United States Patent Application Publication US 2021/0199660 A1 - sequence listing, part 66

SEQ ID NO: 951690 - DNA, 120 bp, Artificial Sequence
  ENSG00000288253_33 (sequence is synthesized)
gaggaggaagaggaaagaaaaggagtcaggaatgcctcttaggtacagtgatattctcagtggactgttgtgtgtctccttcctttctgaaatgccatgtgtggtgttatgatatatatt

SEQ ID NO: 951691 - DNA, 120 bp, Artificial Sequence
  ENSG00000288253_34 (sequence is synthesized)
ggtttccatcgacggttcctggcttataacctccatagcccttgttacaatcttttgttgtaatgttggatgtgttaagcctcaggggtaggcctctgaccttcttttgccttcctttca

SEQ ID NO: 951692 - DNA, 120 bp, Artificial Sequence
  ENSG00000288253_35 (sequence is synthesized)
ctctgatgctccccagcctttctaattgtgggtcttaagaccctcctccgagagcttcccaccctgtaccctggggggaagaatgttgatgtcatgaaacttccataaaaacccaaaagg

SEQ ID NO: 951693 - DNA, 120 bp, Artificial Sequence
  ENSG00000288253_36 (sequence is synthesized)
gcaaagttcgatgagcttctggatggctgaacacgtggaggttcttggaggtagtaagcccaggggcgtcatggaagccctgcactccttcctccataccttgctgtaggtgcctcttcg

SEQ ID NO: 951694 - DNA, 120 bp, Artificial Sequence
  ENSG00000288253_37 (sequence is synthesized)
tctgtatcctttgcagtatcctttataataaactggtaaaggtaagtaagtgcttccctgagttctgtgagccaatctagcaaattaattgaagagggggtcgtgtgaaccccagtttga

SEQ ID NO: 951695 - DNA, 120 bp, Artificial Sequence
  ENSG00000288253_38 (sequence is synthesized)
agctgggtggtcataagttctgaaggcctggacttgcgactggtgtgtatggaggcaatcttggagactgagccatcaactcgtgggatctgacgtctccagtcttaatgtacacagtag

SEQ ID NO: 951696 - DNA, 120 bp, Artificial Sequence
  ENSG00000288253_39 (sequence is synthesized)
atagtgttggaattaaactggaagatacccagctagtgtctgctgcttggtgtgtggggaaagtacccacatacatttagtcacagaggtcttctatgttgatgattgttgtggtgtgag

SEQ ID NO: 951697 - DNA, 120 bp, Artificial Sequence
  ENSG00000288253_40 (sequence is synthesized)
agtagaggaaaagcacaatttgaggagagcttttccctgtacacatcaggcattggagatgtcagtcttctctgagtctgaagcatgctgcctgtgatgtttgctcacactcacccatgt

SEQ ID NO: 951698 - DNA, 120 bp, Artificial Sequence
  ENSG00000288253_41 (sequence is synthesized)
gctcaattttctttccatgtattttagtatgtgttttaatttctgtggtttttatttctttcatatgccctgatgtcttttatttcaggttatacattttttaattgtaagacaaatctt

SEQ ID NO: 951699 - DNA, 120 bp, Artificial Sequence
  ENSG00000288253_42 (sequence is synthesized)
tcatttataccttctgatttttgttgtgcctttgtttgtttcatcttgatttggaaggccttgcatgattatgaagtactaagtttcatttaggaataaagttttgttgtttaaaatttt

SEQ ID NO: 951700 - DNA, 120 bp, Artificial Sequence
  ENSG00000288252_0 (sequence is synthesized)
atttggggctgacgccattttaggcctcagccagcccgcacccaggggctcattaaaacagcgtgttgctccacaccgcctggtgttgtctgttggtgcgctctcgaggtttgaacggat

SEQ ID NO: 951701 - DNA, 120 bp, Artificial Sequence
  ENSG00000288252_1 (sequence is synthesized)
acaaggacctttcattatgacctctattatttctgacaagaagtccattgttattattatcattgtctacgctcaccaactctgaagtctaaaatccaaagtctcatctaaacagcatct

SEQ ID NO: 951702 - DNA, 120 bp, Artificial Sequence
  ENSG00000288252_2 (sequence is synthesized)
tgcccgaagccaatctctctccacttgtgaacctacgaagccaaacgagttatgtgcttccaagatccagtggtgggacaggcataggataggcattccaaaaggaagaaataggaaaga

SEQ ID NO: 951703 - DNA, 120 bp, Artificial Sequence
  ENSG00000288252_3 (sequence is synthesized)
aggaagaaatgatagatccaagttgtacaagcaggtgccacatctgctccacttctggaggggcctcagggggcttttactgatgatggaaggtgaacggacagcaggaacatcaaccgg

SEQ ID NO: 951704 - DNA, 120 bp, Artificial Sequence
  ENSG00000275898_0 (sequence is synthesized)
tatccccacccaaactcatgttgaattgtaatccccaatgctggaggtagggcctggtgggaggtattgggatcatggggacagatccctcatgaatggcttgggccatccgtttggtga

SEQ ID NO: 951705 - DNA, 120 bp, Artificial Sequence
  ENSG00000275898_1 (sequence is synthesized)
tttggtgagaagtgagagatctgatggtttaaaagggtgtggccccttcccctcactctctctcttgctcctgcttttgctgttgacatgcctgctccccctttgccttctgccatgatt

SEQ ID NO: 951706 - DNA, 120 bp, Artificial Sequence
  ENSG00000275898_2 (sequence is synthesized)
gattggaagcttcctgagatctccccagaagcaaatgctgctacgcttcctatatagcctgcagaacggtaagccaataaaacctcctttcaggatgcagcgagctgagatcacgccact

SEQ ID NO: 951707 - DNA, 120 bp, Artificial Sequence
  ENSG00000275898_3 (sequence is synthesized)
gagtgagactccatctcaaaaaacaaaatgaaacaaaacaaacaaacaagcaaacaaaaattacccagtctcaggtatttcttttgttgttgtttttggttggttggttttggagcatgg

SEQ ID NO: 951708 - DNA, 83 bp, Artificial Sequence
  ENSG00000275898_4 (sequence is synthesized)
ctgtctcgacttccagtttcaggtgatcctcctgcctcagcctcttaagtagctgagactacaggtgcgcaccaccatgccca

SEQ ID NO: 951709 - DNA, 75 bp, Artificial Sequence
  ENSG00000275898_5 (sequence is synthesized)
ccaccatgcccagctaatttttgtttttaactcctgggctcaagtggtccacctgccttggcttcccaaagtgct

SEQ ID NO: 951710 - DNA, 120 bp, Artificial Sequence
  ENSG00000275898_6 (sequence is synthesized)
tgctggggttacagtcatgagccatcgtgtctggcccaatctctgtgtcatcattgtcatatggtgttctttctgtgtgtctctgtctagacgtggccatcttcttacaaggacactagt

SEQ ID NO: 951711 - DNA, 120 bp, Artificial Sequence
  ENSG00000275898_7 (sequence is synthesized)
cttattggattaggagcctactctgcgtcagtagaacggcctaacacacatgcttaacctgctaataatgacaagaacacctacctctatctacagtaatgtgatttacttgtttgcctg

SEQ ID NO: 951712 - DNA, 120 bp, Artificial Sequence
  ENSG00000275898_8 (sequence is synthesized)
tttattccctgcccccacccccaccctcaccctgccagagcagctgtaggagatggaagactttattcctgtggctcttgccacctcctctgcacctaacccagtggcaggcacagagag

SEQ ID NO: 951713 - DNA, 120 bp, Artificial Sequence
  ENSG00000275898_9 (sequence is synthesized)
gggctctgaaattatttcctgaatgaatgggtaaatgaatgaatgacgaagtcaatacatgataatagcaatccttgatgagtgcctgcctgatgcaagcactgtacataattttctttc

SEQ ID NO: 951714 - DNA, 70 bp, Artificial Sequence
  ENSG00000275898_10 (sequence is synthesized)
tgacctcaagaccacgtccagcctgtacatgatttcctgtcctccttcagccttgcctccagggagggat

SEQ ID NO: 951715 - DNA, 120 bp, Artificial Sequence
  ENSG00000275898_11 (sequence is synthesized)
gatttcctgtcctccttcagccttgcctccagggagggatagtttcctggttttccagaggttagaaaacttgcttgaagttccagaatcactaagggcagaatcccatttcaaactcag

SEQ ID NO: 951716 - DNA, 120 bp, Artificial Sequence
  ENSG00000275898_12 (sequence is synthesized)
aactcctgggctcaagccatcctcccaccatgcctggcttattctaaaatgttttgtagagactgggtcttgctgcattgcccgggctagtctcgaactcctgacctgaagcgatcctcc

SEQ ID NO: 951717 - DNA, 120 bp, Artificial Sequence
  ENSG00000275898_13 (sequence is synthesized)
gatcctcccacctaagccttctaaagctctgggatgacaggcgtgagccacagcacacgacctttttattttttttatttttgtatcaagctctttactcccgagcgcactcttagccac

SEQ ID NO: 951718 - DNA, 120 bp, Artificial Sequence
  ENSG00000275898_14 (sequence is synthesized)
tcttagtctgcagggaatccacccacgctttttcctttcttgagataagacaagagtgttttcccaaagggccttgagcaccagagagcagaactccaagctgctgtgctgggcgtggac

SEQ ID NO: 951719 - DNA, 120 bp, Artificial Sequence
  ENSG00000275898_15 (sequence is synthesized)
caggcccggcatggagcccacacagagcctctgacttaggccgggggttctcatcccatttccgtggcctgggaactcagggggaaagagcaattaaattagaggggtcaaagaaggagg

SEQ ID NO: 951720 - DNA, 120 bp, Artificial Sequence
  ENSG00000275898_16 (sequence is synthesized)
aggagggtggggagctggtggccagacccagaaaggccagatttcaatttgcataataattttgttagcaacaatggtcatccaggacatctctttaaaggctgtaatgttaatttaatg

SEQ ID NO: 951721 - DNA, 120 bp, Artificial Sequence
  ENSG00000275898_17 (sequence is synthesized)
ggaaaaaagctaatacaattcccccagaatttttcaattaaattaatgtgatgggctttaatggatagcttaagtagagagcgtgaataggagaaatattgcataaattatccatacatt

SEQ ID NO: 951722 - DNA, 120 bp, Artificial Sequence
  ENSG00000275898_18 (sequence is synthesized)
tatatatgtgctgcccgtatatgtaatctctccgctctaaggttttgacatatgagaggtcttatgcttaaatctggcaacaagttatgactctatttcaattaaagtgacccttttatc

SEQ ID NO: 951723 - DNA, 120 bp, Artificial Sequence
  ENSG00000275898_19 (sequence is synthesized)
attcaaagaagggggggatgctccttcccatgtagcttccacacagcccttcctttcaacaacacaccagaagattccagtcttaaagaaacagaaggctcgtgtaacaataacccatga

SEQ ID NO: 951724 - DNA, 120 bp, Artificial Sequence
  ENSG00000275898_20 (sequence is synthesized)
gaacacacatgtgcacagaaagtcgatgatatgagaaatctgtagatgcagaatctcgttccctgctctctgctccccaaagacacttgatggagcagaaaataaaatggattaaatttc

SEQ ID NO: 951725 - DNA, 120 bp, Artificial Sequence
  ENSG00000231964_0 (sequence is synthesized)
accagatgaccatggaatgcggctgtcttttctttggaaaagagggagtgtctgatgaagcactaaggagagcttctgtaagggaaaggcccctcaggacagtcaggggcagaggctctg

SEQ ID NO: 951726 - DNA, 120 bp, Artificial Sequence
  ENSG00000231964_1 (sequence is synthesized)
acaaggatgtccagtgagggaccaacacattggccgggaacaactcagacacccagcagtctggagcaggttggactggtccggccattctatgcagtactgagctaccccaaagcgggt

SEQ ID NO: 951727 - DNA, 120 bp, Artificial Sequence
  ENSG00000231964_2 (sequence is synthesized)
gcatccacgaagacacaccggattcagttgttaggttaaatgagatgcacgtgtccggaaggaacccaggaaactcttggtcattccctctggagtaccagggtaaaacacatgtgcaag

SEQ ID NO: 951728 - DNA, 120 bp, Artificial Sequence
  ENSG00000275897_0 (sequence is synthesized)
aatattgtcatcacctaagaaagaaaccccatactctttaactattatctcccatctcccagcccccttcctccccaaccaacctcatttttagtttttatttgttttgattggtgaacc

SEQ ID NO: 951729 - DNA, 120 bp, Artificial Sequence
  ENSG00000275897_1 (sequence is synthesized)
tggggcatccctcgtaggcagggccagataaagcaggttgtaccttgacccaagaaataaaaacagctgggttccaaaaggcacatagattcccagttcacaggaatggaaacttgcctc

SEQ ID NO: 951730 - DNA, 65 bp, Artificial Sequence
  ENSG00000275897_2 (sequence is synthesized)
gcagcgcgcctgcccccttacctcgcagcgctcctgcccccttacctcccagcgcgcctgccccc

SEQ ID NO: 951731 - DNA, 85 bp, Artificial Sequence
  ENSG00000275897_3 (sequence is synthesized)
ttacctcgcagcgctcctgcgcagcgcgcctgcccccttacctcgcagcgcgcctgcccccttacctcccagcgcgcctgccccc

SEQ ID NO: 951732 - DNA, 120 bp, Artificial Sequence
  ENSG00000275897_4 (sequence is synthesized)
ctcccagcgcgcctgcccccttacctcgcagcgcgcctgcccccttacctcgcagcgtgcctgcccccttacctcccagcgtgcctgcccaaggcagcagcagcctcctcttgacttttt

SEQ ID NO: 951733 - DNA, 120 bp, Artificial Sequence
  ENSG00000275897_5 (sequence is synthesized)
ctcctcttgactttttaagaaatgaacataggtttaaggtattttcagtaccaggctctgtgctaggtactttcacattattttctctccaaatcttcccaacaatcctttcaagtagcc

SEQ ID NO: 951734 - DNA, 120 bp, Artificial Sequence
  ENSG00000275897_6 (sequence is synthesized)
attggtcccacttcaccaatgacccaacagaaactcagggaggttccgtatcttgctcaaggtcacacagctggatcagaacccagctgtctgttaggcaggttcactgcacactagtta

SEQ ID NO: 951735 - DNA, 120 bp, Artificial Sequence
  ENSG00000275897_7 (sequence is synthesized)
ccaacttgtcagagtccagtgaggcaaacacccacaagttacataacgctgagtccagcgaggcaaacacaagtgacatgcaacgtgtttattacctataggtaggcactaagggacaac

SEQ ID NO: 951736 - DNA, 120 bp, Artificial Sequence
  ENSG00000275897_8 (sequence is synthesized)
agaaggctgggattcatttggagctggacccctacggctcaggaaagctgctgaggcagctgggggatggaccgttgtctgtgcatgcctgacttttttttttgttgttggtttgttgtg

SEQ ID NO: 951737 - DNA, 120 bp, Artificial Sequence
  ENSG00000275897_9 (sequence is synthesized)
gtgcatgcctgacttttttttttgttgttggtttgttgtgagatggagtctcgctctttcacccgggctggagtgcagtggtgtgaaccctgggattcaagcaattttcctgcctcagcc

SEQ ID NO: 951738 - DNA, 120 bp, Artificial Sequence
  ENSG00000275897_10 (sequence is synthesized)
tccacccgcctcggcctcccaaagtgttgtgataacaggcatgggccaccacgcccagccagccagacttgtactgaagctgagggaccccagaaaccagcccgccctgtttttcgtttg

SEQ ID NO: 951739 - DNA, 82 bp, Artificial Sequence
  ENSG00000275897_11 (sequence is synthesized)
agccagccagacttgtactgaagctgagggaccccagaaaccagcccgccctgtttttcgtttgtttgtttgtttgtttgat

SEQ ID NO: 951740 - DNA, 70 bp, Artificial Sequence
  ENSG00000275897_12 (sequence is synthesized)
tggcacgcaccaccacacctggctagttttttgtatttttagtaaaaacggggtttcaccgtgttagcca

SEQ ID NO: 951741 - DNA, 83 bp, Artificial Sequence
  ENSG00000275897_13 (sequence is synthesized)
gcttctgccctgggctttataccctggggccatgtgacatgttgggctgaagtgttgaaggacatgctttttctagggggact

SEQ ID NO: 951742 - DNA, 120 bp, Artificial Sequence
  ENSG00000275897_14 (sequence is synthesized)
gggctgaagtgttgaaggacatgctttttctagggggactggaacagagcatggctgtgctggccagtccttccttccctcaggatgttgcattctctgcacactctacagttttattta

SEQ ID NO: 951743 - DNA, 120 bp, Artificial Sequence
  ENSG00000275897_15 (sequence is synthesized)
ggattacaggtgcccaccaccacgcttggataatttttgtatttttggtaaagacggggtttcagcatgttggctaggctggtcttgaacttctgatctcaagtgatctgcccgcctcgg

SEQ ID NO: 951744 - DNA, 120 bp, Artificial Sequence
  ENSG00000275897_16 (sequence is synthesized)
ccaaagtgctgggattacaggcgtctacagttattcttgagaactacaagcaagaaaggaggggagaaccaggtcagttcaaggccactgggagaactgtcctgcaccgcctgcctctga

SEQ ID NO: 951745 - DNA, 120 bp, Artificial Sequence
  ENSG00000275897_17 (sequence is synthesized)
gcctctgaagcccatgatgtttctgctttgtgggacagttgttcaggtgcctgcttccccaggccttcccctgcgccttccccctctctcctacacacaccatctgactgtccttccagc

SEQ ID NO: 951746 - DNA, 120 bp, Artificial Sequence
  ENSG00000275897_18 (sequence is synthesized)
acgtacacctccagatgcttgggttggcctgacccaaaacagtctactctcccggccaagccaattgcccctgggattttctgctcctccaagatcccgtgcatagccctggtggtggct

SEQ ID NO: 951747 - DNA, 120 bp, Artificial Sequence
  ENSG00000275897_19 (sequence is synthesized)
catgcccttaatccttagttactctagatgctgaggcaggaggatcgcttgaggccgaggagttcaagacctcccctctcccaaatatttgtaaatgaaattaaaagaaagatccagccc

SEQ ID NO: 951748 - DNA, 120 bp, Artificial Sequence
  ENSG00000275894_0 (sequence is synthesized)
cagttcttcctgtccagctgggagcattccctgatctgccttcctgccactccctctcaggccaattaaaggcagccttgttttgggagtcccctccacccaaaggtgttcctacccagg

SEQ ID NO: 951749 - DNA, 120 bp, Artificial Sequence
  ENSG00000275894_1 (sequence is synthesized)
ggcacagcctactgacttggccccgggcccaggcggttgtggggaagtgtcccccacctatcacctatcaagtgtactttagcttaaggacatttctggtcttctacagcgtcctcttct

SEQ ID NO: 951750 - DNA, 120 bp, Artificial Sequence
  ENSG00000275894_2 (sequence is synthesized)
cacgaaaatatttgggccatgatttggagggttccatgaggttggggggaggcctctttccccgctgggctgacatcccccaccttaaaatgaaaggtttgaacagggtagcctccagag

SEQ ID NO: 951751 - DNA, 120 bp, Artificial Sequence
  ENSG00000275894_3 (sequence is synthesized)
tcctttccatctctcaatttgattaataacttaagtacctactattcaaaagaggtctctctcttgaaggaattaacttgagggaattaacatactccaccaaatgctgaatccctccct

SEQ ID NO: 951752 - DNA, 120 bp, Artificial Sequence
  ENSG00000275894_4 (sequence is synthesized)
ctctccccccgcacactgagggcaggaactctgctctatttgtttttgtgaaatacctgtcccctagtttgtactcaggaaatgcttgtatgaatgaataaattcgtgcatgtaacttta

SEQ ID NO: 951753 - DNA, 120 bp, Artificial Sequence
  ENSG00000287553_0 (sequence is synthesized)
aaggcgttcccatgacaacggcaaaaggcggggcgcacccagagcgggggctgatacctgaggcccgggagcgcgtcaaggagccagcggcgccaccttctcgtccctgcagctgcagtc

SEQ ID NO: 951754 - DNA, 120 bp, Artificial Sequence
  ENSG00000287553_1 (sequence is synthesized)
ctcgcaagccacggccgaagggggacgcgcggacccctcctgcacctgaggtcgcagactttggttagggtctcgctcctgcgaccctgcgtttccctccgctccgctcctgtgcgtttc

SEQ ID NO: 951755 - DNA, 120 bp, Artificial Sequence
  ENSG00000287553_2 (sequence is synthesized)
ctccgctccgctcctgtgcgtttcccgtcgcggtcgcagggcggcggccagtgcccaggcgcggtctctcctccctcctggaagcccccgcctaccttcccccgcgcgggccggcccggg

SEQ ID NO: 951756 - DNA, 120 bp, Artificial Sequence
  ENSG00000287553_3 (sequence is synthesized)
tggttcaccgtccagggccccaaggagctgccagcgtagaagtccatcgggtagggctgctgccaggaaatgtccctcagagccacggccgcctaggggaggggagggagggacaataac

SEQ ID NO: 951757 - DNA, 120 bp, Artificial Sequence
  ENSG00000287553_4 (sequence is synthesized)
ccctggattactgaattcagtcctcacgacggcctgtgaagggcacactgtcccctgccacagaagggaactgtgtggttcagggccttgcctaaggctacacagctaggaagtgactcc

SEQ ID NO: 951758 - DNA, 120 bp, Artificial Sequence
  ENSG00000287553_5 (sequence is synthesized)
gctggagaaatcgagacagactccggaatctacgaacataacgaagtgctgcccacccaccccactccactccagacctcacctttgagaaccacgtccaaagcccactctctcccagag

SEQ ID NO: 951759 - DNA, 120 bp, Artificial Sequence
  ENSG00000287553_6 (sequence is synthesized)
cttggtgttacctcatagggtgtcagcagcggcttggggaaggctgtgccccagtcaatggagagacgtggacatgccacctgcacccacctgggaagggaagccaggtcagaccctagg

SEQ ID NO: 951760 - DNA, 120 bp, Artificial Sequence
  ENSG00000287553_7 (sequence is synthesized)
aagggcctcctcgtcgcccaggcagcatgctgaagaacatgacagtgcccccagcacacccattcattaacaggctttatgaatcctaaagtaaagacagtgacccactgctgtttggaa

SEQ ID NO: 951761 - DNA, 120 bp, Artificial Sequence
  ENSG00000287552_0 (sequence is synthesized)
ttttttttcttttgtctcatttgttaatcattatttttggtaataaatcattggtcttcctaaaagttttctcaatggtgccaatttaaaatgctcccgtgtagaagctttctaaaatgg

SEQ ID NO: 951762 - DNA, 120 bp, Artificial Sequence
  ENSG00000287552_1 (sequence is synthesized)
attgcttttgtaaaactgtataaatttattaaaaattaagaaactgtatactgacagtggatgaattgtatgtaaattatacctcaataaaggtgttaaaatcgaaagaaaattcttgaa

SEQ ID NO: 951763 - DNA, 120 bp, Artificial Sequence
  ENSG00000287552_2 (sequence is synthesized)
cgatttagagttcctctgtaaactatatttttgtgtgtgtgatattcaaaggttgattattcgtctttctgaccttgaatagtcttcagaattcttcactcattttcatccctactttga

SEQ ID NO: 951764 - DNA, 120 bp, Artificial Sequence
  ENSG00000287552_3 (sequence is synthesized)
cttccacctcaaggcttcagctaaaaatttatggaggtgactccttattcaatatttttagtcctaaaccacaggctcattttttcagcctccttttggatatatctctgattactcttt

SEQ ID NO: 951765 - DNA, 120 bp, Artificial Sequence
  ENSG00000287552_4 (sequence is synthesized)
tggcccctgaacattcttccacaaatcctcaaatgcagtcatcacaccttttctcaaaccagctctcctttttttacccaacaaataattacgggcctcaactgtgactcagccccaagt

SEQ ID NO: 951766 - DNA, 120 bp, Artificial Sequence
  ENSG00000287552_5 (sequence is synthesized)
agtggctgtatatagtagtattgaatagaagaggtaaattccttgcatgcatggcacgtatggtcaactggagaaggcagacattgaggagggtattgcaagttgaaaaaagtattttga

SEQ ID NO: 951767 - DNA, 120 bp, Artificial Sequence
  ENSG00000287552_6 (sequence is synthesized)
acagaaaagagaaagagacgaaagagaagaggagaaggaggaagaaaaggaggaagtagcagtatatagcatattgagaacggcaaactctgtctatgctgttcctctcctggttaaata

SEQ ID NO: 951768 - DNA, 120 bp, Artificial Sequence
  ENSG00000287552_7 (sequence is synthesized)
gactgccttccacatggcaacgtctatctactgtctctaagatgattctacatccacaaatttttcgtatttttcttggtctctcttctttgccatctggaccatttcaatgatctctta

SEQ ID NO: 951769 - DNA, 120 bp, Artificial Sequence
  ENSG00000287552_8 (sequence is synthesized)
atatgcttccctgcagtagccacaaatacaaagtaaccacaataatcttcccaaaatgcatagcggtagttatgctgcttttctagataaaaacctacaattgcataagaaaaaaagtcc

SEQ ID NO: 951770 - DNA, 120 bp, Artificial Sequence
  ENSG00000287552_9 (sequence is synthesized)
atattctagatccttctagatctttctaatcagatccaatctatccttctaagcatttctctaattctcttccacctgcaaatttgaagttcattcttcttctcatgccattttctctct

SEQ ID NO: 951771 - DNA, 120 bp, Artificial Sequence
  ENSG00000287552_10 (sequence is synthesized)
gcttagaatgttctagcccagagattctcaaagtgagatccatggaccacctgcatcatctgggaaattgttgagaatgcaaattcttgggacccacccaaggtctactgactcaaagtt

SEQ ID NO: 951772 - DNA, 120 bp, Artificial Sequence
  ENSG00000287552_11 (sequence is synthesized)
gcacaaagtatattttagtgagcatccaggtgaccctgatgcacataaagtttgaaaagcactgcccaggtccaagtcttcctcttgaaattctagctatctttgagcctaaacctaaat

SEQ ID NO: 951773 - DNA, 120 bp, Artificial Sequence
  ENSG00000287552_12 (sequence is synthesized)
tgttagtgtaacacaaaactttgtatttttaaaatacactatttcattccaaaatgaggtttagtattcatggcccattttatttgtgagctatgtatgtgtctatggcttggatcatag

SEQ ID NO: 951774 - DNA, 120 bp, Artificial Sequence
  ENSG00000287552_13 (sequence is synthesized)
cagtggcaatggtggtggggagataggtttcagagaatggtgattctacagattgattgaaagaaacgagctttaaaagaagccaaaagtagcttttggctcaaaaagggtgtgagaata

SEQ ID NO: 951775 - DNA, 120 bp, Artificial Sequence
  ENSG00000287552_14 (sequence is synthesized)
gtttgagggaagagagaagacaatggagcataggatgggagaaagtgtgtcaggtaaaaacaagaacagtttctattgtttctcttccaataccatgggtgtgggcactaatgcaacaat

SEQ ID NO: 951776 - DNA, 120 bp, Artificial Sequence
  ENSG00000287552_15 (sequence is synthesized)
ccggaagccaagtatccccttcaagtttcctcagatggcactgagtggaagcaaagaaactccctatttttttcagcatgattaggatgaaggacattactgagtatataattttaagtc

SEQ ID NO: 951777 - DNA, 120 bp, Artificial Sequence
  ENSG00000287552_16 (sequence is synthesized)
taagaaatttcaacctccatatgccatatgtattttctgctaagtaattttctctaataacttaccatatgcaaactagccaaagtttggaatgaaacatccctgtccaatttttcagct

SEQ ID NO: 951778 - DNA, 120 bp, Artificial Sequence
  ENSG00000287552_17 (sequence is synthesized)
aaactccaaaaagggcttggagagcaaacagatgtaaggcaggaaaagcaggaggcgatataaaataaaattgtctaattgtccagggaactcatggaaagttaaactgatacaggtggt

SEQ ID NO: 951779 - DNA, 120 bp, Artificial Sequence
  ENSG00000287552_18 (sequence is synthesized)
acttttctcttatttaattccattcttatttgtactatagtatgctatgctaaagtcatttaatgaatattgaatatatatcatgtatttgtttcagttatcaaaaatcttaagcacaat

SEQ ID NO: 951780 - DNA, 120 bp, Artificial Sequence
  ENSG00000287552_19 (sequence is synthesized)
agcacaataaacatgttacctgtgtttttggtcaaatatcttgctattgctaggctctggtgaagagtaagtccatcaacttccaaaatggggatttttccaaatgggagagcttaaaat

SEQ ID NO: 951781 - DNA, 120 bp, Artificial Sequence
  ENSG00000287552_20 (sequence is synthesized)
gaaatgagcaaataattaacttcataacaaaaccagaagttatattacttccatttttactgatcatcgtgaaaacaaagcatgattttatggaatcatgaaattcttaaatatttttaa

SEQ ID NO: 951782 - DNA, 120 bp, Artificial Sequence
  ENSG00000287552_21 (sequence is synthesized)
aggaacacttgacaacttgtagtggaatatttatattttataagttttgtttaagttgttagaaaacctgatttaaaattagtgacagaatttgttcttaagctcaggtttatagtgaca

SEQ ID NO: 951783 - DNA, 120 bp, Artificial Sequence
  ENSG00000287552_22 (sequence is synthesized)
ccatatactgtactgtattttacatgcttactgttaaaaaaaattaattgtaaaacttcattattttttgcagcctcaattgcagattattaaaatcgtagtctgaggattatgaagagt

SEQ ID NO: 951784 - DNA, 120 bp, Artificial Sequence
  ENSG00000287552_23 (sequence is synthesized)
ttgatttacatattgagttatgataaaacatgcatgccaggcagttcaagcctgcgaagactgctggttatacaggatatctgggtataaataaaccaacacatttgtatacaaggtaaa

SEQ ID NO: 951785 - DNA, 120 bp, Artificial Sequence
  ENSG00000287551_0 (sequence is synthesized)
gagtccctgatgctaaaaggacaaggtgatcttcaaattctgttttcagtgtgatcatgttgctgtctcctccacattcttcagtagcatctgggtactgacttttcaatgatgtgtctt

SEQ ID NO: 951786 - DNA, 120 bp, Artificial Sequence
  ENSG00000287551_1 (sequence is synthesized)
aagatggatctattgctattcataggactgggaacatggtcacatggagaaaactgaggaccagcgaagtggcctgcagaagtaacaaactccttaacaagtgctatggcaccagctcat

SEQ ID NO: 951787 - DNA, 120 bp, Artificial Sequence
  ENSG00000287551_2 (sequence is synthesized)
cagaatggacactggctttaatggtattaactgagtcctaaaggccctcttctccttatttcctgaatattgggaagatccaaaggtttctgcaacaaaggggacaaccaagtaaatggt

SEQ ID NO: 951788 - DNA, 120 bp, Artificial Sequence
  ENSG00000287551_3 (sequence is synthesized)
agccactttgtctaccagaatggcaccatttcaatattttgtcaatgaatatagctacacctatgcttattaaacaagtctggtgacataattgtcccaagttcatacagtcagtagaat

SEQ ID NO: 951789 - DNA, 120 bp, Artificial Sequence
  ENSG00000287551_4 (sequence is synthesized)
ttgccatcaaacaactttaaaacaacttttcaggaatataactactatgccacatgaaatacccaccttctgggatattgaagcaaaagcttttcaactgctaaataggcacatgatctt

SEQ ID NO: 951790 - DNA, 120 bp, Artificial Sequence
  ENSG00000287551_5 (sequence is synthesized)
tataccattggtataatgtcacgtacatttgtgtgcagattaccacatccctgaaaactgctccctcagatgttgtgtatggggtaattgatgctttaggcctaaaaatctaaataagct

SEQ ID NO: 951791 - DNA, 120 bp, Artificial Sequence
  ENSG00000287551_6 (sequence is synthesized)
gacacttttattttcagaagtgcctgcaaggggtgcaattcaaaaaaattacatttcaacctggctgattggctaataaaatgaaagtagtttgtaacaaataaacaagtaaaggatatg

SEQ ID NO: 951792 - DNA, 120 bp, Artificial Sequence
  ENSG00000287550_0 (sequence is synthesized)
gaggaggggcaagagaaacagaaagagaagcagcccagatgagagaaaaggtgctttaactttgattgctgcagattttcttggcgtttaagtgctgatgaagcaggtcagtcaaaactg

SEQ ID NO: 951793 - DNA, 120 bp, Artificial Sequence
  ENSG00000287550_1 (sequence is synthesized)
aagatcagcttttgatcatgaagaggagattaggtcacagatgttcaataaggaaagaccatgtgaagacacaagaagatggtcatctgcaagccaagagaaatgtctcaaaaggaactg

SEQ ID NO: 951794 - DNA, 120 bp, Artificial Sequence
  ENSG00000287550_2 (sequence is synthesized)
gccctgctgacatcttgaccttgaatttccagcctcaggttcttggatgcttgatggaattaaggatttgagaacatgagaacaaacaggaatatgcaggaaatcttgaggacacaggag

SEQ ID NO: 951795 - DNA, 120 bp, Artificial Sequence
  ENSG00000287550_3 (sequence is synthesized)
atgaagtcaacctgtggccaagggagagggagggacatgagaagctttgtgaaagatgtcagcgcaaacctcaggcaagtgccacccaacctagagctgtggattgaagtttggcgttgg

SEQ ID NO: 951796 - DNA, 120 bp, Artificial Sequence
  ENSG00000287550_4 (sequence is synthesized)
ggtgtcagcctgtgatttcctgatctccaactccactcctcttaagtcacccagcctaaggcactgaacctcatcatcagaacctcagagtccaacatcttgaccatagccttgcaaccc

SEQ ID NO: 951797 - DNA, 120 bp, Artificial Sequence
  ENSG00000287550_5 (sequence is synthesized)
cactgttaggtgagtttcaagttctcactccccataaacttcttcagaccactgctccctcgaatgactttgtttcctcccaggtcatcagtttccttagtcaatttccaagtcctatca

SEQ ID NO: 951798 - DNA, 120 bp, Artificial Sequence
  ENSG00000287550_6 (sequence is synthesized)
tccacgttgccttctctattcttacctccaggacagcagaacactaaacattaagttcttcaatgctaaaaaacatcctgtaatcacgaaaatcagcccagtacaaattcatgctcacta

SEQ ID NO: 951799 - DNA, 120 bp, Artificial Sequence
  ENSG00000287550_7 (sequence is synthesized)
cacgtggttctcagctgctgtggggcctctctcttcccttcagtatccacagacttgcaacgttcttctcagccttccttcgcaccactaaattatctcattaagtcaggaccatctggt

SEQ ID NO: 951800 - DNA, 120 bp, Artificial Sequence
  ENSG00000287550_8 (sequence is synthesized)
gggaactcctttaacttcccagggcccaggaaaaataaaccatatttacccatgcctccctctttctccatgtgccttttcaagaagagaggctcttctcccagtgtctctctccctgat

SEQ ID NO: 951801 - DNA, 120 bp, Artificial Sequence
  ENSG00000287550_9 (sequence is synthesized)
tccatatcaccctctcttctttgggatacttctccaaagagtgtggtctttcaggtatccttactgtcttatgactgagtcattccacttggcttatgaacctctttgttgcttattcca

SEQ ID NO: 951802 - DNA, 120 bp, Artificial Sequence
  ENSG00000287550_10 (sequence is synthesized)
ggcactctgagtctcccctgcattcagtctcccttcagcatacaacactgttcatgatgctttttgtaaagccctctgcttccccatcctccttagatcttctgctactactctggccag

SEQ ID NO: 951803 - DNA, 120 bp, Artificial Sequence
  ENSG00000287550_11 (sequence is synthesized)
ttttttctctgtctgctgcttctccttcccttgacctattacttccttcctcctcctgaagaaatctgatctgcagctcctcttctgttttcatcagtgtgctcactcttgatgctgctg

SEQ ID NO: 951804 - DNA, 120 bp, Artificial Sequence
  ENSG00000287550_12 (sequence is synthesized)
ggatacaagccattttaactgcggtgagatgatatttcactgtagttttgatttgcatttgtgtgatgatcaatgatattgtgcatgttttcatatgcctactagcctcatagaatgagt

SEQ ID NO: 951805 - DNA, 120 bp, Artificial Sequence
  ENSG00000287550_13 (sequence is synthesized)
ttggaagtattctttccccctccattttttgaaacagtttgagtagtattgctattatttctttaactgtttagtagaattcagcagtcaagccattgggtcccaggcttttctttactg

SEQ ID NO: 951806 - DNA, 120 bp, Artificial Sequence
  ENSG00000287550_14 (sequence is synthesized)
actgggaacatttttatttcagcttcaatttcttcacttgttagtctgttcaggctttggatttcttcctggttcaatctcggtaagacttgccttgcttcccctttaccttccaccatg

SEQ ID NO: 951807 - DNA, 70 bp, Artificial Sequence
  ENSG00000287550_15 (sequence is synthesized)
ccaccatgattgtaagtttcctgaggctctccaacccatacggaacaatacttcctaaccaatggtttgc

SEQ ID NO: 951808 - DNA, 88 bp, Artificial Sequence
  ENSG00000287550_16 (sequence is synthesized)
gccacagactgaaggctgcactgtcagtttccctacttttgaggttttgagacttggactggcctccttgctcctcagcttgctctgt

SEQ ID NO: 951809 - DNA, 120 bp, Artificial Sequence
  ENSG00000287550_17 (sequence is synthesized)
aatagacagttataaacaaatgtccctgcccataagatttatgtaatcgtactttatccatgtgttatattgctaaggacatggtgactgtgacagatgtaacataatagatgcaattga

SEQ ID NO: 951810 - DNA, 120 bp, Artificial Sequence
  ENSG00000287550_18 (sequence is synthesized)
catatacagtatttcttatagctaaactacagctaagttattatatttgaaaaataatatatgagacacatcaataattggtttcattgttaaaaatatacacacaaagcatcttaaaat

SEQ ID NO: 951811 - DNA, 120 bp, Artificial Sequence
  ENSG00000287550_19 (sequence is synthesized)
ggaggggcaagagaaacagaaagagaagcagcccagatgagagaaaaggtgctttaactttgattgctgcagattttcttggcgtttaagtgctgatgaagcaggtaagacttgccttgc

SEQ ID NO: 951812 - DNA, 62 bp, Artificial Sequence
  ENSG00000287550_20 (sequence is synthesized)
tgagacggagtctcgctctgtcgcccagttccggactgcggactgcagtggcgcactgcaag

SEQ ID NO: 951813 - DNA, 120 bp, Artificial Sequence
  ENSG00000287550_21 (sequence is synthesized)
agttaaataacatcacaaatatatgcaagataatttcaaatactgctctctttttcttttgaacgtgttataacaaaaaactatacaatattatttacttgagaatataaaggttgcttg

SEQ ID NO: 951814 - DNA, 120 bp, Artificial Sequence
  ENSG00000287550_22 (sequence is synthesized)
caaattaactactcaatgagacctcaagaatacttgaacaggtaatttgtagaaaaagaaataaggctagccatgaatataaaaagattttctatcacagagaaaatggagaatgtgcca

SEQ ID NO: 951815 - DNA, 120 bp, Artificial Sequence
  ENSG00000287550_23 (sequence is synthesized)
acttaaaactatgagattgtttgttagtatgttagtgtgggagcatgctttagcagcactgggcaaagcagcatatatggtgtggtgatgcaccaaataaatctggccctgctgattctt

SEQ ID NO: 951816 - DNA, 120 bp, Artificial Sequence
  ENSG00000287550_24 (sequence is synthesized)
ggccctgctgattcttttaaaaatatattttctaagaaaaatataaataatatgtacaaaaatgcttatagcaaagatgcttaccacagcattattttaaataatgctttaattatttat

SEQ ID NO: 951817 - DNA, 120 bp, Artificial Sequence
  ENSG00000287550_25 (sequence is synthesized)
caaatattcctttgaccttagaacttcatcaaaatctagtatgttctcaatacaccatttttactaatgaattagttattgcatgtaaagcacctgcctagcatagacaatgaaatgtag

SEQ ID NO: 951818 - DNA, 120 bp, Artificial Sequence
  ENSG00000287550_26 (sequence is synthesized)
catatataataatagtcatcataatacttaaagtaaaaccatagtcaatattttttcttataaatttagtgtacttcacgcaagtgttcgaaaaaagaatgagtacgtttataaaggaga

SEQ ID NO: 951819 - DNA, 120 bp, Artificial Sequence
  ENSG00000287550_27 (sequence is synthesized)
cttgtatactatcaaaactatttaatgttgttggatatttttctcaatcaaaattataactgcagccactcataatattacacacatataatgctttcatcttctcttttattggctatc

SEQ ID NO: 951820 - DNA, 120 bp, Artificial Sequence
  ENSG00000287557_0 (sequence is synthesized)
tcttgcatgggagaacgtgggtaccgggaggatagaggagaggtctgccggaggagttcccctatcccgggctttcggcaccaaatgttatgcgagcatctaattgaagagacaacttga

SEQ ID NO: 951821 - DNA, 120 bp, Artificial Sequence
  ENSG00000287557_1 (sequence is synthesized)
acaggctaagtagaaagatgtgattgcttccccttctgccatgatcggaagtctcctgagacatccccagccatgtggaactaatcttatcatatctggatacttgaaacatcccacaga

SEQ ID NO: 951822 - DNA, 120 bp, Artificial Sequence
  ENSG00000287557_2 (sequence is synthesized)
acatcaagtggtctgctatattaaagacataatgcagagcaaaaaagactagcacactagaagtcttggaagagaagcactctggaatcctagaagaactacttaaacttctgcagaagg

SEQ ID NO: 951823 - DNA, 120 bp, Artificial Sequence
  ENSG00000287557_3 (sequence is synthesized)
aagtggatcttagcaacataagaatcaactatggtagtacctgtgatgccccctcctgaaaaaagccagcactaatttgaagtgacgaagctcatagggcacagaatttaaggagataca

SEQ ID NO: 951824 - DNA, 120 bp, Artificial Sequence
  ENSG00000287557_4 (sequence is synthesized)
aggcacttcagtcgattcaccctagtccctgcttgttccagaattgtctttcaaaatggaagatttatcccttagctactgggagtgttgttagaagaaaatctttatctaagcaatcct

SEQ ID NO: 951825 - DNA, 120 bp, Artificial Sequence
  ENSG00000287557_5 (sequence is synthesized)
taggatgggctttggttgaaaaagtggccatccaaaagtcataaccgctaccattggcagcccataacccaaaactactgatcaactaaaaaatgtaaatgcctggcttcctctccccaa

SEQ ID NO: 951826 - DNA, 120 bp, Artificial Sequence
  ENSG00000287557_6 (sequence is synthesized)
atcaggacaattctgttgggccatctcaacatcaaagcttactgtgaggtggctgaaagcttcactgggactgcatcacagctcaacattttcttcatcttaatactgcttccttaccct

SEQ ID NO: 951827 - DNA, 120 bp, Artificial Sequence
  ENSG00000287557_7 (sequence is synthesized)
ctgcacatgtgttcatcacaagagaaatttctaattactttccttttcactaacctgtatttcagagtctacttcttggaggaaatcttgtgaaaccaaaaataaataacaaatacatta

SEQ ID NO: 951828 - DNA, 120 bp, Artificial Sequence
  ENSG00000287556_0 (sequence is synthesized)
aaaaaaacaaagggcatttaggcagaaggcacatcatatagaagagccaggtgtacccacactgatctcccatgagagaaaccccagctttctggaacacttcagggtgactgcatcccc

SEQ ID NO: 951829 - DNA, 120 bp, Artificial Sequence
  ENSG00000287556_1 (sequence is synthesized)
acagaaggagtgccctcttagttcaggtttgcacaagaaatagatcccaacctctctgtacatggaacatcagcatttctgcagatgaagagaggtgcctgtctgatctgaatagccaga

SEQ ID NO: 951830 - DNA, 120 bp, Artificial Sequence
  ENSG00000287556_2 (sequence is synthesized)
acactggattaggagtgtgactgggagtcagaccactttcctactagcctggaaggagagctgtgatggctccctcacttcctcctgaaaagacctcagtgaatttcactgagagcttcc

SEQ ID NO: 951831 - DNA, 120 bp, Artificial Sequence
  ENSG00000287556_3 (sequence is synthesized)
tttactcatgggtacctcctactagtctgaagctggaactgttcaatccagtgagtgaaataccagagaaacaaagttttaaaagtgcacatcactggggaatgagataagttccatgag

SEQ ID NO: 951832 - DNA, 120 bp, Artificial Sequence
  ENSG00000287556_4 (sequence is synthesized)
acctctgccattctagctccacaggagacagtgaacctgctcacacacccagcacattgctactaccaccagtatctgagaaacctatcccacaaagattgtctataacccaggaactca

SEQ ID NO: 951833 - DNA, 120 bp, Artificial Sequence
  ENSG00000287556_5 (sequence is synthesized)
tacagagtctttgccactgaaattatccagagctgaagcaaggtgacaataaactagaaacactaaactcacatactcaaaggaaaaaaaattttaaacccagttgaatcaaaattaact

SEQ ID NO: 951834 - DNA, 120 bp, Artificial Sequence
  ENSG00000287556_6 (sequence is synthesized)
caaaaataattagaagaagtagtgtactcatatgaaaaggaaccagaaaaccaattctggcaatatggaaaaaacaggattccataataccaccaaatgtcaactagctttccagcagtg

SEQ ID NO: 951835 - DNA, 120 bp, Artificial Sequence
  ENSG00000287555_0 (sequence is synthesized)
gcatttccattgctacacaatctgatgatgacaaaatgatattggatatctactgcaaggtcaagaaaactgctaagaacatctttaattggtcttttatttttaatcatttggtcttag

SEQ ID NO: 951836 - DNA, 120 bp, Artificial Sequence
  ENSG00000287555_1 (sequence is synthesized)
tcataatgcatccattttcattgcatatttttatttgaaataaatctatgtagttacctttggttgcctgggacattcgatggataatctctgcaactggtctgatgtatggctacaaga

SEQ ID NO: 951837 - DNA, 120 bp, Artificial Sequence
  ENSG00000287555_2 (sequence is synthesized)
gaacaaatcggagcagcaggtcgaacggctcaacctcttcattaaagaagaaataatgctgcagccacagccacacattgacttgctcattagatgagaatttgacttaaaaaatcagaa

SEQ ID NO: 951838 - DNA, 120 bp, Artificial Sequence
  ENSG00000287555_3 (sequence is synthesized)
ctggtgatgtcacatatatactcaaaattgtcaaactgcctcattctgcagctctctggctgaaagaaacactactaaaaaagaataaaacaacagctttgctacagaagatgccagcca

SEQ ID NO: 951839 - DNA, 120 bp, Artificial Sequence
  ENSG00000287555_4 (sequence is synthesized)
caaactcatcgccaagaaaaactggatattaaaacagaagtctcccagctactctttagaaagaagtttagatctgtttgcctactccttcagctcagcctatccaacctgttccctctg

SEQ ID NO: 951840 - DNA, 120 bp, Artificial Sequence
  ENSG00000287555_5 (sequence is synthesized)
taaatgcacacgatttcaacaaccaacaggaatgagctccacccctccccgtctccacacacactgttcaagaaccgtttaatatctggaaaagaactgctgctgcattgctttgagaaa

SEQ ID NO: 951841 - DNA, 120 bp, Artificial Sequence
  ENSG00000287555_6 (sequence is synthesized)
caacagggagcaaattactggatggattctttaacttaccaatcagaactgctgaccttttatgactctacaattcaagaagcctgccaaatactcacagtaagaataatcaacaaattt

SEQ ID NO: 951842 - DNA, 120 bp, Artificial Sequence
  ENSG00000287555_7 (sequence is synthesized)
atagattaatttacagaattgttttcaatcttattattcaatctacaatacaaaaatataggcctaagtattttttaaataaacaaaatgtagacagtagctaatacaaatctttgagga

SEQ ID NO: 951843 - DNA, 120 bp, Artificial Sequence
  ENSG00000287555_8 (sequence is synthesized)
aatctttgaggactgatggaagagggtaggagggtaactgaataaaatatacaagcaaaaattccctctggatactttatgtagacttgagaagtaatgaacaataaaaatctatagcaa

SEQ ID NO: 951844 - DNA, 120 bp, Artificial Sequence
  ENSG00000287555_9 (sequence is synthesized)
aaatactggtgcagataatgatgtaataaacaagctggataatccaaggaggctcctgctatcataaatgttagaagagttttaatgagaaaaaaggacatatggctatataggtaggta

SEQ ID NO: 951845 - DNA, 120 bp, Artificial Sequence
  ENSG00000287555_10 (sequence is synthesized)
ctgaccacaagtaaaaagccatcaaaaacctcattgttttgatactgaattttctcccacttacttgtctgcattttatttaaaagattattttaaaaaccacaaaccaccctgaaaaca

SEQ ID NO: 951846 - DNA, 120 bp, Artificial Sequence
  ENSG00000287555_11 (sequence is synthesized)
taagcaacaatattaagtatgctagctatactataccttttatacttaagcattctacctttgccaataatgcacaaaggtatttgtttatacaatgtaattaatccacattacaatttc

SEQ ID NO: 951847 - DNA, 120 bp, Artificial Sequence
  ENSG00000287555_12 (sequence is synthesized)
caggacaagggagggtcgcattaatacaaatactttatagtcttcacaaataatcatacttcaaattactgtaacttaaatgaacattcatagaccaatgattgctaatgtaagagcacc

SEQ ID NO: 951848 - DNA, 120 bp, Artificial Sequence
  ENSG00000287555_13 (sequence is synthesized)
ctttttggggaagatagtctaaaactaaataataaacaccttgaattaaaatacgtattttaaaacttcccattgtctgtgacactgaaaggtttcttctttgtgtatgtaacatgctca

SEQ ID NO: 951849 - DNA, 120 bp, Artificial Sequence
  ENSG00000287555_14 (sequence is synthesized)
atttcttccctggtttaaagctaaaaagatccagcactgcctctgccttcaccttgcactgcccttttgatattcatgttatacttaaatcaatttccagaatatctaaaaacaggcatg

SEQ ID NO: 951850 - DNA, 120 bp, Artificial Sequence
  ENSG00000287555_15 (sequence is synthesized)
actcgcctgctggaggtactgtctgctgcacagaattttaaatcctcatctgcagatgcaattgaactgggtattgccaagaactctgcttttcctgtgctgctgctacacagctattca

SEQ ID NO: 951851 - DNA, 120 bp, Artificial Sequence
  ENSG00000287555_16 (sequence is synthesized)
tcgaaagagcacattatgtagaatctgaagtactatcaaatctgaagtttaagtttcttaaatgagcaaaagaacttctaaaatctagctatacccctgctctgtcacactttcagatgc

SEQ ID NO: 951852 - DNA, 120 bp, Artificial Sequence
  ENSG00000287555_17 (sequence is synthesized)
atgccagccacgttagcgaaaaatgtcctagtgctgctatgtactcctagcaaatgggtaagctagggaagctaagagtagtaatgaaaaaattaataccacatactaatgtaaaaacaa

SEQ ID NO: 951853 - DNA, 120 bp, Artificial Sequence
  ENSG00000287555_18 (sequence is synthesized)
gtaccaggcattaaaacctggtaggatttgtgttgccaaaaaatgtataacctgtccataacaatttgatatttgtattagttttctaattaaaagcctataaataaatcatgtgtctaa

SEQ ID NO: 951854 - DNA, 120 bp, Artificial Sequence
  ENSG00000287555_19 (sequence is synthesized)
tattaccaacaagcatcaattaaaaatccctgccatactgctattaatgaaagttatcttactagctattcagtctgcatcactattgtttctaaagaaaactatgaaataaaagattca

SEQ ID NO: 951855 - DNA, 120 bp, Artificial Sequence
  ENSG00000287555_20 (sequence is synthesized)
aaggtatagaatacttgtgaaatagcttgacttgcaatgttccttcctcctcgtcccccacaccaatatcccttggatcttatattaattataacttagagtataagcaatatgacgtat

SEQ ID NO: 951856 - DNA, 120 bp, Artificial Sequence
  ENSG00000287555_21 (sequence is synthesized)
tttcattatttatcattttccttccacatcagctaatttgatgtatagtattgttgattcttaggttgcagatagatggagctggaaggcaaaccaacaaagataaggtttaaaaattag

SEQ ID NO: 951857 - DNA, 120 bp, Artificial Sequence
  ENSG00000287555_22 (sequence is synthesized)
aagaaaaagaagcataatattgtttatgaaaaagtttataattaactttgtctaggtacagatacgttttcaaagaggaaagaacattaatacttgctcactaacaacaattaaggatct

SEQ ID NO: 951858 - DNA, 120 bp, Artificial Sequence
  ENSG00000287555_23 (sequence is synthesized)
tgagtatttcttcaattaactaatgcattttaaagttgctttcccctttaattgcaagtaactgtcaaaacttgttttaaaaatatttaacaatccatttctatcaaatgattttcattt

SEQ ID NO: 951859 - DNA, 120 bp, Artificial Sequence
  ENSG00000287555_24 (sequence is synthesized)
ccttaagatacaaggtgatcacttctcttaaatggtagtctaaaagatgtgaaatctacaaacacaaccctgaacaagagacatccttcctcaatgctcaaatttatttgcataaataag

SEQ ID NO: 951860 - DNA, 120 bp, Artificial Sequence
  ENSG00000287555_25 (sequence is synthesized)
cataagctaatttttatagttcccctaaaggtaaaaatgtatcaaataagaatccggctcccagaactctgggatgctgagttgggtgcaagtagactgcttgagcccaggagtatgaga

SEQ ID NO: 951861 - DNA, 120 bp, Artificial Sequence
  ENSG00000287555_26 (sequence is synthesized)
gcagcctgggcaacatggtaaaccctgtctccacaaaacatacaaaaattactgaggcatggtggcacttgcctgtagtcccacctacttcctacttgggaagctaaagtgggaagatca

SEQ ID NO: 951862 - DNA, 64 bp, Artificial Sequence
  ENSG00000287555_27 (sequence is synthesized)
accgcactccagcttaaaaacttagccaattgacactatattttaaaaattattgtttcattta

SEQ ID NO: 951863 - DNA, 120 bp, Artificial Sequence
  ENSG00000287555_28 (sequence is synthesized)
attgacactatattttaaaaattattgtttcatttaaaaacaccatttgtcacacatagcctctgagagatgactccagcaattttcaaaatatgaaccctgggagttcctgagacactt

SEQ ID NO: 951864 - DNA, 120 bp, Artificial Sequence
  ENSG00000287555_29 (sequence is synthesized)
acatggagtttctaagatcaaaattatttctataatactaagatgttacttatgttttttactctgtctcttgagtatacacaaagtaaagtttttgtcagagtatagagcatgtaatat

SEQ ID NO: 951865 - DNA, 120 bp, Artificial Sequence
  ENSG00000287555_30 (sequence is synthesized)
cctaacaaactgaatgcaaaagcagatatgagcatccaactgtcttcctgtaagccagactttgttaattgtgtaaacatgtaattagctgttatttttaaataaatttaataaatgaaa

SEQ ID NO: 951866 - DNA, 120 bp, Artificial Sequence
  ENSG00000287555_31 (sequence is synthesized)
actggatggattctttaacttaccaatcagaactgctgaccttttatgactctacaattcaagaagcctgccaaatactcacaacaacaggaaaccactgaaagctttgataagaatgga

SEQ ID NO: 951867 - DNA, 120 bp, Artificial Sequence
  ENSG00000287555_32 (sequence is synthesized)
ggacgatattaagaaattaatgttcttgaagaatgaatgtgatctcaaaaagcagaaacaaccccaaagtccatcaactgatgaataaaatgtggtaccctccatacaactgaatactat

SEQ ID NO: 951868 - DNA, 120 bp, Artificial Sequence
  ENSG00000287555_33 (sequence is synthesized)
tcagtcctaaaaagaatgaagttctcatgcatgctacaacacagaagaacactgaaaacatcgtgttacgtgaaagaagccaaacacaaaaggccatgtactgtatgactccatttataa

SEQ ID NO: 951869 - DNA, 120 bp, Artificial Sequence
  ENSG00000287555_34 (sequence is synthesized)
gaaatgtctaaaataggcaaatccatagagataggaagtagattagtggttgccaggagactgcgcaaagaggaaatgggaagtgactccttaatgagcatcagggttcttttgaggtaa

SEQ ID NO: 951870 - DNA, 120 bp, Artificial Sequence
  ENSG00000287555_35 (sequence is synthesized)
agcatcagggttcttttgaggtaatgaaaatgttctggattaatagtgataattactgcacaactgtgtgaatacaatgaaaacgaccgaatatttatttatttatttatttgagacgga

SEQ ID NO: 951871 - DNA, 84 bp, Artificial Sequence
  ENSG00000287555_36 (sequence is synthesized)
acctcagcctcccaaaaactgagtatttaatagcgtgaattttctggtatgcaaattatgccggcctgaattgagtatttaata

SEQ ID NO: 951872 - DNA, 120 bp, Artificial Sequence
  ENSG00000287555_37 (sequence is synthesized)
tggtatgcaaattatgccggcctgaattgagtatttaatagagtgaattttctggtatgcaaattatacctcaataactaaaaaagctgcaggatatgcaaagagatcgcagatagttaa

SEQ ID NO: 951873 - DNA, 120 bp, Artificial Sequence
  ENSG00000287555_38 (sequence is synthesized)
aatagaaagcaactacactggtttagcaatgagtacataaaagccattgaagtttctattgttaaccctaatccagggaagcaccattcaggttactgtgctccagagtactccactcac

SEQ ID NO: 951874 - DNA, 120 bp, Artificial Sequence
  ENSG00000287555_39 (sequence is synthesized)
agagaccctattggaggatacagcccgagaaaaagaatacataaatttaaacaaagaggtaaaagaattgtcaataataatgtatgtctgaatgtgaacaggaaggaattatgacaaaaa

SEQ ID NO: 951875 - DNA, 120 bp, Artificial Sequence
  ENSG00000287555_40 (sequence is synthesized)
agaaatctattttctctttgattttaaaaagcaacattcccaaagaggaaattcaataaagtttaccattggttatctctggactgaggaagtgaggacaatttgttgtcttttacccag

SEQ ID NO: 951876 - DNA, 120 bp, Artificial Sequence
  ENSG00000287555_41 (sequence is synthesized)
acttttccaactcttcaacaatgacattacttgtataatgaaaatgtataaaaatgtacttacctttataaaaataaaaaactttacatctcaaccatagaaaccattctgaaacactaa

SEQ ID NO: 951877 - DNA, 120 bp, Artificial Sequence
  ENSG00000287554_0 (sequence is synthesized)
acaccaccatacctggctaatttttgttttttgttttttttctagtagagatggggtttcaccatgcaaggtgggcacatcacctgaggtcaggatatctatgtcttaatacccaaaacc

SEQ ID NO: 951878 - DNA, 120 bp, Artificial Sequence
  ENSG00000287554_1 (sequence is synthesized)
tgaggtcaggatatctatgtcttaatacccaaaacctgtgaatgtgatcttgtttggaaaaagaatattttcagatgtaattaagtatgttaacaagagattatcctggattatctgggt

SEQ ID NO: 951879 - DNA, 120 bp, Artificial Sequence
  ENSG00000287554_2 (sequence is synthesized)
gggccctaaatcctgtaacaagggtccttatgagagaaagaagaagagacacagacacagagaaggaggagaagaccatgtgaagaccaaggtagacactggaggtgatgccacaaggaa

SEQ ID NO: 951880 - DNA, 120 bp, Artificial Sequence
  ENSG00000287554_3 (sequence is synthesized)
tgcttggaaccagcagaagccggaggaggtgagaaacgatttgcctctagagcgtccagagggagcgtagccctcccaatatcttgattttggacttctggcctccagaacagtaagaca

SEQ ID NO: 951881 - DNA, 120 bp, Artificial Sequence
  ENSG00000287554_4 (sequence is synthesized)
ataaatttctgttgttttgagccaccctacttgtgatgctttgctatggcagcttgaggaaaccaatacagatgtggacatattagaggaggggacattattctaattcaatgtatcaat

SEQ ID NO: 951882 - DNA, 120 bp, Artificial Sequence
  ENSG00000287554_5 (sequence is synthesized)
gacattttctgaaatttttctcctcctgcttcttccaagttatttcattgtttttctttgtctctgtcattttaggaacttgcgtcagatgtccagtaatccttggttgttgctcatgat

SEQ ID NO: 951883 - DNA, 120 bp, Artificial Sequence
  ENSG00000287554_6 (sequence is synthesized)
tatgaaagagtacttaaaagccaattagatgctcagaccatgtgggtgggacttattgacttcgggttttaatttaggatgattttgatgggtgacattattggcaaatcttcaatgtca

SEQ ID NO: 951884 - DNA, 120 bp, Artificial Sequence
  ENSG00000287554_7 (sequence is synthesized)
gtatatttatgtcttgtcttttagttggttggtttctccagagaagaatattttagtcttctgttttgatgatgttggctaatgttcttcggtctagtagaagagagcttaagaagtctt

SEQ ID NO: 951885 - DNA, 120 bp, Artificial Sequence
  ENSG00000287554_8 (sequence is synthesized)
agcattcactgtctaaattttttttaaagattgatatctgaattctcacttgtcttggtgtccttcagtccaaatatcttgtatcttacattcttcaaagagtggagccaccatcttctg

SEQ ID NO: 951886 - DNA, 120 bp, Artificial Sequence
  ENSG00000287554_9 (sequence is synthesized)
ctggggtctcgtggacacttgttaagctccctttagtgagggaagaaatttgagggtctaactgcttcctaaacgttcagccagtccttttacttttagccttactttcatttcaactta

SEQ ID NO: 951887 - DNA, 120 bp, Artificial Sequence
  ENSG00000287554_10 (sequence is synthesized)
cagggcttgtagtggtcccaatttctaagactttcagaaatattatggtgttgaacaggtggcttcttgaccttccacaaatggcttaggattctacttacttgagtctgataattcagt

SEQ ID NO: 951888 - DNA, 120 bp, Artificial Sequence
  ENSG00000287554_11 (sequence is synthesized)
tattactcagttatctgctttacagttttcaaagctgtattgctgtgtttcctgtattgttctttgtcttttagacatatgttctttaaacattaatttactattgttattgtggagttt

SEQ ID NO: 951889 - DNA, 120 bp, Artificial Sequence
  ENSG00000287554_12 (sequence is synthesized)
tggaaaagagcaaaagtaaatattcatgtttataccaccacctttaaccagaaattccataaaaaagacatatttcttagacttgtcattgttactgattaggtccattcaatgtcagga

SEQ ID NO: 951890 - DNA, 120 bp, Artificial Sequence
  ENSG00000287554_13 (sequence is synthesized)
tggggttgtgtttttattatttattaaatgtttccacttttattttcctacagaatctgatttttaaaatatcttgattattctttcaaaacttttaaccatcttaatatatattcattg

SEQ ID NO: 951891 - DNA, 120 bp, Artificial Sequence
  ENSG00000287554_14 (sequence is synthesized)
aatattctaataaacaaaaagaaaaatcatttgtaatcccaagaccggagatagtttctgttgacactttcatgtgttcctttgattttcgtcctcaattttgtatattttatacaaaag

SEQ ID NO: 951892 - DNA, 120 bp, Artificial Sequence
  ENSG00000287554_15 (sequence is synthesized)
tatcataatgtacatattgctttagtaatctgttttttcatttaatatttcaaaacaacatattgtttttgattgtgaggattttattcagttttgtggattcatgagtagatgggcaca

SEQ ID NO: 951893 - DNA, 120 bp, Artificial Sequence
  ENSG00000287554_16 (sequence is synthesized)
atactttggaaatccttgatcctaactctttgaactgagccacgcttgtaagtctcctgtcatctctcagtgcatctattagaggttttagaggcctcagcaagaatccaccacatacaa

SEQ ID NO: 951894 - DNA, 120 bp, Artificial Sequence
  ENSG00000287554_17 (sequence is synthesized)
ttattatttttttgtttgatcatactcatttctgtggcagttttttttaaagtcttgcaagcatactgtttcccttgttgaatgtccttagaatgccacctagtctggccagggagtgtt

SEQ ID NO: 951895 - DNA, 120 bp, Artificial Sequence
  ENSG00000287554_18 (sequence is synthesized)
tacccacagtgtgcaattttatactttcctacaattactttgcagtaatttgctctgacactatctaagcaggttgactatacagcaacgtcagctatcttcactccagatagtctacta

SEQ ID NO: 951896 - DNA, 120 bp, Artificial Sequence
  ENSG00000287554_19 (sequence is synthesized)
gcttgaaaccaggaatacaggaagacaagaacaatggacaagaaatccacgcatagtggtctgcatttagatgcagtggacttctgcttgaaagtgcagtgctataaaggaaaatcttgt

SEQ ID NO: 951897 - DNA, 120 bp, Artificial Sequence
  ENSG00000287554_20 (sequence is synthesized)
gctgctttgtgccgtggtggaaaccaggaaatggccagatggaggctcaagaaatgtgtttattaggtcttctgactatgctgtattgataaaatgcaaaacagtgggtgatgggagtag

SEQ ID NO: 951898 - DNA, 120 bp, Artificial Sequence
  ENSG00000287554_21 (sequence is synthesized)
cccaatcaggtcatctctgaagtttctgctttcccaagtaaatagttcaaattcctctagcaattcctcagagaagctatatgccaaatccattgctcaactataagtgattttaaagtt

SEQ ID NO: 951899 - DNA, 120 bp, Artificial Sequence
  ENSG00000287554_22 (sequence is synthesized)
cagtctttagaggtgaagttggcacaggatagcgctcggtcacagtgacccttaggcagtcaatgtccctctgcttctcaggctcccctttcctccacaggaatctttttcctaaaaggg

SEQ ID NO: 951900 - DNA, 120 bp, Artificial Sequence
  ENSG00000287554_23 (sequence is synthesized)
ttcccttcaaaattacaccccattccccttatttactcagtgcatggaatttagccagctattggtagaaaaacaatgtgattaaattcactcatatcgtaaatgtctaatagccccaac

SEQ ID NO: 951901 - DNA, 120 bp, Artificial Sequence
  ENSG00000287554_24 (sequence is synthesized)
cctcccaaagatattagcatcttaagagagcctggaggttaatttaagtgatttcactaattgaaaggatttcaaacagtagaatgcagtaaaataaagaattttggacacagtagggag

SEQ ID NO: 951902 - DNA, 120 bp, Artificial Sequence
  ENSG00000287554_25 (sequence is synthesized)
tcatctggtaacaaagcaagaaagcttttcatttgttctgaataccagacacagctttgtacaaaagtatgagtatcaatcttatgccttgcagtcctctttttacttcccagattcata

SEQ ID NO: 951903 - DNA, 120 bp, Artificial Sequence
  ENSG00000287554_26 (sequence is synthesized)
tttcaaaatcacatataatgctacttgcaaaattaaattgctgaagaatatatctactgtcttgacttaggaaaaaacatgcagagaaatcttttagctactgcactgttgcaaaaaaaa

SEQ ID NO: 951904 - DNA, 120 bp, Artificial Sequence
  ENSG00000287559_0 (sequence is synthesized)
ggccgggggcggccgagagcgccgggcgcgcggcttccgaagtcgccagcggccctggagacttgacttcgctctctcctcccgccccccctgccggtcaccgtacaaattctccggatc

SEQ ID NO: 951905 - DNA, 120 bp, Artificial Sequence
  ENSG00000287559_1 (sequence is synthesized)
gtctggattagaatcgggttctatagaatgtgcaagcggtttccactcacccggcggggaggccaaaaatgaaaagagagggtagttctcaagcgaagaagcgggtgctttagagcctgc

SEQ ID NO: 951906 - DNA, 120 bp, Artificial Sequence
  ENSG00000287559_2 (sequence is synthesized)
ctgctgctttatatttgtgctcctggattctagctatagtataagttcccttgaagataaagaatggaacccaggtttcttccatatcaccgtcaacacgtggcagagagctgaacttgc

SEQ ID NO: 951907 - DNA, 120 bp, Artificial Sequence
  ENSG00000287559_3 (sequence is synthesized)
gatggaatctctttaattcttgacaatcaacattgattagaagtcacatctgtctagaaaataaccccaagaaaactacagaaatcacctcaaaaataaatgaaaaaagctgttgttttc

SEQ ID NO: 951908 - DNA, 120 bp, Artificial Sequence
  ENSG00000287559_4 (sequence is synthesized)
ctgcctccataccatgctcccacttgacactgatggaggaagtcaccgattttcagttaaaaatgcgataggagtgaaaatgcagttagaagctacaggtaggctttgggtttctgttct

SEQ ID NO: 951909 - DNA, 120 bp, Artificial Sequence
  ENSG00000287559_5 (sequence is synthesized)
gagccatcgctgctggcgaatacatgtgtgaaatgctagttaccatagcaaccagtgctgcaagattttttttttcactttggtttatgaatccaaatcaataaatgtttataaataact

SEQ ID NO: 951910 - DNA, 120 bp, Artificial Sequence
  ENSG00000287559_6 (sequence is synthesized)
ctccaattggctaaaagaagtagaagcacaagccagaacaatccttctgtcctgtgaatgtgagtcatacatatgttggccacattctggggacagaaaaaggctatcaatggaataaac

SEQ ID NO: 951911 - DNA, 120 bp, Artificial Sequence
  ENSG00000287559_7 (sequence is synthesized)
aattggccacatcattttctttgcaagagcaattaggaaaaaccctgctgagtgaaaatctatttcacatgcttactgacaacaaagaatacaaagtatgctcacccaaggggcatcaag

SEQ ID NO: 951912 - DNA, 120 bp, Artificial Sequence
  ENSG00000287559_8 (sequence is synthesized)
agaagactgcagaaatcactgacttcagtaatacagatactaggtctgaaagagaacattgatgtaattgcacctaagtgatgatactgaagttcaaatggagtaggtagagacattatt

SEQ ID NO: 951913 - DNA, 120 bp, Artificial Sequence
  ENSG00000287559_9 (sequence is synthesized)
ctgcatttgtggatttacatgttctctaggatatgcaagcagaattcatacaaacgtagaatttgctctgaagagtcccaacaaaaatcaaatcaggccaccaaccagggtaaggattct

SEQ ID NO: 951914 - DNA, 120 bp, Artificial Sequence
  ENSG00000287559_10 (sequence is synthesized)
ttctatagcattccaaacagatggtcaaacagcctctctcaggatatttttagtgaaagggaaagtcatttttctccaatctctatctagtagctgttagatttatttcctgagccaaaa

SEQ ID NO: 951915 - DNA, 120 bp, Artificial Sequence
  ENSG00000287559_11 (sequence is synthesized)
tctcctcccactctcatcctttaactcgtatccattggtcttagtttgttctttggcacaacaaagaactaatccatgtggttcctcctcttggtgacagcctttccaacctttgcaagc

SEQ ID NO: 951916 - DNA, 120 bp, Artificial Sequence
  ENSG00000287559_12 (sequence is synthesized)
agccaccaagtgcttctttagtcttctcttactcttggtttagttttcacctctcccctctcaggatgcccttgacttgtcagcattcttctctaaatgtggatgccccgaataatctgt

SEQ ID NO: 951917 - DNA, 120 bp, Artificial Sequence
  ENSG00000287559_13 (sequence is synthesized)
acaaatccccagatgtgagttaagatttcagagcacagtgaaacaacttcctgtgctttttctatctatggatttggctaagtttatgttcaaattttcttttctttccccatgccacac

SEQ ID NO: 951918 - DNA, 120 bp, Artificial Sequence
  ENSG00000287559_14 (sequence is synthesized)
acacagggcaccccatcccagaataggaacaaattatgtaaatatttctcccaggaagaacccaactgggacagggattccctggcaagccactaccctgacaagcaaaaatgaacagct

SEQ ID NO: 951919 - DNA, 120 bp, Artificial Sequence
  ENSG00000287559_15 (sequence is synthesized)
gttctgatcattttggcaaacatttttgctggctgacataaaatggagaaggagtaattgtccacaagctgtggtttgaagggtcatagagaagtgtaccaccccaaaatgtgtcactca

SEQ ID NO: 951920 - DNA, 120 bp, Artificial Sequence
  ENSG00000287559_16 (sequence is synthesized)
tccaaatgccaaaatagctggaattttacgatttggaaaggttagcaaatcctggctattttttccccaaaaggacatattaaatcactaacaatttagtgtgaataggatgaccacatt

SEQ ID NO: 951921 - DNA, 120 bp, Artificial Sequence
  ENSG00000287559_17 (sequence is synthesized)
tctttcttccaggcaaagaaaacttgggacagtaagaaaacactaactttctggatttgaagagaagggagaggagttaaaatcaggggaaaacttttgaaagaagtagtaggatagccc

SEQ ID NO: 951922 - DNA, 120 bp, Artificial Sequence
  ENSG00000287559_18 (sequence is synthesized)
aaagctttacctgtttgctctgcttcattgttaatgctgtctatggccagggcaaaagtcacaaactcaaatggacaccagtgaaagaaataggagggtagaagaaaaactacagcgatg

SEQ ID NO: 951923 - DNA, 120 bp, Artificial Sequence
  ENSG00000287559_19 (sequence is synthesized)
atataataaatggacccaggacaatgggggagtgctgggagcattgcaatctggaggcttccactaaaagggcaaccacagctcagcttcagccaaatatctcaaaggccctgtattggc

SEQ ID NO: 951924 - DNA, 120 bp, Artificial Sequence
  ENSG00000287559_20 (sequence is synthesized)
agatcttttagacttttggaaatctgaagatttatgtaaaatcttcaagtttgggaccattgaccaatactttgagggtgaaacaaaatatctgtactgccaaatattagggtctatgtc

SEQ ID NO: 951925 - DNA, 120 bp, Artificial Sequence
  ENSG00000287559_21 (sequence is synthesized)
aataggatagaagccgtccttacagggttaacaagaattctggacagaaatataattctaattaagcattaatcagactgtatttttggagcaggtcaaaactcccatgctgatcaatac

SEQ ID NO: 951926 - DNA, 120 bp, Artificial Sequence
  ENSG00000287559_22 (sequence is synthesized)
ctgggcaacatagtgagaacctgtctcttaaaaaaaaaaaaatcaggctgcactttgactcacttccttgtaaccaacagtcaggtagcactagatattgactatttgcatccccattat

SEQ ID NO: 951927 - DNA, 120 bp, Artificial Sequence
  ENSG00000287559_23 (sequence is synthesized)
gtagcactagatattgactatttgcatccccattattcctacagataggatttctgacagaatcataaggcttttgtttgagaattgcttaagatgtttttcagatctcgaattccaatg

SEQ ID NO: 951928 - DNA, 120 bp, Artificial Sequence
  ENSG00000287559_24 (sequence is synthesized)
aaatagctgacaggctgacaccagccagcttgaagacccccacagaggaatgggatcagcatgagaatatagttgatatagtttggctgtataacccaaatctcatcttgaattcccacg

SEQ ID NO: 951929 - DNA, 84 bp, Artificial Sequence
  ENSG00000287559_25 (sequence is synthesized)
ggctgtataccggacctggtgggagagagaattgaatcacgtgggcaagtctttcctatgctgttctcatgatagtgaataagt

SEQ ID NO: 951930 - DNA, 120 bp, Artificial Sequence
  ENSG00000287559_26 (sequence is synthesized)
gtctcaggtatgtctttatcagcagcatggaaatggattaatacaacagtttcttcatctccctgtcccatgacttcactctatactctttgaccaatcaacagtctccatgattccacc

SEQ ID NO: 951931 - DNA, 120 bp, Artificial Sequence
  ENSG00000287559_27 (sequence is synthesized)
atcaacagtctccatgattccacccattccgaaacccttgaaaacactggccccaaactccacagggagacagatttgtggtttcctcccatggcctcatttggcatccctgcaattaaa

SEQ ID NO: 951932 - DNA, 120 bp, Artificial Sequence
  ENSG00000287558_0 (sequence is synthesized)
tcaggtccaagcgccttcagccagcagatggttcatgtccttcgaggcggcaaaatatggggtggaaggagtggggggtgtagggaaatatacaaataaaaaatggatcacaccccaaag

SEQ ID NO: 951933 - DNA, 120 bp, Artificial Sequence
  ENSG00000287558_1 (sequence is synthesized)
cttcaacaccaaaaataccttgctaacataccacactatgaaaccaaagacaagaaatcaactacaaataaagaccctgcacaaggctttggccctgtaaaaacatccaaagaacaagtc

SEQ ID NO: 951934 - DNA, 120 bp, Artificial Sequence
  ENSG00000287558_2 (sequence is synthesized)
tattggctgtattcaacctacactgcagttaaaggaacataaaggccggagtgccatatgtcctccaaacaaccacactagttctctaacaagggttcttaacaaggctgagctggctga

SEQ ID NO: 951935 - DNA, 120 bp, Artificial Sequence
  ENSG00000287558_3 (sequence is synthesized)
aatgatagaactggaattcagactatggataggaatgaagatcatcaagatccaggaggatggcaaaatccaatccaaggaaattgaggatcacaataaaatgatatagaagctgaaaga

SEQ ID NO: 951936 - DNA, 120 bp, Artificial Sequence
  ENSG00000287558_4 (sequence is synthesized)
caaaatcactggtttaaaaaagaacctaatggatctgacagagctgagagctgagaaacaaactgtaagaatttcacaaagcaatccaagtattaatagcaaaataaaccaagctgagga

SEQ ID NO: 951937 - DNA, 120 bp, Artificial Sequence
  ENSG00000287558_5 (sequence is synthesized)
tccaagtattaatagcaaaataaaccaagctgaggaaagaatctcagaaatggaagactggctttctgaaataagacagttgacaaaaattaagaaaaaagaatgaaaaggaatgaacaa

SEQ ID NO: 951938 - DNA, 120 bp, Artificial Sequence
  ENSG00000287558_6 (sequence is synthesized)
aatctacaaatcactggcatttctgaaagggatggggagaaagtaaacaatttagaaaacatttcaggatattgtccatgaaaacttcttcaaccttgctagagaggccaatagtcaaat

SEQ ID NO: 951939 - DNA, 90 bp, Artificial Sequence
  ENSG00000287558_7 (sequence is synthesized)
aaaacttcttcaaccttgctagagaggccaatagtcaaatttagaaaatacagagaacccctgtgagattctatacaagaagatcatcct

SEQ ID NO: 951940 - DNA, 120 bp, Artificial Sequence
  ENSG00000287558_8 (sequence is synthesized)
aggacaggtcgtctacaaagggaaccccatcaatctaacagcatacctctcaactgaacccgtacaagctagaagatattggggcctatattcaatattcttaaaaaatatccacccaag

SEQ ID NO: 951941 - DNA, 120 bp, Artificial Sequence
  ENSG00000287558_9 (sequence is synthesized)
aatttcatatccagccaaactaagcttcctaagcaacagagaaataagatcattttcagctaagcaaatgttgagggagttggttaccaccagaactgccttacaagagatcttgaaaga

SEQ ID NO: 951942 - DNA, 120 bp, Artificial Sequence
  ENSG00000287558_10 (sequence is synthesized)
agcactaactatagcaagatggctaccagccaatacaaaaatatacttaaatacgcagaccaatgacactataaaaccatcacacaaacaagccagcataacaacacaatgagggcatca

SEQ ID NO: 951943 - DNA, 120 bp, Artificial Sequence
  ENSG00000287558_11 (sequence is synthesized)
aaccttgaatgtaaatgggctaaatgcccaacttaagaggcacagagtggcaagctggataaaaagcaagacccactggtatgctaccttcaagagacccatctcacatgtaatgacacc

SEQ ID NO: 951944 - DNA, 120 bp, Artificial Sequence
  ENSG00000287558_12 (sequence is synthesized)
atctcacatgtaatgacacccataggctcagaataaagggatggaggagaacctaccaagcaaatggaaatcagacaaaaaagcaagggttgccatcctaatttcagacaaaacagactt

SEQ ID NO: 951945 - DNA, 88 bp, Artificial Sequence
  ENSG00000287558_13 (sequence is synthesized)
aaagaagatctactatcctaaatacatgtgaacccaacacaagagcacccagcttcataaagttcttagagacctacaaagagactta

SEQ ID NO: 951946 - DNA, 120 bp, Artificial Sequence
  ENSG00000287558_14 (sequence is synthesized)
cttagagacctacaaagagacttagacgcccacaaaataatagtgggagacttcagtactccactgacagtattagacagatcatcgaggcacaaaattaacaaagatattcaggacctg

SEQ ID NO: 951947 - DNA, 120 bp, Artificial Sequence
  ENSG00000287558_15 (sequence is synthesized)
aggacctgaactcagcattggaccaaatggatctgatagacctctacacaactctctttcccaaaacaactgaatgtacattttcatcaccatgtggcacatactctaaaaatcaaccac

SEQ ID NO: 951948 - DNA, 120 bp, Artificial Sequence
  ENSG00000287558_16 (sequence is synthesized)
ataattggacataaaacaatcttcagcaagtgccaaagaaccaaaatcataccaaacacactctcagaccacagcacaatgaaataccagtcaagactaagaaaataactcaaaaccgta

SEQ ID NO: 951949 - DNA, 120 bp, Artificial Sequence
  ENSG00000287558_17 (sequence is synthesized)
caattacatggaaatcaaacaacatgctcctgaatgacttttgggtgaataatgaaattatggcagaaatcaggaagttctttgaactaatgagaataaagatacaacataccagaatct

SEQ ID NO: 951950 - DNA, 120 bp, Artificial Sequence
  ENSG00000287558_18 (sequence is synthesized)
tgctagcatcaagaagaaagatctcaaattaagaacctaacatcacaatggaaaaaattagagaaacaagagcaaatcaaccccaaagctagcagatggcaagaaataaccaaaatcaga

SEQ ID NO: 951951 - DNA, 120 bp, Artificial Sequence
  ENSG00000287558_19 (sequence is synthesized)
gctgaactgaagaaagtcaagacatgaaaattcattcaaaagatcaacaagtccagtagttggttttttgaaaacagtaataagataggtaggctgctagctaggctaatgaagaaaagg

SEQ ID NO: 951952 - DNA, 120 bp, Artificial Sequence
  ENSG00000287558_20 (sequence is synthesized)
aagataagaccaaaataaacacaattagaaatgacaaaggggatgttagcactgatgccacaaaaataaaaataaccatcagaaactactacaaacagctccatgcacacaaactagaaa

SEQ ID NO: 951953 - DNA, 120 bp, Artificial Sequence
  ENSG00000287558_21 (sequence is synthesized)
ggaccagatagattcacagctgaattccaccagatgtacaaagaagagctatgaccattcctactgaaaccgttcaaaaaaactgaggaggagggtctcctctccaattcattctatgag

SEQ ID NO: 951954 - DNA, 73 bp, Artificial Sequence
  ENSG00000287558_22 (sequence is synthesized)
ctactgaaaccgttcaaaaaaactgaggaggagggtctcctctccaattcattaaacaacaaaaaacttcagg

SEQ ID NO: 951955 - DNA, 120 bp, Artificial Sequence
  ENSG00000287558_23 (sequence is synthesized)
aaatacttgcaaaccaaatccagcagcacataaaaaagccaatccatcgtgatcaagtaggctttatccccagaatgtaagcttggttcaacatacataaatcaataaatgtgattcatc

SEQ ID NO: 951956 - DNA, 120 bp, Artificial Sequence
  ENSG00000287558_24 (sequence is synthesized)
attatctcaatagatgcagaaaaggattttgataaaatttaccatcctttatattgaaaactctcaataaactaggtactgaaggaatatatctcaaaataataagagacagctatgaca

SEQ ID NO: 951957 - DNA, 70 bp, Artificial Sequence
  ENSG00000287558_25 (sequence is synthesized)
attgaaaactctcaataaactaggtactgaaggaatatatctcaaaataataagagacagctatgacaag

SEQ ID NO: 951958 - DNA, 80 bp, Artificial Sequence
  ENSG00000287558_26 (sequence is synthesized)
gataggaagagaggaaatcaaacgatccctgttggcagatgacatgactctatgtctagaaaaccccatagtctcagccc

SEQ ID NO: 951959 - DNA, 120 bp, Artificial Sequence
  ENSG00000287558_27 (sequence is synthesized)
tagtctcagcccaaaagctccttcagctgataatcaactccagcaaagtttcaggatataaaatcaatgtacaaaaatcactagcatccctttacaccaacaacagccaagcccagaggc

SEQ ID NO: 951960 - DNA, 120 bp, Artificial Sequence
  ENSG00000287558_28 (sequence is synthesized)
caacagccaagcccagaggcaaatcaggaacacagtcccattcacaaatgccacaaaaagaataaaatatgtaagaatacagctaaccagagaggtaaagatctctacaataagaattac

SEQ ID NO: 951961 - DNA, 120 bp, Artificial Sequence
  ENSG00000287558_29 (sequence is synthesized)
attgctattcctatcaaactgccaatgatattcttcacagcactattaaaaaactacttcaaaaatttatatataaccaaaaaggagccagaatagccaaggcaatcctaaacaaaaaga

SEQ ID NO: 951962 - DNA, 120 bp, Artificial Sequence
  ENSG00000287558_30 (sequence is synthesized)
acaaagctggagacatcacattacctggcttcaaactatacttcagggctacagtaacaaaaacagcatggtactggtaaaaaaaaaaaaaaaaaaagacacgtagaccagtggaacaga

SEQ ID NO: 951963 - DNA, 120 bp, Artificial Sequence
  ENSG00000287558_31 (sequence is synthesized)
cccagaaataaggccacacacctacagacatctgatttttaacaaagctgacaaaaacaagcaatgggaaaataactccctattcaataaatggtgctggggtaactggctagccatatg

SEQ ID NO: 951964 - DNA, 89 bp, Artificial Sequence
  ENSG00000287558_32 (sequence is synthesized)
taactccctattcaataaatggtgctggggtaactggctagccatatgtagaagatggaaactggacccctttccttacaccatataca

SEQ ID NO: 951965 - DNA, 120 bp, Artificial Sequence
  ENSG00000287558_33 (sequence is synthesized)
tacaaaaatcctggaagacaacctaggtaacaccatcctggacataggaacgggcaaaaatttcatgaagatgccaaaagcaatctcaacaaaggcaaaaattgacaaatgggatctaat

SEQ ID NO: 951966 - DNA, 120 bp, Artificial Sequence
  ENSG00000287558_34 (sequence is synthesized)
aaaagaaactctcaagggagtaaagggaaaacctagagaacaggagaaaatatttgcaaactatgcacctgaaaaaggtctaatatccagcatctatgaggaacttaaacaaatttacaa

SEQ ID NO: 951967 - DNA, 120 bp, Artificial Sequence
  ENSG00000082929_0 (sequence is synthesized)
ctgtttcaaccatatcctttcaaaccagatcagtgaggtcatgaccagaaaacaagccctgccagcctcctacctcaaatctaattaattataattttcttccttatgacaacccacaca

SEQ ID NO: 951968 - DNA, 120 bp, Artificial Sequence
  ENSG00000082929_1 (sequence is synthesized)
aaagacagagataagaaaaacaaggacttcctgggaggctgtggatcaattaccaatggacacccagaagcaaattcacaagactcacaattcaaagaaccaattttttacaattttttt

SEQ ID NO: 951969 - DNA, 120 bp, Artificial Sequence
  ENSG00000082929_2 (sequence is synthesized)
tttcctgtcagttgaatttgggaaggaaggaacacgcaaaaatttttaccttcttctttcaattggacactatggacggaaatccaggagagctgaccttggaactgcagacactgcaga

SEQ ID NO: 951970 - DNA, 120 bp, Artificial Sequence
  ENSG00000082929_3 (sequence is synthesized)
gacctttgacccaaaccccagtgtgactgtctccggtgctcactcaactgcagtgcatcaatgaaggaaaaaagaactgagcattggcaaaaagctgaggatgacaagcttaggggatga

SEQ ID NO: 951971 - DNA, 120 bp, Artificial Sequence
  ENSG00000082929_4 (sequence is synthesized)
aaggctgccttttcccccccttctgagcgtttctgacagctcccagctgggagaaaccaacatgacgaaaagacaaagaatactggagaagagagagggtgggcagagccacaacctcat

SEQ ID NO: 951972 - DNA, 120 bp, Artificial Sequence
  ENSG00000082929_5 (sequence is synthesized)
cctcccagtggttcctcttgagtttgatttgacaagatgccttcccacccaggtaaccccgtgggaacgtgccagtacctcaccgcacgacctcactgagtcctcacaacaaatccaggc

SEQ ID NO: 951973 - DNA, 120 bp, Artificial Sequence
  ENSG00000082929_6 (sequence is synthesized)
tgcagatttttttccccacttggagatgacaaattgaaatgcaggaaggttaaagagtttgcctgaggttgcttagataataaaagaatctggattagaacccagacctacccagctaaa

SEQ ID NO: 951974 - DNA, 120 bp, Artificial Sequence
  ENSG00000082929_7 (sequence is synthesized)
tttttttttcctgtcagttgaatttgggaaggaaggaacacgcaaaaatttttaccttcttctttcaattggacactatggacggaaatccaggagagctgaccttgccttcttccctct

SEQ ID NO: 951975 - DNA, 120 bp, Artificial Sequence
  ENSG00000082929_8 (sequence is synthesized)
acttcttgtttcagaatcctggagagctggctaactgctgggcacaagcccaacagcttgagccccaggctgatagaaaccaaagagcacattttcactgattacaaagccaagctctta

SEQ ID NO: 951976 - DNA, 120 bp, Artificial Sequence
  ENSG00000082929_9 (sequence is synthesized)
ggcctacggaaagtgtgtccacatttattgggagggggagagccaaccttcgcctttgtgccaagtctcctaagaacaaacacgcagagcctgctcccagatggacaaaggaaaaaagaa

SEQ ID NO: 951977 - DNA, 120 bp, Artificial Sequence
  ENSG00000269604_0 (sequence is synthesized)
ttctctttgagtatctttttaatgacttaaacaccagcacggagactcgccatgtaaacggcctcatttctgtgctctgtgctttgggagggacagggacaccatttcccacctcggctg

SEQ ID NO: 951978 - DNA, 120 bp, Artificial Sequence
  ENSG00000269604_1 (sequence is synthesized)
ggcaaaaaaaaaaaaaaatccaaacgagacctagtttccatccagggacaggatatttctggacacccccggtcactgctcctcctaagggcctggccgtggctactgcagggaggatgc

SEQ ID NO: 951979 - DNA, 120 bp, Artificial Sequence
  ENSG00000269604_2 (sequence is synthesized)
agtgagaatggctggtcttggcactcgacgtcttagctagtggatttatcgcattaagactgtacttgggcctttttcatgatgacttgggtctcaatccttggagcagctgaaagaaca

SEQ ID NO: 951980 - DNA, 120 bp, Artificial Sequence
  ENSG00000269604_3 (sequence is synthesized)
tctcgctcttgacaaaaatcttgctggggcaggtcctctggcagccccagcaccttaccctgagtcacgggaacctgagactttgtccaaacctcggctggaaggctggtcttggcactc

SEQ ID NO: 951981 - DNA, 120 bp, Artificial Sequence
  ENSG00000269604_4 (sequence is synthesized)
gacgtcttagctagtggatttatcgcattaagactgtacttgggcctttttcatgatgacttgggtctcaatccttggagcagctgaaagaacagctcgggccacctgtggatgcaccca

SEQ ID NO: 951982 - DNA, 120 bp, Artificial Sequence
  ENSG00000269604_5 (sequence is synthesized)
caatgaaatcagaggccactgcaaggcagagtggcctgcagttttaactcgggcactatggcaatgcagacccaaaccaattgtgccagttctttgctgggtggcaaagtgttttcaggc

SEQ ID NO: 951983 - DNA, 120 bp, Artificial Sequence
  ENSG00000269604_6 (sequence is synthesized)
tttgtggtcactcctgatttctgtttggaagcacagttctctctctaaggagaatggaaacttggaaaggcctgtaaaatcggaaagcctgtaaaaggccgtagagtggagatgtataaa

SEQ ID NO: 951984 - DNA, 120 bp, Artificial Sequence
  ENSG00000269604_7 (sequence is synthesized)
aatgtacggtcacccatgttttaggggttgacaccgtggacttttatctcgctcaccaaattcctcacacatacagctcactccctgtgccctcggccatctcaggcaccacaaaatcct

SEQ ID NO: 951985 - DNA, 120 bp, Artificial Sequence
  ENSG00000269604_8 (sequence is synthesized)
cactgcttgaaattcacttatggagtccaacaaacaactttcttaaaaaaaaaaaaaaaggcagtaaaatctcagaatttctgtgcaacgcttgcaacctgcccacttattaaataaaca

SEQ ID NO: 951986 - DNA, 120 bp, Artificial Sequence
  ENSG00000269604_9 (sequence is synthesized)
gaacaccaaaccaaccgaaagctatgcaagtggcaggctgccctgggcagagccctgcctgtctgccagggactacggtggcacgggagcagggcgcgatcatgctggaagaaatgagag

SEQ ID NO: 951987 - DNA, 120 bp, Artificial Sequence
  ENSG00000269604_10 (sequence is synthesized)
gtggtctcattccctgaatctcaaactctcatctcaggagcccccagtcctaacactgtattcagcggctggagttatctggccaggtaaagggacgagggaaggcagacagtcctcaac

SEQ ID NO: 951988 - DNA, 120 bp, Artificial Sequence
  ENSG00000269604_11 (sequence is synthesized)
ttcttcctgtgtttctagcagggaaggaacgcaatggcttcagtccctccgcctctaggtaacaaggcaaaggcctccctaacccaggcagacaggatgtggggaaggtcttgtgtcttt

SEQ ID NO: 951989 - DNA, 120 bp, Artificial Sequence
  ENSG00000269604_12 (sequence is synthesized)
tcctaactcagaatgagtgagcgggctcccggagaaagactgtcctcttagcacatgaccccgcaggcttctagcaccaaaggctcgctaacacctccgaccctgtctgcaggtagaggg

SEQ ID NO: 951990 - DNA, 120 bp, Artificial Sequence
  ENSG00000269604_13 (sequence is synthesized)
gatgggaggcagaacccttctcctgattggtgcctgaaggaggcaagaacgagcatctgctatgccgcagccggatttcccccatctcagcaggagaggggagaggtgagggtgcaggcg

SEQ ID NO: 951991 - DNA, 120 bp, Artificial Sequence
  ENSG00000269604_14 (sequence is synthesized)
gggccgcaaggcactgcagggtcacgtagttgaagggctgcatggtacccctggccagcagcttctcgtccagcagctcgtaggccgtcttcttgaaggcattggtggcgtccatgtggg

SEQ ID NO: 951992 - DNA, 120 bp, Artificial Sequence
  ENSG00000269604_15 (sequence is synthesized)
cccctgcttcgatcagggcattcatgatggccgggcagttgttctgggctgctatgtgtagcggggtgttgttgtcaaaatccctgctgtccgggtcggccccgcagtcgagcagcactt

SEQ ID NO: 951993 - DNA, 120 bp, Artificial Sequence
  ENSG00000269604_16 (sequence is synthesized)
tgaccacgtgcagggaggggaatctgcccacgggatagcggcccacgtttgtggtgtccttgtccacagccatgtgcagaggggtgaagccgttcttgcccctgggcgcgcacttgagca

SEQ ID NO: 951994 - DNA, 120 bp, Artificial Sequence
  ENSG00000269604_17 (sequence is synthesized)
ggcggtagacggtctggtgcttcaggtgctcctggctgggggtgcactccactttctccagcaggtagagcaggtggaggatgatggccagcgccttggtgaactgggctgagtctccgg

SEQ ID NO: 951995 - DNA, 120 bp, Artificial Sequence
  ENSG00000269604_18 (sequence is synthesized)
gctccctgggcagctgcagggcccgttccacttcccggacccctttggtgagaacccccatgaggtctgcaaagccgatctgggtgcccaggctgcctttggcggcccggtcctgaagca

SEQ ID NO: 951996 - DNA, 120 bp, Artificial Sequence
  ENSG00000269604_19 (sequence is synthesized)
cgtaggagaagagttccgcgaaggagaggaagctgctggcggtcatggggctcagaggctccaggttgctctgttgcatgtccagggcgtacttccacaagcggatgcagcgctcgaaat

SEQ ID NO: 951997 - DNA, 120 bp, Artificial Sequence
  ENSG00000269604_20 (sequence is synthesized)
tgcccgagtcggcgtacacggcacccctgtaacggatgtaataggaagtgtccgggtgcgagggaccgaggatgcgctcccggatcaacagggcctgcatgcgcatctcatccgggtcgg

SEQ ID NO: 951998 - DNA, 120 bp, Artificial Sequence
  ENSG00000269604_21 (sequence is synthesized)
tgatcagcgcctccagctcctcggtggtgttgacctccctggaatagtcataggccaggaccagctgtgggggctccggtttgggcaggtactcgcccccctggtgacgcagctccatgg

SEQ ID NO: 951999 - DNA, 120 bp, Artificial Sequence
  ENSG00000269604_22 (sequence is synthesized)
cccgcctccagtgtttaagggccccaagcagatctcgtttcttatccacatacgtagctcccagcaattccaaggcttccacggcagcttcccggctggtgggacagcagctttcgtaag

SEQ ID NO: 952000 - DNA, 120 bp, Artificial Sequence
  ENSG00000269604_23 (sequence is synthesized)
attccccgttcagtggttcctctggggaggagctgcagcacggagccccctgaggctgcgcacacccctggctggtggaggggtcttcttggggcagcccaggctgagcctctccccctg

SEQ ID NO: 952001 - DNA, 120 bp, Artificial Sequence
  ENSG00000269604_24 (sequence is synthesized)
cgacctgctcctggccgggctgctcctggatgaggtactccacgatgttggtgtggcccgtcacgctggccgcgagcagcggggtcatgccgtagccgtcacgttccatgcgggccttgc

SEQ ID NO: 952002 - DNA, 120 bp, Artificial Sequence
  ENSG00000269604_25 (sequence is synthesized)
accccagcagcagctgcaggatctccaggctgccggactcggcgcagtcatgcagggccgtgttgcccttggcgctgcgccggttcacctgggcgccctgctccagcaggtagcgggcga

SEQ ID NO: 952003 - DNA, 120 bp, Artificial Sequence
  ENSG00000269604_26 (sequence is synthesized)
tctcacggtggcccttgtagcacgagatcatgaggcacgtgtggccgtgccggttggccacctccaggtcggcctggtgctcgccgaccaggtggccgtagcgggcggcgatgagtagcg

SEQ ID NO: 952004 - DNA, 120 bp, Artificial Sequence
  ENSG00000269604_27 (sequence is synthesized)
gcgttcccccgccggccacctcgcccgtcagctcgtccagttcctcccggctccggccgctgagcagcttctggagcagctgcagcttgccatcacgggcggcgttgtacacggcggtgc

SEQ ID NO: 952005 - DNA, 120 bp, Artificial Sequence
  ENSG00000269604_28 (sequence is synthesized)
ggaggtccatggttcgggcctccgccaggccatgggccggccgccgggggacggggagacggaggatcagagcccggacgggcgggaggcaaccttcaccgtccccctcgccgccatctt

SEQ ID NO: 952006 - DNA, 74 bp, Artificial Sequence
  ENSG00000269600_0 (sequence is synthesized)
attatttccccctgatgctttcctgaaagctcctgcaatcaactacaggtcagaatgttcgtctccaagacagg

SEQ ID NO: 952007 - DNA, 120 bp, Artificial Sequence
  ENSG00000269600_1 (sequence is synthesized)
atgctttcctgaaagctcctgcaatcaactacaggtcagaatgttcgtctccaagacaggactccccctgagactcacagaaaagactatgacaggtgaataagcaaatggagttgcata

SEQ ID NO: 952008 - DNA, 77 bp, Artificial Sequence
  ENSG00000269600_2 (sequence is synthesized)
caaataattgatgtagacactcagccgtcaagaaggtggagccaactcctgacagagtgggacaaggaggagaaata

SEQ ID NO: 952009 - DNA, 120 bp, Artificial Sequence
  ENSG00000269600_3 (sequence is synthesized)
aataacctcacagtggagaaacctgacaaacattagctctgccaaatgatccaagtgaacatcaaaggtgacagttcaccttgagaacatgaagtgacaatgggggacattctacaacat

SEQ ID NO: 952010 - DNA, 120 bp, Artificial Sequence
  ENSG00000269600_4 (sequence is synthesized)
atcaaatgttctttacatgttttctgttgcagtagtaacacatatgtgtaaacttaattatcacatttttcttgtgctgtggttgtgtcctgagttcattctctaaaatgctgttcacct

SEQ ID NO: 952011 - DNA, 90 bp, Artificial Sequence
  ENSG00000269600_5 (sequence is synthesized)
actttaagaccatacacttgactcagttaaggtctccagaagtccggttgggaaactgatgggttcatgacactgctaactcaagatcca

SEQ ID NO: 952012 - DNA, 120 bp, Artificial Sequence
  ENSG00000269600_6 (sequence is synthesized)
ctgatgaaaattgattataattgtatagctttttggagcattgctggttaatattctagtttctggatttaagaaatctctttctcttactctaactgtaacttacaacaatttagtaga

SEQ ID NO: 952013 - DNA, 85 bp, Artificial Sequence
  ENSG00000269600_7 (sequence is synthesized)
tttctcttactctaactgtaacttacaacaatttagtagattatacttttgtaaacagaaatgaagcgtttatctttttttcttg

SEQ ID NO: 952014 - DNA, 120 bp, Artificial Sequence
  ENSG00000269600_8 (sequence is synthesized)
caataagaatctattcatcttataacaggacataattggaaattttggttatattatcaaggtttttactggaatatcatatttagggagtgtacctaagatcagttatgaccagcaatt

SEQ ID NO: 952015 - DNA, 120 bp, Artificial Sequence
  ENSG00000269609_0 (sequence is synthesized)
gggaaaagaggaagggaaagttggggcttactgcagggcaagctccttaggagaaggtggggaggaggaaggagggaggtccaggcccttcttccatcccacgtcctccacttcccaagg

SEQ ID NO: 952016 - DNA, 120 bp, Artificial Sequence
  ENSG00000269609_1 (sequence is synthesized)
tgcaagaagaaaagaggtacagaacacccagaggtgccctcgattccgtcttgcacttgcccttctcccaccgtccagcaataaagcgagagaaacaagtgcaggaaactggccggcagt

SEQ ID NO: 952017 - DNA, 120 bp, Artificial Sequence
  ENSG00000269609_2 (sequence is synthesized)
catgggagaagccaaaaagacaggagttcagtggcatgaccagggctcactgcaaccttgatctgggctcaagtgatcctcctacctcagcttcctgagtagctaggaccacaggtgtgc

SEQ ID NO: 952018 - DNA, 78 bp, Artificial Sequence
  ENSG00000269609_3 (sequence is synthesized)
cctacctcagcttcctgagtagctaggaccacaggtgtgcaccaaccacacccgactaatttttgtagagatgagatc

SEQ ID NO: 952019 - DNA, 120 bp, Artificial Sequence
  ENSG00000269609_4 (sequence is synthesized)
cacattgcatgcttgtatcaaaacatcatatataccccacaaatatatacaaaaaactttaaaattttaagtattaattgctcaggaaaaaattaaaatgctggggtgctgaaatctcaa

SEQ ID NO: 952020 - DNA, 120 bp, Artificial Sequence
  ENSG00000269609_5 (sequence is synthesized)
gggccccattacaaaactccttaggaacctcgccctctctctgctgtaaggactggttccagaatgagagaatttaaaagacattccccccccaaaatgttcataatgtcaccccggaaa

SEQ ID NO: 952021 - DNA, 120 bp, Artificial Sequence
  ENSG00000269609_6 (sequence is synthesized)
cctgcgaatatgttatattacatgaccagggagaagtaaggttgcagatggcagtaaggttgctaatgggctgaccttaagataaggagatgatcctggattatctgggtggacccaatg

SEQ ID NO: 952022 - DNA, 120 bp, Artificial Sequence
  ENSG00000269609_7 (sequence is synthesized)
taatcacaagggtccttaactgtggaatagtgaggtggctgagtcagaggcagagtgatgcaatgactgaaagacttaaccagccatcaccggctttgaatacggaagacggtcatgagc

SEQ ID NO: 952023 - DNA, 120 bp, Artificial Sequence
  ENSG00000269609_8 (sequence is synthesized)
cagggaatgcaggcaggctctgggagctgaaaaaagcaagaaaatggattctcccctggagcctccagaagggatgcggtcctgccaaccccttgtcagtgagccatttcagatttctga

SEQ ID NO: 952024 - DNA, 80 bp, Artificial Sequence
  ENSG00000269609_9 (sequence is synthesized)
tcgtggcgtaggccggagggcaggcccaccagggcggcgcggcctcgggtggcgcggcggggccgtagaagcggtggtat

SEQ ID NO: 952025 - DNA, 120 bp, Artificial Sequence
  ENSG00000269609_10 (sequence is synthesized)
tcccgtggggccgcccactcgcccgcatgcaggctcccgggccggctgcggaagctgtgggcctggactgggggtagcagcagaggggcggccaggtaggtgcaggtgagcagctgcggc

SEQ ID NO: 952026 - DNA, 120 bp, Artificial Sequence
  ENSG00000269609_11 (sequence is synthesized)
ggcggcggccagacgccctgtttgggcggcggccagctgtacacatacatggtcggccccccaggcggctgctgttcttactgggggctcctgcggatccagacctgcggcggaggaagg

SEQ ID NO: 952027 - DNA, 120 bp, Artificial Sequence
  ENSG00000269609_12 (sequence is synthesized)
gatatgtagacagactttctacttaaccgcctcctgtccctgtgggccggttccccgggacgccggttcatggctttgggggaattcatcccaaatcgaacattcagctccccgcctagc

SEQ ID NO: 952028 - DNA, 120 bp, Artificial Sequence
  ENSG00000269609_13 (sequence is synthesized)
ctcttgtcccaaggtcgggcagagcctcaggctcccagcagacaataaggagccttttcaagccctccgccgggatgctcttcccagtgactccccactcacttgtctccttcagccttg

SEQ ID NO: 952029 - DNA, 120 bp, Artificial Sequence
  ENSG00000269609_14 (sequence is synthesized)
gggagccggcgggatccagagcggggctcctctccgcactttgtagctgcgttgctccgctccatgccctgcctcagccactcctcctggttaccaggcaaaaggaaacaccttgagctg

SEQ ID NO: 952030 - DNA, 120 bp, Artificial Sequence
  ENSG00000269609_15 (sequence is synthesized)
gccaggagctaccagcgtctgtctacacctgggtgagccgtactggtcgtagtggccccaccctacaaggatgcccttcctacagtattactgatggctgtctaatccggttagctccca

SEQ ID NO: 952031 - DNA, 120 bp, Artificial Sequence
  ENSG00000269609_16 (sequence is synthesized)
gtcactacaccccagcctcccagcgcctgcaggtggattgggttatcctcacatttgagtgaaactcctgcacaccagacactgaatcgagttgtctgggagcatctaactgcaagttat

SEQ ID NO: 952032 - DNA, 120 bp, Artificial Sequence
  ENSG00000269609_17 (sequence is synthesized)
gtcgatccgaggaaggggggtactgatattacccctgctttccatagcaaaaagctgcttgcctcacagttggtgtccagtgtattcagtgactggagcttatgtaggttaaataactca

SEQ ID NO: 952033 - DNA, 120 bp, Artificial Sequence
  ENSG00000269609_18 (sequence is synthesized)
aaattcaacccccagtctgtctcaagactcaggctcacaatgttggtcttattgcccacctgtgcaggagcttctcgcagactgtctcgaagtcctcccactctagaatgttacataagc

SEQ ID NO: 952034 - DNA, 83 bp, Artificial Sequence
  ENSG00000269609_19 (sequence is synthesized)
ttttttgagatggggtcttgctctgttgtctaggctggagtgcagcggcatgatctcggcacactgcagccaccgtcttgagc

SEQ ID NO: 952035 - DNA, 76 bp, Artificial Sequence
  ENSG00000269609_20 (sequence is synthesized)
gtttcgccatgttgcctaggctggtctccaacctggtctcctggccaggcgtgagctaccgcgcccggcctattta

SEQ ID NO: 952036 - DNA, 120 bp, Artificial Sequence
  ENSG00000269609_21 (sequence is synthesized)
cgcgggggtaggtgccgtacgcgcgccgcagctcccggcgcacgaagtccggtagctgcagaggggggccccgcgcgcgctccacgcggccccagcgcagctcggtttgcaggctcccgc

SEQ ID NO: 952037 - DNA, 120 bp, Artificial Sequence
  ENSG00000269609_22 (sequence is synthesized)
cgagccgctgacacctccaagtcggctgcagctgtgcatccgctcagaccacaagactcaatggaggatgctgacctctctttgttctcccaacgagtactaggcaaggagggaaggaag

SEQ ID NO: 952038 - DNA, 69 bp, Artificial Sequence
  ENSG00000269609_23 (sequence is synthesized)
gatccaccctccttggcttcccaaagtgctgattttacaggcgtgagccatcgcgcccggctgctttaa

SEQ ID NO: 952039 - DNA, 120 bp, Artificial Sequence
  ENSG00000269609_24 (sequence is synthesized)
atccgcccaccttggcctcccaaagttttgggattacaaggatgagctactgcgcccggcctactttaaattcttaatagctatgtgaagtgcatagtgatgtcatgctcttttagtaga

SEQ ID NO: 952040 - DNA, 120 bp, Artificial Sequence
  ENSG00000269609_25 (sequence is synthesized)
gtgatgtcatgctcttttagtagataaggaaccagaggctcagagaagttaggccactgtcccaggttcacacagcctgtaagtaccacagtggaatttgaacccagtccaactgatgtc

SEQ ID NO: 952041 - DNA, 120 bp, Artificial Sequence
  ENSG00000269609_26 (sequence is synthesized)
aaaggccagaagccatttgagtgaaggcaggaagattgcttcatccagatggggtgagccctgtctgagttccagtcccttctggtgtgggtcacaacccctgcacctcttccttctcca

SEQ ID NO: 952042 - DNA, 120 bp, Artificial Sequence
  ENSG00000269609_27 (sequence is synthesized)
gtggggagagtggtagttatggatgattaaaactgaaaccgtctcccagctgcagggctgccatgttgccacactttccttccccatctcctgttgactgaagcagtatcaccagcagcc

SEQ ID NO: 952043 - DNA, 120 bp, Artificial Sequence
  ENSG00000269609_28 (sequence is synthesized)
ctgacagaaaggttcttctgggttctcagtatccctcaaaactcagctaccctctggtggtggccaccatttggtgactcaccctggtgatgtcatgctattcgtgactgagccactgct

SEQ ID NO: 952044 - DNA, 120 bp, Artificial Sequence
  ENSG00000269609_29 (sequence is synthesized)
ccaagtcttaattcgggccagtccttttgaaggcaggtgctggggctgggctgtggatggaaaaaaggggcctggttagggtttcatttggactctaacactgtcatagaaacccagatt

SEQ ID NO: 952045 - DNA, 120 bp, Artificial Sequence
  ENSG00000269609_30 (sequence is synthesized)
caggctggtgaacctgatgcacagctaaggccaaacagtgggagatagagaaaggtttatttgatttggccaaagtgagaaggcgggagagcaaatctctcaaatccctattaacagaaa

SEQ ID NO: 952046 - DNA, 120 bp, Artificial Sequence
  ENSG00000269609_31 (sequence is synthesized)
gagcaaatctctcaaatccctattaacagaaaaaaagcagcagggtggcttacacctgtaatcctagcacttttggaggctgaggcaggtggactgcttgagctcaggagttcgagatca

SEQ ID NO: 952047 - DNA, 85 bp, Artificial Sequence
  ENSG00000269609_32 (sequence is synthesized)
ggtcacaacgtccttcaaggcattcattcctgcaatccaggctggagtgcaatggcggggatcttggctcactgcaacctccgcc

SEQ ID NO: 952048 - DNA, 65 bp, Artificial Sequence
  ENSG00000269609_33 (sequence is synthesized)
attttttttcatgaccacaaagttacctcttcctgcttgaccaagaaacagcacatcagcagttt

SEQ ID NO: 952049 - DNA, 120 bp, Artificial Sequence
  ENSG00000269609_34 (sequence is synthesized)
cctcttcctgcttgaccaagaaacagcacatcagcagtttatattgtgggaacaaggaatattgggcaaaaagtgagtggttagcacgtgcaagcaagcatcggcctgatcagaattttt

SEQ ID NO: 952050 - DNA, 90 bp, Artificial Sequence
  ENSG00000269609_35 (sequence is synthesized)
ttagcacgtgcaagcaagcatcggcctgatcagaattttttttctttttttttttctttttgacaagaaggggtgggttgcccctccaca

SEQ ID NO: 952051 - DNA, 62 bp, Artificial Sequence
  ENSG00000269609_36 (sequence is synthesized)
aaagtatagagaaagaaaaaagggggcccatgggaccggcgttcagcacacggaggatcccc

SEQ ID NO: 952052 - DNA, 60 bp, Artificial Sequence
  ENSG00000269609_37 (sequence is synthesized)
agatggaatatacaatcgggttttacaccgagacgttccattgcccagggatgagcagga

SEQ ID NO: 952053 - DNA, 72 bp, Artificial Sequence
  ENSG00000269609_38 (sequence is synthesized)
cggttttcccctatctcagcagatggaatatacaatcgggttttacaccgagacgaactgcaacgaggcatt

SEQ ID NO: 952054 - DNA, 120 bp, Artificial Sequence
  ENSG00000265115_0 (sequence is synthesized)
cacatgcacaggcacacttcagcctccaagaaccctgaaggatttgcacttccctgagcaagactgttctcacacatgtaaccttgtgtctttgaaggaaaaatgctgtcatcctggaat

SEQ ID NO: 952055 - DNA, 120 bp, Artificial Sequence
  ENSG00000265115_1 (sequence is synthesized)
gccctcccttcctagtctgccggaacaagcctcctcatccttaggggttcagccattccagattccagatttctctctagagacacaggcatgtcttccctggagcaaccatttcactgg

SEQ ID NO: 952056 - DNA, 120 bp, Artificial Sequence
  ENSG00000265115_2 (sequence is synthesized)
tacaggcgtgagccactgcgcccggacgagagaacttttatcatccctgtgcgattggagctttggtttcgtggaggagagagacagtcaataaactggcaaacaaagaaatagagaata

SEQ ID NO: 952057 - DNA, 120 bp, Artificial Sequence
  ENSG00000265115_3 (sequence is synthesized)
agagaatatactttggcaaatagtgattatcttgggcagaggattatggggaatttcacacattccaagtcacacatttctgtaatattagaaattttacaagcatacactgagcaggga

SEQ ID NO: 952058 - DNA, 120 bp, Artificial Sequence
  ENSG00000262721_0 (sequence is synthesized)
atttaagtaatgtacattttatttaagtcatgtgatggattttcacagaatacatatgcccagggaaccagcaccagattacacaacagaactggatcagctcccagaagctctcccctc

SEQ ID NO: 952059 - DNA, 120 bp, Artificial Sequence
  ENSG00000262721_1 (sequence is synthesized)
gtcccctcccaaccctaagggcgatcactatcttgactttggtgcactataaattagttttgtctggttctgaacgtaatacacctggaaccatctagtatgtactgttgcatttggctt

SEQ ID NO: 952060 - DNA, 120 bp, Artificial Sequence
  ENSG00000262721_2 (sequence is synthesized)
tgcgggataggaatggagttattcctgattcagactgatttgctctaactgtgatttggggcaagtcccttcccctgtctagaccttagctggctgccgcatctaaaaaatggagccaat

SEQ ID NO: 952061 - DNA, 120 bp, Artificial Sequence
  ENSG00000262721_3 (sequence is synthesized)
aatcttttcctcgtctttggggtcatccatctttcaaccacatcaggagcagcgggaaccaagtgcagaggatggccttaaaagcagtatgggaaccaaatttttgtaaagtaaatattt

SEQ ID NO: 952062 - DNA, 120 bp, Artificial Sequence
  ENSG00000262728_0 (sequence is synthesized)
tagtatgcatttactaacaccacatctcacccccacgaaacttggtaagggcagcaacagaactttatctgccatatgcactcctgtattcctattaccaaatagtgccagggactaagt

SEQ ID NO: 952063 - DNA, 120 bp, Artificial Sequence
  ENSG00000262728_1 (sequence is synthesized)
gaatatttgtccaatgaatgagttttaagtaggaaacgtttgcatagaatcattttgtttcttttggagttcaaatcttcggatattttacccttcccaatccaaagaaaagtctctgag

SEQ ID NO: 952064 - DNA, 74 bp, Artificial Sequence
  ENSG00000262728_2 (sequence is synthesized)
catctttgtaacaagaagaaaaccaaccaaatgaaaatgaaatgaattctctcaaaaagaattaagtcaagaca

SEQ ID NO: 952065 - DNA, 120 bp, Artificial Sequence
  ENSG00000262728_3 (sequence is synthesized)
aaatgaaatgaattctctcaaaaagaattaagtcaagacaggaagaaggctcgcaaagtaatataaaatatatcttatggtttatggaaaattcttaataaaataccttctttgctccaa

SEQ ID NO: 952066 - DNA, 120 bp, Artificial Sequence
  ENSG00000262728_4 (sequence is synthesized)
agtaaccttaaccctcggcccttggtgggaacttcggctctgtgggaattagtctttgggggactgatggtcatgctgaaatcttattgcgtaggaaattaagtacaacaaagaagaccc

SEQ ID NO: 952067 - DNA, 120 bp, Artificial Sequence
  ENSG00000262728_5 (sequence is synthesized)
gtcgtgagaggagagtgcggaagaaatgcgaagtctacgggaggtggcagctgcagaagcttggtgttggatttggcgttaggagaccgggaggagcccagcttccggtccagacggtta

SEQ ID NO: 952068 - DNA, 120 bp, Artificial Sequence
  ENSG00000262728_6 (sequence is synthesized)
tcttgttgacttgcacgactgcaaacgccctgagctgcttttgcagtctgaaacatcagcgatcccatcaaaatattctgtttcttgggatataagaaacatcccaaggcgggctgtaga

SEQ ID NO: 952069 - DNA, 120 bp, Artificial Sequence
  ENSG00000262728_7 (sequence is synthesized)
tctctggaacacagcagcattcctgattcccacttgaggaggcctaacaaaacggcatatgcctcaacagcagcagatcagtgttaaaaagtctggagtcaaggggaaaaagtaaaattg

SEQ ID NO: 952070 - DNA, 120 bp, Artificial Sequence
  ENSG00000262728_8 (sequence is synthesized)
gaccatttccaaaatctcacaaaaagcaacaaactgacgttctaagtgcccaacatgagcaaattagaaccttaaataaaggtcactcttaatgcctatcccagcatagatgcagcacca

SEQ ID NO: 952071 - DNA, 120 bp, Artificial Sequence
  ENSG00000262728_9 (sequence is synthesized)
agtacagtgtcattttactggtttacctttttcattcttgaaagtaggagctatgaaaaaaaacactaaaatttctctaagagaaccttctactttctgtctaacttacataatcaaaac

SEQ ID NO: 952072 - DNA, 120 bp, Artificial Sequence
  ENSG00000262728_10 (sequence is synthesized)
actgtattgagggtgaaaattgaatattataagaaaataatcacgtgttttgcgagaagttgcaaatataatgctcctccacccaatacctaccttaaaaagaaaaaaggaaacatacaa

SEQ ID NO: 952073 - DNA, 82 bp, Artificial Sequence
  ENSG00000262728_11 (sequence is synthesized)
aaaagtctctgagtgaagagatgggaacaaaatacattaaaatgtattcagtggaactcacagtttaaaattctatgtttct

SEQ ID NO: 952074 - DNA, 120 bp, Artificial Sequence
  ENSG00000262728_12 (sequence is synthesized)
ctcggctgaatgaggtatcgcaaaagactgcatgcactttggagaaagacttaagttattgtcatacaatttccattctttttagtgttttcttaaatatatgacaaatacctacacaaa

SEQ ID NO: 952075 - DNA, 120 bp, Artificial Sequence
  ENSG00000254277_0 (sequence is synthesized)
atgtttttttggacataaggtgaagtatgaagttatgaggagaaaggaacagaggacaaccacacagagaaagtgtagctttatctactagagctgaagacattcaaatttatgatccaa

SEQ ID NO: 952076 - DNA, 120 bp, Artificial Sequence
  ENSG00000254277_1 (sequence is synthesized)
caattctactctgaagtgcagtggtgtatatactgcaacaatgtgtactcatgtgccctgagaactagatatgaaaaaaccttacagcaatatgcataatagtaaaaaaaaaaaaaaaaa

SEQ ID NO: 952077 - DNA, 120 bp, Artificial Sequence
  ENSG00000254277_2 (sequence is synthesized)
tacacagcaacatgaacgaattccacagataatattgagtgaaagataccagacaccaaataatatcccatatgatttcatttacattaaatgttttttttttgagatggagtctcgctc

SEQ ID NO: 952078 - DNA, 120 bp, Artificial Sequence
  ENSG00000286634_0 (sequence is synthesized)
tttttttttttttttttttttgagacaacgtttcactctgttgcccaggctggagtgctatggcacaatctcagctaactgcagcctccacctcccaggagaattgctctgttctgttga

SEQ ID NO: 952079 - DNA, 120 bp, Artificial Sequence
  ENSG00000286634_1 (sequence is synthesized)
ttgaatttcaccctggcaatggaaaccgatagcttatcttcacaggtgtgggacagaaagtcatccctatgctcatctgagacaaatgcgtacctcattgcttcctctgccctatttatg

SEQ ID NO: 952080 - DNA, 120 bp, Artificial Sequence
  ENSG00000286634_2 (sequence is synthesized)
taaaaatgcagtttcactgagccagattaaattgtgtattcagtgaaaggctgatgaaggattcaaaagaatgcaaccttttgtcttttacctacttatgacctggaaccccaaccccct

SEQ ID NO: 952081 - DNA, 120 bp, Artificial Sequence
  ENSG00000286634_3 (sequence is synthesized)
atcagaaccaatgacaatgttacacatactgatgtctcttatctccctaaaatatataaaagcaagctgtacccccaccaccttaggcacatgttgccaggatctcctgaggttgtgtca

SEQ ID NO: 952082 - DNA, 120 bp, Artificial Sequence
  ENSG00000286634_4 (sequence is synthesized)
tggacgtgatcgtcaccttggcaaaataaactttctaaattggttgagacttgtctgacatattttgaattcacatcactaaggagatttgtattatcaggtgtatgtatatgccaataa

SEQ ID NO: 952083 - DNA, 120 bp, Artificial Sequence
  ENSG00000286634_5 (sequence is synthesized)
cttgagatatattgtttctgtagccaaagactggagtttagttaattctggaagctttttttacttagttgaaatctgacagctagtacacagtcaatggattggtaaaactgctgccac

SEQ ID NO: 952084 - DNA, 120 bp, Artificial Sequence
  ENSG00000286634_6 (sequence is synthesized)
cttagtataaaccaaggcactacctccaaaccaatacaagtaagcagtcatcgtgttctgtatcatcacctactcgcagtaaaagcatggcagtttcaccttagaagtttcttgaagtaa

SEQ ID NO: 952085 - DNA, 120 bp, Artificial Sequence
  ENSG00000286634_7 (sequence is synthesized)
aacaccttagttttattatatcttgtccatgaagtcaacattgtttttctattctctgtgatgaagtgggaagtacacgtaaagcagtttctttgcatactgatggttatcttgagttaa

SEQ ID NO: 952086 - DNA, 120 bp, Artificial Sequence
  ENSG00000286634_8 (sequence is synthesized)
agcactcatgcaactgagtttcaagctgaactatccacattgttcatggaacaccgtttttaattgtaagagttactgataaactatggttattcatgcttggatatttggcagacattt

SEQ ID NO: 952087 - DNA, 120 bp, Artificial Sequence
  ENSG00000286634_9 (sequence is synthesized)
acttgaaaatgaacaactgtgagcctatcaattcaagaaaaagaactgcaaaataatggcgaatgataaaatttgagcttttaagtgaaaattaaaattttcgtaaactattgtctgcta

SEQ ID NO: 952088 - DNA, 120 bp, Artificial Sequence
  ENSG00000230825_0 (sequence is synthesized)
atggtttgtcagctatagaagagaaaggagggcgaaacctgtggttaaggcttgcctgaaggatctcacatttgggttgggggctgacatgccagtgaacaaatagcctcctcaggacta

SEQ ID NO: 952089 - DNA, 120 bp, Artificial Sequence
  ENSG00000230825_1 (sequence is synthesized)
tgatagagctagaatcagccagaaacatataaggagactccaccaggagtggggagttcttgggaaagcttttgcttctgaaaaaagataaaagtacacaggagagctgtctggtgccat

SEQ ID NO: 952090 - DNA, 120 bp, Artificial Sequence
  ENSG00000230825_2 (sequence is synthesized)
tccttgagcatgtgagagactgtgtcaccgggagcagcagttatctgtggccataagttgagatgactggatgaaatgctaacatgttgagaagacaatgcataggagtgaatgagacag

SEQ ID NO: 952091 - DNA, 120 bp, Artificial Sequence
  ENSG00000230825_3 (sequence is synthesized)
aagtagagtatatggatgggaggccaagaatacaccaacaaataaaatattgaatatatcggtcaagggcatatcgagatgatcaggatgctgcctattggaatgtttatcctcccaccc

SEQ ID NO: 952092 - DNA, 120 bp, Artificial Sequence
  ENSG00000230825_4 (sequence is synthesized)
taccccagaagaggagcttctcgtcttgttcaccgctgtttcccagctcctggaagagcctggcacataaaaggtgcacaatgaacattcattaaaatcaatgattaattgaactggcta

SEQ ID NO: 952093 - DNA, 120 bp, Artificial Sequence
  ENSG00000230825_5 (sequence is synthesized)
gtattccatctcactttcattactggagaactgaagagccagctagcctacaaaaactcattctggatgtagaagcaataagaaaacatgcattcaaataaaagcagagaatccttctaa

SEQ ID NO: 952094 - DNA, 120 bp, Artificial Sequence
  ENSG00000230825_6 (sequence is synthesized)
gctgctctgcttatggagtagccattctttatttctttactttcttaataacttacttgctttcactttactctatggacttgccccaaattctttcttgtgggagatccaagaacactc

SEQ ID NO: 952095 - DNA, 120 bp, Artificial Sequence
  ENSG00000230825_7 (sequence is synthesized)
tcttggggtctggatcaggacccctttcttataacaccaccacctgctttcttgggtctccagcttgcagatggcagattgtgggacttacttcttagccttcataactgcatgactaat

SEQ ID NO: 952096 - DNA, 120 bp, Artificial Sequence
  ENSG00000230825_8 (sequence is synthesized)
ggtgcggagcagcccagtgggggttgttatagtggcagtggggtgccctgtagagagcattacagagtgggtcaccaggcccaggattagaagtgtctgtagcccccgaggaaccgggac

SEQ ID NO: 952097 - DNA, 120 bp, Artificial Sequence
  ENSG00000230825_9 (sequence is synthesized)
aggactgaatcagtcaagaagagacgagatgatgatgacggagtggccacaaagtcctcccacccctaccctatcccagatgagcccatgctgtaaccacatgaagagcaaagaaacaac

SEQ ID NO: 952098 - DNA, 120 bp, Artificial Sequence
  ENSG00000230825_10 (sequence is synthesized)
gattcccaaccatcagcatcgaagaagaggtccggaagaatgtgaagaatgctaagtcttgtgtggagaatagaggggagcatgaagacaatccacagcctgcaggcagggacttcatgg

SEQ ID NO: 952099 - DNA, 120 bp, Artificial Sequence
  ENSG00000230825_11 (sequence is synthesized)
acactctacattgtgcagcagccacagaattcagccacaggtgccagctggacaatgcataggagtgaatgagacagaaagcaagaccatgaggatgactaagaagagcaagtacaacat

SEQ ID NO: 952100 - DNA, 120 bp, Artificial Sequence
  ENSG00000230825_12 (sequence is synthesized)
caggcatgagccacctcacccggcccattaaatattttttaatgtgagaagatatacttattatcatgaacatacaagggagggatttgatcacagccgagcattgcggacatgtgactt

SEQ ID NO: 952101 - DNA, 120 bp, Artificial Sequence
  ENSG00000230825_13 (sequence is synthesized)
tgcggacatgtgactttgcgtgacttgaaaaaccctggataccaacatctgatcaagtggaaaattcatatgcctaggaaaagtagcccctgtgatgggtgaatctggtggcactgaaat

SEQ ID NO: 952102 - DNA, 120 bp, Artificial Sequence
  ENSG00000230825_14 (sequence is synthesized)
tttttctttaactgcattgaaaggagatgtatcaaacaagcctcagcatgttatttaattatgagatctgttttaaaatttaagtgagaaaccaggatatctagaagcaagttatagaga

SEQ ID NO: 952103 - DNA, 120 bp, Artificial Sequence
  ENSG00000230825_15 (sequence is synthesized)
atgcaaaacctattcccctttaggtattcagcttgatgagccaagtgataataatggctgtagtcagctgttgttatttttgcagtatctaaggaagagagtgtagatgaattcttctct

SEQ ID NO: 952104 - DNA, 120 bp, Artificial Sequence
  ENSG00000230825_16 (sequence is synthesized)
tgtgaactgcttcagttaactatgaaaggaatcaatgtgttcaatctcatccaagatttctttttgaaccattagctaacacttcatgtgtgtggatcagttcttactgatggtacctcc

SEQ ID NO: 952105 - DNA, 120 bp, Artificial Sequence
  ENSG00000230825_17 (sequence is synthesized)
tgctatgcttggtaaaacatcaagctttgctgcctagaatacaaaataaagaaaaatgagtagctatttgtataatgcactattgtgcacttgctgcaagaagtttgcctgcaaaaacaa

SEQ ID NO: 952106 - DNA, 120 bp, Artificial Sequence
  ENSG00000230825_18 (sequence is synthesized)
ataatgttctgtcttctttatatggtaacaaaaactccaccaagaaaaagatccaaaactttgcctcttccatgattttttttaaaggaattggtaagctgacacatccatttccatata

SEQ ID NO: 952107 - DNA, 120 bp, Artificial Sequence
  ENSG00000230825_19 (sequence is synthesized)
gaaatgaggtggcttcccacagcaacatgtttattttgcaactagataaagtgatgaaaattaagtgaagcacttctctctttcatccttctgagagggtagccttcccttagttgtctt

SEQ ID NO: 952108 - DNA, 120 bp, Artificial Sequence
  ENSG00000230825_20 (sequence is synthesized)
gggtgcccatgtaattgaagaaagaaagaatgcaaaaatattatatttttccaattctggcactaaaaaaataagattatgcaggaaaaaaaaaagactttcaagtcaggttatttcctt

SEQ ID NO: 952109 - DNA, 120 bp, Artificial Sequence
  ENSG00000230825_21 (sequence is synthesized)
gagagatttcccaaatactctgtctcctctttaacataccatagtcccagcctggaggatctagcttacagaattttcctgtgggctagagaagaaacctttactccctatgacagcaaa

SEQ ID NO: 952110 - DNA, 120 bp, Artificial Sequence
  ENSG00000230825_22 (sequence is synthesized)
caagtacagagatgatgtgtgttccaagcaccacccaccttaccccacccctgtcccgcccagcttagaggactgaagagaatgcagaattaggcatgggtagggctgcttttgtcctag

SEQ ID NO: 952111 - DNA, 120 bp, Artificial Sequence
  ENSG00000230825_23 (sequence is synthesized)
ttcccttgggactggtcggggacaggctcataggctgttctgcaccacccagagagaagctgtgtcacttggcagtacagtaggccaggagaagattgtggtggccccacgtggctctgt

SEQ ID NO: 952112 - DNA, 120 bp, Artificial Sequence
  ENSG00000230826_0 (sequence is synthesized)
ttagcttcctcaggagagctgttagggaagcttcttttttgctccgtggaaatggagcttttctgtgtttcgagtgaaaatgaatgtaacacagctgagaatggatgcaatggtcattcc

SEQ ID NO: 952113 - DNA, 120 bp, Artificial Sequence
  ENSG00000230826_1 (sequence is synthesized)
agtcttgagatcagaaagtgctccagaaggaagaaggttgtcactgaacaccactcaggtttagaatcaagtccatatgccaactagcatggaagaagggataatcactatccttgtttt

SEQ ID NO: 952114 - DNA, 120 bp, Artificial Sequence
  ENSG00000230826_2 (sequence is synthesized)
taaaagaaaacaaaaaaaccccctgcagttgaggtttgaaaaatccagtctaaatctgggtgctacctccaaagtgacacgcaacatcccttcaaacaataaccagaaaaacccaagcac

SEQ ID NO: 952115 - DNA, 120 bp, Artificial Sequence
  ENSG00000230826_3 (sequence is synthesized)
ccagctgacagtattccatttgctaccggataaatctaaaatcttgagcacgccccagaagcactcacaattggaccccagacttcgatggtatcatctcttgctattgctccctcactg

SEQ ID NO: 952116 - DNA, 120 bp, Artificial Sequence
  ENSG00000230826_4 (sequence is synthesized)
cattctcagcatcctttcatcttgctatacctttcatttcttggggactttgtgtatcagttctcactgcctagagagctgttctcccattttcctccagccaagcccccactcattctg

SEQ ID NO: 952117 - DNA, 120 bp, Artificial Sequence
  ENSG00000230826_5 (sequence is synthesized)
caagactcagtttaactggaactcatcagcaacactttcccttattctcaagttagagatgggcactgtctaatctgtgactttgaagaaccttacacataaatatgttttcttaaaaca

SEQ ID NO: 952118 - DNA, 120 bp, Artificial Sequence
  ENSG00000263450_0 (sequence is synthesized)
actgactcttggggttccagtctgtctggggaaataaattcaagctgttacaacttaatacatcaattgccatggtggaagtatgaaaaaacaatgcctggatatatagaagcaggaaga

SEQ ID NO: 952119 - DNA, 120 bp, Artificial Sequence
  ENSG00000263450_1 (sequence is synthesized)
atattctctcttttatgagataagagagttgaagggttatttgtgaggcccaagttaaaataagcacaaattgaaaatataaagtactgtagaaacatgagccaaggcaatgatgctgga

SEQ ID NO: 952120 - DNA, 120 bp, Artificial Sequence
  ENSG00000263450_2 (sequence is synthesized)
actaacaagtcatgtggctatgcctgctgccgaagagagaaccctgagtcacaagtacacaaatgaaatgcgattgtcttcgtgggttgcatcgtatgatttggagcaagtcttcaggtc

SEQ ID NO: 952121 - DNA, 120 bp, Artificial Sequence
  ENSG00000263450_3 (sequence is synthesized)
taatataaagatctttcaaataaatcatccagctaagcttctgtggccccaaactcctaatttaaaaatgttgataaatgaagtacctctttagttaataaatgaagtatctctttagtt

SEQ ID NO: 952122 - DNA, 120 bp, Artificial Sequence
  ENSG00000259775_0 (sequence is synthesized)
ccttgtgagtaccagggttcccatcagacaaactagaaaaggggatcccagacatgctgctgctgtttcactgtggagcatgacttagcagtattgaaacagatctgactttttgcttgg

SEQ ID NO: 952123 - DNA, 120 bp, Artificial Sequence
  ENSG00000259775_1 (sequence is synthesized)
cagcacaaaaatgatgttattttagaaactctgttggaaagtataggcatgaaactagtctgaggtgagaggcctgccttttcagaaaagttttaatgaaacacgaagtaattagctttt

SEQ ID NO: 952124 - DNA, 120 bp, Artificial Sequence
  ENSG00000259775_2 (sequence is synthesized)
tggacaacttaaaaaaatacttttgtgttctttttctcccttttatttttagttaatacataataacacatttgtgggatacaaagtgatatttcagtacatgtatacaacgtgtaatga

SEQ ID NO: 952125 - DNA, 120 bp, Artificial Sequence
  ENSG00000259775_3 (sequence is synthesized)
tatcatttctttgtgttgggaacattcagaattctctcttctagctttttgaaaatatacaatagattgttgttaagtatatttaccttgaaatactacagagcactagaacttattgag

SEQ ID NO: 952126 - DNA, 120 bp, Artificial Sequence
  ENSG00000259775_4 (sequence is synthesized)
atttaccttgaaatactacagagcactagaacttattgagctgcaattttgtatcaacctctccctctcctctcctcccactagccttcccagcttctaataaaccacaattcaagtctc

SEQ ID NO: 952127 - DNA, 120 bp, Artificial Sequence
  ENSG00000259776_0 (sequence is synthesized)
atttgatgccagttcctggttgagagctcagctatggctattgactggatatctacacagggctgtcctcgtggcatgggagtctcacaatgacaactgagttctcagaaggagagtgcc

SEQ ID NO: 952128 - DNA, 120 bp, Artificial Sequence
  ENSG00000259776_1 (sequence is synthesized)
tacagcaggcactccaaaagaggtaggcagaaggtgtaacacttcatatgacctagctttgggaatcgtgcaatgttacttagttctgctttttaccaatcaagtgagtcacaggctgag

SEQ ID NO: 952129 - DNA, 120 bp, Artificial Sequence
  ENSG00000259776_2 (sequence is synthesized)
tccagattcaggggaaaggaaactagactacatccctttatagggagaatgactaagaatttgtagccacctataatccagtatatgctctgaggtctcagttgcatctgtggttagact

SEQ ID NO: 952130 - DNA, 120 bp, Artificial Sequence
  ENSG00000259776_3 (sequence is synthesized)
agagatatctggatccgtattaacacctactgtcaacaaacagagcaaacagtaggcttctaaggagattcataaaatgactaagctgtcgagatgttgtacacatacaaacacagacat

SEQ ID NO: 952131 - DNA, 120 bp, Artificial Sequence
  ENSG00000259776_4 (sequence is synthesized)
acacatatgcgcacacacaagtatcttattgctaatggaatattactaaggatgaagaaaggccacttttttgagtggattttatttctcctttactgaaaactatcagcactttaagaa

SEQ ID NO: 952132 - DNA, 120 bp, Artificial Sequence
  ENSG00000259776_5 (sequence is synthesized)
atatgaaataattttaaatgcattcctatgaactactgctcctttactttagtctcttgtgataactttatgagatatgcttggcctaatatgtttaaagttaaaggactaattgaggtg

SEQ ID NO: 952133 - DNA, 120 bp, Artificial Sequence
  ENSG00000259776_6 (sequence is synthesized)
aaggcgattgtaagtctaaccattataatattaaaacctagcagagttgtaggaatatatttttttaaaataattcagacagcatactgctatacttaaagtcaagatgctaaagaagat

SEQ ID NO: 952134 - DNA, 120 bp, Artificial Sequence
  ENSG00000259776_7 (sequence is synthesized)
attcacaagtcacctggctttatcacacggcttccagagaaggaaatgagtaaaattccaaagagaagtggtttgtagtcttctttaaaaactgttcttatgggccgggcgcggtggctc

SEQ ID NO: 952135 - DNA, 120 bp, Artificial Sequence
  ENSG00000259776_8 (sequence is synthesized)
ctctgtctctaaataaataaataaataaaacaaaatagaaaagttcttatcactagtacaaggagaaatccttggcttgtcctaatattaattcactgtcgtaatcacagcattcttcct

SEQ ID NO: 952136 - DNA, 120 bp, Artificial Sequence
  ENSG00000259776_9 (sequence is synthesized)
taattcactgtcgtaatcacagcattcttccttgtttcctcagtgaactccttgaggacaaggaatagtgtcttgaaaacctctttaatcctcaaattaccaagtaccgtgcctagtata

SEQ ID NO: 952137 - DNA, 120 bp, Artificial Sequence
  ENSG00000259776_10 (sequence is synthesized)
aagcaataaagggatcaggtagtaaaagtaacatctgatcttcctggaaaatgggcactgaatgaccaacaagatttctaagcaattctattacacaaaattcttgaagataccacacag

SEQ ID NO: 952138 - DNA, 120 bp, Artificial Sequence
  ENSG00000259776_11 (sequence is synthesized)
cttgctctttttcggtcaaagcaattctaacttaactaacacctgggaattcctgatatggtcataggaccctgtgctagagtctaaggaggaaaaatatgtataaaatgccgtcttata

SEQ ID NO: 952139 - DNA, 120 bp, Artificial Sequence
  ENSG00000259776_12 (sequence is synthesized)
tattttatacacatgtgattttagtggattaatctggttcataaagtgttgtggggatactcaaattattatcacttatagtataaagaaaagatttagaataaatttacttttttcatt

SEQ ID NO: 952140 - DNA, 120 bp, Artificial Sequence
  ENSG00000259776_13 (sequence is synthesized)
ctttttcaacaaagagaacaaaacgatcaggtacttttcgttttaaaaagggtctgaaaaaaatctatgttataaaagaagttttcatcgtagccattcagttaaagtaaaattttattg

SEQ ID NO: 952141 - DNA, 120 bp, Artificial Sequence
  ENSG00000259776_14 (sequence is synthesized)
aaaattttattggaaccaattttgacaggtttgtgaaaaattctgtctgtttcaggtagcagataataagcgaatttatgatttaaaaagcagtggtggccgggcatggtggctcacacc

SEQ ID NO: 952142 - DNA, 120 bp, Artificial Sequence
  ENSG00000259776_15 (sequence is synthesized)
cctgtctcaaaaagtaaaataaaataaaataaaaataaagtaaaataaaaagcagtggtaacaagcagtgatcttataactttcattttctctagggcactcccagaccaagagatggat

SEQ ID NO: 952143 - DNA, 120 bp, Artificial Sequence
  ENSG00000259776_16 (sequence is synthesized)
tagctgtttgccacactcctttttattgctagtctccacgtcttaacctatgagagactgtataactgagctgtagatgaaataaggtgggccaaagcaatatatgccacaaggaatacc

SEQ ID NO: 952144 - DNA, 120 bp, Artificial Sequence
  ENSG00000259776_17 (sequence is synthesized)
cacaagcatgacttacgttagttttcctgctcgactctaggaaataaagcagaacatagactcagctgctccaccagccccagtgtccacctacctggaactcccataggtattaaatag

SEQ ID NO: 952145 - DNA, 120 bp, Artificial Sequence
  ENSG00000259776_18 (sequence is synthesized)
gtgaacattaaaaactttcagtttgctgatccattatatttctgagtacacttgttgttcagcctcacctaccccaatgaatatatgatatcagacatattaaaagacatctggattctg

SEQ ID NO: 952146 - DNA, 120 bp, Artificial Sequence
  ENSG00000259776_19 (sequence is synthesized)
tattaaactattttctatccaagttttaaaagagtatctctatgatttcaaaaatatgtttgaatgaatatctttaatatacaattggctatatgctatctgtaattataccataagcct

SEQ ID NO: 952147 - DNA, 120 bp, Artificial Sequence
  ENSG00000259776_20 (sequence is synthesized)
gggaatttttgttatgtaaaagtttaaatgacaaaatcctgacagatttaattaggtttttgtgaatgttaagttgacagctataggcaacaatatttcattaaagagatatttaaataa

SEQ ID NO: 952148 - DNA, 120 bp, Artificial Sequence
  ENSG00000259771_0 (sequence is synthesized)
gggtcgggttcaacttatcaggtatttaacaaacaatactgttaaataattaacagcattattccaaggcatttggaccattctgaccagtactctgctgtttcttatttactataaggg

SEQ ID NO: 952149 - DNA, 120 bp, Artificial Sequence
  ENSG00000259772_0 (sequence is synthesized)
ctcctgggtacaccagccagcccacggcacagagcctgcctgttggtctctacccacaggggatcccctgctgctccaccatcagatttgggacaccaccccccccccggccccaccaga

SEQ ID NO: 952150 - DNA, 120 bp, Artificial Sequence
  ENSG00000259772_1 (sequence is synthesized)
gggcatcagctatgcctagcaattacgcccccgtggctaaattaaactcccattggctaaattaggctcgaagagaggggcacctgctgctaagctgtgtatgttgtcccctaggactcc

SEQ ID NO: 952151 - DNA, 120 bp, Artificial Sequence
  ENSG00000259772_2 (sequence is synthesized)
gctgagctccacatgacaacagcagacgacaggccgcactgatcccacctggcttacaggtgctgtcacacaggtacgccttcttgtgaatcatcagtcaccatttgcccctcgcagcaa

SEQ ID NO: 952152 - DNA, 120 bp, Artificial Sequence
  ENSG00000259772_3 (sequence is synthesized)
ccctgtcttggaggaaggtccttgccgacacccgcctctccccacccttaggctcccttgctccttcattcaaccattgtttacatgtcgttcaggactgctgactaaacactttcaagc

SEQ ID NO: 952153 - DNA, 120 bp, Artificial Sequence
  ENSG00000259772_4 (sequence is synthesized)
acagtggacccttgaacaacgcaggttcaaactgtgcaggtccacccacagggatgtttttcaatcagagttataccaagtgtccctgcctctcctgcctcccttcccacttcctccatg

SEQ ID NO: 952154 - DNA, 120 bp, Artificial Sequence
  ENSG00000259772_5 (sequence is synthesized)
aaggatgagcaggctctctgccatctgcccaccaacttttcaagttacttttacccaccttcaaaattacatctgcttttagcaagaattactgatgtgataaagatgggagtgttcacc

SEQ ID NO: 952155 - DNA, 120 bp, Artificial Sequence
  ENSG00000259772_6 (sequence is synthesized)
atgcaagggcaggggatcccctgctgctccaccatcagatttgggacaccaccccccccccggccccaccagagggcatcagctatgcctagaaggggaccacaacagactcgacaggat

SEQ ID NO: 952156 - DNA, 120 bp, Artificial Sequence
  ENSG00000259772_7 (sequence is synthesized)
ccaccggttgggcccaaggcaggaggaagggcggcgcccccaaactcccaggacgcctgcagcaccccccacgcgccgctctccgcctctggggagcatcctgccaccccccgacacaca

SEQ ID NO: 952157 - DNA, 120 bp, Artificial Sequence
  ENSG00000259772_8 (sequence is synthesized)
aagacttctatgataatccacttccacttagtaaatgctttctcttatgatattcttaatgacattttattttcccaagcttagtttattgtaagaatacagtataaatacacatacaaa

SEQ ID NO: 952158 - DNA, 120 bp, Artificial Sequence
  ENSG00000259772_9 (sequence is synthesized)
agatataaagcggaggagatcagattcgtggtgaaacgcaatagagccaatggcctgcagggtaaagtctgagtgcagcattcagactgaagacaaagatgcaccgggagcctccagagc

SEQ ID NO: 952159 - DNA, 120 bp, Artificial Sequence
  ENSG00000259772_10 (sequence is synthesized)
caacactggcccaaagagagaagcaggggcccgcccaggtgactgccaggcactgtcagccacactgacagggagagcggcccagatgagaggcccaggaaggcactctgcctttgcaac

SEQ ID NO: 952160 - DNA, 120 bp, Artificial Sequence
  ENSG00000259772_11 (sequence is synthesized)
gtcctggcctgtctccatgaccacaggtgcccagtggtgccagggttgccagacagtggtggtttagttgtgtgcaagaactactctgcacagcaagaatgattggttgagactgacaga

SEQ ID NO: 952161 - DNA, 120 bp, Artificial Sequence
  ENSG00000259773_0 (sequence is synthesized)
ttccagacgcatgcaagattgcttcctgagcggctgtctaggagacaaacaataactttcaaacttgcaatgttatggcttgccaacaactaaggattttaataaagctatttatatgca

SEQ ID NO: 952162 - DNA, 84 bp, Artificial Sequence
  ENSG00000259779_0 (sequence is synthesized)
ctcaatgcgatggaatacattcatgccattgtgcaaccttcaccaccgcccatctccagaactctcttcatcctgcaaaactga

SEQ ID NO: 952163 - DNA, 120 bp, Artificial Sequence
  ENSG00000259779_1 (sequence is synthesized)
accgcccatctccagaactctcttcatcctgcaaaactgaaactcggccccgggtgcccatccccctccccgccctggcatccaccctctactttctgtctctctgatcttgactggaag

SEQ ID NO: 952164 - DNA, 120 bp, Artificial Sequence
  ENSG00000259779_2 (sequence is synthesized)
taggtatgtacttagtccgcattttaaagtgcagagcctgggacccagtgagacggagtcacgtgcctgtggtcactcgatagaaaatggcaaagctgggcatcccacccgaggtctgtg

SEQ ID NO: 952165 - DNA, 120 bp, Artificial Sequence
  ENSG00000259779_3 (sequence is synthesized)
tccacagcccctgccttggcggccactacactgtggcttctttcaagtgagtgctgaggaggaaaggggattacgctgcacaacctcagtggtgagatgagatgaacgggtggaaactaa

SEQ ID NO: 952166 - DNA, 120 bp, Artificial Sequence
  ENSG00000259779_4 (sequence is synthesized)
acgtaaggaatgtaagggatgggtgaaaagacgccagtgagcctcctggaagggcagcaagttcccagacattcgaagaatcaaggtcctgaaaggatgacccagcagggacagggcaga

SEQ ID NO: 952167 - DNA, 120 bp, Artificial Sequence
  ENSG00000259779_5 (sequence is synthesized)
ggggaccctgccacagctgagcgatggcctagatgctcgttctgggtgctgtcccttctgggactctagcgaaactgttttcctctctattcagagtctgccattcattggactataatg

SEQ ID NO: 952168 - DNA, 120 bp, Artificial Sequence
  ENSG00000259779_6 (sequence is synthesized)
ccccatttcatctgattgatgacccaaatagcttcaagtagctctccgcgggtggccagccgccctggagggtgtccagttacaggagctgagcacactggacgccttttctcttccaca

SEQ ID NO: 952169 - DNA, 120 bp, Artificial Sequence
  ENSG00000259779_7 (sequence is synthesized)
ccttgtcaggattaatgagagctttggttgcagggcccccccgcctgttgccacgtgacagtctcacaagctcacccgggaagagaggagagaagcccatcaggtcactgaagtgggcag

SEQ ID NO: 952170 - DNA, 120 bp, Artificial Sequence
  ENSG00000259779_8 (sequence is synthesized)
tagaacccaggagaggaagaaagaaaggagagaggggggaagtggatgcagagacagagccattgaaagtgttttccaacaatggacttggatcggcttcccctgcccctgcagcaggga

SEQ ID NO: 952171 - DNA, 120 bp, Artificial Sequence
  ENSG00000259779_9 (sequence is synthesized)
gctcgctgtgcctgcactgctgcagtactgacaaattcatccctgtccaaggagagtgaagtgaaggtccgtgaggcgagacctgctggcactcagggtacgtggggcctggccccatgt

SEQ ID NO: 952172 - DNA, 120 bp, Artificial Sequence
  ENSG00000259779_10 (sequence is synthesized)
ccaagtgctccctccttactgaggagttgggttgccaggtgcagcggcagtttctctaagccacgttcagagctgagttactgggttctgtgtgagaagggagcccacgcccgagcctgt

SEQ ID NO: 952173 - DNA, 120 bp, Artificial Sequence
  ENSG00000259779_11 (sequence is synthesized)
ggaacaggtctcggctggagcaggtggtctgtgcccctcctcaccccatctgtcctggcttgctctcacctcggcttcctggccttcccagggccctggtctcatcctcaccctaaagca

SEQ ID NO: 952174 - DNA, 120 bp, Artificial Sequence
  ENSG00000259779_12 (sequence is synthesized)
ggcccctccacctgaggcgccttcgcactgagatgcccgctgatcttcccaggaccctcatctccgtggctctaagctgttcaccttcaccctggacccccaggagggcagtggatgaag

SEQ ID NO: 952175 - DNA, 120 bp, Artificial Sequence
  ENSG00000259779_13 (sequence is synthesized)
gacaaagagcaacaactctgctgccagcaccaaaaagccctctgctgactccctcaagtcctcttttgcagatacctacaaagggccttgaaagaaaaaagaactagaattacgaacaaa

SEQ ID NO: 952176 - DNA, 120 bp, Artificial Sequence
  ENSG00000259779_14 (sequence is synthesized)
agtataatgcaaatattccaaaatccaaaaaaagtcaggatctgaaaccattctggtgccaagcattgtgggtaagggatactcagcctgtattgtcgatgagaaatctggtattactct

SEQ ID NO: 952177 - DNA, 120 bp, Artificial Sequence
  ENSG00000259779_15 (sequence is synthesized)
ttctgtttttcctgattcggacctcacatgctttttgacatgaagacttaagtctttcttaaattttaaaacatggctaggcatggtgtctgaagcctgtaatcccagcactttgagagg

SEQ ID NO: 952178 - DNA, 120 bp, Artificial Sequence
  ENSG00000259779_16 (sequence is synthesized)
caacatggcgaaaccccgtctctgcttaaaaaaaaaaaaaaattagctgggcttggtgtgggggggcctgtaacccagctacttgtgaggctgagacaggagaattgcttgaactagaga

SEQ ID NO: 952179 - DNA, 66 bp, Artificial Sequence
  ENSG00000259779_17 (sequence is synthesized)
ggggggcctgtaacccagctacttgtgaggctgagacaggagaattgcttgaactagacagaacga

SEQ ID NO: 952180 - DNA, 120 bp, Artificial Sequence
  ENSG00000231858_0 (sequence is synthesized)
gagtgcctgccctgtggaagccagacctaggcagtatttcagcccctttgattcacacaccacctttgcatcgttggaaacacctttgaccagcaatggaaaataaagggaacatactgc

SEQ ID NO: 952181 - DNA, 120 bp, Artificial Sequence
  ENSG00000231858_1 (sequence is synthesized)
tttctctcaacaccgcatacacacttggagacatgggaagaaggtctgatggagaatgtggctctgttgaatcacttcggcttaaagagataacaagagggcatgaagtcaggtggctgc

SEQ ID NO: 952182 - DNA, 120 bp, Artificial Sequence
  ENSG00000231858_2 (sequence is synthesized)
aagtctgtgagtgacaactgtaggatattctacatgatggtgcccaaagatttagtgctatagatgaagatttttatggattgtatacactttcattaaagaaacagaatggtgaacgta

SEQ ID NO: 952183 - DNA, 120 bp, Artificial Sequence
  ENSG00000231858_3 (sequence is synthesized)
acgtaaagcagtttaagtaactgaaggtgtctgctttcaatacgcataatatcagcaacacgcaggaccatccagacaccttttgtgttatgctcatgaatttgttccaataaatgtgtt

SEQ ID NO: 952184 - DNA, 120 bp, Artificial Sequence
  ENSG00000258766_0 (sequence is synthesized)
aaaaactggcagaatttgcagtgtgatcagcaagtctacgctgaggatgcccatcttctctgcctcctgaccccagcataaagacatgggatatgtgagaaaaggaataggaaaaagcca

SEQ ID NO: 952185 - DNA, 120 bp, Artificial Sequence
  ENSG00000258766_1 (sequence is synthesized)
aagagacaccggcttacattagaaaatctactcaaaatcactcaaaggattgacaactgacaaaataaatggtggccagatgcagtggcttaggcctgtaatcctagcactttgggaggc

SEQ ID NO: 952186 - DNA, 120 bp, Artificial Sequence
  ENSG00000258766_2 (sequence is synthesized)
caggagttcaagaccagcctggacaacacggtgaaaccgtgtctctacaaaaaacacaaaaacattagccaggcatagtggcatgtgcctgaagtctcagctacccgggaggctgaggag

SEQ ID NO: 952187 - DNA, 120 bp, Artificial Sequence
  ENSG00000258766_3 (sequence is synthesized)
tcagctacccgggaggctgaggaggaaggatcacctgagacctggaggttaagacttacattgagccacgatcacaccagccctccagcctgggtgcaaaccagctctcctctactagag

SEQ ID NO: 952188 - DNA, 120 bp, Artificial Sequence
  ENSG00000258766_4 (sequence is synthesized)
tttggaagactttcaaccaatcagtcgttcagaaaataatactggatacctactaagttcaaggcattgtttgtgctatatgaacacagcaatgaacaacaataataacaataaataaac

SEQ ID NO: 952189 - DNA, 120 bp, Artificial Sequence
  ENSG00000258766_5 (sequence is synthesized)
aaaaactcatctatactcatggagtttacagtcaaggggccaagagagaaaattaagaaataaaatgaatgaactcctcaatctgaacagatcaatggtgttcatcaaccaatgtcacga

SEQ ID NO: 952190 - DNA, 120 bp, Artificial Sequence
  ENSG00000258766_6 (sequence is synthesized)
caagcaagactgaagttaatccatttagcatgatgatgaaaatgaagtcatcaatgaagttgcaagcttaggatatccttcacattaaccaccagtagcccaactatttaactaaaggaa

SEQ ID NO: 952191 - DNA, 120 bp, Artificial Sequence
  ENSG00000258766_7 (sequence is synthesized)
ctttgtaatatctggactcagaaactgagataaatgccataaccaatcatccaaccggagactgaggctagcaatacatagtatgatactctgtcacgattttgagcagcggtagcgagc

SEQ ID NO: 952192 - DNA, 120 bp, Artificial Sequence
  ENSG00000258766_8 (sequence is synthesized)
ctcagattccagttggccacatgaccataagggtaaccaactgatactctaccatgtactatgttcccagatgattttgcccaactgtaggctaagtgttctgcaggccaaagcaccata

SEQ ID NO: 952193 - DNA, 120 bp, Artificial Sequence
  ENSG00000258766_9 (sequence is synthesized)
cttttggatatcatttgctgaatcccaatgttggtaaagcatgaacttgaagtggaacttcaaagaggcagagtcagccaagccgaaagtgaggtttgccaagattgatcattgatgtga

SEQ ID NO: 952194 - DNA, 120 bp, Artificial Sequence
  ENSG00000258766_10 (sequence is synthesized)
aaagattaatcataagtggaacatggcctcccagctacagactacatttaccagcatcccttgaagctaagtatgttcatgtgatgagattctgggcaacggaggaggagtggaatttat

SEQ ID NO: 952195 - DNA, 120 bp, Artificial Sequence
  ENSG00000258766_11 (sequence is synthesized)
atgtcacttccttgaagacacctgccatgaactctttctccagcagcgctgaggagtgcgacattcaggaaatggcaatgcggcagtaaggaaggaatctgtgccctttaatgacctaga

SEQ ID NO: 952196 - DNA, 120 bp, Artificial Sequence
  ENSG00000258766_12 (sequence is synthesized)
ggagtagatccacttcgccacctggaccggccagactaatgtgagaaatacacttctatctatgtaagccagtacatttgggggtttctttgtaatagcatctcaacctctatccatgga

SEQ ID NO: 952197 - DNA, 120 bp, Artificial Sequence
  ENSG00000286632_0 (sequence is synthesized)
gtctcaaaagaaagggagaaagggagaaagagagagaggaagggaggaaggaaggaaggaagaaaagagaaagaaagagtccctgaggagcaagcaattccctcagccaaagagcttttg

SEQ ID NO: 952198 - DNA, 120 bp, Artificial Sequence
  ENSG00000286632_1 (sequence is synthesized)
ctctcaagtctcgtttggtcatgctaagccacagtttggggactcctaggagcagccatcacaggtaaccagttctgctggctcaggatggcccctgctgccctgactcagagacacttc

SEQ ID NO: 952199 - DNA, 120 bp, Artificial Sequence
  ENSG00000286632_2 (sequence is synthesized)
ctgcaaggcagacatctcatgcagagcagaggccactgcagtcagaaggaagggcctggtagcctcagaggcacagccaaggggctgcaacgatggaaaggagatattccacaagtccaa

SEQ ID NO: 952200 - DNA, 120 bp, Artificial Sequence
  ENSG00000286632_3 (sequence is synthesized)
gagtgtgacatggaagcacactctgggatgtggtggactcaagtgatccatgcagatgtggatgctgtctctctttctctgttcatagagtgtggcatgggtcctctctgggtgaaaata

SEQ ID NO: 952201 - DNA, 120 bp, Artificial Sequence
  ENSG00000286632_4 (sequence is synthesized)
cgccatggcccctaaataactccgtgataagaactgtatgctattgatggctctgaagtccaaatttattggcaaaagcaaagaacatgcctgaactagtcatttctgcaggcgtttctc

SEQ ID NO: 952202 - DNA, 120 bp, Artificial Sequence
  ENSG00000286632_5 (sequence is synthesized)
cttaagatgagtttgaagccaattggttatgtgaagaatagcaatcagttctttctcacactggaggaggaggaagcacaaaagaaagttcaagggtcaagcctcccaaaaggctctgtt

SEQ ID NO: 952203 - DNA, 120 bp, Artificial Sequence
  ENSG00000286632_6 (sequence is synthesized)
ataatcctatgtgctctttcattgtatctagtgatgaatttgggtaactgacactttactcattggccatctatccttgaacttgataagcattttcatttatgtaagtttacttgtaat

SEQ ID NO: 952204 - DNA, 120 bp, Artificial Sequence
  ENSG00000286632_7 (sequence is synthesized)
tcttccaaaacttatcttcacatttcccaacaaactaatttcagacattttgtttttatgattctattgtgacaggaacctccatttcaatatacttgttgcaggtatagattttgtgca

SEQ ID NO: 952205 - DNA, 120 bp, Artificial Sequence
  ENSG00000286632_8 (sequence is synthesized)
ttgctttgtggtgttgatttgtccatcttttgtattctgcctagcttattgtaatcttgatttttaaagttttcaattgggtttttaaagtatgttaatgttaataaatgcatttttagg

SEQ ID NO: 952206 - DNA, 80 bp, Artificial Sequence
  ENSG00000227220_0 (sequence is synthesized)
tcgtccgggcaccggcacggcccgctgcagttctggccgacggccggctgcagggaggacagggcggtcagcggcgctcg

SEQ ID NO: 952207 - DNA, 120 bp, Artificial Sequence
  ENSG00000227220_1 (sequence is synthesized)
cctggcagccgccggccgcagcgggggctcccggcgcttacccggctgcagagggcgaggaggaccacgaaggcgacgcggacggggcccatactggcggcggtcatggttggcactgcg

SEQ ID NO: 952208 - DNA, 120 bp, Artificial Sequence
  ENSG00000227220_2 (sequence is synthesized)
gcggtggcggcgagcggggagcggcggggcctggagcgctggcggtggtcggaggtatttcctatatcttcctgtcttttccatggccaaaaatgatcaagtaaagaacattaaagaaga

SEQ ID NO: 952209 - DNA, 120 bp, Artificial Sequence
  ENSG00000227220_3 (sequence is synthesized)
aataaattactacatattaaaaaatacatactgtaagatgttctttgtacaaaaatgtgacaacttcaataagagtaacttggacaacctgaggcattaattgaggatcaatatgatgac

SEQ ID NO: 952210 - DNA, 120 bp, Artificial Sequence
  ENSG00000227227_0 (sequence is synthesized)
accgatggagctttaatggggggaaagagggaggaactgcggaactgttacagccacctatactacagccgtatttctacaccttcactgaacagtgtcaagaatctgcctcatttaagt

SEQ ID NO: 952211 - DNA, 120 bp, Artificial Sequence
  ENSG00000227227_1 (sequence is synthesized)
tctactaacaacaaagagagagtgcatggaagagtttgtaacgtaaccagtgaaatgaagcatccattttagagaaaaggaaatgatgaaaatggtggggaaggagatttgctcgtgtag

SEQ ID NO: 952212 - DNA, 120 bp, Artificial Sequence
  ENSG00000227227_2 (sequence is synthesized)
atcctggtccagatctcccaaaggagctatggcactgccaaaccgtgcaaagacctcaaatccattcagctttgtcgtctggaagtctcctgaagctctctgtagagacactgagacctg

SEQ ID NO: 952213 - DNA, 120 bp, Artificial Sequence
  ENSG00000227227_3 (sequence is synthesized)
ccccacctcttggagtttgccatcagagccacgatccatgaagagaggtgctccaataaacacatctgcataactagaagaacagaaacttctcaccaaagcaagaacaaatttcatgtc

SEQ ID NO: 952214 - DNA, 64 bp, Artificial Sequence
  ENSG00000267605_0 (sequence is synthesized)
cagtgcgcatgcgcgaggcccgagccgccgcttgggagccctgtgtgatcgtgcgtctgagtct

SEQ ID NO: 952215 - DNA, 120 bp, Artificial Sequence
  ENSG00000267605_1 (sequence is synthesized)
cctcaggcgtgcgcggacggtgtgcgggatggatgcagcagaaaggaatgctgagggaggactccagttggaatgagccacttttccaggactaggaatgaactttccccaataccaaca

SEQ ID NO: 952216 - DNA, 120 bp, Artificial Sequence
  ENSG00000267605_2 (sequence is synthesized)
aactttccccaataccaacaaggcagcctccagggcaagaaatggtaacagaatccatcctgttgacagtcaagatggaattacagagaattctcacctcttttttgactctcaggtgga

SEQ ID NO: 952217 - DNA, 120 bp, Artificial Sequence
  ENSG00000267605_3 (sequence is synthesized)
caggatgaccccgaaccctctagctcagccccaagctcgggccagggagtgaagcctttgtccccaagcaacagagtgagggtctgtctctaacccggtgggctccagtgaaaggaaaat

SEQ ID NO: 952218 - DNA, 120 bp, Artificial Sequence
  ENSG00000267605_4 (sequence is synthesized)
ggcctggaggtgcccacaggagggcgccctagttctgagacaggtctacggctcccagactgtgtccccatgagtaacagagggacacgcagaggggcatactgagtgcctataggggac

SEQ ID NO: 952219 - DNA, 120 bp, Artificial Sequence
  ENSG00000267605_5 (sequence is synthesized)
tcacagactgcagatgcacgctgcggatccagaagccggtcagcgcacacaaccaagcttaggagccgactgttaagatgccccagtgacacggacaagtttctcctctgcaacccaatg

SEQ ID NO: 952220 - DNA, 120 bp, Artificial Sequence
  ENSG00000267605_6 (sequence is synthesized)
agagctgctgaccacgagagcatcgcgggaccgccaaaggattctggaaaatgtggtcccgggtggccagtgtgcgctgaccttcacctgaaggtacggcttgaaggaaacttctggagg

SEQ ID NO: 952221 - DNA, 120 bp, Artificial Sequence
  ENSG00000267605_7 (sequence is synthesized)
gtggggtggtgttgaagagaaggcacaattgtcaccattttgttcaacatgggcgttttctttgtgcattgatttgcatttttaaaggtattccattaaaaatatgtttatctattttaa

SEQ ID NO: 952222 - DNA, 120 bp, Artificial Sequence
  ENSG00000267605_8 (sequence is synthesized)
agtgcgcatgcgcgaggtccgagccgccgctttggtcacagggaccgccacagttgccccgggatgggtccctgagacctgggaaagtaggagctctgtgggatagtgcgtcagagtcgg

SEQ ID NO: 952223 - DNA, 120 bp, Artificial Sequence
  ENSG00000267605_9 (sequence is synthesized)
ggttcagaccagtcctggccagggaagttaacaccgcggtctccggagcccgggattcgcggaaggtacaccaccaggaaaaaacaacagcagcaagaaatctcagacagatcgccgggg

SEQ ID NO: 952224 - DNA, 120 bp, Artificial Sequence
  ENSG00000267605_10 (sequence is synthesized)
aggcagcgcgggaatccagcctcaggagtgcgcggacggtgtgccggtggaaacccccttcccatggggtgaagcgcagtctgctccagagacccactgttagggtcggggatgtcacag

SEQ ID NO: 952225 - DNA, 120 bp, Artificial Sequence
  ENSG00000267605_11 (sequence is synthesized)
ggccaccaaacagaagtgcttctgacattaacgcgacacacagaaggtgtgtagggtgggtagtggaagtgaccgcagaggcctctggggattgtagttttggagctagagaggcaggca

SEQ ID NO: 952226 - DNA, 120 bp, Artificial Sequence
  ENSG00000267605_12 (sequence is synthesized)
caaattttgggtgaaatgtcccaactgccggaaggtgaaagtgttctgtgatgtaaaatttaggtcacactctataaagcttctccttattctatgtgtgaacagctagtctgtatcttc

SEQ ID NO: 952227 - DNA, 120 bp, Artificial Sequence
  ENSG00000267605_13 (sequence is synthesized)
acctatgcatatttaaaaatcaaccttaagaaggctcttggccaccataatccttcctaccctgtagcaagagcccagcctcagactatgcttccttctgcctccgagtgcaatgccttc

SEQ ID NO: 952228 - DNA, 120 bp, Artificial Sequence
  ENSG00000267605_14 (sequence is synthesized)
ccccgaatctccaaggtaccaaaccggtcaggggcagctgagacagctctacttgtacgagtcctccccaagcccttgaaatcacaggcatctctgctgtccctgcccttcatccacatc

SEQ ID NO: 952229 - DNA, 120 bp, Artificial Sequence
  ENSG00000267605_15 (sequence is synthesized)
actgaacaattaagcacacacatctgtgtagttttatttaaactgttccatgtgtgtttgtttacaattaacaacatgaatgactgcaggatggatgcagcagaaaggaatgctgaggga

SEQ ID NO: 952230 - DNA, 120 bp, Artificial Sequence
  ENSG00000267605_16 (sequence is synthesized)
accctggggtgcccttccccaagcagatgccaggttggggcagaagcagttcagggagaagcgatgcgctcctgggactgccggtttgggggcaacatcggccctgtgtcccctagagta

SEQ ID NO: 952231 - DNA, 120 bp, Artificial Sequence
  ENSG00000267605_17 (sequence is synthesized)
ggagggtgtaccaggatggggaaccccaaggccgttttcagggagaacaagattggcttgaggcaaactcccggaatggagatggggagagtctggtcgcatttccccaggagtttaggg

SEQ ID NO: 952232 - DNA, 120 bp, Artificial Sequence
  ENSG00000267605_18 (sequence is synthesized)
gatgaaggctggacttgggtgaacagcaaaagatcccctggtgatagtggtggtgaggatcagaggcttgagccagaaattcccgaggtgtttgtttgttttgttttttttgagacagag

SEQ ID NO: 952233 - DNA, 77 bp, Artificial Sequence
  ENSG00000267605_19 (sequence is synthesized)
tcccgaggtgtttgtttgttttgttttttttgagacagagtcttgatctgtctcccaggatgtagtgcaatggcatg

SEQ ID NO: 952234 - DNA, 86 bp, Artificial Sequence
  ENSG00000267605_20 (sequence is synthesized)
cctcccaagtagctgagattataggcacctgccactgtgcccacctaaattttttttgttcattgcccagcctggtctcgaactcc

SEQ ID NO: 952235 - DNA, 120 bp, Artificial Sequence
  ENSG00000267605_21 (sequence is synthesized)
attacaggcatgagcccccacacccagctcatttttatcttttaacttaaaggtttttatttttctctatttttactcttacaggtacggcttgaaggaaacttctggagggtggggtgg

SEQ ID NO: 952236 - DNA, 120 bp, Artificial Sequence
  ENSG00000267605_22 (sequence is synthesized)
tgagaaattcactgtggaagaaggagacattccagaggagaactgggaatcactggtacagatgcccttacccattgaaaccagattgccgtagttctccaacatcacatctctgtataa

SEQ ID NO: 952237 - DNA, 120 bp, Artificial Sequence
  ENSG00000267605_23 (sequence is synthesized)
gtccctctgaacagggtccaggcagtcccactcctcctgagagaagtctatggacacatcactgaacatcactgatccctgaaacaataaacatacgtattacttgtgtaattaaaaaaa

SEQ ID NO: 952238 - DNA, 120 bp, Artificial Sequence
  ENSG00000267604_0 (sequence is synthesized)
gatggtgatgatggtctttattgaagcatctgaagatggagcattcagccagtcgggagtgtcttgagatcctgagcagccaagaaatcctagggccttctcttgtatcttttccatgct

SEQ ID NO: 952239 - DNA, 120 bp, Artificial Sequence
  ENSG00000267604_1 (sequence is synthesized)
gaaaaacacaaaaccccgaaatgggtgaagaaggaaatgctcatcttgacgagtgggggagatgaagtcatgagatcataaatgccagactgtctaagtgcagggagtaaactgtcctgc

SEQ ID NO: 952240 - DNA, 120 bp, Artificial Sequence
  ENSG00000267604_2 (sequence is synthesized)
cctgggacagcctgttggtctgcactgcactccgggaaacatgcaccgcattcgcaggtttatatcagtggtcctcaaccctgttgcccatgagaagattctacttcattgatctgaggt

SEQ ID NO: 952241 - DNA, 120 bp, Artificial Sequence
  ENSG00000267604_3 (sequence is synthesized)
gaaccgtgcacactggcattttcttaaaattccccaaggattataatgtaaaaccaggattgagaacttctggttgggggaaggtctccctgtgaataaatcacaaacggctggcgacaa

SEQ ID NO: 952242 - DNA, 120 bp, Artificial Sequence
  ENSG00000267607_0 (sequence is synthesized)
tgcgtatccacgtccctcaatatgtccgtgggaccctcccctccccaccattcgtggtctcactccagcgtggtaagttattttggagatgagttctcgctccacagttgtttggcctcc

SEQ ID NO: 952243 - DNA, 120 bp, Artificial Sequence
  ENSG00000267607_1 (sequence is synthesized)
aggaaagcacagggtctgaaggtggggctgggataggaaacttaacatccaatcagagctgccgcgtggtggcggcggcgccaatcaggaaagccataccatgaaccccaccccgcccct

SEQ ID NO: 952244 - DNA, 120 bp, Artificial Sequence
  ENSG00000267607_2 (sequence is synthesized)
gcccgtggctctccccggcccgcgctgatcccactcgataaggccagcagaaggagaggtttctgtgacacccgctggggatacacagagtctggggcttcgggaccccaggtgggccct

SEQ ID NO: 952245 - DNA, 120 bp, Artificial Sequence
  ENSG00000267607_3 (sequence is synthesized)
gagtgaggaaacctcaggtgccctcagggagacaaggaacttggagaaagtgatcgcaaaaacaacaacaacaacaaaaacaaaccagttcctccgaagaagggcagtaatgcggaccct

SEQ ID NO: 952246 - DNA, 120 bp, Artificial Sequence
  ENSG00000267607_4 (sequence is synthesized)
taggtcacaggacagaggctggttaaggaagcctttattgattccagagggttcccccgccaatatttatttttatttttattttatttttggagacagggtcgtgctctgtcccccagg

SEQ ID NO: 952247 - DNA, 120 bp, Artificial Sequence
  ENSG00000267607_5 (sequence is synthesized)
ctggagtgcagtggcacgatcaaggctcactgcaacctcgactttcagggctcaaaggatcctcccaactcagcctcccgggtagctgggaccacaggtgcgggccaccacaccaggcta

SEQ ID NO: 952248 - DNA, 67 bp, Artificial Sequence
  ENSG00000267607_6 (sequence is synthesized)
ggtagctgggaccacaggtgcgggccaccacaccaggctaatttgtgtattttttgcatagacctcc

SEQ ID NO: 952249 - DNA, 120 bp, Artificial Sequence
  ENSG00000267607_7 (sequence is synthesized)
caccatgtatggccatttccccagattgtttcatattcctctttttctcgctcagccggcatagaacatccccctttacgcctgggacttcatagctaggcacttgcataggtacgcagc

SEQ ID NO: 952250 - DNA, 120 bp, Artificial Sequence
  ENSG00000267607_8 (sequence is synthesized)
gcccacagtgaggaggatccctacaagggcagcgatggaaccggaggccaaagctgtgggcgcggggctccaagctgggagcagaaggcgagaattaggaacggaacacagggaggtctg

SEQ ID NO: 952251 - DNA, 120 bp, Artificial Sequence
  ENSG00000267607_9 (sequence is synthesized)
tcgacccgcgtggagctcacgcttggtctgtgcgccctctcggggtcataactctctctgcccccttcctcctagtccccagggttacaggggtgcctcaccgagcatcagtgtaatggg

SEQ ID NO: 952252 - DNA, 120 bp, Artificial Sequence
  ENSG00000267607_10 (sequence is synthesized)
tgccgagctgttgcggaccaccaggccgtcgagattgaggcgcgcgtggcagatcacgggctgccagaagtcgcggggtccagcagcaaactcgtaggtcaaggtcacgttggccagatc

SEQ ID NO: 952253 - DNA, 120 bp, Artificial Sequence
  ENSG00000267607_11 (sequence is synthesized)
caggccggtgaagcgctccaggctttcggaatagatgacccggcttccatgcctcagggtcaccaccaagtagcccaccgggaacacctgcgtcacgtggcagcgcaaagtgtatttcct

SEQ ID NO: 952254 - DNA, 120 bp, Artificial Sequence
  ENSG00000267607_12 (sequence is synthesized)
gccctttaagaccggaggctccaaaatcacgctgtggggcggttctaaggcaagggggagcctctgagtgaggtccgcgggcgctccctatagagcgactgtcaactacccttcccccac

SEQ ID NO: 952255 - DNA, 120 bp, Artificial Sequence
  ENSG00000267607_13 (sequence is synthesized)
ggtcacgaggcagtgcgcgagggagctccaggccctcacgtcgagcagctggtaagacacccaacccggccctctgagcgtcttgccttgccgcagcggggtgcggaggctggaattctg

SEQ ID NO: 952256 - DNA, 120 bp, Artificial Sequence
  ENSG00000267607_14 (sequence is synthesized)
cggctggggacagctgttgctgcaattgagctgcactgacttccccggctgcacagccacgaactccgggctcatgcgcacccagaagggcactgaggtcccggagggcgcgagagggct

SEQ ID NO: 952257 - DNA, 120 bp, Artificial Sequence
  ENSG00000267607_15 (sequence is synthesized)
acccttggggctttgcgcccgcttagtccggcgtcccagcgcgctcccaactcccgggtaggcggccgccaaaaaaaacagcagcgacagagggaacagagaccccatggcaaaaagccc

SEQ ID NO: 952258 - DNA, 120 bp, Artificial Sequence
  ENSG00000267607_16 (sequence is synthesized)
ggactaaggggccccgcgccagagagccagggccggctctagagataaggaggcccgcagccccgcctcctcgactccaccctggagaggaaggggaggccccaacagagggcccgggag

SEQ ID NO: 952259 - DNA, 120 bp, Artificial Sequence
  ENSG00000267607_17 (sequence is synthesized)
tactgcaaaaagggattccgctccccaggtcaagaataagattccaggcctcattagaaaccaaatgtttttttctggagaggagtctttagttttcactagagacccagaaggtcatag

SEQ ID NO: 952260 - DNA, 120 bp, Artificial Sequence
  ENSG00000267607_18 (sequence is synthesized)
aaagtccgatttggaccagaacctcagggtatggccatcaacccacaatgttttcttgggggaggaagtgggaggatcaggctgtggctgcttagaaaggactccagctggatgtgacac

SEQ ID NO: 952261 - DNA, 120 bp, Artificial Sequence
  ENSG00000267607_19 (sequence is synthesized)
ctcccctcaactcacacaaggctgaggcagttgagaaagctttattaactaacacaaaggaagtctgggcaatgttgcgagaccccgtctctggaaaaaaaaaaaaaatcaaatttgcca

SEQ ID NO: 952262 - DNA, 64 bp, Artificial Sequence
  ENSG00000267607_20 (sequence is synthesized)
gaccccgtctctggaaaaaaaaaaaaaatcaaatttgccaggtgtggtgttgtgaggtcaagac

SEQ ID NO: 952263 - DNA, 120 bp, Artificial Sequence
  ENSG00000267607_21 (sequence is synthesized)
tgacagagcgagagcttgtctacacatacacacacacacacacgcggatgaggcttccaaagctgggagggagtcctccaataccttggcccccttccccactgcttgcaggaccctgat

SEQ ID NO: 952264 - DNA, 120 bp, Artificial Sequence
  ENSG00000267607_22 (sequence is synthesized)
cactgcaggaaactggagctgcatagtgcaagctcccagtgaaatgcaaacaggacaagaggacaaggcatagcttgggcatattccctgggcactcatgtccagacatgaccgctgagt

SEQ ID NO: 952265 - DNA, 120 bp, Artificial Sequence
  ENSG00000267607_23 (sequence is synthesized)
gtcattgtgaacactggcagaaatgtatgtgggtggggaggtggctaacaaaggtgtcagttttggggggaagggaggaataaggcctcactgggtaatctctgaacctgtaaccattac

SEQ ID NO: 952266 - DNA, 120 bp, Artificial Sequence
  ENSG00000267607_24 (sequence is synthesized)
cagtccatatagtgcttttgtgccgatagaaaaatcactccttctggggaaaggcaggttggccaatgagaagtcccagccccatttgatctttttgccaggcactctcctgcagtgtac

SEQ ID NO: 952267 - DNA, 120 bp, Artificial Sequence
  ENSG00000267607_25 (sequence is synthesized)
aacctgtacaactgtacctggtgaccttgaatgtgattaggactgggagctccgtgaggccagagacctatgttcatttagcctacataaaagacactcaataaatagctggtaaaataa

SEQ ID NO: 952268 - DNA, 120 bp, Artificial Sequence
  ENSG00000267606_0 (sequence is synthesized)
aaccagctggggacttttctcagatcttcactgtgagaacctgctagagtccttggagataaaactcacgaaagtgtaaagatagctctatggcaaggtcttcttggagtttttaattct

SEQ ID NO: 952269 - DNA, 120 bp, Artificial Sequence
  ENSG00000267606_1 (sequence is synthesized)
cagacttaaccacattcagcttccagcaattcatcaattagagttcaggttttcctaaccttgttctggttcctgcagaggcacaaagattactgcttgtgagtttctgctctggaatgg

SEQ ID NO: 952270 - DNA, 120 bp, Artificial Sequence
  ENSG00000267606_2 (sequence is synthesized)
gtgtacagcacgatgatgtgtatgcccatgtaaccatcacctagaaggatgagaaccacaagcatgagaacatgaggataaatacactttggggaaaaagaaaacagacagaggcagcag

SEQ ID NO: 952271 - DNA, 120 bp, Artificial Sequence
  ENSG00000267606_3 (sequence is synthesized)
agaaggaagacgagaagaagagaaaaagagaagtaggaagaggatgaattcatttcgcttatctggcaaatgtgtaatctgagtaatagagggaacaacagattggacccaactaggatc

SEQ ID NO: 952272 - DNA, 120 bp, Artificial Sequence
  ENSG00000267606_4 (sequence is synthesized)
tcccttggagtggatcagactgatgatttccactatccaaaagcttcctgaataaaaaagaagaaggtgtcacctacttcaatgtgacattgaccccaccactacatcttaaagaccctg

SEQ ID NO: 952273 - DNA, 120 bp, Artificial Sequence
  ENSG00000267606_5 (sequence is synthesized)
aagcggttgccttctgagggctgaagcgtatatcagtaccaggttcagacttcgtgggaggctttaagagggggggaagggcctatgataatacattggcgtggacatgtgcgtcttaag

SEQ ID NO: 952274 - DNA, 120 bp, Artificial Sequence
  ENSG00000267606_6 (sequence is synthesized)
tttgggaaagtgttatgagaggtggttgggaccaccgagcgtctgctttggtgtatctgatggccccattctccgtgagaaacagcatctcactctattgccaacactgaagtgcagtgg

SEQ ID NO: 952275 - DNA, 120 bp, Artificial Sequence
  ENSG00000267601_0 (sequence is synthesized)
ggacccacgtctccctccagacccacaaccatgtctaaaaggagaaggggggagcagaatcatattaatttggacccatgggatgagtgttttattcatgctgtttccaggaagggatgt

SEQ ID NO: 952276 - DNA, 120 bp, Artificial Sequence
  ENSG00000267601_1 (sequence is synthesized)
ggaccagtcgaaacccttggaggctttttttgcagttggccacaggggcgttggaggcctgcttatgggtcctcgatgtcgagaaactcctgcttggggggcgccgcgccgcggtaccac

SEQ ID NO: 952277 - DNA, 120 bp, Artificial Sequence
  ENSG00000267601_2 (sequence is synthesized)
gcacaggagccgtcacttctcttgatgcaggcgaagaacttggcctggtgcccgttgatgttcttctctgtgacccagtccatccagaggcactcgtccggggaggagatgtagcacggg

SEQ ID NO: 952278 - DNA, 88 bp, Artificial Sequence
  ENSG00000267603_0 (sequence is synthesized)
tgctgaagcaagaaactttaagcctgtgagtagagtctcactctgccacccaggttgaagtgctgtgatgcgatcatagctcactgta

SEQ ID NO: 952279 - DNA, 120 bp, Artificial Sequence
  ENSG00000267603_1 (sequence is synthesized)
tttcttgtcttttcaaagagagccacacaggaaggaaaacaagaaattcaacttttaagctgggctattcatggcctttgctaaatcctggcagaatttcacagttcttcattacaattc

SEQ ID NO: 952280 - DNA, 120 bp, Artificial Sequence
  ENSG00000267603_2 (sequence is synthesized)
atctcactgatttcctaatgcaatgaactggccttttcattaaggccatagggaatgaagctgagttacccaatcattaagtgttgttatctgatgagtgaaaaatggattacttttcga

SEQ ID NO: 952281 - DNA, 120 bp, Artificial Sequence
  ENSG00000267603_3 (sequence is synthesized)
gatatcagaccaagattctgataaaaggggataacagagattaaccggagcagaaaaagtacttttctgagccagagataacaagagaaacttaaagaaagtgctgaagcaagaaacttt

SEQ ID NO: 952282 - DNA, 120 bp, Artificial Sequence
  ENSG00000267603_4 (sequence is synthesized)
gctttctgctctgtgagcaggcaaagaaaaattggtgggctcaggaatcagaaatgcagggccaacagtcctgtttctcactttcgataaaggccaacattttacctgctcaagaacact

SEQ ID NO: 952283 - DNA, 120 bp, Artificial Sequence
  ENSG00000267603_5 (sequence is synthesized)
ctattcctttaaccaacgggagtgttatttaattagttccttcgtttttcagctaaagcagacacatgcgcacatcacacacacatgcatgcgctgtggtgttttttcttctatcacccc

SEQ ID NO: 952284 - DNA, 120 bp, Artificial Sequence
  ENSG00000267603_6 (sequence is synthesized)
tccctccacagagatatcaatttgcataagaggagaaaataaattcatttaaaccccattctaaattcagtattagaaatgtaatgatctctaacactgacctttttaaaatactttgtg

SEQ ID NO: 952285 - DNA, 120 bp, Artificial Sequence
  ENSG00000267603_7 (sequence is synthesized)
gataaaccattgattttatttgttctaaatttactttaaaagacctgttttgtaaatcactaaaacacatgtattttatttacctgtttgggataatattaaacataatctttgagggta

SEQ ID NO: 952286 - DNA, 120 bp, Artificial Sequence
  ENSG00000258763_0 (sequence is synthesized)
tgtttacctcttcttttgcagatggcttgatatagatgaagatgcagctgccataagtgatggaaaccacagtaatatgtgaagaacagttgttcatgtattctagaggaaaagaaagga

SEQ ID NO: 952287 - DNA, 120 bp, Artificial Sequence
  ENSG00000258763_1 (sequence is synthesized)
atatcattatatactgcttatgggattctgtgctgcggagatcattacggaagcaacagtagcaggtggcctggccatacagggattccttactcgcagcagagaatgttgctgccactc

SEQ ID NO: 952288 - DNA, 120 bp, Artificial Sequence
  ENSG00000258763_2 (sequence is synthesized)
acatcatctaacaacacacatactcaaaacagggaaatgtgcattttcgggagaggaagagacaaaccttttgtttagctaactggcatgacagagtgtgacatacatgtgctcctggaa

SEQ ID NO: 952289 - DNA, 120 bp, Artificial Sequence
  ENSG00000258763_3 (sequence is synthesized)
gaacggtgttgggtgtctgcactcaaaatcttgagcataggcaactggatgaagggctctgtggcattgattttcattgtgtgtgtgttaatatttacatttataattaaataaataatc

SEQ ID NO: 952290 - DNA, 89 bp, Artificial Sequence
  ENSG00000188280_0 (sequence is synthesized)
aatacaagaagatatgctgtgcacaccaaccagtgtaggagacctcatggctcccgggtaaagaagaagaggtacccacaagtcttgaa

SEQ ID NO: 952291 - DNA, 71 bp, Artificial Sequence
  ENSG00000188280_1 (sequence is synthesized)
gagggtggtgcaggtggcccctctgaggcatgaatctactccctatgaggacactgtacacgacatcgcta

SEQ ID NO: 952292 - DNA, 120 bp, Artificial Sequence
  ENSG00000188280_2 (sequence is synthesized)
aagaagccttccaaaaagcgtgtgaaaaggaagccctactctactaccaaggtgacttcagggagcacattcaatgagaatacaagaagatatgctgtgcacaccaaccagtgtaggaga

SEQ ID NO: 952293 - DNA, 120 bp, Artificial Sequence
  ENSG00000188280_3 (sequence is synthesized)
ttatccccactgctcaggtggagaaactgaagggccaagggagtggccccagctcccgagttcctgaatgaaaaagtgaaaacacgaacccaggagtgtgggccagtgctgacgctgaca

SEQ ID NO: 952294 - DNA, 120 bp, Artificial Sequence
  ENSG00000188280_4 (sequence is synthesized)
agtgctgacgctgacatggcacttagtcatggggtgttcaccaccacacagggagtccaacattcatgtataagccctaaagcaccgagcccaaaaggccccagacactgcccatcatca

SEQ ID NO: 952295 - DNA, 120 bp, Artificial Sequence
  ENSG00000188280_5 (sequence is synthesized)
gcccaaaaggccccagacactgcccatcatcataaagtgggctccgtggtcacacaacccaaggcagttataggctcatctccccacagacaggcatagtcatcagtgtgtcaaaagcac

SEQ ID NO: 952296 - DNA, 120 bp, Artificial Sequence
  ENSG00000188280_6 (sequence is synthesized)
ttaacttttaagttcaggggtacatgggcaggatgtgcaggtttgctacatatataaatgtgtgtcatgagagtttgttgtacagattattgcatcacccatatattgagcctaatatca

SEQ ID NO: 952297 - DNA, 76 bp, Artificial Sequence
  ENSG00000188280_7 (sequence is synthesized)
taaaacacgtgtaaatctcatacatacaacaggcaaatgcagaagcagtgtggtctcgcaagttgtaaagaggaca

SEQ ID NO: 952298 - DNA, 120 bp, Artificial Sequence
  ENSG00000188280_8 (sequence is synthesized)
ctgggtagaagacatgagggaactctgtcactgaatcacggcagagttcaaggccacttgcagactatttcatgttatagaaggtggcctttagctactaagcaaaggcctctgtttctc

SEQ ID NO: 952299 - DNA, 120 bp, Artificial Sequence
  ENSG00000188280_9 (sequence is synthesized)
atttctttcctgttcatcttcttcgtcatccttcttccgcaagggaaacgagcccaagcaaaagacagtttcaatattaatttgaccgaggttttgtgcagttaattatcatccaggtaa

SEQ ID NO: 952300 - DNA, 120 bp, Artificial Sequence
  ENSG00000188280_10 (sequence is synthesized)
aggttttgtgcagttaattatcatccaggtaatcaggtgcaacccagtctgcctagcagcccccctatctctgctctgtgttttcatttaataaacattttggtctacttactatgtgct

SEQ ID NO: 952301 - DNA, 77 bp, Artificial Sequence
  ENSG00000188280_11 (sequence is synthesized)
tcgagaccaagtaaatgagatagaatctttatgttggcagctaagttagatttaattttgtatgtgtgaatgcatac

SEQ ID NO: 952302 - DNA, 120 bp, Artificial Sequence
  ENSG00000235954_0 (sequence is synthesized)
gagcgtgcggcttctactgcggctgcgcaagctcgacgcgcgcactcttgtctgcttacgagggctcctcccttcagctttggtccctcggggcgtctgggcagcctacgctttccgcat

SEQ ID NO: 952303 - DNA, 120 bp, Artificial Sequence
  ENSG00000235954_1 (sequence is synthesized)
gacccatctgcctggcaccagcacctggggctgccaggcagccacccctgcagctgtgttgacaggacctggcagagggactgacccacctttggaaaatgacaccagcaatatcaggat

SEQ ID NO: 952304 - DNA, 120 bp, Artificial Sequence
  ENSG00000235954_2 (sequence is synthesized)
gtgtcaactggatttatgctaagaaaataggatttttggtgttcctctgtttcccaaagtttgagacactttcagacactctgctttgcggttgtggccgatgttacccatgggtgggac

SEQ ID NO: 952305 - DNA, 120 bp, Artificial Sequence
  ENSG00000235954_3 (sequence is synthesized)
ttttgctttgctctagatttttgtaacaccctggggagtttcaggggccaatgctgagagaagaccacaggctgacacatcatgaggtatgttggtaaaacagtcccggctggccgagag

SEQ ID NO: 952306 - DNA, 120 bp, Artificial Sequence
  ENSG00000235954_4 (sequence is synthesized)
gccactgagggaacaggcccagggtttggtttgtactctgtgagtcttggcctggcagggtttcctgcaaagcagagtcctctgagtgggaccccaggggaagcaggttgttgcctggag

SEQ ID NO: 952307 - DNA, 120 bp, Artificial Sequence
  ENSG00000235954_5 (sequence is synthesized)
ctgaggggcagctctgtattcaggaggggtgcctgccttcccatctcccctgtgaccagatgtcacagaaacattctctctttactccctagaccctctgggcaggtccactaagagcat

SEQ ID NO: 952308 - DNA, 120 bp, Artificial Sequence
  ENSG00000235954_6 (sequence is synthesized)
gtattctagaacatgcagggcttgaagcttcacaagatattcagtgcactccttacagatcctgtcaaatgtggaccgggtggtgtcatcgcaccaccatcatccccttgttacccctga

SEQ ID NO: 952309 - DNA, 120 bp, Artificial Sequence
  ENSG00000235954_7 (sequence is synthesized)
gaacacagcttcagagagggtaagtaacctatctcaggccacacagccaggacatggagtagatccatcctaagtctttctaccacacactcctttctacagtcatgggttaaatgaggg

SEQ ID NO: 952310 - DNA, 120 bp, Artificial Sequence
  ENSG00000235954_8 (sequence is synthesized)
tgccatggaatgggtcatccagtgtacactgacatcaggaggagtttcacattcatacactcatggcaaatggttctgttgctccctggtccaaagatgatcttaatagtaggaaaaact

SEQ ID NO: 952311 - DNA, 120 bp, Artificial Sequence
  ENSG00000235954_9 (sequence is synthesized)
catttggcagaagcaagactcagcacacaggctctctccctgagtcttctgtggctggccttgccctgccctcccctccccaaccccactggcagaataaagtcggggggctgtgaggac

SEQ ID NO: 952312 - DNA, 120 bp, Artificial Sequence
  ENSG00000235954_10 (sequence is synthesized)
tgagccccaggccttgacaggcacccgcagccagccgaactcccacctgcccagttggaggggtgcgagaaggccttgctgctctgcaccaccttcatggcctcccccagggcggcgctg

SEQ ID NO: 952313 - DNA, 120 bp, Artificial Sequence
  ENSG00000235954_11 (sequence is synthesized)
gctttcaggccgttcagcagggatgagtagaaggcatggatgaacatcttagaagcagccactggcacaggccacagagacacgaggacacactgagcgccggcagccaggaaggccctt

SEQ ID NO: 952314 - DNA, 120 bp, Artificial Sequence
  ENSG00000235954_12 (sequence is synthesized)
gtcagcgcgatgaccccgtcggctgtgactttgctgttggactcctgggaggagccaagcaccaccagcttcacaggcagctgcaggtccaggacgtcggcggcagtgcctaacttactg

SEQ ID NO: 952315 - DNA, 120 bp, Artificial Sequence
  ENSG00000235954_13 (sequence is synthesized)
agaatcatgcctgctgtgatgagcccttggaaaccatcaggactggatggtaggggtcctgagaggattgggggaggaggccttgatatgacagagtggacagaggccgtggaacccagg

SEQ ID NO: 952316 - DNA, 120 bp, Artificial Sequence
  ENSG00000235954_14 (sequence is synthesized)
acagccagcctgctccacaatcctcatccccacagaccttcatgtgtggctcctaaataagaggaaacccactcctgataagtcaggggctttgaaaagtgattttgtttaaatggtgca

SEQ ID NO: 952317 - DNA, 120 bp, Artificial Sequence
  ENSG00000235954_15 (sequence is synthesized)
aacaagcaagccaatcttggggagacagggctaaacttaagtcctttaagaagctctacatactgacaagattctagttcccttccaccttatatgctgcaaagtaaaaagtatcactga

SEQ ID NO: 952318 - DNA, 120 bp, Artificial Sequence
  ENSG00000235954_16 (sequence is synthesized)
atgagaaaatcagcataaagaagcccaataatgtctgcctgagtttcccctatgatgacttttggtactttttgggaaacattaagtatgaagttatttcaaaataattttttggtgcct

SEQ ID NO: 952319 - DNA, 120 bp, Artificial Sequence
  ENSG00000235954_17 (sequence is synthesized)
ctgcttggtgatgccttaaactctgggtaagagaaacaccaggtgcctgtcaggagatggccttttccaggtttctggttaagctacaaacagctaactggctgctgtcatcaaaataaa

SEQ ID NO: 952320 - DNA, 120 bp, Artificial Sequence
  ENSG00000235954_18 (sequence is synthesized)
agctttctgaaggtggaggcatctgatacccagagtgctgctatcagccggcacggtgggccgctgggtggcaggagcgtcgagaaggccagctcgcttcctatctgggattcagaatca

SEQ ID NO: 952321 - DNA, 120 bp, Artificial Sequence
  ENSG00000235954_19 (sequence is synthesized)
agaaaataacttctttcactttgaactgattctttgcttcataagaaaagtattatccagccacaaaaatggtcaaaattcagatctacaaaagcctgtcaggcagaaactgaccccact

SEQ ID NO: 952322 - DNA, 120 bp, Artificial Sequence
  ENSG00000235954_20 (sequence is synthesized)
taggccacgccaatgagcaagtcatcaaagcagccaagacaggtcctgtgggggccacccatgcacagggcccagcctcgggtcctaaccccgcctatgctttccgccaccataaagagg

SEQ ID NO: 952323 - DNA, 120 bp, Artificial Sequence
  ENSG00000235954_21 (sequence is synthesized)
cccatctgggtaagacctgtcccgcctgctgtggggtattagggcagatggggtctgaggggtctgagggctctgagagcagctggcagctcaaggacatccggagttggaggatggagc

SEQ ID NO: 952324 - DNA, 120 bp, Artificial Sequence
  ENSG00000235954_22 (sequence is synthesized)
aatgcaggcccttgtggtaaagacagtcctgcagccgcgcaggcagggatgctgcaagtggagtgccaggcgggtgcggagccctgtgggactgtggaggggtcagagggaagccaggat

SEQ ID NO: 952325 - DNA, 120 bp, Artificial Sequence
  ENSG00000235954_23 (sequence is synthesized)
tttggggtctctgagagtttggagaaggggaagaagattaaagcttgtttcaaaagtttctaatcaggtgggcagggccaagggtggctgtggggtgagacccatgactcagggtggccc

SEQ ID NO: 952326 - DNA, 120 bp, Artificial Sequence
  ENSG00000235954_24 (sequence is synthesized)
actgttactctattgatttttgggcgtttttttccaaattgattattcttgctgaatgagacctgagtccttgactgtccccttaaagccacctgacttgttttcagttccactggcctg

SEQ ID NO: 952327 - DNA, 120 bp, Artificial Sequence
  ENSG00000235954_25 (sequence is synthesized)
tcgggctgttttctactcaactccactcttgcttgtctgccctccctgcctggggcccagccagcagtcagctcaagggccagatgaattgggtggctgtgctctgcccactgggcatcg

SEQ ID NO: 952328 - DNA, 120 bp, Artificial Sequence
  ENSG00000235954_26 (sequence is synthesized)
tgtggatggtgggtgaccagccccctcaggtgctcagccaggcctcaagccttgctgtgtacctcagagcagctccgtaccctgatgtcacagcaaagaaacttagacatgacacaaact

SEQ ID NO: 952329 - DNA, 120 bp, Artificial Sequence
  ENSG00000235954_27 (sequence is synthesized)
gtggcttcccaaggcagcaaagaatggccaggggtcatgagggccgtgccccacttttggacagacctactctaaagtcacgctacctgcgtgcaaatcataaaatcaacacttttgagg

SEQ ID NO: 952330 - DNA, 120 bp, Artificial Sequence
  ENSG00000235954_28 (sequence is synthesized)
agatcacagctatgccttcgtaacacagcccagtccgaccagatagacggtgcctcgtgacccgaaaacaagcccccggccccccaccatgtgtgtgagccttaccttggactgcacgct

SEQ ID NO: 952331 - DNA, 120 bp, Artificial Sequence
  ENSG00000235954_29 (sequence is synthesized)
gagggagcggatggaagggacagcaaggaggccgaagcgctcgtagaggtactcattggaggagcttcccttcaggagggcgaaaggaatgaggtagagctccccctccagaaccaggat

SEQ ID NO: 952332 - DNA, 120 bp, Artificial Sequence
  ENSG00000235954_30 (sequence is synthesized)
gagctgccggtgccggcccacggggccgctggagtgcatcaggccctatggagcaagcacggagaggctgacatgggtggcccagcaggcaggggtttcaggcaccaggacaaccctgag

SEQ ID NO: 952333 - DNA, 120 bp, Artificial Sequence
  ENSG00000235954_31 (sequence is synthesized)
ccctagcctggatgacacaagcacgagcaggtgaggcctgtgggggtgtggggcgccatggggcatgggccgagttgcagccctgcaggagcggcaccaactggcatgctcgcttgtgga

SEQ ID NO: 952334 - DNA, 120 bp, Artificial Sequence
  ENSG00000235954_32 (sequence is synthesized)
ctggcaagggctggcctggcagcatccatctgcctcacagtcctgagaaggttagaggacagtttcttgaagttcacaagaacctgaagtgggttggagaccggtctgtaccgcacaggc

SEQ ID NO: 952335 - DNA, 120 bp, Artificial Sequence
  ENSG00000235954_33 (sequence is synthesized)
accctgagaaggggtgggaatggcccctctcaaaacaagatctgttttccatttcaatggacaagaggctagaaaatcacagtgaggacgggaggtctgggggctggcatgacagcccct

SEQ ID NO: 952336 - DNA, 120 bp, Artificial Sequence
  ENSG00000235954_34 (sequence is synthesized)
gtagaaggggatgggctgggttctaggatcttccgtgacctcctctgagaaagagtggccccttggctctgggcttgggaggtgccgtccccacttgttccctctggggatgtcagggga

SEQ ID NO: 952337 - DNA, 120 bp, Artificial Sequence
  ENSG00000235954_35 (sequence is synthesized)
cccaatgcatggatgactcccatccctcttgaaaggccgagcatgaggactcgaggcagggtgtgcacagggccacagcggacacagcctcattcctgttcattgcagaacaaggctaag

SEQ ID NO: 952338 - DNA, 120 bp, Artificial Sequence
  ENSG00000235954_36 (sequence is synthesized)
ggcgcgggcatcttaatgagagcagcaggcaacaatcctggaagctgggtccacacagactgcggtgaacaaagaggtggcgtggaagctgctgctgcagcccagagcctgccaagaagg

SEQ ID NO: 952339 - DNA, 120 bp, Artificial Sequence
  ENSG00000235954_37 (sequence is synthesized)
tcccaggtccacagggcctgcgcaacactgggtgccaggggtggggctggcctgccccccaaccccatctgctgaggagtggctgacaagcggacacccaccagggtgccactcgcttgt

SEQ ID NO: 952340 - DNA, 120 bp, Artificial Sequence
  ENSG00000235954_38 (sequence is synthesized)
gcctggggaagcaaatgtgctcgcttgacccgtctgatgtgctgccgtgggcacttgactgagagtggcagagcactaggctaacccaaagtgacacatgcctggcgggatgttcagtct

SEQ ID NO: 952341 - DNA, 120 bp, Artificial Sequence
  ENSG00000235954_39 (sequence is synthesized)
ccttcagctttggtccctcggggcgtctgggcagcctacgctttccggataaaaatggcagaatgaaagaattatgagtggaactagagaataggaaagacatgaaccaacgcccaaaat

SEQ ID NO: 952342 - DNA, 120 bp, Artificial Sequence
  ENSG00000235954_40 (sequence is synthesized)
gagaaagaaggacatataaagaaaaagacaaatacaagtgaaaaaaatagactaatggattaacgtccctgtcgtgtgacattttctgactggaatcagccattttaccaagaaagttgg

SEQ ID NO: 952343 - DNA, 120 bp, Artificial Sequence
  ENSG00000235954_41 (sequence is synthesized)
gtttcttttactggcaaatagtacttcaagagcacagtcttatgtaagggagctgtaccaagttattttgggtcagaattctcctgggatatcttttttcttcgcctttttaaactcgtt

SEQ ID NO: 952344 - DNA, 120 bp, Artificial Sequence
  ENSG00000235954_42 (sequence is synthesized)
tattataaaaacaatgttaccatatgcaaaactagaagagtgtaatgaattcccgtgtgtccatcatctatctttaacagaagtacagtctatataaagactgtccaggacaaaaactgg

SEQ ID NO: 952345 - DNA, 120 bp, Artificial Sequence
  ENSG00000235954_43 (sequence is synthesized)
aagggcaaagacaatgccttcatgcatgttcagtgtctgcccccgtgggctttgaaatgatcgctgacaatgggggatctgcagtgacttctctgcctctgccaaagcccaggggtgctg

SEQ ID NO: 952346 - DNA, 120 bp, Artificial Sequence
  ENSG00000235954_44 (sequence is synthesized)
ctccctaattctaaggattctaatgagactcagagcaggtgtaacacagggcatggagcttcctgagcaagaggctggctaacaaactgtggacgtggtacttagacacattaagagaca

SEQ ID NO: 952347 - DNA, 120 bp, Artificial Sequence
  ENSG00000235954_45 (sequence is synthesized)
acgtggtacttagacacattaagagacattacagggacacctgcaagtatgtctccctggggagaagccaagtgcagatgctatggccacagatgatatggtttggctctgtgtccccac

SEQ ID NO: 952348 - DNA, 120 bp, Artificial Sequence
  ENSG00000235954_46 (sequence is synthesized)
ggatgtcgagggagggacctggtgggaggtgattggattggttcgcatgatagtgagggagttctcacgagatctggttgtttgataagtgtctggcatttctcctgtgctgtctctcct

SEQ ID NO: 952349 - DNA, 74 bp, Artificial Sequence
  ENSG00000235954_47 (sequence is synthesized)
gccaccttgtgaagaaggtgcctgcttctaatgcagaactgtgagtcaattaaacttcctttctttataaatta

SEQ ID NO: 952350 - DNA, 120 bp, Artificial Sequence
  ENSG00000235954_48 (sequence is synthesized)
caggaggaagtgtgtactcacaccagccaggaggaaacaagcctgcctgggaggacagacgatcagccctggctgtccctcaggagcggggggcctccaaggcacactgcccactgggtc

SEQ ID NO: 952351 - DNA, 120 bp, Artificial Sequence
  ENSG00000235954_49 (sequence is synthesized)
tagtcaagcacccagcttcaccctggggttggccgcacagcttcatcggggccacagctgctgatgacaatggcagtagtggccagtgtctgccggcacgacctcccatcatcccgggaa

SEQ ID NO: 952352 - DNA, 120 bp, Artificial Sequence
  ENSG00000235954_50 (sequence is synthesized)
ggggcagcgccagtggggcgcagatgcctgccatcacagatggaaacagcaggtaaatggcacttgtttcctccaggtgtggagatgcttgtatctgggaccccctgccatttctcagga

SEQ ID NO: 952353 - DNA, 120 bp, Artificial Sequence
  ENSG00000235954_51 (sequence is synthesized)
caccctcctgctcctagctgggagatccagcatcctcatgaatgcggggcccaaggccaccaactgttccacctgctgtcagccaggcctgttgccccagccctacacccacagctcacc

SEQ ID NO: 952354 - DNA, 120 bp, Artificial Sequence
  ENSG00000235954_52 (sequence is synthesized)
ccactggttggggggtccagccggaagcccacagcggtgaggagggcctgccagccagggatgccgcccactttgttctccacactctgctgggatgtgtacatggcattgcgctgccca

SEQ ID NO: 952355 - DNA, 120 bp, Artificial Sequence
  ENSG00000235954_53 (sequence is synthesized)
aagctcgacgcgcgcactcttgtctgcttacgagggctcctcccttcagctttggtccctcggggcgtctgggcagcctacgctttccgactatggaaatgatattagacaaaaagcaac

SEQ ID NO: 952356 - DNA, 120 bp, Artificial Sequence
  ENSG00000235954_54 (sequence is synthesized)
ttcaagtggttttcttatttgagttcaaaatgggtcataacgcagcagagataacttgaaacatgaacagcgcatttggcccaggaactactaacgaacatacagggcagctgtgattca

SEQ ID NO: 952357 - DNA, 120 bp, Artificial Sequence
  ENSG00000235954_55 (sequence is synthesized)
gcttccacaccagcaggatgcagaaaaatgctttccaagagtttgttgaatccagaagcatggatgtttatgctgcaggaataaacaaatttatttctcgttggcaaaaaagtgttgatt

SEQ ID NO: 952358 - DNA, 120 bp, Artificial Sequence
  ENSG00000235954_56 (sequence is synthesized)
gagcctagttataatgatttaaaattaatggtccaaaaatgcaattacttttgcaccaccaccaacacacacacacacctacacattctggatttgaattccatgttgattatatgcact

SEQ ID NO: 952359 - DNA, 120 bp, Artificial Sequence
  ENSG00000235954_57 (sequence is synthesized)
attctggatttgaattccatgttgattatatgcacttggaatatttcttttccatctgtggattgttctgtcacttattttctttaataaatgggtttctgaacctctgttgtattgaca

SEQ ID NO: 952360 - DNA, 120 bp, Artificial Sequence
  ENSG00000235954_58 (sequence is synthesized)
gtgccccaccccgggcacacgaggcctccactgcggttgcgcagcctgccgaagagcgtgcggcttctactgcggctgcgcaagctcgacgcgcgcactcttgtctgcttacgagggctc

SEQ ID NO: 952361 - DNA, 120 bp, Artificial Sequence
  ENSG00000235954_59 (sequence is synthesized)
gcgcactcttgtctgcttacgagggctcctcccttcagctttggtccctcggggcgtctgggcagcctacgctttccggtgagttttccagttggttctttggaagccgttttgcggtga

SEQ ID NO: 952362 - DNA, 120 bp, Artificial Sequence
  ENSG00000235954_60 (sequence is synthesized)
ctggttttctgctctctctcactgctccgagtcagggcccacctccttgaccgacacctcacctccatagtccacataaaagactcctgacaggttctggaggcagccgacgccagcttc

SEQ ID NO: 952363 - DNA, 120 bp, Artificial Sequence
  ENSG00000235954_61 (sequence is synthesized)
tgttcccctccccagcccttggcagctcaggttccgcgggaggacgttcacctgcttcgcggtctcgtggaggtccaccgcggcggagaatcctaaacctcacctgtgactcggcaggat

SEQ ID NO: 952364 - DNA, 120 bp, Artificial Sequence
  ENSG00000235954_62 (sequence is synthesized)
gagcggccagcactcccgacggaggccctctgggagaaaagaggcccttggcctcgagacccaggaaagcgggctgttcaggagttggttcgcgcagttacaccgaaagcgccgtgggcc

SEQ ID NO: 952365 - DNA, 120 bp, Artificial Sequence
  ENSG00000235954_63 (sequence is synthesized)
tttttttcttttagtgtgatgttccttgttctatcttcgaactctcaaaggtagcctttacacagatgttcaaactaattctaccagtgtcatatgtctaccaatctcattacttccctt

SEQ ID NO: 952366 - DNA, 120 bp, Artificial Sequence
  ENSG00000235954_64 (sequence is synthesized)
gtatgtacttctagagcaaagagctcattacagtaagaatgatggtaaattttactgaggcaaacaaagatttctgaacgcgagcagtgtgtgtgaaatgcttatgcactagctgatagc

SEQ ID NO: 952367 - DNA, 120 bp, Artificial Sequence
  ENSG00000235954_65 (sequence is synthesized)
ataactctggtcaaagaaatttggtcacttaaatattataattgaatttagcccctaaagtagctgttcttaacctggaatctgaagaacagcctgttggtggggctcccagggaatttg

SEQ ID NO: 952368 - DNA, 120 bp, Artificial Sequence
  ENSG00000235954_66 (sequence is synthesized)
cctgttggtggggctcccagggaatttgtgaaccactgaaattatatacataatttcatgtctgtgtaccgtgtacatttatttttcttacttttttttgagatggagtttcgctctgtt

SEQ ID NO: 952369 - DNA, 120 bp, Artificial Sequence
  ENSG00000235954_67 (sequence is synthesized)
ctgaaactagcatggcctggaacttggctactttggagacttttttggtctctctcctagtgtctttgcatctgtcctgtcttcctcttcgcttctcctctctctgcttacgcatggctt

SEQ ID NO: 952370 - DNA, 120 bp, Artificial Sequence
  ENSG00000235954_68 (sequence is synthesized)
ttgcgcctctgtcactctgggctgcacgtggtcatgatggcccactgacctcagtttacatcaccagcctttgggtcttgcttcagctgcaaatactggatcttgtcaagatgttctgga

SEQ ID NO: 952371 - DNA, 120 bp, Artificial Sequence
  ENSG00000235954_69 (sequence is synthesized)
ttgaattcatgagaaaaggaatctggttggccagttcacaggcgtttttctgacgtgtcccggggttggctgggccatgcagtctgtttcctgctcttgcctagtcagctgcagctggga

SEQ ID NO: 952372 - DNA, 120 bp, Artificial Sequence
  ENSG00000235954_70 (sequence is synthesized)
gagtagagtcctccagtaggaaacacaactgcctgggttcacaactccctaggctgggccgaggcagttctggggaggggtggtgagtgggtgggtaggggcacagtggttgtgttttca

SEQ ID NO: 952373 - DNA, 120 bp, Artificial Sequence
  ENSG00000235954_71 (sequence is synthesized)
atcacaaaggcggtgagactgcattcacttacaggttcctatttagggccaagttgctctgcctttccaaatcagcatgggcctcaggccctggctcagccctccaggctcgacttaccc

SEQ ID NO: 952374 - DNA, 120 bp, Artificial Sequence
  ENSG00000235954_72 (sequence is synthesized)
ggctgatgagctgctcgcccgtctcggaggcagtgatgagtttgcaaagggcttggagggcaggattgggcagacctaaaccaagaaaaaagggtagaagttattcagaagggcctctgc

SEQ ID NO: 952375 - DNA, 120 bp, Artificial Sequence
  ENSG00000235954_73 (sequence is synthesized)
acccaaaagcctgccaccttcccaggggaaagaaccctaaatccttggcatcggtggcatttttcagaagctcagcacagctagacatgtgtgtctgtgtgtgccttggaaaaggacagc

SEQ ID NO: 952376 - DNA, 120 bp, Artificial Sequence
  ENSG00000235954_74 (sequence is synthesized)
ctctggaacatccagctccgaattttaacccagagactatgagagacagaggtcgtcacatccccctcacctcatcttcacgtcaccatcgctatcctccacacctacttactgagccac

SEQ ID NO: 952377 - DNA, 120 bp, Artificial Sequence
  ENSG00000235954_75 (sequence is synthesized)
caccaagcagttaccctgaagtccagtttccaagcccagagttctcccaggcaacccccaatggatcccgaatgtgtctttgggtggtgaattctgattggattgccgtttcggtcagcg

SEQ ID NO: 952378 - DNA, 120 bp, Artificial Sequence
  ENSG00000235954_76 (sequence is synthesized)
ggaccttctgcatatgccctggttgagtacaggtcgagctcttcagaaagcactcatagcaaatgttatgttgatcatgtcctaatctggagtttaagaaagatgcgctccttgcgtatc

SEQ ID NO: 952379 - DNA, 120 bp, Artificial Sequence
  ENSG00000235954_77 (sequence is synthesized)
gccaaggttagaggatctgcaggtgacctccgcggggcaccggggagtttcctttttactggcagacacggcaggcctctcagggattcacagtatcacaggccagaggaatgaaaatct

SEQ ID NO: 952380 - DNA, 120 bp, Artificial Sequence
  ENSG00000235954_78 (sequence is synthesized)
ctgatcaccatgggggagggaaagaaaatgcctgggtccatgagctttcagactgattagacttgggatgaaatggactttactgtctacaataaggattccagaggcaaagggcttcag

SEQ ID NO: 952381 - DNA, 120 bp, Artificial Sequence
  ENSG00000235954_79 (sequence is synthesized)
ggtatccagataccccagaactgtgtatagggcttcacattttttcctgactgatatttttgatggaataaatttatcaaacagaactgtttaaggtagaggaaccctttctgtgatgct

SEQ ID NO: 952382 - DNA, 120 bp, Artificial Sequence
  ENSG00000235954_80 (sequence is synthesized)
gctgggaaatcctgtcatgatgggtggatacatacagttttggcaaagatcacacacctcctggaaatcaccctcaaccataactgaagcccaccaagactgtagatactgtatttcagc

SEQ ID NO: 952383 - DNA, 120 bp, Artificial Sequence
  ENSG00000235954_81 (sequence is synthesized)
cagaaatggaaaagcgaacattcaacccattcaactgtatgctttggccaaacaaccgcccactggtttgcctgaagtacctaagaaggtattggagaaacgtgaccaatggccagcaag

SEQ ID NO: 952384 - DNA, 120 bp, Artificial Sequence
  ENSG00000235954_82 (sequence is synthesized)
agccagaagggcctgcctgaaacccagggtccaacttcagccaaatcagcttgaagggactgttcaagctgcaggagcctctgtgcagtgggcagggttggaggggcggaggggagcctc

SEQ ID NO: 952385 - DNA, 120 bp, Artificial Sequence
  ENSG00000235954_83 (sequence is synthesized)
tctctctatcttggctgacctggtaaaaatgatccctccacccctagtggcagaagaccctgacctgcctggaacctgccagggtaaggctaagatgtctgcttgttgaacaccagctag

SEQ ID NO: 952386 - DNA, 120 bp, Artificial Sequence
  ENSG00000235954_84 (sequence is synthesized)
aatagagccagcacgcagatgacactcatgtaacagcagccatccaggtgagaatgccacttaccacgtgagatcttgctggttatcctgggtgctgccaccactggttttagtcataca

SEQ ID NO: 952387 - DNA, 120 bp, Artificial Sequence
  ENSG00000235954_85 (sequence is synthesized)
gacagtttgcaagtaattgcctccatttttcctcctcctaatcagttgtgaaaatgcttgttgtccttgggtgatgtctgtcctcatttgaatatcactacagatgtctcaatcagaaat

SEQ ID NO: 952388 - DNA, 120 bp, Artificial Sequence
  ENSG00000235954_86 (sequence is synthesized)
caattagacagcctggtggtggggctgccagtctcacaggcctcatcctctacctcatactggaatctaggtctgattgtttctaaggacaaaaattccctggctatacccaagcctccc

SEQ ID NO: 952389 - DNA, 120 bp, Artificial Sequence
  ENSG00000235954_87 (sequence is synthesized)
aatctatttagaaaacaggcagccacgtggtcagtctcattcctgttgcatctgttctaggagaggccgacttatcctgctacctgattttgcaaggggtattttacaaaacacaaggga

SEQ ID NO: 952390 - DNA, 120 bp, Artificial Sequence
  ENSG00000235954_88 (sequence is synthesized)
gtcctttcccccagggcagtgattacagtcatgacccaaccaaggccaagccactctcatggccgagccctcggcagagctagacccctgctttcactcttagatgagaagtcttaggtg

SEQ ID NO: 952391 - DNA, 120 bp, Artificial Sequence
  ENSG00000235954_89 (sequence is synthesized)
aaatccctgagctccagtgcttggaaagcagttcaacagcctaacagacataaacaagttttgaataagtttctaggattttaaacaggtgactccacacttcatgaatcacaagctgag

SEQ ID NO: 952392 - DNA, 120 bp, Artificial Sequence
  ENSG00000235954_90 (sequence is synthesized)
gtgaatgagatgtacttttctttctgatcaaagtcatttgctcttgctacctgtcctagaaccttggtttttaaatttaaatacaggaaacagggaatttaaataaagggaaataaaagt

SEQ ID NO: 952393 - DNA, 120 bp, Artificial Sequence
  ENSG00000235954_91 (sequence is synthesized)
tgggattacaggcacctgccatcacgcccggctaaatttcttttgtatttggtggaggcgaggtttcaccatgttggtcaggctgatcttgaacgcccgacctcaggtaatccagccgcc

SEQ ID NO: 952394 - DNA, 120 bp, Artificial Sequence
  ENSG00000235954_92 (sequence is synthesized)
tttgccatcccatttctttttatcttctgcacattccagaatgatcttgattgaggatctttctatgaaaactagaagtattcccaagaatgctttaattttgttaaatatcagggcgta

SEQ ID NO: 952395 - DNA, 120 bp, Artificial Sequence
  ENSG00000235954_93 (sequence is synthesized)
ggttataatattgtatcactctgggacggacagggttaggctttggagtagaaagaccctagcctcaatcctgcacttactctgccacttactgttctgaaccttgagaaaatgacttaa

SEQ ID NO: 952396 - DNA, 120 bp, Artificial Sequence
  ENSG00000235954_94 (sequence is synthesized)
tctctcagagattcagtttacactgaaactcagttttacacatctgaaaaaagaggactattaatatctgcaacagatttaaggactaacaaatatgaagtatataaagcacctatgtta

SEQ ID NO: 952397 - DNA, 120 bp, Artificial Sequence
  ENSG00000235954_95 (sequence is synthesized)
tctactttactggatacataagtgttcagtgaatgggaaccatttaaaagcttacaaaaagcaggaacagtaattgaagatatcagtctatagagtaaccactatgtttattcattattt

SEQ ID NO: 952398 - DNA, 120 bp, Artificial Sequence
  ENSG00000235954_96 (sequence is synthesized)
gttactctaatacttgcataagaacgtatatgtgcattcatgcgtgtatacatattggccatcattaccttttgtctgttgtgtataatacagattcttgttcttctgtgtcatcaccaa

SEQ ID NO: 952399 - DNA, 120 bp, Artificial Sequence
  ENSG00000235954_97 (sequence is synthesized)
catgtaatattgtcagaatttttattttttgtcagtttattggttttaaaactcttatcttgtgttcactttgcattccttgcaggttgaggatgttttgttttctggtcttagtctcat

SEQ ID NO: 952400 - DNA, 120 bp, Artificial Sequence
  ENSG00000235954_98 (sequence is synthesized)
tcttccttctttttcctgttggtcttgttcttttctttttgatttgtagggtatattaggatggtgcaaaagtaattgaggtttttgcatcgttgaaatttgtcatttgatactggaata

SEQ ID NO: 952401 - DNA, 76 bp, Artificial Sequence
  ENSG00000235954_99 (sequence is synthesized)
gtttttgcatcgttgaaatttgtcatttgatactggaataccctcttaaaccttcctttgttttttttttttttgc

SEQ ID NO: 952402 - DNA, 120 bp, Artificial Sequence
  ENSG00000235954_100 (sequence is synthesized)
ctgttggttctaagttccaaatccaggtggaaacagccctaggtagcactcagtgtgtttcagaggctaatagtagatggagcagctttatttctccatagaaatatttccacttcagtg

SEQ ID NO: 952403 - DNA, 120 bp, Artificial Sequence
  ENSG00000235954_101 (sequence is synthesized)
aaatttgctggcaaatatctctaataacaacatatattactttttcaaattgttacactccaaaatggccagaaaagcaactctgtgctcttcaagggctgctccagcctccagaagtgc

SEQ ID NO: 952404 - DNA, 120 bp, Artificial Sequence
  ENSG00000235954_102 (sequence is synthesized)
tcccacagctgtccccccaggggcttggtccagaccctcactggccagaacgcagtggtgcagcatgggtactgagaagctcccaggccaagctgcaaaggacctacatgatgctaagaa

SEQ ID NO: 952405 - DNA, 120 bp, Artificial Sequence
  ENSG00000235954_103 (sequence is synthesized)
ctggaacccgccgaactcctgaactagatctgtattttcctaaaagaaagcacatctgctaagcagtgtcttgcatgagagttgctcctgggttcactgctttgccttggtgactatctt

SEQ ID NO: 952406 - DNA, 120 bp, Artificial Sequence
  ENSG00000235954_104 (sequence is synthesized)
gtttcaggcatggttaagtactttgatcaaagaagcgtgggaacacctgcagccatcctggtgggctggccccacacctggtggcttggggagggtggctgtaacactcgtcaatcagct

SEQ ID NO: 952407 - DNA, 120 bp, Artificial Sequence
  ENSG00000235954_105 (sequence is synthesized)
gaaaaagtgggtggtgaggaggacaaggttcaggagaccaccgagtggagatttcaggaaatgccctgagaccacaggtgacaggggccccataagcatcctctgaaggccctggatgct

SEQ ID NO: 952408 - DNA, 120 bp, Artificial Sequence
  ENSG00000235954_106 (sequence is synthesized)
cagcacatatgagaacactatgcaaacctgcccctctgtgcccctctgagtcaagcacccagcttcaccctggggttggccgcacagcttcatcagggccacagctgcccatgacaatgc

SEQ ID NO: 952409 - DNA, 120 bp, Artificial Sequence
  ENSG00000235954_107 (sequence is synthesized)
caatagcagccagtgtctgctggtacgacctcccatcatgccggtaaggggcagtgccgctggcacggatgccttggcatcgcagatggaaacagcaggtaaacagcacttgccaggcag

SEQ ID NO: 952410 - DNA, 120 bp, Artificial Sequence
  ENSG00000235958_0 (sequence is synthesized)
caaggctggagcaaggcacagctcactctgacaagataaactgcaagaaatgtgagaggcgacaagagaaggaaaaggcagaatgcccttatctggagacctggcttagaccacacccat

SEQ ID NO: 952411 - DNA, 120 bp, Artificial Sequence
  ENSG00000235958_1 (sequence is synthesized)
ccaaggacacaggacatcagctcagggccttgaaggagccctagtcagcgtggtcctgagtcaccaagtctgtcaaggccaacaggactgagacctccacaaactgacgctgaagtctaa

SEQ ID NO: 952412 - DNA, 120 bp, Artificial Sequence
  ENSG00000235958_2 (sequence is synthesized)
ggacctttttccttgttccaccccactgcgcctcagatgtttccaggagtttctgaaggtcatgttaactagaatttactcttaaaaccaaagacacagaaataaacgttaagcatagta

SEQ ID NO: 952413 - DNA, 120 bp, Artificial Sequence
  ENSG00000235958_3 (sequence is synthesized)
acctacttacagccaccgagcgtcagaaggcccatctcctggggaatggaaaagtgcccagccgctgggaggcctcaagctggagagctacgggggaagcagggcaggtgtggggctggg

SEQ ID NO: 952414 - DNA, 120 bp, Artificial Sequence
  ENSG00000235958_4 (sequence is synthesized)
agaagctactaagccccacaccccaggtgctctggggcctcgcagcccagctgcagggagatggaacactgtgagcagctgttcttcttcctggccatttggttcatctacttcttttct

SEQ ID NO: 952415 - DNA, 120 bp, Artificial Sequence
  ENSG00000235958_5 (sequence is synthesized)
gatgccaacctctcttccacctactcaggggctggaagggcgactggagagccaagcccctgcgagtgaggacagagaatggccaaaggcagagccacagggtagacctttgcaccttgg

SEQ ID NO: 952416 - DNA, 120 bp, Artificial Sequence
  ENSG00000235958_6 (sequence is synthesized)
gaggagagatttggagaatggtgctgcctgggcccctttgcccccaccaaaccgcaggggtaccatggccctgacctgcgttcagagggccgagtcaatgtcacaggaaggggaagagac

SEQ ID NO: 952417 - DNA, 120 bp, Artificial Sequence
  ENSG00000235958_7 (sequence is synthesized)
atgtgcccacagaccctgtggtcatggagggggtggaagatctctggagggcagcagggccacagcaaggctctgaggtcctgagtcttctccgtccgtggacttaaactctgcgtgttt

SEQ ID NO: 952418 - DNA, 120 bp, Artificial Sequence
  ENSG00000235958_8 (sequence is synthesized)
acagctgttctgtgcctgggtccaggctctagtgagaaataaactgccttcagagccaggtcatcgacaggaatgacagcctggcaagctgcagtgactgcacacagctaccctgtgagc

SEQ ID NO: 952419 - DNA, 120 bp, Artificial Sequence
  ENSG00000235958_9 (sequence is synthesized)
tccacttgtgtgggtgcaggtgggcgacaggagtgtgtgacacagacaggcactccaccaggaggaaacccacagcagacgtcaaccatcgctttattaaggctgcgagtcggggggctg

SEQ ID NO: 952420 - DNA, 120 bp, Artificial Sequence
  ENSG00000235958_10 (sequence is synthesized)
caggatgctcccaggctgctctggtaaatcaggaaggaaaacaggccagggttaggaaagctgctccatggtccaggctgctctgaggggcagagccttcccaccgtgctgctgcagcat

SEQ ID NO: 952421 - DNA, 120 bp, Artificial Sequence
  ENSG00000235958_11 (sequence is synthesized)
acagcaattctgaaccacttagaggcaattcacccttcaagaggtcaatttcccttttctctggctgatgtgttccccactatcttttctgtactacatgaggggctcctggcaaatggc

SEQ ID NO: 952422 - DNA, 120 bp, Artificial Sequence
  ENSG00000235958_12 (sequence is synthesized)
ttcctgaagacatcaaagatgagtaccaagtgccaaagcctgacaagcaagacccaaggagacctgagttgtcaactgatgtaccagacagggctgttgctgcagaaaactccataaaag

SEQ ID NO: 952423 - DNA, 120 bp, Artificial Sequence
  ENSG00000235958_13 (sequence is synthesized)
ttccaagggtgccagaatgactttctgaaatgcctgcctaactctgctgtcagccactttcttccagagcccatagcacatcatcatttagttcatcaaagaacagcagggcaggtcagt

SEQ ID NO: 952424 - DNA, 120 bp, Artificial Sequence
  ENSG00000235958_14 (sequence is synthesized)
ggctctgttccagtagcccagctacacaggcttctctagatggcaggaacatatgtatgaatttctgtgtgaatcagagcagaattctctcacattaaatttttatacacttggttcttt

SEQ ID NO: 952425 - DNA, 120 bp, Artificial Sequence
  ENSG00000242516_0 (sequence is synthesized)
gacgtggacaatggcagtggcccctggctggcccaagagccgggtccagatacgcgcgcctgattccaggcgtcataaccaacccggggccgcgaggctgggatcaggcaccccggagcc

SEQ ID NO: 952426 - DNA, 120 bp, Artificial Sequence
  ENSG00000242516_1 (sequence is synthesized)
gcttgcccgtggccgggctgctctccccctctaagcctaagcaccgccagtcgcggcgctgcgctttccgccgacctcccagagcgtcccgccgtcgccggcggccagcctcgcgcagga

SEQ ID NO: 952427 - DNA, 120 bp, Artificial Sequence
  ENSG00000242516_2 (sequence is synthesized)
ccagtgtggcgccgccctgctgttgctggggggcgcccgaggcctccattccttgcccaggcttccggctctcggggcggcctcccttccgcccacgctccagggcttccccggctcccg

SEQ ID NO: 952428 - DNA, 120 bp, Artificial Sequence
  ENSG00000242516_3 (sequence is synthesized)
agctccgagcttccaccacatcggccggctcaggacagggcttccactgtaaagtcggctgccagacgtgttggagctcaccggatttgtccctggtgccttatttagttcacttggtga

SEQ ID NO: 952429 - DNA, 120 bp, Artificial Sequence
  ENSG00000242516_4 (sequence is synthesized)
ggtcatgtttttttcctggatggtgttgatggtagtagatgttcttcagtgtctggacattaaaatcttgggcatgcagcaccatatgagaggtttaaaaaataaaattaaaaaagagaa

SEQ ID NO: 952430 - DNA, 120 bp, Artificial Sequence
  ENSG00000242516_5 (sequence is synthesized)
aagaacccagagttgatctctgcagcatgccatcactgctggggatgaggaaacggtgatttcaggactgttttttctgtctcttcagtgcctctttcagtgatctgaggttaaaaccag

SEQ ID NO: 952431 - DNA, 120 bp, Artificial Sequence
  ENSG00000242516_6 (sequence is synthesized)
atacccagtggtgggattgctgaatcagacagagccaatagacgatcagtaatggtggccaatcatcagctagaaacaaagtatttagcagtgcttgaaaacaccaaaactctgagacca

SEQ ID NO: 952432 - DNA, 120 bp, Artificial Sequence
  ENSG00000242516_7 (sequence is synthesized)
ccctttattttctgtcctctgtgcatctcagtagtctctttttaccacactgtctatatactgcatgagccatttacgtgaaactatctgacactccaaggcatcttatactatatattc

SEQ ID NO: 952433 - DNA, 120 bp, Artificial Sequence
  ENSG00000242516_8 (sequence is synthesized)
aaccatgtatccctagtacctagcacagtcctggcatatagtttgctactaaacatttgcagaatgaaggaattatcttgtatccaggttcaagttttaagttgattcttcactaaacaa

SEQ ID NO: 952434 - DNA, 120 bp, Artificial Sequence
  ENSG00000242516_9 (sequence is synthesized)
agtattacagttcacaaataatctacttccttttttacaaatgggatcgatcttaatcttatcccctaataacattactttcatttactcccatctaaatatactgtcctaagagagcaa

SEQ ID NO: 952435 - DNA, 120 bp, Artificial Sequence
  ENSG00000242516_10 (sequence is synthesized)
taagaaagagagttgaagctggagcttgaagaattgtacatggtcctgtgataacctaccttgttttaacctgagtgactgtctcctagcagagagctggacagactccattttagtttc

SEQ ID NO: 952436 - DNA, 120 bp, Artificial Sequence
  ENSG00000242516_11 (sequence is synthesized)
ttcatgtgcagccccctttacctccctcccttaaggacataactagtgtaaactgactcaaagcatgtccaggaatcacttactgttaagatattgaggcaagctgcgccagcagctcct

SEQ ID NO: 952437 - DNA, 81 bp, Artificial Sequence
  ENSG00000242516_12 (sequence is synthesized)
tactgttaagatattgaggcaagctgcgccagcagctcctggggatgcgctcggtgaatggcacccaaaacccctgcattt

SEQ ID NO: 952438 - DNA, 120 bp, Artificial Sequence
  ENSG00000242516_13 (sequence is synthesized)
tttttaactttttgccagctctgcttctgtaaaaattgcttcagccaaactcccccctcccctatttagaccacggtataaaaccaaaaccaaccccttcctcggggccgagagaatttt

SEQ ID NO: 952439 - DNA, 120 bp, Artificial Sequence
  ENSG00000242516_14 (sequence is synthesized)
gggaaccgagctctttttgtaacaagttgtttgtcaggaggcccggtcatgaaagcccttcctgactgggctcaaggaatacaaaaaggacaacttgtttttgccattgtctgttgtttt

SEQ ID NO: 952440 - DNA, 120 bp, Artificial Sequence
  ENSG00000242516_15 (sequence is synthesized)
tcaataactagttctccgaaacagcactggatgaatgcctcaaggggctcacacaactcgttccaggacttagtgaccattgtttctgtccctgttcaatagagttcaaatttaatattt

SEQ ID NO: 952441 - DNA, 86 bp, Artificial Sequence
  ENSG00000242516_16 (sequence is synthesized)
tgtttctgtccctgttcaatagagttcaaatttaatatttaaattttgctccacaatgtgccatattatctgtatccaacctgtca

SEQ ID NO: 952442 - DNA, 120 bp, Artificial Sequence
  ENSG00000242516_17 (sequence is synthesized)
ctcacgcccaagaatcagaattcagaacttttaataagaaaagctttcagaactcaggaaggacaaggaagacattctggttctccatgcttaacattggactgtttcttcaactgagac

SEQ ID NO: 952443 - DNA, 120 bp, Artificial Sequence
  ENSG00000242516_18 (sequence is synthesized)
gcttttatctctttcgaggagagcactgttgtgctttccacaatggtgggaccaatgtacactcccaagcatctgtcattttttgactttttcataatagccattctgactggtgtgaga

SEQ ID NO: 952444 - DNA, 120 bp, Artificial Sequence
  ENSG00000242516_19 (sequence is synthesized)
tttctctaatgatcagtgatactgagctttgtattctatggttgttggtcacatgtatgtattcttttgaaaagcattcatgtcctttgcccactttttaaacatttttttatttccata

SEQ ID NO: 952445 - DNA, 120 bp, Artificial Sequence
  ENSG00000242516_20 (sequence is synthesized)
actttttaaacatttttttatttccataggttttaggacaacaggtggcatttggttacattagtaagttctttattgatttgtaagattttggtgcatccatcaactcatctgtataca

SEQ ID NO: 952446 - DNA, 120 bp, Artificial Sequence
  ENSG00000242516_21 (sequence is synthesized)
ctgaacccaatttgtagccttttatcactcacccccttctcccgtttctccctgagtccccaaagtctattgtgtcattcttaagcttttgcatccttatagcttagctcccaattataa

SEQ ID NO: 952447 - DNA, 120 bp, Artificial Sequence
  ENSG00000242516_22 (sequence is synthesized)
ttcacttagaataatagtcttcaatcccatccaggttgctgcaactgccattaattcatttcctctttatggctgagtagtattccattgtgcatatataccacggtttcttcatccact

SEQ ID NO: 952448 - DNA, 120 bp, Artificial Sequence
  ENSG00000242516_23 (sequence is synthesized)
tattccattgtgcatatataccacggtttcttcatccactcgttgattgatgagcatttggattggttcaacatttttgcaattgcaaattgtgctgctataaatatatgtgtgcaggta

SEQ ID NO: 952449 - DNA, 120 bp, Artificial Sequence
  ENSG00000242516_24 (sequence is synthesized)
gctcaagtcctgctgcatgaactttctgatgactgcctatgttcactcaaggcctttggtctctacaattagcaggtggcaaagccagccaggcctgtgttctttcctttagggcagtga

SEQ ID NO: 952450 - DNA, 120 bp, Artificial Sequence
  ENSG00000242516_25 (sequence is synthesized)
gtgccctcagtccctggctgggtccagaaatgccattcagaagtcagggagtacagtcaaaaattttagaagtccacttgacattctattgcattgcagctgatctggcactcaaaccac

SEQ ID NO: 952451 - DNA, 120 bp, Artificial Sequence
  ENSG00000242516_26 (sequence is synthesized)
aagacatagttcttcctattcctcccttcctttcctaaaggcagggtagccaccaccacctcaggccacagtgagtactgccaggctaccaccaatgttcccttaaggcccaaagcctct

SEQ ID NO: 952452 - DNA, 120 bp, Artificial Sequence
  ENSG00000242516_27 (sequence is synthesized)
tgtcagcttgtgatgaatgctgcctggcctgggacttgcgttttcaggacaatgggatccctactggccctgggcagcttcataaatgccaaccaaaaatcaagtcctagaatcagggat

SEQ ID NO: 952453 - DNA, 120 bp, Artificial Sequence
  ENSG00000242516_28 (sequence is synthesized)
tctgaaagttcgcttggtgctctacccacctctggccttgctggtacctaaggggcaagaaaaagtcccctttaattttccctctacttttcccaagaagaaggagttttgcctcttagc

SEQ ID NO: 952454 - DNA, 120 bp, Artificial Sequence
  ENSG00000242516_29 (sequence is synthesized)
caccacagctagtaatgtgctgacctcacctaaatctagcaagtctatgagggtcatccaaggcccttgatgtagtacctgggtatggctgctggttattcagagcccaaaggttttcaa

SEQ ID NO: 952455 - DNA, 120 bp, Artificial Sequence
  ENSG00000242516_30 (sequence is synthesized)
gtttgcaggcgataaatcctgccagcacatggttcttttcttcaaggcagcaggtttttttctggcccagggtgtgtctaggaatgtctaggagccagagactggaaaggaggctgcagg

SEQ ID NO: 952456 - DNA, 120 bp, Artificial Sequence
  ENSG00000242516_31 (sequence is synthesized)
attctgaccagtgcactaccttgctgtggctgagctggtgcccaggatgaaagacaaagtactccctattcttttccttcctctcctcaagcagaaggatggggtcccttttggagccat

SEQ ID NO: 952457 - DNA, 120 bp, Artificial Sequence
  ENSG00000242516_32 (sequence is synthesized)
ccccaccccagtccactgtccctgggccccattcagccctaggcctcacctaagagttacagtcctgatggcctaggctgcctttcaagttttcttagacacacagagtgcgggagccct

SEQ ID NO: 952458 - DNA, 120 bp, Artificial Sequence
  ENSG00000242516_33 (sequence is synthesized)
tagttgccaggtttccaaacactgaagttccaaccactggaatctgattctcctctggctagggctggcttaattgatcactctgtggatcagcattaactgcacttggtctggttttcc

SEQ ID NO: 952459 - DNA, 120 bp, Artificial Sequence
  ENSG00000242516_34 (sequence is synthesized)
atcagggattatcatagatagtttgacttggactacgccgttcattcaaattctttatctagacaatttaagtactagctgatttggcatgaaaatctggcaaagtattttcttggtatt

SEQ ID NO: 952460 - DNA, 120 bp, Artificial Sequence
  ENSG00000242516_35 (sequence is synthesized)
caattgatttttattctgcttgggttagcagttttattaaccagttagtctcttcattaaagttctgggaattcttacccagttcaaataatatcattctaaagttctcaaaaacctgta

SEQ ID NO: 952461 - DNA, 120 bp, Artificial Sequence
  ENSG00000242516_36 (sequence is synthesized)
ttcaagagtgcttctgagggccttctccatcctttcatgaacctccttaaagatacaatattccaggattttgcaagcttgtaaagttttcagaaactgcctcagaattaagcaatttac

SEQ ID NO: 952462 - DNA, 120 bp, Artificial Sequence
  ENSG00000242516_37 (sequence is synthesized)
tgtggaaatgactttaagttgtcatagtcagacacaattgacaagaaaattttatttatttataggcatgagccacagcgcctggcctctaaagctaatttaataaaactttataaatgc

SEQ ID NO: 952463 - DNA, 120 bp, Artificial Sequence
  ENSG00000242516_38 (sequence is synthesized)
ctcaggacaggtggttgtctacgaggatcatttaaggccagaagttcgagaccagcctgggcaatagaacaagacctcatctccacaaacaataaaaaattagccaggtgtggtggcaca

SEQ ID NO: 952464 - DNA, 120 bp, Artificial Sequence
  ENSG00000242516_39 (sequence is synthesized)
tgggaggctagggtgtgaggaacacttgagcccaggagttcatcattacagtgaactataatcatgccactgcacttcagtctgagaaatagagtgagaatcatctgtttaataaaaaat

SEQ ID NO: 952465 - DNA, 120 bp, Artificial Sequence
  ENSG00000242516_40 (sequence is synthesized)
aaaacaagaataaagctatagcttaaaaagaaacaccattttcatcatcgttataatgactgattcttaaaaatcacttaagatacattcaaaggataaataaatgcatgaatgtctaaa

SEQ ID NO: 952466 - DNA, 120 bp, Artificial Sequence
  ENSG00000242516_41 (sequence is synthesized)
aaaatttttaagatactacatcagaatagaggaaaagggggaaacagagaaaataaatagcagagaaaaaggcctaaggagaggatggcagggattggatttggggtaaatagaagaaga

SEQ ID NO: 952467 - DNA, 120 bp, Artificial Sequence
  ENSG00000242516_42 (sequence is synthesized)
gaaaaataagagactgggatatatgcatgagagttacccctggggactatataatgcacatttaatgcagaccaacagccttcaggtcgaagacctagggaaaaaagtggtgaaaacaag

SEQ ID NO: 952468 - DNA, 120 bp, Artificial Sequence
  ENSG00000242516_43 (sequence is synthesized)
ataacactacaaaaatttgctgggcattactcctccaggcctccctgcctggtattcactgactgacctgaaagtctcaggtttggggtttcttctactatccatggctctgctccttgc

SEQ ID NO: 952469 - DNA, 120 bp, Artificial Sequence
  ENSG00000242516_44 (sequence is synthesized)
tctagcttgaagatcatctcaggtttggtaatgtaatgccctggtaatgagaaacaatggaagactttgtcaaaccactaagtcaaatccttttcagaatgacgacagctgggcttcagg

SEQ ID NO: 952470 - DNA, 120 bp, Artificial Sequence
  ENSG00000242516_45 (sequence is synthesized)
gactgtgcaatgaaggagccaatttgaacatttcattagagtagtgacacatttttcatcaactggaagcttacaagtaaatattattataccttaaaagggttcctatatttaccagca

SEQ ID NO: 952471 - DNA, 120 bp, Artificial Sequence
  ENSG00000242516_46 (sequence is synthesized)
acaaaatacaatcctgggagttactggcaagtttcactcacccaatgataccaggctgctgtaggtctccagcatcacgtccctgtacagggtcctctgagcatcatccaggtcctgcca

SEQ ID NO: 952472 - DNA, 120 bp, Artificial Sequence
  ENSG00000242516_47 (sequence is synthesized)
ctcctcccaggtgaagtgcacagctacctcctcaaaggacaccaactcctgtaatgataccaggctgttgtaggtctccagcatcacgttcctgtacagggtcctctaagcatcatccac

SEQ ID NO: 952473 - DNA, 120 bp, Artificial Sequence
  ENSG00000242516_48 (sequence is synthesized)
gtcctgccactcctcccaggtgaagtgcacagccacatcttcaaaggacaccaacccctgtaatggcacatttttcctcaagtcaaagcatcagcccaaagattcttgtcaaaagaacaa

SEQ ID NO: 952474 - DNA, 120 bp, Artificial Sequence
  ENSG00000242516_49 (sequence is synthesized)
gaatctgggaattcactctttggtgtgtccatgtgtcttatgtattttacataagatgtagtttgttttgcactgtttatggtgggagaaggagtaatcacagtagaaatatgcttccac

SEQ ID NO: 952475 - DNA, 120 bp, Artificial Sequence
  ENSG00000265933_0 (sequence is synthesized)
ggggcggcctgggactcgggggcggggtcagtcatataaggctgtgcccagcgcttttggaagcagtaagtccagcccgaggctaaggaggtgttaaccaccgaagggaggtagaatgtt

SEQ ID NO: 952476 - DNA, 120 bp, Artificial Sequence
  ENSG00000265933_1 (sequence is synthesized)
tttccccaccagaggaggcagcgaccacgtctcctctatggaggcattcaagagccgtccagctgaagcagcatcactgtctgagctcggaaggcacaatccacataggtctgcatggtc

SEQ ID NO: 952477 - DNA, 120 bp, Artificial Sequence
  ENSG00000265933_2 (sequence is synthesized)
caccgagctgcatacccacggggccagcgggaggtgggcagctgctgggctctcttctgaagcagacaggatctcactctgttgctgaggctggatcacagctccctgcaaccttgaact

SEQ ID NO: 952478 - DNA, 120 bp, Artificial Sequence
  ENSG00000265933_3 (sequence is synthesized)
ctccctcaagcaattctccccactctgccttccaaagcactagcattataggcctaagccaccactcccatccactgtagtgtaaactgtctccttcaatgtttccaatagttgcggagc

SEQ ID NO: 952479 - DNA, 120 bp, Artificial Sequence
  ENSG00000265933_4 (sequence is synthesized)
agatcagataagggttcttcctgtctgttgcttcaagtttcattctctctttaaacaatacaaggttggcttccatggttccttcttaaagaatgttgaaggtgtgtcttcagattcatt

SEQ ID NO: 952480 - DNA, 120 bp, Artificial Sequence
  ENSG00000265933_5 (sequence is synthesized)
tagtgttcgtggaaccccagggaaagctgatgtaaaaacctcttttttctcccatatgtctcaaaaagttgtattttctgggtccaagggatctgcaagcctcctaaaggcatttccatt

SEQ ID NO: 952481 - DNA, 120 bp, Artificial Sequence
  ENSG00000265933_6 (sequence is synthesized)
gtcactaccaccaggtgtgaactgtaatctggcacgtatagttccaagaactgtcataatagatgctgaagaaacattgtgaagttaactcgctgttaccaactgtgaagtcattagcta

SEQ ID NO: 952482 - DNA, 120 bp, Artificial Sequence
  ENSG00000265933_7 (sequence is synthesized)
gatactgtggaaagaacagaaagatcctgtatctttcctataattgttctactggaagttgtcattttacacaggagacattctgttttatttattttcttttgagacagggtctcactc

SEQ ID NO: 952483 - DNA, 120 bp, Artificial Sequence
  ENSG00000265933_8 (sequence is synthesized)
ctggtgcctccactgcctgaggactgctcaagcaatcctcctgcctcagtcccctgaggagctggggccacaggcctgcaccaccatgcctggctaattatttttatttgtagagacaaa

SEQ ID NO: 952484 - DNA, 120 bp, Artificial Sequence
  ENSG00000265933_9 (sequence is synthesized)
gtctatcttgcctaggctgatctcgaactcctgggctcaagtaatcctcccgcggtggcttctcaaagtgcttgggattacagatggtcttgctctgtcacccagtctggaatgcagtgg

SEQ ID NO: 952485 - DNA, 120 bp, Artificial Sequence
  ENSG00000265933_10 (sequence is synthesized)
tgccatcatagctcactacagcctgagctgtactgagctcgagggatcttcccgtctccgcctcctaagcagctgggactacaggtaatggaagtgggcagagaatgatcctttccctag

SEQ ID NO: 952486 - DNA, 120 bp, Artificial Sequence
  ENSG00000265933_11 (sequence is synthesized)
gctccagtgtgtaagaattaaagaaagaggaaagaaacacaatggcttgatggtcgaggacaggtttattttaaagaaaacaaacccaagagtggcttctggctgagttagatcagagaa

SEQ ID NO: 952487 - DNA, 120 bp, Artificial Sequence
  ENSG00000265933_12 (sequence is synthesized)
gagaagtgattttcttgaaatgcatgaggctggaaagggagctggcacttaaagtggcggtgtttgtccgagaggatggtgctcctgctctgtcacagtgggcatggggattcaggccac

SEQ ID NO: 952488 - DNA, 120 bp, Artificial Sequence
  ENSG00000265933_13 (sequence is synthesized)
tgccaccgaatttcaagagcccaagcacagagcccagaactaaattgtgagggtttaaaaaaaaaaaaagctttattgaagtataattgacatacaataaacttgaatatttaaagtgta

SEQ ID NO: 952489 - DNA, 120 bp, Artificial Sequence
  ENSG00000265933_14 (sequence is synthesized)
agtaagtccagcccgaggctaagggtggatcgggcggaggccgtcaagctagccggaaggggctgtgctgtcaaccagcgagcgcaggaggtgttaaccaccgaagggaggtagaatgtt

SEQ ID NO: 952490 - DNA, 120 bp, Artificial Sequence
  ENSG00000265933_15 (sequence is synthesized)
atataaggctgtgcccagcgcttttggaagcagtaagtccagcccgaggctaaggtgagagcgtctgccgggacagtgtggctggacccacgtggcaggtgcgaggcagggtcactgcgg

SEQ ID NO: 952491 - DNA, 120 bp, Artificial Sequence
  ENSG00000265933_16 (sequence is synthesized)
atgggagagaaggcgtagaggcctcaggccttgtggggtgtcacctagagatgccccaggagggctggggggccggggtgtttccagtgaagccagttggcatcctggccgctctctccg

SEQ ID NO: 952492 - DNA, 120 bp, Artificial Sequence
  ENSG00000265933_17 (sequence is synthesized)
tggtgtagaccccgggaggctgggcggggacgctgggcggggacctggttgaggacctgggcggggacactgggtggaaaccctgggtgggcacgctgggcggggactctacagggctct

SEQ ID NO: 952493 - DNA, 120 bp, Artificial Sequence
  ENSG00000265933_18 (sequence is synthesized)
ccctctgggtagtcacattcacttgttgagttgggtgtccatctcctctgcatgtggattttactgacttcttataattgtccttggtagaaatcagtgatagtttattcagaactgggg

SEQ ID NO: 952494 - DNA, 120 bp, Artificial Sequence
  ENSG00000265933_19 (sequence is synthesized)
caaaagggaaaaagccggcctgaggtggaccacagcagacttgataggcaggcttgaggaggcggcgtctgatttacacagggcccacagattggtctgatcaggtgtgacgtttacata

SEQ ID NO: 952495 - DNA, 120 bp, Artificial Sequence
  ENSG00000265933_20 (sequence is synthesized)
gcgctcggggaaggctggtcgtcccaccctaatcttattaaacaaatgggctttctacttggccagtaccatcttgtctgctccttactatacacgcgggtggcaaagacaggagaagat

SEQ ID NO: 952496 - DNA, 120 bp, Artificial Sequence
  ENSG00000265933_21 (sequence is synthesized)
ggagccaccgttttgaacgtgtctattcccaggtaacctttctctgttggcacaaccaccagtattagcctatgcaagcttccagcttgcttgtctgtgcctgcagcttgattttacagg

SEQ ID NO: 952497 - DNA, 120 bp, Artificial Sequence
  ENSG00000265933_22 (sequence is synthesized)
agactcaagaaaagactgcctgccctactcaccttgactgagcgctgacgaagaccacggggccctctgcgctgcaagggcggaggtggcccagaagcccgcagtgcccacgtgcaggac

SEQ ID NO: 952498 - DNA, 120 bp, Artificial Sequence
  ENSG00000265933_23 (sequence is synthesized)
ccagggtagggggtgaggccggacgatggcacccgccccgctggttcccagccacacagggaggcaaagcaaaggcagcccgcgggcggatggagctgcaggggccgagcgtcggcaagc

SEQ ID NO: 952499 - DNA, 120 bp, Artificial Sequence
  ENSG00000265933_24 (sequence is synthesized)
ccaggacggcctggcgcagggttgcgggcgcccgacctccagcgtggcccgcggatgcaagacaaagctttaaagcctccggccgcacagccacccactagtccccaggtatgaggacgg

SEQ ID NO: 952500 - DNA, 120 bp, Artificial Sequence
  ENSG00000265933_25 (sequence is synthesized)
ccaccacacactaccacaaccacaccacacacctccacaaccacacaccaccaaccccacactgccacaaccacacacaaccacacaccaccaccacacaccagaaccacacacaaccac

SEQ ID NO: 952501 - DNA, 120 bp, Artificial Sequence
  ENSG00000265933_26 (sequence is synthesized)
acataaccacaaccacacaacaccacaaccacaaccacacaccagcaccacaacacacaaccacaacctccctctgagctgctcaggctgctttaaccaaccagtttggaatccaatcaa

SEQ ID NO: 952502 - DNA, 120 bp, Artificial Sequence
  ENSG00000265933_27 (sequence is synthesized)
aatcctctgctgccgtctagcgacgaataccgggaaagcagaatatatagtaagaaagctgtttaagaggcaaaaagtgatcgtctaaaggtttgcaagtgcaagccagaagaacctggt

SEQ ID NO: 952503 - DNA, 120 bp, Artificial Sequence
  ENSG00000265933_28 (sequence is synthesized)
catcctgtgttcatgacagtgccttgaactgggtcaccccgcacttgctaaggggctggtgtgggatgtgacaagaagaaagtcgtcaaggggactccaagatttctgacttgagaaact

SEQ ID NO: 952504 - DNA, 120 bp, Artificial Sequence
  ENSG00000265933_29 (sequence is synthesized)
gaaaaagccactgttaactgagattttttttttttttaatgtgggtggaacggatttgggcataaagatttaaaaatccagtttgaaacgtgctaaattggaatgtttaaaagggaatac

SEQ ID NO: 952505 - DNA, 120 bp, Artificial Sequence
  ENSG00000265933_30 (sequence is synthesized)
ttgctaaactgagcaataattatgctgtctccaggttagcacgcgtccccttttaggtcaaaggatacagagtagcaagtatgtaggaggaacaaatcaaaagatctaatgaacaacatc

SEQ ID NO: 952506 - DNA, 120 bp, Artificial Sequence
  ENSG00000265933_31 (sequence is synthesized)
gggactgtcgtttctatagtgtgttgtgttaaggatttttgcaaaatcagtagatcatagctgctcttgccacaaggcggaaaaacggaaaaatggaaaaacgggtaactatgtgagatg

SEQ ID NO: 952507 - DNA, 120 bp, Artificial Sequence
  ENSG00000265933_32 (sequence is synthesized)
atggatatattaatctgttgtactctagtaaccatttcactagatacataatatcgtgttgaacaccttaaatatacaccaccagatttattttttaaaataaaaatgaaacatggcttg

SEQ ID NO: 952508 - DNA, 120 bp, Artificial Sequence
  ENSG00000265933_33 (sequence is synthesized)
aaagtgcttgggattacagatgtaagctaccatgcccggcctcacaggagacatttttgatgtccctcttgacagtctacaaaagtctacaaatctttttttttttttttttgagacagg

SEQ ID NO: 952509 - DNA, 74 bp, Artificial Sequence
  ENSG00000265933_34 (sequence is synthesized)
tcttcccgtctccgcctcctaagcagctgggactacaggtacttgcccccaggcccagataatttatttaaaaa

SEQ ID NO: 952510 - DNA, 120 bp, Artificial Sequence
  ENSG00000265933_35 (sequence is synthesized)
taagtgctggcattacaggcatcagctgccatgcctggctacaaatcttaatgttttccccatggcttctttttctggcgttcttttctcaggtaatggaagtgggcagagaatgatcct

SEQ ID NO: 952511 - DNA, 82 bp, Artificial Sequence
  ENSG00000265933_36 (sequence is synthesized)
gtgtctctttaggtgtgcttatctgggagggagttgtgtgtctgtttccatacatcttcctgcagctgcaggcataccccca

SEQ ID NO: 952512 - DNA, 120 bp, Artificial Sequence
  ENSG00000265933_37 (sequence is synthesized)
cccaatgtatgagggtgaagtttggcaattacccaagagactttccccccacctccctctgtgcctgagctgtctcatctatgttttactgtctgctctttctgtctgcttgttgttaga

SEQ ID NO: 952513 - DNA, 120 bp, Artificial Sequence
  ENSG00000265935_0 (sequence is synthesized)
actggagccacaaaagcaatgcaggaggaagaatgaatcagctttgtaaccagcttcatctgacggcttagatggccactagaagggaaggtgctgtgatttgaacgatgttgtccccta

SEQ ID NO: 952514 - DNA, 120 bp, Artificial Sequence
  ENSG00000265935_1 (sequence is synthesized)
aaaaacctgtggcttttgggaggcaattgagacataagggctccattttcaaaaatgggattagccttttagaaaatggctcaagggtgaagagaacattcccttggtcttctgacttcc

SEQ ID NO: 952515 - DNA, 120 bp, Artificial Sequence
  ENSG00000265935_2 (sequence is synthesized)
accactagtaaggacacagcaacaaggtgccatcttggaagcagatgtcaatgccagcagcttggtcttggacttcccaacctccagaactataagaaataaatttatgttccttataaa

SEQ ID NO: 952516 - DNA, 120 bp, Artificial Sequence
  ENSG00000260377_0 (sequence is synthesized)
aggaagcaaagtctgtgaaatagtgacatgccgcttaggtaggcacagctacttaaaagtgccctgtaaggcttgaattgagcagttagaagacctgagtctgggtgagatttctggggg

SEQ ID NO: 952517 - DNA, 120 bp, Artificial Sequence
  ENSG00000260377_1 (sequence is synthesized)
agtgattgtagagaagaaaggaatgaagaatgaagaaaacagaggtgggagaattagaaaactccttggaattcaaagaaagagaatccttcaaaaaggggatcatcagcttcagagaac

SEQ ID NO: 952518 - DNA, 120 bp, Artificial Sequence
  ENSG00000260377_2 (sequence is synthesized)
tgcagatagacaagatgaacatcactggacaatgtagattcactggaactcgaggttgaagatgattaaaccgaatggatgatataaaagtggaagcagtgggtggagaacagaagtttg

SEQ ID NO: 952519 - DNA, 120 bp, Artificial Sequence
  ENSG00000260377_3 (sequence is synthesized)
gcagagaaacgaaggagaggagcagggtagtgtacggatggaacaacttcaccaaggttttttgtttctagggcagaggaggctttttttttttttttctttagacagagtcttgccctg

SEQ ID NO: 952520 - DNA, 66 bp, Artificial Sequence
  ENSG00000260377_4 (sequence is synthesized)
caagcgattctcctgcctcaaccccccgggtagctggggctacaggcgcgcgccaccatgcccagc

SEQ ID NO: 952521 - DNA, 120 bp, Artificial Sequence
  ENSG00000260377_5 (sequence is synthesized)
aaagtgttgggattacaggaatgagccaccgcgccagccacggaggctttttctgaagggtagacagagagaagaagcagtgaaccagaagacactaactaagtgaagttactagaaaga

SEQ ID NO: 952522 - DNA, 120 bp, Artificial Sequence
  ENSG00000260377_6 (sequence is synthesized)
gagagagagagtcaatggaataaggaggaaggtaagaccgacagtagtagagagaacagataaagaggggagcagtacattccctgtctgagactggtgaagaggatgaaagaaagggtg

SEQ ID NO: 952523 - DNA, 120 bp, Artificial Sequence
  ENSG00000260377_7 (sequence is synthesized)
taaggagagatgcttggaagctgaaggcagaggagatgaggcacctctaatgtgtttccagcatagataagacagtaacatgagatgtctgctgcattaaacagcgtctgtggatcaagt

SEQ ID NO: 952524 - DNA, 120 bp, Artificial Sequence
  ENSG00000260377_8 (sequence is synthesized)
tgcagtgcggatgtccaaattgctttactccccatgagacctcacagaagattatgttactgcaaactgatgtttgagctaggaaaaacatttaaaaggacacacagtctctgctgtata

SEQ ID NO: 952525 - DNA, 120 bp, Artificial Sequence; identical to SEQ ID NO: 874535
  ENSG00000260370_0 (sequence is synthesized)

SEQ ID NO: 952526 - DNA, 120 bp, Artificial Sequence
  ENSG00000260370_1 (sequence is synthesized)
tataatcacacgatctaatagttttaaatacgcaaaataaagagcaccaaagtaaatgtcattcagaaataacaacaacaaaaccagagcaccccgatgcatttaggcctcaaggaattc

SEQ ID NO: 952527 - DNA, 120 bp, Artificial Sequence
  ENSG00000260372_0 (sequence is synthesized)
gttgtcagagcattaagaagcaagagagtagaatgttacagggggtgctacaatcacccagataatagcaggaagtagggtggagaggcatgttataaatcagaaagaagaatcttcgga

SEQ ID NO: 952528 - DNA, 120 bp, Artificial Sequence
  ENSG00000260372_1 (sequence is synthesized)
gaaggctgggaagcaggtgatttttagagttgaggaagcgggcacacctgcaaaacagaagagatttttggatgaaggttatagaacagcagtctagaggcagcagtgggagccagtttc

SEQ ID NO: 952529 - DNA, 120 bp, Artificial Sequence
  ENSG00000260372_2 (sequence is synthesized)
tgtcgttgccaggggacccagtggctacgacagaaagatgccaaaaaaagggcttcagaagctgatggcatagttatgagaggggtgaagactgcgactgcatttccaacagaccctgag

SEQ ID NO: 952530 - DNA, 120 bp, Artificial Sequence
  ENSG00000260372_3 (sequence is synthesized)
gacaattgggaagaatgcgctgaatatttttgagcaatttctatatgataagcagtttttagggcaagtataggttgcactgatcctgaccttttggcctgaggatggaagtcttcagta

SEQ ID NO: 952531 - DNA, 120 bp, Artificial Sequence
  ENSG00000260372_4 (sequence is synthesized)
tatatgttcacagtcactggaaatgatcaacacaattagatttgcttcttttgccccagaacaaagcgggtttgttgatgtactgaatcggacacattactttctagctgaacactcagc

SEQ ID NO: 952532 - DNA, 120 bp, Artificial Sequence
  ENSG00000260372_5 (sequence is synthesized)
ttcatccactccaggacagctgagcgtctggattcaagatcttgcaaaatctgagatctgctcaactctcaactcttctttccaaatgaatgcttcctatctgccaggaggagcagtgtc

SEQ ID NO: 952533 - DNA, 120 bp, Artificial Sequence
  ENSG00000260372_6 (sequence is synthesized)
aacagtcctagccagctgttgctgaagggcccaacaccaaatcccagctgaagaacagcttctcatcttttgagacacagcacagggtgatgggcatggagctcttccacactccccaca

SEQ ID NO: 952534 - DNA, 120 bp, Artificial Sequence
  ENSG00000260372_7 (sequence is synthesized)
gtctgacttagctctctccgttgtgccctcctggcaccctgctcgtattttattgtggcacctatatcgctggatctcactcactggtttgcactcctgtatcccctttgagggaacaaa

SEQ ID NO: 952535 - DNA, 120 bp, Artificial Sequence
  ENSG00000260372_8 (sequence is synthesized)
atgcctctgcaatcccaggatctgatactgagatagacactaaacagatatttaaaaatttttgataatcaatgaatggacaaggagaataaataatatgaaagatgaaataaagaaata

SEQ ID NO: 952536 - DNA, 120 bp, Artificial Sequence
  ENSG00000260372_9 (sequence is synthesized)
acgacagtgcaagtgttcgaaagcacaaaggcagactgtctacccgcgacagttcgcaagttgcggtggcggggcggctgtgcggagcgcgcgtgcaggagggtagaataacatggaaag

SEQ ID NO: 952537 - DNA, 120 bp, Artificial Sequence
  ENSG00000260372_10 (sequence is synthesized)
cagcttttattcactccaaggacagctaactcacatacaacaaagggcagaataagtctctaggtgcatagattagcctcagggtgtcatgggtgtgtgtgtcttacttaggaacctctt

SEQ ID NO: 952538 - DNA, 120 bp, Artificial Sequence
  ENSG00000260372_11 (sequence is synthesized)
atgctaatggtatattttcatttagaaagtctgaggtctttattttctgagacagtgaatgaacttcttttcaccttgttcctggctgtttttcctccattgccttaataaagactgagg

SEQ ID NO: 952539 - DNA, 120 bp, Artificial Sequence
  ENSG00000260372_12 (sequence is synthesized)
tgcataggcacatacaccttcctgcaaatggtaaattttctaataaaacagtttccctttctattataattccagttgagtgaaatataaaatatttactaagccccttttttattttta

SEQ ID NO: 952540 - DNA, 120 bp, Artificial Sequence
  ENSG00000260372_13 (sequence is synthesized)
cttcttcaaggtatttccagttgcccgccctgaactgtttcagaatgaggaggacacctggaggaatctacacgtgcatagaccaatttgcaaaagaacctgtgagccaacattattacc

SEQ ID NO: 952541 - DNA, 120 bp, Artificial Sequence
  ENSG00000260372_14 (sequence is synthesized)
tcagctggaagaattaataagcaacacgttcacccaagaagtatttactgagcacctactatgtgcattattttctggtgttggggctagggggcaaacgactctgacaagtctctgttc

SEQ ID NO: 952542 - DNA, 120 bp, Artificial Sequence
  ENSG00000260372_15 (sequence is synthesized)
tgagccaccgcgcccggccgtagtttacattttctaaagcgtactctgccagccaagtggcaaacagacttgggcctcttaagagtggaagcaggaggaaacccgaagatcctggagaga

SEQ ID NO: 952543 - DNA, 120 bp, Artificial Sequence
  ENSG00000260372_16 (sequence is synthesized)
gactggtggctggtaccagtggagagggagcaaaaaggaaaatacaggatacaatttcaggaaaaatttcataccaatttcctgaggtaatttctgaactcgaacattttcagtgtcacc

SEQ ID NO: 952544 - DNA, 120 bp, Artificial Sequence
  ENSG00000260372_17 (sequence is synthesized)
acattgtgtttcctgctgaatcaagtctacatcacttcggtttttaaagccttccacgatccttccctgaacactgtagttttcactgatggttggctgtttcaaactcccatatgatcc

SEQ ID NO: 952545 - DNA, 120 bp, Artificial Sequence
  ENSG00000260372_18 (sequence is synthesized)
atactgtatcattaataagcaagcaaggaataacacaccctctgctattctgtgcagtgtttcaggtttttagttttctctttcaagatagaaaatccctttagagtaggaactcggctg

SEQ ID NO: 952546 - DNA, 120 bp, Artificial Sequence
  ENSG00000260372_19 (sequence is synthesized)
tcttgtatgaagaagggtgattatctgtcaatattcattgcatcattgaaccaatgtacaatgcattaatcatcactgaagataaccagatgaggctttattgtaatctccttctatttt

SEQ ID NO: 952547 - DNA, 120 bp, Artificial Sequence
  ENSG00000260372_20 (sequence is synthesized)
gctgagataatttcacttgctttagagtttatgaggccataagtggctcccatctgttgatgaacatatttctaagagtcatttagtctcaagtatggaatacttgaggggaagttaaat

SEQ ID NO: 952548 - DNA, 120 bp, Artificial Sequence
  ENSG00000260372_21 (sequence is synthesized)
tgtaacttttatattaagtgtcatcttagtaacagaaccaaaattggaagcatgtgttcaattttggtttttcattttcaaagctttaggtcaggcaaagaattaatttcatttgtttac

SEQ ID NO: 952549 - DNA, 120 bp, Artificial Sequence
  ENSG00000260372_22 (sequence is synthesized)
aaagtagattatgcctaataaaatctattttgtttatggtcacattttaatcaatccactgctttagaaaatgagagaattctgattggctaatcattcaacatagtaaattacattatt

SEQ ID NO: 952550 - DNA, 120 bp, Artificial Sequence
  ENSG00000260372_23 (sequence is synthesized)
ccacatccacagaacactggcctaattgcattatccagtaatgataaaaatattccttttaatacattttgagcaaggcatataccagtgatgaaacagggaagaatcttgtttattcca

SEQ ID NO: 952551 - DNA, 120 bp, Artificial Sequence
  ENSG00000260372_24 (sequence is synthesized)
tccttgtttgatgatcgaccacagaatataacataacacttctgtgtataagaattttttcaacattaaggataataaggacaaggtagttttcactggatccttactggtactctgaat

SEQ ID NO: 952552 - DNA, 120 bp, Artificial Sequence
  ENSG00000260372_25 (sequence is synthesized)
tttcactatttgtccgcatttcttctccttcccggaaatttgttttctgcgaaaaacaagtgctactttgtcaaataaagcttaaataaaattggtttcaatttatgcataataaaagga

SEQ ID NO: 952553 - DNA, 120 bp, Artificial Sequence
  ENSG00000260372_26 (sequence is synthesized)
atgcctagtgactttctatctctagtgggaggtagaaaactctccagggtgactttattcactccagaggttctggtgagcaccaaggaacattacctctgcaaaatgcagacatacgca

SEQ ID NO: 952554 - DNA, 120 bp, Artificial Sequence
  ENSG00000260372_27 (sequence is synthesized)
aaaggatgcatcaaatttaagagaagtccgtagatagatatctgagggatctgccttaggggatgtagaccatatatacaacacgaattccacagaattagcctggtattcacgatcact

SEQ ID NO: 952555 - DNA, 120 bp, Artificial Sequence
  ENSG00000260372_28 (sequence is synthesized)
gtttcttaaaacataactcttttatgttaccaagcaacttttatctgagatgatgactactcgaatacttcttttgcatatcgccagaaaatatcaagttttcatttgagtccttaattc

SEQ ID NO: 952556 - DNA, 120 bp, Artificial Sequence
  ENSG00000260372_29 (sequence is synthesized)
aagttctttatcacaagaagaaagaatagcatggataaaatggtttaaaggtagccaaaaaaaaaacaaaacattgtattttagaatgcatattcaaacatattccaaaaaatactgtat

SEQ ID NO: 952557 - DNA, 120 bp, Artificial Sequence
  ENSG00000260372_30 (sequence is synthesized)
tttagaatgcatattcaaacatgatgacaagtgggctctgtggctcatattgacaatagctttaacctatgaagtgagtgtctttctatacggaggtgatgagttactcaatactgaacg

SEQ ID NO: 952558 - DNA, 120 bp, Artificial Sequence
  ENSG00000260372_31 (sequence is synthesized)
gctctactaaattgtgcttttggctattagaacttggctactgcctttcgttgctatgtgttgagagaaaaatctcaaatgatgatgctaaccattttgctaataaaatatgctaagctg

SEQ ID NO: 952559 - DNA, 120 bp, Artificial Sequence
  ENSG00000260372_32 (sequence is synthesized)
ggcacaagaactacatgggcaaacaaactactgaatttcagcaaggcagtttagcaaattcttttataaatttgaaggaacctgtggattggatgattctgcgttgtggcagcattgtca

SEQ ID NO: 952560 - DNA, 120 bp, Artificial Sequence
  ENSG00000260372_33 (sequence is synthesized)
gtgcaagtgttcgaaagcacaaaggcagactgtctacccgcgacagttcgcaagttgcggtggcggggcggctgtgcggagcgcgcgtgcagggcttcagaagctgatggcatagttatg

SEQ ID NO: 952561 - DNA, 120 bp, Artificial Sequence
  ENSG00000260372_34 (sequence is synthesized)
tttacccccatccatgcttgcaactgtaagttgatcttaaattagtacttttaaccaagtcaacctcaatcacttgaataggatacccagctgaaaaacttggggtcactgaatcaatct

SEQ ID NO: 952562 - DNA, 120 bp, Artificial Sequence
  ENSG00000260372_35 (sequence is synthesized)
tggcttttaaccacaacctttatatttttgccgagtatcacctttctgcagcaaccgtgagaacctcgcgctaagcttgtcttagattgctcattcctttcctatatttagacaccaaac

SEQ ID NO: 952563 - DNA, 120 bp, Artificial Sequence
  ENSG00000260372_36 (sequence is synthesized)
aacaaacaaggaaaaaattggacagacaaaaaatttaggtggtgccaagtatgatgcaaacactaaaacagtaatgcaatagaagatgtcagagggagagtgggaaggttacgttaaata

SEQ ID NO: 952564 - DNA, 120 bp, Artificial Sequence
  ENSG00000260372_37 (sequence is synthesized)
gatgtccaaggaagatctctctgaggagaagctactagggctgagatcttaatgacaacaaggaacccaagggctggaagcagagcgttttgaacatggccagtgggtgcaaaggccatc

SEQ ID NO: 952565 - DNA, 120 bp, Artificial Sequence
  ENSG00000260372_38 (sequence is synthesized)
acacgtgaatgggcctggccaggtggaaggacagagggcaaggctgttgtggttgccctgtgagtgcgaacggcccaagatgggatgaaagaggaggtcgggaccacaccgtataggaat

SEQ ID NO: 952566 - DNA, 120 bp, Artificial Sequence
  ENSG00000260372_39 (sequence is synthesized)
ataggaatatcagatcatggtcagggctttggattttacaggggtgcagtataagccatggggagttttagacaggtacagaagtaatttacattttctttctttctttttttttttttt

SEQ ID NO: 952567 - DNA, 120 bp, Artificial Sequence
  ENSG00000260372_40 (sequence is synthesized)
tgaggacaattgggaagaatgttctggtgaaacgcaactccatcaacacctccccagtccgatcttatcctctacgtcttttctcagtgacaccttcctctcatacgagtaaaactagaa

SEQ ID NO: 952568 - DNA, 120 bp, Artificial Sequence
  ENSG00000260372_41 (sequence is synthesized)
aaaaatgatagaatgcgatttatgttgattcctggtcaagtgaacacaagccggcccactgaaccagaagaaaagagtaatagaactcttgaaagagaagataaaacccaccgtatccag

SEQ ID NO: 952569 - DNA, 120 bp, Artificial Sequence
  ENSG00000260372_42 (sequence is synthesized)
atattgctgggaagaaaaataaaaacaactattaaaaatttaaaatcacttttagaaagcttccttgcattagtgctatgaaatagaaagagtcttggagaacaggatttgttcacgtta

SEQ ID NO: 952570 - DNA, 120 bp, Artificial Sequence
  ENSG00000260372_43 (sequence is synthesized)
agttgggcaagtcttctcttcctgggctcagtttcctcatctgcagtgcatgaggtcattgaactccataagccctaaggatccttctggtttcaaaaatcccataacgtctgatataga

SEQ ID NO: 952571 - DNA, 120 bp, Artificial Sequence
  ENSG00000260372_44 (sequence is synthesized)
acacttaccttgacaaagctcttcaagtcattttcaccttcacatattgatttatctgtgtagtgacatttaaagtgaattctaatcaggaaataaaaggctgatttcttcagtagaaga

SEQ ID NO: 952572 - DNA, 120 bp, Artificial Sequence
  ENSG00000260372_45 (sequence is synthesized)
aattgacaataaaaaaatgtgaatacaagagagaaacaaaggcctgattaccagaagtcgatctataggatacagaatgtggcattgtacaaagtagaaattcctttctaaaatttaaga

SEQ ID NO: 952573 - DNA, 120 bp, Artificial Sequence
  ENSG00000260372_46 (sequence is synthesized)
agaaatcattgtaacatcaggaataaacaggaaaaaggagaaagcattaagattttccagtcaaggagagatctggaaacataatgatttacctcctgccatagcaagcatggtatagca

SEQ ID NO: 952574 - DNA, 120 bp, Artificial Sequence
  ENSG00000260372_47 (sequence is synthesized)
aattttatgatttggggttgatcaaaattattgtgtgacgaagacataattaaaaaaagatttgactctgtctctaaccttttttaaggaaggaattattttcttaaaaatcaagaacaa

SEQ ID NO: 952575 - DNA, 120 bp, Artificial Sequence
  ENSG00000260372_48 (sequence is synthesized)
tataactaaagcacaaattaagtgttcagaagaatattggggagaaaaagcagaatgcaaaaggaaaaatgccttatggaaagagcataggattaatagtaaatgaggaagaactatgac

SEQ ID NO: 952576 - DNA, 120 bp, Artificial Sequence
  ENSG00000260372_49 (sequence is synthesized)
aagaactatgactcctaaagaattataaattttaaattgtatgaaaaataatattggtaaaacagaaaaactaagagataattgtaagtaaataaaaatgaaacaagatgtgttgccatt

SEQ ID NO: 952577 - DNA, 120 bp, Artificial Sequence
  ENSG00000260372_50 (sequence is synthesized)
cagctgccccagtaaagcaataattcaaggtcaaataacttagaatggtcagcacctaatagtcttggtaaatagagcaggtcaataaatatatattgattggttgattgaataagaaat

SEQ ID NO: 952578 - DNA, 120 bp, Artificial Sequence
  ENSG00000260372_51 (sequence is synthesized)
gcttgcagttattttaggaaaatcaaagttgcttgggaagttatgcatgtaatttcttaaactaagcaagtataaatttccttttgaaacaatataaaacaaaacctttcctaacagtta

SEQ ID NO: 952579 - DNA, 120 bp, Artificial Sequence
  ENSG00000260372_52 (sequence is synthesized)
cctctaaatcctaaacaatgaaatcttttataagataatgtttatatatagcaaaacctaaattggaaatagataaaatgtggaaatataaatgtgcttctgtagaaagaaattatattt

SEQ ID NO: 952580 - DNA, 120 bp, Artificial Sequence
  ENSG00000260372_53 (sequence is synthesized)
tatatctttgatggtttttgataggtggttggaatagggaaaattctgtgtgaacaatttaccaaaaaaatgctatactttcctctaaaccaatatttggacatataaatattttccaac

SEQ ID NO: 952581 - DNA, 120 bp, Artificial Sequence
  ENSG00000260372_54 (sequence is synthesized)
tgggttcagtttttgatatggccaaagataatgatatgttatttcaagactgtaagtcaaaataaaattgatttgaaatggtctgaattaatgagatgccttccatcctgtaagtttcaa

SEQ ID NO: 952582 - DNA, 120 bp, Artificial Sequence
  ENSG00000260372_55 (sequence is synthesized)
cattgtcatctcaagtgataagataatgatggaccgtttcttaccaaatattttattaattaactcacgaagcttggcctgttcagtcagtatagacactatgttccggtgccttggatg

SEQ ID NO: 952583 - DNA, 120 bp, Artificial Sequence
  ENSG00000260372_56 (sequence is synthesized)
tgattagcaagatgtgattcctttaaataatgagctcaaaacacatattaaatttagaagtggtaagcttacaggaaaaagaaagatctgctgggagtgaataaaaggaaaaagaaaaaa

SEQ ID NO: 952584 - DNA, 88 bp, Artificial Sequence
  ENSG00000260372_57 (sequence is synthesized)
atccactccaggacagctgagcgtctggatggtgtctcaccctgttgcccaggctggaatacagtggcacgatcctggctcactgcaa

SEQ ID NO: 952585 - DNA, 120 bp, Artificial Sequence
  ENSG00000260372_58 (sequence is synthesized)
gggcagaaatttcccacacgattgtctgtggctttgtatgcagaatgcgataatgaaggaaagcagctataatgtgcttgtagtggtggtggaccaccaggaggtgggaagctctggtga

SEQ ID NO: 952586 - DNA, 120 bp, Artificial Sequence
  ENSG00000260372_59 (sequence is synthesized)
acatgagtaataccttctacattgaaatgttttgatgtggacctggatccaagtgagagttggaatctaactgccccccaccccccacaccactgggcttcagaagctgatggcatagtt

SEQ ID NO: 952587 - DNA, 120 bp, Artificial Sequence
  ENSG00000260372_60 (sequence is synthesized)
gtccataagatgacactggaaaaggggattggcttgagtgcaccagggggccagagacatgggtcatccctggtgacgggagttggaatgctcccctgagatggagactggaagtacaag

SEQ ID NO: 952588 - DNA, 120 bp, Artificial Sequence
  ENSG00000260372_61 (sequence is synthesized)
gaggtctcaattctgtcttcctatactcactcttcctttggaagtgtccatggtgtatgtttgtgtctatgcacacaaacaaggctgagaaaaggaacaccctacaactagatggaaccc

SEQ ID NO: 952589 - DNA, 120 bp, Artificial Sequence
  ENSG00000260372_62 (sequence is synthesized)
taatcctgttcagctaagactatatagatctgtgggaattctgttgctcagagaaggcaatcctaactttgggcaggaggtctctttggaccctttaaccaagagccatgccaaaatatc

SEQ ID NO: 952590 - DNA, 120 bp, Artificial Sequence
  ENSG00000260372_63 (sequence is synthesized)
agccctctgattctcaaactctgatactgggaaaaggtaagtcttttagagaattaactagataaatgcagttataaagtacctagtacagtacctgacatatagtgtctgccatatagt

SEQ ID NO: 952591 - DNA, 120 bp, Artificial Sequence
  ENSG00000260372_64 (sequence is synthesized)
aggtttctccaaaatgtgaatgcatcctgtctctatgcctttcttctctgattttctttaaataccgggcatatcatctataacgctgctttcccaacttcagattaagatgaccatggg

SEQ ID NO: 952592 - DNA, 120 bp, Artificial Sequence
  ENSG00000260372_65 (sequence is synthesized)
aacagtccctgtgtgcataagcagttgacagaggtggatgctaattcaattaatagtatccataggccagtgagcaaccaatgaggggacctggagcaaaagacactgtccaagtgggta

SEQ ID NO: 952593 - DNA, 120 bp, Artificial Sequence
  ENSG00000260372_66 (sequence is synthesized)
gagagtaactagctaaatcaatgtgtccatctcccttttgggctgtagactggaaaatatggagagtggccagttattacggggtaggaggagagagagagagagatgaagagagaagag

SEQ ID NO: 952594 - DNA, 120 bp, Artificial Sequence
  ENSG00000260372_67 (sequence is synthesized)
gaggcacaaaagtagcagaataggagtctgagagggcatctgagtcaagataaggtgaagctgggggctatgacgtaagtgacactccttttccaggaagcagcatatacctgcccccaa

SEQ ID NO: 952595 - DNA, 120 bp, Artificial Sequence
  ENSG00000260372_68 (sequence is synthesized)
ccctgcccaacatgccaatgcctactagtccaaagccacctgagtcctgggagcagcattgccatgtgcgagagtagtaggggcactggcaggaatgcactccattcgtctcactggatt

SEQ ID NO: 952596 - DNA, 120 bp, Artificial Sequence
  ENSG00000260372_69 (sequence is synthesized)
atgtcacttgcatatttgacaactcagctatacttaagacagctccccaaagcctgctctaaccctcactggagagcaggcagctcacactctggtgctaccatgtgttacctgggccct

SEQ ID NO: 952597 - DNA, 120 bp, Artificial Sequence
  ENSG00000260372_70 (sequence is synthesized)
gagttaggaagagagattgcctgtggtatcagatcatgccatggggattctgagtccatgctgagtggggtttcttttcaggatttcattctgagaaagaatgcaaaggaagaatataga

SEQ ID NO: 952598 - DNA, 120 bp, Artificial Sequence
  ENSG00000260372_71 (sequence is synthesized)
attacactagcagcaaagcagaaggacagaagggaagacaggagtcaagtgggttgtcatatgatgaggtcagagtgaatagagcactaacaaaactaagcgagcatcaaatggatattt

SEQ ID NO: 952599 - DNA, 120 bp, Artificial Sequence
  ENSG00000260372_72 (sequence is synthesized)
gcaaggtctatgtatgcatgcattcagatacattttatcatctttattttttagaatattatttcattaactctaagttttgcagctttttggggtttccaaaatgggttacctctccta

SEQ ID NO: 952600 - DNA, 120 bp, Artificial Sequence
  ENSG00000260372_73 (sequence is synthesized)
aaaacagttgtacttgattcaagatatcaattaaatgggtactggaggcagccatggccacagcctctccttttgttccctttctttgtgagggcaagtataggttgcactgatcctgac

SEQ ID NO: 952601 - DNA, 120 bp, Artificial Sequence
  ENSG00000260372_74 (sequence is synthesized)
tcgctgagtgaagaggctctgagactagagtttgagaacatctgcctaaggaagagcttacgaattccaaaaccatggcaggaatggcgatccttagagaagatggattcatttcaggga

SEQ ID NO: 952602 - DNA, 120 bp, Artificial Sequence
  ENSG00000260372_75 (sequence is synthesized)
catgttaactgtaaaaagatcaactcttcctctctgaaccaacagcctgtgtctactcccaagtgcaagtgtcctgagagaggtatggctgcatgcctgccagggagtttccttccttta

SEQ ID NO: 952603 - DNA, 120 bp, Artificial Sequence
  ENSG00000260372_76 (sequence is synthesized)
cttcatagcactgtttgttcacaacattttcttccttattgacttgaacacaaggacaccacctacctcatgtcttccttcttcccgtggatgtccagatgaagcactccacactccttt

SEQ ID NO: 952604 - DNA, 120 bp, Artificial Sequence
  ENSG00000260372_77 (sequence is synthesized)
tcttggttctcctgttggcttcagaatgaacataattaagatgattaacgatcaactcaggcctgaaaaatgagtaactgtaggtcatgttgccatgaagttacgaagaaaaagaactct

SEQ ID NO: 952605 - DNA, 120 bp, Artificial Sequence
  ENSG00000260372_78 (sequence is synthesized)
tcagaggtgtatacatgttcctggccactctgcttcttagggtggagttagaggactccccgccctccttgcctgcgaaggaggaggcgtggccacacagataaagctggtctgaaaaga

SEQ ID NO: 952606 - DNA, 120 bp, Artificial Sequence
  ENSG00000260372_79 (sequence is synthesized)
agtgcaagtgttcgaaagcacaaaggcagactgtctacccgcgacagttcgcaagttgcggtggcggggcggctgtgcggagcgcgcgtgcagagttttcacctggcaagaggttgatga

SEQ ID NO: 952607 - DNA, 120 bp, Artificial Sequence
  ENSG00000260372_80 (sequence is synthesized)
tttaaatgtcaaaagaggcagactccagataaaatgctgaacaaacaattttgaggacttagacctttcttttctgccattactacttctcaagcttcttctgattcccagagaatggga

SEQ ID NO: 952608 - DNA, 120 bp, Artificial Sequence
  ENSG00000260378_0 (sequence is synthesized)
ataaaatgacaccaaggcatattataatcaaattgcttaaaaccaacgataaagagaaaatctgaaaagcagccagacagaaaaaacacattatacagaggaaaagattcataaactgaa

SEQ ID NO: 952609 - DNA, 120 bp, Artificial Sequence
  ENSG00000260378_1 (sequence is synthesized)
gaccgatagcaaaatgatgttcagttaagcaaattcaacatgtctgaaccttcataaattcgcccccagtgatgctgtcctgcagtgtgatcctggcctcgggagacgtctgtccccagc

SEQ ID NO: 952610 - DNA, 120 bp, Artificial Sequence
  ENSG00000260378_2 (sequence is synthesized)
agagctaatcacctttactctttgggtgaaattgaaactgataatattttgatgtcaacgcatctcattcaagagctgagctgtgaaatcctacgaagccatggcagggctttctgaggt

SEQ ID NO: 952611 - DNA, 120 bp, Artificial Sequence
  ENSG00000260378_3 (sequence is synthesized)
ggggagaacctagatagagcctcagatcctgggcatcgatattccacatggatcctgtttgtacctcttgtattcacaccggggaaactgcaaagggaagactgctaagtaatgtaaggg

SEQ ID NO: 952612 - DNA, 120 bp, Artificial Sequence
  ENSG00000260378_4 (sequence is synthesized)
ggcccgtgcctgcacaaattcttcctagcaggcacactgggggccttagcagcgtatgtgttgtgagcgagtaacactttgcatccgcaacggacttcatgcctttcagacaatctgcca

SEQ ID NO: 952613 - DNA, 120 bp, Artificial Sequence
  ENSG00000260378_5 (sequence is synthesized)
gaccagtcctaatggcaaccttttaaaaaaggatgacaagtccttctagcaggctgtcacatgttgccagattaaaacattgtgtaattatttacaggagacggtggggtgtcagatcat

SEQ ID NO: 952614 - DNA, 120 bp, Artificial Sequence
  ENSG00000251577_0 (sequence is synthesized)
tatagaggtggcataaatctggaggttctgcaaagtcttcccagaggtgaagtattcaggctgatctggaactctggctggataatggagaagagcaatctgggcactgttaccactggg

SEQ ID NO: 952615 - DNA, 120 bp, Artificial Sequence
  ENSG00000251577_1 (sequence is synthesized)
cagaatgacatggcggccatgccctcttcatgatctcttgttgtgatctatcactgggacagaaggaaggtaaaattctgagattttggaggaagaagttggcccatagaagaatcatcc

SEQ ID NO: 952616 - DNA, 120 bp, Artificial Sequence
  ENSG00000251577_2 (sequence is synthesized)
agttagaaccccaagatcattatttggggcatctaattattaatgtgggatgctttataaagtgtgtatgggggtcttgaaagataaagcctgtgcctctctcagtgaattcttaaattt

SEQ ID NO: 952617 - DNA, 120 bp, Artificial Sequence
  ENSG00000251577_3 (sequence is synthesized)
cattgaaaatatagtggttgaggaccaattcctcatcctgaagtttacaatgtaatgaaaaaaaggaaatgtataattttaataaaaatgcatgcattgaaatgtgatggtgcagcaaga

SEQ ID NO: 952618 - DNA, 120 bp, Artificial Sequence
  ENSG00000251577_4 (sequence is synthesized)
ggctttagaaattcctgttgcagagatttatataagactgccacatcttactggagaatgatgaaataatgaagcagaaataatctgaagataatacctgagaatcaaaagggataaagt

SEQ ID NO: 952619 - DNA, 120 bp, Artificial Sequence
  ENSG00000251577_5 (sequence is synthesized)
aatcacagtgcattattccactagttctaaatgttttcaaataaaaaaagattaaagacaggcttgagaggcatacaaatgatttcgacaaagccataaatttgaaaatatgctgagtaa

SEQ ID NO: 952620 - DNA, 120 bp, Artificial Sequence
  ENSG00000236378_0 (sequence is synthesized)
ctctcccctccccatccactctagttagagggatgtggactagaatgggaataaggacgcagactccagagcagactgcctgcatgaactccaggtccccaccagccagttctaaactaa

SEQ ID NO: 952621 - DNA, 120 bp, Artificial Sequence
  ENSG00000236378_1 (sequence is synthesized)
aagttcagatattctgaaccatggaacaaacatgatgtggcctgctgaagtagaaatgtggacttttgggatgtgagaccgaaatcactcatagataagggtccttcctaaatctacaga

SEQ ID NO: 952622 - DNA, 120 bp, Artificial Sequence
  ENSG00000236378_2 (sequence is synthesized)
gtgggcaacaaacctaattcacttgttaaaataatcattgagatggaaattgcaaacgttctgactctggagagacagagggtgactggcaggcaaaggagaaatctcaggcttcagtaa

SEQ ID NO: 952623 - DNA, 120 bp, Artificial Sequence
  ENSG00000236378_3 (sequence is synthesized)
aaagggttcagtgatagagaaagccggagatgatgaggctgggagagtaagcttctcttaccattgttctctattctccctactcccatattcttccagtgggacaaagtgccccaaagt

SEQ ID NO: 952624 - DNA, 120 bp, Artificial Sequence
  ENSG00000236378_4 (sequence is synthesized)
ataagtcagtgtgtcccaaggggtctggagtttaggtacctgaacatggaagagggccttgctaaactggtttgacctttctctcatccccagcaaagttctgaatgcgggttctgactc

SEQ ID NO: 952625 - DNA, 120 bp, Artificial Sequence
  ENSG00000236378_5 (sequence is synthesized)
tgagctgaaggcatacttcatgaagtttcctgctgccctttcactacacagctggacttggaggcaaacttggagataaaaatatagttcccgtgctatcccttataaagatttaagaga

SEQ ID NO: 952626 - DNA, 120 bp, Artificial Sequence
  ENSG00000236377_0 (sequence is synthesized)
gggagacatgagacagcaatcagtatgtataagatgtacattggttccatctggaaaggggacaactcgaggtgaaggcgggacaactcaaagcgcggagggggcttccagatcatagat

SEQ ID NO: 952627 - DNA, 120 bp, Artificial Sequence
  ENSG00000236377_1 (sequence is synthesized)
ccaccctgatttcagcgggcgttcctgggtcttgtatgcactaggtgccctcaatgcttggcaactggaatgggttagcctggaggcatttaggctgtccttctacaaccacagaagagc

SEQ ID NO: 952628 - DNA, 120 bp, Artificial Sequence
  ENSG00000236377_2 (sequence is synthesized)
agcagagatcttctcagaagagcttttgaataaatgaagttgttcagaatggccttgttaaaatgactcacttgtcaaaaaactagatgtgttggaaggctgggttggaagacaagatgt

SEQ ID NO: 952629 - DNA, 120 bp, Artificial Sequence
  ENSG00000236377_3 (sequence is synthesized)
ctgagaagctgtcctgctgcatgaggagtttcattgctacacacctagtctctgggtcctgtgtttttggcctccagcttacttcgtgaacataataaaggaaaggcattttctcttgtg

SEQ ID NO: 952630 - DNA, 120 bp, Artificial Sequence
  ENSG00000236376_0 (sequence is synthesized)
gacacagacccagaccatatcagagtctgcataggaggatctttcctgctcaggaagatggtcaaacctcatagaggtagtttcaaaccacaggacaatttctgtgtcttcacagagaag

SEQ ID NO: 952631 - DNA, 120 bp, Artificial Sequence
  ENSG00000236376_1 (sequence is synthesized)
ctgtgaaagaaatggcttgactgtaagatgttctcagtctaaccaattttaggaaagaaaatatgtgaaggcagaggatccaaagcgattcccttcaaaccatcctaccccatgggacac

SEQ ID NO: 952632 - DNA, 120 bp, Artificial Sequence
  ENSG00000236376_2 (sequence is synthesized)
cctttgtgaactccctaaggtaacagcagtccagaacacagatgacctacaggatttctgttcctttccagctttttattttaccattgatgcttcctttctcctataaaggaaacaaca

SEQ ID NO: 952633 - DNA, 120 bp, Artificial Sequence
  ENSG00000236373_0 (sequence is synthesized)
agactcaggactgcaacatcaactcttaccttgaatttccagactgacctacaccttttgaatttgctatcctccacaatcatacacttgattagccttaggcagtcctgtgcatcacag

SEQ ID NO: 952634 - DNA, 120 bp, Artificial Sequence
  ENSG00000236373_1 (sequence is synthesized)
ccttctgcaatacctgccagatcatctacagaagctagggtgaaaacccagggtattatatccttagaatttatttctaccagaaagttgccactttatatattctgccaacaagcttgc

SEQ ID NO: 952635 - DNA, 120 bp, Artificial Sequence
  ENSG00000236373_2 (sequence is synthesized)
ttgcaagaggagaagccactattattcccgagtcagtggcatgaacacgtggactgcagagataactgaggtaagatttgatgaatgacttccttgtgtcattatattctgaagtggcag

SEQ ID NO: 952636 - DNA, 120 bp, Artificial Sequence
  ENSG00000236373_3 (sequence is synthesized)
tttcctgtgattcttattcatactgattttttgaacactagcaatgacttccctgatccttgctttatcactcatcccaaaggtttggtaactttccaatctctgtattacatccctttc

SEQ ID NO: 952637 - DNA, 120 bp, Artificial Sequence
  ENSG00000236373_4 (sequence is synthesized)
agtttgaaatctcaagcatattctgtttttctaaccaacctctgactgatatgcagaatttcaacagctgcccaaggtctcacagttaatcagatttgaatccagatctgtccagctttt

SEQ ID NO: 952638 - DNA, 120 bp, Artificial Sequence
  ENSG00000236373_5 (sequence is synthesized)
gactatatgaattcttgagttctgtatctttcttcagacgattgtgggttgctttacattcctaaatggagaatagcatgtttggagttctgtagggggaaaagattatacctctatatc

SEQ ID NO: 952639 - DNA, 120 bp, Artificial Sequence
  ENSG00000236373_6 (sequence is synthesized)
agaagtctgaggcaaattaaaatatatagctacaaggaaaccagaaagaactatctgaagatttgaactactccttttgttatttttcatagccatgggttaaagagggaggatagtaga

SEQ ID NO: 952640 - DNA, 120 bp, Artificial Sequence
  ENSG00000236373_7 (sequence is synthesized)
gattagcaagagggaaaacaagagatttgtgatttggagtgacacaactactgatccagttataaccacccatccctgcatttgtatgtttggatgagtatttttaaaatattaaattct

SEQ ID NO: 952641 - DNA, 120 bp, Artificial Sequence
  ENSG00000236373_8 (sequence is synthesized)
agtcattgtcaatatttgtagtataatgtaaatattatccagaaggggctgatttatgtaaaatatttagtttgactcaggaagaataaataacagatcacattgttgttgctaccattc

SEQ ID NO: 952642 - DNA, 120 bp, Artificial Sequence
  ENSG00000236373_9 (sequence is synthesized)
atcttataaaagttaacaattaaatttagaaacatgcttatttatacattattgacatttcagacacaattgattttatttgcttataaataactagctctgcaacaatgttttactttt

SEQ ID NO: 952643 - DNA, 120 bp, Artificial Sequence
  ENSG00000236373_10 (sequence is synthesized)
ccattcatcagcttgtttttaaaatgttttgaaaggacagagagtgaaagttggattaacaatgaagcaattaatttaattgcaaaagaaatgactaggcaaaatatatagtgtaaagga

SEQ ID NO: 952644 - DNA, 120 bp, Artificial Sequence
  ENSG00000236373_11 (sequence is synthesized)
aggaatctagataagtacttgtgttgctatggggactggatttatagatgaccttaaaaagagaattaatttccttggatgtttctcttgtgcagttttactctcagattgtaaatggtc

SEQ ID NO: 952645 - DNA, 120 bp, Artificial Sequence
  ENSG00000236373_12 (sequence is synthesized)
gggatacttaacctataatatacaaaggattttatatccccttataaatatgacatgttcaactattctgcaagagggactatggaaacccctagaaatgtcacttaaggagaatctggg

SEQ ID NO: 952646 - DNA, 120 bp, Artificial Sequence
  ENSG00000236373_13 (sequence is synthesized)
ggcattcgggaataattatttgaaaaattgcaactagagagaaggaggagtaaaatggttgacgagaagctttcactaattatccttcctgctggaacaccaaactgaacaactatccac

SEQ ID NO: 952647 - DNA, 120 bp, Artificial Sequence
  ENSG00000236373_14 (sequence is synthesized)
tggcatgaacacgtggactgcagagataactgaggtaagaaagctatgaacctggaacaagaatcatggggagaagcaatatgcaattttgtgaattatgaatttaagttcataaaggga

SEQ ID NO: 952648 - DNA, 120 bp, Artificial Sequence
  ENSG00000236373_15 (sequence is synthesized)
gaagccctgaagaagaaagaccaggaaaattggtaagagaatcatttcagtttgaatgaaccaggacaaggcaccagagggctttaaccagccatgctgaccacagaatggtgcttaact

SEQ ID NO: 952649 - DNA, 120 bp, Artificial Sequence
  ENSG00000236373_16 (sequence is synthesized)
cagtgccctcttgaatacagaaggaaaaagggcaggcttaaattaaggctgtgcccaggcatcaatgaggtgacgagaagactaaggcttagaagacttaagtaacttgcaaaggtcatg

SEQ ID NO: 952650 - DNA, 120 bp, Artificial Sequence
  ENSG00000236373_17 (sequence is synthesized)
gagtgatcaggtggctatgcatataatcccaagagtagtctgtgtgaaagcttatgtgctctatgctgcttttctacatcagaaaggtggaaattctccctctctgttgtatccctcaca

SEQ ID NO: 952651 - DNA, 120 bp, Artificial Sequence
  ENSG00000236373_18 (sequence is synthesized)
gaatgaccacatgattattctgatagcttaatgaaaagtgtgttcctggctaggcaaacttctcatttgcttagttcagtgctggatataaagaagatgaatgtggcctcagacatctaa

SEQ ID NO: 952652 - DNA, 120 bp, Artificial Sequence
  ENSG00000236372_0 (sequence is synthesized)
tttccctgggaggagttccctgtttaccctcccttgctggggagaaggcagagcatcgcaggggacttggcctcacaaaggacacagtgagatgagtccttcagggcagggctgccagga

SEQ ID NO: 952653 - DNA, 120 bp, Artificial Sequence
  ENSG00000236372_1 (sequence is synthesized)
aacagccatagctttgctggaagagggacaggagacaatgacaattgatcgaagcctccagcccctcctgggagagtttggctgtttctttggccttgtcctgatctttcctggactcac

SEQ ID NO: 952654 - DNA, 120 bp, Artificial Sequence
  ENSG00000236372_2 (sequence is synthesized)
ctctgtcatccagctggatttgcagtgctggctcaaattgctacttgaaaccagggccagaccaggcatgtgggcacctctggcgagcttgtaacttgacatgccatcaaaataaggcac

SEQ ID NO: 952655 - DNA, 120 bp, Artificial Sequence
  ENSG00000236372_3 (sequence is synthesized)
tttaaatgtttgcacaatgaaaacttactagggccagacagaaatgacaaacagatttcctttattattccttttcattggccaagcaattcatgtccaaaaaaatttttaaatcaaaat

SEQ ID NO: 952656 - DNA, 120 bp, Artificial Sequence
  ENSG00000236372_4 (sequence is synthesized)
atctagtaaaacatgctccattattttcaataattctccttctcttaagatatctttcctgtagtttcttaaaggaggtaactcttaggaggcatatccaataatttgaaatataaacaa

SEQ ID NO: 952657 - DNA, 120 bp, Artificial Sequence
  ENSG00000236372_5 (sequence is synthesized)
caaaactcattcttaattcatagcaccacattgtactttgtttccaaaatttctactggcctcagctgtcagcttttagcatatgtaaatgcacgtgaacacaactaatgctcagagaag

SEQ ID NO: 952658 - DNA, 120 bp, Artificial Sequence
  ENSG00000236372_6 (sequence is synthesized)
cagagaaggatggaaattctacctaagtgagaaaaacgaatggactcttcttccttccttccttccttcttcctttcttccttctttcctttcttccttccttccttccttcttccctcc

SEQ ID NO: 952659 - DNA, 120 bp, Artificial Sequence
  ENSG00000236372_7 (sequence is synthesized)
ctcccttttctctttctttctctctctgttgttttatctgcttgttttgtttgtttgtttacgtactccaggtcttacccaccaaggtcagagtaacagtcatttatacccacacagtaa

SEQ ID NO: 952660 - DNA, 120 bp, Artificial Sequence
  ENSG00000236372_8 (sequence is synthesized)
ggtgaggaagggtttgggggacctgagttagccaggtagatattggtgacagttttgtgccatcagacagctgcccagcaggcacatccccttctttatctgttttagaagaatcttcct

SEQ ID NO: 952661 - DNA, 120 bp, Artificial Sequence
  ENSG00000236372_9 (sequence is synthesized)
gggcatgtctcctatgatgagttcctgaacgcattcttgctacttcaacagctataaagtgtgtgtttgggaagcaggaatgttggatacctggattcaaactcgcccagcctgaatcca

SEQ ID NO: 952662 - DNA, 120 bp, Artificial Sequence
  ENSG00000236372_10 (sequence is synthesized)
ggctcagcttcctcctagctgtgtggccttgacaagatggtgggaaagaaaggggccagagaacacaagagacaagcacccccgctgttaaggcctcttcgttccagggttggaaggaag

SEQ ID NO: 952663 - DNA, 120 bp, Artificial Sequence
  ENSG00000236372_11 (sequence is synthesized)
acgctccacagcgatcttcagggcagagtcaccctgctgttctgacatccatcaagccgggcctgacttctcaagattgctggctgtcccaagagagcaggtggcataggcagtatccac

SEQ ID NO: 952664 - DNA, 120 bp, Artificial Sequence
  ENSG00000236372_12 (sequence is synthesized)
aggtccaactctctcccaggagaagagattcgaagcagggatctgccacctttctgacaagcaaaggaagcaaccaaagcctgcaaggaagaccaaactgtctactagaataattaaggt

SEQ ID NO: 952665 - DNA, 120 bp, Artificial Sequence
  ENSG00000236372_13 (sequence is synthesized)
cagaaagatcacaattccaccaaggagagaaaacataaagacccttgaaatacctgctgtgatttgggaaatgattttgtgtagattttctagtaggaaaatccatgctgagatgtagag

SEQ ID NO: 952666 - DNA, 120 bp, Artificial Sequence
  ENSG00000236372_14 (sequence is synthesized)
agaagagaattatgaacagaaaaaaaacatgtgtgactcgcaaggtagtggcaaagataattctagtaaacagggttaaaataatagaagagcttttgactaatacacccggggaaaaga

SEQ ID NO: 952667 - DNA, 120 bp, Artificial Sequence
  ENSG00000236372_15 (sequence is synthesized)
gatactgaagtgaaaacgggtccacaaataaatcaggctgggcatgaaattaatgatgggtctgaaatggccgagatattgaactcattcttcaaacctgtcttccgcaatagaaatgaa

SEQ ID NO: 952668 - DNA, 120 bp, Artificial Sequence
  ENSG00000236372_16 (sequence is synthesized)
aagaaaaatacagacaatgaggaagcgatagaaaccttctgaaaataactcctggcacaagcagaagcacgacccctcggaacatctaagtgccaccctgaacaggtgtagacatgcccc

SEQ ID NO: 952669 - DNA, 120 bp, Artificial Sequence
  ENSG00000236372_17 (sequence is synthesized)
ttgggggatatgaggaattgattaggatctactgtacatttagaatagtgtctgaaaacggcatcatggagctattattgttattttaaataaataaagttagagatggttctgaaagaa

SEQ ID NO: 952670 - DNA, 120 bp, Artificial Sequence
  ENSG00000196566_0 (sequence is synthesized)
tttgcttcttgatccccgacatgctggctggctgcggcggagcccgggtcccgggagcagagaccgaaggacgcagggacggcggcggcggcggcggcagcagcagcagcagcagcagca

SEQ ID NO: 952671 - DNA, 120 bp, Artificial Sequence
  ENSG00000196566_1 (sequence is synthesized)
gcggctgccggactcccgggaaggagatgctcgtgtcaaagagaagagctacaagactgtttctgcccccaaggtgctccagtccattggagaagcaaacacataactgagaatgactca

SEQ ID NO: 952672 - DNA, 120 bp, Artificial Sequence
  ENSG00000196566_2 (sequence is synthesized)
ccttgtgatggctgctatgatgaggttcatacctggtgctacaggacacagagaggcataataatgtggtcacactaatgcaagaagtagattcccatggtcttgggcactctgcccctg

SEQ ID NO: 952673 - DNA, 76 bp, Artificial Sequence
  ENSG00000196566_3 (sequence is synthesized)
cctgtggctttgcagggtacagcctcccttctgtctgatttcacaggccggcattgaatgtctgtgacttttccag

SEQ ID NO: 952674 - DNA, 86 bp, Artificial Sequence
  ENSG00000197210_0 (sequence is synthesized)
agactgaggcaggagaatcactttaagcgggaggcagaggttgcagtgagccaatctgatgctggagcatctcggcctcaatacct

SEQ ID NO: 952675 - DNA, 70 bp, Artificial Sequence
  ENSG00000197210_1 (sequence is synthesized)
agcagaaagggagtaagcttgcagggaggctgggggacaagatcccaggatctcagcctcgcactggttt

SEQ ID NO: 952676 - DNA, 62 bp, Artificial Sequence
  ENSG00000197210_2 (sequence is synthesized)
cggcctgtgagcatgggcttgattttcaaacaggacccggagggtagggacagacagtgctg

SEQ ID NO: 952677 - DNA, 120 bp, Artificial Sequence
  ENSG00000197210_3 (sequence is synthesized)
ttttcaaacaggacccggagggtagggacagacagtgctgtcacccttaggtgctgaacactcagaaacgggccagcggcagcccttccctcacctgcagacaccagattgggcagaaca

SEQ ID NO: 952678 - DNA, 79 bp, Artificial Sequence
  ENSG00000197210_4 (sequence is synthesized)
agcccttccctcacctgcagacaccagattgggcagaacagcacgtggcacttgcagctcttgaggggctgctgaggcc

SEQ ID NO: 952679 - DNA, 120 bp, Artificial Sequence
  ENSG00000197210_5 (sequence is synthesized)
ccttggcgtggtctccaccaggtccccagcccaccagtgcagggcgcccctgagcctgctgctgccacgggccctgtctctacccaggacgtccccacaccctcgcagtgtcagggaaat

SEQ ID NO: 952680 - DNA, 79 bp, Artificial Sequence
  ENSG00000197210_6 (sequence is synthesized)
tacccaggacgtccccacaccctcgcagtgtcagggaaatgatcatggtggcggtgacactcgcaggcaggggcccgtg

SEQ ID NO: 952681 - DNA, 120 bp, Artificial Sequence
  ENSG00000197210_7 (sequence is synthesized)
tcacgagcagagccacatcccgggagtccgagaaaggtcctggctgggctcagccacctcattggccacgggcagcctttgtcgtgtgagccttgctctcctggggaggctcaggctgac

SEQ ID NO: 952682 - DNA, 120 bp, Artificial Sequence
  ENSG00000197210_8 (sequence is synthesized)
gtcgtgtgagccttgctctcctggggaggctcaggctgacggctgatgtgggcattgccgaaggtaacctgtggcccagtgtatatggccgggtctcctcaagctgcattcattcaagta

SEQ ID NO: 952683 - DNA, 120 bp, Artificial Sequence
  ENSG00000197210_9 (sequence is synthesized)
ccctgtaagctgggtgagctactgaagccaaggcgggaggcagctgacaacacccacagcccatgcggaggtggtggaaaggctggactcagcagcaacaccaaatcctggaccaggcag

SEQ ID NO: 952684 - DNA, 120 bp, Artificial Sequence
  ENSG00000197210_10 (sequence is synthesized)
aaaccacccaagactgaggggctcgtgccagagcggtggccacagccccaccccaccggctcaggggttcttcccagcggcgctgatcatgaagtcaacatgcacgcaagtcgtctcagg

SEQ ID NO: 952685 - DNA, 74 bp, Artificial Sequence
  ENSG00000197210_11 (sequence is synthesized)
cgctgatcatgaagtcaacatgcacgcaagtcgtctcaggaaacttcttaatgaaagtgtagacaccagccact

SEQ ID NO: 952686 - DNA, 75 bp, Artificial Sequence
  ENSG00000197210_12 (sequence is synthesized)
gcctgcattgcagaaggagagccgggtccccctcctggagaacgctgcgttccccagccccacaccggctttgcc

SEQ ID NO: 952687 - DNA, 79 bp, Artificial Sequence
  ENSG00000197210_13 (sequence is synthesized)
tgcattgcagaaggagagccgggtccccctcctggagaacgctgttgaggcaggaggcggagacttcagaacccactcc

SEQ ID NO: 952688 - DNA, 120 bp, Artificial Sequence
  ENSG00000197210_14 (sequence is synthesized)
ctgccaggacacggattgtccagggattacattccagcatcttattagaggaccgaagcagagggtgctgtttcaacgccaccaccaggagagaggcagaggggctgtgccgtgctagag

SEQ ID NO: 952689 - DNA, 120 bp, Artificial Sequence
  ENSG00000197210_15 (sequence is synthesized)
tcctcagggagggagtgacctcgaccctggctgtgctgcaagctgactccagccttggggtcagcagcacccggcaaacagcagcaggaggagccgctagagcagctgctcatgggcaga

SEQ ID NO: 952690 - DNA, 120 bp, Artificial Sequence
  ENSG00000197210_16 (sequence is synthesized)
ccccagggagcccaaggcaggggaggctcagcatggaatgaaacaggggagtgagggacacaaggaggtgggaagtgggagggtcccagccccaccaagtacgcagagaccccctcgaca

SEQ ID NO: 952691 - DNA, 120 bp, Artificial Sequence
  ENSG00000197210_17 (sequence is synthesized)
tcctggacaccacaggggcacctgcaggctgggagaccaggtcctctgtgcatgggcccgggaggcagacctgccctaagggtgatgcacaggctacaggtgctgcacgctccagcgccc

SEQ ID NO: 952692 - DNA, 120 bp, Artificial Sequence
  ENSG00000197210_18 (sequence is synthesized)
actctagacatcagcctccaggttgactaagggtcaggtcatgtttgaaaccatgcttggctggaccaggacccatggcaagagcacctgggcaccagtgtttagccctggtctgcagga

SEQ ID NO: 952693 - DNA, 120 bp, Artificial Sequence
  ENSG00000197210_19 (sequence is synthesized)
aggaggacagcagactttaggaccccacagcacggcagtgctgaccatttcacccacttggcctccttgagaaatatggatggggagccctctggggatgggcaaggccttccaggatag

SEQ ID NO: 952694 - DNA, 120 bp, Artificial Sequence
  ENSG00000197210_20 (sequence is synthesized)
gctcagttttggtcccctgctttttgaggttgggttaaaattccgaccatggcagaggaagcacagctcgggttcccacacctcacttttcacagcctctgagggcagcagtgcacgtgg

SEQ ID NO: 952695 - DNA, 120 bp, Artificial Sequence
  ENSG00000197210_21 (sequence is synthesized)
aggagacgtctcccatgaggccaaggcctccagtgctcaccgatgccctctgcgaagttggggtagaactcgtcagtgaagaggggctcgggcagctcacggaagtacagcttcagcatg

SEQ ID NO: 952696 - DNA, 120 bp, Artificial Sequence
  ENSG00000197210_22 (sequence is synthesized)
cctgcgatggcgttcacgtccatctcgctcatcatcactgacacgtccttgttatctggaaagagcacggaaatgcagcggcctccttgaagatcctgataaatgaagaaaagacacaga

SEQ ID NO: 952697 - DNA, 120 bp, Artificial Sequence
  ENSG00000197210_23 (sequence is synthesized)
gaaggatgtgacatgcctgggccatggagcactctgagatctcatcgtggacaccactgcccacacctccatcccgtcctgcgcaggccgacactcactgacgttgaagcctgccttcag

SEQ ID NO: 952698 - DNA, 120 bp, Artificial Sequence
  ENSG00000197210_24 (sequence is synthesized)
tgcctggatgtctgcggccaccccagacatgcggtagatgcccacctcctccatgcctcggcgctcgatctcctccacgcactgacgcacgatgtagggcaccttggacctctctctcct

SEQ ID NO: 952699 - DNA, 120 bp, Artificial Sequence
  ENSG00000197210_25 (sequence is synthesized)
gcgggaggagggaatgttctcagtgtcctaacagccctgcttgggccataacacaggagacctgctccctatctgcgcacccggaggtggggtgaggacggtgacgaaggtacccaggtc

SEQ ID NO: 952700 - DNA, 120 bp, Artificial Sequence
  ENSG00000197210_26 (sequence is synthesized)
tggggctgcacacagagccttctgcatgcctgtcctccctctgcaagctctgtcctcattgcatgtactttctcaggaacctttcaagcggccagaacccctgcgaatcacacatgacct

SEQ ID NO: 952701 - DNA, 120 bp, Artificial Sequence
  ENSG00000197210_27 (sequence is synthesized)
ttgtgggaaggtcaggaggcctgtctaagtcaagtcagcacgggaagggcatctgacagattccaggcctggggttagcagcctgtgcccccggctgggaggtcagacccggtgttggtc

SEQ ID NO: 952702 - DNA, 120 bp, Artificial Sequence
  ENSG00000197210_28 (sequence is synthesized)
ctgccacccacgtgctgtgtgagaggagaatccctgacccctgccctgggccttaacacacatccgacgaatgaatgaagggttgcctcagcaccggtgctccaagtcctgcgatgctaa

SEQ ID NO: 952703 - DNA, 120 bp, Artificial Sequence
  ENSG00000197210_29 (sequence is synthesized)
gtgcttttctcctctgagtcttagcaatggacaattccaatacctccacacaggacactagagtaagaatccttcacagttagaacgcagtgctgtgcggaggccttaacttgagttctg

SEQ ID NO: 952704 - DNA, 120 bp, Artificial Sequence
  ENSG00000197210_30 (sequence is synthesized)
ttttgcacctggatttaccagcacatcaaagctgcttcgcaagccccctcatcagcagggcttatgtgggggagctgctgatggagtcctcgctgctcatgcccacagccctcccagagt

SEQ ID NO: 952705 - DNA, 120 bp, Artificial Sequence
  ENSG00000197210_31 (sequence is synthesized)
gctatgcgagtggctgccgtgcagttgggggtggggcgtggtgtttagacacagataggagtccagggtatgactgatggaggccccggcccacgtgaccagcaaggtcagaggcccagc

SEQ ID NO: 952706 - DNA, 120 bp, Artificial Sequence
  ENSG00000197210_32 (sequence is synthesized)
cagattccatcctggggaagcaaatgaattctcagaggaagtggtctgtgtctgtatgaactgctctcaaaccaacaaataggcttctcttggcaactgactcgtgacaaagggttcaag

SEQ ID NO: 952707 - DNA, 120 bp, Artificial Sequence
  ENSG00000197210_33 (sequence is synthesized)
attgtttgaaaaaaaaaaaaaagggggggaacagggaggcagtaggtcctggaaaagtaaattctttattttacaataagaaagtgattacatattttattttttttacaatggtggaaa

SEQ ID NO: 952708 - DNA, 120 bp, Artificial Sequence
  ENSG00000197210_34 (sequence is synthesized)
attagaagtgattgtgaaaatgatgtctacccgccttgctgatgagtaggatgtgatttggctctttaggaaactgaatttgcagaacttaagaatattgatttataaagggcatggcca

SEQ ID NO: 952709 - DNA, 120 bp, Artificial Sequence
  ENSG00000197210_35 (sequence is synthesized)
ttgacccagtccatcttatgcaaatctggatgccataaataatatttaaaaatgaaagtattggggtggaggttgcagtgagcggagatcgccccactacactccagcctggtcaacaga

SEQ ID NO: 952710 - DNA, 120 bp, Artificial Sequence
  ENSG00000239498_0 (sequence is synthesized)
gtgtgagctgactgtcccctgggagtaattctgtgaccataattagccacacagctcctctggaggcccctctaaaggacccccaagcttgggcacatgacccaaggtcagccagcaaga

SEQ ID NO: 952711 - DNA, 120 bp, Artificial Sequence
  ENSG00000239498_1 (sequence is synthesized)
tgccctgtcccggaaatttacatctgtgtatgagccacatgagaacagggaagcttgcagtgagagcacagcgattttcctggaactgccccacaaggctgtctctgagccccttttgct

SEQ ID NO: 952712 - DNA, 120 bp, Artificial Sequence
  ENSG00000239498_2 (sequence is synthesized)
gggtccccagagctgctgtggctcccattcttcctgaggtctgagattccatcttccttcagttctgtaggatcctgattgttacacgaactgtccacctccatccagagccgtgtggct

SEQ ID NO: 952713 - DNA, 120 bp, Artificial Sequence
  ENSG00000239498_3 (sequence is synthesized)
cctgttcacgtgacttgtgttggccagtggaatatagtttgatctgcagtagtttgaatctgaggatgctgaacctgtggataaggagagcctacttttcttggacaaatgccctgtgtc

SEQ ID NO: 952714 - DNA, 120 bp, Artificial Sequence
  ENSG00000239498_4 (sequence is synthesized)
agaagagtgtggtaaacagaagctcagctccttcaaggatgacagccttggttacaccaccagtttctctaggaaaagagaccaaagtcagggagcagtcgttttcacatgggatgaact

SEQ ID NO: 952715 - DNA, 120 bp, Artificial Sequence
  ENSG00000239498_5 (sequence is synthesized)
cagtgtaagaggcaagcagattgtggaagattagaagataatggatactattattccatccagattcctcttcaggaccaaggactcattttccagctggcaggaatgttagctactgac

SEQ ID NO: 952716 - DNA, 120 bp, Artificial Sequence
  ENSG00000283886_0 (sequence is synthesized)
gccagtaacaaacatggctccctgaagccgctcaggctcaagagcaacatggaggtctgcacttaatcgctcctctccgggggcggccatactgaggaggcatctcttccgtgcaggcag

SEQ ID NO: 952717 - DNA, 120 bp, Artificial Sequence
  ENSG00000283886_1 (sequence is synthesized)
gctctcctggggacctcagagattctctccagcggcagcagaaaacgggcaatgggtggattcgggtccagattctggcaggagggagtttgggatcgagatctggaaaaaagcactaga

SEQ ID NO: 952718 - DNA, 120 bp, Artificial Sequence
  ENSG00000283886_2 (sequence is synthesized)
ctggaagaggacgcgatggagtcggagccgctggcgggtacaaaaaccagaggccggggaaggcgccggtgggaggcaaggcacggatggactttacctgcgcacgcgtcgcagccatct

SEQ ID NO: 952719 - DNA, 120 bp, Artificial Sequence
  ENSG00000283886_3 (sequence is synthesized)
ccgcgcacagtggtggccaccgcgactggtgctgaagtgtcggcgtgtgccgggcgctccgctgggacccgggttgctcgccctgagtctcagctttctcatctgtacggttgggacaag

SEQ ID NO: 952720 - DNA, 120 bp, Artificial Sequence
  ENSG00000283886_4 (sequence is synthesized)
tacagtaaccctcgcccgtcaagacgggccagggctgtggcgagggtccacgccttagagcaggcacctatcttgtgcagggccctgagatggggtctgactcagttcctgcggggaact

SEQ ID NO: 952721 - DNA, 120 bp, Artificial Sequence
  ENSG00000283886_5 (sequence is synthesized)
tcaccagtgacccagtcagtgcccttcagttaaagaccaccaggagcacacttatatcatggaaatcaggacagtagcagttgggattgtggcaatcaaaggggtggaaagtgaattcta

SEQ ID NO: 952722 - DNA, 120 bp, Artificial Sequence
  ENSG00000283886_6 (sequence is synthesized)
tcttgcaacgaacgaggaaggaaaactctatgcaaagaaggaatgcaatgaagattgtaacttcaaagatctaattctggaaaaccattacaacacatatgcagcagctaaatggacaaa

SEQ ID NO: 952723 - DNA, 120 bp, Artificial Sequence
  ENSG00000283886_7 (sequence is synthesized)
tttcttcctatggcaataacttaattgcatatggtatataaagaaccagttccagcagggagatttctttaagtggactgttttctttcttctcaaaattttctttccttttattttcta

SEQ ID NO: 952724 - DNA, 120 bp, Artificial Sequence
  ENSG00000283886_8 (sequence is synthesized)
gtaatcaagaaaggctggaaaactactgaaaaactgatcaagctggacttgcgcatttatgtttgttttaagacactgcattaaagagacatttgaaaagtatacacaaaaatcagattt

SEQ ID NO: 952725 - DNA, 120 bp, Artificial Sequence
  ENSG00000283886_9 (sequence is synthesized)
agtaactaaaggttgtacaaaattgtaaaactggttgtacaatcatgatgttagtaatagtaatttttttcttaaattaatttacccttaagagtatgttagatttgattatctgataat

SEQ ID NO: 952726 - DNA, 120 bp, Artificial Sequence
  ENSG00000283886_10 (sequence is synthesized)
gattatttaaatattcctatctgcttataaaatggctgctataataataataatgcagatgatgttatataaggtatatcagacctacaggctgctggcaggatttgtcagataatcaag

SEQ ID NO: 952727 - DNA, 120 bp, Artificial Sequence
  ENSG00000283886_11 (sequence is synthesized)
ccacactaactatggaaaatgagcagcattttaaatgctttctagtgaaaaattataatctacttaaactctaatcagaaaaaaagaatattctcaaaaaaatctattatgaaagtcaat

SEQ ID NO: 952728 - DNA, 120 bp, Artificial Sequence
  ENSG00000283886_12 (sequence is synthesized)
aaaatagataatttaacaaaagtacaggattagaacatgcttatacctattaacaagaacaaaatttctaatgctgctcaagtggaaagggtattgctaaaaggatgtttccaaaaatct

SEQ ID NO: 952729 - DNA, 120 bp, Artificial Sequence
  ENSG00000283886_13 (sequence is synthesized)
tgtatataagatagcaacagtgattgatgataatactgtacttcatcttacttgccactaaataacattttataattcctcaaagtaaaattgagaaatctttaagtttttttcaagtaa

SEQ ID NO: 952730 - DNA, 120 bp, Artificial Sequence
  ENSG00000283886_14 (sequence is synthesized)
cataatctatctttgtataattcatatttgggaatatggcttttaataatgttcttcccacaaataatcacgcttttttcctatggttactgcattaaactctatattaagttgtttttg

SEQ ID NO: 952731 - DNA, 120 bp, Artificial Sequence
  ENSG00000266962_0 (sequence is synthesized)
atccgcagcaggggcaggaagcgctcggtggtgaagtagcgcagggtcggcttcggggcgcgcaaagcggtgaggaagacctgcggcggcgggaggagagctgtggccaccgctgcgcgc

SEQ ID NO: 952732 - DNA, 120 bp, Artificial Sequence
  ENSG00000266962_1 (sequence is synthesized)
cggaggacgcaccgcccccactcctggagtccagcccggcgctcacctccgccacctcctcagggttctgcgccgcctcgcgaaagacttgcttgctgtgggcgaggtattggtagaagc

SEQ ID NO: 952733 - DNA, 120 bp, Artificial Sequence
  ENSG00000266962_2 (sequence is synthesized)
ggtggaaggtgtggatgtccgtgcggtccagcacctcctctgggctgcccaacaccttctccatgaaggcggtgtgcactgggccgcactcgatcaggctcaagctgctggccggagagc

SEQ ID NO: 952734 - DNA, 120 bp, Artificial Sequence
  ENSG00000266962_3 (sequence is synthesized)
aacgagtgggagggggcggacgccagccaggccccagtcccagccccaaccccagtcccagccccaaccacgtcccggcccccgaccgcgagcagcaccgctgcgctgggaagtgaggcg

SEQ ID NO: 952735 - DNA, 120 bp, Artificial Sequence
  ENSG00000266962_4 (sequence is synthesized)
gaaagggcgctggggataaccagaacatttgaaacgcgggttcctgccggagcagccctcccaaatccatctgaggctacaagggagccctggtgtcaggattcgaatctagcggggtcc

SEQ ID NO: 952736 - DNA, 120 bp, Artificial Sequence
  ENSG00000266962_5 (sequence is synthesized)
ctggccgctgtgtgaccttgggccagtcacctaacctctctgggctggagcttccccataacaataccaacacttcagcagctaggtcagcaggtggcacaatgcgtgccatgcgcccag

SEQ ID NO: 952737 - DNA, 120 bp, Artificial Sequence
  ENSG00000266962_6 (sequence is synthesized)
cccaagtgcctggcacacagctaatgtgagccgggcagagagggccagggagatcgccccagagcggctcccgcaggacagggtgctcggcgtctctaggtcagagttaagagggttcgg

SEQ ID NO: 952738 - DNA, 120 bp, Artificial Sequence
  ENSG00000266962_7 (sequence is synthesized)
ggaacgggggtgttgactcactggaccccaaagggcagcagcagaaccgccagactctcgcataagccttcgagcgcgaacttgctggcgcaataaacgtcattgaaaggcagcccttag

SEQ ID NO: 952739 - DNA, 120 bp, Artificial Sequence
  ENSG00000266962_8 (sequence is synthesized)
gtggggagacgaggttcctgaggcgcagcggccagggggtcatccccgggcagacggtgcccctccaagctgacggcaccccactccaccccccccgcggaacctgccttcaaggctcag

SEQ ID NO: 952740 - DNA, 120 bp, Artificial Sequence
  ENSG00000266962_9 (sequence is synthesized)
cactccctaccactcacccatcaatcctcccacgctcccggtcaccaacacgcgtcccgaaccgcgcctcttcatgtctggcaggaaggcctgcagcatccgcacagtccctactacatt

SEQ ID NO: 952741 - DNA, 120 bp, Artificial Sequence
  ENSG00000266962_10 (sequence is synthesized)
cacgtccagcacagaggccacggcgtcctcccccagcgcctccagcggccccagcaggcccaggcctgcgttacacactgcggagacaagaggcccgaccagcccgcctcagcatcaccc

SEQ ID NO: 952742 - DNA, 120 bp, Artificial Sequence
  ENSG00000266962_11 (sequence is synthesized)
tcagcacggcctgtcccctcgtgctccctgggcctgggaacatgttggtttcaacgcagggcggagaaggctcctaggagcccatatgcttccaggaggctcacccagcacgtccacgcg

SEQ ID NO: 952743 - DNA, 120 bp, Artificial Sequence
  ENSG00000266962_12 (sequence is synthesized)
gccctcagtcacgcgttcccgggcagcggccacggattttgagtcccttacgtccagctgcaacgtctccagggatcccggagggcatgccagggcccgggccgcctcccacagccggcc

SEQ ID NO: 952744 - DNA, 120 bp, Artificial Sequence
  ENSG00000266962_13 (sequence is synthesized)
ctgtgttttcaggtccctcaacgtggcatacactggaggttttgggagaggaggaagatctgacttcccttctggcctccaagggctcctcccttctctccctccctgtccctgcctatc

SEQ ID NO: 952745 - DNA, 120 bp, Artificial Sequence
  ENSG00000266962_14 (sequence is synthesized)
tatacctttgaagctctgggatggatctgaagccagacgtacggccaagtgcaggccgatgcccgaggaacagccggtgatgagcaccacggtgcgggccatggtgagactgtggggaga

SEQ ID NO: 952746 - DNA, 120 bp, Artificial Sequence
  ENSG00000266962_15 (sequence is synthesized)
ggctggggctctgggcttgatatcacctgcttcgccccgccccgcctgcgggcccccaccccttgttgtgtctcccacgcaatctcaaggataagccttcctgcgggtccctggcccgct

SEQ ID NO: 952747 - DNA, 120 bp, Artificial Sequence
  ENSG00000266962_16 (sequence is synthesized)
ctccccaccctgttctgagccaaaacagacatgagcccactgcttggaacaacaaactgtcctggttgctggtcagagggaggggaggctttacaagcaggtgtgggttcccacgtgggc

SEQ ID NO: 952748 - DNA, 120 bp, Artificial Sequence
  ENSG00000266962_17 (sequence is synthesized)
acagagtggccccctgggcagattcccctgggtatgcctctgtgccacaggagcgattatagtgaccgcagtttgctgcagaggctgtgaaagtaaaggcgttgggaggtgggagatgat

SEQ ID NO: 952749 - DNA, 120 bp, Artificial Sequence
  ENSG00000266962_18 (sequence is synthesized)
tgtatatgtgctggtttcgtccagggttcctagctcataactcacatgaccatggttacagtcttacgttgtcatgttggggtgcctcaggcctcaaaaaacagcctttcgtctctctga

SEQ ID NO: 952750 - DNA, 120 bp, Artificial Sequence
  ENSG00000185168_0 (sequence is synthesized)
cagcctggccaacatggcaaaaccctgtcgctacaaaaaatacaagaattagccatgtgcacctgtggtcccaggtgcctcctctgctcctttgggaaagccccacctgtcttgaggtcc

SEQ ID NO: 952751 - DNA, 120 bp, Artificial Sequence
  ENSG00000185168_1 (sequence is synthesized)
tggaggaccccagggtggcaggctcacaacagcacaggtgtcctcctacagctcccagggccgggagcctgaaaccaaggtgtccacagggccctgctgcccccagaggctctgggcaga

SEQ ID NO: 952752 - DNA, 120 bp, Artificial Sequence
  ENSG00000185168_2 (sequence is synthesized)
gcccttccgcctttccagctccccctggttcccgtgctcctcggcctgtggccccatcactctggcctctgccttcatctcatgccgagatccctgaagcgggcccagctccgttcactg

SEQ ID NO: 952753 - DNA, 120 bp, Artificial Sequence
  ENSG00000185168_3 (sequence is synthesized)
acgtctgcggtgttacccacgactgcctgggacctggccaagggctccacacaccaagaccaaggcagcaggaaggagaaaggagggaaggtaaaagactactgaaaagctttcagctgg

SEQ ID NO: 952754 - DNA, 79 bp, Artificial Sequence
  ENSG00000185168_4 (sequence is synthesized)
aggagggaaggtaaaagactactgaaaagctttcagctggggctgggcatggtggtggatcacttgagcccaggagtct

SEQ ID NO: 952755 - DNA, 120 bp, Artificial Sequence
  ENSG00000185168_5 (sequence is synthesized)
cctgctgtttcccacacgcagccatggtacagggcagctcatcccaccacctccccaaccgcagcctccagggatgtacaccctgcctcaggggctgtgcctgggccctggctggtggag

SEQ ID NO: 952756 - DNA, 120 bp, Artificial Sequence
  ENSG00000185168_6 (sequence is synthesized)
ggcacagccgtcagggaaggccctcagctgcaggatgccgtgcctcagagaccaaccaggccctcgaaggcactgtggccggcccagatgtcagcagctccagcaattaggctgggacag

SEQ ID NO: 952757 - DNA, 120 bp, Artificial Sequence
  ENSG00000185168_7 (sequence is synthesized)
atggtgcctggtgacacaaggggactgtgggggccacaggggaccctgctcacctggacctaccgtggaggccagggagggagatggactcgaagggcggaagggcccagagaaggcaca

SEQ ID NO: 952758 - DNA, 120 bp, Artificial Sequence
  ENSG00000185168_8 (sequence is synthesized)
tttgcagagcagcggccgcatttccagagctcgggagcccaacaggaatcccgtctggccatgggaccaccgcccttggggctgggggatgccgcaggggacggcagagggcagacaggc

SEQ ID NO: 952759 - DNA, 120 bp, Artificial Sequence
  ENSG00000185168_9 (sequence is synthesized)
ggggcaggctggaaggggccaaggccagcgccaagggggagcaggtgagggaccctggtgggcatctgtgggaacaaggccacgtttctccctgcgcacgctttaatcaaggacattcct

SEQ ID NO: 952760 - DNA, 120 bp, Artificial Sequence
  ENSG00000185168_10 (sequence is synthesized)
gtggttctccaaaagtgtcgcacactacatgggtgtcgtgagctgggctccgtgagagtgtgcgggtggctgggggcagcaagggagcagcaaggcctcaaacccgggcggcggcctggc

SEQ ID NO: 952761 - DNA, 120 bp, Artificial Sequence
  ENSG00000185168_11 (sequence is synthesized)
ctgcgcgccaggatgtgcggtgtgagtttcccgagctgcaggaacaaggtccacagactggggagcttcacacaacagaaactgcctcgcagttcccgaggccagagcccatcggggtgg

SEQ ID NO: 952762 - DNA, 120 bp, Artificial Sequence
  ENSG00000185168_12 (sequence is synthesized)
ctccctgaggccgtgagcccggactgtcctgggccgccccctcttccacaggctgagatcatccttggcgtctgttggcctgcggccgcctcgcccaacctctgccctcatgtccacacg

SEQ ID NO: 952763 - DNA, 120 bp, Artificial Sequence
  ENSG00000185168_13 (sequence is synthesized)
ggtcctccctgtgtgcatgttggtgtctggatctgccctttctactgtggggcaactgtcgtcgaggatagggcccaccacacaacacggcctcatcgtaactaagtatagtcagcagtg

SEQ ID NO: 952764 - DNA, 120 bp, Artificial Sequence
  ENSG00000185168_14 (sequence is synthesized)
atcctatttcccaataaggtcccattctgaggtcctggacttcaacatgtgaattttgggggccacaactctaccctggcatgcagagagagaaggggggcgtggagtccccctgggggg

SEQ ID NO: 952765 - DNA, 120 bp, Artificial Sequence
  ENSG00000185168_15 (sequence is synthesized)
aagtcccttgggaagtcacaggcccccttggtggggcaattgggacgtgggtgtgagggtcctgggtacagggagcctgcctaccaaggctctgccgacagctatttctaaattcctcgt

SEQ ID NO: 952766 - DNA, 120 bp, Artificial Sequence
  ENSG00000185168_16 (sequence is synthesized)
ggaaaataccctgtggccctcctcatctggagcgagcgacgggctggagggtgtctgagccaggctggtgccggggagcagatgtgggtggcccaacccagccccttgttcttgttcccc

SEQ ID NO: 952767 - DNA, 120 bp, Artificial Sequence
  ENSG00000229512_0 (sequence is synthesized)
cggcgccgaggtcccggggcctgtggtgactttcgcgctcccctgtggcccccacgagccccttgcgccccccgcgctggaatgcacctgtgccgccctgcgcggcctcctgcacggacc

SEQ ID NO: 952768 - DNA, 120 bp, Artificial Sequence
  ENSG00000229512_1 (sequence is synthesized)
ggcgccgggctccggaggtgcaggggacccggggcagaggcgccagatgcctctcccccatatgccaccctgggttcccttgcaaggcagcccgcattcccaggaggggtatgctgaccc

SEQ ID NO: 952769 - DNA, 120 bp, Artificial Sequence
  ENSG00000261135_0 (sequence is synthesized)
tgcgtctgttctctcccaaagaagctggtccttagcctgtgttaaggagcaatctttcggtggccagatggagccggggcatccttcttcaaataatggcttttaattcgcagactagaa

SEQ ID NO: 952770 - DNA, 120 bp, Artificial Sequence
  ENSG00000261135_1 (sequence is synthesized)
tgtttcggattacaaaagaaaccggttctcttcacatccttatccttgtgatgcagcattccgcttgcatttggaagccgtttaatatcagagagaagccatatttatgaaagtaaagag

SEQ ID NO: 952771 - DNA, 120 bp, Artificial Sequence
  ENSG00000261135_2 (sequence is synthesized)
gctgctcagatgactgcaaaccagccttccttactggttttatcactggtaatgttataaagacagttgtccagtttcatgaatcttgtaggttttttttttttgatgttgttttttttt

SEQ ID NO: 952772 - DNA, 120 bp, Artificial Sequence
  ENSG00000261135_3 (sequence is synthesized)
caaaaatccgtattgtagaaaaatatgctgtcccagaagagatgattggacactctcaagcgtggtgctggactttgtcatctcttgcacagccatctccacaccttagtgcttacctca

SEQ ID NO: 952773 - DNA, 120 bp, Artificial Sequence
  ENSG00000261135_4 (sequence is synthesized)
accaaaataatccaaatttgacacaaatacctgggctacatcttatttgagatgtttaacaaatgtctggatcatcttttcttatatattacgcaggaaacactgtgaagtaagcaaagt

SEQ ID NO: 952774 - DNA, 120 bp, Artificial Sequence
  ENSG00000261135_5 (sequence is synthesized)
tggaatgcccaagtgaaagaccatttgaatatttacaagtagatttcagacaggaatactacagggtggtcacaggataacaaattctaggcagcagatttacatgacttgaggctgtgg

SEQ ID NO: 952775 - DNA, 120 bp, Artificial Sequence
  ENSG00000261135_6 (sequence is synthesized)
gctgttaagacgctgaaaaaccagggtgtggaccaagctggctaaggctgagtggacccaacgtggtgctggattggatggaggttttacctaggccctcattatatgctcattaacata

SEQ ID NO: 952776 - DNA, 120 bp, Artificial Sequence
  ENSG00000261135_7 (sequence is synthesized)
ctaaatcacacacccgccagtgccatgacagttctgagaccagtgtttgatgtaaaaatggcaccacagttccaagaaatctccacctttacccaggaattttcgtgaacattccactcc

SEQ ID NO: 952777 - DNA, 120 bp, Artificial Sequence
  ENSG00000261135_8 (sequence is synthesized)
ttggttaaagaaacccatcaagatgaaaccccagaacccattattctctcttgggtatgcccaagctcccctttcttgagagtgtactttttgctttgcaataaatctcttctttcacta

SEQ ID NO: 952778 - DNA, 120 bp, Artificial Sequence
  ENSG00000261136_0 (sequence is synthesized)
actcctcggcgcaccgccccgcgaccgagctccgccctcatctgcgcggcccctcaccttcccgccgggcctcctcgaggaactggccgccgtcagtcagggcgcagatggccgcagaag

SEQ ID NO: 952779 - DNA, 120 bp, Artificial Sequence
  ENSG00000261136_1 (sequence is synthesized)
cgcgccgcagacactcgccgcgccagccacttacccccagaggagaggggtctctcccgccacctcagcctctctggtagtggaagaagccgccggtccagatccctcctgcctgtggga

SEQ ID NO: 952780 - DNA, 120 bp, Artificial Sequence
  ENSG00000261136_2 (sequence is synthesized)
ccgctgtttccctggcaaccagatgcgcgatgcttccggtctcgcgatagcggaaagggctgtaccatccggaaatgggaccggggccggcggctgttggagccctgcgagctgggacgg

SEQ ID NO: 952781 - DNA, 120 bp, Artificial Sequence
  ENSG00000261136_3 (sequence is synthesized)
ccggcgtgtgtccttccgtcttcgctgccgacggtgggggttgggagcgatttttcgtctttaggttggattcggaacgcggacgtctggatgcttgtgtatctctgtccctcatattgc

SEQ ID NO: 952782 - DNA, 120 bp, Artificial Sequence
  ENSG00000261136_4 (sequence is synthesized)
tgtgatgccttacaggtcagttatcctctccgagcacagtttcctcctccgtaaaatgggaacaataataattcccttcttacaagacttgtgcagctcaaaaagaccatgtatgtgaag

SEQ ID NO: 952783 - DNA, 120 bp, Artificial Sequence
  ENSG00000261136_5 (sequence is synthesized)
ctctagtaaatttggggtgctatggaaattttaaaaatatgagttttgcacagattcggctacagtccaaaaagagttataattgctttttgcaccttctttcatttcgtagtttctcta

SEQ ID NO: 952784 - DNA, 120 bp, Artificial Sequence
  ENSG00000261136_6 (sequence is synthesized)
attctcagtgcacgaaaattatttccctacgtccacaaactgattttcctcacctccattgccatcatttctcctgctttccagtctgaacagcacattaccgtttacagggcattttca

SEQ ID NO: 952785 - DNA, 120 bp, Artificial Sequence
  ENSG00000261136_7 (sequence is synthesized)
cattcatggcccctttgtcctcattgttttaactaggtacgatgtggttttttttcagcgaagcaaatagtcgtaggctgagttgccgaaagaacacagctgcagtctaggcgagtgctg

SEQ ID NO: 952786 - DNA, 120 bp, Artificial Sequence
  ENSG00000261136_8 (sequence is synthesized)
ggtataaaaacctggctataaatgccatccctatgctcctgaatcctgcatcttatcaccagcccagacttccctgaactccagactcctttacctaactgcctatttggcatatccact

SEQ ID NO: 952787 - DNA, 120 bp, Artificial Sequence
  ENSG00000261136_9 (sequence is synthesized)
tagatgtgtaagcatctcaaacttaacacgggaaaaaacaacttctccagagtcccccacccactttctatccatctcagcaaatggtaatttcagcctgccatgcctagaccaaaaacc

SEQ ID NO: 952788 - DNA, 120 bp, Artificial Sequence
  ENSG00000261136_10 (sequence is synthesized)
ttggagtcatcctcaattcttcttcctctctcactctacaatctatttgtcctatcagctcaacattcaaaatatattcagaatccaaacattcgtcacaacttcagtgcttccattcag

SEQ ID NO: 952789 - DNA, 120 bp, Artificial Sequence
  ENSG00000261136_11 (sequence is synthesized)
gttcatactgacatcatctctaaatgataaggctttctgttggctctctgacctccactcctacctactgctttcccctggtaaacctggttccagcctcactgtcctcattgttagtgt

SEQ ID NO: 952790 - DNA, 120 bp, Artificial Sequence
  ENSG00000261136_12 (sequence is synthesized)
ctttccaaatctcaaaagaaaaaaagttgcaaactgaagaaaatgggagaaagtatcctaatcctcctatgagaattaaaacttagcagccgacctagagatgttactgaagaaattcac

SEQ ID NO: 952791 - DNA, 120 bp, Artificial Sequence
  ENSG00000261136_13 (sequence is synthesized)
caatgtcaagttgaaaaccagcacaggaaatgctgagttcgaggttgaggtgaacattttcaggaaccaggtcaggagcacttgggagagacatggccacaatctcatcagtcagtcttg

SEQ ID NO: 952792 - DNA, 120 bp, Artificial Sequence
  ENSG00000261136_14 (sequence is synthesized)
tttgtagttggtgccatgaaagcctatgttcctggccctgtgtgccgctggcagtgagtcattcttgcaaataaaatataaataggttgatactcattgtatactttatacaaattctat

SEQ ID NO: 952793 - DNA, 120 bp, Artificial Sequence
  ENSG00000261136_15 (sequence is synthesized)
gagcagtgttcaaaaaagtaacgggttttggattcaaagtaaatccttaaattgacagtttccaacccatgattctgggtagtacagttaaccctgctaggagatctattatttgaatac

SEQ ID NO: 952794 - DNA, 120 bp, Artificial Sequence
  ENSG00000261136_16 (sequence is synthesized)
tcctcaataatgttctctgtgttttccagcatttgaatatttgctataaaccccacttcttgtaaacacttctaaatttaatagttctcattttttaaacaaaggcttcagatacttgta

SEQ ID NO: 952795 - DNA, 120 bp, Artificial Sequence
  ENSG00000261136_17 (sequence is synthesized)
ataatgagtaaagaatatgaagaaggtagagaatattttaagaataagattttgagaacagctggtaattctgatttcctgtttctgcatcccaaagatcagtatctgtcaggaatttgg

SEQ ID NO: 952796 - DNA, 120 bp, Artificial Sequence
  ENSG00000261136_18 (sequence is synthesized)
aaacacttgttgttcctccagtccaaatacacacacacacacaccagcctgaaatacagtttcccagctatccacctggtttgctcctctctttcctcaggcgtccgcttcctcaggagg

SEQ ID NO: 952797 - DNA, 120 bp, Artificial Sequence
  ENSG00000261136_19 (sequence is synthesized)
gcctttcccaaccaccctgtataaaataattatccccatctccacactccctaccctctgtcccctcaaccctgctttatttttttatgaagaagagagatgacattatttggattttga

SEQ ID NO: 952798 - DNA, 120 bp, Artificial Sequence
  ENSG00000261136_20 (sequence is synthesized)
tattaaacagctaggttatcttaggtaaatacataagcttttgtgggccacagtttcttcatttgaaaaatgaagttggactagttttgcagtgcttaactgcacagagcattagaatca

SEQ ID NO: 952799 - DNA, 120 bp, Artificial Sequence
  ENSG00000261136_21 (sequence is synthesized)
cctggggagacttcataaactacacaaccaggggtgtacctgagatcaaatgaatctaggccttctcaactttaatgtgcagacaaatcaccgaggaatcttgttaaaaatgctgattca

SEQ ID NO: 952800 - DNA, 120 bp, Artificial Sequence
  ENSG00000261136_22 (sequence is synthesized)
aaaaaaaaaatgttgattcagtatcaggtgagacctgagactaacaggctcctagatgatgccaatgctccccgtccaccgaccgctgtttacctagcggcaagacgagatcattgccaa

SEQ ID NO: 952801 - DNA, 120 bp, Artificial Sequence
  ENSG00000261136_23 (sequence is synthesized)
gtgcctgcacggttctcatacaccataaacgaaggccattctttccagtttttaatttggtgactaatagtgtccactaagaaaacaataccttcccaatttctcggggggggaaggggc

SEQ ID NO: 952802 - DNA, 120 bp, Artificial Sequence
  ENSG00000261136_24 (sequence is synthesized)
tgaactaagaaaaagcggacctatgattactgctgttttcatttttttaactgttgtttttaaaatgcaacataagatgcatataaagcaagtgaaaataaaattcgggttccacgtaaa

SEQ ID NO: 952803 - DNA, 72 bp, Artificial Sequence
  ENSG00000261131_0 (sequence is synthesized)
aatttacagatgtcaaataataggctaatttgtcataatgttctagtttaagataattcctaggctggtctc

SEQ ID NO: 952804 - DNA, 120 bp, Artificial Sequence
  ENSG00000261131_1 (sequence is synthesized)
tcagtaattgttcaaactaggaattgtatccccatctttcttttttcataattactcaggtaattgatgagtgtaacagaagctcctcaaaacagttttattaaattgcctttcattttt

SEQ ID NO: 952805 - DNA, 120 bp, Artificial Sequence
  ENSG00000197291_0 (sequence is synthesized)
gcggctggagggggagtcgctgcctcacccgcgcctggcgcccgcggctccctccgcctcgccggcgttggcccaccctctcgtagctcaccccgcgaggctggacagctcccggaaccc

SEQ ID NO: 952806 - DNA, 120 bp, Artificial Sequence
  ENSG00000197291_1 (sequence is synthesized)
acagctcccggaaccccggaaccgggatctatttcgggggctcggctgcgtggcgcccaggactctccagggtctcccaggatcgctccccgaattcgagtcgccccctctctctttcgg

SEQ ID NO: 952807 - DNA, 120 bp, Artificial Sequence
  ENSG00000197291_2 (sequence is synthesized)
gaataccagctgatgtcagtccgccagccaaaaccagggaggagaagcgggagccagccctctggagtcgggagaaggtctggggagtggggtagaggggaaagcaaagtccaaatacct

SEQ ID NO: 952808 - DNA, 120 bp, Artificial Sequence
  ENSG00000197291_3 (sequence is synthesized)
acacctcctggggcctagaccccacaaacctgttgtggggagggcaaaatacgatgactacgttcccaggaagaaggtgccacagctcttcaggaccacggttgggagaaagaatggagg

SEQ ID NO: 952809 - DNA, 120 bp, Artificial Sequence
  ENSG00000197291_4 (sequence is synthesized)
ggttttagaaccttcagtgtgcgacttcatgtgccagtcttcatctcaggatctcaagctcttggatcatgggcacggataacctgttgtcctcctctatggtcaagaggctgcttttgc

SEQ ID NO: 952810 - DNA, 120 bp, Artificial Sequence
  ENSG00000197291_5 (sequence is synthesized)
aaagaatccagtgggagagagtcaatggcctgcttgacgtgaactccaaagtcctcctggccaagggtcatcctgcctggagcagggcaagaggtgacttgacccttaggaagagtggca

SEQ ID NO: 952811 - DNA, 120 bp, Artificial Sequence
  ENSG00000197291_6 (sequence is synthesized)
tctctaatcttcaacttccaccaccaccacacacacaaatgcagagccacccaggaggaagtaaaaagtgctagggccttctacaccttgaaattatatgtggagcatcctgcaataagc

SEQ ID NO: 952812 - DNA, 120 bp, Artificial Sequence
  ENSG00000197291_7 (sequence is synthesized)
ctggaggggtcggcaagctgctctcccagacgtggagaagagggagggggctgggagctccagcggcctctcgacgccgctgcttctaaggggctgtcctgggttgtgggggaaggggcg

SEQ ID NO: 952813 - DNA, 120 bp, Artificial Sequence
  ENSG00000197291_8 (sequence is synthesized)
ataccaatttcttactgggtctggaaaggaggagagaaggatagagagtttcttctaggaccaaattgattcctccacaaataggaagatccccagactgtgtgcacacaccctcctcct

SEQ ID NO: 952814 - DNA, 120 bp, Artificial Sequence
  ENSG00000197291_9 (sequence is synthesized)
tacaagaatgatgctcaggcagcgtgactgtcaaggaccgtggccaagtgacccatagcacacacccagcagtgctgagaacatagctagtcccttagcacctggggctgactcatggtt

SEQ ID NO: 952815 - DNA, 120 bp, Artificial Sequence
  ENSG00000197291_10 (sequence is synthesized)
gctgtaggacccaatgccagatgccaggattgctttctccctccattcattaggactgtcccatgaaaccctccccaggaacccttctaccccatcccggcatgccaggagcctggatac

SEQ ID NO: 952816 - DNA, 120 bp, Artificial Sequence
  ENSG00000197291_11 (sequence is synthesized)
tgcataacacagggtactcatatttgtttaccaagccttgaagatgacaggcaatatgctgatatgctcaatgcatcatacaaattgttttatttaaaactgaactattaaattaagtat

SEQ ID NO: 952817 - DNA, 120 bp, Artificial Sequence
  ENSG00000197291_12 (sequence is synthesized)
caaattgttttatttaaaactgaactattaaattaagtatcatagcaactcactttacagacaaggaaactgaagctcaaaggttaagtaagggccaggcatggtggctcactcctgtaa

SEQ ID NO: 952818 - DNA, 120 bp, Artificial Sequence
  ENSG00000197291_13 (sequence is synthesized)
gaggtgggaggaggattgcttaagcccgcgagtttgagaccagcctaggcaatatagggagaccccatctctacaaaaaattatctgggcctggtgatgtgtgcctgtagtcccagctac

SEQ ID NO: 952819 - DNA, 87 bp, Artificial Sequence
  ENSG00000197291_14 (sequence is synthesized)
gagcccagttgtactccagcctgggcagcaaagcaaaaccctgtattgaaaacaaacaaacaggctgggcacggtggctcacacctg

SEQ ID NO: 952820 - DNA, 66 bp, Artificial Sequence
  ENSG00000197291_15 (sequence is synthesized)
cctctactgaaaatacaaaaattagcagggcattgtggcacatgccaaggtgggcagatcacctga

SEQ ID NO: 952821 - DNA, 120 bp, Artificial Sequence
  ENSG00000197291_16 (sequence is synthesized)
tgatgcacagtcattcacacctgctggtctctcccccagctgtctgcaaaatgaagagcagagcacaagagaacatgtgagaaagaggcagggtcggggaagccagaagtcctggctggc

SEQ ID NO: 952822 - DNA, 120 bp, Artificial Sequence
  ENSG00000197291_17 (sequence is synthesized)
aggggctgatccttcctaactagagagaggagacacacttcttgagagggcagggagatagcagggagaactagaggagctatagccagggagccagctaagggagggaagacaaaggag

SEQ ID NO: 952823 - DNA, 120 bp, Artificial Sequence
  ENSG00000197291_18 (sequence is synthesized)
tggagacacaactactccatctctccccagcctcctcatctccagaatgatggcacacctgggaggggcctgactacctttcagggggaaaaatggtcactgggcctggtgcggtggctc

SEQ ID NO: 952824 - DNA, 61 bp, Artificial Sequence
  ENSG00000197291_19 (sequence is synthesized)
tgcctgtaaagtgtgccgagattaagccactgaactccagcctgggcaacaagagtgaaac

SEQ ID NO: 952825 - DNA, 120 bp, Artificial Sequence
  ENSG00000197291_20 (sequence is synthesized)
cactaccatgtattgaacacttactatgggctgcataatgtgcctactgacgcatgtgctgaaagctttgcatgtatgtcttaaagccacaccactataacatcagaattatcttctcca

SEQ ID NO: 952826 - DNA, 120 bp, Artificial Sequence
  ENSG00000197291_21 (sequence is synthesized)
tgtgtgaaatggggaaacaggaggagaaagtttacaatcccagagctagtaattggcagagccaggatttaaacccaggatatcttgatgctaaagttcatgtcttaaccattatgattt

SEQ ID NO: 952827 - DNA, 120 bp, Artificial Sequence
  ENSG00000197291_22 (sequence is synthesized)
cagcaaggaggcgaggagcggcggcggcgctgagccgggcccgggtgtgggggcgcctatatccccagcccaagctgcaggaagccgcgccgcttcctcggaggggctgggacggcggcg

SEQ ID NO: 952828 - DNA, 120 bp, Artificial Sequence
  ENSG00000197291_23 (sequence is synthesized)
attttttgtagatatgggggtcttgcttttttgccgaggctggtctcgaactcctggcttcaagcaatcttcctgcatcagtctcttaaagtgttgggattccaggcatgaaccactgca

SEQ ID NO: 952829 - DNA, 120 bp, Artificial Sequence
  ENSG00000197291_24 (sequence is synthesized)
cctggcccttgggaagttttatttttagcctagggttggggttaagtttgcatcatgatgttgagacctccaaaggagaacttattgtagtcattcctgagctcaggtgtccaaactgtc

SEQ ID NO: 952830 - DNA, 120 bp, Artificial Sequence
  ENSG00000197291_25 (sequence is synthesized)
taattggagaatctgggaattttctctcgttttgattttcctcttccacttttccatgccagttggatgtttgaatgtttttatcgacctctgagagcatccgggtaactgagggtttac

SEQ ID NO: 952831 - DNA, 120 bp, Artificial Sequence
  ENSG00000197291_26 (sequence is synthesized)
tttgggggtctttggagatgaatagggacaggagacctcacctttcttttccatgtagccataggagatagtcccacgatctgatgatctgtagcaatgggtagaggaagggccgtatta

SEQ ID NO: 952832 - DNA, 120 bp, Artificial Sequence
  ENSG00000197291_27 (sequence is synthesized)
ggaacagaagctagtttcgtcatgggaagtcccctgttttccactcctgagggccctcacattccctttctaagcccctttctgcttttgctattaaaaaatacagtttttaaattgcaa

SEQ ID NO: 952833 - DNA, 120 bp, Artificial Sequence
  ENSG00000247033_0 (sequence is synthesized)
gaccatttcccacaatcttttattaagaaaaattccaaacatacagaaaagttgaaagaacaagtacactgttcactgaaataccagccactgcagattcaacaatgaacattttggcct

SEQ ID NO: 952834 - DNA, 120 bp, Artificial Sequence
  ENSG00000247033_1 (sequence is synthesized)
tatttgctttgtgtattttggggggaactatttggaattaaattacacatttcttgaaggcattcacctatataatccagcatctatctcctaagaatgaggacattttcccatgaactg

SEQ ID NO: 952835 - DNA, 120 bp, Artificial Sequence
  ENSG00000247033_2 (sequence is synthesized)
cagtaccgttaaatggctattagaggaatggttggtctttgtgagggtctcacgtccaggaacctcatcaaagtgtgctaggcccttagcagagagggtagaacctgctcgccggctccc

SEQ ID NO: 952836 - DNA, 120 bp, Artificial Sequence
  ENSG00000247033_3 (sequence is synthesized)
tcaccttctctcccatcccagaaaggcagaagcaggaggtgctgtgaatagaacagtgccctttgtggtgacaaagctatggggagcctgctgtgcatgtgccaagacctgcagggcagc

SEQ ID NO: 952837 - DNA, 120 bp, Artificial Sequence
  ENSG00000247033_4 (sequence is synthesized)
tcccccagcccccacagggacctctgagctgcatggttttgtccccgcttcacatgtgaaatatctgaagttcagatgaagtcgtttccccaagatcattctgccaagtaggagagcctg

SEQ ID NO: 952838 - DNA, 120 bp, Artificial Sequence
  ENSG00000247033_5 (sequence is synthesized)
aatgcacagtctagagcccacgttcctgccaccgactcacaacagccccaaggtcttcaccccagacgggtcccgcgctgagacccaggctctgaaccaccgagtcttctttagtgtttc

SEQ ID NO: 952839 - DNA, 120 bp, Artificial Sequence
  ENSG00000247033_6 (sequence is synthesized)
ccgtggcagcagggggatggtccagcacatcaggcgggcctgagaagggtcagagcagagaggcggtggagtcgtctccctctagagctttccttcgctggctctgcaggaggctctgga

SEQ ID NO: 952840 - DNA, 120 bp, Artificial Sequence
  ENSG00000247033_7 (sequence is synthesized)
atgctgctccgggagcccgctgggcacggggacacaggccaggcctgcactgctgctccctgccccgagctgcctgcccagcccgcattttgccaacttttgtgagcctgagcagttggt

SEQ ID NO: 952841 - DNA, 120 bp, Artificial Sequence
  ENSG00000247033_8 (sequence is synthesized)
tctggttcaagggctctgagctggcacagccccaaaccagggcctcttcctgggcctcaatgaagcatgcccgtgagtcagcactgagacgcaaactgaacaacaggcagggcgagtgga

SEQ ID NO: 952842 - DNA, 120 bp, Artificial Sequence
  ENSG00000247033_9 (sequence is synthesized)
acgtgggatggggagcaaaggctggaaggaggggggctgggcccacacctggaagaacccacatccttgcagcctccggtggctgcaacatcttggcccctgcagatcttttcagaggtc

SEQ ID NO: 952843 - DNA, 120 bp, Artificial Sequence
  ENSG00000247033_10 (sequence is synthesized)
cagcacaatgactccacagagggctgactggttccatgatgcttaagaggttaggaagcttgtaggaggcacgcctgacttgccactccctccacccaggcctgactatctgaggaccaa

SEQ ID NO: 952844 - DNA, 120 bp, Artificial Sequence
  ENSG00000247033_11 (sequence is synthesized)
ttcacacacctggagccccgagtagcagcctgaaggaatgctaaggaggtaggtgagggagtggggggcaggcccttgcccccatttcttgattgtataacacttcattaaaataaaatc

SEQ ID NO: 952845 - DNA, 120 bp, Artificial Sequence
  ENSG00000247033_12 (sequence is synthesized)
acgcagtgccatcttttattagacattttaataccatatcaaaacaccttgactaatgaagaaagcttttctcccaagctttgaacatttttttaaacattttataagtttttttttgta

SEQ ID NO: 952846 - DNA, 120 bp, Artificial Sequence
  ENSG00000286938_0 (sequence is synthesized)
cacaccctccaaggacggaacgggagcggccaaataactccctctgaaatcccttgggctcacagctctgcagcgggggtaaatcagctcgagaagacctcggttgtaccttccacgggc

SEQ ID NO: 952847 - DNA, 120 bp, Artificial Sequence
  ENSG00000286938_1 (sequence is synthesized)
tggaaaatgggcacggcaaagataggcacggcctgatccctggagcctgcgaatgctactttccatggcagcgtctttgcagtcttgctgtgtggctttaggcagatcgtgcaacctctc

SEQ ID NO: 952848 - DNA, 120 bp, Artificial Sequence
  ENSG00000286938_2 (sequence is synthesized)
tgagagacgctttagtccggggatgtccactcttttaacttccctgggccacattggaagaagaatttgtcttgggccacacataaaatactcttaacactggcggggcgcggtggctca

SEQ ID NO: 952849 - DNA, 69 bp, Artificial Sequence
  ENSG00000286938_3 (sequence is synthesized)
ggccaacgtggcaaaaccccgtgtctactaaagatagaaaaaataagctgggcatggtggcccctggaa

SEQ ID NO: 952850 - DNA, 90 bp, Artificial Sequence
  ENSG00000286938_4 (sequence is synthesized)
caaaacttaggcgttttaagaaaatttaccaatttgtcttgggccacaagctgcccgtgcggttggacaagctggctttagtccattctt

SEQ ID NO: 952851 - DNA, 120 bp, Artificial Sequence
  ENSG00000286938_5 (sequence is synthesized)
ctgcccgtgcggttggacaagctggctttagtccattctttggaaggggaggggtagtaaaataataccaaagtgccttgtaaattgtaaaaggtcccacatattataggctattaagaa

SEQ ID NO: 952852 - DNA, 120 bp, Artificial Sequence
  ENSG00000286939_0 (sequence is synthesized)
gactgatgtcagactagggcaatgtgggcagacacagagggaagacggctgcgcgaagacagaggccgagatgggagtgaggcgggcgcaagccaggaaacaccaaggattgcaggcaac

SEQ ID NO: 952853 - DNA, 120 bp, Artificial Sequence
  ENSG00000286939_1 (sequence is synthesized)
aaaagactctcaaccacagacagctccagtccaagctgaagtccaggaccacgctggaaggctgcacacccttggaaggcacccaaggaagagaggcaggcatctgctgaagcctgaagc

SEQ ID NO: 952854 - DNA, 120 bp, Artificial Sequence
  ENSG00000286939_2 (sequence is synthesized)
ccaaaactgatcacagccacctgtgggaatgcgaccaactgtggcctgtgccaaacagtgtgtgactcattctgccaaagagcgaggaggcggggatgtggggcgaggggatacctcctt

SEQ ID NO: 952855 - DNA, 120 bp, Artificial Sequence
  ENSG00000286939_3 (sequence is synthesized)
ttcactgcctttggccacatttccctcaaatgccagcaggtggagatattgatctcttcctgtatttgaataagggccctgcagctcagcacgcctatgactgggagcccccgaggatac

SEQ ID NO: 952856 - DNA, 120 bp, Artificial Sequence
  ENSG00000286939_4 (sequence is synthesized)
cagcacccaggcactgtggtaagtacttcaggtgcacgatctcatttagcatttgggacagccttgggaagtagctattactgctctccctattttatccacggggaaactgatgcatgg

SEQ ID NO: 952857 - DNA, 120 bp, Artificial Sequence
  ENSG00000286939_5 (sequence is synthesized)
agagatgaagagacttgctcaaggtcacacagtcagtctgatgcaaagccagggttttgtcctgtgccagaagctgtgctcctactccctgctccccagacgctctgccaggcagcatgc

SEQ ID NO: 952858 - DNA, 120 bp, Artificial Sequence
  ENSG00000286939_6 (sequence is synthesized)
ggccatgccctggtcaggtgaggcaagcttgaccagtgcttcgggtaaagcagccaggcctgggggccgagaaggggtgcatgtgtagaaccagtttctccaagagagggtccctaaact

SEQ ID NO: 952859 - DNA, 120 bp, Artificial Sequence
  ENSG00000286939_7 (sequence is synthesized)
gggttcaggttgcaaggggggcaagagttatgaggagctgacctttgcactgtagctaagggaaacagggcagggcagggggtggggagagggtagcctcgataggtctgtgcctgggga

SEQ ID NO: 952860 - DNA, 120 bp, Artificial Sequence
  ENSG00000286939_8 (sequence is synthesized)
caaggctgtgacattctcctcttccactctgccacaaaccagccttttctgaagtgctgcaggaccctgagtttgattgagtcattgttcctcacgggctgggcttctcagacaccaggc

SEQ ID NO: 952861 - DNA, 120 bp, Artificial Sequence
  ENSG00000286939_9 (sequence is synthesized)
agataggagctgggcctgggagtactgatggtggctgcttggtccagtgcagcacctaacgtggtagggtcagagaagacggccctccagggtcaggatcagccagcagctttcctggaa

SEQ ID NO: 952862 - DNA, 120 bp, Artificial Sequence
  ENSG00000286939_10 (sequence is synthesized)
gctgcctgggtgagctccaaatattgagtgaccagaattggaggaaagaactatcagaagcatcaagctgagcctcctgttgggagcttgccccggaccctgaatctctagcctttattt

SEQ ID NO: 952863 - DNA, 120 bp, Artificial Sequence
  ENSG00000286939_11 (sequence is synthesized)
gttatggcaacctgagcaaacttaaaaagccaccttgcaatgacaaccatatgatggggattaaacatcgaaaggaattttgtggaataaatgtcaaagtgccttttaaatctataatac

SEQ ID NO: 952864 - DNA, 120 bp, Artificial Sequence
  ENSG00000286936_0 (sequence is synthesized)
gttgcctgttgtgaacctaagcgggggaactaactggattcctttctgtgggaatttcagtagaaaacatctcaagaatgagggagaaaagcaatgaaagcagaagctgaaaggttgaga

SEQ ID NO: 952865 - DNA, 120 bp, Artificial Sequence
  ENSG00000286936_1 (sequence is synthesized)
tgaaaaaagtaaatggagaaaacatggttggttctctttagccaacattatgaggtagccaaactggtgagaatataaagacaaacagatagaagtggaagtaccacatagccgttaagc

SEQ ID NO: 952866 - DNA, 120 bp, Artificial Sequence
  ENSG00000286936_2 (sequence is synthesized)
aagaggaagagaagactccatgactctctaatttcaattcttctgtgtgaccttcaccacaagcttccttttgcttgagggacgtttagtaagactgtttcatgcagctacaacagcctc

SEQ ID NO: 952867 - DNA, 120 bp, Artificial Sequence
  ENSG00000286936_3 (sequence is synthesized)
ggaatgtgtttgaagccctcactcattgctccaaaccaacactctacccttttccaccctgttctgggtcttggaagtgccaatttgtgtggacctcattactgactcccatccactagc

SEQ ID NO: 952868 - DNA, 120 bp, Artificial Sequence
  ENSG00000286936_4 (sequence is synthesized)
ttctggttggctccatcccttcaccaaaggccacagctccagccagacggtgtcctctccatggaaaactaccttttctaggctcagggaaacagctccctttccttgcctctttgggac

SEQ ID NO: 952869 - DNA, 120 bp, Artificial Sequence
  ENSG00000286936_5 (sequence is synthesized)
tagggatgggaagggcccccactgttgctagtcccaagggactgcactctcctccttggtttctctaaacctgcccacacctttataaagagtcgctgttattaaagtcctgttacatta

SEQ ID NO: 952870 - DNA, 120 bp, Artificial Sequence
  ENSG00000286937_0 (sequence is synthesized)
gctcagcagaggaaggcgttagaatctggaaggagttccgctctgggaagtgggcacactgcgagtgtccataggtttgagtggcgagtgagttcaatctgcaggcgtaggaaggcttct

SEQ ID NO: 952871 - DNA, 120 bp, Artificial Sequence
  ENSG00000286937_1 (sequence is synthesized)
gatctctcggggaatgaaggaagaaaaatacaagcagaagactgtatatgaaaatgaataatattaaaatgcctttttggattttgtctttagaaataatatttgcactacaaaggtgtc

SEQ ID NO: 952872 - DNA, 120 bp, Artificial Sequence
  ENSG00000286937_2 (sequence is synthesized)
gcactacaaaggtgtccaatattttattagtatagtttattagtatagtttatctctttaatgtaaataataaagaggacatggatgttttaacagataataaatctgttaaataagtca

SEQ ID NO: 952873 - DNA, 120 bp, Artificial Sequence
  ENSG00000286937_3 (sequence is synthesized)
tccatttaaaatgtgcaattcaatgatttttgttatattcaagcacgtatacaaccaataccacagtcaattttagaacattttcatctcaagaggaaatcctgtgtaactttacctatt

SEQ ID NO: 952874 - DNA, 120 bp, Artificial Sequence
  ENSG00000286937_4 (sequence is synthesized)
agcacttcccctgcgctaactcaccccagccctaagcaactatttatctccattctactttctagagattttttttctattcttgactttgtataaattgaaatcacatagtacatgatt

SEQ ID NO: 952875 - DNA, 120 bp, Artificial Sequence
  ENSG00000286937_5 (sequence is synthesized)
atttgtgactggcttctttcatttagcataatattttcaaggttaattcatgttgtagtattcattagtatttcatttcttttgtggctgaactatgttagattgtatgaatatagacag

SEQ ID NO: 952876 - DNA, 120 bp, Artificial Sequence
  ENSG00000286937_6 (sequence is synthesized)
tttattttatcatttcatcccttgatggacatttggattgtttcaagcttttgtatattattaataataacgttatgaacattcctatgcatttttctttgtaaatgtatattttcattt

SEQ ID NO: 952877 - DNA, 120 bp, Artificial Sequence
  ENSG00000286937_7 (sequence is synthesized)
tcagactcttccaaagtagcagagccatttggcattctcaacaacagggtatgatggttctggcttttccacattattatgtcaacagctgttgttatctaatttttaaaattgtattta

SEQ ID NO: 952878 - DNA, 120 bp, Artificial Sequence
  ENSG00000286937_8 (sequence is synthesized)
tcctagtgagtgcaaaatgatatctcactatggtttggatttgcctttaactttttttattctaaagtgtattttacctgatattagtagctttcttgtgattgtgattagcatgtttta

SEQ ID NO: 952879 - DNA, 120 bp, Artificial Sequence
  ENSG00000286937_9 (sequence is synthesized)
tcatttttcatctttttactttcaatctatttgtgattttgaatttaaaatgtctctcctatagacaatatacaactggataatttttaaaaatccagtctaaaaacatctgccttttta

SEQ ID NO: 952880 - DNA, 120 bp, Artificial Sequence
  ENSG00000286937_10 (sequence is synthesized)
ttattatagttgaatatatctcttctactttaatttttctatatgtctcatgtctgttttgtttttctatttctcctctactgttttcttttgtattaaatattttcaaatgtagcattt

SEQ ID NO: 952881 - DNA, 120 bp, Artificial Sequence
  ENSG00000286937_11 (sequence is synthesized)
ttttgtattaaatattttcaaatgtagcattttaacttcatgtgattactgattttatttgtcaacttgactgggccacatggtacctagatatttgattaaacagtatcctgaatgtgt

SEQ ID NO: 952882 - DNA, 120 bp, Artificial Sequence
  ENSG00000286937_12 (sequence is synthesized)
ctgtgagggagtttttagatatgactaacaatcttgaatcaatatattgagtttagcaggttgtgatctcccccagtgtgattgggcctcaccaaccccttgaagatttaaatagaacaa

SEQ ID NO: 952883 - DNA, 120 bp, Artificial Sequence
  ENSG00000286937_13 (sequence is synthesized)
atattctgagtaacagaattcacttttctttctgtctgtcttcaagctggaacatttgtcttctcctgtctttggactcattctcagactgaaacttacactataagctctcctgctact

SEQ ID NO: 952884 - DNA, 120 bp, Artificial Sequence
  ENSG00000286937_14 (sequence is synthesized)
aaagtcttcagactccaactggaactaagccatatgctctcctaggtccttctcttgccaacagcagttcataggacttctcagcttttatgattgagtaataatttcttataataaata

SEQ ID NO: 952885 - DNA, 120 bp, Artificial Sequence
  ENSG00000286934_0 (sequence is synthesized)
gctgtaaaactcaaatggttacaaaaccagttagtgtatctctgttgtcatataatgtaacagatgtctatacgctgccagtgtaaggcatgtacatgcacaatcactatgcctgctaag

SEQ ID NO: 952886 - DNA, 120 bp, Artificial Sequence
  ENSG00000286934_1 (sequence is synthesized)
atgtgttggaaaggagaacaaaatgtcaagaatgatgtaatatgttgccgttccgaatttaaggtcaccccatttgattcaaagtaaccattcacaacaaaccatacataatgggactag

SEQ ID NO: 952887 - DNA, 120 bp, Artificial Sequence
  ENSG00000286934_2 (sequence is synthesized)
ggctttctctgaaacctgttatcagaaatgttgcctggcataaggatcctgaccagtgtgggtgatctatattgggtcatatatctgctttccaaggtgtttgagtggctgatacccaaa

SEQ ID NO: 952888 - DNA, 120 bp, Artificial Sequence
  ENSG00000286934_3 (sequence is synthesized)
gtcaacagtgcgacagaaaccagaagacataaggagaaaaaacaaataaggggcagtggactctacaaacaagaattatataggaaatgtataaaatagaaggaagccgagagggtatga

SEQ ID NO: 952889 - DNA, 120 bp, Artificial Sequence
  ENSG00000286934_4 (sequence is synthesized)
tttgggtatttcacatccgctcactcaaatatcccccccttcccctggccagacctgcctatcttgacttattgaaccataaaggatgggcagctcctaataacctcctccaggtgcctt

SEQ ID NO: 952890 - DNA, 120 bp, Artificial Sequence
  ENSG00000286934_5 (sequence is synthesized)
gtactgagagtttagcttaaggcaacttctatgaagaaactccacattttgagtcttggagttctgagcctgggggtggcaggtgtcccagcaacaggcattcagactactgggctgtca

SEQ ID NO: 952891 - DNA, 120 bp, Artificial Sequence
  ENSG00000286934_6 (sequence is synthesized)
gtgcagcctgctgcctcaaggacttcactgtgatcctgggaatggcaggcacagccacacccttagcaggccagttcctctgtgtagttcaaatttacccgaggccaagcttagatttta

SEQ ID NO: 952892 - DNA, 120 bp, Artificial Sequence
  ENSG00000286934_7 (sequence is synthesized)
caccttttaccttcccaatgacatcacctaaaaatctcctgccttaactgctgctgtgcaattatcaatgctgacaaacagtggaaatagtataaaaaatatagaacaaagtaaactgtg

SEQ ID NO: 952893 - DNA, 120 bp, Artificial Sequence
  ENSG00000286934_8 (sequence is synthesized)
tcatcggaatgtatgatgcatctgcagagatttccctacaccaagaatgtgagttctgagaccttttcctcttcctcatcactaactgcgtattccattaactaaacagcaacctcgaaa

SEQ ID NO: 952894 - DNA, 120 bp, Artificial Sequence
  ENSG00000286934_9 (sequence is synthesized)
gaaatcaatactcggaaggtcctgtagtagcagccattccatggatgggacaccagaggtggggcaggagcaaggaggggttcctcaccctggcaggaaagctagaagcctagcctttgt

SEQ ID NO: 952895 - DNA, 120 bp, Artificial Sequence
  ENSG00000286934_10 (sequence is synthesized)
cagtgaacacagcaaaccaagcttcttttctgaaatcttcttggaagcagatgaagtgcacacaaaagagggttcttctccacccccaggaggtgcattctggtggccaatgccagggaa

SEQ ID NO: 952896 - DNA, 120 bp, Artificial Sequence
  ENSG00000286934_11 (sequence is synthesized)
taatttcaaaggactgataaacctactaggaacaagacaggtcagtggccatttatgacctcccatacagaagaaaacaaacaaacactgctcctggaagatccagctcagaggatataa

SEQ ID NO: 952897 - DNA, 120 bp, Artificial Sequence
  ENSG00000286934_12 (sequence is synthesized)
gggcaaaatccaatttgccctgttttccataaggtgttgttatatatggatgaagggtttcagtttattttgtttcagccccataaacaaacatcgaaagtgtgtttacctagcgcctgc

SEQ ID NO: 952898 - DNA, 120 bp, Artificial Sequence
  ENSG00000286934_13 (sequence is synthesized)
ttcccatgtcttgctagagaacataagcaagacaaagaagaggagggactcccatcccagcacacctcagggtcctggatcctcaaggcactctgagtcctgagttgattctaggtatgg

SEQ ID NO: 952899 - DNA, 120 bp, Artificial Sequence
  ENSG00000286934_14 (sequence is synthesized)
ggcctcttcacgggaaggaggcaattgtatttggaaaggatatcattatatcactgttgacacatcattgcattcctggtgtggtcactcattgagtgagtgctgcactgtggctcctta

SEQ ID NO: 952900 - DNA, 120 bp, Artificial Sequence
  ENSG00000286934_15 (sequence is synthesized)
aaatggcttgtagttacgcatccagtggagccaggagggaaaaatcagacatcagtaacccacttgatgatactgcacattgtatgcaatcatgaatgctgacaagacacaggggaaaga

SEQ ID NO: 952901 - DNA, 120 bp, Artificial Sequence
  ENSG00000286934_16 (sequence is synthesized)
ggagaaaaataaatataacaaaggaaactgtcatgaaaacagatgatacatttccagggattcccctgaaccaggaatgtgcgactttcaagaccttcttctgttcctccccactaacca

SEQ ID NO: 952902 - DNA, 120 bp, Artificial Sequence
  ENSG00000286934_17 (sequence is synthesized)
agtattccattaattaaatggcaacctagcaagaaaccagtagttggaggtggagggttctcttgtctaggaagtcttagataatcccaagagacagacctccaaatcccactgtgatct

SEQ ID NO: 952903 - DNA, 120 bp, Artificial Sequence
  ENSG00000286934_18 (sequence is synthesized)
gccttagaaggaactctacagaagccaggcaatacatggtatttacttcatgtaagaatcgtctactttcaagcgcttcctgtggctgaagtttgtctgctcatttttgcatactcactt

SEQ ID NO: 952904 - DNA, 120 bp, Artificial Sequence
  ENSG00000286934_19 (sequence is synthesized)
tgcatgaatatccatggcaaccaaaagcatgcctaccttgttagcttttccggtgaggtaagaattattatagtaggcagggcaacatgaaagcatctgaagattttttcccaaactacc

SEQ ID NO: 952905 - DNA, 120 bp, Artificial Sequence
  ENSG00000286934_20 (sequence is synthesized)
caaattacacaacaaccatcatgctcatctctagggccagaaagcgagatgcaggataaaactcagtgattatagatggaatccaacactgagaaggcgtgaatgttattcctgttgcac

SEQ ID NO: 952906 - DNA, 120 bp, Artificial Sequence
  ENSG00000286934_21 (sequence is synthesized)
ccctctccacttcccattttaaatgctggcccatttaaaatgctgatgaccctgagaacgactgtagattaacaaaagcttattccacctgatggctggaattgagagttccgttctgta

SEQ ID NO: 952907 - DNA, 120 bp, Artificial Sequence
  ENSG00000286934_22 (sequence is synthesized)
tatgcacatggtcagaatataatagagcagatttacatgctggctggggcacctttttctgttcacggtcatatcagtctacagtagcacaatttccttcacctggggtacgaactcagt

SEQ ID NO: 952908 - DNA, 120 bp, Artificial Sequence
  ENSG00000286934_23 (sequence is synthesized)
aaagacgttggctcgctatttttaaagcaatatttgttgacctaacacgggattctccaacactagcattcatcagcattaccagaacggagtggtaaatcagagctcagggccctaccg

SEQ ID NO: 952909 - DNA, 120 bp, Artificial Sequence
  ENSG00000286934_24 (sequence is synthesized)
gagttgtgccagagaatttggctttctaacaagctccctggggatgccaatgctgccgatttgggaacactgctttgaaaaccattggtctaagatgaccaaagactgcagatcatcttc

SEQ ID NO: 952910 - DNA, 120 bp, Artificial Sequence
  ENSG00000286934_25 (sequence is synthesized)
acatacggtgggagactcagacatagcaaggacagcggataagtcctttgaaaatacagggcttgcgatttcagacatggggcaacctgacgacgatcaccaatgtggcgagaggcactc

SEQ ID NO: 952911 - DNA, 120 bp, Artificial Sequence
  ENSG00000286934_26 (sequence is synthesized)
agattttcagcgcagataaaaagatgggaaaaccaattaggcagctactgagcaagaggtaaagaatgcatatatgcttgacataaggaagtatcaagaggagataggaaaaaaggtcca

SEQ ID NO: 952912 - DNA, 120 bp, Artificial Sequence
  ENSG00000286934_27 (sequence is synthesized)
taaacgagaggtagtgcataatgagtaatcaaaggtgggcataaaggaaagtgaacgttagaagcaattccaaacttctttttctctcctacggagaaaacagtaagaaacctcagaaca

SEQ ID NO: 952913 - DNA, 120 bp, Artificial Sequence
  ENSG00000286934_28 (sequence is synthesized)
tataggataaaagcatctacccaacgtttcctcaaagaccaaaggaaaaggtctggactcaagaacatgaaacattccgtttgggtaacaccaaatggggacttgatggaatagtaatgc

SEQ ID NO: 952914 - DNA, 120 bp, Artificial Sequence
  ENSG00000286934_29 (sequence is synthesized)
ccatcttcagaagaagatgaggtacgcagaaatggaattcagctaagaaatcaccaagaaaactttggctttgagattcttctgaaaaaaaaaggtcacaggtgaagctttgggaaagat

SEQ ID NO: 952915 - DNA, 120 bp, Artificial Sequence
  ENSG00000286934_30 (sequence is synthesized)
ttaacttggactattttacatagaccatgtataggaggaaaagtaagttaggagccataatctcaaggaatgtctactttggaagtgcaggtgaaaaaataggttaatgaaggaacctga

SEQ ID NO: 952916 - DNA, 120 bp, Artificial Sequence
  ENSG00000286934_31 (sequence is synthesized)
gaaggaaaacgaaagaattgggagaaccagaccacagaaggtcagtggtatggattccaactcagaagacgacttcaaataagagatgaggttgtagcatattcttgaacaggagagggg

SEQ ID NO: 952917 - DNA, 120 bp, Artificial Sequence
  ENSG00000286934_32 (sequence is synthesized)
aatccagctgtaatatctgttatcattgacaaggtctactagacaacaaatgttagatacattattgtatatataatgcagaaataacacattacatatctttaaaaatgatatagctta

SEQ ID NO: 952918 - DNA, 120 bp, Artificial Sequence
  ENSG00000286934_33 (sequence is synthesized)
gttttcattagtgtttaatacaaacgtccattttacagtcaattgctctttaagtatctcttttacatttttctcttccttcttttcaagagcaattttaagagagaatcagaataggca

SEQ ID NO: 952919 - DNA, 120 bp, Artificial Sequence
  ENSG00000286934_34 (sequence is synthesized)
gagagttaaaagaaaggttaatgaaaatggggagactctgctaatgtatttccttgggcaaattgcagaacactggcacaatcagtcggattgtttgcagcctccaggttgctgcctgta

SEQ ID NO: 952920 - DNA, 120 bp, Artificial Sequence
  ENSG00000286934_35 (sequence is synthesized)
ggtaactggggatgagccattctctgtgctgagtgcctttcttgcagtgtgatgtgtcaggctgttccagctccaatgttggctttcctgtggggcgctcatcactgtcactcatactac

SEQ ID NO: 952921 - DNA, 120 bp, Artificial Sequence
  ENSG00000286934_36 (sequence is synthesized)
aaagatgttaccaagtcagaaaggggaaaaagcccccaaaaacaacaacaacaaaaaacaacaaaaagctccacgatgcatgtttctagaatgtattttgtttacacataggtattagaa

SEQ ID NO: 952922 - DNA, 120 bp, Artificial Sequence
  ENSG00000286934_37 (sequence is synthesized)
gtttaaaatgaataacaagagacctactgtccgaaaacattgttacatacattatttttatttaatcataaaaccaaatgtaacttttcttgctaaaatgtctcctgtaagtataaagta

SEQ ID NO: 952923 - DNA, 120 bp, Artificial Sequence
  ENSG00000286934_38 (sequence is synthesized)
aggtacatttttgtttgaaagatgacacattttgtaaaacaaaaaactttaaaatctttccttttgcttccaggtccctaattttccttgctcaccacataattggcacattttccactg

SEQ ID NO: 952924 - DNA, 120 bp, Artificial Sequence
  ENSG00000286934_39 (sequence is synthesized)
tgatctagaagttgaatgaaattcttgttttaacatttaccagtaaactttattcatttgggaaatgataagaggtacttagcgtcagttattggtgatccaagtactaagctctgcact

SEQ ID NO: 952925 - DNA, 120 bp, Artificial Sequence
  ENSG00000286934_40 (sequence is synthesized)
ccataatttacatgatatgtaacagaaactatgcaaacaagtcactatgtccatttatgaatgaagaaatactcaaagatgttaaatgcctcattcgaggtcacattataagacagtaag

SEQ ID NO: 952926 - DNA, 120 bp, Artificial Sequence
  ENSG00000286934_41 (sequence is synthesized)
taagcttgtatttgacccaaattctacacacccaattacattgcactcaatacaatttttttttttttttttttttttgagaggaattctcttcttaactgtgaattaccacttccccac

SEQ ID NO: 952927 - DNA, 120 bp, Artificial Sequence
  ENSG00000286934_42 (sequence is synthesized)
gactcagttaagtcaactgtgcggtctgagacttctctctttcttagtgcacataagctatggaggcatgatttctttttattacttctggtttctacttttgagtagttttaatttctt

SEQ ID NO: 952928 - DNA, 120 bp, Artificial Sequence
  ENSG00000286934_43 (sequence is synthesized)
aatttatacaaatttcggttgtcacacataaggtaacagttaacaggggacttacaaaaattagaaatactcctcctgcttttttggtaataaagcatctcctgtactctataaatatac

SEQ ID NO: 952929 - DNA, 120 bp, Artificial Sequence
  ENSG00000286934_44 (sequence is synthesized)
acactatgtacccacaacaatttaaaaaaatgaaaaaaaattaaaaatgaagtcattttgttttgaaatatttaccatgcttacttaccaagaataacatcactttttctctttgaaagg

SEQ ID NO: 952930 - DNA, 120 bp, Artificial Sequence
  ENSG00000286934_45 (sequence is synthesized)
catgtctacatattcaacctactaggaagtgctttattagctatactatggctatttctttactgttcttgttttatcaaaaaagttacatcgtttaagttagcaatctgacaaagtatt

SEQ ID NO: 952931 - DNA, 120 bp, Artificial Sequence
  ENSG00000286934_46 (sequence is synthesized)
ctctttgaaataaacttccaaaaataacactgtggttttagaagcttaagcaattcttgctagaataattataactgaaactcataaaatgtcctcataacattcatttgtatatattgg

SEQ ID NO: 952932 - DNA, 120 bp, Artificial Sequence
  ENSG00000286934_47 (sequence is synthesized)
tagtgtgttgtttgcattcgctgtttttgcaatgcatttgcaagtttagcagagtatcactcttctgtgatatttatttttgtgtttactattcctcttgggcttccaacatcaatcttc

SEQ ID NO: 952933 - DNA, 120 bp, Artificial Sequence
  ENSG00000286935_0 (sequence is synthesized)
gagctggtaggggagggcaggactctctagcactcagacttcagggcaaagaagctagacaaaaggacatttcagagccagataaaactgtgtgagcagctctggggaagacctaatgtt

SEQ ID NO: 952934 - DNA, 120 bp, Artificial Sequence
  ENSG00000286935_1 (sequence is synthesized)
tccagtccaagatctgaaatatatttcagagagcaggtgatgtgattcaggggctgggggaaagggagaggaggggcagtacttttaccaacataagtggccactgcaagagctaaggag

SEQ ID NO: 952935 - DNA, 120 bp, Artificial Sequence
  ENSG00000286935_2 (sequence is synthesized)
gtaggagcttccctacagtccccccacatggtccccaaggcacttaccctcacactgcctgccttccccttggtagccaggcttgcaggagcacttgtaggaggtgggtgtgttctgaca

SEQ ID NO: 952936 - DNA, 120 bp, Artificial Sequence
  ENSG00000286935_3 (sequence is synthesized)
cagggcgtcggcatggcagtcatctagcccttgggcacactcatctacatctgcaaaagagcacagctgacacctggtacaggctcccaggccatgtgtgatctggcctcggccctgtct

SEQ ID NO: 952937 - DNA, 120 bp, Artificial Sequence
  ENSG00000286935_4 (sequence is synthesized)
tgtttctgggtccctgtttccaggaacagcccggacactctacgtgaaattacccccaccatcacctactggccttcaggacttagctcaaatccacctcctccaggaagcctgccatga

SEQ ID NO: 952938 - DNA, 120 bp, Artificial Sequence
  ENSG00000286935_5 (sequence is synthesized)
cccccattgtagctgccctcaccaagtgctcgcatatgtatggctttgcatgcacacatcaggcagggttgtcactgttttccttcctctctctccactagacaatgtcttgacaacaga

SEQ ID NO: 952939 - DNA, 120 bp, Artificial Sequence
  ENSG00000286935_6 (sequence is synthesized)
ctgcgtctgtgtcccttatgccaagccagcgcagtacctggcatgtgagtaggcaatagtacctacatgcccgctaaaggaggaaaggaccaaacggacagacaagctctgaacaccaag

SEQ ID NO: 952940 - DNA, 120 bp, Artificial Sequence
  ENSG00000286935_7 (sequence is synthesized)
cagctgtctgtcagctttctcggagctcagagcaagcttgtccaacacagcccgtgggctacgtgcagcccaggacagttttgaatgcggcccaatgcaaattcataaactttcttaaaa

SEQ ID NO: 952941 - DNA, 120 bp, Artificial Sequence
  ENSG00000286932_0 (sequence is synthesized)
caggaggaaaatctttttccctgctcctttactgtatccatcatagaagagaaaactccagattaaagaacaaaacaaacatccttttgcccacaacctttcctgcagcagaaacagctg

SEQ ID NO: 952942 - DNA, 120 bp, Artificial Sequence
  ENSG00000286932_1 (sequence is synthesized)
agccgctggtttaggaaactctgaattctgaaattaaaattgcatgagaggaaaatggaagcacataaacagcatcaaagaaaaaattttgtcaagtgatggtctcaaacacatgtgaag

SEQ ID NO: 952943 - DNA, 120 bp, Artificial Sequence
  ENSG00000286932_2 (sequence is synthesized)
ctcctataacagaagacagattaacaagagaaaagtagatacatttatttcatacaagttttacatgatgtgagaaacttcgtaaggaaagaaacaccaaagaaatagctacagatttgg

SEQ ID NO: 952944 - DNA, 120 bp, Artificial Sequence
  ENSG00000286932_3 (sequence is synthesized)
tgaacttgcctgatagaagaagatttttaaaattattttggaaaattattagctgaatggcctcaggtggaacttcaaacaggctctcaatttctttggtaacttcaaacacatcaccag

SEQ ID NO: 952945 - DNA, 120 bp, Artificial Sequence
  ENSG00000286932_4 (sequence is synthesized)
accctgaaaacgcagtgggaaaaatggcacacaaaattaggagtcaaactgaatttgattggagctttatttccaccacgaatcagctgtttggcccacggtgatggcaacagagacagg

SEQ ID NO: 952946 - DNA, 120 bp, Artificial Sequence
  ENSG00000286933_0 (sequence is synthesized)
acagatttacagacatttaaggatacctgtctcttgcctccttattcttccctttcttgagttaaacacacatgggtctcttaatagcaccgagtggtccccaggacactctagtgggtc

SEQ ID NO: 952947 - DNA, 120 bp, Artificial Sequence
  ENSG00000286933_1 (sequence is synthesized)
tctagccattgggtccttctgcgggggaccttaactcagtactctagctcagtctgattggacagggatggagcaagttctttgtgctacttagttactacacaaccactgaggcgagac

SEQ ID NO: 952948 - DNA, 120 bp, Artificial Sequence
  ENSG00000286933_2 (sequence is synthesized)
tcaggtgtacttgcagccccggacaggctgagtagcttccttccatgctctgaacatagagccctgtatgcactggtgcccagctgagggctcataggcccctggacaagcgtctcagga

SEQ ID NO: 952949 - DNA, 120 bp, Artificial Sequence
  ENSG00000286933_3 (sequence is synthesized)
tgacttaaaactcattttcaggtctggctccttattgccagacatttctctctgccacaccatgtgtgtcttgctctctgttccatctgtggctcccttccaacaaagcctgcctggtat

SEQ ID NO: 952950 - DNA, 120 bp, Artificial Sequence
  ENSG00000286933_4 (sequence is synthesized)
ctgcctcagagttcgcccaaaagaaacttggcatcgagatggtcaacagaactacagggaccttcagctggctgcataggtcaaagaatggagtctctggtgcaagaatggagactctgg

SEQ ID NO: 952951 - DNA, 120 bp, Artificial Sequence
  ENSG00000286933_5 (sequence is synthesized)
tgcgagaatggagtctggtgcaagaatagagttttttcatgcatcacacacttagatgtaacctataaaacattttatatgttccactttaataacatatccaggtattgagtacaagga

SEQ ID NO: 952952 - DNA, 120 bp, Artificial Sequence
  ENSG00000286933_6 (sequence is synthesized)
gtatgtttgccacagctctgacccttgcatcctatgtcatctgtacaggatggggaatggaaggagctgaggttcagaatgtgcttggtgtgttacttcgttggtaatcaaaagtagcac

SEQ ID NO: 952953 - DNA, 120 bp, Artificial Sequence
  ENSG00000286933_7 (sequence is synthesized)
atttacatattggcacatcaaaatgttcttttttgtacattgctgcaggttaagaaagacacagcaggacctgtgtagagtcagagaagggaaaaacaagtatagtctgagaaggaagga

SEQ ID NO: 952954 - DNA, 120 bp, Artificial Sequence
  ENSG00000286933_8 (sequence is synthesized)
cttccactcctaaatatatagcgaaaacctactcatcatcttctgggtggacagagcctggtttgtatcacaggaagggatatgggaatcatgatgctgtcaccaaatcaggtatctcac

SEQ ID NO: 952955 - DNA, 120 bp, Artificial Sequence
  ENSG00000286933_9 (sequence is synthesized)
aaaggatgatcagaggaggtctttggaagctgagaggatatagatgaattttagagaagattaaaatcttctctctacacaatgggaagaagttagcagaggtcttttacctggaagagc

SEQ ID NO: 952956 - DNA, 120 bp, Artificial Sequence
  ENSG00000286933_10 (sequence is synthesized)
tgcactggccagcaattgaagtgactatgctcccttgcatgttgagaagatgcaaagtcaagtggctggagaaacagaaccacatttgctgagtacctacagtgtgctagatgttcccca

SEQ ID NO: 952957 - DNA, 120 bp, Artificial Sequence
  ENSG00000286933_11 (sequence is synthesized)
tcaaaattcctgtcagtatgtagcagagttagagctcagtcttgggtctttctgaagtcaaagcttgttttctttttgctaaagtagcagttttcagtcccatcagacccaaggcccctt

SEQ ID NO: 952958 - DNA, 120 bp, Artificial Sequence
  ENSG00000286933_12 (sequence is synthesized)
agttttcagtcccatcagacccaaggcccctttttataataaatatcttgtaacgtcttctttactaccctgaaaaaaaatcattgaaaactagtttcttttctttttttttcttttttt

SEQ ID NO: 952959 - DNA, 64 bp, Artificial Sequence
  ENSG00000286933_13 (sequence is synthesized)
acctctgtctcccaggttcaagcgatttttgtttttgtttttttagtagatacagggtttcact

SEQ ID NO: 952960 - DNA, 61 bp, Artificial Sequence
  ENSG00000286933_14 (sequence is synthesized)
accacacccagctagtttttgttttgatccgccttccttggcctcccaaagtgcttggatt

SEQ ID NO: 952961 - DNA, 120 bp, Artificial Sequence
  ENSG00000286933_15 (sequence is synthesized)
ccaaagtgcttggattacaggcataagccatcacaccgggcctgaaaactaatcttatgtatagtacttgggttttgtttgttcgtttgttttgtttttgttttttgagacagggtctca

SEQ ID NO: 952962 - DNA, 83 bp, Artificial Sequence
  ENSG00000286933_16 (sequence is synthesized)
gacagggtctcactctgttgcccagaccggagtgtagtggcaggatcatggctcactgtagcctcaacttcctgggctcaaga

SEQ ID NO: 952963 - DNA, 75 bp, Artificial Sequence
  ENSG00000286933_17 (sequence is synthesized)
gctacaggtgcataccaccatgcctggctaatttttattttttgtggaaatgggagatcctcccacctcggtctc

SEQ ID NO: 952964 - DNA, 120 bp, Artificial Sequence
  ENSG00000286933_18 (sequence is synthesized)
cctagtacttgcttttcttaaaaaagcaataatatctacataaaaacttgtacacaaatgtttatagtggcattactcataatagctaaaaagtggaaacgcccaaacattatcaactgg

SEQ ID NO: 952965 - DNA, 120 bp, Artificial Sequence
  ENSG00000286933_19 (sequence is synthesized)
atgatggatacatatagtctattcatacagtggaatattattcagcaataaaaaatgaatgaaatattgatacatgctacaacatagaagactcttgaaaacattatgttgagtgaatga

SEQ ID NO: 952966 - DNA, 120 bp, Artificial Sequence
  ENSG00000286933_20 (sequence is synthesized)
aaccagtcacaaagaacaatataccatgtggttcaatttatatgaaatatccagaataggcagatccatagagatggaaagtagattagtggttgcctagagctgggggatggagggact

SEQ ID NO: 952967 - DNA, 86 bp, Artificial Sequence
  ENSG00000286933_21 (sequence is synthesized)
gtagattagtggttgcctagagctgggggatggagggactgagggtgaaatctaaggaaagcaggatttgtcccccaggctggagt

SEQ ID NO: 952968 - DNA, 120 bp, Artificial Sequence
  ENSG00000286931_0 (sequence is synthesized)
gcggcggctcctctgcagcagcctcggcagtaggggtcacggtggccaagcccaccgtggagctcatctgagagttgtaaggtacgggactgcctcggtctttgggacgccccgtctggt

SEQ ID NO: 952969 - DNA, 120 bp, Artificial Sequence
  ENSG00000286931_1 (sequence is synthesized)
agcatcccagatccagcacgttccttccggccctgcaccccggcccggtgcctcacaccccgctaccccatgcatccagactctaaggcagcccctgcatctcagtcctgacatcgctgt

SEQ ID NO: 952970 - DNA, 120 bp, Artificial Sequence
  ENSG00000286931_2 (sequence is synthesized)
ctctaaggcagcccctgcatctcagtcctgacatcgctgtccctggagcatcctccgctggagctggagcttgacagccaagacaatccaaagcaaaaagaacacagctggaggcatcac

SEQ ID NO: 952971 - DNA, 120 bp, Artificial Sequence
  ENSG00000286931_3 (sequence is synthesized)
aaccaagacagcatggtactagtaccaaacagatatctagaccaatggaatggaacagaggctgcagaaataacaccgcacacctacaaccatcagatttttgacaaacctgacaaaaac

SEQ ID NO: 952972 - DNA, 61 bp, Artificial Sequence
  ENSG00000286931_4 (sequence is synthesized)
gttgtattaaattaagttggatttaattaagatggattaaagacttaatcgggtatgggca

SEQ ID NO: 952973 - DNA, 90 bp, Artificial Sequence
  ENSG00000286931_5 (sequence is synthesized)
aagtccaaatagacaaattggacctgattaaactaaagagcttcagcacagcaaaaaagactatcgtcagagtgaacaggcaacctacag

SEQ ID NO: 952974 - DNA, 61 bp, Artificial Sequence
  ENSG00000286931_6 (sequence is synthesized)
caaacaaccccatcaaaaagtggggtaaggatgtgaacagacacttctcaaaagaaaacat

SEQ ID NO: 952975 - DNA, 81 bp, Artificial Sequence
  ENSG00000286931_7 (sequence is synthesized)
aaatttacaagaaaaaacacaaacaaccccatcaaaaagtggggtaaggatgtgaacagacacttctcaaaagaaaacatt

SEQ ID NO: 952976 - DNA, 68 bp, Artificial Sequence
  ENSG00000286931_8 (sequence is synthesized)
cactaaggattaagaaactccctcaaaaccactcaactacatggaaaatgaacaacttgctcctgaat

SEQ ID NO: 952977 - DNA, 67 bp, Artificial Sequence
  ENSG00000286931_9 (sequence is synthesized)
caatcaaactagcactaaggattaagaaactccctcaaaaccactcaactacatggaaaataaagtt

SEQ ID NO: 952978 - DNA, 120 bp, Artificial Sequence
  ENSG00000286367_0 (sequence is synthesized)
gcagccctcagcacctggacaaggaggtcagggtcggcttgtgctgcacgtggccacggctgccagactgcaaggagtacacggtacctttgggatgttgacacgggaccagaaaagctc

SEQ ID NO: 952979 - DNA, 120 bp, Artificial Sequence
  ENSG00000286367_1 (sequence is synthesized)
cagatgctccagcatcttctgtggcttgaatttggagtagaggatggccagctcagtgaacatgcccatgtgggcccgctccaggcccagggccgcttccaacagcaagatcagctcctc

SEQ ID NO: 952980 - DNA, 120 bp, Artificial Sequence
  ENSG00000286367_2 (sequence is synthesized)
aaagtagccacgatcctagcagaccaacagccacgcgtggggcagagtgattgcatgcctcctgcagccaccctccagcccatgcccacgccgcagggactgtgcttgtgactgggaatg

SEQ ID NO: 952981 - DNA, 120 bp, Artificial Sequence
  ENSG00000286367_3 (sequence is synthesized)
atcccgaggaggcatgtgtgaagaaaacgtgtatacatactgtgctacagatcatgccatttacttagcaacttattggatcatctgacaattaccagtggcacactgcactacaatttt

SEQ ID NO: 952982 - DNA, 120 bp, Artificial Sequence
  ENSG00000286367_4 (sequence is synthesized)
tttaggccatgcttcatatttgcagatgcaacactgtgatggtcacgagctaaggggatgaccgtgcctctctgtggagtgtttaggcatcacttgtcatctgcattaccagcagagatc

SEQ ID NO: 952983 - DNA, 120 bp, Artificial Sequence
  ENSG00000286367_5 (sequence is synthesized)
atctggtcacctggtaatagcacatcagctcctccagctcatctgcatgaatgacgatgtgaagaccacacagctgtgcgaagcggaactcttgtccatccatgcaggcaaagcacacct

SEQ ID NO: 952984 - DNA, 120 bp, Artificial Sequence
  ENSG00000286367_6 (sequence is synthesized)
aggggacggagggcaagcgtgagggtccccaagacaggacacagcaccacagcagctgacttacaaggcacacagttgcaaatgcagaaataccagcagtggggtattttaagttggatt

SEQ ID NO: 952985 - DNA, 120 bp, Artificial Sequence
  ENSG00000286367_7 (sequence is synthesized)
ctgaacaagtagctaactctatgatgaattgtacaagactgggagaaaaaatatgacatttgtaatctgcaggccaagggggtgcttgagaccatggaaagaataaagtttgtgcattac

SEQ ID NO: 952986 - DNA, 86 bp, Artificial Sequence
  ENSG00000262445_0 (sequence is synthesized)
atggttctgcctggcactgcgtgctgaagaaatacccctggatcattatcatccccctcagatggctcgctgcaagatctaccatc

SEQ ID NO: 952987 - DNA, 70 bp, Artificial Sequence
  ENSG00000262445_1 (sequence is synthesized)
ttgatcctctgtaagggagtggtgagagaggaatcgattccagctttctctgtgggggaggtgacagctc

SEQ ID NO: 952988 - DNA, 120 bp, Artificial Sequence
  ENSG00000262445_2 (sequence is synthesized)
gaatcgattccagctttctctgtgggggaggtgacagctctcgccccaggcttctgagggcttcaccagggggcactgccagcttccagaacacacccttatcctcccagggattggatc

SEQ ID NO: 952989 - DNA, 120 bp, Artificial Sequence
  ENSG00000262445_3 (sequence is synthesized)
tggtgcagagatgccaaggcagcctacgagagtcctgaaggcctccgatacctgatcctgcaggctggcagacgggcgggtgacacccacagactcttttgttatggctcctaaaacagg

SEQ ID NO: 952990 - DNA, 120 bp, Artificial Sequence
  ENSG00000262445_4 (sequence is synthesized)
gaaggcaagagggatctacggtgaggagaaaggccagggaggcaagcccaccgagaagaggactgtggcattttcatttgggtgcccagagtccccccagagcctgccaccgagaggcct

SEQ ID NO: 952991 - DNA, 120 bp, Artificial Sequence
  ENSG00000262445_5 (sequence is synthesized)
cgtccatggctgcagtgatagaggacagtgatgcaggaggaacagcagcagcggctccgggaggccttgctctgccacaagaaggcacgctacatccactttgtcacaaactctcaaagc

SEQ ID NO: 952992 - DNA, 120 bp, Artificial Sequence
  ENSG00000262445_6 (sequence is synthesized)
cccagaaggcagatggcattaaccccacttttcagatgacaaaactgaggccagaaggatttaaagcatctgcccagggtcaggcacctggtaaatggcaaagcaggagcccaagtcccg

SEQ ID NO: 952993 - DNA, 120 bp, Artificial Sequence
  ENSG00000274798_0 (sequence is synthesized)
aagagatagacatccatgatttattgttaggaggaagaagcaagttgcagaacatataatacagtatgttcaggttaaacaagtgtgcaaattaaaccttgttcaacttacaagaaacaa

SEQ ID NO: 952994 - DNA, 120 bp, Artificial Sequence
  ENSG00000268403_0 (sequence is synthesized)
agcgggaggcgccattttgtagcgagggagggaggctggtccttgtgattacccgggagggagccggggtgacgagcgccattttccccacaggggcgaggaggcggctttggttctccc

SEQ ID NO: 952995 - DNA, 120 bp, Artificial Sequence
  ENSG00000268403_1 (sequence is synthesized)
ggtgggcttgccggagtgcgttctgcagaccagaagggctttgtctggcgattgctgaatgctcaatagcagcctgctgggagggaagtcgaagggagaaataggacagaaagagagacc

SEQ ID NO: 952996 - DNA, 120 bp, Artificial Sequence
  ENSG00000268403_2 (sequence is synthesized)
tgacctctccctggaggctctcagtgtcggccgaggcccttggtcttgctctagggctctgcattcccgagagctgctgtatgccggggattggcttccaagcctgcctgagcttctcca

SEQ ID NO: 952997 - DNA, 120 bp, Artificial Sequence
  ENSG00000268403_3 (sequence is synthesized)
gtctcccgggcatcgccatgcggtgggagggtgagccttcctctcctgctgaaattccggcggcttggcaaccggccggggggtcttggattcctcggggagacaccactgatgctttgt

SEQ ID NO: 952998 - DNA, 120 bp, Artificial Sequence
  ENSG00000268403_4 (sequence is synthesized)
gttcttgtgttgcgaactaataaaggaaagtcaaaagggtgggagaagcattcagtctggttccctaaagttactaagaatggatacaaattagttgtggccgttgcggttaatgcttct

SEQ ID NO: 952999 - DNA, 120 bp, Artificial Sequence
  ENSG00000268403_5 (sequence is synthesized)
tgtagctcttaacccagccctttctaaacctttggatatacttactagtcagttccgaaggtactcagtacaaatttgcgttggcgcaccaggccgactaaagatgaggtgggtgtatta

SEQ ID NO: 953000 - DNA, 120 bp, Artificial Sequence
  ENSG00000268403_6 (sequence is synthesized)
gactcaaaatttcttaagtcggccagggggtagaattgagctaccaagagaatgagagactaccctgttgtaacagatttggatcgcgcttagaaaaacagggagaaagctggatgatgt

SEQ ID NO: 953001 - DNA, 120 bp, Artificial Sequence
  ENSG00000268403_7 (sequence is synthesized)
tcaacttaatgtcttgcatttcagacgattatcgaatggacggggataaataaaaacgatgttacagatagccctctaagtgtggatagtaaatattttgatttacaattaagcctacct

SEQ ID NO: 953002 - DNA, 120 bp, Artificial Sequence
  ENSG00000268403_8 (sequence is synthesized)
tgaggtgcaggccctaaccaacggatagttgagtaataggggcctagacgccaatggaaagaaaatgggactttaagctttgtttgaacatatattctgttaataaagaagtttaaatca

SEQ ID NO: 953003 - DNA, 120 bp, Artificial Sequence
  ENSG00000286364_0 (sequence is synthesized)
gggcagggacgctgatgagtgcccgttcttgcttctcaagctcttaaggcaacaattccattaccatcgctagttctcgctccagcacagggaggacggaatggctctgcctgtcatcag

SEQ ID NO: 953004 - DNA, 120 bp, Artificial Sequence
  ENSG00000286364_1 (sequence is synthesized)
atgaggggagtccactcagggctgttagtcctttagcaaaggccacagatgggtgagcagcagaaacgacatgggagctgaggccgggacccacagccaacgtgcttttgctccatcaat

SEQ ID NO: 953005 - DNA, 120 bp, Artificial Sequence
  ENSG00000286364_2 (sequence is synthesized)
tgagatgatcagtttttcttttttaaaaaaatcttttcagaagatgaattacattcgttaattttcaaacgttgaaccaacctttcacttctggggatgtgactgggaaaaagaaacaca

SEQ ID NO: 953006 - DNA, 120 bp, Artificial Sequence
  ENSG00000286364_3 (sequence is synthesized)
ggaccacaggaacgtctgtgacccatgctttctctaaagaaggcatcagggcttcaatatttagaggggaaaaaatgggcaggagaggaaagaaaaaaggggaggatacggtcaccttct

SEQ ID NO: 953007 - DNA, 120 bp, Artificial Sequence
  ENSG00000286364_4 (sequence is synthesized)
cgcgaagctctgatgagggctccgtaaatccatatgctgccatggaaagaacggggcagacggacggtcacctatgcgttcctctcctgctcagcgagcatgcttttgacaggaggaaga

SEQ ID NO: 953008 - DNA, 120 bp, Artificial Sequence
  ENSG00000286364_5 (sequence is synthesized)
gcaaatggggcagtcacgcacgcatttgtctcgggtgagggagaaatgacgtccagtcctgcctttgtcctgtgcctgtgaagataagctgtgaattcacattgtcagggtgaaattcaa

SEQ ID NO: 953009 - DNA, 120 bp, Artificial Sequence
  ENSG00000286364_6 (sequence is synthesized)
cagaacattgttttagggtaaagatcttggggcccacagggaggtaccttgtgagaaaactgagggaggccgcctagggaggtatgtggccttctatctatctacttaggaacaaagcag

SEQ ID NO: 953010 - DNA, 120 bp, Artificial Sequence
  ENSG00000286364_7 (sequence is synthesized)
gaggcagttaacccaaggttaacttttcccaatggcttagtgagtttggggccccaagattttgattttctgtttacatgttctcaaagaaccagctattggccttattgatttgactat

SEQ ID NO: 953011 - DNA, 120 bp, Artificial Sequence
  ENSG00000286364_8 (sequence is synthesized)
ctccgttgcatcttgtgttctattttgtgtttattagctctttccctctactttctttgagctcattcttttgagtttcatgcatagctcatgttcagtctcttttcctctctaacacag

SEQ ID NO: 953012 - DNA, 120 bp, Artificial Sequence
  ENSG00000286364_9 (sequence is synthesized)
gcacttaaagtctacatttaccttgaagtgtttcttcagctgcaagccacattttgatataaaatttttcattactgttcagatatcagtttctctaatgtttgttaataatttcttttt

SEQ ID NO: 953013 - DNA, 120 bp, Artificial Sequence
  ENSG00000286364_10 (sequence is synthesized)
ttaataatttcttttttgacctatgtggtattcagaagtctgttttaaaacttccaaatgttagccaggcatggcttacacctgtaatccagccactttgggaggctgaggcaggaggat

SEQ ID NO: 953014 - DNA, 120 bp, Artificial Sequence
  ENSG00000286364_11 (sequence is synthesized)
agaccagtctgggcaacatagtgagactctatttctacaaaaaataaatttccaaatacatgcagggttttaaaagttatcttcttgttactaatgtctaatataattttactgtggtca

SEQ ID NO: 953015 - DNA, 120 bp, Artificial Sequence
  ENSG00000286364_12 (sequence is synthesized)
tcagaaggttatacaaatttctgccagattaagcttgctaatggtgcttttcaaattttctatacatttgataattattttgactgcttaatccatcaatattgagaaaaatgtgttaaa

SEQ ID NO: 953016 - DNA, 120 bp, Artificial Sequence
  ENSG00000286364_13 (sequence is synthesized)
ccatcaatattgagaaaaatgtgttaaaaatctactagtatgtttatggattgcaaatcccaaaccctataactaaaaaattatataggtaaaactaaaaaattatatctattgaagtta

SEQ ID NO: 953017 - DNA, 64 bp, Artificial Sequence
  ENSG00000286364_14 (sequence is synthesized)
gctgggactacaggcgcctgtcaccatgcctggctaattcttctgtttttaggatccttctgcc

SEQ ID NO: 953018 - DNA, 120 bp, Artificial Sequence
  ENSG00000286364_15 (sequence is synthesized)
agtgctgggattacgggtgtgagccaccttgcccggcctgaagttattaatattattaaatgtacctaagtttagaaatcgttttatcttcctggcaaattattactttcatcattacac

SEQ ID NO: 953019 - DNA, 120 bp, Artificial Sequence
  ENSG00000286364_16 (sequence is synthesized)
acacaatagccttaatatattcctaaataacattttgccatcaagtatattttgtgtgatatcaacttagcaccactagctttcttttcatgaatatttccctagcaaacattttttttg

SEQ ID NO: 953020 - DNA, 120 bp, Artificial Sequence
  ENSG00000286364_17 (sequence is synthesized)
gggtgggagtggggtagggctggcattcttttgctttcaacctttgagtccttttatttaggacccagaaatagcacatatttagaaataccacatagatgaatttttttggggggggct

SEQ ID NO: 953021 - DNA, 120 bp, Artificial Sequence
  ENSG00000286364_18 (sequence is synthesized)
gggatctaatctgaggatctatttcatctgaaaacattagttcattgatgttactgtgctaatccattagaaaatatttttaccccttagtttggattttctattcactttcctttttgt

SEQ ID NO: 953022 - DNA, 120 bp, Artificial Sequence
  ENSG00000286364_19 (sequence is synthesized)
gtgcttcaccaatccccttccatgttagttactcctactgattttttaattcctcaccaacatacactgctatgaaagttttctattctacatctattcttttttaaaaattaaaacaca

SEQ ID NO: 953023 - DNA, 120 bp, Artificial Sequence
  ENSG00000286364_20 (sequence is synthesized)
atttttcattttaaaagaatttcagacataaaaatgttttaaaaatagaatgaagaattcccatattccttgtcctctcccagcttctccaagtattaatatctcaaatagccacaacac

SEQ ID NO: 953024 - DNA, 120 bp, Artificial Sequence
  ENSG00000286364_21 (sequence is synthesized)
aatgatcaaaagcaggaaattaacattgatatactattgtgagctaatttacagatcttacgaaaatttcaccggttggctcactgacgtcctttttctggttcaagatccaatccagga

SEQ ID NO: 953025 - DNA, 120 bp, Artificial Sequence
  ENSG00000286364_22 (sequence is synthesized)
ccacacattgcatttaattgtcacgtctccaatctggggtagttcctcaagtctctgtcttctgtgaccttgataattctgaagagtattggttgggtattttgtagaatgtgcctcaat

SEQ ID NO: 953026 - DNA, 120 bp, Artificial Sequence
  ENSG00000286361_0 (sequence is synthesized)
gtggaaacgtggcaggaacattgggcgtgaaaaagactgcactagcatatagataatgctagaagagaagggtgtggagatagaccttcagagaatctttgcatttcagggctgggtcaa

SEQ ID NO: 953027 - DNA, 120 bp, Artificial Sequence
  ENSG00000286361_1 (sequence is synthesized)
agcggagtgagctggggaagccagccctgaatggcagaactacaaagtgagcccaacagagtcccatggaagggattcataaatataaaagatgaagcaactttccctataccacttggc

SEQ ID NO: 953028 - DNA, 120 bp, Artificial Sequence
  ENSG00000286361_2 (sequence is synthesized)
acgtgaagaaaaatgaagcttagagtttcccaggtcttagtccaagggcccagcagcaaacctttcaagcacacaaataaacaaaaccaacaaaataaaccagagttgaccaaaaaaaaa

SEQ ID NO: 953029 - DNA, 120 bp, Artificial Sequence
  ENSG00000284674_0 (sequence is synthesized)
tcgtggccacttatctccatttcaacgggacgattctggaccgcagtgatcacagcccccctttccctcactgagacttaccagaagggactctgcacagggaaaggctcattggtgggg

SEQ ID NO: 953030 - DNA, 120 bp, Artificial Sequence
  ENSG00000284674_1 (sequence is synthesized)
ctgcctgggagaactcccaagacacacaggtggagcctttcccgaaggccaagtatggagcaattatctcgcgtcttcatccatcatcggaaatcctaactgaagcttttgagccgaatt

SEQ ID NO: 953031 - DNA, 120 bp, Artificial Sequence
  ENSG00000284674_2 (sequence is synthesized)
ccaaagctttatggacgcccttccgtccggagctccctggagctgcgcctcgtgggctgtgatttacacaggggctgaggcttgggcctgagttggttccagatcatagggactgtgaca

SEQ ID NO: 953032 - DNA, 120 bp, Artificial Sequence
  ENSG00000284674_3 (sequence is synthesized)
agcctgaagacccttctccctatcccaggaggagcccaggaacgcaagcgagagcctctgcaagtcaccccagctgccgcgtttccacccaggaggaagacgcacgtggggcggcacgag

SEQ ID NO: 953033 - DNA, 120 bp, Artificial Sequence
  ENSG00000284674_4 (sequence is synthesized)
agatagacggaggattgaaagaagtagccagtgagccagataagatgagccaggacacacgatgctgatgggtcaaggaaggtcagtcctgggagctgaccacagattggactgacccag

SEQ ID NO: 953034 - DNA, 120 bp, Artificial Sequence
  ENSG00000284674_5 (sequence is synthesized)
aagacagtgccagctccctgaggaggggcagctgggtggatgcagtgaatgccaatccctctttttggtaccagcacctgggttttccttggggagaatgctactcccttaatatacaca

SEQ ID NO: 953035 - DNA, 120 bp, Artificial Sequence
  ENSG00000284674_6 (sequence is synthesized)
agaggctcagtttcccttgggtaaggcagggatggggggctcagctaagaccaacagtctctccctcctgaaattctcatctttgactggcataagacaaaacaaaacaaaacgacaaaa

SEQ ID NO: 953036 - DNA, 120 bp, Artificial Sequence
  ENSG00000284674_7 (sequence is synthesized)
aaagccacgaattaccccaggaagaggcgccgtgaaaatactacatgctcttcctcctgttccctgggtttgttcttcctccttttcccatttcctgtttattctaagacttccacttca

SEQ ID NO: 953037 - DNA, 120 bp, Artificial Sequence
  ENSG00000284674_8 (sequence is synthesized)
attcctctatcccctgtgattccaatgacctgtctttgcagaagagctttaatcagctggtcagtttctaaggctttcatccaaggaaccctcattgatgtgaaacaacaaagtgagact

SEQ ID NO: 953038 - DNA, 120 bp, Artificial Sequence
  ENSG00000284674_9 (sequence is synthesized)
tccatcctcgaatgtgcagccaggaagtggcagaaaggagctttgcataaacttcttctcatttcaaatcctatgctctttctcccacgcctcagccatttgcctttaaaatcaattgca

SEQ ID NO: 953039 - DNA, 120 bp, Artificial Sequence
  ENSG00000284674_10 (sequence is synthesized)
tcctgaagtgaagagctttgcaagaacagtgctatcagaaacaaccatactccaccagagcaatcacagcacctcccagaacccctgggacttttgcttggactcgggcaagtgagtaga

SEQ ID NO: 953040 - DNA, 120 bp, Artificial Sequence
  ENSG00000284674_11 (sequence is synthesized)
cagctcggatggggcgagcacctgctggttcatccaccaaatatgaacatggcccaagagtgagaccccaagacccgaaattgcaccaatgactatagctatacaagaaaatgccactgg

SEQ ID NO: 953041 - DNA, 120 bp, Artificial Sequence
  ENSG00000284674_12 (sequence is synthesized)
acaaattttgcagaggtttctttattgttgctgttctcagcaaacctaagaagtcatttcagtttgtctcagtttttgtagaagaacaaaaagttcaacattaaaccatgtgtgtaagta

SEQ ID NO: 953042 - DNA, 120 bp, Artificial Sequence
  ENSG00000228748_0 (sequence is synthesized)
agacagaaagaacctacacatcagccaactccagctacgtgctgcagaggagaagctgtctcaagtttagaaatacaggaaagctgactgactaggaagagattaaaaactcacatcttc

SEQ ID NO: 953043 - DNA, 120 bp, Artificial Sequence
  ENSG00000228748_1 (sequence is synthesized)
aaacacagccttacagaaattgacctttatttgttgtactaaagcctgtttaacttttgatacaaagtaacattttagtacagaaaatcccagtctgtcagctcagtacctgtctgtgca

SEQ ID NO: 953044 - DNA, 120 bp, Artificial Sequence
  ENSG00000228748_2 (sequence is synthesized)
cactgtaccatctcagtcccactctgcctgtaacttagaaaacagcccctacccccagagggtctgcgagttaataccttgagaatagtctacagtttttcatagtttgtctgagctaga

SEQ ID NO: 953045 - DNA, 120 bp, Artificial Sequence
  ENSG00000228748_3 (sequence is synthesized)
aaacttgtacctgtaaaacaaaggacagcattgaggactgaaacttgtctcttttttgaacaactgtgcaagaaaatatatccctttttaaaaaacatcagttatggctaaactacaatc

SEQ ID NO: 953046 - DNA, 120 bp, Artificial Sequence
  ENSG00000228748_4 (sequence is synthesized)
tgaaatcaaagatttctcgctagtaaaatgaaatgttaggaacagtattaaaatataggtcctaccccaacgacacttacacagagcccagtacagtacctattattaacaggacgcata

SEQ ID NO: 953047 - DNA, 120 bp, Artificial Sequence
  ENSG00000228748_5 (sequence is synthesized)
gcttaaggaggaaccacatcaaatcttcagccagacatatctagcctcagaagtgcaaaaaaaaaaaaagcccccaaacgaagacacccacactgagtagggtgcatgccgtgagtgctg

SEQ ID NO: 953048 - DNA, 120 bp, Artificial Sequence
  ENSG00000228748_6 (sequence is synthesized)
taatcaagattaaaaagacctcagtttttctttttagactgttgatagtgacaataaccattatgcttcccctaaaagctctcaattcaatgtctgaaacatgaatgttttcatatcaaa

SEQ ID NO: 953049 - DNA, 120 bp, Artificial Sequence
  ENSG00000228748_7 (sequence is synthesized)
aagaactgatgtacctgccaccctctaaaaagtttaagaattaccctgcaaacattgcactgatgaaggctgtcacgacttacagagcctaaggaggacccaatggcaggcatcagcaca

SEQ ID NO: 953050 - DNA, 120 bp, Artificial Sequence
  ENSG00000228748_8 (sequence is synthesized)
aagagactgagtcagttcccacttgtgaatagacagcatgaaggctttaaacctctctgaacctgatcagcattggcaatgatcttctgcagatccaacaacagcacagaagaatgtatc

SEQ ID NO: 953051 - DNA, 120 bp, Artificial Sequence
  ENSG00000228748_9 (sequence is synthesized)
atcaggaacacatttggatattgacacaacttcatctgcagttggcttgtcatcctgagctccgttcccaggcagcgtagatattgcacaggattttgctgaccagggagttgggttata

SEQ ID NO: 953052 - DNA, 120 bp, Artificial Sequence
  ENSG00000228748_10 (sequence is synthesized)
agtggtaactccaacctcttaatactaacgacattgacagtaccatataatccatctattacaccacacaggaaaatcaagcccagtggtacaggacagaagaactggctccagccagga

SEQ ID NO: 953053 - DNA, 120 bp, Artificial Sequence
  ENSG00000228748_11 (sequence is synthesized)
tcaagcattgctttggcattgttccccaatacctgggcctttcttctccaattgttggggtaactggagtgaggagcctgaggggacccaaaggtgttctcctgagcctaaggaggaccc

SEQ ID NO: 953054 - DNA, 120 bp, Artificial Sequence
  ENSG00000228748_12 (sequence is synthesized)
aatggcaggcatcagcacagctgaacaccacctggaccccactgcagccctgcccacgcagctctcacggagcagacacagtcctcaagtaataagcacagatggaggagaaacgagagg

SEQ ID NO: 953055 - DNA, 120 bp, Artificial Sequence
  ENSG00000228748_13 (sequence is synthesized)
ctgtggaaggcaggagagaaaggccgagagacgagtttgtaagaatgccaaagtcaccttccccattgtgggaggaaaatgccaaaggcactggttctgctgccacaggcagtctgagca

SEQ ID NO: 953056 - DNA, 120 bp, Artificial Sequence
  ENSG00000228748_14 (sequence is synthesized)
cctggagttgtgacgtccttccaggagaggtgccaccaaggagcaggaggtttgtcaaagctctggtcccaccaacaagaacctcccaaagcaaagcagcccccattgaggttccaaggt

SEQ ID NO: 953057 - DNA, 120 bp, Artificial Sequence
  ENSG00000228748_15 (sequence is synthesized)
cgttttgctgaagacgggaacgaaaccaacaccaaagcgacagggggttgacagaggggacaggggctgggcaccggcaacatggagccgttcaagtaaacataaaccaccaaatactta

SEQ ID NO: 953058 - DNA, 120 bp, Artificial Sequence
  ENSG00000228748_16 (sequence is synthesized)
gttaaagcacacgtgtgacacgggcagagtgtgtgggcctgggcctggatcgcacgcagccgtggccctctgtctacaaaggaggtgcttctgggtcctggttccggatccttcccccgc

SEQ ID NO: 953059 - DNA, 120 bp, Artificial Sequence
  ENSG00000228748_17 (sequence is synthesized)
atgttcatagacggacagacttctactttcagtcgctagaaaagagctgagtctggtgtcccctcaggcggccagctgcagtcatccacagcacagcattctcctagagcgggcaggctg

SEQ ID NO: 953060 - DNA, 120 bp, Artificial Sequence
  ENSG00000228748_18 (sequence is synthesized)
gaatccacaggactttattttgttcttgattgaccattgccaagatctgagtgcaaatgcttgacagggctcctccctggatgacccctgcaaaagagccccccagacacgtcattcagc

SEQ ID NO: 953061 - DNA, 120 bp, Artificial Sequence
  ENSG00000228748_19 (sequence is synthesized)
tcagagtaagaccccaggtttgaggcaaggcagtacagcttgcactctttctactgtgtggctgtctgctttgtgctccttggcactctgctccatccccacctgactctccttcaccag

SEQ ID NO: 953062 - DNA, 120 bp, Artificial Sequence
  ENSG00000228748_20 (sequence is synthesized)
caagaaactgggaaagaaaattgcccctcttgagttgatcactcatatgtaaactgcccaccccactgcagttaacaccctgggttgggtttgcaatggttgggggaatcccagggcatc

SEQ ID NO: 953063 - DNA, 120 bp, Artificial Sequence
  ENSG00000228748_21 (sequence is synthesized)
agaaggaagtttggaggacatgtggcggtggtctaatcattagcaggattctgcaggaaacgacaagtttaaggagccagatagctcatggccaagaggagagtcacagaaagatgatgg

SEQ ID NO: 953064 - DNA, 120 bp, Artificial Sequence
  ENSG00000228748_22 (sequence is synthesized)
cgccaacttgggccagccctgtactataggagtttgacaaaggggtctatagacaccaggccaggggtactccagtgtgctccacataacagcacctggacacaaaccaagcccctactg

SEQ ID NO: 953065 - DNA, 120 bp, Artificial Sequence
  ENSG00000228748_23 (sequence is synthesized)
caacaaggcatgctcagaaattgacagtgagtgtctagaaactgctatggaaacaggacgtcgtaattttatgtctgttgaatctaacaagaaaaaaatagagcttaccttttgcaagac

SEQ ID NO: 953066 - DNA, 120 bp, Artificial Sequence
  ENSG00000228748_24 (sequence is synthesized)
caaatgaagattccctcaagcagcagcctcctggaatcaactgctgagtccaaatcttgtagcccttaaaaatatttagtatttttactaagtaataagtatttagggtgttatgaaaaa

SEQ ID NO: 953067 - DNA, 120 bp, Artificial Sequence
  ENSG00000228748_25 (sequence is synthesized)
tgcaatttgaaaaagtacattggtttttaagaacaagaggaactatttagaaattatacaatatattaacaaaagtaaatatttaatatatctcaaacacaaaaatgcaaaaactggtta

SEQ ID NO: 953068 - DNA, 120 bp, Artificial Sequence
  ENSG00000228748_26 (sequence is synthesized)
ccaagcatcaagaaaaacttaaaacttgtaaaatacaaaggttaaatgtattttatcttcattctattattagcagataaccttaataaaaatgagctgttatttacagcaaaatatcat

SEQ ID NO: 953069 - DNA, 120 bp, Artificial Sequence
  ENSG00000228741_0 (sequence is synthesized)
cccgggacagtttccagtcggcttctccgtgaccttcctcccccttccagctcggagcgggatgctgggatccctccaaggaccctctgaggacgtaggagggatgctgagacagggcca

SEQ ID NO: 953070 - DNA, 120 bp, Artificial Sequence
  ENSG00000228741_1 (sequence is synthesized)
gcttcaaaccttgtcaagctctgacaagggaagatgaagcctagttccagctaggggtgacctgtctatctgcattttttgagctgcagagtgatgggagtcatattcgctgcctgtgca

SEQ ID NO: 953071 - DNA, 120 bp, Artificial Sequence
  ENSG00000228741_2 (sequence is synthesized)
gcaccacaggcctgatgaaaatgaaatggcaacaccgtgcagatggcaaagcgtaggcctcacaaacatcctggccgtgaagagcttgtcttcaagagtagctggtgcagaaactcgctc

SEQ ID NO: 953072 - DNA, 120 bp, Artificial Sequence
  ENSG00000228741_3 (sequence is synthesized)
ggactgacctggaagaagaccctgaggagaacccgggcacacagcagccattccagtcctcagcttcaagggggctcacgaaggttgtggatccttgcccagcctgcagtggggacctgg

SEQ ID NO: 953073 - DNA, 120 bp, Artificial Sequence
  ENSG00000228741_4 (sequence is synthesized)
tgtggcattgagtggctgtgagtgctcagtgtcccccatctcatgctaagcacagcgaagtagggggagattgcgtagtgtgctgatggagcagttgcctccacctggctgcgtgtccct

SEQ ID NO: 953074 - DNA, 120 bp, Artificial Sequence
  ENSG00000228741_5 (sequence is synthesized)
ccgtcatgtgacagaaaagaagaaggcaatggtgtttttctgtagcaagtcactatttatggaagaggagaccctttatctgcatcgcaattctgaagattccactttgttccagtcatt

SEQ ID NO: 953075 - DNA, 120 bp, Artificial Sequence
  ENSG00000228741_6 (sequence is synthesized)
gttgtgggcacactttcaacatttgattaagagccataagggtggcttcctccacccacagaaaaattcctctaaggaatcatgagaccgtcgacatttagcagctgtttaaaagactgt

SEQ ID NO: 953076 - DNA, 120 bp, Artificial Sequence
  ENSG00000228741_7 (sequence is synthesized)
gtcttgggcaagaagggaactcaagtaggaaagtcagcaatctaaatttcaaacctcagggaaccttctttgtataacctgataatctccttcgctcaacacagtgcttgctgagtgaag

SEQ ID NO: 953077 - DNA, 120 bp, Artificial Sequence
  ENSG00000228741_8 (sequence is synthesized)
gagtgtaatggaaaagaaagttaataatcccttgtgctctggatcaaaaatgaggtaggagaccaaattttccatcaaactggttgggtccaatcacttaatgcaaaatgcttacttcag

SEQ ID NO: 953078 - DNA, 120 bp, Artificial Sequence
  ENSG00000228741_9 (sequence is synthesized)
ggtctgtagcacttgttgatcaatgtacctaacaggtcttaatagagaaagtgatcaattcaagcagtgtcttcccaaattctatatatatataacagatattgctgcataacaaaccag

SEQ ID NO: 953079 - DNA, 120 bp, Artificial Sequence
  ENSG00000228741_10 (sequence is synthesized)
acaacgcttaatagtttaaggcaaccgttttattattccccagagttctatgcgtggaccaaggtcacttgggccctagtcttgtgatgtcacttggaccacagtcattgggaggttcac

SEQ ID NO: 953080 - DNA, 120 bp, Artificial Sequence
  ENSG00000228741_11 (sequence is synthesized)
caggtggaagcctccatgacagctcaatcccatagctgccagtgggtacggcacctacacgtggctgcttgtatggcctgggattttcacagcacagcagcaggggctgagaggcagagt

SEQ ID NO: 953081 - DNA, 120 bp, Artificial Sequence
  ENSG00000228741_12 (sequence is synthesized)
cctaggagtgattgtccccagagagcagaagcaaaagctctcatcagtcttctaagaggctgagctgacaatgggcacagcaccactctgccatcatctatggcttaagcattcacaggg

SEQ ID NO: 953082 - DNA, 120 bp, Artificial Sequence
  ENSG00000228741_13 (sequence is synthesized)
ccaggctaaattcaggctgtcggaagataaactccacctctcaatggagagagttcaaagcaactgtggccatctttaccccatcagctttcttgccaagaaataaagctctacatgaca

SEQ ID NO: 953083 - DNA, 120 bp, Artificial Sequence
  ENSG00000228740_0 (sequence is synthesized)
atggcaggccaacttactagctttcaagtaaggtaacatctcagaccatcataggttttgacaggggaaactctgaaggaccacaggagttggaggttccacgtatctctaagtagtaac

SEQ ID NO: 953084 - DNA, 120 bp, Artificial Sequence
  ENSG00000228740_1 (sequence is synthesized)
atacgatgggtccaaaacagaagaaagagaactcaagattcccgagccacagagctgttgattggaggctgactcagagaaaccctggattcagtgacatacagagacaacaggtgctag

SEQ ID NO: 953085 - DNA, 120 bp, Artificial Sequence
  ENSG00000228740_2 (sequence is synthesized)
gacttccagtgcgacattgaaaatgacagtgaaaccacacatccctgccttgttcctggtcctcagtctttcaccatcaagtttgatgctacctgtagttctgcgtgcattttgtagatg

SEQ ID NO: 953086 - DNA, 120 bp, Artificial Sequence
  ENSG00000228740_3 (sequence is synthesized)
cttagtatcaagctgattccaaggacgcttctatctttagactgctgtattatgagagaggatgggagaaatgagagcatcaagaaacaaaagactcatggaatcataggacattcatct

SEQ ID NO: 953087 - DNA, 120 bp, Artificial Sequence
  ENSG00000228740_4 (sequence is synthesized)
tggatgagaccagagaggccaacccatgtgtgtatttccccaccccatccaacccccagcaactcactctcctctggacacacccagtgacttgggagcagtcagctatgccctatggga

SEQ ID NO: 953088 - DNA, 120 bp, Artificial Sequence
  ENSG00000228740_5 (sequence is synthesized)
agcacaggagctgcctgcctgcttgcaacgaccagccatttgatttgcctgctctgtaccctggctgcatctcaagggctcttcaagggacaaagaagttacagtcagattggtttctgt

SEQ ID NO: 953089 - DNA, 120 bp, Artificial Sequence
  ENSG00000228740_6 (sequence is synthesized)
ggacggaagcctggcagctcagcacctgtcatgggccaccccgaacacagcaagtggaaatgcgtcctctggacccccacctgcctgggacactcacctcatcctgacaggcccagccct

SEQ ID NO: 953090 - DNA, 120 bp, Artificial Sequence
  ENSG00000228740_7 (sequence is synthesized)
tctctgccatcccgtgctgcgaggcaccaccaactgccaaggtgtgggctgaagggcagcggcccaggccaatggagacttggggaaggtaaggaaaggagaaccaagaattaagtggga

SEQ ID NO: 953091 - DNA, 120 bp, Artificial Sequence
  ENSG00000228740_8 (sequence is synthesized)
gatgaaataagaggcagattctcctcggtgagtggttgcataagtctagggcagctccatagtaagattccaggggcaataggggtggatggaacatcaacgcaacctcaatggcggacc

SEQ ID NO: 953092 - DNA, 120 bp, Artificial Sequence
  ENSG00000228740_9 (sequence is synthesized)
gcggggtgacagcgaggggtgcctcctgcacaccgacagggtctggtatttactttagcacaggcctcaggaatacagttctgcctcataaaagactagggaatgctgacaaaagaaagt

SEQ ID NO: 953093 - DNA, 120 bp, Artificial Sequence
  ENSG00000228740_10 (sequence is synthesized)
tctgtgctttcctgacaactgcatgcactgtcaggaaacagtgggtcctacttagagttgagttggaaaatggatttgggggctgaagaatcaaatgatgctgtgaagcactctctttgt

SEQ ID NO: 953094 - DNA, 120 bp, Artificial Sequence
  ENSG00000228740_11 (sequence is synthesized)
ggcgtcttcataacacttcatgcttgtggagctggcagtcactggattcagcttcctcccaatgcagggattccttacacacaactgctgagcagcatgcagggacctaaggccactccg

SEQ ID NO: 953095 - DNA, 120 bp, Artificial Sequence
  ENSG00000228740_12 (sequence is synthesized)
tggtgcagccggctaagaaatgacagggccaccaggccggctgcactcctgtaccttcctctcttattcagtgcaggaagcccagtgttcctgtagcaggcagccccatggtctagctca

SEQ ID NO: 953096 - DNA, 120 bp, Artificial Sequence
  ENSG00000228740_13 (sequence is synthesized)
gtctagctccacatcctgtcctcaatgtgacaaagatcctgtgcttggccagtctttagtcaggccctgatccttctcctaggcccattagcaagaaccccagctaagtcagtctggcaa

SEQ ID NO: 953097 - DNA, 120 bp, Artificial Sequence
  ENSG00000228740_14 (sequence is synthesized)
gaattccccacagaaacatgctgacatgctgacctgccttcagcaggaaaccctttaggctggtttggccagaactgcccgcagacttggcgtctcctctgagtaactttacacccactg

SEQ ID NO: 953098 - DNA, 120 bp, Artificial Sequence
  ENSG00000228740_15 (sequence is synthesized)
accctctgctccttggccatcagtgcccactcgtccccgttgtacttgtaacggagcccaacccagctcttcactggagtcttttttgcaatagtcctgaataaaatgtgccatcactga

SEQ ID NO: 953099 - DNA, 120 bp, Artificial Sequence
  ENSG00000228740_16 (sequence is synthesized)
cacccccaccatggatgctgtccgtccactgttgcacaatgtccttcagtgtctaatttacagatccagctgtatttccccttccacctgcatccctgaagttcctcccacctgaaaact

SEQ ID NO: 953100 - DNA, 120 bp, Artificial Sequence
  ENSG00000228740_17 (sequence is synthesized)
caagaaagcaaaggaaaaaacccggagagccagctcatagtctggttcactgtttaacagccagaagccagagcctgcgtactagaagtggatgcccaggaagtacttgtgagctgacta

SEQ ID NO: 953101 - DNA, 120 bp, Artificial Sequence
  ENSG00000228740_18 (sequence is synthesized)
agaatgtaagaacgccacccacttcattcaggaaagtgaggcaggattccatggagtatgaatgactgcacatggaacaagcaggttatcatttatattcagcaagggacctccatgaac

SEQ ID NO: 953102 - DNA, 120 bp, Artificial Sequence
  ENSG00000228740_19 (sequence is synthesized)
aggacatttggggagctgctatcaaacatcagaacttctgacactgtgcacacagtcttatattgtgccttgtctgttgtgatgtctcactacagtaatgattaagatgatgagcactta

SEQ ID NO: 953103 - DNA, 120 bp, Artificial Sequence
  ENSG00000228740_20 (sequence is synthesized)
tgcgttgatattgcaatatgtctgcgtaagaactatcgctaaggcaggttatattattaccctcagtgtataggtaaggaggttagactgataacttacccagtgtcacataggtagtaa

SEQ ID NO: 953104 - DNA, 120 bp, Artificial Sequence
  ENSG00000228742_0 (sequence is synthesized)
ggaatgcagctcacatgccagaaactatacaatccaccccctctgaaggagtttgttcatttaaaaaaaaaaaaaggatcacagtctggaagtctgctcacagtctcaaggttggcatat

SEQ ID NO: 953105 - DNA, 120 bp, Artificial Sequence
  ENSG00000228742_1 (sequence is synthesized)
cccctagagcccccagactcctcatcccatggagaccaacatggccaggggagggccagagcagggccttctaaatcacagaccccagggcaggagcccctccggtctggatctaaggat

SEQ ID NO: 953106 - DNA, 120 bp, Artificial Sequence
  ENSG00000228742_2 (sequence is synthesized)
ggtattttcaacaattcctaaatttttatcctaggctctccaaatgggagtctaaaggtctcaaaacatggtccagaagaagtatgcaaaaatgtaaattcctaggccccaacccagacc

SEQ ID NO: 953107 - DNA, 120 bp, Artificial Sequence
  ENSG00000228742_3 (sequence is synthesized)
tatgaatcagatgatctgtatgggggttcaaggaatctatattattaaacaatcttcctaaatgacttgtattcatactaaagcttgagaattgctatcaaacagctagaagttggagtg

SEQ ID NO: 953108 - DNA, 120 bp, Artificial Sequence
  ENSG00000228742_4 (sequence is synthesized)
aagggtcctgcctttcccatgaaattcatcaactctatgccctcaaaagctgggctcttggatgagctgctctccattctagagacattaccagctaggtagcctgctggtcctcaggaa

SEQ ID NO: 953109 - DNA, 120 bp, Artificial Sequence
  ENSG00000228742_5 (sequence is synthesized)
gttaagcccagactcttcagcacagaatcagataaacactgattacattgtactctacagttctgagaacaccattacttaattcccggcaagttgcaatgtaattgagtaggttgtagt

SEQ ID NO: 953110 - DNA, 120 bp, Artificial Sequence
  ENSG00000228742_6 (sequence is synthesized)
tttttgggtttggggtttttttgttttttaaatatatcaggcgtagttagccagcttcctagaaacaccatgatctcttggtgaaaattccagaaatatgcatcacttcctaattaaagt

SEQ ID NO: 953111 - DNA, 120 bp, Artificial Sequence
  ENSG00000228742_7 (sequence is synthesized)
attcctattgccctttcttttcacccaccattcagcagtcagcagacactttctgggtacaacagggtaggaccatccaggcagaacaaaagccattgatcatgaactacagaggagagt

SEQ ID NO: 953112 - DNA, 120 bp, Artificial Sequence
  ENSG00000228742_8 (sequence is synthesized)
ttggtaaatggacaccagaaaccatggcctacaggggcctggttttctcccatctaaatactaactaggcccaacgctagttgggcttagcttcctagatcagatgaaattgggcacatt

SEQ ID NO: 953113 - DNA, 120 bp, Artificial Sequence
  ENSG00000228742_9 (sequence is synthesized)
tagggttgggggtatggctctctattgtaagtagcaagagtttgagagaagaaaaaagggattttcttttttttttcttttaaattttagagcattaactttaaacatcaagatccaaac

SEQ ID NO: 953114 - DNA, 90 bp, Artificial Sequence
  ENSG00000228742_10 (sequence is synthesized)
cataggaggtatagagatagagaaatatggaattggctcccatgattatggaggctgagaagtccctcaatctgctgtctgtgagctgga

SEQ ID NO: 953115 - DNA, 120 bp, Artificial Sequence
  ENSG00000228742_11 (sequence is synthesized)
gaggctgagaagtccctcaatctgctgtctgtgagctggagacctaggaaagcttagctggtggtacaaaccagcccaagtgcaaaggcccaagaactaagagcaccattgtcagagagc

SEQ ID NO: 953116 - DNA, 120 bp, Artificial Sequence
  ENSG00000228742_12 (sequence is synthesized)
aggaaaagacagatgtcccagctcaaaaagagagagcaaattcaccttccttccaccattttattccgtcctgttccattcctcaacaggttggatgatgagggagatctttatccatct

SEQ ID NO: 953117 - DNA, 120 bp, Artificial Sequence
  ENSG00000228742_13 (sequence is synthesized)
caagttttttgtgcaaatatggaatacaaatgaaaaatacttaaagcacatcatcattgatttccaacttagactagtttaacttccctttttcttctatcctgtcagttccttgaggga

SEQ ID NO: 953118 - DNA, 120 bp, Artificial Sequence
  ENSG00000228742_14 (sequence is synthesized)
tcctctctccttgttcatctctgcatctctagtaattagcacagtgccaggcacatggtaatatggctaaaacagtggattattggtctccaacataattaagcccatccaaaagaaaaa

SEQ ID NO: 953119 - DNA, 120 bp, Artificial Sequence
  ENSG00000228742_15 (sequence is synthesized)
cttaacctcctggaatgcagctcaccagccctccatgaatgaggaacttcctggggccactagtgcatgctgcagctcacacagtcaactccatccacacctccacaaacagctgccctt

SEQ ID NO: 953120 - DNA, 120 bp, Artificial Sequence
  ENSG00000228742_16 (sequence is synthesized)
tggccactactcaggcgtaaggacacacccagcagggtatgccctctggaggtcagaccagggaagaagcccttgcacagtcaggagccagctcagcacctgtgatgctgaattctatgt

SEQ ID NO: 953121 - DNA, 120 bp, Artificial Sequence
  ENSG00000228742_17 (sequence is synthesized)
tttgtaaactgtatggcactggcgggagtgtctttagcatgttagcgcattatataattagtgtataatgagcagtgagacgactggaggtcactttcatcgccatcttggttttggtgg

SEQ ID NO: 953122 - DNA, 120 bp, Artificial Sequence
  ENSG00000228742_18 (sequence is synthesized)
atgtcaccctgcttgcacatggaagggaggcctgagaggctgcagaatggccctggagaaggcaagagacatcatctggttggcctggagtgcacgtctgtgagagactttggggcagtt

SEQ ID NO: 953123 - DNA, 120 bp, Artificial Sequence
  ENSG00000228742_19 (sequence is synthesized)
ctctcttctctatgctagagccattgatgccctgtgcacttcattgcctttgaccatcattccttgctcctggaatgccacctcctctttgccacagttaataaaaccagctgaagcctc

SEQ ID NO: 953124 - DNA, 120 bp, Artificial Sequence
  ENSG00000228742_20 (sequence is synthesized)
aggtgctcggattaaacctgatttctgggtatgtctgtgagggtatttccagaggagattagaatttgaatccgtggattggcaaagttggtgtctgccccagtgtgggtggtcaccatc

SEQ ID NO: 953125 - DNA, 120 bp, Artificial Sequence
  ENSG00000228742_21 (sequence is synthesized)
tactctcctgagggcctgaagagaacaaaaggcaaaggaaggaggaattcgcccttaacttgcttgccgcctgcctgcttgagcagagacatttcatcacatcttctctggccctcgact

SEQ ID NO: 953126 - DNA, 120 bp, Artificial Sequence
  ENSG00000228742_22 (sequence is synthesized)
gagattcacaccattggcttccctggttctcaggcattttgacttggactgaactacaccattggctttcctgggctccagcttgcacatagcagattgtgggatttctcagcctctatt

SEQ ID NO: 953127 - DNA, 120 bp, Artificial Sequence
  ENSG00000228742_23 (sequence is synthesized)
ctatgtctcaaaggtgctggccaaaaaaatttaagaacttgggaattatgtgttattttgtttgtttttttcaccaagcctacttttctgtcacaagagcccatatcaacaacacaccca

SEQ ID NO: 953128 - DNA, 120 bp, Artificial Sequence
  ENSG00000228742_24 (sequence is synthesized)
aattgacccagacccttcaggaatgaaggttcaccccaccagacgcatgtaacatttggtgctgaaacccaagacaggggactccttcagaagaccagccccctgtcctcaccctcagtc

SEQ ID NO: 953129 - DNA, 120 bp, Artificial Sequence
  ENSG00000228742_25 (sequence is synthesized)
cccaaggaacatctcaccaatttcaaattgggaccccactggaagtcggaccatccaacttggattacagctgctcctagacctactggagcaaaaagctaaggctcctggctgattcct

SEQ ID NO: 953130 - DNA, 120 bp, Artificial Sequence
  ENSG00000228742_26 (sequence is synthesized)
acctactggagcaaaaagctaaggctcctggctgattccttcccagatctcctcggcttagtggctaaagactgacgctgccaaatcatctcggaagccccctggaccatcacggatgcc

SEQ ID NO: 953131 - DNA, 76 bp, Artificial Sequence
  ENSG00000228742_27 (sequence is synthesized)
aggaatgtcaggcctgtgagcccaaagtaagccatcataacccctgtgacctgcatgtatacgcagccagttcctg

SEQ ID NO: 953132 - DNA, 120 bp, Artificial Sequence
  ENSG00000228742_28 (sequence is synthesized)
cccaccctaactaatcaatcgaccttgtgacattcctcccctggacaatgagtctcatgatctccccaccctgcaccttgtgtcccccatccctgcctgtaagagataaccacctttaac

SEQ ID NO: 953133 - DNA, 120 bp, Artificial Sequence
  ENSG00000228742_29 (sequence is synthesized)
gccgacctcctatctcatcctgtgactaggaatgccttaacctcctggaatgcagctcagaaatttgggtgcagacaggcacacagggagaacaccatgtcaacacgaaggcagaagttg

SEQ ID NO: 953134 - DNA, 120 bp, Artificial Sequence
  ENSG00000228742_30 (sequence is synthesized)
gttggagtgatgagtctacaagccaaggattgccagcaattcatcagaggccaggacagcagcctggggcagccccctacatggtaccaactccatcaacaccttgatctcagacttcca

SEQ ID NO: 953135 - DNA, 120 bp, Artificial Sequence
  ENSG00000228742_31 (sequence is synthesized)
gtttgtcaccatcaactgttaaaactgtaaagatttgatcagctaaataagtggtctttgaactaattcctctcgtacttcctaaaggaactttgaaaaactatgtatccccttgcacat

SEQ ID NO: 953136 - DNA, 120 bp, Artificial Sequence
  ENSG00000228742_32 (sequence is synthesized)
tttcaagcagacacctaagatttttcatcataaatttgaataacttcaaaatatgtacttattagcatattgtaaatattgatttttaaataaaatatatcacactttgtatccaatgaa

SEQ ID NO: 953137 - DNA, 120 bp, Artificial Sequence
  ENSG00000226627_0 (sequence is synthesized)
aatgacagaagcagcagcgagagcccttcagaggaccgcgaaacgcgaactcccaccccagcaaaccaccaaggggaagaggcgggcccccatccaggaggccttaggaacaggagagct

SEQ ID NO: 953138 - DNA, 120 bp, Artificial Sequence
  ENSG00000226627_1 (sequence is synthesized)
gacttttctaaagcaaataaggcagtgttctccccagggcgccaggcttccccagctccaagtctgggcgtctgaaatctgctgtgtaattggatcacgcccggcccgtgctgagcgccc

SEQ ID NO: 953139 - DNA, 120 bp, Artificial Sequence
  ENSG00000226627_2 (sequence is synthesized)
atctgcgcccgtcttggaaaacacaagtctcagagaaggaaagcagttgccacagtgttcagcttaaccaagtcatcttatttgatatgtgaaagttcttcgagatggaagaatctcagc

SEQ ID NO: 953140 - DNA, 120 bp, Artificial Sequence
  ENSG00000226627_3 (sequence is synthesized)
tcatcactgcgaaggcatgccaggattaggaagtcatcagatgcaagcctgcaagcctcagtgtactcctcaatgtctgcagggcccaccccagagagaggcccctgggtgaccagccgg

SEQ ID NO: 953141 - DNA, 120 bp, Artificial Sequence
  ENSG00000226627_4 (sequence is synthesized)
tgaggagcttcaagaggaaggattcaccatcaccacctggatcctgtgtgcagcttttgtcacagcggtggcgagcacagtttctgcctcctggggagatggggtgtgaagctcacagca

SEQ ID NO: 953142 - DNA, 120 bp, Artificial Sequence
  ENSG00000226627_5 (sequence is synthesized)
cctgcgtgtggctgggcccaacattaacagcgctgcaagagctcacctccatttataggaagtgggaaggacccaaggactggccgatgacaccacaggaggcagaaggcacatcggggg

SEQ ID NO: 953143 - DNA, 120 bp, Artificial Sequence
  ENSG00000226627_6 (sequence is synthesized)
ttgggggtagcctatggccaacctaccctgtccctctaacaacctaccctgtccctataacacgttgctggcaggaaacacgggagatggctcagactggagacctggggacatatctac

SEQ ID NO: 953144 - DNA, 120 bp, Artificial Sequence
  ENSG00000226627_7 (sequence is synthesized)
caagtgccacgtgggtcctgggtcaaagtcaccaccgtgaaaagacatttctgagataatttgggacatgtgctaatggaggggtttcagattccacccagagaccactgctgggtgcgt

SEQ ID NO: 953145 - DNA, 120 bp, Artificial Sequence
  ENSG00000226627_8 (sequence is synthesized)
ggatgggacagtgacactggggcccgcaagaaagatcccatgctgtgagagacagactgaaggggaagagggagtgacgcgatgcctgggatttgctgaagaaaaaaaaaagaataaaaa

SEQ ID NO: 953146 - DNA, 120 bp, Artificial Sequence
  ENSG00000226627_9 (sequence is synthesized)
aacttttgtgcatcaaagggcaccatcaacagagcaaaaaggcagctaaagaatgggaggaaatatttgcaaatcatgtatctggtaaggggttagtatccagaatgtgcagaaaactct

SEQ ID NO: 953147 - DNA, 86 bp, Artificial Sequence
  ENSG00000226627_10 (sequence is synthesized)
tctggtaaggggttagtatccagaatgtgcagaaaactcttacaactcaacaacagaaacaaaaatctaatttaaaaatgggcaaa

SEQ ID NO: 953148 - DNA, 69 bp, Artificial Sequence
  ENSG00000226627_11 (sequence is synthesized)
acatggcaaaaccccatctccactaaaatttcaaaaattagccaggtgtgatggcacgtccctgtaaca

SEQ ID NO: 953149 - DNA, 69 bp, Artificial Sequence
  ENSG00000226627_12 (sequence is synthesized)
taaataaataaataaaaatgggtaaaggacttgaatagacatttctccaaagaagagatacaaatggct

SEQ ID NO: 953150 - DNA, 120 bp, Artificial Sequence
  ENSG00000226627_13 (sequence is synthesized)
cttgaatagacatttctccaaagaagagatacaaatggctgataaggacttttctgaaaagatgttcaacaccactaatcaattagagaaaggcaaatccaaactacaacgggacaccat

SEQ ID NO: 953151 - DNA, 120 bp, Artificial Sequence
  ENSG00000226627_14 (sequence is synthesized)
ctcacacctgttaggatggccacgatcctaaaacagaaagtaatgacgctggtgagtatgtggggaaactggagcccttgggcaccgctggcaggaaggtaaagtggtgcagcccctgtg

SEQ ID NO: 953152 - DNA, 120 bp, Artificial Sequence
  ENSG00000226627_15 (sequence is synthesized)
gaacatggcatggctgctcctcaaaaccttaaacacagaacgagcacgtgagccagcaatgccacttctgcatctatgcccgaaggcattgacagcggggtcttgaagagatatctgcac

SEQ ID NO: 953153 - DNA, 120 bp, Artificial Sequence
  ENSG00000226627_16 (sequence is synthesized)
acccgcgttcacggtggcagcactattcatggtagctaagaggtggacgcaacctaagtgtccacctacagatgaacagacacacaaaaggtggtgtttccgtagagttgggatagttat

SEQ ID NO: 953154 - DNA, 120 bp, Artificial Sequence
  ENSG00000226627_17 (sequence is synthesized)
cattcaggcttaaaccagaaggagattctgatgcatgctacaacacggaggaacctcgaaggtattacactgagtgaaatgtaccaagcacaaaaagataaatactgcaggattccactg

SEQ ID NO: 953155 - DNA, 120 bp, Artificial Sequence
  ENSG00000226627_18 (sequence is synthesized)
gggagcttgtcggtaagtctcatctggtcaagttcgacaacccccaggtggcaagctttacgccacaaagcccattggactgcaggaaacaggaaagatggacagctctagtcctcggcc

SEQ ID NO: 953156 - DNA, 120 bp, Artificial Sequence
  ENSG00000226627_19 (sequence is synthesized)
agaggcagagctcgtcagtcagtctcatctggtctaatcccacaaccgccgagtggcaagctttatgccacagagcccactggactgcaagaaacaggagagaccgatggctccagccct

SEQ ID NO: 953157 - DNA, 120 bp, Artificial Sequence
  ENSG00000226627_20 (sequence is synthesized)
ggaccagaggctactatccctgtagtacctctgaaaggccaatccttgtagcagccctgaaaggtccagatgcagccccttattctgcagaggaggagtccaaggtggcccacccacagg

SEQ ID NO: 953158 - DNA, 120 bp, Artificial Sequence
  ENSG00000226627_21 (sequence is synthesized)
aggcagagctggcctctgttgctgtagtggagaaatactgcaccccaagccacatcatgacactcttcagcccagagtgggcagcctgaagaggaaagactccatcccagcaaggatgaa

SEQ ID NO: 953159 - DNA, 120 bp, Artificial Sequence
  ENSG00000226627_22 (sequence is synthesized)
ggtgggtgccaggggccgggggaggggatggggatgagtgttaatagggaagagtttcagtttgggaagatgagaaggttctggagatggatggtggtgatggtgaatggaaatgtactt

SEQ ID NO: 953160 - DNA, 120 bp, Artificial Sequence
  ENSG00000226629_0 (sequence is synthesized)
ctcttggcttcaggctctgaagcactccccatctcaggcccaaacaggaataaaatcagttcctttctctgttcctcttactagactgagatccactgggattgtctgagggaattcttg

SEQ ID NO: 953161 - DNA, 120 bp, Artificial Sequence
  ENSG00000226629_1 (sequence is synthesized)
tgaaaccagaaagaaagttcaagaaatgatgcaacaacaacaaaataaaacccaggagaaatagtacgacaagaagttaaaagatcgtgaggagagccctgcagtggaggaggagaacct

SEQ ID NO: 953162 - DNA, 120 bp, Artificial Sequence
  ENSG00000226629_2 (sequence is synthesized)
gttggccaggaactgccaacagcttttgttctggataagcccctcgtggaggaggacaaggcaagaagatgggtcttcatcctaacccacggaagcagcgctggactgagaagcaccacc

SEQ ID NO: 953163 - DNA, 120 bp, Artificial Sequence
  ENSG00000226629_3 (sequence is synthesized)
tgcgaaactcccagccccactgagtaacctccagggcaggggcatgtccctgcttacgagctcccaccagcccgtcacacccccccacccacctcagaggctcctgcccctgacctgagt

SEQ ID NO: 953164 - DNA, 120 bp, Artificial Sequence
  ENSG00000226629_4 (sequence is synthesized)
gagctgtgtctgagttgggtccctcctccctccaaggagtgtgctctatggacaacagcctctatcctcatttgtcccttcctcctagcgcctccttctgcacccctgaccccgctccat

SEQ ID NO: 953165 - DNA, 120 bp, Artificial Sequence
  ENSG00000226629_5 (sequence is synthesized)
gctgtcacctcctctgtatggcagctgggcctcgtctgtcctgggacggtggcaagcatgtacagaagtcatcttccttatttctcactacccccagcttcccagatgggaaactgaggc

SEQ ID NO: 953166 - DNA, 120 bp, Artificial Sequence
  ENSG00000226629_6 (sequence is synthesized)
tcagagaaatgacataactcagctgacaaaggatctgagtgggtctgacccgcaagcccaccctcttcacctcatgctgtctaaaacaattacagacacctcccacgagcaggaaagctc

SEQ ID NO: 953167 - DNA, 120 bp, Artificial Sequence
  ENSG00000226629_7 (sequence is synthesized)
tggaaatgtcttcttggaaagcaagcagctacccatgaacagacttctcaaagcttttggccttggcctcccaaggtgctgggactacaggcgtgggtcactgcacctggccaaagcttt

SEQ ID NO: 953168 - DNA, 120 bp, Artificial Sequence
  ENSG00000226629_8 (sequence is synthesized)
aaatgctgatgatctctgatggaggctgctgggtggctgctgccctcaccctgacctgtcctccccagctggacgggggacttctaggagggggagggtccccactgaagatggacacat

SEQ ID NO: 953169 - DNA, 120 bp, Artificial Sequence
  ENSG00000226629_9 (sequence is synthesized)
gtcctgtcagagtttctgagaagctccagcccttaggcagaatgggacaaggagaaacagacttgggtctgtactcgggactgcagaagccgagcatgaggagttgtggggacagtgccc

SEQ ID NO: 953170 - DNA, 120 bp, Artificial Sequence
  ENSG00000226629_10 (sequence is synthesized)
ctccttcatccccacctcccagccccccagtatctccttctccccctgatccttcccttgatcaggccagggccctgtcattgtcccaacaaatgcctaccgccagttcatcgcaccttg

SEQ ID NO: 953171 - DNA, 120 bp, Artificial Sequence
  ENSG00000226629_11 (sequence is synthesized)
ttttctctgatgtcctcgcaatcacacaccttgtgcccctgagctgggtacacgatcctttgcaatgtgtgctacgagaactgtattgctaataataaagacaaaatttaatgactccac

SEQ ID NO: 953172 - DNA, 120 bp, Artificial Sequence
  ENSG00000226629_12 (sequence is synthesized)
tggctgagcttctggtaggtcccaggcacgttagacagactatttcattaattctcacctcggcaatttgaggaaggtcttgctgtctcagtatcctgagtcttagacaggttcaatgac

SEQ ID NO: 953173 - DNA, 120 bp, Artificial Sequence
  ENSG00000226629_13 (sequence is synthesized)
ttgcacaaggtcacatagcttttaagtgacagggcctggctgccttggctctgaagtgagttctctttgcaacaacctacccagctgagcccctcctttgtttagagaaggcttctcctc

SEQ ID NO: 953174 - DNA, 120 bp, Artificial Sequence
  ENSG00000226629_14 (sequence is synthesized)
tgagctgggaagatccaactttgaccctcaattctcagatgacagtggttcagtcaggcaggaactagctgtactaacatgtaaacaagtcacttctgcaaggagaggcagaggccagtg

SEQ ID NO: 953175 - DNA, 120 bp, Artificial Sequence
  ENSG00000226629_15 (sequence is synthesized)
cttgcgcgagcgtgactgataaaggaatggggcgagggctgaggactctctggctctaccgatttatgatactgaaagtcatcaatcttaaagagagatctgcattccccaagctttctt

SEQ ID NO: 953176 - DNA, 120 bp, Artificial Sequence
  ENSG00000226629_16 (sequence is synthesized)
ctccctgaggggcctctcctatctctcgccaatattgtggctcccctcagccgcaggggcaatctttctggttttctcttaggtccaaacacgaaccaaataaaatcctcttttcccttc

SEQ ID NO: 953177 - DNA, 120 bp, Artificial Sequence
  ENSG00000239930_0 (sequence is synthesized)
cagggcctgagcgggttctgtgcctggctgcccaccggctctctgacctggacctcgccgtcgctggcccctgaaatccatcacttttgtcggctgttctgtgacgccacaacgaggagc

SEQ ID NO: 953178 - DNA, 120 bp, Artificial Sequence
  ENSG00000239930_1 (sequence is synthesized)
tcaaggaggcagctctggcctctcagcaggagctggggaggagtgactgaataactataggatttggtcttgatgggagaatcccagaagccaaatccacgcggtgaataagctgctgat

SEQ ID NO: 953179 - DNA, 120 bp, Artificial Sequence
  ENSG00000239930_2 (sequence is synthesized)
cttccagagcacacatcccctagagattcttcccaatgctaatatgaaaggttacaaccataacccatcatcaggcccaaatatattacttactgaataaatacacaagttacaacaaca

SEQ ID NO: 953180 - DNA, 120 bp, Artificial Sequence
  ENSG00000233930_0 (sequence is synthesized)
agtgcggcctggacactggggggatggatctgcagccctcccccccgacaggggaaggccccttcccgggtgtcccaggccagaggccgtcgcgtccctcccacggccgaggctccacac

SEQ ID NO: 953181 - DNA, 120 bp, Artificial Sequence
  ENSG00000233930_1 (sequence is synthesized)
ctcccggaccgactccgggccagggtccgcctgctccggttctggcccccgcgggggtgacgttcgggacgtcgggggctcgcgcagatccgcgctggatctcaggcggccctgatggag

SEQ ID NO: 953182 - DNA, 120 bp, Artificial Sequence
  ENSG00000233930_2 (sequence is synthesized)
tgagaagctggttcttagtgatcactcagaaacgtcggcctggccttgtggggtcagaccttgcatctcagtcagcccagggagaagaagaagatggtccacacccaagtgcagggaaca

SEQ ID NO: 953183 - DNA, 120 bp, Artificial Sequence
  ENSG00000233930_3 (sequence is synthesized)
tcgtggcagtcggctgggtgcctgcgtccaggcgaggacacctcccgcatcagggaaacacacgtttctggagtgaggaggctgaaggcagggcccagaggagagctgagccatggaagg

SEQ ID NO: 953184 - DNA, 120 bp, Artificial Sequence
  ENSG00000233930_4 (sequence is synthesized)
tgcgccccaaagcgggagggccctgcgagaagggaggccctggctggagggggaccctgagactggaggtgccggacccggatgcggggccagatggagacaacaggaaggaaagagacc

SEQ ID NO: 953185 - DNA, 120 bp, Artificial Sequence
  ENSG00000233930_5 (sequence is synthesized)
aaatgctttcaccaaacaggagaaacctgaaggtctgggtccagagcctcagatcttacactggcagcacacagggacacaacagttggactggcagcaacagggcttgcagcagctgga

SEQ ID NO: 953186 - DNA, 120 bp, Artificial Sequence
  ENSG00000233930_6 (sequence is synthesized)
ctggcagcacacggggacacagcagctggactggcagcagcagggcttgcagcagctggactggcagcaggatgatccacagcctgaggagcagcaacagggcttacaacagctggactg

SEQ ID NO: 953187 - DNA, 120 bp, Artificial Sequence
  ENSG00000233930_7 (sequence is synthesized)
aaaaggccccctccccgctgccgggtggagagggagcgtggggggatccgccttctgcccccgagcccccagccagcctgggccccccagggtcaccctggggctctgaagggggcttcg

SEQ ID NO: 953188 - DNA, 120 bp, Artificial Sequence
  ENSG00000233930_8 (sequence is synthesized)
gccgctggttgaatgaagggccacagaaaatgaagctggcgcaacgaccgcagaaccctcagtgggcaccaggaccacggagctcagggtgccaatgatggagacaacaggaaggaaaga

SEQ ID NO: 953189 - DNA, 120 bp, Artificial Sequence
  ENSG00000233930_9 (sequence is synthesized)
agacccaggcgcggcgttttacctgcagcggctgtgctcgccccgccgcgacccccgcaggacggagccggatccccctgcactcgggcggacctgggaccctcagaggcgagccggctg

SEQ ID NO: 953190 - DNA, 120 bp, Artificial Sequence
  ENSG00000233930_10 (sequence is synthesized)
cctcgggtcacacatccgcgaactccgggggcgggctccccaggacgccgccgaccccccacgacccccagccctcccgcttccgtggaaagccgccccgacgacccctgtgcgggctgt

SEQ ID NO: 953191 - DNA, 120 bp, Artificial Sequence
  ENSG00000233930_11 (sequence is synthesized)
tgaggggccgcaccccgccgaccgctgtgggaacacctccgcgcgtgcggcggggacgcggcgagtccggggcaggaagaacgcacggatggagacaacaggaaggaaagagaccttcct

SEQ ID NO: 953192 - DNA, 120 bp, Artificial Sequence
  ENSG00000233930_12 (sequence is synthesized)
cagctggagctgcagcccccacagccagagccacagcccccacggccggagccacagcccccacagccagagccacaacccccacagctggagccacagcccccacagccggagccacag

SEQ ID NO: 953193 - DNA, 120 bp, Artificial Sequence
  ENSG00000233930_13 (sequence is synthesized)
cctctggagcagccacagcagcccatggttctggtggattgagggtggagcaggtagaggagcaggtgagagggaggtgcaggtgtggagctccctgagcctgggctctttatatacctg

SEQ ID NO: 953194 - DNA, 120 bp, Artificial Sequence
  ENSG00000233930_14 (sequence is synthesized)
tccagatgtcaggcatgacacagggtccctttcttgtgactgtttacactatttttccagagctctatttttttcctctttgctagtgacttccttctggctcagttgagcatctacttt

SEQ ID NO: 953195 - DNA, 120 bp, Artificial Sequence
  ENSG00000233930_15 (sequence is synthesized)
ctttgttttctaaatttgtctttttccccatttgttttggcccctacaattaaaacctcagctccaggctgtctggttcttcctgcaaagctccagggtgctggtcacctgctctctgct

SEQ ID NO: 953196 - DNA, 120 bp, Artificial Sequence
  ENSG00000233930_16 (sequence is synthesized)
gaccacatgtgaccaatgggcaacagcctctgcccacgtgctctcatctttcctgtgttgactccctcaataatattaattttacatttttagatttcaaaattatccacgatctttata

SEQ ID NO: 953197 - DNA, 120 bp, Artificial Sequence
  ENSG00000233930_17 (sequence is synthesized)
ctcatgccagtctcagctttccgggtgtgttagaccattctttgcattgctctaaagaaatacttgaggctgggtaatttataaaggaaagaggttagaatggctcatggttctgcaggc

SEQ ID NO: 953198 - DNA, 120 bp, Artificial Sequence
  ENSG00000233930_18 (sequence is synthesized)
tgcacaagcatggcacccacctctgctcagcttctggggaggccctcagggagttttcctcacggtggaaggcgaagcaggaacaggcacaccacatggtgagagtgggagcaaggggtg

SEQ ID NO: 953199 - DNA, 120 bp, Artificial Sequence
  ENSG00000233930_19 (sequence is synthesized)
aggaggagccacacacttgtgaacaaccagatctgagtgaacacactcatcgccaagggggtggcactaagtcactcatgagggatccacccccatgacccagacacctccctgcaggcc

SEQ ID NO: 953200 - DNA, 120 bp, Artificial Sequence
  ENSG00000233930_20 (sequence is synthesized)
cctccttcaacactggccaacaactatatgaaaaaatgctccacatcactaactattcggggaatgtaaatcgaaaccaccacgagataccatctcatatcagtcagaatggcttttgat

SEQ ID NO: 953201 - DNA, 120 bp, Artificial Sequence
  ENSG00000233930_21 (sequence is synthesized)
gtatggggtgggggtggcggtggagtgcgtcctggcgcagagctggcacacagcacaaacaaacgccttggcgggagtgggtctgtcccggaagggagcccaggggttattggggttggg

SEQ ID NO: 953202 - DNA, 120 bp, Artificial Sequence
  ENSG00000233936_0 (sequence is synthesized)
gctgatggactaaaaactggccatctttgatcagagggatcgtggatttttgcaactttcctggccagacttcgtcaaggccctgccggcctgctggacactgattgatcaaagattgat

SEQ ID NO: 953203 - DNA, 120 bp, Artificial Sequence
  ENSG00000233936_1 (sequence is synthesized)
caaacagctcctcccctcactgagggcagatgcttgcttcaaggatcaaacagcccggctctgccaggcaccgcccagcagcagaaggttgtgcttcaagtctgcacagccctccaactt

SEQ ID NO: 953204 - DNA, 120 bp, Artificial Sequence
  ENSG00000233936_2 (sequence is synthesized)
tggatgtttcttagaccaccggggatgcaagtcttctagtcctttctattcagaccagcactgacggtgaaggagctgaggccagggttggccatgtggaggcgtagggagatggaacat

SEQ ID NO: 953205 - DNA, 120 bp, Artificial Sequence
  ENSG00000233936_3 (sequence is synthesized)
aggctctgtctggcatctgaagacccagcaaagcccagctctgccagcagcttgccaggacctgagaaagcccctctctccccgggcctcagtttccccagatgtacgtggagggattgg

SEQ ID NO: 953206 - DNA, 120 bp, Artificial Sequence
  ENSG00000233936_4 (sequence is synthesized)
cctaaatgagctcagcggatctcatggccccgatcctggcaggttggtgactggctgccctgtccccagccctgtgggggttcaaggtgtgagccttgtggtgggggtacacagggtccc

SEQ ID NO: 953207 - DNA, 120 bp, Artificial Sequence
  ENSG00000233936_5 (sequence is synthesized)
ccaaattcatgtatatccagagcctcagaatgagaccttatttggaaacagagtatttgcggatacaattaggtaaggacctctagctagaagcatcctggatttcgggtgggccccaaa

SEQ ID NO: 953208 - DNA, 120 bp, Artificial Sequence
  ENSG00000233936_6 (sequence is synthesized)
tccaatgactgctggagaggacgccagagccacagggagaagcggccacgtggagacggaggcagaggctggagtgaagtggccaaaagccagggcgcgcctgggccaccagaagccgga

SEQ ID NO: 953209 - DNA, 120 bp, Artificial Sequence
  ENSG00000233937_0 (sequence is synthesized)
cggccgcctttcccgttgggcacccagctgtggctgtgccctgtcctcgcccagctcccggcataggcatgcgctctgggccggggccggggccccccgcctccccgggaggaatcgctg

SEQ ID NO: 953210 - DNA, 120 bp, Artificial Sequence
  ENSG00000233937_1 (sequence is synthesized)
ggttgactctgggtcagcaaagggagcccggccctttctagcggggggacgtcctgcagccgctggaggaggctgagtcacgcttttcccaccagaagtctacctgtgcctgcgcccgcc

SEQ ID NO: 953211 - DNA, 120 bp, Artificial Sequence
  ENSG00000233937_2 (sequence is synthesized)
ggacctgccggcctcttccttctcatccagggggcctcttctccagcctcacggaggtgggaagcttgctggaggcccctacctgccttttggggaagaccccgaggctggcccacgccc

SEQ ID NO: 953212 - DNA, 120 bp, Artificial Sequence
  ENSG00000233937_3 (sequence is synthesized)
caccacttctcccagcccctgggctgcttcctctctcccgtgtctgggaccccagaggcaccacttccattccatacaagcttgcagagtcaagacgaactctaactcatgggatggaca

SEQ ID NO: 953213 - DNA, 120 bp, Artificial Sequence
  ENSG00000233937_4 (sequence is synthesized)
aactggaagatgtaaaataagtaaggctttctgggccaaaaagcctcttcttacagaaaatcaaattttaaaagaacattgacctcaaaacaataaaactgtcctggttatgcaatagaa

SEQ ID NO: 953214 - DNA, 120 bp, Artificial Sequence
  ENSG00000233937_5 (sequence is synthesized)
atagctatataaatggaatcatatccttaatgaacacctcctgtggctacccaacttttcacacatcttactgattataggccttgctgtgaatgctttcttgctctatctgaagtattc

SEQ ID NO: 953215 - DNA, 120 bp, Artificial Sequence
  ENSG00000233937_6 (sequence is synthesized)
ccaccagagttgtttccaactttatttcctatattatgaaaaatgaagtttttttaacattgtaacaaagtatatgaaagataatgtatactgtattaaataaaccattatacaaaaata

SEQ ID NO: 953216 - DNA, 120 bp, Artificial Sequence
  ENSG00000233937_7 (sequence is synthesized)
gtcccaaggagaaattggagaggctctcctatgaaaatccatctcaccattccttttctgaggagtccacaggacctgtacagttggaaccagcccctcaggcttccctgccagagccct

SEQ ID NO: 953217 - DNA, 120 bp, Artificial Sequence
  ENSG00000233937_8 (sequence is synthesized)
tttctccaggagcagaggcatccatcccctcctgccagcattccagaccctggagggcttgcgcggtggcaggttttcccttgaatgctgaggcgaggctgagggaaagcttgcagagtc

SEQ ID NO: 953218 - DNA, 120 bp, Artificial Sequence
  ENSG00000233937_9 (sequence is synthesized)
ctctttccctgcctcgcgacacccagaccgagacctcgggaatgctccggccccctgccgccgtctcccggcccggttctctttcactaaaaataggcgattctggcagcgcccctccta

SEQ ID NO: 953219 - DNA, 120 bp, Artificial Sequence
  ENSG00000233937_10 (sequence is synthesized)
tggggccttgggggcaattggggttttgtcttagagcccgtgtggacccggatggcgacggcagcccgaggagagggagggctgactgtatggttggctttccgacgaccagaccctgca

SEQ ID NO: 953220 - DNA, 120 bp, Artificial Sequence
  ENSG00000233937_11 (sequence is synthesized)
ggattcggcctttccctttggagttttcctccatccccctccgtccctcccaggggatgcccgcaggccacagtggtcactgaaggtcaaccctgagccgaaggagaagtggcctcgacc

SEQ ID NO: 953221 - DNA, 120 bp, Artificial Sequence
  ENSG00000233937_12 (sequence is synthesized)
gtttgatgtatttcataatgaacggcgaaattggtgtttgcccattgacatttcagtgtcaatgtattttaagcttcagtgtgttaaaactctgttgaaaattttaacttttgaaatgtt

SEQ ID NO: 953222 - DNA, 120 bp, Artificial Sequence
  ENSG00000233937_13 (sequence is synthesized)
caagtatagattatttttcattgttcttccaaccttggggttgttctgtccacaagttcagcagaatccgtttttctttggcaaccaagaaacttcaatatgtaacagaaaacatggaat

SEQ ID NO: 953223 - DNA, 120 bp, Artificial Sequence
  ENSG00000233937_14 (sequence is synthesized)
ggcatttagatcttcaaaaagcagggcaaactggaatggaatgtactgtttctcacagtggtctatgctgacagcaaggctgaagatttccagtaggttatgggtaatcagtgaaagttc

SEQ ID NO: 953224 - DNA, 120 bp, Artificial Sequence
  ENSG00000233937_15 (sequence is synthesized)
atgcttggtggtgacagctgcagtacatcttgaataccagttttcttcaatctttgccaaaaacccaaatttaacacagtttgctgtagtgccattaagatatactcctatacaatttcc

SEQ ID NO: 953225 - DNA, 120 bp, Artificial Sequence
  ENSG00000233937_16 (sequence is synthesized)
tccaactcggttcatttgatacagctgcaaaaatactgtctttggtggtcaagtagaaggctcacgaaaacagcacacccacagttttgaaagccttattctgaatgtaagcaaagtaca

SEQ ID NO: 953226 - DNA, 120 bp, Artificial Sequence
  ENSG00000233937_17 (sequence is synthesized)
acagttttgaaagccttattctgaatgtaagcaaagtacagttttcttcatcagtagattcatctcaaccaacagcaataaaagatgagccgatttttttttttttttgagatggagtct

SEQ ID NO: 953227 - DNA, 120 bp, Artificial Sequence
  ENSG00000233937_18 (sequence is synthesized)
catgtcattctcctgcctcagcctcttgcgagctgatgttttttaagatctgaagtttgatatatacagtcattaattcagagttaagactgcagaagtagatgaagaaattctggaatt

SEQ ID NO: 953228 - DNA, 120 bp, Artificial Sequence
  ENSG00000233937_19 (sequence is synthesized)
acaagtgtctccatttttttctcctttgcaattaaaagggctgtttaatattaagctttcacggcttggaagattcctgtgaatatttcaatactgtccagtcttaaagctgcagagaat

SEQ ID NO: 953229 - DNA, 120 bp, Artificial Sequence
  ENSG00000233937_20 (sequence is synthesized)
cgggctttgcagaacactccactgtttttaatggcatgaatttaacagtgtttggcatggtgtcactgcccaacactttcagataactcaactgaagaagttgaccctatcttctgcaaa

SEQ ID NO: 953230 - DNA, 120 bp, Artificial Sequence
  ENSG00000233937_21 (sequence is synthesized)
ataacatgagtatatacttgagaaaagcctcaacatttttttttggctgccatttttagctacctcaaaggagataacagaaaaacaaggagtactgatgatggaagcatctggtccctc

SEQ ID NO: 953231 - DNA, 120 bp, Artificial Sequence
  ENSG00000233937_22 (sequence is synthesized)
ttgcagagtgatgaatgattttattggtggcagctgggtggcaggacaatccaggcatccagttatgcctgatccccaataagtgaaatctttgttcattttctttttatacacccgtct

SEQ ID NO: 953232 - DNA, 120 bp, Artificial Sequence
  ENSG00000233937_23 (sequence is synthesized)
gcttcctaaaacctgacaccatttaatggtgcccttggtcaaatctaaatgatcttactttcataattctttgattctagcttgcagagtcaagacgaactctaactcatgggatggaca

SEQ ID NO: 953233 - DNA, 120 bp, Artificial Sequence
  ENSG00000233937_24 (sequence is synthesized)
tggcaaggtccgacgttttccaaggatcctggctgagctcctgtggaagctgcttcttacactgatgtggtccctcggctggcaggcccttctgcggccaaccaggtgacacctgccagt

SEQ ID NO: 953234 - DNA, 120 bp, Artificial Sequence
  ENSG00000233937_25 (sequence is synthesized)
tatgagggacaggtaggagaggatgggctttccatcagaaaaaaaaaaaaaaaggttttccaaactgcttttctttcaaattttaatcttaagactaacctacattaatttcttattttt

SEQ ID NO: 953235 - DNA, 120 bp, Artificial Sequence
  ENSG00000257964_0 (sequence is synthesized)
agaaaacaaagaaaaataaaacccagtttatgtggaggattttaaatcaagggagagacagacaccagtaaaacccgagcacattcttccttgaggggctgctccagtgcctggactctc

SEQ ID NO: 953236 - DNA, 120 bp, Artificial Sequence
  ENSG00000257964_1 (sequence is synthesized)
ctctcatgccacaggacatcccaacatgacttcagattgccctattgcctcaaacatcagctgtatgatgaagattcccaaatccatccccaattccaatctctcctctgagtcatagag

SEQ ID NO: 953237 - DNA, 120 bp, Artificial Sequence
  ENSG00000257964_2 (sequence is synthesized)
cttctcatccccaaccctgcagctccacttgtgcctctggtctcaatgcatatctgccagcctcatccactgccaaagcctgaactgggcatcataggtgcctgagctcctgcacccatt

SEQ ID NO: 953238 - DNA, 120 bp, Artificial Sequence
  ENSG00000257964_3 (sequence is synthesized)
catgcaatctctcaccaagccctgtcatcgtctacatcttttgtgtcttcccctcagtgactaccctaaattgggccaccaactaatctccctggcttctgttttactctttcaatctat

SEQ ID NO: 953239 - DNA, 120 bp, Artificial Sequence
  ENSG00000259813_0 (sequence is synthesized)
gcccgccaagcgggcccctgcccaggcccccaagctctgccaccactggggtgctgcaggaagttggcgctcttgtagctggggtccccccagggcattgccgagcagatggggcacacc

SEQ ID NO: 953240 - DNA, 120 bp, Artificial Sequence
  ENSG00000250193_0 (sequence is synthesized)
aaacaagcctagactgtgaagactacaatacctaactcttcaatgcccagacaccaatgaacatctacaagcatcaacaccatccaaggaaacatgacttcactaaatgaactgagaaaa

SEQ ID NO: 953241 - DNA, 120 bp, Artificial Sequence
  ENSG00000250193_1 (sequence is synthesized)
acatgagattttactggacaagagtttatgctcctttaacctgctcatatgtaagacagcaagaaggacatgtggattccaaggatcagtgagagataattctaattaacatagatttca

SEQ ID NO: 953242 - DNA, 120 bp, Artificial Sequence
  ENSG00000250193_2 (sequence is synthesized)
taatttatctgaaaacactgtacaaacatgagcacatgcccaattataagggactgaaccaagacaaagtgaggttcaaatctcgactttaacttgttgaactgctttgaataacagact

SEQ ID NO: 953243 - DNA, 120 bp, Artificial Sequence
  ENSG00000250193_3 (sequence is synthesized)
cttcatctataaagtgaagaaaataatacttccttaaagaatgtgccaacctgtggtgataaactaaccacagtgttagagattaagacacaaggaccataaaccttcttcttacataat

SEQ ID NO: 953244 - DNA, 120 bp, Artificial Sequence
  ENSG00000254707_0 (sequence is synthesized)
ttttatagttcttgtcatgcagaattgtgataatgaattatttgcctctatcatcggactatgaactactcaagggaaaaaacttgccttattcacctctgcatttctaaggtttagctt

SEQ ID NO: 953245 - DNA, 120 bp, Artificial Sequence
  ENSG00000254707_1 (sequence is synthesized)
aattcttggcataagtaagcacttagaaacactggatggacaaacaaatgacttttcttgagaacacatccttaagagtatagctatttagatcaacatgttaaaatattcaaagctctt

SEQ ID NO: 953246 - DNA, 120 bp, Artificial Sequence
  ENSG00000254707_2 (sequence is synthesized)
cattgcagatgagaaaactgagaatcaaggagacacacagctggataatggcagagcatgaatgtaacagaacatggagtctcggagttgtgacgtccattgccagcaaaggttcagaca

SEQ ID NO: 953247 - DNA, 120 bp, Artificial Sequence
  ENSG00000254707_3 (sequence is synthesized)
aaggagcaggaggacacaccgtatggtctcaggctgccaacttaatccaatcgctaagtgggaaccactgaatcctcctttataaacaccttgcatattccctgttgcaactaagagatg

SEQ ID NO: 953248 - DNA, 120 bp, Artificial Sequence
  ENSG00000254705_0 (sequence is synthesized)
atcagtggaaaggccacatgaggacaaagcagccatctagcagccagaaggagagccctcaccagaaactgaacactgctggaatctttatcttgaactctccagcctctagaatgatga

SEQ ID NO: 953249 - DNA, 120 bp, Artificial Sequence
  ENSG00000254705_1 (sequence is synthesized)
gaaaataaaggccaagtgcacacagagcacctcactggaagaatctgagtcacctcatccttctgaaacaattctggaagtctaccaccatctgcacagctttcgtggcagcaaattaat

SEQ ID NO: 953250 - DNA, 120 bp, Artificial Sequence
  ENSG00000254705_2 (sequence is synthesized)
ccagggaaaaataagcaaataagactggctcagggaaacacagcaagtaagtgaaaaatccttgaattaaacaatttaagaagacattgagtgtgggaacttagaagagtgggtaaagta

SEQ ID NO: 953251 - DNA, 120 bp, Artificial Sequence
  ENSG00000254705_3 (sequence is synthesized)
ggtggcttaccctgttgttacttatctagtatttaaatgtccaagtgtctgtttctttggagaaaaaactttatagaaagtacctccttcatagcgctgtttataagaaaatgcgcatct

SEQ ID NO: 953252 - DNA, 120 bp, Artificial Sequence
  ENSG00000254705_4 (sequence is synthesized)
gacaggaagtctattttttgaggactgtgatctgcagagaaaacacttagaaggacacaatcaaagtcaaaagcctatacattttgtggataagtgatccaaacctaagacagttacaaa

SEQ ID NO: 953253 - DNA, 120 bp, Artificial Sequence
  ENSG00000254705_5 (sequence is synthesized)
gaaaatggctctcagctatttacagccagacttcaggccttctgtggatttctttggcattacctcactaagttaatatatcatcacttgacatttaataataaatacctgatgaaatta

SEQ ID NO: 953254 - DNA, 120 bp, Artificial Sequence
  ENSG00000254703_0 (sequence is synthesized)
gtgcgtagagtttaagcagtgtggagatatttcttcacttttccttagggtgtccacatcaagaccctgaggccatcttaccacccttctggatcagaagaggccttcagagccctccgc

SEQ ID NO: 953255 - DNA, 120 bp, Artificial Sequence
  ENSG00000254703_1 (sequence is synthesized)
tgccgagacgcggcagactcccagagcggctcacccactcatcgaagcggattctgggcggtttcgggctgacccgcgctgtcagggcgcggactccattccgggcgcattgttaggaga

SEQ ID NO: 953256 - DNA, 120 bp, Artificial Sequence
  ENSG00000254703_2 (sequence is synthesized)
aggggcccctcggggcggcgcgcctcgaccctgggctcccggtgcccgcagagggcggagatccgcggcgccctaggccacctatccgcatcttctcgagccaaacccccagcgcttacc

SEQ ID NO: 953257 - DNA, 120 bp, Artificial Sequence
  ENSG00000254703_3 (sequence is synthesized)
cggacccgacggcccaagcactgactcccaggcaagagtcgcccttcctggtccccagggaactgacactaccgcgggacgttccctctaggacagtcagcaggtcccaggagcgcagca

SEQ ID NO: 953258 - DNA, 120 bp, Artificial Sequence
  ENSG00000254703_4 (sequence is synthesized)
cgcaacagcgcagagcagacccagacttttcccggggtgagacccggaggcccgcgctctggaccgtcctccctacccagcctggaggccggcgttccccggcccaacccggagacctcc

SEQ ID NO: 953259 - DNA, 120 bp, Artificial Sequence
  ENSG00000254703_5 (sequence is synthesized)
ttaccttgtccacgctctccggaccacgctttggacttgctcacttttatttaagagtccgacgggggaaagagggaaaaaaaatccagaggagatccaagtcaattggaagaaaaaatt

SEQ ID NO: 953260 - DNA, 120 bp, Artificial Sequence
  ENSG00000254703_6 (sequence is synthesized)
tcaaaagggtgtccacagaggcgaaaaaagcccaggctctaccgaccttcaaactacaacagagctttcaggagaatgcggagagacggcttcccacccggacctcaccagaaacccgca

SEQ ID NO: 953261 - DNA, 120 bp, Artificial Sequence
  ENSG00000254703_7 (sequence is synthesized)
caccccagccacattgctcctcattcagccagaaaggactccaactccaccaccaggaggccccccttcctggtgctggccagttgcagaggctgttcatggcatcccacaggtggcgac

SEQ ID NO: 953262 - DNA, 120 bp, Artificial Sequence
  ENSG00000254703_8 (sequence is synthesized)
tgccccccaccctcctcctagcactttagagggtccctctgtggcagacaccatggctaggtttctctttccaactcctgttggtctggcaagtgacagatcatcttcactacattaatc

SEQ ID NO: 953263 - DNA, 120 bp, Artificial Sequence
  ENSG00000254703_9 (sequence is synthesized)
agtagtcacccgaacattcctatactgtcccccaattcctttcagcaccagctgcctcccccactggaattattcaatatggaactagattaaattgaagacttgccctttagtttttaa

SEQ ID NO: 953264 - DNA, 120 bp, Artificial Sequence
  ENSG00000267688_0 (sequence is synthesized)
agtgtcaccgggggaccatccctccagccgcccagcccacgtgggctccggtggggtgcgctctagccagggcagggtggccgtgcagccctctggagtccccgggcagccccaagcagc

SEQ ID NO: 953265 - DNA, 120 bp, Artificial Sequence
  ENSG00000267688_1 (sequence is synthesized)
tgtttcttcaacctaaaaaagcgagccataagtcaaggccagaaaaaggctgcctttgccgttgacaaaagaggccccggcccggactcggcagcgccacccgcccggcagccgcaggct

SEQ ID NO: 953266 - DNA, 120 bp, Artificial Sequence
  ENSG00000267688_2 (sequence is synthesized)
ccgtggaaggaaggtcctgccccgtgtctccatcccgtctccctgggcctgggcgctcagaccaggttgtactccttgaggttgagctgcaggatggtgtccttcacggccgcgaacacg

SEQ ID NO: 953267 - DNA, 120 bp, Artificial Sequence
  ENSG00000240875_0 (sequence is synthesized)
agtatgggctttcaggcaaccgcggcgacggctcccctccaggggaagaatgtggaatccgcagagctgggttgaggcacatccgctgccaaactgtctccagcatttgtaatccctgct

SEQ ID NO: 953268 - DNA, 120 bp, Artificial Sequence
  ENSG00000240875_1 (sequence is synthesized)
tttcggcaccacccaagatgtactaatgcgccttgtgaagactcactcccgtggcctctggggttcggcattgaaagagagggtgggagaggaaaggaaagagaaggggaaaggactcat

SEQ ID NO: 953269 - DNA, 120 bp, Artificial Sequence
  ENSG00000240875_2 (sequence is synthesized)
caagaaaaaggaatgcgcatgagagtcatgcacaaggaaatccaacactgaggggtcacagcagagggacggaaagcacctggatcttacaacattgttgagctcttttgtctcttgact

SEQ ID NO: 953270 - DNA, 120 bp, Artificial Sequence
  ENSG00000240875_3 (sequence is synthesized)
tctagttatgagatgtaattttcttactgttaaagtcatttctgttccttgcaaccaaaagcattcattgatacactgaatatagtacaatatttattcaatcaataaatgcctggcaaa

SEQ ID NO: 953271 - DNA, 120 bp, Artificial Sequence
  ENSG00000240875_4 (sequence is synthesized)
gctgcctgcttccgccgctttagtgcacgctcgggcttcctggtgcgcccggagcctgcctcgcgtgccgaccccgccgcgtaatccggcgaggcatcccagattccgcccggctccaga

SEQ ID NO: 953272 - DNA, 120 bp, Artificial Sequence
  ENSG00000240875_5 (sequence is synthesized)
acatcatgtgattgtagggaaagcctaggctatcatggagggaagagattggataaattatttgaaaagcaagcctgtgaattgctgtggaggaacaatagcctgtctcttatctggagc

SEQ ID NO: 953273 - DNA, 120 bp, Artificial Sequence
  ENSG00000240875_6 (sequence is synthesized)
ctttccaaggaaaagcaaaggggaccctagaaggcttcctgggagacagtttaattctgaaaacaaagcagtacttcacctcttgtgtgttgggtagagctgtaaaacagaacacagtca

SEQ ID NO: 953274 - DNA, 120 bp, Artificial Sequence
  ENSG00000240875_7 (sequence is synthesized)
aaatagtcattagggccacatcaatgtctgcccaaagtcaggcgagcattcccaggaaggtggggggctgtggcagttgcacacatcaacctcctttctccattgtcacacagcagaaga

SEQ ID NO: 953275 - DNA, 120 bp, Artificial Sequence
  ENSG00000240875_8 (sequence is synthesized)
gcgtgttccattctactaaagttggggcggggggagttgaataatttattgactgaaaactgggggcctgagttagatggtaaaaaagtttagagtgctgttttttgttttttaagttat

SEQ ID NO: 953276 - DNA, 120 bp, Artificial Sequence
  ENSG00000240875_9 (sequence is synthesized)
gtttgttttatatattgaagtgcttaaaatgtattttaaaaattcaaaacatcccagaaattcagcaacttgaggagacaatagtgacgaacattttatggcaacatttggacactttaa

SEQ ID NO: 953277 - DNA, 120 bp, Artificial Sequence
  ENSG00000240875_10 (sequence is synthesized)
agattatttcaggaactttaatgctgataaatgagagaagggacaacttttcctaactataacatttcggcacctgagtacagggatcaaaacaagagcaagcatttcaaattcatattg

SEQ ID NO: 953278 - DNA, 120 bp, Artificial Sequence
  ENSG00000240875_11 (sequence is synthesized)
tgaagcacctacaaaaagattattctgttagccttcataatgtggagagttcatcttttcatcttatcaaataaaaatatacccaaattcttgaacaggcattcagttaggaaaagaggg

SEQ ID NO: 953279 - DNA, 120 bp, Artificial Sequence
  ENSG00000240875_12 (sequence is synthesized)
tggggtgatgaaatgtgttctcattcagcaaacactttgcagatatttctagtcaaagatccctgtggtctaggctagtgagagaaaaacgtgccctctgcccagtgacagcggctgcac

SEQ ID NO: 953280 - DNA, 120 bp, Artificial Sequence
  ENSG00000240875_13 (sequence is synthesized)
ggggatcagctttcaccaatgcaggcaggggaacaaagggcaggcttcatctgcctgcatcccacaggcccttgcgcaggggagttccatttcagtgcccatcacatgacctctcaggcc

SEQ ID NO: 953281 - DNA, 120 bp, Artificial Sequence
  ENSG00000240875_14 (sequence is synthesized)
aaaacggtttttaataattctgattttgaatatcaaatggaagtgaaaagtacatttaggaaggaagggctctatccttattgaagaacatgctctatgcaaacaggttggacaggcact

SEQ ID NO: 953282 - DNA, 120 bp, Artificial Sequence
  ENSG00000240875_15 (sequence is synthesized)
agctcttgtagagctatggttctcagctttggcaacacactggatcacctcctctaaaaggtactgatgcctgctttcctccctcttctgcccctaaagaaagtagaatttaattttaag

SEQ ID NO: 953283 - DNA, 120 bp, Artificial Sequence
  ENSG00000240875_16 (sequence is synthesized)
aggctagagtgcagtgtgcagtcttggctcactgcagcctcaatctcccagattcaagagatcctcctgcctcagccccctaagtaactaggattacaggcacgcaccaccacaccaggc

SEQ ID NO: 953284 - DNA, 120 bp, Artificial Sequence
  ENSG00000240875_17 (sequence is synthesized)
gccacagcccctggccggcatcaggatttttaaaagctcccaagtgcagtcaaggttgagaacagctgctatagtgtgacttaatacagcattcaaagcctctcataatctagcctcagc

SEQ ID NO: 953285 - DNA, 120 bp, Artificial Sequence
  ENSG00000240875_18 (sequence is synthesized)
ctaatttttccttccagcaccccatctcagcctgtacataagccacagagacattctcactgttctctgaatgtacttggctcattcatatttccaggctttcttgcacacacattgtct

SEQ ID NO: 953286 - DNA, 120 bp, Artificial Sequence
  ENSG00000240875_19 (sequence is synthesized)
gactctgggcacctaaggaaagctcagctccaatgtcctctcctcttccgtgaaacctttcctgtcaagcccaccttcactactaagtcactccttgctcctagatcagatggaagaatg

SEQ ID NO: 953287 - DNA, 120 bp, Artificial Sequence
  ENSG00000240875_20 (sequence is synthesized)
ctttggcatatctctactggagcccttctcactttacattaaagataactgtatataggttagcccactcctcctccctaatagcatgtggaccctttgtagtttcagcagtaagcacag

SEQ ID NO: 953288 - DNA, 120 bp, Artificial Sequence
  ENSG00000240875_21 (sequence is synthesized)
ggcttggtttctatgaatacttattgagtgaatggatgaatgaatgccaatcttgtacattgttgatgttcaccacattgaacccagttctcaaaccaggatcacttgggagattctgag

SEQ ID NO: 953289 - DNA, 120 bp, Artificial Sequence
  ENSG00000240875_22 (sequence is synthesized)
tcaataatttgaaggtctgtatcattcctactcaaagtgtggtccataagccagcagtggctatattatctgggagcttgttgcaaatgcagaatatgtattttaacaagatccccaggc

SEQ ID NO: 953290 - DNA, 120 bp, Artificial Sequence
  ENSG00000240875_23 (sequence is synthesized)
aattcatatgcacattacactttgagctatatttttaacaagctcccaggtgattcctttgtagcccggctgctgacctgcatttcgtaaccactgttctagaccttcatttgctgaatg

SEQ ID NO: 953291 - DNA, 120 bp, Artificial Sequence
  ENSG00000240875_24 (sequence is synthesized)
gagtggtccctgtgtgattgcctacaggtttcttctagtctcccatttttcttcctagttaacaaagcccaaattttgtttggaagggtgatcagcccttcacccatcaggcctttgcct

SEQ ID NO: 953292 - DNA, 120 bp, Artificial Sequence
  ENSG00000240875_25 (sequence is synthesized)
cagggaagcttgaccccacctttagaccccatgttgggcctgagtagtccaaaggcatatcccattcccctggccagggattagtttagggatagacatgtgaccaaattcagctcaata

SEQ ID NO: 953293 - DNA, 120 bp, Artificial Sequence
  ENSG00000240875_26 (sequence is synthesized)
aaatgtgagtctgcaggggcaatctagaaaaagtgtcctcttccctaagagaaagccacaggagggtaaaaaaatgtctcagaacattgtcctgcctaaacatgatgcctcggacattct

SEQ ID NO: 953294 - DNA, 120 bp, Artificial Sequence
  ENSG00000240875_27 (sequence is synthesized)
ccccatgacccaaacacctcccaccaggcctcacctccaatgctggggctcaaatttcaacatgaggtttggaggggtcaaatattcaaaccacagcaacgggagaagacatttcctcat

SEQ ID NO: 953295 - DNA, 120 bp, Artificial Sequence
  ENSG00000240875_28 (sequence is synthesized)
gaagaagcaatataaattgaaatacaacctatagaatttatatagacatatgcaatctgcagaagcacatgttgggactgaaaaaggactgcactaatgaattctgtcacagatgtgttt

SEQ ID NO: 953296 - DNA, 120 bp, Artificial Sequence
  ENSG00000278126_0 (sequence is synthesized)
aattaaaataaaataaaataaaattccctttggagggaaattaattattaacataggaggaagtcatttcatggaaaaatataaaatcttgctatcaatgagaagaaaagtaattgactt

SEQ ID NO: 953297 - DNA, 65 bp, Artificial Sequence
  ENSG00000278126_1 (sequence is synthesized)
ttaagccagaaaataaataagcaatgataaaacctatattggtgtggattgctcgagctcaggag

SEQ ID NO: 953298 - DNA, 74 bp, Artificial Sequence
  ENSG00000278126_2 (sequence is synthesized)
ctggaggctgatgtgggaggatcacttgagcttgggaagtggaggttacagtgaggcgagattgcgccactgca

SEQ ID NO: 953299 - DNA, 120 bp, Artificial Sequence
  ENSG00000278126_3 (sequence is synthesized)
agcctgggtgatagagtgagaccttgtctcagaaaaaaaaaaaaaaaaacaactatattgagtggtgctgtggagaaacaggtacattgttgatgtttctgtgagttcatttagtctttc

SEQ ID NO: 953300 - DNA, 120 bp, Artificial Sequence
  ENSG00000278126_4 (sequence is synthesized)
gttcatttagtctttctgtacagtcttgcaggaagcaatagcagccctaatgtatgtaaaaccttggactccatggtcctactaaatatgccctaataaaatgaatattttgcttcttta

SEQ ID NO: 953301 - DNA, 120 bp, Artificial Sequence
  ENSG00000234740_0 (sequence is synthesized)
gcttcgcggaagccgctgctgtggcttttttaaaaggatggggtctagaagtttcctttgctactcgcaagtctccactccccccagccccgcggtggataatcctagacctttcagcac

SEQ ID NO: 953302 - DNA, 120 bp, Artificial Sequence
  ENSG00000234740_1 (sequence is synthesized)
tcatgaaatattttgaggcaaagttggactggaatgtccccaaatatggtagagcaaatagcacatctgccagagaaagatcctacactttaaagagaagaagcagacaacttcctggtg

SEQ ID NO: 953303 - DNA, 120 bp, Artificial Sequence
  ENSG00000234740_2 (sequence is synthesized)
aatttaggactgcttgatggtgttgcaattttatttgttgagttaatgaaaccattagagccattcttcccaatctggccagctaagttaaaaataaataaataaataaaaggagacaaa

SEQ ID NO: 953304 - DNA, 120 bp, Artificial Sequence
  ENSG00000234741_0 (sequence is synthesized)
gtcttttcgaggtaggagtcgactcctgtgaggtatggtgctgggtgcagatgcagtgtggctctggatagcaccttatggacaggtaagaattggggaaagtatggtgggaagaatgaa

SEQ ID NO: 953305 - DNA, 120 bp, Artificial Sequence
  ENSG00000234741_1 (sequence is synthesized)
atctaagaggtggtctcagcctgtgatgctttaagagtagtggacagaagggatttctgaaattctattctgaggctttaatgttaacagcatttatatttaacgtgactgctgtgaggt

SEQ ID NO: 953306 - DNA, 120 bp, Artificial Sequence
  ENSG00000234741_2 (sequence is synthesized)
tcattctcactgttttgcttgcatctttttgttttctagttgtgtccccaaggaaggatgagaatagctactgaagtaagttgaaaattccctctcaaaaaggtttaaagccattggatg

SEQ ID NO: 953307 - DNA, 120 bp, Artificial Sequence
  ENSG00000234741_3 (sequence is synthesized)
tgccacaatgatgacagtttatttgctactcttgagtgctagaatgatgaggatcttaaccaccattatcttaactgaggcacccaaaatggtgagttggggaacatagagagtacacct

SEQ ID NO: 953308 - DNA, 120 bp, Artificial Sequence
  ENSG00000234741_4 (sequence is synthesized)
aagttcacatgaagttgtttcttcccaggtcctaaagagcaagcctaactcaagccattggcacacaggtgagacacctctattttgtacttctcacttttaagggattagaaaatagcc

SEQ ID NO: 953309 - DNA, 120 bp, Artificial Sequence
  ENSG00000234741_5 (sequence is synthesized)
aaagcaatgatgattatctatgttagtgcttctctcccctcttttcaaatgagaattttgctctcatattgatactaagtttaatactgaagaaaatgtgaaaacagatactatgatggt

SEQ ID NO: 953310 - DNA, 120 bp, Artificial Sequence
  ENSG00000234741_6 (sequence is synthesized)
tgcatagttcagcagatttaatcatgaagagatgtactatctgtctgatgtatctggggtagttgtggtttgctgttaatggttaagcagtgtaccaccaatctaccattaaaatatttt

SEQ ID NO: 953311 - DNA, 120 bp, Artificial Sequence
  ENSG00000234741_7 (sequence is synthesized)
ttgctgacaattttgtattaaaattacaggcattagacagaaagctggaagttgaaatggtaagtgaaactgtatccaagtaagcaggtaactgggcaaacttcctacggcacaaatggc

SEQ ID NO: 953312 - DNA, 120 bp, Artificial Sequence
  ENSG00000234741_8 (sequence is synthesized)
tttttagttacctcctagtgctgaatgcattaaataaatggcggattcttgtcttgttatgattaataagaaagtttgtaaatgcagcctggatgatgataagcaaatgctgactgaaca

SEQ ID NO: 953313 - DNA, 120 bp, Artificial Sequence
  ENSG00000234741_9 (sequence is synthesized)
tgaaggtcttaattagctctaactgactaaaggcatttgttagttttggcagggggtgaacactcatctgtggctattctaagaccactcttatttcttaggtggagtccaacttgcctg

SEQ ID NO: 953314 - DNA, 120 bp, Artificial Sequence
  ENSG00000234741_10 (sequence is synthesized)
gaccagcttaatggttctggtaagtattaatgaaaacagtagatagacttaatgaaaatgctgatggtgatatgcttactgctgagctaatggcttaaggcttggctgatgaatactgac

SEQ ID NO: 953315 - DNA, 120 bp, Artificial Sequence
  ENSG00000234741_11 (sequence is synthesized)
tgtattttccttgagcatgtctggaacagtgtttatgtgttttccttgagcatgtttggaacggggtttgtgtaatgatgttgatcaaatgtctgacctgaaatgagcatgtagacaaag

SEQ ID NO: 953316 - DNA, 120 bp, Artificial Sequence
  ENSG00000234741_12 (sequence is synthesized)
gtaacactgaagaaccctgtgacagacaactttgaaaagagtttaatgatgtttagcattttaatggaagtcctcatttgtattccagctcctggtaacgtttttatccatggatgactt

SEQ ID NO: 953317 - DNA, 120 bp, Artificial Sequence
  ENSG00000234741_13 (sequence is synthesized)
tcctgtcataccttttaaaggtacatgttttattgatgttaacgttaattgattgagctactgttagtgatgattttaaaattaaagcagatgggaatctctctgagaaagaaaatggag

SEQ ID NO: 953318 - DNA, 120 bp, Artificial Sequence
  ENSG00000234741_14 (sequence is synthesized)
attaatcttaaactgaaacagtagttgggaaatcttttagaaatccacctattactacctattggtaaaggagattaaatttctacaggtatggagagtcggcttgactacactgtgtgg

SEQ ID NO: 953319 - DNA, 120 bp, Artificial Sequence
  ENSG00000234741_15 (sequence is synthesized)
agcaagttttaaagaagcaaaggtatagcagttccaagtattttttttttttttttagacaagagtctagctcttgcccagaatggagtgcagcggcactatcagttcactgcaacctct

SEQ ID NO: 953320 - DNA, 86 bp, Artificial Sequence
  ENSG00000234741_16 (sequence is synthesized)
tcaagtctggtttttaagtgttgtaaagccgatacaatgatgataacatagttcagcagactaacgctgatgagcaatattaagtc

SEQ ID NO: 953321 - DNA, 120 bp, Artificial Sequence
  ENSG00000234741_17 (sequence is synthesized)
catagttcagcagactaacgctgatgagcaatattaagtctttcgctcctatctgatgtatctggcggtaacattctagtttatgccccgaaaaggggaatatagccattctataatgtt

SEQ ID NO: 953322 - DNA, 120 bp, Artificial Sequence
  ENSG00000234741_18 (sequence is synthesized)
tggagattttggattactcctaattgtatgcaagttgtcttactgtgtattgtcccttaatttcaggactcagaattcatgattgaagaaatgcaggttagtttaaactttgaaggaaat

SEQ ID NO: 953323 - DNA, 120 bp, Artificial Sequence
  ENSG00000234741_19 (sequence is synthesized)
ttttaaggtggcaaaaggttttggtggcatatacaccttaatctgtagatgggagtgattagctgtttaaaagttaaaatgtgactgagaaggaaattgagtagggcaaattttaaatgg

SEQ ID NO: 953324 - DNA, 120 bp, Artificial Sequence
  ENSG00000234741_20 (sequence is synthesized)
gtattatttttcatcttcaaacaggcagacctgttatcctaaactaggtgagtcagcttttggtacatgtgatgattttcagtgtaaccaatgatgtaatgattctgccaaatgaaatat

SEQ ID NO: 953325 - DNA, 120 bp, Artificial Sequence
  ENSG00000234741_21 (sequence is synthesized)
aatgatatcactgtaaaaccgttccattttgattctgaggttactctactaacaagcatcacacatttgtattttgccctgattaatatgttggcttcgctttcagggtttttaatgacc

SEQ ID NO: 953326 - DNA, 120 bp, Artificial Sequence
  ENSG00000234741_22 (sequence is synthesized)
acaacaagcaagcatgcagcttactgcttgaaaggtgaggattggaaatgttgggactattataattgcagaatacatgatgatctcaatccaacttgaactctctcactgattacttga

SEQ ID NO: 953327 - DNA, 120 bp, Artificial Sequence
  ENSG00000234741_23 (sequence is synthesized)
tgacaataaaatatctgatattctgcattcccatgtagcattttaattgaagtctgtaaatgtggctaaaagtcttgtcttattttttgagacagggtcttgcctcacccaagctagagt

SEQ ID NO: 953328 - DNA, 120 bp, Artificial Sequence
  ENSG00000234741_24 (sequence is synthesized)
gcagtggcctttgaagcttactacagcctcaaacttctgggctcaagtgatcctcagcctcccagtggtctttgtagactgcctgatggagtctcatggcacaagaagattaaaacagtg

SEQ ID NO: 953329 - DNA, 120 bp, Artificial Sequence
  ENSG00000234741_25 (sequence is synthesized)
ggcacacaggcattagacagaaagctggaagttgaaatggtggagtccaacttgcctggaccagcttaatggttctgctcctggtaacgtttttatccatggatgacttgcttgggtaag

SEQ ID NO: 953330 - DNA, 120 bp, Artificial Sequence
  ENSG00000234741_26 (sequence is synthesized)
ctgtgttggtagggacatctgagagtaatgatgaatgccaaccgctctgatggtggcacatgccgagtcacccgagtaagctattgttaagggccgtgacccgagcctccatcagccgtc

SEQ ID NO: 953331 - DNA, 120 bp, Artificial Sequence
  ENSG00000234741_27 (sequence is synthesized)
cgctctcatgaaaggctgtcggtggtagtccacgtgcttaagtgcctgcattccgcagtgtcaccaatatttccattagtgtttcttttttcttttttgagaccgagcctcgttctgtca

SEQ ID NO: 953332 - DNA, 120 bp, Artificial Sequence
  ENSG00000234741_28 (sequence is synthesized)
ttttttgagaccgagcctcgttctgtcacccaggctggaatgcagtggctcgacatcggttaatggcaacctccgcgtcccgagttaagcagttctgcctcagcctcccaagtaactggg

SEQ ID NO: 953333 - DNA, 79 bp, Artificial Sequence
  ENSG00000234741_29 (sequence is synthesized)
ggtggtcccccaacatactgggattacaagccgtgagccaccgcgcccggccgccatcggtggttcttaactgcgggtg

SEQ ID NO: 953334 - DNA, 120 bp, Artificial Sequence
  ENSG00000234741_30 (sequence is synthesized)
tctttgtaacattaagtgtatcctttacctgtcgctagataatgaatggtatggtgctgggtgcagatgcagtgtggctctggatagcaccttatggacagttgtgtccccaaggaagga

SEQ ID NO: 953335 - DNA, 120 bp, Artificial Sequence
  ENSG00000234741_31 (sequence is synthesized)
cagcacttgagcagctttcttctgcgttaggaagcctggggagaggggaactggctaaagggcaaaatgtcactgaggaacttcggagaagatggggacaaggcgtcgggcgggggagcc

SEQ ID NO: 953336 - DNA, 120 bp, Artificial Sequence
  ENSG00000234741_32 (sequence is synthesized)
tgaagacagttcctgtcataccttttaaaggtatggagagtcggcttgactacactgtgtggagcaagttttaaagaagcaaaggactcagaattcatgattgaagaaatgcaggcagac

SEQ ID NO: 953337 - DNA, 120 bp, Artificial Sequence
  ENSG00000234741_33 (sequence is synthesized)
acaggcattagacagaaagctggaagttgaaatgttttggcagggggtgaacactcatctgtggctattctaagaccactcttatttcttaggtggagtccaacttgcctggaccagctt

SEQ ID NO: 953338 - DNA, 120 bp, Artificial Sequence
  ENSG00000234741_34 (sequence is synthesized)
atggtgcatgcgtgacctaagctgcgactatgttagagtagaactgcggagaagcctcggctctcgtgccctgcctctgatgaagcctgtgttggtatggtgctgggtgcagatgcagtg

SEQ ID NO: 953339 - DNA, 120 bp, Artificial Sequence
  ENSG00000234741_35 (sequence is synthesized)
gcagtgcttctttgtaacattaagtgtatcctttacctgtcgctagataatgaatggtatgttacctgcatcattggtttaaaaagacgaaccgtttttttaaagaacactctttaaaaa

SEQ ID NO: 953340 - DNA, 120 bp, Artificial Sequence
  ENSG00000234741_36 (sequence is synthesized)
ttagtttattaaaacttttatgtgtatgattagaacttaaaatcacaatgagttttggtgttcactttttcgcacatttgaggttaatctaaggttgattagaattttcaattacttata

SEQ ID NO: 953341 - DNA, 61 bp, Artificial Sequence
  ENSG00000234741_37 (sequence is synthesized)
attgagagaaaatagtgttcagtgattaataatatctttgttcatcttggctcactgcaac

SEQ ID NO: 953342 - DNA, 70 bp, Artificial Sequence
  ENSG00000234741_38 (sequence is synthesized)
caggctggagtgtacctcatgcctcagcctcccgagtggctgcgattacaggcatgcgccaccatgcctg

SEQ ID NO: 953343 - DNA, 120 bp, Artificial Sequence
  ENSG00000261123_0 (sequence is synthesized)
caccacttcacttctctgaacctctgttgtctgtggaaagagcctcatgggatccccagggccccagaaccttccctctagggagggagcaggctcatggggctttgtaggagcagaaag

SEQ ID NO: 953344 - DNA, 120 bp, Artificial Sequence
  ENSG00000261123_1 (sequence is synthesized)
aaaggctcctgtgtgaggctggccggggccacgtttttatcttggtctcagagcagtgagaaattatgggcgggtttttaaataccccatttttggctggtcttgaactcctgacctcgt

SEQ ID NO: 953345 - DNA, 120 bp, Artificial Sequence
  ENSG00000261123_2 (sequence is synthesized)
cagcctcctgaagtgctgggattacaggcttgagacactgcgcccagccaagagtgtcttttatcctccgagagacagcaaaacaggaagcattcagtgcagtgtgaccctgggtcaggc

SEQ ID NO: 953346 - DNA, 120 bp, Artificial Sequence
  ENSG00000261123_3 (sequence is synthesized)
ttcagtgcagtgtgaccctgggtcaggccgttctttcggtgatgggctgacgagggcgcaggtacgggagagcgtcctgagagcccgggactcggcgtctcgcagttggtctcgtcctcc

SEQ ID NO: 953347 - DNA, 120 bp, Artificial Sequence
  ENSG00000242659_0 (sequence is synthesized)
aatggctgaaacaatctgctacccgaagccccaaaggctctgattaccggtcgccgctcacctgctggggcgcgaggtgcagagactgtaccgaccgaggacccagaggctgtcaccacg

SEQ ID NO: 953348 - DNA, 120 bp, Artificial Sequence
  ENSG00000242659_1 (sequence is synthesized)
gacgtcgagctccgccctgcctcctccatcccagcgctctacatctcggggggcctgaatttttacggatcccttgaatattaattttcttggattaaagaaataaaagataaattttca

SEQ ID NO: 953349 - DNA, 120 bp, Artificial Sequence
  ENSG00000261121_0 (sequence is synthesized)
tccaccattgctgtgaaaacatgcctgggagagcctgctggaagacagtacccagagcagcgccccagtctctccagttgactagccaggaccagcctagatcttctgacaactggatga

SEQ ID NO: 953350 - DNA, 120 bp, Artificial Sequence
  ENSG00000261121_1 (sequence is synthesized)
ccttcagatatagataccaccagcttctgatggtgttacaccctggaaatggcagtccagctctagcttctggaaggcaactggcaagagcataagaaaacagccgaagattagattttg

SEQ ID NO: 953351 - DNA, 120 bp, Artificial Sequence
  ENSG00000261121_2 (sequence is synthesized)
ataatgagagagcccaacgatcctggacccctggccgggaggacaataggggaaacaggtgaaacactgtgtgagctggaccacccaggctctccaacaccaggacaccagagcatcctt

SEQ ID NO: 953352 - DNA, 120 bp, Artificial Sequence
  ENSG00000261121_3 (sequence is synthesized)
cctccttcttctcttctgctgcgacttcctggaggcatagcagagttacaactgctggccatgtggaacttctcttctcctataagtttgctctgagatggagagattgtgcctgtggtt

SEQ ID NO: 953353 - DNA, 120 bp, Artificial Sequence
  ENSG00000261121_4 (sequence is synthesized)
ccagaaggagaagttgagctgtgttgaagcctcaatggagacctcagccaattctgagtcatgtcctgaagctagaatatgtcctctaaattatcccaagctgagatgagggagctgggc

SEQ ID NO: 953354 - DNA, 120 bp, Artificial Sequence
  ENSG00000261121_5 (sequence is synthesized)
agggagctgggcatttagccctgtattaggccattcttgcactgctataaagaaataactatggcctggcgccgtggctcacgtccttaatcctagcactttgggaggccgaggcgagca

SEQ ID NO: 953355 - DNA, 120 bp, Artificial Sequence
  ENSG00000261121_6 (sequence is synthesized)
aaaaaaaaaaaaaaggaaagaaggaaataactgagactggtaatttataaagaagaggtttaattggctcacagttcctcatgctatacaaaaagcatgatgctggcatctgctcagctt

SEQ ID NO: 953356 - DNA, 120 bp, Artificial Sequence
  ENSG00000261121_7 (sequence is synthesized)
catggcagaaggtgacgcgggagcaggcagttcacagggccggtgcaggaggagagagagaggcaggagatgctacacgcctttaaacaaccagatctcctgataactcactctcgtcac

SEQ ID NO: 953357 - DNA, 120 bp, Artificial Sequence
  ENSG00000261121_8 (sequence is synthesized)
aacaccaccaagggagatggtgttaaaccatgagaaaccacctccacgatccaatcacctcccaccaggcctcacctccaacactggggatttataattccacgtgagatttgggtagag

SEQ ID NO: 953358 - DNA, 120 bp, Artificial Sequence
  ENSG00000261121_9 (sequence is synthesized)
gacacagatccaaaatatatcatacccccacgttgatcagtcattagatgtgggccaccctagttgaggcagctcccctcgctcaggtggttcctgaagcgagctgacagctgacggctg

SEQ ID NO: 953359 - DNA, 120 bp, Artificial Sequence
  ENSG00000261121_10 (sequence is synthesized)
catgccagaggtactgtcagcagctgaaggagagtcttttgtgctaaaagccatcttaagcagcacagcacagcgtccaccacatattgtggacaggtgatatggtttagatctgtatcc

SEQ ID NO: 953360 - DNA, 120 bp, Artificial Sequence
  ENSG00000261121_11 (sequence is synthesized)
ccaccacaatttcatgctgaattgtagtccccaatgttggaggtaagccctggtgggaggtgttcgggtcgtgggagcagatccctcatgaatggcttgggccatcctcttggtgatgag

SEQ ID NO: 953361 - DNA, 120 bp, Artificial Sequence
  ENSG00000261121_12 (sequence is synthesized)
ggaacactcactctgagtgttcacaagatctggtggtttaaacgtgtatggcacctctccccacccccactctttcttgttcctgcttttgccatgggactcgcatgatccctttgcctt

SEQ ID NO: 953362 - DNA, 120 bp, Artificial Sequence
  ENSG00000261121_13 (sequence is synthesized)
ctgccaggactaaaagctccctggagcctcctcagaagctgagcgatgttggcgccatgcttctggtacagcctgcagaaccatgagccaattcaacctcctttctttataaattaccca

SEQ ID NO: 953363 - DNA, 120 bp, Artificial Sequence
  ENSG00000261121_14 (sequence is synthesized)
gtctcaggtatttctttatggcaatacaagaacaccaggggtttgcaggtaacccgggcccctgtccttgaggacacagcagcaagccattggtaaagcaaaactgtccataaggaaggc

SEQ ID NO: 953364 - DNA, 120 bp, Artificial Sequence
  ENSG00000261121_15 (sequence is synthesized)
tgctcccatgcagtgttcatttgggcagcccagaaatcgagaaatcctcggtccatttcaagtttgggggaaaacttatttttatcatatttgagatgaataataaaagcaaatccagaa

SEQ ID NO: 953365 - DNA, 120 bp, Artificial Sequence
  ENSG00000287710_0 (sequence is synthesized)
ggactccatagttcatttcaggtcggaacttgcgcattcgggccggacctcaagccatgggcctctgcgaaggcgccggcgtgcccacggctaagaaacttcctctttctgctcccggga

SEQ ID NO: 953366 - DNA, 120 bp, Artificial Sequence
  ENSG00000287710_1 (sequence is synthesized)
acgaaggctgtagcagagaaggccttcaagtttcgagacccagttccagccgcagctgagcactggtgaccttgaattaagtctaatgttgggattggaagacgcttcagacatccgctg

SEQ ID NO: 953367 - DNA, 120 bp, Artificial Sequence
  ENSG00000287710_2 (sequence is synthesized)
cagtgctcttttgtcggttagttttgtcatttgtaaaataggaacagtagatagtggtaggaaagtggttgtgaaaacttaatagaaagctaagcgccttggtcgggcgcagtggcatgt

SEQ ID NO: 953368 - DNA, 120 bp, Artificial Sequence
  ENSG00000287710_3 (sequence is synthesized)
cacccctgcaattctatcactttgggaggctgaggcgggcggatcgtttgagcccaggaattcgaaaccagtctgggcaatatgaaaccccatctctgcaaataaagtacaaaaaattaa

SEQ ID NO: 953369 - DNA, 120 bp, Artificial Sequence
  ENSG00000287713_0 (sequence is synthesized)
tatgagaagaggaagaggcattaggcctgtgaatagagaaaaggccatgtgaagacactgagaagacagccatctgctactgaagggagaggtctcaggagaaactaagcctgctggcac

SEQ ID NO: 953370 - DNA, 120 bp, Artificial Sequence
  ENSG00000287713_1 (sequence is synthesized)
cttgatcttggatgtccagcatctagaactttgagaaaacaaattcctgttgtttaagccacctgtttgtggtattttgttatggcagccttagcagacaataaatatatactgtcaagt

SEQ ID NO: 953371 - DNA, 120 bp, Artificial Sequence
  ENSG00000287713_2 (sequence is synthesized)
aataagggagcattttgaagaagaaaatatcaaggctgacggtgaatgaagcgcattagactgagaatagctgctgagtagaaagccggtgggaaaacagagaatttcctggaggcatgg

SEQ ID NO: 953372 - DNA, 120 bp, Artificial Sequence
  ENSG00000287713_3 (sequence is synthesized)
gaggggcacgctgtaatgagtgggaatgtcacaggcgctgtttcaaaaagagtggatgaaagcctgagaatgcggctgtaaaggctactggaaggctcctcgggcaggggacaggatgtg

SEQ ID NO: 953373 - DNA, 120 bp, Artificial Sequence
  ENSG00000287713_4 (sequence is synthesized)
agcccctggaatagactcataaaagaaaatgttagcacataccattgaattcactgagacacatgagaaaatatgggaaagtcggagagtggaagaaaatgtaaagacccccctcctccc

SEQ ID NO: 953374 - DNA, 120 bp, Artificial Sequence
  ENSG00000287713_5 (sequence is synthesized)
caaagagtacgttgtgtagtggggtagagtggaaaatcaatccaagaaaagtagcaaacggacccaaagatgaagaggaagaaaagaaacagcaacacgaaacgaaaaaaaaagccacca

SEQ ID NO: 953375 - DNA, 120 bp, Artificial Sequence
  ENSG00000287713_6 (sequence is synthesized)
gcaacgttgatgtaaacctggccgtcttcctgaaccagtgacccagggtttccgcttccctttgctgtcatcttgctcaagtctagaagctgaaatatcatcatcaactcgacatgaggg

SEQ ID NO: 953376 - DNA, 120 bp, Artificial Sequence
  ENSG00000287713_7 (sequence is synthesized)
gataacctctggatccactcatcagatgctcatcagacgttccaattacaaaactgaacctcttcttagtgctggggcggttagaatgcaaacatttcaagaaaaaaacacattgttttc

SEQ ID NO: 953377 - DNA, 120 bp, Artificial Sequence
  ENSG00000287713_8 (sequence is synthesized)
tagtggtgatagaattgagggtgagttcttccttcctttattgttgtcttttcttttatttttttctactttactgaagggcacatgcaataaagcagataaaaatgcactaatctggag

SEQ ID NO: 953378 - DNA, 120 bp, Artificial Sequence
  ENSG00000287713_9 (sequence is synthesized)
tttacagttgggtgaatatttatatctgtattcacaggcataaccattaaccagatcaagatctagattctttaacatttcttgctcctcaaaaagtttcctagtgctggttccagtcta

SEQ ID NO: 953379 - DNA, 120 bp, Artificial Sequence
  ENSG00000287713_10 (sequence is synthesized)
tagcctccttctccagaagaaattgctatttttacttccgccatcatcaatgaattttgttgttcttgacctttaaatggaaccatacagtatgtactcttttgtgctcagatgtttttt

SEQ ID NO: 953380 - DNA, 120 bp, Artificial Sequence
  ENSG00000287713_11 (sequence is synthesized)
cactgagcatcgtgtctacgagtactatgtggtggtgttggtagttcattccttcttactgctgagtagtattccacttttggctatgacaacatttacttatctattctcccactgatg

SEQ ID NO: 953381 - DNA, 120 bp, Artificial Sequence
  ENSG00000287712_0 (sequence is synthesized)
acttggcggccgcagggctggctcagtggaccgcaggggagaaaacagggcaaggggttgagcgccatcaggagccattccacagtgaccatggaggagcagagactgcatggtgggggt

SEQ ID NO: 953382 - DNA, 120 bp, Artificial Sequence
  ENSG00000287712_1 (sequence is synthesized)
tgtgagtggggagaaagcgtccactcacctgaaagcccaacgacctggtctcctcggcatcagacttacacagcagttccatccaccttgaccttagggctcagggcatctgcagcccta

SEQ ID NO: 953383 - DNA, 120 bp, Artificial Sequence
  ENSG00000287712_2 (sequence is synthesized)
ctgccggccctcggcctcactgccctcatctggcagcttctatgtgctctcggggctggagaggtcaggaagaaatagacagagtgggccaggcttggtcggagtccatacagagcaggc

SEQ ID NO: 953384 - DNA, 120 bp, Artificial Sequence
  ENSG00000287712_3 (sequence is synthesized)
cccctctgcacggggagtcacagatttctggaaacctcagctgagcctggtgcagtggcacagagcagccctgccccagttcccagtggtgactcctctggggttcagcacatgggacag

SEQ ID NO: 953385 - DNA, 120 bp, Artificial Sequence
  ENSG00000287712_4 (sequence is synthesized)
aagacctgccctggggaggtgcaaaagagcggcaatgctaacgccacctgggctccctggccctgcaggcatcttccttcatgttctctgggggagagactgactgtgggaatcagcctt

SEQ ID NO: 953386 - DNA, 120 bp, Artificial Sequence
  ENSG00000287712_5 (sequence is synthesized)
agttactggagatatctgccgctggagacgggttcagagcctagtttaatatcccgaatttctgatgccaagctgatcatcgtctcagcaccagcaaagacatgctattcccgtccctga

SEQ ID NO: 953387 - DNA, 120 bp, Artificial Sequence
  ENSG00000287712_6 (sequence is synthesized)
cgagcatttccttcttgagaaagtgattttgaggggctgcagatgtacttggaggaaggtttgggccgggacagatgacgtgcccatgtgggagctggacggcccctctctgggtagctc

SEQ ID NO: 953388 - DNA, 120 bp, Artificial Sequence
  ENSG00000287712_7 (sequence is synthesized)
cctgggaactcccatgtccgcctcccgctgcctcctgatccaaggtggatgcacttcatttgaggcctggtctttcgtccttccctctcctcttcggggaccactttgtctagtgctaga

SEQ ID NO: 953389 - DNA, 120 bp, Artificial Sequence
  ENSG00000287712_8 (sequence is synthesized)
ctcattgtgcttcccccttggggcttccttcagccctcagccgattcaagacttcaaaaggaagttggacatggagaggaaaaaagaaatgaaaccaggaaggaaccgccaagaagcaca

SEQ ID NO: 953390 - DNA, 120 bp, Artificial Sequence
  ENSG00000287712_9 (sequence is synthesized)
caacgcgtttatgctgccttaaccacacgcttgactctaaatgggtttaaaaattcttacttgtgttagcccaagaaagtttctgcagccgtctttttggtttaaacaatcaaatactca

SEQ ID NO: 953391 - DNA, 120 bp, Artificial Sequence
  ENSG00000287715_0 (sequence is synthesized)
agtcacgacgtgggcatcggcctgggatcagccaaggctcttcagctcatcccaatggccactctctccagcatcggggagcccccatatctccctgcacggatcctccaagaaggaggg

SEQ ID NO: 953392 - DNA, 120 bp, Artificial Sequence
  ENSG00000287715_1 (sequence is synthesized)
aaacagcaagactgctggctgccccggcagtgctagcttctagcagagatgaaggaatgttgaggtagctgacactgcaacatctggcttcgctttccattttcatcactatttcttaca

SEQ ID NO: 953393 - DNA, 120 bp, Artificial Sequence
  ENSG00000287715_2 (sequence is synthesized)
tcatgcgacaatatgagatttcctaaagcctccatttttctcatctttataacgagggaggagaatcaagatgactttgtcaagtcctcccatctccaatttcagggagtctaagaatcc

SEQ ID NO: 953394 - DNA, 120 bp, Artificial Sequence
  ENSG00000287715_3 (sequence is synthesized)
atatgcctttattaaaatggtgaaaacttagaaagatggggtcttgggaagcactggagaatttctgaccagcatacattaggtgctcaacaaaagttaacagaaacggaagaaatctgg

SEQ ID NO: 953395 - DNA, 120 bp, Artificial Sequence
  ENSG00000287715_4 (sequence is synthesized)
aaccaacaagagacttaccacatctacagagaggctgggggaggggtgcagatcaggagatgggagagtgagggagaaacagaagctgggagagataggagaccaaaggaagggggaagg

SEQ ID NO: 953396 - DNA, 120 bp, Artificial Sequence
  ENSG00000287715_5 (sequence is synthesized)
gtggcggcatgcggggaggctgctagtgctgtaggcggcagagggatattaatagtacctggggcccttccagtctcttatcagtcttttcaagcttcctcttccttagactgatgtcac

SEQ ID NO: 953397 - DNA, 120 bp, Artificial Sequence
  ENSG00000287715_6 (sequence is synthesized)
accctcccttctcacacttgggaaatcacagaggaaacagttgtccttcatctagtgaaagatagggaatgggaagcaaagacattcactttccccttttcaaatccctccgagatcatc

SEQ ID NO: 953398 - DNA, 120 bp, Artificial Sequence
  ENSG00000287715_7 (sequence is synthesized)
ctacaaatccctcagccttcatgaaggagacacctccttcctcatgcaagaaatttcctagaattcccagggctgagtcagctccacacaagtggatacccaacattgctgtttttatcc

SEQ ID NO: 953399 - DNA, 120 bp, Artificial Sequence
  ENSG00000287715_8 (sequence is synthesized)
tgaccccagtctagcagaagctctccaagggtcatttttttttaaagcttttggacatcatgggccccttcgagaatctaaggaaggttataagccccccacataacacaacaatcaaaa

SEQ ID NO: 953400 - DNA, 120 bp, Artificial Sequence
  ENSG00000287715_9 (sequence is synthesized)
acttgcttatacttttcatacagttcacacctaaaaccattagctgcatggaatccagctcaagaatccttgtaatatgggcttattgacctactagctgtgtgactggggcaagttatt

SEQ ID NO: 953401 - DNA, 120 bp, Artificial Sequence
  ENSG00000287715_10 (sequence is synthesized)
taaagtttctgtgcttcagtttccttgtcgatggtagtacccactccatgaagttgttatgaggattaaatgaggtgatatggataaagccccttacaactgtgtctagccaatggtgcg

SEQ ID NO: 953402 - DNA, 120 bp, Artificial Sequence
  ENSG00000287715_11 (sequence is synthesized)
tattcaataaacatcagctgttactattactacatttctctgtggtaattcatagtgacatttgggaatgttcccacccttctatgtaaaaaacacaacccaagacagccaaataaaaga

SEQ ID NO: 953403 - DNA, 120 bp, Artificial Sequence
  ENSG00000287715_12 (sequence is synthesized)
gatctaattcagagaggaaaaaaatggctggtggtaataggactagagaggtctctcagtgtcaattccacaagatgggattcctttttccttatccccatgaagtggaaaaggagcatg

SEQ ID NO: 953404 - DNA, 120 bp, Artificial Sequence
  ENSG00000287715_13 (sequence is synthesized)
cttgtatatattatctcatgtatcccatataataacctgtaagggaagcatcattatcctcactttacatattaagaaactgacattaaactcctatctctcaccagacacaaaaatcaa

SEQ ID NO: 953405 - DNA, 120 bp, Artificial Sequence
  ENSG00000287715_14 (sequence is synthesized)
ctcaagatggattaaagacttacatataagacccaaaactattattaaattattagaagaaaatctagtattgcaggaaaaatctactatctagtataaggaaaagtctcctggacattg

SEQ ID NO: 953406 - DNA, 120 bp, Artificial Sequence
  ENSG00000287715_15 (sequence is synthesized)
gactaggcaaagaatttatgactaagatctcagaagcacaggcaacaaaaacaaaaataaacaactgggacttaactaaactaaaaagctctgcacaacaaaagaaataagcaacagaat

SEQ ID NO: 953407 - DNA, 120 bp, Artificial Sequence
  ENSG00000287715_16 (sequence is synthesized)
gaacaacccgcagaactggagaaaatatttgtaaactattcatctgacaggggagatatccaaaatatacaaagaactcgagcaagaaaaaaaaaaaccccacaaataatcccactaaaa

SEQ ID NO: 953408 - DNA, 120 bp, Artificial Sequence
  ENSG00000287715_17 (sequence is synthesized)
atcccactaaaatgtgggcaaatgacatgaatagacatttttcaaaagaagacatttttcaaaagacatttttcaaatggccaacagatatatgaaaaaatgctcaacatcactaatcat

SEQ ID NO: 953409 - DNA, 120 bp, Artificial Sequence
  ENSG00000287715_18 (sequence is synthesized)
aataaaaaccatgacgcgatatcatcgtaccccagtcagaatggctattattaaaaagataaaaaaaaaaacagatgttggcaagaatgtggagcacagagaactcttagacattgctgg

SEQ ID NO: 953410 - DNA, 120 bp, Artificial Sequence
  ENSG00000287715_19 (sequence is synthesized)
tgggaatgtgaactagtacaacttctatggaaaacagtatgcagatttttcaaaaaactaaaagtagaactgccattcgacccagcaatcccactactgggtatttactcaaaggggaag

SEQ ID NO: 953411 - DNA, 88 bp, Artificial Sequence
  ENSG00000287715_20 (sequence is synthesized)
cccagcaatcccactactgggtatttactcaaaggggaagaaatcagtacattaaaaagacacctgcactagtatgtttatcacagcc

SEQ ID NO: 953412 - DNA, 120 bp, Artificial Sequence
  ENSG00000287715_21 (sequence is synthesized)
tatatatacacaatggaatactatttggccataaaaaggaatgaaattatgtcttttgcagcaatgtggatggaactggagatcattattttaagtaaaacaatcgaggcacagaaaatc

SEQ ID NO: 953413 - DNA, 120 bp, Artificial Sequence
  ENSG00000287715_22 (sequence is synthesized)
aaatattgcatgttctcactcataatgtgagtgctaaaagatgtgtacacatggatgtggagagtgaaatggtaaacagtgaaaacttggaaggaagagggaatgggagaggagtggatg

SEQ ID NO: 953414 - DNA, 120 bp, Artificial Sequence
  ENSG00000287715_23 (sequence is synthesized)
atgagaaattagtcaatgggtacaatgcatgttatgcttgtggtggataccctaaaagccctggcttgaccaacatgcaacctattcatgtaacaaaactgcacatgtaccacatcaatc

SEQ ID NO: 953415 - DNA, 120 bp, Artificial Sequence
  ENSG00000287714_0 (sequence is synthesized)
caattcattatcataattagaggtgattaacaataatatataatattactaactattcaatcacatgtgcatgtgtgtgtgtatgttttggaaacactataggttaaaacatagttgatt

SEQ ID NO: 953416 - DNA, 120 bp, Artificial Sequence
  ENSG00000287714_1 (sequence is synthesized)
gttttaattcttgtagttattattattttattgaggctcacatcatctcatctttgcctagaaaaaggcttccctagctggctccaaagtgttttagacatagccccaaaagtcactgct

SEQ ID NO: 953417 - DNA, 120 bp, Artificial Sequence
  ENSG00000287714_2 (sequence is synthesized)
agctctcttgcccttcagtatgataaattattccaggttcatgttacacaattcctgccccagatctgtgatcagttctcgcccaaagatcccaggttccttttagtgctcacagtctga

SEQ ID NO: 953418 - DNA, 120 bp, Artificial Sequence
  ENSG00000287714_3 (sequence is synthesized)
gcactagattttgaacctagtaaatgaacccagagatactcattttacctaccttgtcattattgctaagtcttttcagtcaatagagccagggaatttatatttttacattaaaataca

SEQ ID NO: 953419 - DNA, 120 bp, Artificial Sequence
  ENSG00000287714_4 (sequence is synthesized)
tcacaatttcaattaataattacaatataatttaaagactagaaggtttctttttggctctgtttttgttttctgagacaagttctggccatcacctaggctagagtgcagtggcccaat

SEQ ID NO: 953420 - DNA, 120 bp, Artificial Sequence
  ENSG00000287714_5 (sequence is synthesized)
tacagctcactgcaaccttgaaatcctgggctcaagcgatctttctgccttggccttctgagtagctggaactacaggcatgcactaccatgcccagccatttaaaaaaaaaatctcttt

SEQ ID NO: 953421 - DNA, 78 bp, Artificial Sequence
  ENSG00000287714_6 (sequence is synthesized)
tgcactaccatgcccagccatttaaaaaaaaaatctcttttgtagaaatggggtcttgctgtgttgcctaggctagtc

SEQ ID NO: 953422 - DNA, 120 bp, Artificial Sequence
  ENSG00000287714_7 (sequence is synthesized)
aagactacaaggtttttacttaaacgttttttctcttaaatctaaattacctttcttccataccaaaaatcctagttcctgataccaacataatttcacttgctttatcccataatgcac

SEQ ID NO: 953423 - DNA, 120 bp, Artificial Sequence
  ENSG00000287714_8 (sequence is synthesized)
agaagaacgagagagagagacagagagagagaaagagagagagagaaaagagaaagagagggagggagggaagaaaggaaggaaagaaggaaagcaggaaggcaggcaggcagatgtaaa

SEQ ID NO: 953424 - DNA, 120 bp, Artificial Sequence
  ENSG00000287714_9 (sequence is synthesized)
cagtaacaacactatcatcaataataattttaaaaaacaatgtaaaattgtttcacaattctttttcttaggagatatctacatactgtatcatttgaaatcattcctctctgtccttga

SEQ ID NO: 953425 - DNA, 68 bp, Artificial Sequence
  ENSG00000287714_10 (sequence is synthesized)
acatactgtatcatttgaaatcattcctctctgtccttgaggaatcatcatactgtcttccacaatgg

SEQ ID NO: 953426 - DNA, 120 bp, Artificial Sequence
  ENSG00000287714_11 (sequence is synthesized)
gatttacaagagaaaaacaaacaaccccatcaaaaagcaggcgaaggatatgaacagacacatctcaaaggaggacatttatgtggccaataaacctatgaaaaaaagctcatcatcact

SEQ ID NO: 953427 - DNA, 63 bp, Artificial Sequence
  ENSG00000287714_12 (sequence is synthesized)
ggccaataaacctagataccatttcacgccagttataatggtgatcattaaaaaatcaggaaa

SEQ ID NO: 953428 - DNA, 120 bp, Artificial Sequence
  ENSG00000287714_13 (sequence is synthesized)
gcttttacactgttggtgggagtgtgcattagttcttccttgattcttaaaggaaccatgcttaatctccaggtctacttgtttacagctgaagtgagcccccaagcagttatagattaa

SEQ ID NO: 953429 - DNA, 120 bp, Artificial Sequence
  ENSG00000287714_14 (sequence is synthesized)
attagtttgcatcaggtaaattggtttccaccaaactgaatgaaggcacagaagctggttgggattcttctgttaaacattgtctagtctcggaaagcaaaaaataataataatgaaagg

SEQ ID NO: 953430 - DNA, 120 bp, Artificial Sequence
  ENSG00000287714_15 (sequence is synthesized)
aggcactaacaaggaaatgaagtaagtttaatgcctaaaaatagccatgcttagtaaatactcatttctcatcctcagtgagtccctttgtaaactgcagttaaaaatgaaggcttaaga

SEQ ID NO: 953431 - DNA, 120 bp, Artificial Sequence
  ENSG00000287717_0 (sequence is synthesized)
agtgcggaatggaggcggcggaggaaggctgtgaggggcgcccagccgtgtgccttggcctttcctccccacgccccgcttgcctcccagcttttccctgggagtcgcaacgccattcgt

SEQ ID NO: 953432 - DNA, 120 bp, Artificial Sequence
  ENSG00000287717_1 (sequence is synthesized)
cccccctctcctccccgcgctgccagactcactcggagccaccaacgacctgggaggtgatggcaagcagcgggttggaagcctcgctggcagctccagacttagggatccgagctgctt

SEQ ID NO: 953433 - DNA, 120 bp, Artificial Sequence
  ENSG00000287717_2 (sequence is synthesized)
tgggaagaatggagagctgagggcatgagggtcgtccacctcctggctgaaagggggcgtcttatctttccccccagcacaggtgttggttaggctggggatatccacgctggattggat

SEQ ID NO: 953434 - DNA, 120 bp, Artificial Sequence
  ENSG00000287717_3 (sequence is synthesized)
ggtcccggggctcccgtgtgagctcagaagggatcttttatctcgggaaaacgtgtcccattcggagctggggatgccctctaggctgggtcctgcttcttcaagacccagagcagccct

SEQ ID NO: 953435 - DNA, 120 bp, Artificial Sequence
  ENSG00000287717_4 (sequence is synthesized)
gcggccctcctacccgccatgtgcccgaggctgttcaccggcaaactcgctgggccgactgcgccccagagccgctgtccaaatgctgaatctggcctcccctgggctggctcccgacgt

SEQ ID NO: 953436 - DNA, 120 bp, Artificial Sequence
  ENSG00000287717_5 (sequence is synthesized)
aggccccaggaaactttggggctccaagatgacattggaaagcttcaggatagggggcgatcggtcgaagggagacagaagccaagagagcaggcagagcagcgcgcctggcacgccgaa

SEQ ID NO: 953437 - DNA, 120 bp, Artificial Sequence
  ENSG00000287717_6 (sequence is synthesized)
ccacgcgcccttgatgactcgccccgggtcccctccgcccgcccgtgtgtgtttctcccacttccacagtaggggaggtccctaggctgaacttgtcagcgggtctcaccattcatcacg

SEQ ID NO: 953438 - DNA, 120 bp, Artificial Sequence
  ENSG00000287717_7 (sequence is synthesized)
agccagacagacaggccaagttcatgagcaatactgttaaccccttgcaagccaagcacctctcacaggaggaagcctcctggccagggagcgttctctaaggttccagaggcactgcct

SEQ ID NO: 953439 - DNA, 120 bp, Artificial Sequence
  ENSG00000287717_8 (sequence is synthesized)
cccaggaacgtggcagccaccgctcctttcttcttttcggctcgtctcctaaccatttattccgtcattttatttacacttttggtttccacagtctttcaagttccttctcttctaagt

SEQ ID NO: 953440 - DNA, 120 bp, Artificial Sequence
  ENSG00000287717_9 (sequence is synthesized)
tagtttgataccagtataactgactgccttttaaatgtcttcttttcctacgttgtggctgtgttcattgtggaaacattagaaaattttgaaaaaatgaaataaaataataattggccc

SEQ ID NO: 953441 - DNA, 78 bp, Artificial Sequence
  ENSG00000287719_0 (sequence is synthesized)
ccattttgtctgtggcttctcctgctacatttcttggttccctgaccaggaagcgaggtgattaacagatggtcaagg

SEQ ID NO: 953442 - DNA, 80 bp, Artificial Sequence
  ENSG00000287719_1 (sequence is synthesized)
agggattttgtctgtggcttctcctgctacatttcttggttccctgaccaggaagcgaggtgattaacagatggtcaagg

SEQ ID NO: 953443 - DNA, 120 bp, Artificial Sequence
  ENSG00000287719_2 (sequence is synthesized)
ccagcttgagcaacatggatcctgagagcgctcctgggtaggcaattgccccagtggaacaccttgccagaggagcacgtggcaggcccccatggaggatcaacgcagtggctgaacacc

SEQ ID NO: 953444 - DNA, 65 bp, Artificial Sequence
  ENSG00000287719_3 (sequence is synthesized)
taaaactaatcagagggtggaaagaagaaaaactcatgccagcctaggaaggaccctaccttgtg

SEQ ID NO: 953445 - DNA, 120 bp, Artificial Sequence
  ENSG00000287719_4 (sequence is synthesized)
tgtgctgctaaccaccaagactgctgttcatacagtggaaaaaggatggactcaccacacttaagtcaaagcgccaccccctccagagtcatgggccacagtcccaggggaaaaccctac

SEQ ID NO: 953446 - DNA, 75 bp, Artificial Sequence
  ENSG00000287719_5 (sequence is synthesized)
catcttaatacttgccttgttataccctgtggggacctgccaagtcgaagacagctctctacttcagaaaagtac

SEQ ID NO: 953447 - DNA, 120 bp, Artificial Sequence
  ENSG00000287719_6 (sequence is synthesized)
attaggaccatttaatccagggaaattttgataaagactccagtgtcaaccaggagtcttgttgcccaatgtagagcttttatgccatagttggtccaacattctgtggactgctaaaga

SEQ ID NO: 953448 - DNA, 120 bp, Artificial Sequence
  ENSG00000287719_7 (sequence is synthesized)
gactgctaaagagcaaggatggactgccccaaccagtttctgtaatttcccaaacatacattcattttactagaggatcatagaagttaaaaacttaaaacaaactttggcaattaagac

SEQ ID NO: 953449 - DNA, 77 bp, Artificial Sequence
  ENSG00000287719_8 (sequence is synthesized)
gcctggttggaatggatcaaatatgccatccgcacgttaaacaaaagcagttgttatgcttgtgcacatggcaggcc

SEQ ID NO: 953450 - DNA, 80 bp, Artificial Sequence
  ENSG00000287719_9 (sequence is synthesized)
tctctgctatatcccaaagtcaggcaccctgcgggtcatgacagggaggaaactttgcatttcttggagccctgaaagga

SEQ ID NO: 953451 - DNA, 120 bp, Artificial Sequence
  ENSG00000287719_10 (sequence is synthesized)
tgctatatcccaaagtcaggcaccctgcgggtcatgacagggaggaaactttgcatttcttggagccctgaaaggatgcagtcagcttaaaaattttcaagagcttatcaatcagtcagc

SEQ ID NO: 953452 - DNA, 120 bp, Artificial Sequence
  ENSG00000287719_11 (sequence is synthesized)
accagagggagggaaaataagacattggaaagagagagaagccccttataggtctttcgactatacgtccatttagacgtaattggagtcccacggggaataccagatcaatttaaagct

SEQ ID NO: 953453 - DNA, 77 bp, Artificial Sequence
  ENSG00000287719_12 (sequence is synthesized)
ggtccctggccaaggccagtggtctatctctgaaaacaactagacagtgtttcccaaggctggcccccatgtctaag

SEQ ID NO: 953454 - DNA, 90 bp, Artificial Sequence
  ENSG00000287719_13 (sequence is synthesized)
gtaggtccctggccaaggccagtggtctatctctgaaaacaactagacagtgtttcccaaggctggcccccatgtctaagggccctggca

SEQ ID NO: 953455 - DNA, 120 bp, Artificial Sequence
  ENSG00000287719_14 (sequence is synthesized)
agcccagttgaacataactgtgtagaagtgttggactcagtttattctagcaggccaacctctgaaaccatccttgaacatcagtagactgtgagcagtacgtggatgggagtagctgcg

SEQ ID NO: 953456 - DNA, 120 bp, Artificial Sequence
  ENSG00000287719_15 (sequence is synthesized)
ctgtgagcagtacgtggatgggagtagctgcgccagcccctgcaaagtgactctgaagaagacaacaagctctgctccagtcacgcttggaagctgactggtccacacacggccgaagca

SEQ ID NO: 953457 - DNA, 120 bp, Artificial Sequence
  ENSG00000287719_16 (sequence is synthesized)
tgagaaaactcatcgtgggactcattttccttaaaatttagacttgtacagtaaggactttaactgactttcctaagactgaggactgttcccagtgtatgcatcaagtcacagaggtag

SEQ ID NO: 953458 - DNA, 120 bp, Artificial Sequence
  ENSG00000287719_17 (sequence is synthesized)
gacaaaaagttgctacagtcctattattttatgattattgtaagtgtactgggactctttaaaaaaaaaacttgtttgtataatgctattctatgcaaggtatgtagcccaggaaatgac

SEQ ID NO: 953459 - DNA, 120 bp, Artificial Sequence
  ENSG00000287719_18 (sequence is synthesized)
tctgagcctcccatgaccacagtttttgaaataagattaaggactgaggactagtgggggctcataaatgatacaagtaaagtgttagccaaaacaaaagaaaaaagggtgcccaaacaa

SEQ ID NO: 953460 - DNA, 120 bp, Artificial Sequence
  ENSG00000287719_19 (sequence is synthesized)
ccaaaacaaaagaaaaaagggtgcccaaacaagtcaccttgaagtttgatgcctgtgctgtcattaacagtaataaattacaaatagaatgtggttctcttaattaggaaagaggctata

SEQ ID NO: 953461 - DNA, 120 bp, Artificial Sequence
  ENSG00000287718_0 (sequence is synthesized)
gcccttttttccctgggagtaaattgggtcagagtgttcccagaatttacatttcaattaaaaatacaataataacacattgtgctaatagtgaatgattccgactcaggggaagatgac

SEQ ID NO: 953462 - DNA, 120 bp, Artificial Sequence
  ENSG00000287718_1 (sequence is synthesized)
accgcccgctactttgttaatgaaaagcccccttcattcggacgggccacacatcagcgttattggtgatggcatcggagagctgccacggacccctcccccaggcctttgtgagtggat

SEQ ID NO: 953463 - DNA, 120 bp, Artificial Sequence
  ENSG00000287718_2 (sequence is synthesized)
ttaactttaaaaacatctcccgttagcctctgaggctggaatctgatagaaacttcagcccagggctgcaggaaacctgagtgcctggtcttgctgcttctttgagaaaaagccacttgc

SEQ ID NO: 953464 - DNA, 120 bp, Artificial Sequence
  ENSG00000287718_3 (sequence is synthesized)
ctgcccagtatggtggtggtgaagctaaggccgtcgctcgttttgaaaaggcccctgcctcactggttttcagagttggtctacaaatcccccagataagagaatcctctgtggggcttt

SEQ ID NO: 953465 - DNA, 120 bp, Artificial Sequence
  ENSG00000287718_4 (sequence is synthesized)
cttccgtggaatggccactgactgatgctgaggtgctcactcaattcataatcggagatggcaacaatatcccataagtcaaggttagagaaggcctgggaatgtgtgacccctaaagac

SEQ ID NO: 953466 - DNA, 120 bp, Artificial Sequence
  ENSG00000287718_5 (sequence is synthesized)
aacttcaggatgggcccatggggaagggagttgaagttgggagcacagccaaagggaggagaatgtggtttctggccacttgtgataggtcactccctggtcatctggcctgagggtcag

SEQ ID NO: 953467 - DNA, 120 bp, Artificial Sequence
  ENSG00000287718_6 (sequence is synthesized)
tgtggtccctgtaccagtgtgactcaatgtgatcctctgactgaggaaacagggcgtgtgcccagggccctgctaacaatactcctggacacgttcaagcatcagagtggactacagagg

SEQ ID NO: 953468 - DNA, 120 bp, Artificial Sequence
  ENSG00000287718_7 (sequence is synthesized)
ttgatgaaggggctgcttcagagtggacttggtacttcttcgtcaaccaccctgatggcccaggcagctgagcagtggagacggaggattctcacggtgtccacctcccaggagccactt

SEQ ID NO: 953469 - DNA, 120 bp, Artificial Sequence
  ENSG00000287718_8 (sequence is synthesized)
catttttaccaacgtctcaggcacactgggctgcatctgctacctataccggcagagaaccccagccgtgtgaggtgggctgatgtcctctctcagctattgcactcccatacttcagca

SEQ ID NO: 953470 - DNA, 120 bp, Artificial Sequence
  ENSG00000287718_9 (sequence is synthesized)
gggtggaaaggggggatttccatcctgtgttgagtagatgtccagacatagtgggccagctggggatctgcttgtgctgtttgggcatgtggtggtgtgaataaagggcattgatgagtc

SEQ ID NO: 953471 - DNA, 120 bp, Artificial Sequence
  ENSG00000285719_0 (sequence is synthesized)
agagtgctgtaagcaaaagggagagcaatgtacaaagtttcaaaagtttcaaaccttccaagtgcaaagagatgaggtggagaatgtcattccccaaggaaagtaatcgagtataaatat

SEQ ID NO: 953472 - DNA, 120 bp, Artificial Sequence
  ENSG00000285719_1 (sequence is synthesized)
ttaccgggtgcctattttttttttaaccgaagtgagagcaagaccttaagagtaaggatatgtgtagtctcccggttctggctgcaacttcgcactccgcgcctctggcaaccagaagag

SEQ ID NO: 953473 - DNA, 120 bp, Artificial Sequence
  ENSG00000285719_2 (sequence is synthesized)
accctggcatctccaaagcgctttatctcagtccattggaaccagtcgtgctgaccgattcacacctcggctaacgcacactcgcgggggtgatggccttcccttcccctcccacccccg

SEQ ID NO: 953474 - DNA, 120 bp, Artificial Sequence
  ENSG00000285719_3 (sequence is synthesized)
tcagctcccagtctccctccagtgcctcctcttggcagaacctaacaagaaatcagctgacaagggagtctgggaaccagtgtcctgtgatcaacctggggagaacggaatctttccttc

SEQ ID NO: 953475 - DNA, 120 bp, Artificial Sequence
  ENSG00000285719_4 (sequence is synthesized)
agagaacttggtatatatctccattgtttgagtcttcattaaagtttataattttccctgtaatggttttaattcattcattattgttaagtgataaattcatttaattcattgttagat

SEQ ID NO: 953476 - DNA, 120 bp, Artificial Sequence
  ENSG00000285719_5 (sequence is synthesized)
ttattcctaggtaatttatgtcctctaagactatggcaaatattatcttctttttaattatttttgttgctggtgtatgaaattgcaatttattgttttatattaatcttttattgagct

SEQ ID NO: 953477 - DNA, 120 bp, Artificial Sequence
  ENSG00000285719_6 (sequence is synthesized)
accttattaacttatcttattagattgaagtatttctagattattttgggttttatatgtaaatgatcatatcacaagcaaatagtgataattttatgtttccttcccaatccttctgca

SEQ ID NO: 953478 - DNA, 120 bp, Artificial Sequence
  ENSG00000285719_7 (sequence is synthesized)
actgatttgttttacttaagttaatatactggcaagaacatctaaggatagaaaggagtggtgatcatgcacatcctcacctcattccagattttgaagtgtaagcttctaatgtttcca

SEQ ID NO: 953479 - DNA, 120 bp, Artificial Sequence
  ENSG00000285719_8 (sequence is synthesized)
cacatttgcttaattttttaaatgtgctttttatttatttagttatcatttttaaattattattttatcttagagacaggggcttgctatattgtccaggctggtctcgaactcctggcc

SEQ ID NO: 953480 - DNA, 120 bp, Artificial Sequence
  ENSG00000285719_9 (sequence is synthesized)
tgctggtattataggaatgagttgctgcaactggcctatatgtgctttttatcattttaaggttattctcttctattcctaattgactaaaagatttttttctttaataatgaactaatg

SEQ ID NO: 953481 - DNA, 120 bp, Artificial Sequence
  ENSG00000285719_10 (sequence is synthesized)
atgatttttttcaaatgccttatctatacctattaaaattacatatggtttttctcttttaatatggtagtatggtgaattacatttgtagattttctaacattaaatcaactttgcctt

SEQ ID NO: 953482 - DNA, 120 bp, Artificial Sequence
  ENSG00000285719_11 (sequence is synthesized)
cttgagttaaaccaaactttgtcagtgtattatcttttttatacactgtagaatttaatttactaatacaatcttctatttatgatttttgcttctatagtcataaatgaaacagccctg

SEQ ID NO: 953483 - DNA, 120 bp, Artificial Sequence
  ENSG00000285719_12 (sequence is synthesized)
taatttttccttttcttcttgtcatagtctggttttggtattggggttacagagtccatataaaatgagttggagagtatttccctttttttctattctcaagaaaagttttttatgaga

SEQ ID NO: 953484 - DNA, 120 bp, Artificial Sequence
  ENSG00000285719_13 (sequence is synthesized)
ctgggatgatcacttccttttaagatttgtgggaacttgcctgtaaaatcatttgggcctagtatttaatgtgggattatttaacaatactgcttgcatttttgtaattgttgaattctc

SEQ ID NO: 953485 - DNA, 120 bp, Artificial Sequence
  ENSG00000285719_14 (sequence is synthesized)
agatttaaaaaaatttcttcttgagtacattttgttattttcctaggaaactgagtatttatcaaacctttcaaattgttgttgataaaattcctatttgcttgttaatctgtactttat

SEQ ID NO: 953486 - DNA, 120 bp, Artificial Sequence
  ENSG00000285719_15 (sequence is synthesized)
tctgtactttatctagagtgtgttccctttttaatttgtgctattacttctttgtgaataatttgtcttaatttattacagatacttaaattataaaagttttcaaattacttacatgta

SEQ ID NO: 953487 - DNA, 120 bp, Artificial Sequence
  ENSG00000285719_16 (sequence is synthesized)
cccctggcctgggacctggagcctcatccctgattcgcttccctcgaattccttaatgtccacttctggctctcccagtccctgtgcaagtctcccggttctggctgcaacttcgcactc

SEQ ID NO: 953488 - DNA, 120 bp, Artificial Sequence
  ENSG00000285718_0 (sequence is synthesized)
gaatttatgatttataaaacccatgagtgttaacaaagaagagtattaccttcttaaccactgaattttaggtcatttgttgtgcagcaatccataaatggaacaagtaaatgagcttgt

SEQ ID NO: 953489 - DNA, 120 bp, Artificial Sequence
  ENSG00000285718_1 (sequence is synthesized)
taagtaataaggaaaaacaaaaacaaaatgcagcaagaaagatggatcacaaaaatgtgagataagccaaaggtgaccatttctccaagttgcaaagattgaatcctggattggcgtcca

SEQ ID NO: 953490 - DNA, 120 bp, Artificial Sequence
  ENSG00000285718_2 (sequence is synthesized)
tttccatctctctctggccccgcctcagctggtgccaaacatgttcctgattgcctcggaagaactgcctttgaaatttaacattggcattgggatagacagacaagaagagacaaagaa

SEQ ID NO: 953491 - DNA, 61 bp, Artificial Sequence
  ENSG00000285718_3 (sequence is synthesized)
acattggcattgggatagacagacaagaagagacaaagaaaaaccttcctaagagttcaca

SEQ ID NO: 953492 - DNA, 120 bp, Artificial Sequence
  ENSG00000285718_4 (sequence is synthesized)
atacgtagaacaagttctactgattgagagagagaagcaactgactgtttctttcagtatagacactcttggggacttgtttgtaattgtgtgttgtatctatacaagttagtgtcttct

SEQ ID NO: 953493 - DNA, 120 bp, Artificial Sequence
  ENSG00000285718_5 (sequence is synthesized)
gtgggtaccaaacagtaggatcagcttccctcaatttgggaaatttctatggaatttattgtttgcaggttgatcaagcccaaccaacagagagagcatctcaaccatttcagtttggac

SEQ ID NO: 953494 - DNA, 120 bp, Artificial Sequence
  ENSG00000285718_6 (sequence is synthesized)
gtgtgttttatatagtcatgagaaattagaatttggtaaagtgatattcttttgcaatactgtttggccccgatattgtttggaattctggagtttgctattgaatgggaaagacagatg

SEQ ID NO: 953495 - DNA, 120 bp, Artificial Sequence
  ENSG00000285718_7 (sequence is synthesized)
gagttgcatatatccaggcttttgtgctgctgttctaagcagggttaggcctgcttactatgcgatgttttcctttggtgttgttaggcccctgtgttcttttgagtctggggaggtttg

SEQ ID NO: 953496 - DNA, 120 bp, Artificial Sequence
  ENSG00000285718_8 (sequence is synthesized)
gcctttaaaaatcaaacttgaaactgctttacccaaaattttggttcacagccttaactggattacctattggggcaaacaaagtaaaactggtaagctcgtattgctatctcatggcta

SEQ ID NO: 953497 - DNA, 120 bp, Artificial Sequence
  ENSG00000285718_9 (sequence is synthesized)
gagttccaagctaaaagctattggaactttgtgagtgtgtatacatgtctagatgtgtttatttgtatgtacaaatattgttatatgttgtgcctacaaaactggcttctaagtaaaaga

SEQ ID NO: 953498 - DNA, 120 bp, Artificial Sequence
  ENSG00000285718_10 (sequence is synthesized)
gtgctcataaactaagtaaataagtccaaccaattttcaaagtcatgtgacttaagtaaatctttactaaacaagctggctttaaaattattggtaaaatgaaaatagagaaatgacttc

SEQ ID NO: 953499 - DNA, 120 bp, Artificial Sequence
  ENSG00000285718_11 (sequence is synthesized)
agaattgtcagtatatattttgtctgggttttatatttgtctttcctagatatttgagatgtcagtgcttgtcatagacatttataaggctattgatccagccaaaacaaaatgatcttg

SEQ ID NO: 953500 - DNA, 120 bp, Artificial Sequence
  ENSG00000285718_12 (sequence is synthesized)
gtttgtgtgacttatttgacaaatgagaataatttaatgttgttagctgaattttctgagttactggtcaaaatacctatgtacttaactttgaggcacttacttaggtgagcacctgat

SEQ ID NO: 953501 - DNA, 120 bp, Artificial Sequence
  ENSG00000285712_0 (sequence is synthesized)
gaggcgcagccagcttctgaagtgggaatagagggattgtttccaggattagcagccatggagagggtgggggtgcaggctggataaggggccgttcttgcggattggcagccagtttgg

SEQ ID NO: 953502 - DNA, 120 bp, Artificial Sequence
  ENSG00000285712_1 (sequence is synthesized)
gcagctcggttggaggggttgttctccagtattactggccatggttcgggcagcctggactttatgggggaatgcagggattgtttggagcaatcagcacccataggctgggcaggctcg

SEQ ID NO: 953503 - DNA, 120 bp, Artificial Sequence
  ENSG00000285712_2 (sequence is synthesized)
ccataggctgggcaggctcgattctttattggggggtgtcttgctatgttacccaggctggactcaaattccttggctcaagtgatcctcccacctcctcagcctcccaaagtgctggaa

SEQ ID NO: 953504 - DNA, 120 bp, Artificial Sequence
  ENSG00000285712_3 (sequence is synthesized)
acccagcctgctcagtgacgttgatgttagccagattccatcttatctatggaaaacggaagcacaacaggtgaagttgcctgccaagtcagccagctgatcttgcccttgaacactgtg

SEQ ID NO: 953505 - DNA, 120 bp, Artificial Sequence
  ENSG00000285712_4 (sequence is synthesized)
tgtggaagcacctcggtcccaagaagcctgaagtcggctcatggtgggagtcttagagtgagctgatcacatagcctgctaaacacatttgtggagacttcagggatccagtggtttggg

SEQ ID NO: 953506 - DNA, 120 bp, Artificial Sequence
  ENSG00000285712_5 (sequence is synthesized)
acatgcttggacattccttccaaagtaaaagacaaatgattgcatctcatacttcccaccaacgagaataaagcacgatgcttagtaggctcccttgggtttaaaggtagcaaaccccat

SEQ ID NO: 953507 - DNA, 120 bp, Artificial Sequence
  ENSG00000285712_6 (sequence is synthesized)
gagctatatgaaggctctgggcccagagctggaaagggctctgtagcaagttcaggatgtgggtcagcagccctgctccttccatcataagatccagcagaccttaatgtatacgaggta

SEQ ID NO: 953508 - DNA, 120 bp, Artificial Sequence
  ENSG00000285712_7 (sequence is synthesized)
tctatggtagaaaaagagggcatttggagtttacgacaggttcccatgggagaatcacaatacagacaattagggttctggatcaagaccacaccatctgtaactgataattatacatat

SEQ ID NO: 953509 - DNA, 120 bp, Artificial Sequence
  ENSG00000285712_8 (sequence is synthesized)
accacccaaaaaaccaaacccaaccagaacagctcccagcatgccaccgggccctgatggaggcagagcacccagcaacagacatcaagcgactctgcagccagaactgcccatcctgag

SEQ ID NO: 953510 - DNA, 120 bp, Artificial Sequence
  ENSG00000285712_9 (sequence is synthesized)
ctgggttcggctagaacccaagttataaaatcagtggtgggcccaacagccccattcacagtatgatggtgatggtgcattccattctgggccagagcagggccatgtggcagccaggag

SEQ ID NO: 953511 - DNA, 120 bp, Artificial Sequence
  ENSG00000285712_10 (sequence is synthesized)
ctgcacaagcaggtggcccaggccccatattgtctgcaaaggttgcatcgggcccctgtctcactcagctcagaattggggtagaggtgggagtaaaggggccaaacttgggtcatggct

SEQ ID NO: 953512 - DNA, 120 bp, Artificial Sequence
  ENSG00000285712_11 (sequence is synthesized)
tgataggtggatgtaagccccaaatgctgctgtgctatagcctgccatgggacagccctgaaaaacagtggtgggggaaagtcctcccaataggcagaaattctgacagagcaaccgtca

SEQ ID NO: 953513 - DNA, 120 bp, Artificial Sequence
  ENSG00000285712_12 (sequence is synthesized)
ttcactatgtggaaagaagcggactgaggttagagtaaacatgaaactgatggacagtggctgatggctgggctggtgatcaggggtctagaaggagaaagactgggaggtgtggtgggc

SEQ ID NO: 953514 - DNA, 120 bp, Artificial Sequence
  ENSG00000285711_0 (sequence is synthesized)
ggtcctctgcagccgttctgtcaatgaagctcctctctgccttgctcaccctccacttgtccgtgtacctcattcttgtcgtggaacaagaccctgggacccagtgaatggtgggactga

SEQ ID NO: 953515 - DNA, 120 bp, Artificial Sequence
  ENSG00000285711_1 (sequence is synthesized)
aagagcggtaacacaaacagggctgaaacatgcccaccgctcgccactttgtgggcgacgaggagaaacgaactgctgtggcccttcaggaatcccagacctagagactcctgagccagg

SEQ ID NO: 953516 - DNA, 120 bp, Artificial Sequence
  ENSG00000285711_2 (sequence is synthesized)
gctgtgacaccctctttggggctccgcagtttctggtgtctccaagcttccgggtgccatcgtatttcccagtgcctgcagtggaagccatttgtggtaacgcctggtccagccagtctc

SEQ ID NO: 953517 - DNA, 120 bp, Artificial Sequence
  ENSG00000285711_3 (sequence is synthesized)
tgctggcgcctggagctgcctgcccagtggcagcaagcacgcatggctgtgtgcagtggccagaccccatgcttattaacacaccccttgctactcctcaccaggctcgcccttggcagg

SEQ ID NO: 953518 - DNA, 120 bp, Artificial Sequence
  ENSG00000285711_4 (sequence is synthesized)
tgtgggatccaggtcagtattatgagccaaatacagcctgctggggcgagtgagcagaagaggccagcgggcccgtgtaaaactcaggcaaaggcaccaccagccgcagaggtttccaac

SEQ ID NO: 953519 - DNA, 120 bp, Artificial Sequence
  ENSG00000285711_5 (sequence is synthesized)
tgaaaaagtgacacggtttgatcttcgcagtggcctgtggctaagactgatattaaaggaagaattaaaatcctgaatcaatcatgaactttaaagttaagatgaattcaaggatatcaa

SEQ ID NO: 953520 - DNA, 120 bp, Artificial Sequence
  ENSG00000285711_6 (sequence is synthesized)
acttgactgcataagagagtatcatgtttggagagaagaaataattttattgcgagacacaaagtggtgtctgtcacttaaatccttcaccaatctacctcctgtactcgtggaaaaaaa

SEQ ID NO: 953521 - DNA, 120 bp, Artificial Sequence
  ENSG00000285710_0 (sequence is synthesized)
attgccccccatcatttgcacctatttttgtcaagtccaaacataatttgaagtgaggatgttcatgctgtgcttgctgtccaccatgttcactgccaggcccctcttgccaaagcggcc

SEQ ID NO: 953522 - DNA, 120 bp, Artificial Sequence
  ENSG00000285710_1 (sequence is synthesized)
cgtgcgcccgatccggtgcaggaaggagagttggaggctgagaggactaaggacaggagacagaaatcactgtcatccatagagtgttgctttatgacccatgctaagtgcagtggcgtg

SEQ ID NO: 953523 - DNA, 120 bp, Artificial Sequence
  ENSG00000285710_2 (sequence is synthesized)
tgggctcaagggatcctcccacctcagtcttccgagtagctgagactacaggttgggagggactgtgatcagcgctgacatggaaatggcccgtcaaacaaatgctgctgagagtacgag

SEQ ID NO: 953524 - DNA, 120 bp, Artificial Sequence
  ENSG00000285710_3 (sequence is synthesized)
gtcaaacaaatgctgctgagagtacgagagccaagacccaggcagaagccagaggaggcgtctgaagtgaagggagaagacactgcagatggggagtctgaggagtcccccaccctcgag

SEQ ID NO: 953525 - DNA, 120 bp, Artificial Sequence
  ENSG00000285710_4 (sequence is synthesized)
ttggagcaccagtccagcacggtcccaggggtgccaatgacaatctgctcactgatcttctggcctctttccactgtggagacccagtgctgtatttccaaatgtctgatggctaccggg

SEQ ID NO: 953526 - DNA, 120 bp, Artificial Sequence
  ENSG00000285710_5 (sequence is synthesized)
cagaagagaacacagcaggcctgaccgctctccttaggaaagcctatttgcaaggctggcccttggctgtcacctgcgaacttggactttgggaaggttcccatcattcctagaactgat

SEQ ID NO: 953527 - DNA, 120 bp, Artificial Sequence
  ENSG00000285710_6 (sequence is synthesized)
aagagggggtcagtctgcctcaactctttttaaaaacagttgcatgtaatttatgctaaccacctgcattccttctggaagtctggaattctggtacatgctaggcacagggtgactata

SEQ ID NO: 953528 - DNA, 120 bp, Artificial Sequence
  ENSG00000285710_7 (sequence is synthesized)
tgacagccccccaataaaagcctcaagtagagtctctaacaagcttccctgacaccacttcatatgtgctgttacaatttgctaccggaagaatgaagcacactctgtggactccattgg

SEQ ID NO: 953529 - DNA, 120 bp, Artificial Sequence
  ENSG00000285710_8 (sequence is synthesized)
gagataacttggaagtttgcctggtttcctctggacttagcccatgagcctttttcctccactaattttgctttgtatcttttcactataataaatcatagttgtgagtacaactacata

SEQ ID NO: 953530 - DNA, 120 bp, Artificial Sequence
  ENSG00000285717_0 (sequence is synthesized)
gatcgggacatggtgttagggaaaggagagctatgagaatgtctttgttgctgcatttggattctgagaggacattagagtccattgtgggagtaatgaggttaaggacacctttgtgtt

SEQ ID NO: 953531 - DNA, 120 bp, Artificial Sequence
  ENSG00000285717_1 (sequence is synthesized)
gaaaccctggaagaaggtgctggccggcctgagcaggtggaattcagggaagaagagaacagccattctgggtctttgcaagaaacaagccagaaggcaagatcaggcttgccattcttc

SEQ ID NO: 953532 - DNA, 120 bp, Artificial Sequence
  ENSG00000285717_2 (sequence is synthesized)
tgagaaggaccccagaatctcacctctccagatggcctaaggatcaagagagaaggatcacacactctatctctggagctttaacacgtgggctgccttaactccaagatcttctgagaa

SEQ ID NO: 953533 - DNA, 120 bp, Artificial Sequence
  ENSG00000285717_3 (sequence is synthesized)
agagctcccatcagcacccttggatacagcaactggcaccacactctgaaccgattgagcttctccagcaaagattatgtactggaccctccaatatataaatgatcattgatgtcttgg

SEQ ID NO: 953534 - DNA, 120 bp, Artificial Sequence
  ENSG00000285717_4 (sequence is synthesized)
atatgaaggagattgtccagcagaggtgtacagaagaagaggatccagaacagaaactcagtaccaacaactttaggatggggacgaggaagaggagaagacactggagtctgagaagtg

SEQ ID NO: 953535 - DNA, 120 bp, Artificial Sequence
  ENSG00000285717_5 (sequence is synthesized)
tccacagagctagaaataagtaatcaaagtgtggttcctgcaagccaagggaagagaatgtttcaagggagtaggattggtcaatgtttctgagaagccacagaagacaaagacagtcac

SEQ ID NO: 953536 - DNA, 120 bp, Artificial Sequence
  ENSG00000285717_6 (sequence is synthesized)
ttagtaactgggatggccctggtcatctgatcagagcaatttcagtggaagcatcagggtaggaaccacagaacaggacatggaaggtaacaaggaaaggtagagtgtaagcaatgtcat

SEQ ID NO: 953537 - DNA, 120 bp, Artificial Sequence
  ENSG00000285717_7 (sequence is synthesized)
gtccattactttcaaccgtcacatcaatcctgcaagccaggtattgttttcttccctttgaaaaataggaaaaagagagttgcccaagatgacacagctaagatttaaacacaagtctga

SEQ ID NO: 953538 - DNA, 120 bp, Artificial Sequence
  ENSG00000285717_8 (sequence is synthesized)
gtggcagaaagacaaagtcctttccacacaccactgcctccccaagcacttagccacctgtgtgtctccgctgacaatgttggaaatttctgataacactgcactgagcagtgggatggg

SEQ ID NO: 953539 - DNA, 120 bp, Artificial Sequence
  ENSG00000285717_9 (sequence is synthesized)
gacactatgcagtatgcttgtttgttaacagagaaataaagttacatggaaaactggaaaaaaaaaaacagcagcaactttgctcttctctttgtagcaatgtgtgtgtttgttttcgtg

SEQ ID NO: 953540 - DNA, 120 bp, Artificial Sequence
  ENSG00000285717_10 (sequence is synthesized)
gccctgttcgtggactcctactgaacatctcagaattctttggactcagatacctctttgctgtagtgcaaagatgctgacctgccaaaagtgtgttacaggctgtgcctctttgaagaa

SEQ ID NO: 953541 - DNA, 120 bp, Artificial Sequence
  ENSG00000285717_11 (sequence is synthesized)
ccagcttgaactgattgttcttcagcttctcacataaattagagaacatgaggcccacagctttgcccaaagttgtcaacaggttttaattgtctctgcttttccgtacacacagatggc

SEQ ID NO: 953542 - DNA, 120 bp, Artificial Sequence
  ENSG00000285717_12 (sequence is synthesized)
ttggttaagctgctctgagcagacctctactgtctccactaagaaaaattagacacaacaaatggaaatccatttaaaaagaaaagttataataaggtaaagtcctaagtaactgtggct

SEQ ID NO: 953543 - DNA, 120 bp, Artificial Sequence
  ENSG00000285717_13 (sequence is synthesized)
attttttatgaaggtaaatgctatgaatagtagccatgacagtgcagagatagaggcaaattaagaaaaactgtaacgaaaatgtgaacttttgaaggcaggtgcagaaactatcaagaa

SEQ ID NO: 953544 - DNA, 120 bp, Artificial Sequence
  ENSG00000285717_14 (sequence is synthesized)
aagtagatagaagtatttggaaaggaaaggaggttctttttttactgatggcatctataataggccttgaatttcaagtttatttttccaggttcactcagagaagctagaaatgattca

SEQ ID NO: 953545 - DNA, 120 bp, Artificial Sequence
  ENSG00000285717_15 (sequence is synthesized)
acaattatgcttacaggaatctgtccttcagaaataatacaagtgtgtagagttattttaaaagattatattacaacactgtttatagtagcaaaaaattggaagcaaactattagattg

SEQ ID NO: 953546 - DNA, 120 bp, Artificial Sequence
  ENSG00000285717_16 (sequence is synthesized)
gtgcaaaagtaattgctgttttttgctattgacagtaatggcaaaaccgcaattacttttgcatcaacctaataattagttaaatgtagtttacataacaaaacattgtacacctaaagt

SEQ ID NO: 953547 - DNA, 120 bp, Artificial Sequence
  ENSG00000285717_17 (sequence is synthesized)
taataatatgagcttaagttcgtagaaggtcaaagggtataagcatcttgcatgttaaaaggcattgctacattgcactgtgtaaaggttgtaccaaattacatttccaccaacagtata

SEQ ID NO: 953548 - DNA, 120 bp, Artificial Sequence
  ENSG00000285717_18 (sequence is synthesized)
tgaaagaacctatgtctgtacattctaaccaatgcagcatgtattactaatgttacaggttaaaaataggtaagtaaattatgcatcattatcattctaattactatttcctttattata

SEQ ID NO: 953549 - DNA, 120 bp, Artificial Sequence
  ENSG00000285717_19 (sequence is synthesized)
aatacagttgaacaccattttgtttcatttgagaacaatcatttatattttctttactataagttaccccttcagggacatttgcagtggctcacgtctgtaattctaacactttgggag

SEQ ID NO: 953550 - DNA, 120 bp, Artificial Sequence
  ENSG00000285716_0 (sequence is synthesized)
agagctggccctgcctgggctcatcctctgtgtcctctccatcctcatgacacttgggcttagaccagccgcaccatgtgaatatggcctattgagaatcacctagggagtcttacccac

SEQ ID NO: 953551 - DNA, 120 bp, Artificial Sequence
  ENSG00000285716_1 (sequence is synthesized)
cacactgcacagaaaggaaacagctccagagaggtgattggaggtactggcagggaaggaaccagaacctggaccacactgccttgagctacggcctcacatggatgatgggaagagctg

SEQ ID NO: 953552 - DNA, 120 bp, Artificial Sequence
  ENSG00000285716_2 (sequence is synthesized)
gaaggatgagaaaagatcttaaaagtcatgaccaactcctccaaagagacggacaagaatcccacatggagtgtgttgcagtatgttcaaggagcttttctaaaacctatatttcaaaaa

SEQ ID NO: 953553 - DNA, 120 bp, Artificial Sequence
  ENSG00000285716_3 (sequence is synthesized)
gactaagctcaagcctctgccttttaggctacatcagcacactgaaatgagccccacagatggcctttgtacatgaactcctggcatactggttttttttcagccccagaattcccttga

SEQ ID NO: 953554 - DNA, 120 bp, Artificial Sequence
  ENSG00000285716_4 (sequence is synthesized)
actttggaaaatgctaattgaaatacaaggcatatgttctttagcgtgagccagtgagagaaatctaaggactggacaatgctgtcaagtaaatatgatgcacagtaacagtggcggtgt

SEQ ID NO: 953555 - DNA, 120 bp, Artificial Sequence
  ENSG00000285716_5 (sequence is synthesized)
gtaactagtagcgaatttgaaaaccaaatctgagaacatttggtggcttgattaatttgctttgcccatccgccatctgttgttgtctccaggagcccaggatggggcaccctgcttgat

SEQ ID NO: 953556 - DNA, 120 bp, Artificial Sequence
  ENSG00000285716_6 (sequence is synthesized)
tctgctgacttaggccacctggaagctctccttctatagggagtgggggtggactctgcggaacaaaagtccccggccctgctcctctgatcccactgtgcagctgggaaatcaggtttg

SEQ ID NO: 953557 - DNA, 120 bp, Artificial Sequence
  ENSG00000285716_7 (sequence is synthesized)
tgcagagcaaagtgaggtcacttggtgacaatcagccaattgcttcttttgagctgaactgtagaatgtcacatttgaattgtgctacccgccccaccctttttggctgagttaactcat

SEQ ID NO: 953558 - DNA, 120 bp, Artificial Sequence
  ENSG00000285716_8 (sequence is synthesized)
tcttttcagagcaaagcttttcaccaaatgccttatacaaacttggtgtgtagtgccattgataagtaagctcagctttgctttctgaactaggtcatgaaaatgatgctcatctttgcc

SEQ ID NO: 953559 - DNA, 120 bp, Artificial Sequence
  ENSG00000285716_9 (sequence is synthesized)
cttgtcctgctcccccaacccagacacttaagtgccccattcatttttcaatagaaacatagtgagtgttcacatgtgagctagatactgggaagtcagaagtgagagcttagtccttgg

SEQ ID NO: 953560 - DNA, 120 bp, Artificial Sequence
  ENSG00000285716_10 (sequence is synthesized)
tcctcatggggctcacaggctagtggggaaacttaaataaataaaactacgctgcagatattttgacagagatttacacaggctacttgtagcaaaggtttattgtagcccaccaaacgg

SEQ ID NO: 953561 - DNA, 120 bp, Artificial Sequence
  ENSG00000285716_11 (sequence is synthesized)
attccactcctcttccatattaattgagttgcccagctccacatcacacctccttcccttcccacaaattccctccctgcaacttggtgtggtcatatgaccaagacctccccatcagga

SEQ ID NO: 953562 - DNA, 120 bp, Artificial Sequence
  ENSG00000285716_12 (sequence is synthesized)
atatgagttagaagtgacgtgtgccacttccaggcctgggccttcaaccgtggcacacgtgctctaccactttcttaccctttctggtgagctggaacatgataaggcctgtaagctagc

SEQ ID NO: 953563 - DNA, 120 bp, Artificial Sequence
  ENSG00000285716_13 (sequence is synthesized)
atcaaccatgtgaaagaggatggtgctccaggtgatggggagaaatgagatggaaggagccctcgtgactgcacggagcaaatgggcccctctgccggttctggattgcttcgagaatga

SEQ ID NO: 953564 - DNA, 120 bp, Artificial Sequence
  ENSG00000285715_0 (sequence is synthesized)
ggaggccctgtggacctccggtggggcagagtaccgacccaaagaccctccggccccgcagcctccggctgtccgcagttcctccagttattaccactcagccatcctttgcatgcatgc

SEQ ID NO: 953565 - DNA, 120 bp, Artificial Sequence
  ENSG00000285715_1 (sequence is synthesized)
aaccagtttctatttttgtgtagggcagagcctttcaggcaaatggaagcgccttacccctgccacaaggtaggaccactccatggaaacaaatgagcatttatttcatcaaaggcttcc

SEQ ID NO: 953566 - DNA, 120 bp, Artificial Sequence
  ENSG00000285715_2 (sequence is synthesized)
cggagaccaggcatcttaccaagctcagaggacccttaggagctccttggaggtggtggaggaagctagatgaggagggggagctcagtgccccgcttctggttggaacagagcagaagt

SEQ ID NO: 953567 - DNA, 120 bp, Artificial Sequence
  ENSG00000285715_3 (sequence is synthesized)
cttcagacatgaaaaggaatgaagtactgacatgctacaacgaggaggaactccaaaagcctcacccgaagtgaaagaagccaggcacaaaagggacatggatgaagctggaagccatca

SEQ ID NO: 953568 - DNA, 90 bp, Artificial Sequence
  ENSG00000285715_4 (sequence is synthesized)
aacacatggacacagagaggggaacaacatacaccagggcctgttgggggatgggggtgagaagcgggaagttggaggatgggtcaatag

SEQ ID NO: 953569 - DNA, 120 bp, Artificial Sequence
  ENSG00000285714_0 (sequence is synthesized)
agggtacagcagaactcaaagtgtttgtcaacttggacttccgcctgtccactagcttgccttaagcagattctgaggagctgcactcaagattgatcccctatgttcttttggtctcat

SEQ ID NO: 953570 - DNA, 120 bp, Artificial Sequence
  ENSG00000285714_1 (sequence is synthesized)
attctctagcctttcttgtaacaggcataccaggtcaaatgagggacatctgtccatttgcaaacaagccaacctcatccctgaggtcagtgatgaagtgctgagtaacgaactggaaaa

SEQ ID NO: 953571 - DNA, 120 bp, Artificial Sequence
  ENSG00000285714_2 (sequence is synthesized)
atgtgatttttcctgaacaactgcatacttcctagtatgccttttggtaaactacccacgtttcccacaatatgtacctgatatggagagggaaaaaagcaaaccatggcggtctaagca

SEQ ID NO: 953572 - DNA, 120 bp, Artificial Sequence
  ENSG00000285714_3 (sequence is synthesized)
gcttagatttgataaaaataataagagtggttccttcagttcattttccaaacccttctgccagaacaagctggttcttctgggaagacggaactgcctacggccatatgcacccatctg

SEQ ID NO: 953573 - DNA, 120 bp, Artificial Sequence
  ENSG00000285714_4 (sequence is synthesized)
ttcttctctgcaaaaatgtcttggccttttccacacagagccagtgggtggtgggggtgaccactgcaggtggacaggccagattgcaagagcccccattctagagagggtcctgtccca

SEQ ID NO: 953574 - DNA, 120 bp, Artificial Sequence
  ENSG00000256705_0 (sequence is synthesized)
aggcgtgcactggtgaagcctcaccagctcaggtcagggtgtccacaggtgcctgtggagtaggggcacagatggggaagaagaggactggcaggaagtcgtcgcaggctgttctcacag

SEQ ID NO: 953575 - DNA, 90 bp, Artificial Sequence
  ENSG00000256705_1 (sequence is synthesized)
aagaggactggcaggaagtcgtcgcaggctgttctcacaggccctgtgccacctgtggtcacgtaacttgactctggaaatgagtgttcc

SEQ ID NO: 953576 - DNA, 72 bp, Artificial Sequence
  ENSG00000256705_2 (sequence is synthesized)
ttctggtttctgaagaatgatcaaaccatataattaaaccaatcattttaggtaactgtgtgatcctctaac

SEQ ID NO: 953577 - DNA, 120 bp, Artificial Sequence
  ENSG00000256706_0 (sequence is synthesized)
agctgcttgtcaggccaggaagacagcagccctgatgatcagttcttcctaaagccatccggctcctggggagaggcaggacagccccccagggcagggagagcactcggaggggccagc

SEQ ID NO: 953578 - DNA, 120 bp, Artificial Sequence
  ENSG00000256706_1 (sequence is synthesized)
gtgacgcacggctttgtgaatagcctgtcaagcaccgagctgcaaactttaacatggagaattttacggcatgtgaattacttctccattaaaaaaccttttttttttttttgaaaatca

SEQ ID NO: 953579 - DNA, 120 bp, Artificial Sequence
  ENSG00000246022_0 (sequence is synthesized)
agtttctggctgcggctgcacaccacctgaaggctcagctgggccggatgtccaaaatggccgagtcgcacagtgagcagtggattctgactgtcacctggagcctcagtgggggctctt

SEQ ID NO: 953580 - DNA, 120 bp, Artificial Sequence
  ENSG00000246022_1 (sequence is synthesized)
cactggagcactcacatatggcatctccacatggcttgggattctcacagcctgacagctaaattccaggagggaacattatcaagagatccaggcatcttacaagcccagcctcagaag

SEQ ID NO: 953581 - DNA, 120 bp, Artificial Sequence
  ENSG00000246022_2 (sequence is synthesized)
tcctagaatgttacttccatcacaatccattggttaagcaagtcactaagcagaacctgagaaacacgctcatcaagtccaggaaataaatagagatacaatgattttgatctgcagaag

SEQ ID NO: 953582 - DNA, 120 bp, Artificial Sequence
  ENSG00000246022_3 (sequence is synthesized)
tctcaagagaataaacagaaaaattcctaaaattaggccctggaaatgggggatctcctgccttgacagctcatcagtacgtgtgaaaagccaacaagagtggatatgataggaactgca

SEQ ID NO: 953583 - DNA, 120 bp, Artificial Sequence
  ENSG00000246022_4 (sequence is synthesized)
atcacacagcactttggagaatgtgaagattggtgctcacagcagaagttaacacactgatgctgtgatcactgttcagtaggtggaatggtccttagtgatccttgaagagtagctgca

SEQ ID NO: 953584 - DNA, 120 bp, Artificial Sequence
  ENSG00000246022_5 (sequence is synthesized)
actggaagacacagaatggagagggtggatcatgcaaatgaaaagatgggctccaacattcagcggaaggaatttatggttggttcccccgtttttttgttggcggtggtggtttatttt

SEQ ID NO: 953585 - DNA, 120 bp, Artificial Sequence
  ENSG00000246022_6 (sequence is synthesized)
cattccccatgcccggtccttctgatggcactcactgatttggctctagggcacaagtctatgttgcatgcagtcctggtgtaacaatcaattgaggcatttcctgggcgaggagctggg

SEQ ID NO: 953586 - DNA, 120 bp, Artificial Sequence
  ENSG00000246022_7 (sequence is synthesized)
acacgggccaagccaatcagactctggttcccccaggacgctgagtcatagtggagccatgccaagacggaaacagctgacctgctgtgctgctgccatggctccctgaggagtgtccct

SEQ ID NO: 953587 - DNA, 120 bp, Artificial Sequence
  ENSG00000246022_8 (sequence is synthesized)
cagttcctaagaggggactgtctgcacgctggctcttatgggttgattttgcactttttctttgattctgagagctacccacatcctctccaattcttgctccagtcaaccagacacagt

SEQ ID NO: 953588 - DNA, 120 bp, Artificial Sequence
  ENSG00000246022_9 (sequence is synthesized)
tctcatggtgttcacagctgcacatgggaaacacctcattgccttcgcacaacaaacccaagagggagggggttccttccccaattctgcaaatggaaaaactgaggctcagaggggaaa

SEQ ID NO: 953589 - DNA, 120 bp, Artificial Sequence
  ENSG00000246022_10 (sequence is synthesized)
ttgatctctcagtgtcacagccaatgaatgacagagggaaagttgtggtccagggctgagtccgggttccacagtgtgtagatgaatttcttcaaccccttcatcatgtgacaagagcca

SEQ ID NO: 953590 - DNA, 120 bp, Artificial Sequence
  ENSG00000246022_11 (sequence is synthesized)
caaggtctccaggcctcctggacatgacaggtgtttgctcacaaactgaaactttctctgctgggtcacaccctcctcgcccatccctactcttggtgcagggcatgagctggaccctgg

SEQ ID NO: 953591 - DNA, 120 bp, Artificial Sequence
  ENSG00000246022_12 (sequence is synthesized)
aagaccaatgggtattcaactttcagaaagccttggcgaggtctagtgatgaaataattttgtcatttggaatgctgacaaaaaaaatttgaatttttcggccatagtttcatttccata

SEQ ID NO: 953592 - DNA, 120 bp, Artificial Sequence
  ENSG00000246022_13 (sequence is synthesized)
aatcacttcattcttatcctaatccttccccaactgtttgtcaaaattcccatcaaatatttttccacttggaagactgatttttaacactcataccccacccccaccaggccacggtgt

SEQ ID NO: 953593 - DNA, 120 bp, Artificial Sequence
  ENSG00000246022_14 (sequence is synthesized)
ggacatttttcattcctaaagtcaggaggccagagacatttccaagagagatcaaagcacttgctggccacgttggaaaatgagaagggaggataagggtgtgaaggggcatcctgcctc

SEQ ID NO: 953594 - DNA, 120 bp, Artificial Sequence
  ENSG00000246022_15 (sequence is synthesized)
caggagggaccccctccaagtgagttaagagatgtgggccaggagggctgagcagtagcatccactgggaagccctgggctccaggcccagccctgtagctgcctcactggacaagccct

SEQ ID NO: 953595 - DNA, 120 bp, Artificial Sequence
  ENSG00000246022_16 (sequence is synthesized)
tccagctggcctcggaggacatggaccatcttcccgggtttggctgtgtatcccagtagcaccatggagtagccagggcccttggccaggccactaaactacaccgtaccccccttgtca

SEQ ID NO: 953596 - DNA, 120 bp, Artificial Sequence
  ENSG00000246022_17 (sequence is synthesized)
tctgttgcatgcaggcatcagaatttacctttaaagaagtgtttctcaaacttgagtcacttagttttcatggcatatttatacaatatatgtgcgattattaaaagtttcctttaaatc

SEQ ID NO: 953597 - DNA, 120 bp, Artificial Sequence
  ENSG00000246022_18 (sequence is synthesized)
aggtagtccccagtcacaaatcatcgcgtcgccttcgctggtccctttctcttatcgagcctcagttttctcttccataagccgggccagcagtgcccaccccacaggttggcgccagct

SEQ ID NO: 953598 - DNA, 120 bp, Artificial Sequence
  ENSG00000246022_19 (sequence is synthesized)
ccgtaagggccctaccaccgcggccggccagatcctcggcgggccagtcctggcgctgcggtcatttagcctgatgacccctggccaggttcagcctcaattgctccaaagaactccgga

SEQ ID NO: 953599 - DNA, 120 bp, Artificial Sequence
  ENSG00000246022_20 (sequence is synthesized)
cccgtaccccgagcccggcgtcccagcggcgaagttgatgggccccgcaggagcccttgcggtgagaaccgagtcctggagcccctggagcccccggagcccccggagctgcagccgggg

SEQ ID NO: 953600 - DNA, 120 bp, Artificial Sequence
  ENSG00000246022_21 (sequence is synthesized)
cagcctcctttccgccgggagtccagcgctctcgagagcccagaaactcaccgcgcgcaggagttggtgcgggcgtcccgggcaggttagacttctgtgagccgcagccccgaaactgag

SEQ ID NO: 953601 - DNA, 120 bp, Artificial Sequence
  ENSG00000233785_0 (sequence is synthesized)
tttcgcggagccttggcggaaaccctactgggagccggtgtgtcccccagtaacatttgcaaatgaaagaagaggcgacctgatgtctaatgatgacactgctcttatgaccaaaggaat

SEQ ID NO: 953602 - DNA, 120 bp, Artificial Sequence
  ENSG00000233785_1 (sequence is synthesized)
gtgagctcgtatattcttttagaatttcctaaggcactcatgaaaggtggccgggtaccactgtatcaatggcccagttgcccatctcctggcgagagatttccctaagtgacctggaag

SEQ ID NO: 953603 - DNA, 120 bp, Artificial Sequence
  ENSG00000233785_2 (sequence is synthesized)
caggtggcataagcaagagttccattttggtttcattttcagaggaccccaattgcgcagtctgcaagaaataatgtgcctctcaggatggttccaagctgagcccaaatcactgaggga

SEQ ID NO: 953604 - DNA, 120 bp, Artificial Sequence
  ENSG00000233785_3 (sequence is synthesized)
gattcactgcttgctaacatgaactttattcctggataaacaagtcccaaaccgtcttgtccatatgccaccacggtcaggtcaaaacacacattatcagctgggtgcggtggctcacgc

SEQ ID NO: 953605 - DNA, 120 bp, Artificial Sequence
  ENSG00000203900_0 (sequence is synthesized)
acaaacaccagctggaaaaggcagcaacgtggggtctccctccccctcagccaaagtgaactgtgtcagcaggtgtctcccagctgctgagaatgagccaagggaccaagatggccgcct

SEQ ID NO: 953606 - DNA, 120 bp, Artificial Sequence
  ENSG00000203900_1 (sequence is synthesized)
ggctcctgcaagtggagagggtcttgctggggcctgaactggctgaggtcttgcagcaggaaggggacgctggacacttagccccctacagggagcccagagccaggcctgggtgaaggt

SEQ ID NO: 953607 - DNA, 120 bp, Artificial Sequence
  ENSG00000203900_2 (sequence is synthesized)
gggacccagctggacaggtccctgtgagccggcctgggtccttggtgggtgggacatgtctacaaatagctcatcacgtctccaatccagaagtgctgtgtcgtttcaaaaatgagcgga

SEQ ID NO: 953608 - DNA, 120 bp, Artificial Sequence
  ENSG00000203900_3 (sequence is synthesized)
gccaacgcagccaccagccaggcctcggctacctgggcaaggctgccggctcatgaatattcacggctccgatggtgtctctgagcctcctaaccatctggaattaaaccaacgagcttc

SEQ ID NO: 953609 - DNA, 120 bp, Artificial Sequence
  ENSG00000203900_4 (sequence is synthesized)
aattgtgatttcctcggggaagcttcccaggcccctcagcccacggaggccttcccagcaccttgaccgcaccacaaaaccaggcggcggatgggccgaggactgctttgggtctcctgt

SEQ ID NO: 953610 - DNA, 120 bp, Artificial Sequence
  ENSG00000203900_5 (sequence is synthesized)
cacactgacttccagggaagggctgtgtctctagcagctggcgagtcagaggacactcggggcgagccgttcaggactctctgtccgcctgcagcccccgccttccctggtacctccgca

SEQ ID NO: 953611 - DNA, 120 bp, Artificial Sequence
  ENSG00000203900_6 (sequence is synthesized)
gagacccaagaggcgtccagaggggagcccaggcgcacggtccccagggaggggccccgccctcaggcccaggcttccacagggtcaagcggtctcaagccggcggctctccctggtgga

SEQ ID NO: 953612 - DNA, 120 bp, Artificial Sequence
  ENSG00000203900_7 (sequence is synthesized)
ttcctgcagctgcttccatcccgggccctgctgaagctgcctttgctgaaaagatgtagggcacagccgctggggtgatagtgggagacggaaaggttggctgagaggcctgattccttc

SEQ ID NO: 953613 - DNA, 120 bp, Artificial Sequence
  ENSG00000203900_8 (sequence is synthesized)
cacgcatcacaacctgaaaatcgccaaaggtcttccttgttggggaggagtgaatggcagcaccggaagccaaggcccctcaccaccaagaagccagcagctcatccccaccttctggac

SEQ ID NO: 953614 - DNA, 120 bp, Artificial Sequence
  ENSG00000203900_9 (sequence is synthesized)
caaagacacgaagcagagaccaagccgagccaaggtcaggacctggggccacagtcaaggtcggggcctggggtcgcggtcaaggtcggggcctggggtcccggtcaaggtcggggcctg

SEQ ID NO: 953615 - DNA, 120 bp, Artificial Sequence
  ENSG00000203900_10 (sequence is synthesized)
gggtcacggtcaaggtcagagcctggggccacagtggatttcctcctgtggggatgtccttgacgtccacagctcaggcctgagggtctgccaccggctccagcagctgccacaggtgtc

SEQ ID NO: 953616 - DNA, 120 bp, Artificial Sequence
  ENSG00000203900_11 (sequence is synthesized)
ctggctcacagggtgtctctggctcagggccggggctgtctgcaactcccctctcccctgagccctctgagtggggctcctcaagctctcaggggctccgccacacctgggcttcctggg

SEQ ID NO: 953617 - DNA, 120 bp, Artificial Sequence
  ENSG00000203900_12 (sequence is synthesized)
ggctgggtcctgccctgtgacgcctgccaggctctttgtagacagttactgatctcccattggctccggttttgtggctctaagtgcttctggccctccctccacactccctgcctctct

SEQ ID NO: 953618 - DNA, 120 bp, Artificial Sequence
  ENSG00000203900_13 (sequence is synthesized)
gctgagtagttaattcactataagcacgctccagaggaagtctccagcctcttagtgaaactgcagcgatgaatgagaatgatcgggcacccaggtctgcctccaagtctcgcggatggc

SEQ ID NO: 953619 - DNA, 120 bp, Artificial Sequence
  ENSG00000203900_14 (sequence is synthesized)
ccagagaccgtgcagtgggaaggttggcagcaagctgaaggtttgaactctggctgtgcccctgctgccaggggacctcaggcaaatcatctttttctctgggccttggtttcctcagct

SEQ ID NO: 953620 - DNA, 120 bp, Artificial Sequence
  ENSG00000203900_15 (sequence is synthesized)
gtggggacagtgctggccccgagtcactgggccgttgtgaggatggagagggggtcgtgcaggctcctgggtcctcgctgaagccacccaggagttctcctgcactctcaggggagccct

SEQ ID NO: 953621 - DNA, 120 bp, Artificial Sequence
  ENSG00000203900_16 (sequence is synthesized)
tgtgctgacatctgagggtcacggttcagtggcttcagggtccagacaggcccggaggccaggccagatgtggtgcagccaggggagggggcaagccccgggggccgtgggccatcggtt

SEQ ID NO: 953622 - DNA, 120 bp, Artificial Sequence
  ENSG00000203900_17 (sequence is synthesized)
cccactcagggtttagccctaggctccccccagcacccccctcccaatccagaggacactcccagccctgagcagcgagctctgggcaggcatcgggagagggagcgcatctcggctctt

SEQ ID NO: 953623 - DNA, 120 bp, Artificial Sequence
  ENSG00000203900_18 (sequence is synthesized)
tgtgaggaattacgtcccgacaggtcactgacacagaaaagccctttgtcccagccagctggccgcctgctaatgacatccagcctgcaccttccaaggccacctctgcatccagaaagg

SEQ ID NO: 953624 - DNA, 120 bp, Artificial Sequence
  ENSG00000203900_19 (sequence is synthesized)
acagtggcggctccagccggggaggaacaagggccacagcttccctggggtcaggggtggggagggtgggtgaaggctccggacgcttctgcacgttgccccagagctgcggacggacct

SEQ ID NO: 953625 - DNA, 120 bp, Artificial Sequence
  ENSG00000203900_20 (sequence is synthesized)
caggtgaccgtcaagacctgctgcggatccagtgacccctccaaggagagtgccgagtcctgggaattctcttcctcctcctgcacctccaggtcaccttgccctctcccgtgttcccca

SEQ ID NO: 953626 - DNA, 120 bp, Artificial Sequence
  ENSG00000203900_21 (sequence is synthesized)
gccagacccccagtagagaggagacccctgcagttgtggatgtggctttccccagtgtccacgagacccctggagcctggcccctctgggcccgtagaagctcccatgagattctgatgc

SEQ ID NO: 953627 - DNA, 120 bp, Artificial Sequence
  ENSG00000203900_22 (sequence is synthesized)
acagcgagggcctgagccctgggccagctcttgggggcagccctgggctcccatgtaggtttcatcacaccacactgtggccctcacaccctgccctctggctgcccctcctccctaggg

SEQ ID NO: 953628 - DNA, 120 bp, Artificial Sequence
  ENSG00000203900_23 (sequence is synthesized)
catgtaccccgagcccacctcagcctccccgggcatatcagggccccactttctggggtatgtgtgagccacgggacctcgagtcaggagatccaggcctaggcctgattctgccccctc

SEQ ID NO: 953629 - DNA, 120 bp, Artificial Sequence
  ENSG00000203900_24 (sequence is synthesized)
caggttcaggaccctgggcaagtcctcccacccatcttagcccagcctccccacccataaaatttgggttgcttgtcccggctctgaggctttgagagcagggctgtctctaaccgaggg

SEQ ID NO: 953630 - DNA, 120 bp, Artificial Sequence
  ENSG00000203900_25 (sequence is synthesized)
agggtgctgcaaactccagaaggcccccgtcccagggaacagcggggggaactgtcagagaagcgacccctggaccagcaccctgagtgggctttcttctcctccccaccctgctgagac

SEQ ID NO: 953631 - DNA, 120 bp, Artificial Sequence
  ENSG00000203900_26 (sequence is synthesized)
gagggtcttgctggggcctgaactggctgaggtcttgcagcagcttcttgatgccccattccccaaacccgggcccccaatgcccccgccccacccccgggagaagagcccagccgcgcc

SEQ ID NO: 953632 - DNA, 120 bp, Artificial Sequence
  ENSG00000283217_0 (sequence is synthesized)
ggagggaagatctgggatgccttccccagcacccagcatatcatgctttttaaatagagctcaaaaataagcaaaatgaaacaccatgttattatttcatatatattttgatataagcat

SEQ ID NO: 953633 - DNA, 120 bp, Artificial Sequence
  ENSG00000283217_1 (sequence is synthesized)
atatatttaaaagcagtagaacgatatacaacatttagggctgtgcttacctttggagaatggactagggattggacaactgaatttaaaggcaagttaaagttcaatattttgaacaat

SEQ ID NO: 953634 - DNA, 120 bp, Artificial Sequence
  ENSG00000283217_2 (sequence is synthesized)
tttaaatcaagatgagcgagaagacagaactgttaaaaggttttattttacagccaagtgaaggattcagctatgtcccaaaggattaaacaagatggtatgcttaataattcctcgctt

SEQ ID NO: 953635 - DNA, 120 bp, Artificial Sequence
  ENSG00000283217_3 (sequence is synthesized)
ctatgaaactccctgattatgaagtgtactttcattctatagaactactcctgatttcatcaggaaactctgatctgaaactcaatttacagaaatattaaaaatgaattttcgactaaa

SEQ ID NO: 953636 - DNA, 120 bp, Artificial Sequence
  ENSG00000283217_4 (sequence is synthesized)
ctttgctctgatcagttactcagaagaaatctatgtaaagcatgcggaggggaaaacatttgcacaaaaagtgaaggagctcgccaaggtggtcaaacctgtcctgacacccagaggtct

SEQ ID NO: 953637 - DNA, 120 bp, Artificial Sequence
  ENSG00000283217_5 (sequence is synthesized)
gcatgaggggtggccactgaaggaggagttctcaaaggccacaggtgatgaagagcttggatgaataaacttagaagtcccaggaaaatagcaaaaatttcatctcctgaagaaatttga

SEQ ID NO: 953638 - DNA, 120 bp, Artificial Sequence
  ENSG00000283217_6 (sequence is synthesized)
cccgcgcacctcgctccccctcccggccggcgctcgcagtggcgcgcctgctcgctctcccgctaagcgacgagtcttcaacaagttggaggaaggcaggaacgcaggggttaagctcgg

SEQ ID NO: 953639 - DNA, 120 bp, Artificial Sequence
  ENSG00000283217_7 (sequence is synthesized)
ccgcaattaccaagatcgtgaccctcccacacagtacagtaacttatatacttacctggaagaacccgctttgccgccgggcaaacacccgtggggggcggggaggggccggagggagcg

SEQ ID NO: 953640 - DNA, 120 bp, Artificial Sequence
  ENSG00000283217_8 (sequence is synthesized)
ggccggcaggagaggggctgcttccagctggctgcagtgcggacgggaccggcgcgctcccgtggcccccagaccgaggtggtcaaacctgtcctgacacccagaggtctgcatgagggg

SEQ ID NO: 953641 - DNA, 120 bp, Artificial Sequence
  ENSG00000277342_0 (sequence is synthesized)
taaaggagatggacttaatttaatgaaatgtacctcttactgactttgctgcttgatttaaacaatccttctagggatatttctgtcattgcacttaccttgcatagcaaaccttaatgc

SEQ ID NO: 953642 - DNA, 120 bp, Artificial Sequence
  ENSG00000277342_1 (sequence is synthesized)
aattgtgttttgcctttgctacaccatgagctttgcatcccaagtctttaacacaaaagctagcacacagtgggcatgaaatattttatgaaagaatcagtttgtactagaagaaggcac

SEQ ID NO: 953643 - DNA, 120 bp, Artificial Sequence
  ENSG00000277342_2 (sequence is synthesized)
tactaagaaaattaggatgtataggaagtgacagatgttaataaaactacctgtattagtttcaccagcagtaatgagaaaaatgtgaaaaaaacgttttgtaggaataatgtaactgtg

SEQ ID NO: 953644 - DNA, 120 bp, Artificial Sequence
  ENSG00000277342_3 (sequence is synthesized)
aatgtaactgtggtttcttaatacagaataatgcaaataccaactaaaattttttctataaatattttaatatatattttgttctatatagcaggaggttaataaaaatttaccagcatt

SEQ ID NO: 953645 - DNA, 120 bp, Artificial Sequence
  ENSG00000274929_0 (sequence is synthesized)
aagctcccacgtctggtgtggctgggggggcgtcacaggtcccgagggagcgtcctgcctgaagtttctccctcctaacccactcgctgcactgcatatgttgccgatgttttcatttct

SEQ ID NO: 953646 - DNA, 120 bp, Artificial Sequence
  ENSG00000274929_1 (sequence is synthesized)
gtggcctcgacccctaggctcccgtcccataaatctagtaccccaggtcccgggcaccggcccggctcactaactcagtggcagtatatgctttcgacatttggtcctgatgtccaggaa

SEQ ID NO: 953647 - DNA, 120 bp, Artificial Sequence
  ENSG00000274929_2 (sequence is synthesized)
tggaaatagaggttttcagacattgaaaactttccaagtgctccgtcttggcggagaaagaactgagttggaaggctaatttagaatgaactttttgcttttgttctttgcaaaaattac

SEQ ID NO: 953648 - DNA, 120 bp, Artificial Sequence
  ENSG00000274929_3 (sequence is synthesized)
ataaaatgttgcaacagttcgagaccaggactataacaaaacgcatttcatggagctactttgtaccgcgcttggcgacttaccttgtcagagctgaataaaagtggttgagttcacaaa

SEQ ID NO: 953649 - DNA, 120 bp, Artificial Sequence
  ENSG00000231393_0 (sequence is synthesized)
aatagagaagaggcagccaagtgacaaggcatctctgagttacagctactcgcctctgctgtaagacaacccacaaccacgtctccagcacacaaaaacttcagaacatccaagccacag

SEQ ID NO: 953650 - DNA, 120 bp, Artificial Sequence
  ENSG00000231393_1 (sequence is synthesized)
cacagctcgggattcctcctaggccgtgccctgtctgtgtgggcccccactggaggttggactgtccgactcacatcgccaccattcctaaagctcctggagctcaaacccaacgttcct

SEQ ID NO: 953651 - DNA, 120 bp, Artificial Sequence
  ENSG00000231393_2 (sequence is synthesized)
tggctgactccttcccacatctgctcggcttagcagctgaagaccgacactgcccaatcgccttggaagccccctggaccatcacagacgcgcgtgacagtccccagcactgcagagatc

SEQ ID NO: 953652 - DNA, 120 bp, Artificial Sequence
  ENSG00000231393_3 (sequence is synthesized)
tgagatccaataacagtctgcagaggtctactcacaccatagccactgctctgggattcccattccatttaggcctcctgattgccccatgtgtccttacaataaacaacgcttcactta

SEQ ID NO: 953653 - DNA, 120 bp, Artificial Sequence
  ENSG00000231394_0 (sequence is synthesized)
ccaagtcctaaactcattcacaaattagaacacataggtccagcccaggcacagtggctgaagcctggaatcctcccgcttcctgcttcgggagaccaaggcaagaggatctctcgaagt

SEQ ID NO: 953654 - DNA, 120 bp, Artificial Sequence
  ENSG00000231394_1 (sequence is synthesized)
ggcacggagaagctctcgctcatcgctgcctcctaccactccgaacatgctgcagtctcgttgaccacgctgcagtcttggtggccaccaccaactgcagggagcctggccaggtgccgc

SEQ ID NO: 953655 - DNA, 120 bp, Artificial Sequence
  ENSG00000231394_2 (sequence is synthesized)
agaggctggaatggtggaatgcaccctcagtatgcattatatatagaggtttcggcaatgagggcctggactttgtgttctgattggatgggggaaacctctaggctttatcttcatgcc

SEQ ID NO: 953656 - DNA, 120 bp, Artificial Sequence
  ENSG00000231394_3 (sequence is synthesized)
ctgattggttatcctaagagttgctctcatccagtcttctttataagtggtcatctttgtaagttcatgcccactgggagttactgaagttgtgaatgattacatttaaacttatcctgt

SEQ ID NO: 953657 - DNA, 120 bp, Artificial Sequence
  ENSG00000274922_0 (sequence is synthesized)
gttgcttccgcctcccggggcgcaggcgctgggcgcggcggggaagggactcggcactggggaaacccggagtttcagccagggtcccagggcttccttcccgggttcctgccggaaaac

SEQ ID NO: 953658 - DNA, 120 bp, Artificial Sequence
  ENSG00000274922_1 (sequence is synthesized)
ttttctcctccgcccggaagcctcgatggggcagtgagatcgcggggcgaggtgggagtgtgggagggggccgcgggcagagagcgggagtccggctgggtgggagatctcctgagccga

SEQ ID NO: 953659 - DNA, 120 bp, Artificial Sequence
  ENSG00000274922_2 (sequence is synthesized)
agctgggtctcgccccagcgtggcgccaccgacccgcaggcttttcctgctctgcagatggagagacacagggacgctcctcaggtggctgccctgggctgccagcctgtcagtgggagg

SEQ ID NO: 953660 - DNA, 120 bp, Artificial Sequence
  ENSG00000274922_3 (sequence is synthesized)
ggagggtgcagacaagaggcccctgtttccgaaacccctctgtccccaaagctgcgacagcagaagacacttaggcggcctgaggggttggtgaaccacagaggagctcagcttcgcctg

SEQ ID NO: 953661 - DNA, 120 bp, Artificial Sequence
  ENSG00000274922_4 (sequence is synthesized)
gtctccagctcccggtggcggtggcgtgtccttaatgctgctggctttgaactggactgagaactatttaccacacaaacaccaccatttcaatcccggagaatgcctgttttccctagg

SEQ ID NO: 953662 - DNA, 120 bp, Artificial Sequence
  ENSG00000274922_5 (sequence is synthesized)
gtgacctggccggggtaacaaacacttgttctctaattccacggtcagccttgacttaattgaggtacttgatttccaacttcctgtcttgctgccacagataatcactgatgaaaccaa

SEQ ID NO: 953663 - DNA, 120 bp, Artificial Sequence
  ENSG00000274922_6 (sequence is synthesized)
acaggcaacaccttttggtggcctgtggagagcgctgccccgtctgggtcttaggaaggcaattgaatatgaatgttctcccgagtgcttgtggaaaagagatggtgttggccacttttt

SEQ ID NO: 953664 - DNA, 120 bp, Artificial Sequence
  ENSG00000274922_7 (sequence is synthesized)
agacgaagagaaatgagtactagtgaacactaatcatagtgactaaacagtaaacggctcccatttgttgtcggctaaagcactgattcttcattttccatcccagcctgtcctgctctg

SEQ ID NO: 953665 - DNA, 120 bp, Artificial Sequence
  ENSG00000274922_8 (sequence is synthesized)
gcctgccctgtgctcaggaagctggcggtccccctcagtggatcttcacccacagggacaacctgctgcagaccgggtaggagggaggcaggggcctcttcccctctccttcctggcctg

SEQ ID NO: 953666 - DNA, 120 bp, Artificial Sequence
  ENSG00000274922_9 (sequence is synthesized)
gccccacacccaccagtgttggtttcactctgtggctacgattcttcctgggtgccctttccattgcacaactcctctaggctctacgaacagaacttctccccgcccccaagcctctta

SEQ ID NO: 953667 - DNA, 120 bp, Artificial Sequence
  ENSG00000274922_10 (sequence is synthesized)
gggtgagacatgttgtcggtctgccattgttgctggtccctaaatagcagcaccctttgaaggatccttgaaccatgaccacaccgcaacaaagagtccttcatcaaactcgcttccaaa

SEQ ID NO: 953668 - DNA, 120 bp, Artificial Sequence
  ENSG00000274922_11 (sequence is synthesized)
tcccctcccaagaacaccttcagtttcctgcaagaaccctgactgctgaagccggattttgactaagcttctaccttgtaaaccgtgactgtgggattggggtcgaggcgcaatcagagg

SEQ ID NO: 953669 - DNA, 120 bp, Artificial Sequence
  ENSG00000274922_12 (sequence is synthesized)
ctttattcagtagtaaatgtgaattgtttttcattctgttgtgaatactgttggttgacaatgcagcagccatgccctctctatccttgctggttcaggtatccactctgtgtggctaag

SEQ ID NO: 953670 - DNA, 120 bp, Artificial Sequence
  ENSG00000274922_13 (sequence is synthesized)
ggtaaactctgtctcttgagaaaatcttggtaactccatttctctttccaacaattggcttcaaacaagctcaagtcaatgagtcccaacaggaagcctgctgggggttgtctggcaaag

SEQ ID NO: 953671 - DNA, 120 bp, Artificial Sequence
  ENSG00000274922_14 (sequence is synthesized)
gttttctcactcctacaggaacataaagaggaaatgctcctttttccctggtgaatgttgcattccctgtctggatgcaatgcctggtgctccgcagccctttgcacttataagagaagg

SEQ ID NO: 953672 - DNA, 120 bp, Artificial Sequence
  ENSG00000274922_15 (sequence is synthesized)
tggccggaagagcatcttcaccctggggtggccgcctgggaagatgagaagagcaggagtccttggtggcacaaccaggcaattcaccaaaatcctgctgccctcacctggaatttcctg

SEQ ID NO: 953673 - DNA, 120 bp, Artificial Sequence
  ENSG00000274922_16 (sequence is synthesized)
ctatgagagacgtctccgtttaaaccacatgagctggattttctgtttctaacacatgtcagcatcttcacggtaaatctaagaaaaaaaaatcagggctattaaaaaacaaagtccaac

SEQ ID NO: 953674 - DNA, 120 bp, Artificial Sequence
  ENSG00000274922_17 (sequence is synthesized)
tcaccctgtgctatggtctgaaggtgtcctcccaaattcacacgtggaaacctaatcccaaatacctgatacctaatcccaaatattaagaggtgggggccttgggaggtggttaggaat

SEQ ID NO: 953675 - DNA, 120 bp, Artificial Sequence
  ENSG00000274922_18 (sequence is synthesized)
gggattagtgccctttaaaactgaggtttttgggagcctgcttgccctttctgccatatgaagatgcttagaagaggccttctatgaagcagagaacttttctcagatgccagatctgct

SEQ ID NO: 953676 - DNA, 120 bp, Artificial Sequence
  ENSG00000274922_19 (sequence is synthesized)
gggaccttgatcttggatttctcagccttcagaactgtgggaagcaaacttctgtgtgtatgaatagccatctaaaggattttgttacagcagcctgagcagactaagacaccctgtgag

SEQ ID NO: 953677 - DNA, 120 bp, Artificial Sequence
  ENSG00000274922_20 (sequence is synthesized)
tcagttatttttggctgtgtcacgagtgaccgcgagtgcaggagctgaaacggcagtgagtgggttaccatttctcaggaccctgcggaattggtgcgatggtgcttctgctccacctgt

SEQ ID NO: 953678 - DNA, 120 bp, Artificial Sequence
  ENSG00000274922_21 (sequence is synthesized)
tgttggctgggattgtcctgcagctgcattcttctgggggtcagctggggctggaagcttcctgtggtctagtcacacagctggggtctcagctagggtgatagaacactgggggcaggc

SEQ ID NO: 953679 - DNA, 120 bp, Artificial Sequence
  ENSG00000274922_22 (sequence is synthesized)
cggccttgctgtctctctctggcttctcatcattcagtggtctagcctgagttttttacatggcagctcaggagggtcaatgtggacgctatacagcctgtaaggcccgggtttggaagt

SEQ ID NO: 953680 - DNA, 120 bp, Artificial Sequence
  ENSG00000274922_23 (sequence is synthesized)
ccaagaatatgacttctaccatgttctactggtgaatataaattccaaggccagcctagattcaagggataagaacgtagatttcactccttgatgggaggatcccatgtacagacaggg

SEQ ID NO: 953681 - DNA, 120 bp, Artificial Sequence
  ENSG00000274922_24 (sequence is synthesized)
atccttatgagggattatgagaactcctaatccttatgagggattatcatacagagaatttatgggggattatctttggaaataatctaccatagactgaataaatgataatgtaatgtg

SEQ ID NO: 953682 - DNA, 120 bp, Artificial Sequence
  ENSG00000274925_0 (sequence is synthesized)
gactctcgcgagagcgcgcggcgcggtgactcgtcgctgagggactttaagattgtagaggggcgcggagggtcctccccggggcggagggacacagagggattctagggaacctgccgt

SEQ ID NO: 953683 - DNA, 120 bp, Artificial Sequence
  ENSG00000274925_1 (sequence is synthesized)
cgcgagtcccgcttcaggcggagaatctaggcggcggcggggcctccctgaggcggaggagtcggcaccggggcctggctgccggggaaggagagcacgggagcggggactcctgtgtct

SEQ ID NO: 953684 - DNA, 120 bp, Artificial Sequence
  ENSG00000274925_2 (sequence is synthesized)
ggcggagggacacggcgttccggtggagggatctgttccttgtacctggtccagggttgcggtcggggatggagcggttaccccgaccctgcgggaccttcttcctctggcggaggtgca

SEQ ID NO: 953685 - DNA, 120 bp, Artificial Sequence
  ENSG00000274925_3 (sequence is synthesized)
cggcgcggcgtggtgtttttctggcggaagtatctgtgcgtggccccaggcccttcccggcgcggtctcatctggggccacttgttggccctcgcgttggggaggttcatgtggtgcatc

SEQ ID NO: 953686 - DNA, 120 bp, Artificial Sequence
  ENSG00000274925_4 (sequence is synthesized)
ctgatgagaaggggggtcacaggggtctcggggccagggttcagccagccaggccccagcttgctctcttctggtgctgcccctgtccctgaattcatagacccggctttccctctcttg

SEQ ID NO: 953687 - DNA, 120 bp, Artificial Sequence
  ENSG00000274925_5 (sequence is synthesized)
agcacctactatgtgccaggctgcgctttgcgcatgtagcagaggcaacagtgtcacctgggaagctggtttcccccaaaggaactcttgtctgtccgttgttgcagagccagcgcatga

SEQ ID NO: 953688 - DNA, 120 bp, Artificial Sequence
  ENSG00000274925_6 (sequence is synthesized)
gaccaagtgtgagtatcaggcagtgcagccttcattcagtggccatggaattggagaagtgggagggtagctcgcaaatcaagctctcagctcttggaaactgagaagttacaggtaata

SEQ ID NO: 953689 - DNA, 120 bp, Artificial Sequence
  ENSG00000274925_7 (sequence is synthesized)
gggagtgttgacgaaaagtaaaaccgtgcaaaatatttgaagagatttattgtgagccaaatacgagtaaccacagcctgtgatacagccctctcgaggccctgagaacatgtgcccaag

SEQ ID NO: 953690 - DNA, 120 bp, Artificial Sequence
  ENSG00000274925_8 (sequence is synthesized)
gtggtcggggtgcagcttggttttatgttttaggttggcatgagacatcagtcaaatacattaaatacattggtttggtccaggaaggcgggacaacgcaaaggggtgggggtgggggct

SEQ ID NO: 953691 - DNA, 120 bp, Artificial Sequence
  ENSG00000274925_9 (sequence is synthesized)
tccaggctataggtaaatttaaatattttctagttgacaattggttgagtttgtctgaagacctgggattgatagaaaggaagtgttcaggttaagataaaagatagtggagactaaggt

SEQ ID NO: 953692 - DNA, 120 bp, Artificial Sequence
  ENSG00000274925_10 (sequence is synthesized)
tcttttgaagtcttatggtggctgctcttagagataatagatgacaaatgtttcctattcagatcttcaaaaggtgttagacttttagttaatccgtttaggattgggagggcctggaag

SEQ ID NO: 953693 - DNA, 120 bp, Artificial Sequence
  ENSG00000274925_11 (sequence is synthesized)
aaaaacatctagctatgttaatagatgttctttacagatgcacattttaccccacaaaggatagcttttgggggaaaatgctgtcctttatggaagaaattgcaaaatagggcaaggaaa

SEQ ID NO: 953694 - DNA, 120 bp, Artificial Sequence
  ENSG00000274925_12 (sequence is synthesized)
tctgatgagaatttatggtttgtaggtcatgactccccagatcccttagataggaatttgggcaggattaaaaaaatcaagagtttaggctggtcgtggtggctcacgcctataatccca

SEQ ID NO: 953695 - DNA, 64 bp, Artificial Sequence
  ENSG00000274925_13 (sequence is synthesized)
ttagctgggcatggtggcacacgcctgtgattctagctgattgggaggctgaggcatgagactc

SEQ ID NO: 953696 - DNA, 120 bp, Artificial Sequence
  ENSG00000274925_14 (sequence is synthesized)
caaaacagaaaaaaaaaacaaaagaatcagagcttagtcgtcaggtgtccttaatgaaggggctgggcattaagagcaaggcgaggaggcagaaggaaagcttgagcccaggaattggag

SEQ ID NO: 953697 - DNA, 120 bp, Artificial Sequence
  ENSG00000274925_15 (sequence is synthesized)
aattggagaccagcttgggcaacatggtaagaccctgtctctaaaaaaaataaaaattaagaacaagaggaggaatattcatgttttttcttgggaagggaggtagattttcctggaatc

SEQ ID NO: 953698 - DNA, 120 bp, Artificial Sequence
  ENSG00000274925_16 (sequence is synthesized)
aaggagctgcccctttttttgtcctttttttggtctcttcgggtcatcacggtgattgtcaactgtcatggcaaccagtgggaatgtcatttagtactgaagttggattagaatgaagct

SEQ ID NO: 953699 - DNA, 120 bp, Artificial Sequence
  ENSG00000274925_17 (sequence is synthesized)
agaggttcttcagaggtcgagtaagctaagaaggaacctatgaccacagacaacctgttttctaaaaataagcagagttaaatctgagtaggaatttagctatgtcatggaggcattgca

SEQ ID NO: 953700 - DNA, 120 bp, Artificial Sequence
  ENSG00000274925_18 (sequence is synthesized)
ttgggtaacaaaagccaggtaggcgtccagctaagtcccctaggccctgcaacgggtaacagcagtactgactctatgttagagaaaagcttgcttgcttgagtataattattgttttgc

SEQ ID NO: 953701 - DNA, 120 bp, Artificial Sequence
  ENSG00000274925_19 (sequence is synthesized)
ctgagtttgtaaactattcactaaaaacagccacagaaaaaaacaggaccttcttcaacagataaaacacacagacccgcagctttgggaacaggctgatggcccctgcacagtctagtc

SEQ ID NO: 953702 - DNA, 120 bp, Artificial Sequence
  ENSG00000274925_20 (sequence is synthesized)
acaaggcattgaccaagaaagtaatgactaactgcccatctgagactgcgcatgattcacaagaatgtttctttgttttgttttttgagacagtcttggtctgtctcccaggctggagtg

SEQ ID NO: 953703 - DNA, 120 bp, Artificial Sequence
  ENSG00000274925_21 (sequence is synthesized)
acctgcctcggcctcccaaattgctggggttacaagtatgagccaccgctcctggcccacaagaatgttttgatcattatttctcctaattttccttaaaatccctggatctagaggcac

SEQ ID NO: 953704 - DNA, 120 bp, Artificial Sequence
  ENSG00000274925_22 (sequence is synthesized)
attttccttaaaatccctggatctagaggcacaactgagaaaggtggtctttgaatgctagtgcactgccttttgcaggttgctggtttctcgaataaagctaactttgctttcaccaaa

SEQ ID NO: 953705 - DNA, 120 bp, Artificial Sequence
  ENSG00000231646_0 (sequence is synthesized)
aactatctgaagagaggatggagtcatcagatactgggtattctaaatagttactgtgaaaggaaaatatcttgggcctccaaaatcactgagctgaagggaaaattcaagctgggaact

SEQ ID NO: 953706 - DNA, 120 bp, Artificial Sequence
  ENSG00000231646_1 (sequence is synthesized)
gctcaaagaaaatctgcttcccattctattaagtcatccctctgctcactgacatagttgcttattctgatcgcctcatttagaatggtttaccagaaactcaaaagaatgcaaccattt

SEQ ID NO: 953707 - DNA, 120 bp, Artificial Sequence
  ENSG00000231646_2 (sequence is synthesized)
aaccatttgtctgtcacctacctgtgtcctggaagccccctctgtgcttcaagttgtccctgactttctggatggaaccaatgtacttcttccacatattgattgatgtctcatgtctcc

SEQ ID NO: 953708 - DNA, 120 bp, Artificial Sequence
  ENSG00000231646_3 (sequence is synthesized)
aaaccaagctgtgcccctaccaccttgcgcacatgtcctcaggacttcttgaggctgtgtcaggggtgcatcctcaacctcagcaaaatagactttctaaattaactgagacctgtctca

SEQ ID NO: 953709 - DNA, 120 bp, Artificial Sequence
  ENSG00000231646_4 (sequence is synthesized)
ctcaaattttcggagttcacattactgaattttttgtctggttgtttgatcagttactcccactataattgtaaagttttctattctctatgctctattttcattatttctaaatacatt

SEQ ID NO: 953710 - DNA, 120 bp, Artificial Sequence
  ENSG00000231646_5 (sequence is synthesized)
gttatatctattttatgagttgacctgtttgctttatctgttcctctttatctctagtaacactccttgcatttggatacaattgatcatacattagtatgacttcatttggctttttaa

SEQ ID NO: 953711 - DNA, 120 bp, Artificial Sequence
  ENSG00000231646_6 (sequence is synthesized)
tgttttctttttaatcagcataaaattgccctagaaattgccatatccctgggcaacatgatgaaaatcagatgaaaatctttccaacatgagtagctttacaggtaaaggatggagaaa

SEQ ID NO: 953712 - DNA, 120 bp, Artificial Sequence
  ENSG00000231646_7 (sequence is synthesized)
aataactatccccttccttcccaaaagagagagagaaagaaaaggacaagaaaggaactcattttttttgttttgtattgatatggaatggaaaggatcctgagttcttagcctaatgtt

SEQ ID NO: 953713 - DNA, 120 bp, Artificial Sequence
  ENSG00000231646_8 (sequence is synthesized)
aggaatctaaatgagtctttacaaagggcaagtagatccaatggttctggctttttgacctagagccacctccaaggtgtagattccatacattttgaagtgaaaatatctaggatgctg

SEQ ID NO: 953714 - DNA, 120 bp, Artificial Sequence
  ENSG00000231646_9 (sequence is synthesized)
gtgatctagttatattatcatctagggattaagctagggacctattctgggctgtaatatttggtcttcttgaatgacggtaattaagtagacaaatagctagatgctatagatctaact

SEQ ID NO: 953715 - DNA, 120 bp, Artificial Sequence
  ENSG00000231646_10 (sequence is synthesized)
ctgaaggtatgtgaaaagtaatctagaagaaatgaaaacaaacgtctaatatttatattgtgaatattccttgtcttgggagcccagggctttatacaggaacactgagaaatcaagagt

SEQ ID NO: 953716 - DNA, 120 bp, Artificial Sequence
  ENSG00000231646_11 (sequence is synthesized)
agttttattttctcacactcatttttagatcagtatactgtttatttatatgtagaaaatataatgctatagtgggatttgtacctactatttttctatttgttttccacttgatccaac

SEQ ID NO: 953717 - DNA, 120 bp, Artificial Sequence
  ENSG00000231646_12 (sequence is synthesized)
cagtacatgaatcactcctactaagagatcctgaaagaggtcatcaaagccaccagaaactattcctggacagaggaggttttataggtgtggttggtctccttactgacgtgtcaacta

SEQ ID NO: 953718 - DNA, 120 bp, Artificial Sequence
  ENSG00000231646_13 (sequence is synthesized)
ctacagaaacttgaactatctgaagagaggatggagtcatcagatactggatccagtcaaaatatttggatgctttcagaaacatctgcctagctgagatgtggggaaggaacataaagc

SEQ ID NO: 953719 - DNA, 120 bp, Artificial Sequence
  ENSG00000231646_14 (sequence is synthesized)
attttctctcccagtccctgctgaaagggtgagcctgtggtctatatatataggaatgactaaagttaattgttaagaattatttgataggcaaaaataaaagctaatgctttatataga

SEQ ID NO: 953720 - DNA, 120 bp, Artificial Sequence
  ENSG00000231646_15 (sequence is synthesized)
tgcagttaaacctgagcaagaggaatgtgacatatgtgtctttgctctttatttggatctgtgtgtatgctcttggagcagtggcgaagaagctccaggtaaggtatagagttctttatt

SEQ ID NO: 953721 - DNA, 120 bp, Artificial Sequence
  ENSG00000231646_16 (sequence is synthesized)
tttcatcaagctaagatttttaatgaaacaatatccaaaatgcttgctatgaaagattcaagtgatttttgtagttctacattcttgggtaggagaagataaaaaatgcagttattacaa

SEQ ID NO: 953722 - DNA, 120 bp, Artificial Sequence
  ENSG00000231646_17 (sequence is synthesized)
ctatattatgagcctcttctaaccttttctttaaagaggtaggtatttatatttctaataaataaaaacgtttgtatcaaataagtaaaataaacaatgttattttacatatggtctaca

SEQ ID NO: 953723 - DNA, 120 bp, Artificial Sequence
  ENSG00000255548_0 (sequence is synthesized)
aaattagaagcatggcagcacataaaaaatctttgaaattaaaatgcttccctcatttttgaaataaaaacagggacaccgatcaagtcattcccacgccagtgaaagcttcttgtgaca

SEQ ID NO: 953724 - DNA, 120 bp, Artificial Sequence
  ENSG00000255548_1 (sequence is synthesized)
gctctggggaaagtggctgcatggagttctccagggtggctcccagcagtgcctagaatgtagtgtgtacacagacatctctctcagagaaagctgtggggaactctcagtcccttagaa

SEQ ID NO: 953725 - DNA, 120 bp, Artificial Sequence
  ENSG00000255548_2 (sequence is synthesized)
aaacatgtccctatgtatgagctttactgctgttttcaagttttgatttagggcagttgacagaaacaacaacgacagctgaggaaatatttatgaatgatgaggtgacctaataagact

SEQ ID NO: 953726 - DNA, 120 bp, Artificial Sequence
  ENSG00000255548_3 (sequence is synthesized)
acaagaacattttggtttctgaggtcctttaaggcttgtaattctgtggttggagcaagaatcattagacaaccctgagctatcatgtcgaaggtgcctgagaagctgcagcatcccatg

SEQ ID NO: 953727 - DNA, 120 bp, Artificial Sequence
  ENSG00000255545_0 (sequence is synthesized)
gaggcagccatgactggccacttcatgtgctcctggagaagggcttgcaccagccgttttcaggaaagtcaagcagctgttgactcctgagtctgggtgaatttgtgtgaagagcataag

SEQ ID NO: 953728 - DNA, 120 bp, Artificial Sequence
  ENSG00000255545_1 (sequence is synthesized)
gcgctgtttcttaaccaaaacgcttcctcttgcagtgcagatgggatgtgcttctccacaggaggccccacggcttccccacccctcagaggagcgccgtgcgtgcgtctgtgtggagga

SEQ ID NO: 953729 - DNA, 120 bp, Artificial Sequence
  ENSG00000255545_2 (sequence is synthesized)
ttggcagctcctgcagtcggcccttggtcctatttggcgacgcctctgccttccccttaattatacagtcatgagccgccctggaatcacggcagctccggatggatcctggatgccaga

SEQ ID NO: 953730 - DNA, 120 bp, Artificial Sequence
  ENSG00000255545_3 (sequence is synthesized)
atgcagcctcagcacggggctgcaggacaggagtgagcgaggggctgcagagccggcggccgcggtgggcaccatggagggggctgccctgggcagcacgggcatgagtctcaaggccca

SEQ ID NO: 953731 - DNA, 120 bp, Artificial Sequence
  ENSG00000255545_4 (sequence is synthesized)
ggtttgagtaacaggtgttgagagcttacttacttttcctgagacacagtttcctcatctcgagagcacggaaaatcattctaacttcagaggattgttgtgaaagttaaatgagattaa

SEQ ID NO: 953732 - DNA, 120 bp, Artificial Sequence
  ENSG00000255545_5 (sequence is synthesized)
agaggtaaagcccatgacgtgcttagctcgtgcttggctcttggtcaatgccagttagcgctgcattttctcccctctccctccctccttctctctttcttttcttctattctccattcc

SEQ ID NO: 953733 - DNA, 120 bp, Artificial Sequence
  ENSG00000255545_6 (sequence is synthesized)
tgttttctcccccaccccactccccaaagctctgcgttgagaaccagatgctgtctggtgggttagggccagaggaggaaaagctgcccgccgtgggctgcacccataccctcttcattc

SEQ ID NO: 953734 - DNA, 120 bp, Artificial Sequence
  ENSG00000255545_7 (sequence is synthesized)
caatgacatgaggggaggggaaaggacagaggtagactgtcctcccctacctcctcctaatacaaatggaattcctggaactggaaaacaaagaatacccccataaaaataagacagtac

SEQ ID NO: 953735 - DNA, 120 bp, Artificial Sequence
  ENSG00000255545_8 (sequence is synthesized)
ttctggtgcggtgtaataaaggggaaagtaaccctcaatgtcaggaaactccgcacctcccagctcatatttgtgtggaggaaaagttaaatattaatttggactcaactgaatgtggac

SEQ ID NO: 953736 - DNA, 120 bp, Artificial Sequence
  ENSG00000255545_9 (sequence is synthesized)
acaaacaatggtcaccaagtcccggaacaggttgtgtgagcctcttcaggggttcatccagcgctgttttggagaaatctctatttcaatttattcctatacgttagttactgaaaaaca

SEQ ID NO: 953737 - DNA, 120 bp, Artificial Sequence
  ENSG00000255545_10 (sequence is synthesized)
acagacaatcgcaaaagcaagttgcccgttttgtgttccttgagcccaatcatgaagtgccgtcgtgactgggcctcatgacaaacaacttgtaacaagtaacaacagagctcaggtccc

SEQ ID NO: 953738 - DNA, 120 bp, Artificial Sequence
  ENSG00000255545_11 (sequence is synthesized)
agaccgcactgaagctctgtgagacctctcctcatctgtgcatgaacgagtgtctgactctggagcccagcctgctgcttcccagtctggtggtgaatcctccgtagtctgatggaggtt

SEQ ID NO: 953739 - DNA, 120 bp, Artificial Sequence
  ENSG00000255545_12 (sequence is synthesized)
tggcacaatctcggctcactgcagcccctgcctcccaggctcaagcaattcttacgcctcagcctcctgagtagatggaactacagggcatggactggaactcccaatacccctgacatg

SEQ ID NO: 953740 - DNA, 120 bp, Artificial Sequence
  ENSG00000255545_13 (sequence is synthesized)
gactggaactcccaatacccctgacatgggctgagtcaacgtggtcatgaacatgtgacaggaggcagcagaagttgcagagaagagtgaggcacgtttgaaaaaggctgaaaaatgttt

SEQ ID NO: 953741 - DNA, 120 bp, Artificial Sequence
  ENSG00000255545_14 (sequence is synthesized)
ctgtccaggcaagggtgtgtgctgaatgactcaaggattttttggagagaattggagtgtctcaccagaggagaccacgtctgaagggctttgcatccctccttggacatgtctaatacc

SEQ ID NO: 953742 - DNA, 120 bp, Artificial Sequence
  ENSG00000255545_15 (sequence is synthesized)
agagagaagaaagactctgcttcttgcccagggcctggcatggggcggaggcaaagcagtggggtcctcagctatgtcccactgtgagtgcacagcgagtcctgaccttcagagggtgca

SEQ ID NO: 953743 - DNA, 120 bp, Artificial Sequence
  ENSG00000255545_16 (sequence is synthesized)
gcccgaggggccctggcctgtctgaagggtgcgccagccgagtggcctgctctgaccaccaggctcacccatgactacctgggtggctacagccagttcctgacaatgagtacagcactc

SEQ ID NO: 953744 - DNA, 120 bp, Artificial Sequence
  ENSG00000255545_17 (sequence is synthesized)
agttatcggggcccttccacccacacgctgtccacttcctggggtactgctgtgggcatgtgagtgcttgctccccggggcactgctgtgggcatgcgagtgcttgctccccggggcact

SEQ ID NO: 953745 - DNA, 120 bp, Artificial Sequence
  ENSG00000255545_18 (sequence is synthesized)
gctgtccacttcctggggtactgctgtgggcatgcgagtgcttgctccccggggcactgctgtggacatgtgatagcttgctccccagctccactagtgacactggcggcccctcgctgg

SEQ ID NO: 953746 - DNA, 120 bp, Artificial Sequence
  ENSG00000255545_19 (sequence is synthesized)
ggccttccccgcctgctccgctccattaccgctgccgggctcctcacgtctctccttgctgcttcctgcactggggtgaggagagtggggctggtccccttgagaccggagaagctccag

SEQ ID NO: 953747 - DNA, 120 bp, Artificial Sequence
  ENSG00000255545_20 (sequence is synthesized)
gcttttaaggaaaactgccagggacgaagagaagatatcacttccccacgtggttggcttccagattcagaaggaatgtctgtccttgtggattccgtaccagatgaccccagatgctgc

SEQ ID NO: 953748 - DNA, 120 bp, Artificial Sequence
  ENSG00000255545_21 (sequence is synthesized)
ctcagtactaggtccctgtggctctggagcctttgctgggtctgggcagtgtctcttcctctccagttcatccttgggtctcttcacccttgccaggggcaggcttcctggtgagaggtc

SEQ ID NO: 953749 - DNA, 120 bp, Artificial Sequence
  ENSG00000255545_22 (sequence is synthesized)
gacctcctgcatgaaggctctcaagaggccagttcaaagccaagctccgggtctgtgcctgtggggctgctcctcgatcaggagatggtcactcccctcctggtctgtatctgtgggatt

SEQ ID NO: 953750 - DNA, 120 bp, Artificial Sequence
  ENSG00000255545_23 (sequence is synthesized)
ctcctccatcaggagatggtctctcccctcctggtctatacccgtgggattctcctccatcaggagatggtcactccccatcctggtctatacccgtgggattctcctccattagatggt

SEQ ID NO: 953751 - DNA, 120 bp, Artificial Sequence
  ENSG00000255545_24 (sequence is synthesized)
cactcccctcctggtctattcccgtggggctgctcctccatcaggaggtggtcactccccctcctggtctatacccgtggggctgctcctccatcaggagatagtcactccccctcctgg

SEQ ID NO: 953752 - DNA, 120 bp, Artificial Sequence
  ENSG00000255545_25 (sequence is synthesized)
tctatacccgtgggattctcctccatctggagatggtcactcccctcctggtctatacccatgggattctcctccatctggagatggtcactcccctcctggtctatacccatgggattc

SEQ ID NO: 953753 - DNA, 120 bp, Artificial Sequence
  ENSG00000255545_26 (sequence is synthesized)
tcctccatctggagatagtcactcccctcctggtctatacccgtggggttctcctcaatcaggaggtggtcactcccctcctggtctatacccgtgggattctcctccatcaggagatgg

SEQ ID NO: 953754 - DNA, 120 bp, Artificial Sequence
  ENSG00000255545_27 (sequence is synthesized)
tcactctccctcctggtctatacccgtggggctgctcctccatcaggagatggtcactcccctcctggtctatacctgtgggattctcctccctcagaagatggtcactccccctcctgg

SEQ ID NO: 953755 - DNA, 120 bp, Artificial Sequence
  ENSG00000255545_28 (sequence is synthesized)
tctatacccatgggattctcctccctcagaagatggtcactccccctcctggtctatacccgtggggctgctcctccatcaggagatggtcactctccctctcggttgctcagtccaaaa

SEQ ID NO: 953756 - DNA, 120 bp, Artificial Sequence
  ENSG00000255545_29 (sequence is synthesized)
acaacctctctggaaaactgcgtggaatttttttttaaagaattgaaactagaactagcatttgatccagccatctgcctactgggaatacacccaaagaaaaataaatcattatatcag

SEQ ID NO: 953757 - DNA, 120 bp, Artificial Sequence
  ENSG00000255545_30 (sequence is synthesized)
gccccgcccccgccccgagcccgcgccagcgccggcgggacccgagctgctaatgcctccaatcaacagatcagacagcttgtactcacaggccaaggacacgtggaaagaggctcaatt

SEQ ID NO: 953758 - DNA, 120 bp, Artificial Sequence
  ENSG00000255545_31 (sequence is synthesized)
ttctagatgggtggcaacagccatgatcttctgtcctctgggtccccacaagcctggatgaactcaagatctgactcagtggcacagtgaggagacctttgaggcctcagtgaccatcct

SEQ ID NO: 953759 - DNA, 120 bp, Artificial Sequence
  ENSG00000255545_32 (sequence is synthesized)
tggacttcacctctcacggctttcaggcagagaggccctcccatgcccacaacaggctgagcccagccttcctcggggtttgcttccaggcctgacttttactcccctttctaagtgtgc

SEQ ID NO: 953760 - DNA, 120 bp, Artificial Sequence
  ENSG00000255545_33 (sequence is synthesized)
gcgattttactcccgtggcctgtgctagctgcctgcttggccgttgggactgaagggatgctcatccacttggcacactgactgcaagcctggcaccggccttgcctttgttctcccatg

SEQ ID NO: 953761 - DNA, 120 bp, Artificial Sequence
  ENSG00000255545_34 (sequence is synthesized)
agtcctcttgaaggcaacccacttgtggtaggaggcgtagagtccagcagggctcttgccccttttgccctcctgaatcatggaggaagagctcggttcctcgtccatacagtgggaaaa

SEQ ID NO: 953762 - DNA, 120 bp, Artificial Sequence
  ENSG00000255545_35 (sequence is synthesized)
acaaatgagcagttaccttgggcagagtccacagtccagcctgcttggctgcccggggggaggtgccgactgcagaaggcgtgggcccttccaggtgtggactcggcccctgggcagtgc

SEQ ID NO: 953763 - DNA, 120 bp, Artificial Sequence
  ENSG00000255545_36 (sequence is synthesized)
gacctgtggcctccttaccaatgaagaggagtggaaaagatgctctctctgctgctcacggcagcctcagcccacacaggctgctggcatttctgtgctattaaataattaacttggtac

SEQ ID NO: 953764 - DNA, 120 bp, Artificial Sequence
  ENSG00000255545_37 (sequence is synthesized)
gtgacagctgcccaaaagctgacacaaggaacaagcctggaggagtgaggatgggtgctgtgaaggaggttgtgcagctgggcccgcagtcggacctggtgagatcagaggagggggtgc

SEQ ID NO: 953765 - DNA, 120 bp, Artificial Sequence
  ENSG00000255545_38 (sequence is synthesized)
caccagtctgtggacgaagatgagaagctggaatagagcagaaaacaggaggctgccactctccatctttcccaaagtcactccaggagcaagggtgtcatttactgaaatgacagactc

SEQ ID NO: 953766 - DNA, 120 bp, Artificial Sequence
  ENSG00000255545_39 (sequence is synthesized)
tgcaggcctgaggtttgccaaatatgtgtaggcatttaatcaccaccacgatcaagatgtagaatattcccactatcaaaaagtttgctgtgtcccttgatggtcatgccccattccaca

SEQ ID NO: 953767 - DNA, 120 bp, Artificial Sequence
  ENSG00000255545_40 (sequence is synthesized)
gccccagccccagcccctggagattgctgtctgctttatgttccagtggttttatcttttccagactgtatggatgtgaatggaatcagatgtgattccaaggtgttttatcttttccag

SEQ ID NO: 953768 - DNA, 120 bp, Artificial Sequence
  ENSG00000255545_41 (sequence is synthesized)
atgtgaatggaatcagatgtacgaaatcctatggtagggggtcttctgagtctagctccttttgtttagcgtgatgcatttgaaattaatccatgtctcaggcatcaggagttcatttct

SEQ ID NO: 953769 - DNA, 120 bp, Artificial Sequence
  ENSG00000255545_42 (sequence is synthesized)
gagttcatttctttttctgctgagtagtatttcattgtatggatgtactgcaatttgcctatccattcacctgttgatgtacatttgagatttttggcaattatgaataaagctgctata

SEQ ID NO: 953770 - DNA, 120 bp, Artificial Sequence
  ENSG00000255545_43 (sequence is synthesized)
caaatgcctggcagcgtcctcggtgcttcacctgccatagccgacagtggctgacctcccatgcctgttgccttttctttctgttggatcagggatacactgccatgtgtgttaagaaaa

SEQ ID NO: 953771 - DNA, 120 bp, Artificial Sequence
  ENSG00000255545_44 (sequence is synthesized)
gctggccttacctacagggctggccagtcccggtcacgtttctagtaagccattgccttacataagggtaacggcatgggacgctatcttagccaatgtgataaaagtggacatgaggtg

SEQ ID NO: 953772 - DNA, 120 bp, Artificial Sequence
  ENSG00000255545_45 (sequence is synthesized)
agaggcttcagagagaggttttaaaaaagagacaaaagcaggacgttgcctctcttcctcctctccacgtgtcctacccggatgtgaagccaaaacagatgcaggcttagtgcaaccatg

SEQ ID NO: 953773 - DNA, 120 bp, Artificial Sequence
  ENSG00000255545_46 (sequence is synthesized)
gggaacccagcataagcacagattcaacagcagaagagtggcagagggagaaggtgaaaggaacctaggttttcctgtccttgttgagtcattcagttaaaaatccctggaattttcctc

SEQ ID NO: 953774 - DNA, 120 bp, Artificial Sequence
  ENSG00000255545_47 (sequence is synthesized)
tctccggcagtgtgttttgtgggataatgagttgccttattggggttggcttgctagtcgggatgtttcgctcccatcaacatccatacgcttgctctgtgaaccaatgacctgatgagg

SEQ ID NO: 953775 - DNA, 120 bp, Artificial Sequence
  ENSG00000255545_48 (sequence is synthesized)
tagtattagcaccaccatcattatgctgaggatgagatttatggcacagtggttcagtagcttgcccaaggccatgcggctggtaggttctggaggagggctcagggcaccccctgagct

SEQ ID NO: 953776 - DNA, 120 bp, Artificial Sequence
  ENSG00000255545_49 (sequence is synthesized)
acccctgctggccattgcaccaccccataaagctgctggcagtcacttctctgaggggttagcatgtaagaaatgtcctcctgaatgctggccagacaaatggaaatctgccagggttgg

SEQ ID NO: 953777 - DNA, 120 bp, Artificial Sequence
  ENSG00000255545_50 (sequence is synthesized)
gtacccccatgacagcagccagcctgccctcttagtccctgacagctgcagtgacagcatctgtgattgcaaagcgtgacaatttatatctctcatttcatcacaccatctatcagcaga

SEQ ID NO: 953778 - DNA, 120 bp, Artificial Sequence
  ENSG00000255545_51 (sequence is synthesized)
cagtcaggctttaaaaatcaatcccacactgactcagtccccagcagagatggcctctgacaacagtatccacactgcaggctggacaagggccctattaattttgagactcagccaaat

SEQ ID NO: 953779 - DNA, 120 bp, Artificial Sequence
  ENSG00000255545_52 (sequence is synthesized)
ttccttctgaccctaagctggtgaatccctgctcctttgctttggttggggttggtgtgagctaaggctgtgatcccatttgctcctatggcctccaggtggcctgggcctccatgaatg

SEQ ID NO: 953780 - DNA, 120 bp, Artificial Sequence
  ENSG00000255545_53 (sequence is synthesized)
ggccacatggtcatactgaatgcttgattacactcagacctagcagtcgtctgggcgcagctggtttatggatcactttgtcacaatgttccatccttccaggtccccatccccgcggtg

SEQ ID NO: 953781 - DNA, 120 bp, Artificial Sequence
  ENSG00000255545_54 (sequence is synthesized)
ggaaaacattgctttaggcagtgctagaggacttcagcaggcattggcagcttctggattcaggattagaacaaagaaggaggagtcacagcaaagataggaacagaaggcagagagaac

SEQ ID NO: 953782 - DNA, 120 bp, Artificial Sequence
  ENSG00000255545_55 (sequence is synthesized)
gcaagggtgtgtgctgaatgactcaaggattttttggtgcattgaatgaacagcgggacattggacacctgctgatccatcaccccgggcccgggcaggcccgtggatgaagagagatgg

SEQ ID NO: 953783 - DNA, 120 bp, Artificial Sequence
  ENSG00000255545_56 (sequence is synthesized)
agaagaccaggcatgagactgtggagaagccacaccaccagaaacccctgccccatgcgccgtccagcccacacctgtggatgcacgggggattgcaggcagggctcccaccgtggactc

SEQ ID NO: 953784 - DNA, 120 bp, Artificial Sequence
  ENSG00000255545_57 (sequence is synthesized)
aggaacaggcagggaagctgctgcctcaccaggcgaaggggccaggagggggaggcggagaggcccgtctagcccctgcggctgtcaccgtggtgcctcctcactggccagtgcggtcgc

SEQ ID NO: 953785 - DNA, 120 bp, Artificial Sequence
  ENSG00000255545_58 (sequence is synthesized)
gcctcagcttcgttaataggggagggggcctaagagttttcacgtccaggctcgggcagtggggaggcaggcaggagtggccgctggtttttcagacctcccagggaggccgaggaaatg

SEQ ID NO: 953786 - DNA, 120 bp, Artificial Sequence
  ENSG00000255545_59 (sequence is synthesized)
tggctgtgttttttggatgcttgatattttgttttttcttctcttcactctgtcatgaaactggcaatagtagtttgtaaataaatatgtgttatagatgaatatttgctatgagtaaat

SEQ ID NO: 953787 - DNA, 120 bp, Artificial Sequence
  ENSG00000255545_60 (sequence is synthesized)
taataaaggagtgaataaatgagcgattgatgtagggcctgtcctgtctcagggagccccacgaaggcctgcgcgccggccagagcctgcctgcctgccagggtactgggacgtcactct

SEQ ID NO: 953788 - DNA, 120 bp, Artificial Sequence
  ENSG00000255545_61 (sequence is synthesized)
caaagcggcgggacccagccgctgatcttgctgaggaggcccggtctcagaaaactgagcggctgcttctgcagaccctgcatcctcccctccctggagaaagaagctctggctgagtcc

SEQ ID NO: 953789 - DNA, 120 bp, Artificial Sequence
  ENSG00000255545_62 (sequence is synthesized)
tgggaccgaacccttgggtgccacagaaacgggctttgctgcctgtcagtcaagcggcgggagaaacagacctggggaggaggaggctgggagggctgtgttttctgcacagcgagtagc

SEQ ID NO: 953790 - DNA, 120 bp, Artificial Sequence
  ENSG00000255545_63 (sequence is synthesized)
tccttagcctggtgccatttctctccaaacaccctgaaggttgagtccagggtgaagatgtagaggcaagttttggggggatggagtgggcttggagggatgctggcgccttagcaggct

SEQ ID NO: 953791 - DNA, 120 bp, Artificial Sequence
  ENSG00000255545_64 (sequence is synthesized)
gtgctcctgaggtgcccagtgtctgcgggcacaggaacatgttgccgagggcatttgggtgtgggtggggtggggaaagggagacagggctgtctcttttaatgggtatctgcgagcatg

SEQ ID NO: 953792 - DNA, 120 bp, Artificial Sequence
  ENSG00000255545_65 (sequence is synthesized)
tgattgtaagagaggaagaagtaggggaggaagaaggcctccttgggaggtgcgtcatcctgaggaaggctgaacaatgagggtcttggagagtcaattcagaagcacaaccttgcagag

SEQ ID NO: 953793 - DNA, 120 bp, Artificial Sequence
  ENSG00000255545_66 (sequence is synthesized)
caggcaaaaacaatagggcttcttgaggctgcccgggcactcatgcaatcaccatttcctgctgtgaatgagcctacattttgttggggaagagacgcaacgacgccaaacgatggactc

SEQ ID NO: 953794 - DNA, 120 bp, Artificial Sequence
  ENSG00000255545_67 (sequence is synthesized)
tgagtcaacgataagatgaaacaaaattaaaacaaagtaggaaatcaagagtggctgctgtgatggcgttgcggagatgatgtttgctttgagaactggacaagtgagcccctgagctgc

SEQ ID NO: 953795 - DNA, 120 bp, Artificial Sequence
  ENSG00000255545_68 (sequence is synthesized)
atctgcacccagaggctgagccggtgcacaggacttgcagagggatgggcctgggcttgtagagcagcacaacggccccaggcctggaggagcaagggtgggaaggggggcaggccagct

SEQ ID NO: 953796 - DNA, 120 bp, Artificial Sequence
  ENSG00000255545_69 (sequence is synthesized)
cctgccaggctggagaaggactcggacctcaggccacctgtgcctgggtgattgtgaacttgtaacaaatgtgatcttatttatgttttgaaaaaggcaacacaaaccaacacgagccgt

SEQ ID NO: 953797 - DNA, 120 bp, Artificial Sequence
  ENSG00000255542_0 (sequence is synthesized)
gggagcggtatttaagaggagcctctgcccgcccttccacccgcctccgggacgatcttcggatttgcgctgtgctggaccttgttagacgatggaacgcgaccggccacgtgcaaactc

SEQ ID NO: 953798 - DNA, 120 bp, Artificial Sequence
  ENSG00000255542_1 (sequence is synthesized)
tctgagtaggtcccggggatggtgccagaggagccggagtcccagcaggaccgattggtagttaaatgccaggcgctgatatccgaaggcttgagttcttcaccaccttctagctgagta

SEQ ID NO: 953799 - DNA, 120 bp, Artificial Sequence
  ENSG00000255542_2 (sequence is synthesized)
ctgtaaaatgggactatcttctcccacttctctgtgctaagagaactaaatgaaatggagaggatatgtaaaactcctaaagtggcgtctggcacccagtaaaccctccaaaaatattca

SEQ ID NO: 953800 - DNA, 120 bp, Artificial Sequence
  ENSG00000255542_3 (sequence is synthesized)
gtgcattttcagagtccttagaagatagtttattggacaaaatatccaagtatgaacagacagatgagaaaaataacaagaaaaagaggggaaaacacattaataaaatttaaaaaataa

SEQ ID NO: 953801 - DNA, 120 bp, Artificial Sequence
  ENSG00000243018_0 (sequence is synthesized)
acatggcctgtgcctttcagctctgtgagaggctatttctggatgctggctgcatccagatgttggctgccagggatctggggggcagccttgtggcttctggtcgacttgggatctgct

SEQ ID NO: 953802 - DNA, 120 bp, Artificial Sequence
  ENSG00000248790_0 (sequence is synthesized)
cccttccttaaaattgctacaagccactgaagagcatcttccttgttctatgtgtccagcttcagtctcgtcgctggacatttggttccagatctaaagcagcagagggcagtggccgta

SEQ ID NO: 953803 - DNA, 120 bp, Artificial Sequence
  ENSG00000248790_1 (sequence is synthesized)
tgaggatcaaatttgatggtgtttgtgaagagctttgcccagtggctggcagcctgtgatcatggctctgtaaatggaggctgccatcatcataatatcattatgaagcccctgatctca

SEQ ID NO: 953804 - DNA, 120 bp, Artificial Sequence
  ENSG00000261045_0 (sequence is synthesized)
gcctcccgaagcactgggattacagaacagtttgctgatgcttgccctcaaagatggcagatccacagatagaaggagcctggtttgtgagtagcagcatcggaagctcaacatggatgg

SEQ ID NO: 953805 - DNA, 120 bp, Artificial Sequence
  ENSG00000261045_1 (sequence is synthesized)
ctgctgggaatctccacgtgggactcttcataagggagaaatcaacagttagcacagtcatggaagacagtcaaatgggtactcagcaagtaccttcccaagctcccttgcagggatggt

SEQ ID NO: 953806 - DNA, 120 bp, Artificial Sequence
  ENSG00000261045_2 (sequence is synthesized)
acagagggatgcttcaaggagaggggacgatactcgtccaggatctgggattcccaaacatccttctggtcagccagtatatggagccgttgttaagctttggaatcagacttcctagca

SEQ ID NO: 953807 - DNA, 120 bp, Artificial Sequence
  ENSG00000261045_3 (sequence is synthesized)
tgagaacagacgaatacactaactaatggaggaatgacttgattcagaaatgtaaagaaatgggacggcttgcacctcaggagttctagagcagttcctgcctgtggctccaataagaat

SEQ ID NO: 953808 - DNA, 120 bp, Artificial Sequence
  ENSG00000261045_4 (sequence is synthesized)
gtcaaggtcactggattgcattttatgtgttttctttcctaatttgatttttggaatagatgctgtgctatatttacatcgctcgaaaatcaaaataacataaaaagatatttccaaaaa

SEQ ID NO: 953809 - DNA, 120 bp, Artificial Sequence
  ENSG00000247775_0 (sequence is synthesized)
aaccaagagagcgggcagacagattttatgtgagagaaaagttggatgctcacgctccatggagcatcctcgcgtttcccggggaaaagcggatcccggagaagcagcctaatctctcag

SEQ ID NO: 953810 - DNA, 120 bp, Artificial Sequence
  ENSG00000247775_1 (sequence is synthesized)
cccttgtggagaagggaatatcagaagcaggacgaaagccaggtcaagtctctttccttaggctccccaaagggacaagtactcacctcccagagacctggcccagcgggtcctcatggc

SEQ ID NO: 953811 - DNA, 120 bp, Artificial Sequence
  ENSG00000247775_2 (sequence is synthesized)
agcaccaccccctcccggtgcccacgaccattcgtctcccatccggcgttctccaggatttccaaagacgcccgtttagatccacagagctggaagacagctgttcctggatcacaccag

SEQ ID NO: 953812 - DNA, 120 bp, Artificial Sequence
  ENSG00000247775_3 (sequence is synthesized)
gaggaggggggaaacaacaactcgtttttgctttttagaaagaaaaaaacacattaatgagcccaagaaatacacgcaactctgcaactctgtagatttccacctgttcccatcctccac

SEQ ID NO: 953813 - DNA, 120 bp, Artificial Sequence
  ENSG00000247775_4 (sequence is synthesized)
agtctcccatcccaccagcaacacacgtgagatatctgatgccttcccatcaataactctcacttagtatgggtaagcaaaaaatttccaaccagggatggaagttgtggagagatagag

SEQ ID NO: 953814 - DNA, 120 bp, Artificial Sequence
  ENSG00000247775_5 (sequence is synthesized)
tgggaaagctcaaggagcattgatagggatcattaattaaaaatctaccaaacatctctttctctccctaatgtgcgagttacaataacatcactcaaagcagtttgcagccacagcttg

SEQ ID NO: 953815 - DNA, 120 bp, Artificial Sequence
  ENSG00000247775_6 (sequence is synthesized)
ttatatttatagaaagttatgctttgtctgattcttgcgctaatttgggttctgaaatttgagtaaaatcaaatttaaacatacaaaacaactttaaaaccacaaggaacaggaagcaaa

SEQ ID NO: 953816 - DNA, 120 bp, Artificial Sequence
  ENSG00000247775_7 (sequence is synthesized)
tgattatacataaaagacatatagaagataatgcatatgtgttcagtggaaaatagaaaagcatgaaagtaagatcacaaatatttattatttaaactcttccttgaactattggtctgc

SEQ ID NO: 953817 - DNA, 120 bp, Artificial Sequence
  ENSG00000247775_8 (sequence is synthesized)
cctttggaaaagcagactttccttaatgcagtagctcatattaatattttttgtttgcttaggaccagagcaagaaggttggacttgggagctagtttgctgtctggctttgagaccttg

SEQ ID NO: 953818 - DNA, 120 bp, Artificial Sequence
  ENSG00000247775_9 (sequence is synthesized)
aacaagttttgttctccttctgtttccagttttcttttttgtaaattaggagattaactcatgtgatcactctattttcaactttttgttatgggaaatattcaaacatatgcaaaagta

SEQ ID NO: 953819 - DNA, 120 bp, Artificial Sequence
  ENSG00000247775_10 (sequence is synthesized)
gacagaataaaggactctcatgtgaagatcatccaacttttacattttttcaatgcatggctgatcatgtctcatccataagtccactcactttatcactaccaatcctccctctttttt

SEQ ID NO: 953820 - DNA, 120 bp, Artificial Sequence
  ENSG00000247775_11 (sequence is synthesized)
ttttttttttaccaaattcaagctttatatatatcttttcagctgtaaacattcagtatgcatccacaaaatttaaggactgtttaaaaataaccacaatatcattagatgattctttaa

SEQ ID NO: 953821 - DNA, 120 bp, Artificial Sequence
  ENSG00000247775_12 (sequence is synthesized)
aattgcagtgtaatttacacctagggaaatgctcagatgttgtgtccctttaaatcagttttgaaaaagccatgcattagtgtaacccacactattttgaagacacaggacattttcatc

SEQ ID NO: 953822 - DNA, 120 bp, Artificial Sequence
  ENSG00000247775_13 (sequence is synthesized)
gacagttaccttgtaccttcatgtgcatattctagaatgtcataaagatctaatcacgtagtataaactttgttttatatttgtctgacttcttttactcagtataatatttgtgaggtt

SEQ ID NO: 953823 - DNA, 120 bp, Artificial Sequence
  ENSG00000247775_14 (sequence is synthesized)
cgttcatgtcgttgcatgaatgggtgttttgttttttattgctttttgttgtttctttttactactgttaatagtataagttttccattgtgcctctttacaactagtatctcaatagag

SEQ ID NO: 953824 - DNA, 120 bp, Artificial Sequence
  ENSG00000247775_15 (sequence is synthesized)
tattacaacaattatttaatatattatttcacatgacatatttatagtataaccatgacctccttgagacctagtgctttaagtcaaagaggtaaataaaatgagatattttaggtctca

SEQ ID NO: 953825 - DNA, 120 bp, Artificial Sequence
  ENSG00000247775_16 (sequence is synthesized)
ttacaacagaccaatgtgagagaattatttctggacagttgcacttcttataaacgtttaacatgattccaaacttttatttggtaatttgttagtcctttggcaaaggactaatgtact

SEQ ID NO: 953826 - DNA, 120 bp, Artificial Sequence
  ENSG00000247775_17 (sequence is synthesized)
atgttatttagtcataacaagcagatcaattacattttatgtaacttttatagacagagaaactgagctccaagagttttggtgatatgctgagatcacctagctattttaagtggcaga

SEQ ID NO: 953827 - DNA, 120 bp, Artificial Sequence
  ENSG00000247775_18 (sequence is synthesized)
gctgagacaatttagcagaaactgttacagaaggcacaattgtctcctgaattagcagtttgtgtctgaagcctcacagattgggtgtggtaaagagtgagaaggaaaaaggtagaaccc

SEQ ID NO: 953828 - DNA, 120 bp, Artificial Sequence
  ENSG00000247775_19 (sequence is synthesized)
agctgtgttagaaatagccttcaaatttggatgtgacaatggaaatcaagaagaacttatgttattatgaaacagttcattcatatttaaagttttgccttttctatattggtattcctc

SEQ ID NO: 953829 - DNA, 120 bp, Artificial Sequence
  ENSG00000247775_20 (sequence is synthesized)
aatagggggagatgatttcttactacctacaaaaaaagaaaactgtaaactaatttcgttgtcattttgaattacaactatatgtttaactcttgtcactccttaaaatgccttgaacac

SEQ ID NO: 953830 - DNA, 120 bp, Artificial Sequence
  ENSG00000247775_21 (sequence is synthesized)
agtaaacatccaatgaacttttaattacacataatattgatagtgatattgcatatgttctaggtctgtattcttaaggagggaaagctgctcaagtacaaagaagggaactagaagtta

SEQ ID NO: 953831 - DNA, 120 bp, Artificial Sequence
  ENSG00000247775_22 (sequence is synthesized)
aaataaagtttttttaatttttcttttcattattgatggacagcatggtcttcagtaaatctttagcctctctgaatataacgttaaactaattgaatggcttgtacctcataagaaata

SEQ ID NO: 953832 - DNA, 120 bp, Artificial Sequence
  ENSG00000247775_23 (sequence is synthesized)
tgaagttatgaagtaataacatatttggaagcattactaacatgcatattctgttcataactacaatattcatgttttgttttctctttgctaagtgaaatataaatattttaccagacc

SEQ ID NO: 953833 - DNA, 68 bp, Artificial Sequence
  ENSG00000247774_0 (sequence is synthesized)
cccgttggccaggctggtctcgaacaccttacctcaggtgatcctcccacctttgggattacaggctg

SEQ ID NO: 953834 - DNA, 120 bp, Artificial Sequence
  ENSG00000247774_1 (sequence is synthesized)
gaattaccaaggaggcaggaggtggagcaaaacacaccaagcctggtgccaatcattgacaatattatggaactgactcagcgcaagaagacagcttcgactccttgtgatttcatccct

SEQ ID NO: 953835 - DNA, 120 bp, Artificial Sequence
  ENSG00000247774_2 (sequence is synthesized)
aaccaatcagcactcctggctcactggcttcccccaacccaccaaattgtccttaaaaactctgctctccaaacgctgggggagactgatttgagtaataataaaaccctggtctcctgc

SEQ ID NO: 953836 - DNA, 120 bp, Artificial Sequence
  ENSG00000247774_3 (sequence is synthesized)
agactaatgaccgaagcttcaagactttgacatgtgtgaaaacatgaaatggtaagtcaatacaaagacagcatcttcctggaatttggttttgagcttgttttcatttcacctttctca

SEQ ID NO: 953837 - DNA, 120 bp, Artificial Sequence
  ENSG00000247774_4 (sequence is synthesized)
gtaatctgggtgtagcttattttgactcttcctttgattaaacaattcagacccttggctcttattgttcttgctggtgtggtatgttcacggctgaaaagatggtcagaaggggaaagg

SEQ ID NO: 953838 - DNA, 84 bp, Artificial Sequence
  ENSG00000247774_5 (sequence is synthesized)
ggtatgttcacggctgaaaagatggtcagaaggggaaaggaggaagtgagaagaaagaaacagggaaatgacagagtgttgctc

SEQ ID NO: 953839 - DNA, 120 bp, Artificial Sequence
  ENSG00000247774_6 (sequence is synthesized)
caggtgatcctcccacctttgggattacagcaggctgaggaattaccaaggaggcaggaggtggagcaaaacacaccaagcctggtgccaatcattgacaatattatggttagtacttac

SEQ ID NO: 953840 - DNA, 120 bp, Artificial Sequence
  ENSG00000247774_7 (sequence is synthesized)
ttactgagggctgactatggttgaaactgcctttgcaaaattatgactgagacggtgaaagagatctaacttaaccaacgctagctatcttgcctctaacctccaagctgtccttgttca

SEQ ID NO: 953841 - DNA, 120 bp, Artificial Sequence
  ENSG00000247774_8 (sequence is synthesized)
tgcatgtgatggatcagctgacaccatccagatcggtaaactggttcatctgatcttgtgccctccacccaggaactgactcagcgcaagaagacagcttcgactccttgtgatttcatc

SEQ ID NO: 953842 - DNA, 120 bp, Artificial Sequence
  ENSG00000247774_9 (sequence is synthesized)
attacaggcgtgagtcaccgcacctggccataaggttgttttgtcaaggaagatagaaacagcttaatatttttggatgtgtgctgttcttcctttcttactttattagataaacatcca

SEQ ID NO: 953843 - DNA, 120 bp, Artificial Sequence
  ENSG00000247774_10 (sequence is synthesized)
aacatccatcgagtgctccttcggtcaggcacagtgcttagcacctgagatatgaggttgagtaggatatggtcttctctatgttctgtagctcacagtgcagggagggaaaaacacaga

SEQ ID NO: 953844 - DNA, 120 bp, Artificial Sequence
  ENSG00000247774_11 (sequence is synthesized)
agcagataactagaattcaatgttgggagtgcatttatggctttatgttagagtatcacttctattactgaaaagggatttttaaaattctactgaaaacatgaaaatgaaaatagcgcc

SEQ ID NO: 953845 - DNA, 120 bp, Artificial Sequence
  ENSG00000247774_12 (sequence is synthesized)
atgaaaagtagcttctagtcatattcttttatgatgaatatttgctttgcatatacgattggcccatattgcatcatttgttttataaattaatcgtatatcactattccattttaccgg

SEQ ID NO: 953846 - DNA, 120 bp, Artificial Sequence
  ENSG00000247774_13 (sequence is synthesized)
taaaatagtaggcttttaagtatttttcccaattatcacttacaaaaatattgttacagcttactttttttgaccttcctttttcttttagggtgctcttttccttaacatagtttgttg

SEQ ID NO: 953847 - DNA, 68 bp, Artificial Sequence
  ENSG00000247774_14 (sequence is synthesized)
ctgcgaaatacatttaaataaatgaagatggagaatcagacattactttcatttatctgaatctggtg

SEQ ID NO: 953848 - DNA, 120 bp, Artificial Sequence
  ENSG00000247774_15 (sequence is synthesized)
cattactttcatttatctgaatctggtgtagtttaattaatctgtaattgtaagtctttgaatcatatgtcaatattctattttgttagtcatgatttctaagtgttacataactgtggc

SEQ ID NO: 953849 - DNA, 120 bp, Artificial Sequence
  ENSG00000247774_16 (sequence is synthesized)
cccagccactttatattttggtatcatgacagaagactctgattgtggttattttctacctatgcatttattcttagtgatatatgttggttaaattatggcatagttttaaaatacatg

SEQ ID NO: 953850 - DNA, 120 bp, Artificial Sequence
  ENSG00000247774_17 (sequence is synthesized)
accacgcaaggttccaatttaaaataaattctaaacgaatcatgttattttccaaaactgttcctcctctcagtaaatgaaatcaatatccacccggttaccccaagacagaaatctcaa

SEQ ID NO: 953851 - DNA, 120 bp, Artificial Sequence
  ENSG00000247774_18 (sequence is synthesized)
gatcatctgtgactccttcctcttcatctgccacaagaagagtagcttctatctccaaagctagtctctgatcagtctacttctcttcctatagcctctgctttagttcaaatctagaat

SEQ ID NO: 953852 - DNA, 120 bp, Artificial Sequence
  ENSG00000247774_19 (sequence is synthesized)
cctgctgtggtggtgctgtggcttccaagttcatcttcttccaatccgttctctaaactacagtcttgctctttctaagactcagatcttataattttacttcccttcataggttgaatt

SEQ ID NO: 953853 - DNA, 120 bp, Artificial Sequence
  ENSG00000247774_20 (sequence is synthesized)
taacctgctaaatcacataaaatttttctgaagataccagcctttctgccttaatcaaacacattagccaaatccatagcattactgggataaagcctgaagatcccaaattgataaggc

SEQ ID NO: 953854 - DNA, 120 bp, Artificial Sequence
  ENSG00000247774_21 (sequence is synthesized)
atctggattccctttgataacagtattcaataacaatgaacacctactgagtatactattccaagcatttaaagtgtatcaactcttttcacaaaatcaacaataattattattgctacc

SEQ ID NO: 953855 - DNA, 120 bp, Artificial Sequence
  ENSG00000247774_22 (sequence is synthesized)
ctttaaaaccaccctgcagggtagctcttactgtctccatgaggaatatcagaaaagggaaaggacttcctggagggctggttctgcctcaagccaatcagctgacactaagcagtgaag

SEQ ID NO: 953856 - DNA, 120 bp, Artificial Sequence
  ENSG00000247774_23 (sequence is synthesized)
ccggaatctgaggtccctctgcctgccctggtctttgctcaccctgacaaccagacacctcactgtgtcctgagcagcatagatgccacacgcacagtgccacatagagaagggtgatgt

SEQ ID NO: 953857 - DNA, 120 bp, Artificial Sequence
  ENSG00000247774_24 (sequence is synthesized)
tagagaagggtgatgtaaatgaaaattaaaacactgtgacaaagtcaagcagggcatttgtttttgttgttgttaagttatttttggtagatacagggtctcactatgttgaccaggctg

SEQ ID NO: 953858 - DNA, 120 bp, Artificial Sequence
  ENSG00000247774_25 (sequence is synthesized)
ctcaagcaatctgcctgcctcagcctctcagaatgttgggattatagacatgaaccactgcacccggccagtgtcagtctttgttccctacaagtgaaatcaaaacagcctcacgcctgt

SEQ ID NO: 953859 - DNA, 88 bp, Artificial Sequence
  ENSG00000247774_26 (sequence is synthesized)
gatctaggcaacatagtgagaccctatctatacaaaaataaaaatagcctgggcagggtgactcatgcctataatcccagtactttgg

SEQ ID NO: 953860 - DNA, 75 bp, Artificial Sequence
  ENSG00000247774_27 (sequence is synthesized)
agaaaccctgtctctattaaaaatacgcctgtagtcccagttactcgggacgctgaggcaggaatactgcactct

SEQ ID NO: 953861 - DNA, 120 bp, Artificial Sequence
  ENSG00000247774_28 (sequence is synthesized)
gtttcttgctttaggaagcggaagactaatgaccgaagcttcaagactttgacatgtgtgaaaacatgaaatgacccttggctcttattgttcttgctggtgtggtatgttcacggctga

SEQ ID NO: 953862 - DNA, 120 bp, Artificial Sequence
  ENSG00000285899_0 (sequence is synthesized)
gttgtaggtgaggccatcggcgctggcgaagagctgctgcgcggtgaggccggcctcggacacgtagcgggtgctgccgctgatcaggttcaaggagtacatgtgcaagttttcaagttt

SEQ ID NO: 953863 - DNA, 120 bp, Artificial Sequence
  ENSG00000285899_1 (sequence is synthesized)
tttacctggttaatcacaaacatctataactaccaaacacagcttctgaacagcattgagtgtttgtcattctaccctgaaataatgtgattacaacagaagcaaggctcaacaccacat

SEQ ID NO: 953864 - DNA, 87 bp, Artificial Sequence
  ENSG00000285899_2 (sequence is synthesized)
aggctggagcagctgggatgaaggagaaagatgccacactcaatttaggaagattttgaagccctgtgctctgggactggttacatt

SEQ ID NO: 953865 - DNA, 120 bp, Artificial Sequence
  ENSG00000285899_3 (sequence is synthesized)
atgtcataccaagtgtatataatattatcagcatgacctatcactcttgatattgacctggatcacttggctgagtcctagaatctggaatttcccccaagaagccccgggtccttttat

SEQ ID NO: 953866 - DNA, 120 bp, Artificial Sequence
  ENSG00000285899_4 (sequence is synthesized)
tggagaataatattagaaaacaagatcgaggcaccagatttcttccagagccagtgtcaccaaagtatatacttagatgacaaaccaggggttcctgccacagttttgccactgtgcctg

SEQ ID NO: 953867 - DNA, 120 bp, Artificial Sequence
  ENSG00000285899_5 (sequence is synthesized)
ctcctcagccacatcattccatgtagccattttagccagggcatcattgaccaaggtctgacaattatgagaagaatagaagatcctgtgaagccattattagctcttgactcaatggca

SEQ ID NO: 953868 - DNA, 120 bp, Artificial Sequence
  ENSG00000285899_6 (sequence is synthesized)
acagcccttttttccatttgaactaacgcagttgtaaaaccttgggcaagtagttcaatgtgcctggacctcagtttccctcaactatgcaatgcaattaataaatcctacctctcaaaa

SEQ ID NO: 953869 - DNA, 120 bp, Artificial Sequence
  ENSG00000276434_0 (sequence is synthesized)
agctagtatagccttcacaccatacagactaatctcactgatgaatagaagtatgtaattgttaattattaatgttagcaacttgaatctacaggtgactatgaagtatttttttagttt

SEQ ID NO: 953870 - DNA, 120 bp, Artificial Sequence
  ENSG00000276434_1 (sequence is synthesized)
gaagatagttttttccagaaatccaaggatggcttaatcatatggaataatcaagggcaaagccaagccaagaaggcttgaaagaagaacactagagatatattataatgctctaataat

SEQ ID NO: 953871 - DNA, 120 bp, Artificial Sequence
  ENSG00000276434_2 (sequence is synthesized)
gataaacagaccaatggaacaaaattgcgaagccagatagaaatcaaccagtctgtggatctattaatttatgggaatgtcttttgtgagatatatcaattaatgggaaaaagactgttt

SEQ ID NO: 953872 - DNA, 120 bp, Artificial Sequence
  ENSG00000276434_3 (sequence is synthesized)
aaaacataattcagtgacagttgactgtatggaagaaaacaaaattaaacccttatttcatttccagatggatttaagactcatgtaaaaaagtaaaactttgaaactcagagaacaaaa

SEQ ID NO: 953873 - DNA, 120 bp, Artificial Sequence
  ENSG00000276436_0 (sequence is synthesized)
gacctggcgacttttactgcccctcaggcgcggggcggcggtcgtcaactacagttcccatcatgccacgatccgcctggagtaattctccacgcctagtgagaacgaggagaatgccgg

SEQ ID NO: 953874 - DNA, 120 bp, Artificial Sequence
  ENSG00000276436_1 (sequence is synthesized)
ccacaaggccgcctctgggcggggaagagcgggggagcgtccctggcaccttgcgccctatcaggaggaagagggcgggccttcctgggagcgcacctcgctgcctgtagctagaagatc

SEQ ID NO: 953875 - DNA, 120 bp, Artificial Sequence
  ENSG00000276436_2 (sequence is synthesized)
agaaaaggaacaaccgcgagtgctttgcagtctcgcttttttgggggtcttctcaaatagccaccttcattcgctcttcccatgctctgcttcagttttataaatagcatttctacctga

SEQ ID NO: 953876 - DNA, 120 bp, Artificial Sequence
  ENSG00000253865_0 (sequence is synthesized)
gcccttcatgtggggctgaagtcttaagacctggagagcagccccaagggtggagaagcggctgctgaagggatcagcatgcgctggcacaggaagtctgttttccatgtgtctggaacc

SEQ ID NO: 953877 - DNA, 120 bp, Artificial Sequence
  ENSG00000253865_1 (sequence is synthesized)
cagccgaagcttcctggggtaattttaaccagtatccactctagaacaataccaaaaaagcaagactgtgttgggctggaggaaaggcagtaatcaactccatgttccacgtgaggaaac

SEQ ID NO: 953878 - DNA, 120 bp, Artificial Sequence
  ENSG00000253865_2 (sequence is synthesized)
tcgtgcagccagatgcccatcccagtactaggttgcgctgtggggattgtggagtagccctctaccacctagggccctcatgtgtttcctttatttgagacagggtctcactctgtcacc

SEQ ID NO: 953879 - DNA, 120 bp, Artificial Sequence
  ENSG00000253865_3 (sequence is synthesized)
cagcatcagcctccccaggctcaagtgattaaggcctccctctgcctgccccacccccactgtgtttatattgttgggaaacttaatccacggaaataaagtgtggattatttttattga

SEQ ID NO: 953880 - DNA, 120 bp, Artificial Sequence
  ENSG00000253862_0 (sequence is synthesized)
gggctgttctcagtctgttgcttctgtgcttgcagaggtcccctgtgaagttaattactggagtctctcagagaaatactacagaccaagaattctcagacttttctggaaaccctgtgg

SEQ ID NO: 953881 - DNA, 120 bp, Artificial Sequence
  ENSG00000253862_1 (sequence is synthesized)
gttctcagtgggactctccttgagtacaaagaagattaacagtcctcagagacacgcttttcagatgattctctcttaagatgattaacctgagagctcaggaaaattccgtttattact

SEQ ID NO: 953882 - DNA, 120 bp, Artificial Sequence
  ENSG00000253860_0 (sequence is synthesized)
atggaagttccagctcagctcctctcctttctggtactctggctcccagaagttgtgctgacatggtccccaatcaccctgtgtttgtccccaggggaaggagccaccctcacctgaaag

SEQ ID NO: 953883 - DNA, 120 bp, Artificial Sequence
  ENSG00000253860_1 (sequence is synthesized)
ggttcccaggctccttatttatagggcatctaccaaggctaccagcatcccagcccggttcagtggtggtgggcctgaggcagactttaccccaaccatcaacagcctagaccctgaaga

SEQ ID NO: 953884 - DNA, 120 bp, Artificial Sequence
  ENSG00000275180_0 (sequence is synthesized)
ctagaaggaattgaggggagtggggtggaccgcgatgcattttaaaggttgggaaagagctaagccattggattccttttcttgaaggaaggagtggaattgtgtaagataattgataca

SEQ ID NO: 953885 - DNA, 120 bp, Artificial Sequence
  ENSG00000275180_1 (sequence is synthesized)
gataactttttcaccctaaaaaattctaacacttctttcagcagttaaatgccaaatttagtgtgtacctgttttacttcattctttagctgtaggttggagtggtgtgagcgatctgca

SEQ ID NO: 953886 - DNA, 120 bp, Artificial Sequence
  ENSG00000275180_2 (sequence is synthesized)
agaggggcagaagaagtagacctgataattaaagtttatgccttaacattttagatctggtttctgatatgctctcttagtaaatctgagtgtgtctttaaaaacgtaaacccaaagcaa

SEQ ID NO: 953887 - DNA, 120 bp, Artificial Sequence
  ENSG00000275180_3 (sequence is synthesized)
tttaaagtttctctttaaactttgcaactcgcgaatgagaagattgaaattatttgtaggtaattgcactattccgattttttaatgtatgaggcaaacaaataaattctatgtacagtg

SEQ ID NO: 953888 - DNA, 120 bp, Artificial Sequence
  ENSG00000253868_0 (sequence is synthesized)
gcttcctgttaagcctgtggaactctagtggacatctgaaaccctaaaacatctcatctgtgcaaaaaagaggaatgagccaggtcgggagagtgagaagctcgcaccacttcgaaagcg

SEQ ID NO: 953889 - DNA, 120 bp, Artificial Sequence
  ENSG00000253868_1 (sequence is synthesized)
tctgcctggatgctgaagttcgggttgttcttgtagctctggatcacgcaggacttcacaccttgtcctccgcactcaatgagagcctgaggccgatccacagagaggagctgcaccttc

SEQ ID NO: 953890 - DNA, 120 bp, Artificial Sequence
  ENSG00000253868_2 (sequence is synthesized)
ttcatttcccgaactccccagaagagaacctgaggaaaagaccagcagagccatcaccacagatccacggaggagccccacacctgccctggctctgtgtggaaaagttagacctgctcc

SEQ ID NO: 953891 - DNA, 120 bp, Artificial Sequence
  ENSG00000253868_3 (sequence is synthesized)
ctgagaaccacgctgtgttcctccaggaaagaactgcacagctttttgagggctcattctttttctctaggtctcccgcccattccatatcacctctcctacaattcaggtggggccact

SEQ ID NO: 953892 - DNA, 120 bp, Artificial Sequence
  ENSG00000253868_4 (sequence is synthesized)
gcccttgagtgccaaagaacaactcagctcctccgctgacccgtacctccactcggtatttgctcagcaccggccgaatgttggcaggaaccgggtagatctgggtgatgtctggtggct

SEQ ID NO: 953893 - DNA, 120 bp, Artificial Sequence
  ENSG00000253868_5 (sequence is synthesized)
caacgggtgggaggccttgcagcccagaaggaggaacctaccgcacaaggcaagtatgagttagatgctggagagacacagggaaggcaacagtgccacacaaccacctcatcagtaaga

SEQ ID NO: 953894 - DNA, 120 bp, Artificial Sequence
  ENSG00000253868_6 (sequence is synthesized)
tgttcactgttttgccaacaaaagtaatgtttccagcttaaaatacaaggaccatgcattttaccatatttaattatttattaattgataaatgcagtcatttacaagggtaaccaacat

SEQ ID NO: 953895 - DNA, 120 bp, Artificial Sequence
  ENSG00000253868_7 (sequence is synthesized)
ttagcgagcacttaagatgtaccacaaggctaataacacagagctcacagtatagaggggagagagaaaaacaaatacggaagatggtctttacaacttaataaaattacacaagaacca

SEQ ID NO: 953896 - DNA, 120 bp, Artificial Sequence
  ENSG00000253868_8 (sequence is synthesized)
cagcagggtagtggagaaggagcttctatcagtttccaaacatttgagtcttaatgatccccactcccttcggacttgtcaagatctccagaaaagccattatgcactactactgctact

SEQ ID NO: 953897 - DNA, 120 bp, Artificial Sequence
  ENSG00000253868_9 (sequence is synthesized)
aatactaatactactactacaataaaaggatgtacatttaatccaacagagactgcatcctaatcagtgaagcagaaaatgaaatgttttgaaggcagatgaaaacttgtctcttcttgt

SEQ ID NO: 953898 - DNA, 120 bp, Artificial Sequence
  ENSG00000253868_10 (sequence is synthesized)
gcacttggggttaatgaaacttcaggacaatttcagctttgctgaaatttcacacaaaggacttacagagttctactgagaaaagggtctttttcactgtgtaggccatcccacactgcc

SEQ ID NO: 953899 - DNA, 120 bp, Artificial Sequence
  ENSG00000253868_11 (sequence is synthesized)
ctcaaaacctggttcgacacatacatctttcaagaaggtttccccaaagaaaacaaaaaataaaagaagctttttctgaccctgtcccagctgcttctaccattcaatgccttttgaatg

SEQ ID NO: 953900 - DNA, 120 bp, Artificial Sequence
  ENSG00000253868_12 (sequence is synthesized)
caacatgtcctttatgcagattttgtgcagaaatagaggactgagtccagaaataaggctctgctgtgtgaccctgcacaagtaaatttccatctctgagcctcagatattgggccagat

SEQ ID NO: 953901 - DNA, 120 bp, Artificial Sequence
  ENSG00000253868_13 (sequence is synthesized)
gacccatcaagctccttgggaatcatatgttctattaaacattgctttggagcaggtggttctccttactggggctgtttgtctgcctgaacaatttacagggacttggccaataggaag

SEQ ID NO: 953902 - DNA, 120 bp, Artificial Sequence
  ENSG00000253868_14 (sequence is synthesized)
tctttatttacttcattctccaagcccctccatgtacagtgagttcttgatagatgtttaccggttgactgacatattagtccacatgctccgtgtgctagaaaaagcctaactgtgcat

SEQ ID NO: 953903 - DNA, 120 bp, Artificial Sequence
  ENSG00000253868_15 (sequence is synthesized)
caaaatctgcaaaatgcaaatatatcaccattctgttttcacagacatattctcgttggcaacagcagatgtggttaagctaattacaagaaagctcagaaaaaggagagcagacactgc

SEQ ID NO: 953904 - DNA, 120 bp, Artificial Sequence
  ENSG00000253868_16 (sequence is synthesized)
aaatgcgcaataggcttaaggtaatgaagctgcaggatacaccagcccagatcaagaagctggtaaataatgaggatggcaatgcccaatactgcctggcagtgatgaggtgagcaattt

SEQ ID NO: 953905 - DNA, 120 bp, Artificial Sequence
  ENSG00000253868_17 (sequence is synthesized)
agcctgcgagcatcacctcactgggaaagttaatagccccccaggctttaaagggaaagccacgaaacagctgtgatggtggcataggaggggctgcctctagatgtgctttttaaaaag

SEQ ID NO: 953906 - DNA, 120 bp, Artificial Sequence
  ENSG00000253868_18 (sequence is synthesized)
catcatatgttttatcctggggctcctgaagtgtcttgggaaatggccaaagaagttttgctttgtaagtgcctgaaaaatgctgttaagagctcaacacagcccttaaagaatcctata

SEQ ID NO: 953907 - DNA, 120 bp, Artificial Sequence
  ENSG00000253868_19 (sequence is synthesized)
gcagtgatgagagtcaataatgtcagctgaatttctccataaagggcttgacttagggttgggccaggaaaagccattactgaatggagatctggaagggaaatggaaagcaatgggaca

SEQ ID NO: 953908 - DNA, 120 bp, Artificial Sequence
  ENSG00000253868_20 (sequence is synthesized)
gcaaagggaaacacagccagctcagcaggaagcaagatgggaacttcatggtctccaaggtctccgctccccttctgtgatgctcacttcttgactccctcctgaccttgacccaaagac

SEQ ID NO: 953909 - DNA, 120 bp, Artificial Sequence
  ENSG00000253868_21 (sequence is synthesized)
aggagtactgcgaggaggtggggaagctttaggcaggcttcctggaactactgttttacttaatatatttgtgcttctgcaacctcatgaggaggtagagatattaaataaagaaacaaa

SEQ ID NO: 953910 - DNA, 120 bp, Artificial Sequence
  ENSG00000253868_22 (sequence is synthesized)
ccctttcctttcattttagactacctaatttaagaaaagaatatttgtgtaagttaaaaaaatcctccagtaagctttggactctatccaagggttcagcacacaaacgtctttggagaa

SEQ ID NO: 953911 - DNA, 120 bp, Artificial Sequence
  ENSG00000253868_23 (sequence is synthesized)
caagaggtttggttcacatcataaaagaaaagggatagagattaaagtgttgtgaaaggcgtcgaagcaacaagcaagagagaaagaaacacagaaaggctgagaaaatacccatccatt

SEQ ID NO: 953912 - DNA, 120 bp, Artificial Sequence
  ENSG00000253868_24 (sequence is synthesized)
tcttttcagccaggggagatcagtaaaaacctcctgtctccaaaaagcatggacatttttattaaacagcaataggacctggaattagctggaggctgggtacagttgcaggttgcttta

SEQ ID NO: 953913 - DNA, 120 bp, Artificial Sequence
  ENSG00000253868_25 (sequence is synthesized)
tacaagtatcacattcctgaagaagtgtgtagactgacgttctgtaaaccagatccaattttaattgccatttaaatggaagtcagtgaaaaactcttttagtaaagcaaatgatcatca

SEQ ID NO: 953914 - DNA, 120 bp, Artificial Sequence
  ENSG00000253868_26 (sequence is synthesized)
ccaatctttttggttctgtgaactgttttcagaggtcaagtttgcctctaggtacatctagtgttctcaccactcacagcgtcaggactttatttactttaaaataaagtgagtgagttc

SEQ ID NO: 953915 - DNA, 120 bp, Artificial Sequence
  ENSG00000253868_27 (sequence is synthesized)
aacgtggcattttttatgaggtgtggtcagcactggcccagggggacactcaccacagcgtcgctgtcatacagctccaccaccactaagggcggggactctgccagctccttcacatct

SEQ ID NO: 953916 - DNA, 120 bp, Artificial Sequence
  ENSG00000253868_28 (sequence is synthesized)
ccatgcagcaccaaatcattgaacagcagcatctggttccaggtcggagagagggtctgggagattatctggaagcagggaccaaagaaaagcaaaagatcattcaattgagttataggg

SEQ ID NO: 953917 - DNA, 120 bp, Artificial Sequence
  ENSG00000253868_29 (sequence is synthesized)
gctctaaggttcattcatcaaatacttatacaggggaaagagaacacatcatcattgtgattgctcaccattcaatattcaagtgactatgtaaactgagcagctactatgtactaaaca

SEQ ID NO: 953918 - DNA, 120 bp, Artificial Sequence
  ENSG00000253868_30 (sequence is synthesized)
atgctagggaacacaaagactcccaaccgtggagaagcgtacattcttaagtttcatgagcagagcccctacatgtttaacaccctctttgcatacatactttcagctcagtcctcacag

SEQ ID NO: 953919 - DNA, 120 bp, Artificial Sequence
  ENSG00000253868_31 (sequence is synthesized)
tagtgccaatgataacactagccacttttttgagcatttatggtgtgctgaatttcacatgcactgtctcattcaaccctcacaataattctgggaggtaggttcagttatttacacaca

SEQ ID NO: 953920 - DNA, 120 bp, Artificial Sequence
  ENSG00000253868_32 (sequence is synthesized)
ttttacagatcaggaaactgaggctcacttgtccagagccagcaagtggcagaactgaggttccacctggaccatctggcagcaaagcccaggcaggctgctaacctcacccactctcgc

SEQ ID NO: 953921 - DNA, 120 bp, Artificial Sequence
  ENSG00000253868_33 (sequence is synthesized)
catgtagatgctaatattatccccattttatgaatgagaacacggaggattggggagattacatgattcttgacttaggagcaaataaaattttgtcatcaaatatcctgaagttgggta

SEQ ID NO: 953922 - DNA, 120 bp, Artificial Sequence
  ENSG00000253868_34 (sequence is synthesized)
tttgacctaatattccttatgtggaattctactgttttgtggttattgactgaattaaatagatcaaggttttcaaaactgctctcaccattttgcatgacaactttcttacactgatag

SEQ ID NO: 953923 - DNA, 120 bp, Artificial Sequence
  ENSG00000253868_35 (sequence is synthesized)
tagactgtaccattatacagttggagcagtcaatggatacagaggataataatctgcataattgccctcagaccatgagcatcttgcctagaagtggcttacagccccctcctaggccat

SEQ ID NO: 953924 - DNA, 120 bp, Artificial Sequence
  ENSG00000253868_36 (sequence is synthesized)
ttaagtggtgccctcagaagggagggcatatttggtcttgcattttcttctctatttaattggatgtttggaaacctgccaatttcacacagccgaagactggagttgtttgcggggcaa

SEQ ID NO: 953925 - DNA, 120 bp, Artificial Sequence
  ENSG00000253868_37 (sequence is synthesized)
gtggactctgcacctgggcagaagctattccattaatgcaggagactagtcctggaaagagttcaaaaccacatttctttctcttccaggcaaatgagtgatttcataggtgaatgtatc

SEQ ID NO: 953926 - DNA, 120 bp, Artificial Sequence
  ENSG00000253868_38 (sequence is synthesized)
acagcagctgctgggtccaggggaagtttctgaactgtgcctttgtctgtcactgttcaatctaggaggaaagtctagagggagacctggcctggactccaaaactcgtatcaactgtca

SEQ ID NO: 953927 - DNA, 120 bp, Artificial Sequence
  ENSG00000253868_39 (sequence is synthesized)
tctcagcgttttacatcgagtcatttctagtcacagcattaagtcatttgccctgtggtcacaaaggaatatttttattgctcttctttatgtgggtcataaaaatattgtgcattttca

SEQ ID NO: 953928 - DNA, 120 bp, Artificial Sequence
  ENSG00000240095_0 (sequence is synthesized)
tagcagaggtgtgtgaaaagcagagcaacgcagcacccaaaatgatcttgaaactactcagatagagtaattcctcgactcaaaaatatacagcatatttccgtgtcatttagaacaaaa

SEQ ID NO: 953929 - DNA, 120 bp, Artificial Sequence
  ENSG00000240095_1 (sequence is synthesized)
gccacaattcttagaatagtctacaaggtttaacataagggtgatgtcttagacttttcaacaggtcacaaggctgggaacatgggaactggatttgagggcaggctaaagtgggagaaa

SEQ ID NO: 953930 - DNA, 120 bp, Artificial Sequence
  ENSG00000240095_2 (sequence is synthesized)
gggaagaactgaagaccacttaaaattaaatctacatgactctacatctgggatgctggatttcctcacagccttagagagaagttgagaaccaaacaagtgagcttcattctctacttc

SEQ ID NO: 953931 - DNA, 120 bp, Artificial Sequence
  ENSG00000240095_3 (sequence is synthesized)
tgggagttggataatacgtactgcaggaacatagaattaacaagcaaaaatccagaaggcagcaaaaaccaagcagtgtggccgaatcattagaccggcgagaggtgagaagaaacatac

SEQ ID NO: 953932 - DNA, 120 bp, Artificial Sequence
  ENSG00000240093_0 (sequence is synthesized)
accctcgccaagtgtctgaaagcccagcggcagcctggctccttccctcaccaactcattcattcattgcctgaccccatttcccaagctggtgaccacggctggtcaggactcgcttct

SEQ ID NO: 953933 - DNA, 120 bp, Artificial Sequence
  ENSG00000240093_1 (sequence is synthesized)
aaagggcgcggggtctggcttcctcaccagcagccacagggcacagctcccggaccagccggcagcccctcccaaggaggaggttattctggagacaaaggcagcgccctgaggtagagt

SEQ ID NO: 953934 - DNA, 120 bp, Artificial Sequence
  ENSG00000240093_2 (sequence is synthesized)
atcattctgttttttcctgggtgcggaggagtaatttcagaaggagacattttgtaaaattaaaagaggcatgagctcctccttcctggcaacctgggggatcacaaagacagacggcac

SEQ ID NO: 953935 - DNA, 120 bp, Artificial Sequence
  ENSG00000240093_3 (sequence is synthesized)
ctccccaggcacctgcgcctgtgtccgacggcaaagccattgtcaagcgaacctgatgctgtcactggtcacccggagcccatcagcatgttgacccggggcccatcagcatgttgaagg

SEQ ID NO: 953936 - DNA, 120 bp, Artificial Sequence
  ENSG00000214145_0 (sequence is synthesized)
gaatgtgttcctttattactagttgttggagggtccttgttgacatcttgcagaggtctggctgtcacttttaatcagaatggctattccccactcctgctgaagagctccaggcctggc

SEQ ID NO: 953937 - DNA, 120 bp, Artificial Sequence
  ENSG00000214145_1 (sequence is synthesized)
gggggtgggctggcgggctgtggtggtggtaagggctgtcccccagcacactgttagaactttacttatcctcttgcttgaagtgtgggagctggagaccattcaggaagctgtggttac

SEQ ID NO: 953938 - DNA, 120 bp, Artificial Sequence
  ENSG00000214145_2 (sequence is synthesized)
agtcccagacagggtccctaaaagcaaggagccattcccaatgcttcctccttagggaagccttccctactttctcttccctcttctgggcagagtttgtaccttcctcctttttgctct

SEQ ID NO: 953939 - DNA, 120 bp, Artificial Sequence
  ENSG00000214145_3 (sequence is synthesized)
taccatctttatttgttccatgtttgtatcttctactgaatgtggcttcaagaacagaaagcacagaacgtggcacgttggaggaaatcaaaagaaatctcgccattgccgggaatgggt

SEQ ID NO: 953940 - DNA, 120 bp, Artificial Sequence
  ENSG00000214145_4 (sequence is synthesized)
aaatcactcaggccgcgtgggtccttggcagatggcagaggcggcttcccagtcccccacctggcactagagggacggggcgcgcacccaacggtggcacgcatcgccgaattttcctga

SEQ ID NO: 953941 - DNA, 120 bp, Artificial Sequence
  ENSG00000214145_5 (sequence is synthesized)
atgccgctgtggcacattcctggcctttgcagttattaggaaatgagaggatcttttttccttctactctcccctccccctgccttcgtttttcttccaggcatggaattatctacttta

SEQ ID NO: 953942 - DNA, 120 bp, Artificial Sequence
  ENSG00000214145_6 (sequence is synthesized)
gcagttcaaaagacattccattcccatgacaaagacagaaaggggtgatgttggcatactgtagccctctttctcatagggagacttgagcaataaatcataatgaatgagaatttaaaa

SEQ ID NO: 953943 - DNA, 120 bp, Artificial Sequence
  ENSG00000214145_7 (sequence is synthesized)
attttctgctcagacaccgttgcttgcaaaattccacccagaagataagggagggagtatcgctgcagcgtcctgctctgtgcctggttatattactggatccttgtgttgcagccctaa

SEQ ID NO: 953944 - DNA, 120 bp, Artificial Sequence
  ENSG00000214145_8 (sequence is synthesized)
gatagaaggattgtctccatttcacagatgagagagaactgatgcgcaggaggctgaaattgtctgaagtcacacagcagcctcctcttaaacatgacaaagaatccaaggacttgtgct

SEQ ID NO: 953945 - DNA, 120 bp, Artificial Sequence
  ENSG00000214145_9 (sequence is synthesized)
ggggctgtcagctgctattctggtgccctggggacgaagaagggatctggagggaagactgtcaccctcttgcgaatgtttccaagaagcagctcagcatgggagagaaaaggggagatc

SEQ ID NO: 953946 - DNA, 120 bp, Artificial Sequence
  ENSG00000214145_10 (sequence is synthesized)
ccagttccaggaacacctggccagtgtttcacctgtttatcggagttgacaggaccagccagccctttcccacctctccccatcatgatggatgggagcctggcctttgagattcctgcg

SEQ ID NO: 953947 - DNA, 120 bp, Artificial Sequence
  ENSG00000214145_11 (sequence is synthesized)
aaggaatgacaaagaacatcaaggctcaatccttggaactctccatcactcatctttaaattagacttctctgctgactctcagagttgtgtatgctgagaatccactgcctctaagaca

SEQ ID NO: 953948 - DNA, 120 bp, Artificial Sequence
  ENSG00000214145_12 (sequence is synthesized)
tcctgcttggcaggttcctatctcccttcgactgaggcatcgtttccaaatcagacacttctcgtcaccactattgccctccccttgtccaacccacctttggctcttggctggagtccg

SEQ ID NO: 953949 - DNA, 120 bp, Artificial Sequence
  ENSG00000214145_13 (sequence is synthesized)
gtgagtctcctagctggctctccctgttctcgtcatttcccagtaagttccaaccctgccttcagactcttctgcacacagcttccagagtaatcctttcaaaaagtaagtcagatccca

SEQ ID NO: 953950 - DNA, 120 bp, Artificial Sequence
  ENSG00000214145_14 (sequence is synthesized)
tcttttccctcccgtctcactctgtcagccacattcattccaaaggaccatgtggtccatgtccctgttctctctggttctctcactgctctcctctgtgcttactctctcctgcctcac

SEQ ID NO: 953951 - DNA, 89 bp, Artificial Sequence
  ENSG00000214145_15 (sequence is synthesized)
tctcactgctctcctctgtgcttactctctcctgcctcacaatgtttgcacttactgtttcttctgcttggaactctttccctccaaga

SEQ ID NO: 953952 - DNA, 90 bp, Artificial Sequence
  ENSG00000214145_16 (sequence is synthesized)
gtgatccgcccgcctcggcctccctaagccggcctccctccaagatctttactcacgttgtcaccttagtgacggctccctccctaacca

SEQ ID NO: 953953 - DNA, 120 bp, Artificial Sequence
  ENSG00000214145_17 (sequence is synthesized)
actcacgttgtcaccttagtgacggctccctccctaaccatcctatttaaaattgcagcccgttcaacacccattcctccttctccatccttgctctgcttcctccctttgacctgtcac

SEQ ID NO: 953954 - DNA, 120 bp, Artificial Sequence
  ENSG00000214145_18 (sequence is synthesized)
tctttaatccagtggcattctgattcaatggtgactgggagcaggacctaaggaggtgcgtcatctgtagagaatttgaaaataatcgtgaaataaactcaaagtgggtttgctctttat

SEQ ID NO: 953955 - DNA, 120 bp, Artificial Sequence
  ENSG00000214145_19 (sequence is synthesized)
gagccccgcacaccagcaattctaaattctgttatcaatatactttcctgccagggtgggccgcccccaccgattctcctctatcttaatacactatgtgtttcccttgtttattttgct

SEQ ID NO: 953956 - DNA, 120 bp, Artificial Sequence
  ENSG00000214145_20 (sequence is synthesized)
tattgttcatttccatgcactagaatataagctccgcgagggcagtatattttgtctgttttgttcaccactgtgtccctcgtgtctgccacatggtgtgtgctcagtaagctttagctg

SEQ ID NO: 953957 - DNA, 120 bp, Artificial Sequence
  ENSG00000214145_21 (sequence is synthesized)
aatgaatgaagtggtggatgtcgacgttcccttagttgggggttatcaggagggcttcctggatgaattggtgtctatattgcctgtccttaaagaggaggaaggtgctctaggcagaag

SEQ ID NO: 953958 - DNA, 120 bp, Artificial Sequence
  ENSG00000214145_22 (sequence is synthesized)
aatcagtaagtgtttgctaaaggtccaacaatgaaacagaacagatatatccagtgctatgccgcgtcaaaagagtatgagaggtattgtggtgatgcttttgaatgctaatcagaataa

SEQ ID NO: 953959 - DNA, 120 bp, Artificial Sequence
  ENSG00000214145_23 (sequence is synthesized)
ggagggtgactagtccatagttatatagaatataggatatacagaatatacctttttctgtaacgggatgtgtcacttaactttgttccttaaagctccagaagcccaaggtcacccaca

SEQ ID NO: 953960 - DNA, 120 bp, Artificial Sequence
  ENSG00000214145_24 (sequence is synthesized)
atgattcaagtattatcaatgttgagagcctgtaaaagcatcaagtatattatagtttccaaaaaattgtgaattagactgaaaaccagcatttaaaaaataaagtgatgttgacttaaa

SEQ ID NO: 953961 - DNA, 120 bp, Artificial Sequence
  ENSG00000214145_25 (sequence is synthesized)
atggggaaaaccttgtgcggcacatttgcctcaggaagactgcactgggctccccggcgcccctaggacagcgtcccttcacgtcggagagactgggtgtgggccgtgaggtttaggagg

SEQ ID NO: 953962 - DNA, 120 bp, Artificial Sequence
  ENSG00000214145_26 (sequence is synthesized)
ctttaggagaaggaagatcctctctcaggagtgaaatgatcttatctgagaggatggaagtggtgagggcatcagcatgggtcctgggctgcggctgtgcctcttcctccccatgctgac

SEQ ID NO: 953963 - DNA, 120 bp, Artificial Sequence
  ENSG00000214145_27 (sequence is synthesized)
acgtgcttgcccacaagcgccccgggcctctacatctcttggtagtttaaagctctattttagtctcaactagcagtttctctcactggtagatctaagttctaagactattcaatgggt

SEQ ID NO: 953964 - DNA, 120 bp, Artificial Sequence
  ENSG00000214145_28 (sequence is synthesized)
tctgtttctttttttaagaattaaaaaaactgttccagttaattcacggtcactatgaaaaaaataggcaggacatgtaaataaaagattaaaatatatacaaatcaaagaaggaagtac

SEQ ID NO: 953965 - DNA, 120 bp, Artificial Sequence
  ENSG00000214145_29 (sequence is synthesized)
acccaggccagttatcaggcaagcttgccagacatcaatccagcaagaaaacgatagtgtgctttgaaaatgccaaatccggccgggcgggcggctcccgcctgtgatcccggcactttg

SEQ ID NO: 953966 - DNA, 120 bp, Artificial Sequence
  ENSG00000214145_30 (sequence is synthesized)
aatcagcttttccctgggttgagaaaacctgagacagagagctacagtcgcgcctgccacatctacctccccagccatcctactctctatgctgctgcaaactagacattccttcctgga

SEQ ID NO: 953967 - DNA, 120 bp, Artificial Sequence
  ENSG00000214145_31 (sequence is synthesized)
gggacctctcgcttcccatcttcagatcaggacgcacggtctcttctccgcagctgcttcctctggtgttcctgtgctcctgtcggcccgctgctcccacacacatgcccattcttctcg

SEQ ID NO: 953968 - DNA, 120 bp, Artificial Sequence
  ENSG00000214145_32 (sequence is synthesized)
accttgctgattttcaaagcgtcaccaacagctttgtttttcacattccccagcaagggtccaactcaaactttgagcagacagtagcgaattttattcctctcatatattcctaaaaaa

SEQ ID NO: 953969 - DNA, 120 bp, Artificial Sequence
  ENSG00000214145_33 (sequence is synthesized)
aaatgggttgaggggattcgtgttccgctccctctcagctcttaaatgtcttaagtctatcactgaacaaagactgacagaagattttaaaatagaatgcaaaactatcatcacagcaaa

SEQ ID NO: 953970 - DNA, 120 bp, Artificial Sequence
  ENSG00000214145_34 (sequence is synthesized)
agccgcaggagaggaggctcacaacggccaggcaggctccgatcttctcaatgtggtccctcgctgtggcggcttagcttagatcttctctcaaactcaggccgctagagggtccccacc

SEQ ID NO: 953971 - DNA, 120 bp, Artificial Sequence
  ENSG00000214146_0 (sequence is synthesized)
aggcagccggaaggaaactcctgagctttttacggaatgcacaagacaaaagccatgttttgttcagtccttcagaagatagaaattgaacacctgacttgtggacagcacctctaaaca

SEQ ID NO: 953972 - DNA, 120 bp, Artificial Sequence
  ENSG00000214146_1 (sequence is synthesized)
ctgcagagagagattcagagatgaatagccctggcccttagggttcttgcggtcacaagcaccgtccagtaagagcagcccatggttatgagtaacaagagcagacactacggcaggcac

SEQ ID NO: 953973 - DNA, 120 bp, Artificial Sequence
  ENSG00000214146_2 (sequence is synthesized)
ttggtttagggacattgccttgtttcatcctcacggtgacttcaggaggacagtgccatcgttacgccgtttaacagatggtaaaactgaggcccagagaggggagtgccttgcttcaga

SEQ ID NO: 953974 - DNA, 120 bp, Artificial Sequence
  ENSG00000214146_3 (sequence is synthesized)
gcagagcctgtttgcctaacttctaaatttccctaactctctagaacagagggtagtaggagtgcagcagacaggacaactaaccctgcctggaaaagtcatggtgggcttcccggagga

SEQ ID NO: 953975 - DNA, 120 bp, Artificial Sequence
  ENSG00000214146_4 (sequence is synthesized)
ggcgtccttaggctggggcttgaagacgaggtatttaccagacaaatagtggagaagaaggctgtcttaaacagaaaaaacttcttatgtggtcctgggttctgagggcccagctcttct

SEQ ID NO: 953976 - DNA, 120 bp, Artificial Sequence
  ENSG00000214146_5 (sequence is synthesized)
caccctccttctccgaggagtgggggaacggaagtgcagagccttcgtgttttaccctccttctccgaggagtggggaacggaagtgcagagcctttatgttttgtgacagtggaatccc

SEQ ID NO: 953977 - DNA, 120 bp, Artificial Sequence
  ENSG00000214146_6 (sequence is synthesized)
ccccggggcaaggaggggaggccaggcagccggaaggaaactcctgagctttttacggaatgcacaagacaaaagagtgctgcttgctctgcagctggtccaagaagcttcacctcccag

SEQ ID NO: 953978 - DNA, 120 bp, Artificial Sequence
  ENSG00000214146_7 (sequence is synthesized)
gagcaccagacagatgatctcctgtttacagtggttccaggagcaccaaccccaaggatgagttataagcaggtctctaaagagattttaggagaagctgctaaaatggtggcaaagctc

SEQ ID NO: 953979 - DNA, 120 bp, Artificial Sequence
  ENSG00000214146_8 (sequence is synthesized)
tttagaaacatagaagtatgaacctttttatggggagaacttataagagtttggagaggtcttccaggtccacacaacctccctggaaatggcaaggagttataatttccattttacaga

SEQ ID NO: 953980 - DNA, 120 bp, Artificial Sequence
  ENSG00000214146_9 (sequence is synthesized)
tgaaaaatgaaaaagaggagaaggggatgccatttgctcaaggctgctggaacgctaggctggctctgggactatcacgaaaagtttctaaccccccgccacggctcttctcacaacaca

SEQ ID NO: 953981 - DNA, 120 bp, Artificial Sequence
  ENSG00000214146_10 (sequence is synthesized)
agaatgagctcagagaggttaatgaacctgccaaagaccccagctgagagactgagttggtttgcagattccaaagcccacattcattccattttatctcatctttagtggactttgaac

SEQ ID NO: 953982 - DNA, 120 bp, Artificial Sequence
  ENSG00000214146_11 (sequence is synthesized)
atgcctcagccttcaccttgacccttggtgaaggtgctgagaaccaagacccagtgcagcggtgtctctggaacctcctggagctcagcagccgactcccaaacctggaggtcctcactc

SEQ ID NO: 953983 - DNA, 120 bp, Artificial Sequence
  ENSG00000214146_12 (sequence is synthesized)
ccctgtaaagttgtttaaacttctgtttatcatcatcttccatcatttctaattgttttcctgtgtccctttcttttgtagaggatataaactcagcattttagcttttgaaatagattt

SEQ ID NO: 953984 - DNA, 120 bp, Artificial Sequence
  ENSG00000214146_13 (sequence is synthesized)
gctgtgcagtttcatggctctttagtggcttaaaatgtattgttctgtgagtctttctgtgcccgtcacagcattcactgtgggaagcagcaggacgccagcgatgctgatgtttatttg

SEQ ID NO: 953985 - DNA, 120 bp, Artificial Sequence
  ENSG00000214146_14 (sequence is synthesized)
attttaggggactttaaggcattcctgggaccatacggattctaaatattctgcctcattgtcttcagaagctactaaaatatcctagaaatgatcatgtttcagcatgtaagctacata

SEQ ID NO: 953986 - DNA, 120 bp, Artificial Sequence
  ENSG00000214146_15 (sequence is synthesized)
tttcacgttacctcttgtatccatccatacatagcctctatcaagagcctggcataagccaatgtaatggttctgaaatggtaaccacatggttcttcaatcactaaaaccctttccact

SEQ ID NO: 953987 - DNA, 120 bp, Artificial Sequence
  ENSG00000214146_16 (sequence is synthesized)
ctgagattggacattcattgctattttctgccagggctttgatttacaagactgtctatgagttctgtgtttaatatacagaactggctgccctcaatgcatgagacttcctggtatttt

SEQ ID NO: 953988 - DNA, 120 bp, Artificial Sequence
  ENSG00000214146_17 (sequence is synthesized)
tttcatgtgattagatggattacatttgtttcatatttattgtttagatatacaagtaatcctcactttgcacagtgtcatgtctgcatattgaaaccctatactcactttgtgcaatcc

SEQ ID NO: 953989 - DNA, 120 bp, Artificial Sequence
  ENSG00000214146_18 (sequence is synthesized)
tttggtaagtgcaaagtgagaacacaggtctgatatgtacaagtttcagtgaacatggtactatgcatcatgaagactatctgaagttgctttcaaataaaatttggataaggactgtaa

SEQ ID NO: 953990 - DNA, 120 bp, Artificial Sequence
  ENSG00000214146_19 (sequence is synthesized)
cccccggggcaaggaggggaggccaggcagccggaaggaaactcctgagctttttacggaatgcacaagacaaaagcacgcttgctttccattaagcggatcctttgtgctgaaacagat

SEQ ID NO: 953991 - DNA, 120 bp, Artificial Sequence
  ENSG00000214146_20 (sequence is synthesized)
ccaaaccagacgatgctgctggcaggaagatgcacatggtctgatgttaatgcaagagtgagaaaacctctgtggcacagtcatgggaggtcagcccaaatgtagagtttccttccttcc

SEQ ID NO: 953992 - DNA, 86 bp, Artificial Sequence
  ENSG00000214146_21 (sequence is synthesized)
tttttactttctgtaattctaaagtggcaggaacgacttgactctttagaccatatatttttttcagaaatacatttctgaaaata

SEQ ID NO: 953993 - DNA, 120 bp, Artificial Sequence
  ENSG00000214146_22 (sequence is synthesized)
agaggggacttacgatcacggagccacacgcccaggcccaacccaggcccaggagctccaccctagggaaacgcctaagtcagaacagagcactcctaaccccccggggcaaggagggga

SEQ ID NO: 953994 - DNA, 120 bp, Artificial Sequence
  ENSG00000214146_23 (sequence is synthesized)
ccccttctgaaaactttcctggactgctccttatcttgctgccggtgattgaaagcaatcctttcctctctcttccctcacacctgcctgtttgcattaaagttcttgagttggactcca

SEQ ID NO: 953995 - DNA, 120 bp, Artificial Sequence
  ENSG00000230513_0 (sequence is synthesized)
gctagctgggttagtaagcggcgcgagcgtgcgagtttctgacgcgcccgcgtcgtcccagctccctggactaccagtattgtcgcccacgtgggcttctctttcgtccgctcaggcctc

SEQ ID NO: 953996 - DNA, 120 bp, Artificial Sequence
  ENSG00000230513_1 (sequence is synthesized)
acttttctccgtaaacaccccggcacgatggagcggccccagcgttcgggagcggcccgggagcggaaagcggcagtgtcctgggagcctcgaaagccgcaggggcggcagctcgcctcg

SEQ ID NO: 953997 - DNA, 120 bp, Artificial Sequence
  ENSG00000230513_2 (sequence is synthesized)
gaatgacctctgacggaagaaataaaacggggcctgggacgcttgcacgaaagaacccgacaaaaaccagagcccgcactcactctcgtactggggaggtggacttcagggagggttatc

SEQ ID NO: 953998 - DNA, 120 bp, Artificial Sequence
  ENSG00000230513_3 (sequence is synthesized)
tggaggaggaatctctcaaagtacaacacaggagaaagacagtatcgcaatacagaaattttattttttattttattattattttcctgagaccggagtctcgctctgtcgcccaggctg

SEQ ID NO: 953999 - DNA, 75 bp, Artificial Sequence
  ENSG00000230513_4 (sequence is synthesized)
actccgcctcccgggttcacgccattcggctgcctcaccctccagcaatacggaaattttaatagctgacgtgaa

SEQ ID NO: 954000 - DNA, 120 bp, Artificial Sequence
  ENSG00000230513_5 (sequence is synthesized)
tgcaatacggaaattttaatagctgacgtgaaaaggggttgtctccataaaggatgcgggccttcaggggcagcattattctgcaggtctcctgcttcctgatggcacaaggactccaca

SEQ ID NO: 954001 - DNA, 120 bp, Artificial Sequence
  ENSG00000230513_6 (sequence is synthesized)
tcacccagtcctaccttaaatccaatcggacaccagtccacaaactggttggtgtgcttgctcttgatggtggcgacagccgcactgacatctttcaggaccacatcccctctgtacaac

SEQ ID NO: 954002 - DNA, 120 bp, Artificial Sequence
  ENSG00000230513_7 (sequence is synthesized)
atgcagcaggccatgtacttgccatggtgagggtcacacttgaccatctgattggctggctcgaagcgggcactggcgatcttggccacggacagctgctcatggtaggccttcttggct

SEQ ID NO: 954003 - DNA, 120 bp, Artificial Sequence
  ENSG00000230513_8 (sequence is synthesized)
gagatgaccagggcgtaggtggccagggggaggtggatgtgggggtatggcaccaagttggtttggaattctgtcaagtacacattcagggccccatcgaatcacagggaggccgtgatg

SEQ ID NO: 954004 - DNA, 120 bp, Artificial Sequence
  ENSG00000230513_9 (sequence is synthesized)
gacgactgaggttggtgtacatgggacactcgatgtccaggttgtgctgacatgtcataggtggctttgctgtcgactatgaaggcacagtcagaatgttccagggtcgtgtaggtggtc

SEQ ID NO: 954005 - DNA, 120 bp, Artificial Sequence
  ENSG00000230513_10 (sequence is synthesized)
aggatggagttgtagggctccgtcatggccatggagacctggggggctgggcaaatggcaaactccagcttggacttcttcccgtagtccaccgagagccgcttcatgagcagagacacg

SEQ ID NO: 954006 - DNA, 120 bp, Artificial Sequence
  ENSG00000230513_11 (sequence is synthesized)
aacccagagccagtgccgcccccaaagctgtggaagatgaggaagccctgcagtcccatgcacagatctgcctgagagaaaccagacaacgtaagccaatgcccgtgggagccacaccac

SEQ ID NO: 954007 - DNA, 120 bp, Artificial Sequence
  ENSG00000230513_12 (sequence is synthesized)
caacctccaccaagccggggccacttctctttgcctctgagagttgatacggattcagaccatccataatgaacacgcatcacactttgaagcagagaaaagcagacaatacagatctat

SEQ ID NO: 954008 - DNA, 120 bp, Artificial Sequence
  ENSG00000230513_13 (sequence is synthesized)
gcacaaatcaccacgcacacttcacagtaagacgttgcagaggtctaggaaggctggtttgaagaaatacacagaagaaaaacggatggactaaccagagcgctcagccagcctgctgga

SEQ ID NO: 954009 - DNA, 120 bp, Artificial Sequence
  ENSG00000230513_14 (sequence is synthesized)
ctggcacccgtggctacagacactcttgtttagcaccatggagagctccctgcacagaagcaaggactcagggcattgccccctctctacctgagaactagactcagcgcccagcactgg

SEQ ID NO: 954010 - DNA, 120 bp, Artificial Sequence
  ENSG00000230513_15 (sequence is synthesized)
atttgataatacaggtactcaaatacatgtgctttcctctttactcagacacttctagggctggcagggtcagacagtaatcccccactttgtggggaggccctgtttttgctgaacagc

SEQ ID NO: 954011 - DNA, 120 bp, Artificial Sequence
  ENSG00000230513_16 (sequence is synthesized)
tcaagggcaggaagattctttcttccacacacccctgcaactgccaatacttgttctgtgtgacccttgcagccatcctatgcggtaggtgctaccattgccatggatcaagtggggacg

SEQ ID NO: 954012 - DNA, 120 bp, Artificial Sequence
  ENSG00000230513_17 (sequence is synthesized)
cacagatccaagctccttcacctctcaagggagttgggccctcccacagatctcttggaggaaaaaaatggccttgctgggcctgtcgatttccagtccccacccacctccctcatgtac

SEQ ID NO: 954013 - DNA, 120 bp, Artificial Sequence
  ENSG00000230513_18 (sequence is synthesized)
atgtgtctgtttgtgaaaccttcatagcaccttagcttccaggccctccatcccggctgcctctctggcacttgcccttttactgtgcgggtccaaagagacacctatgttcagtttgtc

SEQ ID NO: 954014 - DNA, 120 bp, Artificial Sequence
  ENSG00000230513_19 (sequence is synthesized)
ggcgggagttaagtcgcaagcggctctccgggcatccggaggagcctcgcgcctccagccgccgctcctccccaaggggctctggcctgtcgggtcccccccggcccgttgtcgccccaa

SEQ ID NO: 954015 - DNA, 120 bp, Artificial Sequence
  ENSG00000230513_20 (sequence is synthesized)
ccccgtcccagccgattctcttgacttctgtcagcggcactcacgctctggccattgctgcgccgccgaagtctcgcgaggggtagcgcgcgccggaagttggtaccatagagactggag

SEQ ID NO: 954016 - DNA, 120 bp, Artificial Sequence
  ENSG00000230513_21 (sequence is synthesized)
aatagcctcagcttccacggaatccatgcccacatcttcataatcctccagagctgccagatcctcgcgggcctcggagaattcccccactgccatgccctcccccacgtaccagtgcac

SEQ ID NO: 954017 - DNA, 120 bp, Artificial Sequence
  ENSG00000230513_22 (sequence is synthesized)
taaggcgcacttggccgaacttatggtccaggcaggcccaggcctccgtgatggccgtggtgttgctcagcatgcacaccgcccgctgcactttggccaggtctcccacagggaccaccg

SEQ ID NO: 954018 - DNA, 120 bp, Artificial Sequence
  ENSG00000230513_23 (sequence is synthesized)
tggggggctggtagttaatgcccacctgtcagagatgggcagcatagaatgaagtttatattggcctcagaaatgggagctcattaaaaatcagagctgtggaccagttccaacactgtg

SEQ ID NO: 954019 - DNA, 120 bp, Artificial Sequence
  ENSG00000230515_0 (sequence is synthesized)
aggatggtgctcaaactgcaggatgcaggctttccctgaattcctcaggattcaggtttccagtcaatgcaagaagcccttcttccgtcccttcaggatcagcctgctctctgcagggcg

SEQ ID NO: 954020 - DNA, 120 bp, Artificial Sequence
  ENSG00000230515_1 (sequence is synthesized)
ccctgacttccccatcctccttttatgcagtctcaaactgatgtgtcatcgctccacagtccctcaagcccccaagcttctccctcctgcctagctccttccctggcccccaaagaaggc

SEQ ID NO: 954021 - DNA, 120 bp, Artificial Sequence
  ENSG00000230515_2 (sequence is synthesized)
tgacaggagaaactaaactgaaataaagaggccatggtagctctgtttcctaagatgttttgttctttttctacccataagggaatgattcaaaatgtccctccacctgggtccaaccgg

SEQ ID NO: 954022 - DNA, 120 bp, Artificial Sequence
  ENSG00000272432_0 (sequence is synthesized)
cggctgcaggctggagagggctcgcagccgggctcggagctggggccgtctgacgggctggtgcccacagggtcgttgccgccacccaccggcaagtcgcagacccggcctgagcctccc

SEQ ID NO: 954023 - DNA, 120 bp, Artificial Sequence
  ENSG00000272432_1 (sequence is synthesized)
tggacccttcctggcctcttcctcctgtcctaggtaccgcggcgccaggagaaggcgaccgcgtccacaccccgccatgacagagaggggacctcaccctcccccggaacaccccaagac

SEQ ID NO: 954024 - DNA, 120 bp, Artificial Sequence
  ENSG00000272432_2 (sequence is synthesized)
gaaatgcagtattaacgtagaaaagatgttttacttccatgttttggctaggaaggtaataaggtcgagacaaaataaaaagactcaaaactgacctttaatctggggataataatgaag

SEQ ID NO: 954025 - DNA, 120 bp, Artificial Sequence
  ENSG00000272432_3 (sequence is synthesized)
tctgcgatatctcttccaaaaactgtgtttggtgtgagtgtaaacaaaggtgactattttacttctagggatctacaaatgggatgcatttcaaacacttcttgtaataaagcataacaa

SEQ ID NO: 954026 - DNA, 120 bp, Artificial Sequence
  ENSG00000272434_0 (sequence is synthesized)
taggacgtgcccccactaatcaggtagtcggccatggccaacacaggacaccgccgcgtgtctccgaggaccgcgccgcagagacctctgccgtctgggccgcgccaatataaaccagcc

SEQ ID NO: 954027 - DNA, 120 bp, Artificial Sequence
  ENSG00000272434_1 (sequence is synthesized)
cgtcagggcgtagtgcgcgcgggcggaacctacccgcctcgctgcggcgggggcggagctggcgctgaagaaacagcgcatgcgtatagcacatagtggccttgtcactgaggagctgcc

SEQ ID NO: 954028 - DNA, 120 bp, Artificial Sequence
  ENSG00000272434_2 (sequence is synthesized)
acttcacgtcccaccccacactccccgcaggacctcggccagttcaattaacaggcaagggtttacttctactgtcccgccgggctcctccccaaaataaagagacgttgttcactaaca

SEQ ID NO: 954029 - DNA, 120 bp, Artificial Sequence
  ENSG00000248242_0 (sequence is synthesized)
tttccttattactagcatggaggggtgggactagaagacttctagtttcctcccagctcaatgaaagcaaagaatgctttcttcttaagttttattagtgtttctcagtatttctttaac

SEQ ID NO: 954030 - DNA, 120 bp, Artificial Sequence
  ENSG00000248242_1 (sequence is synthesized)
cttccgtggatgaactgcctgatacactggaagtgcacaaatagatttaaaagtttcacttatgaggggaagattaacattcaactaaaggatactctgaatgatcattctacttgtgca

SEQ ID NO: 954031 - DNA, 120 bp, Artificial Sequence
  ENSG00000248242_2 (sequence is synthesized)
gcctcagcttcctgagtaactaggactacagggtgaagttcaacaacatagtactcaaggatcacatttttgcagcgtgaggacagactaatacacagaactgagatcatcactgcatca

SEQ ID NO: 954032 - DNA, 120 bp, Artificial Sequence
  ENSG00000248242_3 (sequence is synthesized)
caggccagcaagtgatgggaggcaatatgacagagtctttaagaagatgaacgctggagccatacttccaggctatgaccttcactgcaatgttgaatggaagtggcaagaaaggatatc

SEQ ID NO: 954033 - DNA, 120 bp, Artificial Sequence
  ENSG00000248243_0 (sequence is synthesized)
agaagctccacccctcggcagctgcagtcaggccctatctgggcctttccagaagcaactcaggagccccaagacctgcaggggtatgtgcaccctgacccctgatgcatagccctgcac

SEQ ID NO: 954034 - DNA, 120 bp, Artificial Sequence
  ENSG00000248243_1 (sequence is synthesized)
ctgcaaccagctggcctcgggctgcaaacaaggcggggacttactgtcttgtcatcccctggacccaagatgagggtgctaggacgccctcccacaccaccccagcttacccaggggcac

SEQ ID NO: 954035 - DNA, 120 bp, Artificial Sequence
  ENSG00000248243_2 (sequence is synthesized)
tctaagataaaaccagactgtggacaacaggacagataagacacacatggctctgcactgcctgggtctgttattgtgtggaggaatgtcttagtctgttgctcctgtgggtgtcgctaa

SEQ ID NO: 954036 - DNA, 120 bp, Artificial Sequence
  ENSG00000248243_3 (sequence is synthesized)
agcacgaaccaggggtcttcatccttagaaagcagttagacacctgagaaccaatcccaaactgcagccttccacagaaccttctggaaccttctggaatgcaactcattactgccagag

SEQ ID NO: 954037 - DNA, 120 bp, Artificial Sequence
  ENSG00000248243_4 (sequence is synthesized)
gctctttgatgagagtctactctccaccatttgtcttcaaagagaatacccacatattatctttctgtggaaaggcttggaaatctagtgtatattttacactaagagcatatctcaatt

SEQ ID NO: 954038 - DNA, 120 bp, Artificial Sequence
  ENSG00000248240_0 (sequence is synthesized)
cgggtgtttccttgttcggaatggggttggctcctctttgattttttacttctggtgacccacgcaaaagcagtcccgacctggttgtattaataataaaggctgtaaggatcagccttt

SEQ ID NO: 954039 - DNA, 120 bp, Artificial Sequence
  ENSG00000248240_1 (sequence is synthesized)
tgaacggtccagccgagaactaaccacagagcgcgttttagtggagtggtacttatttttaaataagatactgagtttactacaaatggaaggtttgaggcaaccttgatggagcaagtg

SEQ ID NO: 954040 - DNA, 120 bp, Artificial Sequence
  ENSG00000248240_2 (sequence is synthesized)
tcactttgtgtctctgacatattttgaacgcaagactatatttactagcagctctgtgtccttgctcattggaaaatgatctttcctcaagacttgctgacacgtttctgtttaaggcat

SEQ ID NO: 954041 - DNA, 120 bp, Artificial Sequence
  ENSG00000248240_3 (sequence is synthesized)
gacaatcctaaaggccaacaattgtggacgggggcaactcttcctttcattatgtactggtgtagtcaattatgcaaagtctggtcaaccaaagaccaccaggctcaagccatcagtttt

SEQ ID NO: 954042 - DNA, 120 bp, Artificial Sequence
  ENSG00000248245_0 (sequence is synthesized)
aggcagtgcaagagggcatggattcagggaaatatgaaaaattgaggctttaatgcaatccatctatcataaaagagatgcggttttcctaggttgctcctgctggtctccgactcctga

SEQ ID NO: 954043 - DNA, 120 bp, Artificial Sequence
  ENSG00000248245_1 (sequence is synthesized)
tcttccagctcctattgcagggctgctttgtgtgggaaagctggtggcagatcatggaaagacggcccatcatagaaccaaacacacgtgatcacaggcatgacgcaaaacaatgaagct

SEQ ID NO: 954044 - DNA, 120 bp, Artificial Sequence
  ENSG00000248245_2 (sequence is synthesized)
tggtaccttcctctcgccacaggatgtttgcaactgcagcagcagagaatgaggaaagcaggagtgtgatggagtcaaggaaaaagaagaaagcagtgttaaaccgtcactgcagtgatt

SEQ ID NO: 954045 - DNA, 120 bp, Artificial Sequence
  ENSG00000248245_3 (sequence is synthesized)
atcatcattattgctgtcatcaattgcctgtgaggggcattggcctgaggctgtttcctactctctccttgagcctttatggatatattttggataaatggacctagaccaacatggcaa

SEQ ID NO: 954046 - DNA, 120 bp, Artificial Sequence
  ENSG00000248245_4 (sequence is synthesized)
aagtctgaacacagaggctaagtttttcactcaggaaccagctccagggttccttcgttcttcctgaaagtcttggaccctcagcatccttccctagactactctgtggcctagattctg

SEQ ID NO: 954047 - DNA, 120 bp, Artificial Sequence
  ENSG00000249112_0 (sequence is synthesized)
attgaggctgaatttccatccctaaaggacaaacctgtaacaactgaattttggtcacttctaattctgccttttcgtaaatgtgatggagacaactcttcctttcagaaccatgatcaa

SEQ ID NO: 954048 - DNA, 120 bp, Artificial Sequence
  ENSG00000249112_1 (sequence is synthesized)
agcaatttacgctttgcagcttgctgagaaaacaacatgggcaaattctcacaaagggtctaaggtatgaagaccaaccctgccctcaagtgctgttcaggcttagcagctgatctggtt

SEQ ID NO: 954049 - DNA, 120 bp, Artificial Sequence
  ENSG00000249112_2 (sequence is synthesized)
gaaatcagggaaaggttagaagtctctcatccttatgcttctggatgcagacatgattttaagaagaaagaaaggcaggaagaaaggaaagaaaagcccattttggaaaccaccgtattc

SEQ ID NO: 954050 - DNA, 120 bp, Artificial Sequence
  ENSG00000249112_3 (sequence is synthesized)
aactcaaaacatgctggtcataacaaattaaatgacaaggaagtgcctgagtcacactgtatgggagctatgtggtgtataaagctatgcggtgagctgagatccatgtaaagggaaggc

SEQ ID NO: 954051 - DNA, 120 bp, Artificial Sequence
  ENSG00000249112_4 (sequence is synthesized)
cacagaagcacccaaagcatcgtgggtcggctacagaagaagacaattttgactccctgtacaggacactatcttggtaccactcactttcctccctgcaaaatctgaatattgctcaca

SEQ ID NO: 954052 - DNA, 120 bp, Artificial Sequence
  ENSG00000249112_5 (sequence is synthesized)
tatattcaacatatgtccaagaagcttcttatgtatgtctcctgcctcttctttccatacctcccaaatgttgatccaaaacactgatcaattttaataaattaagcaaagttttgaaaa

SEQ ID NO: 954053 - DNA, 120 bp, Artificial Sequence
  ENSG00000249114_0 (sequence is synthesized)
tccttggaggggcttctgggtggccagccgtgtattgttgcttggttgtgcttttagggttgtctggcttgtgtgggtgctgggtttgtcggtgcagagagcacagctggttccaggctg

SEQ ID NO: 954054 - DNA, 120 bp, Artificial Sequence
  ENSG00000249114_1 (sequence is synthesized)
gagggtgacactatagcgccagttcttcttacagccttgttctgcactttctaaaaatattcctgacaaacagctaatgggcattttggccattctattgccaaactattgctgccattt

SEQ ID NO: 954055 - DNA, 120 bp, Artificial Sequence
  ENSG00000249114_2 (sequence is synthesized)
caaatggaatgcttctccttcaagcctgttcatcttgacttatatgatggggatagattcatccgtttcatgggacttcacaacagcccactcaccagaggctctttgaaaacaatcaag

SEQ ID NO: 954056 - DNA, 120 bp, Artificial Sequence
  ENSG00000249116_0 (sequence is synthesized)
attttgcccagctttctgtctggggcgcacggagcaatcggaagaggggaccgagcgcccaccccaggactccctcggccagtaccctccctgggaccttgcccaagttcaaagcggagg

SEQ ID NO: 954057 - DNA, 120 bp, Artificial Sequence
  ENSG00000249116_1 (sequence is synthesized)
ttctgcgccatcgccctccgggaccgggactcgccccggttgccctcgccccctgggccggcctcccgtgatgaaaatacgagttctccgatcgcgttggaccggagcgggccacgtccg

SEQ ID NO: 954058 - DNA, 120 bp, Artificial Sequence
  ENSG00000249116_2 (sequence is synthesized)
agctgcttgcagagggaaaccatcggaaataatgaatagccgctccatgcaaattattcagacagtttagcgtcggtagccgcgagaaatatataaagaacacgagtcaaatgacattaa

SEQ ID NO: 954059 - DNA, 120 bp, Artificial Sequence
  ENSG00000241326_0 (sequence is synthesized)
gagccactgcacccagcctgatcctattgttgcactatttatggagcaacaactttgtacaaagaacaagctttgtacagagaacaagcttggctttttctcccaacgccgaggatgctg

SEQ ID NO: 954060 - DNA, 120 bp, Artificial Sequence
  ENSG00000241326_1 (sequence is synthesized)
ttgatgctgccacgtaatagcataattttgggtgtcctcaaggacagaacttccactttgaataatggaagttagaacaatgaatttcacaggggaataaatattaatgactgacgtgaa

SEQ ID NO: 954061 - DNA, 120 bp, Artificial Sequence
  ENSG00000241324_0 (sequence is synthesized)
gccgctgcaggctccctgagatgctgaaaactgtattgtattattttacaaattaaacatatgtggcaaccagcatcaagcaaactattggcaccgttttccaacagcgttggtatctcc

SEQ ID NO: 954062 - DNA, 120 bp, Artificial Sequence
  ENSG00000241324_1 (sequence is synthesized)
attgaagacatgctagaaactgtgcaactccctgtccacaaggaattcactgtcaagtaataagcacataattattccactacttgccatgtcttaaataaaactgtgttccagagtctg

SEQ ID NO: 954063 - DNA, 120 bp, Artificial Sequence
  ENSG00000241328_0 (sequence is synthesized)
actctctgcatcatgctgctgctgctacaggatgggagaatggtggtatcagtgattcaagactgtttttcctacatcttcagtgcctttttcaatgctgtggagttaaaaccagcatag

SEQ ID NO: 954064 - DNA, 120 bp, Artificial Sequence
  ENSG00000241328_1 (sequence is synthesized)
gtctttctctgtgcttacctgctgggatccactatgatgtctaccactgaggctgttcctcctctcaagactcaagaccctctttacttcttttaactccactagaggaaggacagcagt

SEQ ID NO: 954065 - DNA, 120 bp, Artificial Sequence
  ENSG00000241328_2 (sequence is synthesized)
aaaatgttcaatgccgtttgtgtctgttcttggcagtgacattcagttctctttataaaacaagggagtagaaagagagtagaagtgacatcttcacacacacataccgtttgctagatt

SEQ ID NO: 954066 - DNA, 120 bp, Artificial Sequence
  ENSG00000241328_3 (sequence is synthesized)
tgtcaaacagctgatttcaaactgttaatatgacacagaatcaatttttttgagtcaaacttttcattatacaatagaattgaaaagttaatatcagaataactgtctgttagtaagatt

SEQ ID NO: 954067 - DNA, 120 bp, Artificial Sequence
  ENSG00000241328_4 (sequence is synthesized)
ttatttaaaaaatttggttgcatacacacctaaacattcacttacattgttatagcatatgacattgtgatgtaaaatatatttcttactctagtcacggtcataaacgatcgaaagcca

SEQ ID NO: 954068 - DNA, 120 bp, Artificial Sequence
  ENSG00000241328_5 (sequence is synthesized)
gacttaagggcattatttagtgctgagctgtctaatatggtagctattttatttaaatgtaaatgaattaaaattacataaaattaaaatcagtgtcttaaccaaagcggccacatttaa

SEQ ID NO: 954069 - DNA, 120 bp, Artificial Sequence
  ENSG00000241328_6 (sequence is synthesized)
ttgctcaataattacttgtggcaactttattgtatatcttgggtccagccttttatcatcgcagaaagttctgctggcagtgctgatgtagaaacaatctaatactatatttgtaacatt

SEQ ID NO: 954070 - DNA, 120 bp, Artificial Sequence
  ENSG00000241328_7 (sequence is synthesized)
ttctttatatgaaatttgtacataacaaataatgtccaacaattaataaaatttgtggtggtttttgtcttttgctacaataaagttttatgcaatagtatttagctggttgtattagat

SEQ ID NO: 954071 - DNA, 120 bp, Artificial Sequence
  ENSG00000241328_8 (sequence is synthesized)
agtgttgacttattgaaagaattccattgctttatttaagaaaagcaagacccaaaaccatgaagcaagaaagaataatcattagtggcatgaactcggaatccactgctcagattcaaa

SEQ ID NO: 954072 - DNA, 120 bp, Artificial Sequence
  ENSG00000241328_9 (sequence is synthesized)
tccacttttctacctgtgtgaacttggacatttatttgcctcagttctattacctgtataatggatatgacgtgaatagttttatctatatcttagtgcttaaatttataaagtggactt

SEQ ID NO: 954073 - DNA, 120 bp, Artificial Sequence
  ENSG00000241328_10 (sequence is synthesized)
taaagtggactttatattacaaatttatattcataaaatgcctacacaagtaaaagctaaattaagtgatgagttaaattcattttttgtctaaacgtatttgtgtcatatataaataaa

SEQ ID NO: 954074 - DNA, 120 bp, Artificial Sequence
  ENSG00000233096_0 (sequence is synthesized)
accctttgtgtccaggcactacattaggttctgagcacaaaatgaagacatagaatggtcctcaacaagctgctgatgcccataagaaagaggcctgcaaacatgtgtaaacaagtgtga

SEQ ID NO: 954075 - DNA, 120 bp, Artificial Sequence
  ENSG00000233096_1 (sequence is synthesized)
caagttcaccggcaaggggcagcacagggtggcactgaactcagcctcggtattgccctgaccacatggctgcatgtgagcatgccaggtgaggtgagcaggagagatgttctaggcagc

SEQ ID NO: 954076 - DNA, 120 bp, Artificial Sequence
  ENSG00000233096_2 (sequence is synthesized)
ggccacttgaggttgcacaactccttccagacacagccatctctgaaactgggagcccagtcagcccccaagcaagtacaacctgcaagtatggagaggtaacgccctaggagccatctc

SEQ ID NO: 954077 - DNA, 120 bp, Artificial Sequence
  ENSG00000233096_3 (sequence is synthesized)
taaccagtgaagaatgagagccagtaagcaagtctagccactcctcttttggagggaacattctagaaggcattctgcacacttgccaaaggtcacagaagaattgagcccctgttgccc

SEQ ID NO: 954078 - DNA, 120 bp, Artificial Sequence
  ENSG00000233096_4 (sequence is synthesized)
aaagcagcaaccttaatgatgcacactcagtggcttttcattcttccctgtctcactctctcccttttctttcacctctgctttttgggatctcctcccaaataaaccacctgcaccaag

SEQ ID NO: 954079 - DNA, 120 bp, Artificial Sequence
  ENSG00000233093_0 (sequence is synthesized)
aatcagatgcagacatggctggatgttctttgctgggctgctgagtcagaagcctggacgggccagcttcagttttaatgaagtggctcaggaaggaagtgctaacagagatgggtgcac

SEQ ID NO: 954080 - DNA, 120 bp, Artificial Sequence
  ENSG00000233093_1 (sequence is synthesized)
agtgcagtcagtgggtgggagctgatgctggctagaagacctgagtcttccgagaggcagcttgattcctggaaaagactactgggctggaagtcaggaggcctggggtactctcagctc

SEQ ID NO: 954081 - DNA, 120 bp, Artificial Sequence
  ENSG00000233093_2 (sequence is synthesized)
gccgtaagagaagaacgagcccatgagttccagcctggtccagctcagcacctggctcacattaggcactcagtgaatgttgatgtgaacaaatgaactgattcaaagaagtgtctcctg

SEQ ID NO: 954082 - DNA, 120 bp, Artificial Sequence
  ENSG00000233093_3 (sequence is synthesized)
aagttgcttctttccaatccagctaacaaatgcagtattctgaatggaggtaccagagatcacgtcatcttcagctttctgctgcagatccacatgaagaatcacacatatccttaatgt

SEQ ID NO: 954083 - DNA, 120 bp, Artificial Sequence
  ENSG00000233093_4 (sequence is synthesized)
tagataggactttgcattgaacactttaaaatgtgaagtctggctttgaagagggtgtataacacacataatttactgtgcatcagtctcactaatggaaaataaacaataacccataaa

SEQ ID NO: 954084 - DNA, 120 bp, Artificial Sequence
  ENSG00000233093_5 (sequence is synthesized)
aagcctgcagccgtaagagaagaacgagcccatgagttccagcctgtgggtccttccacatgctagttcctgtacctggaatgtattctttcctgacccagaaaattccttcagggcttc

SEQ ID NO: 954085 - DNA, 120 bp, Artificial Sequence
  ENSG00000233093_6 (sequence is synthesized)
ctcttccaggaagtcttccctgagtctgtcacctcttcaccctcactccttctgcatgctcccaaaatcccctgcacttctctactgtggatgcttacccagtgcactgtggtccactct

SEQ ID NO: 954086 - DNA, 120 bp, Artificial Sequence
  ENSG00000233093_7 (sequence is synthesized)
ggcttttgtatctccttaactagcagctctgtctttttcattttggattcccagacctatcagagagcctagtgcttgccaaatgctgggaaaatacttattgaaaggatattgactact

SEQ ID NO: 954087 - DNA, 120 bp, Artificial Sequence
  ENSG00000233093_8 (sequence is synthesized)
cggtgttagccacaaggcccctcggacagtcttgccataggaaacatcaatgggagaaccttttggaatatatagagagatgctgtggggaacttatgggtttgttttttttgttgttgt

SEQ ID NO: 954088 - DNA, 120 bp, Artificial Sequence
  ENSG00000233093_9 (sequence is synthesized)
ttgtttgtttggctaaactcacagcaataggtgttagagtcatacaagggttacaatagcacccaagagcccacttatgactagaaatttcttccagaattcccttcaaagcatgactct

SEQ ID NO: 954089 - DNA, 120 bp, Artificial Sequence
  ENSG00000233093_10 (sequence is synthesized)
cctgctgtgtttggggtggggagtgtgtggcagtggcgaggggacacaatcctgcctctaggatacaactctggagtggatatgtgccaagaaagctcaccttggggacctgggatggag

SEQ ID NO: 954090 - DNA, 120 bp, Artificial Sequence
  ENSG00000233093_11 (sequence is synthesized)
actatgaaaactaataccagaaaccagatcaagacacccaacatccccattcccaaccacactcatctatgctggaggtgattatccccacgcccctcctatgttactcttcctgagcca

SEQ ID NO: 954091 - DNA, 120 bp, Artificial Sequence
  ENSG00000233093_12 (sequence is synthesized)
ttggagtgccagaataaacataaccaactagaagacttctgcagaatggaaaaggatggaagattccagactagaaaggccaaggacagcagatggacactgaatgttgagatttgtcag

SEQ ID NO: 954092 - DNA, 120 bp, Artificial Sequence
  ENSG00000233093_13 (sequence is synthesized)
tggagtgctgcaagacaggatgcaaagttatgacaggtgtctttgcttctagagaggcttcgcagacatgcattctatcccaccccaccccgccccaccccctgggtgtgtaggtactcc

SEQ ID NO: 954093 - DNA, 120 bp, Artificial Sequence
  ENSG00000233093_14 (sequence is synthesized)
tccttcttgttcccacagcactctgtgttcacttctacagtggtgcttttcacactgtttatgattgtctgtctgctcatgtattggtcagcttctctgaactggaaactcctggcaaag

SEQ ID NO: 954094 - DNA, 120 bp, Artificial Sequence
  ENSG00000233093_15 (sequence is synthesized)
acatgctgcatgaccatgggctgactggagaacctgaggtgctgtgcagagaccagaggaaggctttgatcccaagcctgcagccggtccagctcagcacctggctcacattaggcactc

SEQ ID NO: 954095 - DNA, 120 bp, Artificial Sequence
  ENSG00000253552_0 (sequence is synthesized)
ttctgaaccaggaattgtctccaactccaggcgctcagggaatcgccttttccggtgtccaggcgctctgcagacaaataaacagcagaagcaaatggtcaccgagccggcagtcagctt

SEQ ID NO: 954096 - DNA, 120 bp, Artificial Sequence
  ENSG00000253552_1 (sequence is synthesized)
tctgggagtgggagatgatggggaaagaggaaagaatcgtccgctcgccggaccctggcttggagaagttctgcgctccgctgggactctgcgggccctttgcgtctacagacctatccc

SEQ ID NO: 954097 - DNA, 120 bp, Artificial Sequence
  ENSG00000253552_2 (sequence is synthesized)
tgccccgactaccccttcactcagacccagggaaggacacgtttctatgccttacagagacttgaagcctgaaagcctggccaagtttgggaagaagaggagccctctcagagctcaaga

SEQ ID NO: 954098 - DNA, 120 bp, Artificial Sequence
  ENSG00000253552_3 (sequence is synthesized)
caagagttcagctcaagttgaacatacatacacacactctcacacacaaattatgtgagccgtcagaatccaagtgaatccagctcaagctatctacaaggtttttacatgcaaggtcaa

SEQ ID NO: 954099 - DNA, 120 bp, Artificial Sequence
  ENSG00000253552_4 (sequence is synthesized)
gtatctcaatccagaggacttttgttttcttaatgaaaagcttagaaaacacatgaatcttagatttttaatgttttttaaatggagtttattcttagcacatggctttctatgtagcca

SEQ ID NO: 954100 - DNA, 120 bp, Artificial Sequence
  ENSG00000253552_5 (sequence is synthesized)
catcacaatttgtacagttccacataagtctaaatgcactcccctctccccaaagaccgtgccccagaaggggacaacagtatctctgtaacagtgtcttaaataaatgcaagtaagaaa

SEQ ID NO: 954101 - DNA, 120 bp, Artificial Sequence
  ENSG00000253552_6 (sequence is synthesized)
gccacccaccactcccctgcgtgacacttaggagtatgtaattattatggttattatttttgctgtttccttatctccaagtctaatattcatggctgctgtaccccataaatcgttcag

SEQ ID NO: 954102 - DNA, 120 bp, Artificial Sequence
  ENSG00000253552_7 (sequence is synthesized)
actaatgagtcacagagagatgctgcccaggtctctcactttacaatggctgccgccgccgccgtggcctctctctccgcgtttttggcgctcgcttgctccctcgctcgcccggcgcgg

SEQ ID NO: 954103 - DNA, 120 bp, Artificial Sequence
  ENSG00000253552_8 (sequence is synthesized)
ccctgcggaaaaggccccaagatctggtgagggcctgccagctccgtcctccctgccgagggctctctcctgccttcctgaaggagttaaaagcctttggagataaatctgagggtgtgt

SEQ ID NO: 954104 - DNA, 120 bp, Artificial Sequence
  ENSG00000253552_9 (sequence is synthesized)
gtttttaaaaatcaaatgagcgagagtcccccagactgttctctatctgatgcatgtctctagagctgaacagtggaatggcagaatttcaaaacgcctgatggtggcatttgaaggctt

SEQ ID NO: 954105 - DNA, 120 bp, Artificial Sequence
  ENSG00000253552_10 (sequence is synthesized)
ccccaccacctacactagacacaagatttgagaggaacaacactttaccagccatttgaccaattaattctttggggataattttcttgtagtagtttaaaataatgcacacaacgcagg

SEQ ID NO: 954106 - DNA, 120 bp, Artificial Sequence
  ENSG00000253552_11 (sequence is synthesized)
aggccccggcccgtggtggtggccgctgcccagcggcccggcacccccatagtccatggcgcccgaggcagcgtgggggagaggagatgggcagactggaaacctcaaactggaaggcct

SEQ ID NO: 954107 - DNA, 120 bp, Artificial Sequence
  ENSG00000253552_12 (sequence is synthesized)
tctctgcccaaagaagagatcccattgaaggaaaaggaaacgccaagacatagaaaaccacgcttttcccgtaggaagaaccgatgatgagccctgatgaaagaaggaagaagacccgct

SEQ ID NO: 954108 - DNA, 120 bp, Artificial Sequence
  ENSG00000253552_13 (sequence is synthesized)
gtctgcgaaggcctaaaggttagaaatacagcaatttttctcatgccgaaggaaaggcaaaatggtctaagaaactgcaagagtgtgatacaagttttcctcaacagcgagctgggactg

SEQ ID NO: 954109 - DNA, 120 bp, Artificial Sequence
  ENSG00000253552_14 (sequence is synthesized)
gcgacaatttcttaactcacagcctccgcagtcgccttagtcgacaaagagagcagcccacgcagcggccgccgcgcccgtgcccgtggcctttacttgcttttgccctgaagttcagtg

SEQ ID NO: 954110 - DNA, 120 bp, Artificial Sequence
  ENSG00000253552_15 (sequence is synthesized)
caaacacactccctctgactctccacaacccatctttgccttctgcaaccgcttctcctgcccatcgctggttttggggtaggctctttgtctgcctgaggccccgcactcgcagggcaa

SEQ ID NO: 954111 - DNA, 120 bp, Artificial Sequence
  ENSG00000253552_16 (sequence is synthesized)
gaagcttaaaggaatccaactccaaactcctccgaagttaaatattgaccagaacctctttcaacaggccgcggttgccaggaaccgtggagggccaactcctcccaaccgccctggtgc

SEQ ID NO: 954112 - DNA, 120 bp, Artificial Sequence
  ENSG00000253552_17 (sequence is synthesized)
gctctgcagacaaataaacagcagaaggtgaatggcggctgcgagggaagggagttggaggccgggagtgggaagcgaggctcatgcgggcgccaaggtggccctgggggtgacgcgaac

SEQ ID NO: 954113 - DNA, 120 bp, Artificial Sequence
  ENSG00000253552_18 (sequence is synthesized)
atcagggagtcaccagggcactcgtccgtgtggcgcactcattgctcgaaatgttccagtctacaaatggtccgaagatggtgatttatttttgtaaaataaatacatactccatctcca

SEQ ID NO: 954114 - DNA, 83 bp, Artificial Sequence
  ENSG00000253552_19 (sequence is synthesized)
agggcaggaagaaccggctgtgctggatgtcgtgggcagtagcttggggaccaggagccaggccagaggaccctcttccagaa

SEQ ID NO: 954115 - DNA, 120 bp, Artificial Sequence
  ENSG00000253552_20 (sequence is synthesized)
ttggggaccaggagccaggccagaggaccctcttccagaaggcactcctttacctgagctggagctgctggttttctgctttgtgttttgtcgagactctttcatccaggggaagatttg

SEQ ID NO: 954116 - DNA, 120 bp, Artificial Sequence
  ENSG00000253552_21 (sequence is synthesized)
actcacttcaccggcctccaacttggcctgcgctgggactgatactgtggtcctggtcaccagagccaaaatagggggaaagctggcttggaaaaagcaggcaaccaagggtacacaccg

SEQ ID NO: 954117 - DNA, 120 bp, Artificial Sequence
  ENSG00000253552_22 (sequence is synthesized)
ttagccaatatttgcaaggctgttggcagattagatatatctgtactcaaacactgcaatctgatttctctgtcaaaagtacacttaacatttttgtcccattacttaaatctagtggat

SEQ ID NO: 954118 - DNA, 120 bp, Artificial Sequence
  ENSG00000253552_23 (sequence is synthesized)
caaaaatccgttcggcggcattttctcttcaaacccgcccggtcggatgtggcatttgaagaaagaaggcgtgggtcaataatcaacccgcactttctcctccaaactgctgacgcgact

SEQ ID NO: 954119 - DNA, 120 bp, Artificial Sequence
  ENSG00000253552_24 (sequence is synthesized)
tccagaaattaccagccgccgccgctgcgccctttctagacaaatcccacagcagttcacccggctcccccaaaaccgcagagcttttctttactgagaggaccccttggttccaccaat

SEQ ID NO: 954120 - DNA, 120 bp, Artificial Sequence
  ENSG00000253552_25 (sequence is synthesized)
tcccccaaatccccgtggctcccgatctctcatccagggggactagaagaaaagattttctcagcactagaagaatacttggagcagcaaaggtgcccgtggtgtctttctaccattcaa

SEQ ID NO: 954121 - DNA, 120 bp, Artificial Sequence
  ENSG00000253552_26 (sequence is synthesized)
gcctctggcggttccaaggctgtgcagccggggaggaaggtgaggaatatcgtgggtaagaagaggcaccaaaatcacagaatagagaggaaaattattgaggaaatgtacttgcctgtg

SEQ ID NO: 954122 - DNA, 120 bp, Artificial Sequence
  ENSG00000253552_27 (sequence is synthesized)
agggtgaagctggcatttcgaggtagaaggggactagccttttttgatatctaatagtttagcattatacgtaatggactcactttagcactttcatgggaggaaaaaccaatctgagct

SEQ ID NO: 954123 - DNA, 120 bp, Artificial Sequence
  ENSG00000253552_28 (sequence is synthesized)
ctataaatgtggctcttggcttctcactgtgcatgcttttatgtagaaccagagtccatccttagatatttattcagcttgctggcactgaagcaacaataaaaagatgcctctaacaaa

SEQ ID NO: 954124 - DNA, 120 bp, Artificial Sequence
  ENSG00000253552_29 (sequence is synthesized)
aggaaaaggaaacgccaagacatagaaaaccacgcttttcccgtaggaagaaccgatgatgagccctgatgaaagaaggaagaagacccgctgtctgcgaaggcctaaaggccgcggttg

SEQ ID NO: 954125 - DNA, 120 bp, Artificial Sequence
  ENSG00000253552_30 (sequence is synthesized)
cagacccaggtaacctcttaccccagcctgccccaaaccagccctccgctgtctgtctgccttcacgcaattctgtagatagcgctaagaggggatatcaaatagctgaggagtcccctg

SEQ ID NO: 954126 - DNA, 120 bp, Artificial Sequence
  ENSG00000253552_31 (sequence is synthesized)
acccctggcttcggagccccctagcacgtggaacaagtggccgcacaccggtagctgcgctctgccacagttcgacccgtagcccccacaaaccaaaggaaaaggacccaggatccacgc

SEQ ID NO: 954127 - DNA, 120 bp, Artificial Sequence
  ENSG00000253552_32 (sequence is synthesized)
tgcgcgctgcgccccctttctcttgttcaaacttgctttctgtgtccccaaagggagtgccccctggtcttggggctcctggcatgaccatgagcaaggtggactcagccatcctgcact

SEQ ID NO: 954128 - DNA, 120 bp, Artificial Sequence
  ENSG00000253552_33 (sequence is synthesized)
cttccccagcgtgaatcagaacattaccaactgtctgcgcatccgtcccacttcatcaccaaagccaggatgtgaccgcagaaaacccaagcccgaactcacgtttccccggacgcggcg

SEQ ID NO: 954129 - DNA, 120 bp, Artificial Sequence
  ENSG00000253552_34 (sequence is synthesized)
ggaagggattctctgggccaaggggaccgagggctcccgagcaagggctggggcgccctgaaagcatacctttccactggcgccaagaccctgccgggcaaaacgcggggaccagacctg

SEQ ID NO: 954130 - DNA, 120 bp, Artificial Sequence
  ENSG00000253552_35 (sequence is synthesized)
aggagccgtgggagcccagggagatctggggcgggagcttcgttccggccagggcctctatccgccccgatacgtggctcctgggccgcgggcctcagcgggcagaagtggggctccgac

SEQ ID NO: 954131 - DNA, 120 bp, Artificial Sequence
  ENSG00000253552_36 (sequence is synthesized)
ctcaagatgaaggtccagcgtcctggcatgcagatggtcggtgccccagcctcaagccgctctgcttaaatccaaaggactggctttggagcaagcgtaggcgagattattttaaaataa

SEQ ID NO: 954132 - DNA, 120 bp, Artificial Sequence
  ENSG00000253552_37 (sequence is synthesized)
tttctttcttttttttggcgggggagtggggaaggaaaggacatgaagcaaacagaggaagctgagaaggtggaagtggctttgctggtggtgtgggctgctttcagagagctctctcct

SEQ ID NO: 954133 - DNA, 120 bp, Artificial Sequence
  ENSG00000253552_38 (sequence is synthesized)
caggcaccacaacttggagaatgtgaatgcttgctttattttcctttcctaacaaaaggaagccttgtctgggagcattcaatcacggactctcctgaaacctcactaatatgtgttcat

SEQ ID NO: 954134 - DNA, 120 bp, Artificial Sequence
  ENSG00000253552_39 (sequence is synthesized)
ttctgtaggcgcgaaatcagacccgggttcattccactggccagaggcagtcttgggaggatttgtgttctggtttattcaactctgggtgcgttccttttaggtcctagtgggctggcg

SEQ ID NO: 954135 - DNA, 120 bp, Artificial Sequence
  ENSG00000253552_40 (sequence is synthesized)
gggctaccgcagcacctagtccctcagagcaggccagctaaggctgctggaaactgagagggacgccggctggtacaatacctgctcaggggccctgctcctgcctggccttgcgcaacg

SEQ ID NO: 954136 - DNA, 120 bp, Artificial Sequence
  ENSG00000233099_0 (sequence is synthesized)
agaaatgaagagattacagctgcatagagatgcctgtcaaatgacaagtgcctggagaaagcattttgatgaatgaacaacagaatgatcacaaaacagcctttggggccagcagtgtga

SEQ ID NO: 954137 - DNA, 120 bp, Artificial Sequence
  ENSG00000233099_1 (sequence is synthesized)
ctgctcttgtgggatcctggagtgtctgatgggatgggaattacagtggatccttcacgacaggggtttgaagggcatggtccactttggtccacctctgccactctgagacagaagcac

SEQ ID NO: 954138 - DNA, 120 bp, Artificial Sequence
  ENSG00000233099_2 (sequence is synthesized)
caacccctcttcttcctcctcctcctcagtctactcagtgtgaagataacaagaatgaagaactttatgatgatgcatttccacttaacgaacaataaatatattttcttttccttgtga

SEQ ID NO: 954139 - DNA, 120 bp, Artificial Sequence
  ENSG00000233098_0 (sequence is synthesized)
ggattgaactcgtgattagccttcttcagcatatgtaaaatgatgtctgcttttcttctctatttgtcattttaccgactttttatatatagtagtttccccatatccatggaggatgta

SEQ ID NO: 954140 - DNA, 120 bp, Artificial Sequence
  ENSG00000233098_1 (sequence is synthesized)
tcccaagacccccagaggatgcttgaaaccacagataataacaaactctatgtatcctatgatttttcctgtacatccttacctatcataaaaaattgaagttgaagtataaggagaatt

SEQ ID NO: 954141 - DNA, 120 bp, Artificial Sequence
  ENSG00000233098_2 (sequence is synthesized)
tttacatcacccaggttctaatttggaaggtttctaacagccctctgtcctcttctggtgctcactgtgaaagaatttgcaccctgcaacactaagtgtttgtgctagaatccacttctg

SEQ ID NO: 954142 - DNA, 120 bp, Artificial Sequence
  ENSG00000233098_3 (sequence is synthesized)
tcctccatgaacacaatgaaacttggcctgcacctgggacatccttctccacggctagtctacaatgcaggtgctctgcacacgctccctggctgaccccaacgcagagaagatgcacgt

SEQ ID NO: 954143 - DNA, 120 bp, Artificial Sequence
  ENSG00000233098_4 (sequence is synthesized)
gagcccacccccacagcaggcgtggacatttgcctcccttttataatagctgtattcaaatgaggtatcctggaagcctcgttctgataggatgagagcagactctgtactacaacacgg

SEQ ID NO: 954144 - DNA, 120 bp, Artificial Sequence
  ENSG00000233098_5 (sequence is synthesized)
attggataatagtctccaactctgattggttaagattgtgcaatcagagatggaaattattatccaataagagttgtcaaaaaggttccttgcgcagtggtcgtcatagttcagaagcga

SEQ ID NO: 954145 - DNA, 120 bp, Artificial Sequence
  ENSG00000233098_6 (sequence is synthesized)
atgtggagttgctcactgcccaacgtagaggactaggaatcaggagtcggtggccgtatgctggaggctggagccgcgggagcgcggctcgcctcgctgcggttgttggcagtgacggag

SEQ ID NO: 954146 - DNA, 120 bp, Artificial Sequence
  ENSG00000233098_7 (sequence is synthesized)
agagagcagcgcggctggagcaggacattgtattagtttcctgcaataaaatatttttacaatgtcagtttgtcgaaactgctggactgtaaactatttctaatcgaaacctgaaattgt

SEQ ID NO: 954147 - DNA, 120 bp, Artificial Sequence
  ENSG00000233098_8 (sequence is synthesized)
gtcacaacatggctgtattacgattccatgtcagaggaaggatatatacgtgcatctggtagtggcttccagttgttgctgtcagatgtttgtttgggaatgcattcagaagagcttatc

SEQ ID NO: 954148 - DNA, 120 bp, Artificial Sequence
  ENSG00000233098_9 (sequence is synthesized)
agcagtgacacaaatcactatgtaatatagttagcctttgaacaacacggatttgaactgcaggggtctacttatgagcagattttctcccacctctaccacctgagacagcgaagacca

SEQ ID NO: 954149 - DNA, 120 bp, Artificial Sequence
  ENSG00000233098_10 (sequence is synthesized)
atcttcctcttcctccttctccttagcctgctcaacttgaagactatgatgaagagttatataatgatctacttgcatttaatgaacatgcagagaacagcgacttctcatcttgaaaaa

SEQ ID NO: 954150 - DNA, 120 bp, Artificial Sequence
  ENSG00000233098_11 (sequence is synthesized)
ctcccccactctactgaggcttgcattttgcagctgtctttcatgtaaaaattatacataaaaaaaggatcttcagaacaaccaaagaattttaaatgactacatactgactgagggaag

SEQ ID NO: 954151 - DNA, 120 bp, Artificial Sequence
  ENSG00000233098_12 (sequence is synthesized)
gcttcagaaagaaaagagcaaaaacaacagaccttcattcagcttaggaacataataaataggacgaagttgaataaacgaaatggaggggagtgaagtattccagatggaagaggcagt

SEQ ID NO: 954152 - DNA, 120 bp, Artificial Sequence
  ENSG00000233098_13 (sequence is synthesized)
acgtggccaagaggaaacagaccatgtgcgctggagaaaaaggatggccagacttgcagaaacctggaattggtgattggctttagaagtggagagacaaaaaaggaggcatagaaagtg

SEQ ID NO: 954153 - DNA, 120 bp, Artificial Sequence
  ENSG00000233098_14 (sequence is synthesized)
ggcctcagagaagggtgtcccagatgtaggcaaagcgtcctccatgtgttcctggaggaccgtcccaagtccttctccattctcccaacctcttgggcctggtaagtctggatgcgagcg

SEQ ID NO: 954154 - DNA, 120 bp, Artificial Sequence
  ENSG00000233098_15 (sequence is synthesized)
catcccacggggccgaggcacagggagagaggaacggggcagagggaggaaagcgtgtgcaggggcccggagcgccaggctgccagggcttcaccccatggccaccggggagctgtggcc

SEQ ID NO: 954155 - DNA, 120 bp, Artificial Sequence
  ENSG00000233098_16 (sequence is synthesized)
ccactcggcccaaggcagagtccggccctcctgctgctggcactgtcacctccctggggtcctgccttctgggtccctgtgggcctcctgtcatctggcactggaaataagctagcgaag

SEQ ID NO: 954156 - DNA, 120 bp, Artificial Sequence
  ENSG00000233098_17 (sequence is synthesized)
caaaatttcgtgaatattggcctttgcatctttttcttcattttcagtgctggtttttctgttgggtcatttatgttcttacattgatttgaataattttaaaatgtattttataaatta

SEQ ID NO: 954157 - DNA, 120 bp, Artificial Sequence
  ENSG00000233098_18 (sequence is synthesized)
attcttcatgggctcatttctagtgtagatagttgtttcctagtctggtcattgttctttaattgtattttgcatttctttcttgctgatacataggaatctgattgattttatgtattc

SEQ ID NO: 954158 - DNA, 120 bp, Artificial Sequence
  ENSG00000233098_19 (sequence is synthesized)
atcttgcatcctgtagcctggcttaattcacatattcataaccatcatttttggattgtggtgtatttttcatgtacataatagtgtcagccacatacaataacagctgtattgcttaaa

SEQ ID NO: 954159 - DNA, 120 bp, Artificial Sequence
  ENSG00000233098_20 (sequence is synthesized)
tgttggttcttatacctttatttttgttttattgtcccaattacacctccagcactgtgtgaaatagagggggtatgtccaggaagtcttgcttggttctgattacagtggaaaagcttc

SEQ ID NO: 954160 - DNA, 120 bp, Artificial Sequence
  ENSG00000233098_21 (sequence is synthesized)
agtggtcctgtgttgtaatttcattttagacaagcttaatcagattaaggaagctgccttcctttgcatttgctaagagttatgactaattgttgaatttgaataaatgctttttttaca

SEQ ID NO: 954161 - DNA, 120 bp, Artificial Sequence
  ENSG00000233098_22 (sequence is synthesized)
tggctgctctgacacagcttccattcggcagggtctcactcttgtcgcccagactgcattgcagtggggtgatctcggctcattgcaacctctgtctcccggattcaagcaattctcctg

SEQ ID NO: 954162 - DNA, 120 bp, Artificial Sequence
  ENSG00000233098_23 (sequence is synthesized)
taatgaacagaagtctaatgcctacatttaaaggatagcccggcccccagtaaacgcggattcctgctcgtggccttctacgcccattactggagcagcagccatcagcgtagacgacga

SEQ ID NO: 954163 - DNA, 120 bp, Artificial Sequence
  ENSG00000233098_24 (sequence is synthesized)
cgaagtctcccatgtaggaaaacgtgtctctgctaactggaggcgccggcttcaccctcggcttcatgtgcttgcatatggctctgcgctttcatctccatctccatccagtggctcacg

SEQ ID NO: 954164 - DNA, 120 bp, Artificial Sequence
  ENSG00000233098_25 (sequence is synthesized)
gagtcgcttgctggctttcgtctctgattcttgtccatgttgattttcctgcccttctgaaacttccgggcttgcagatttcctgacaaagtcccaggtctcatcctctgtggcaaactt

SEQ ID NO: 954165 - DNA, 120 bp, Artificial Sequence
  ENSG00000233098_26 (sequence is synthesized)
cttaaatctggcagcaggaaaccggtccacctgtgctttgcactcattcccggtcagaaagaccccggtcttgccgcccctcctcacggcatagaacatcccgaacccgtgagagcagcg

SEQ ID NO: 954166 - DNA, 120 bp, Artificial Sequence
  ENSG00000233098_27 (sequence is synthesized)
gcagggcaaggcggccaaggcgactctgcggccaggaacagaagccggctcatcgctcactcccggcaccaggaagcatttcgactcccaaggaaccactaattttacaaagagagttgt

SEQ ID NO: 954167 - DNA, 120 bp, Artificial Sequence
  ENSG00000233098_28 (sequence is synthesized)
cctaaactgtgacaaattttccagtacttaattctttttacaattcattcgttttttaaatgacaaaattgtatatatgttgtgtaaaacctttttagaaataggtagatggtggaatga

SEQ ID NO: 954168 - DNA, 120 bp, Artificial Sequence
  ENSG00000233098_29 (sequence is synthesized)
ttgcattgcgctcaggaacatatgcatacttactttttgtggtgagaacccttcttgattttcaagaatacgatacattaactgcagttaccatgttgtgcaatgtatctcttaaactta

SEQ ID NO: 954169 - DNA, 120 bp, Artificial Sequence
  ENSG00000233098_30 (sequence is synthesized)
ttcctcctgtctaactacacttttgaatgatttcaccgtctccccaaacccctgcctcccacccccggtaacctccattctactctctgcttctgtgagtagaagcaggaggctggagaa

SEQ ID NO: 954170 - DNA, 120 bp, Artificial Sequence
  ENSG00000233098_31 (sequence is synthesized)
cagaggtcagacattccttttagtaaggactccaatatggtttctcacctactcactccaacaaaattgctcttctcaaagcacaaacgatattgttaaattatgaattaaagcataatt

SEQ ID NO: 954171 - DNA, 120 bp, Artificial Sequence
  ENSG00000233098_32 (sequence is synthesized)
cctcagcctttgtcttaatttatgtatcagcagcatttgacacaggtgatctctcctttttgcaaaactttctttgatagaattccagaacacttaacccactttccccccgacattttt

SEQ ID NO: 954172 - DNA, 120 bp, Artificial Sequence
  ENSG00000233098_33 (sequence is synthesized)
ttgctgtttttttctcacctttactactttttaaatgttagagaagcactaggctcaggacctggacttatctttcttttatttactttcttactaatttttgtgtcattaatttcctga

SEQ ID NO: 954173 - DNA, 120 bp, Artificial Sequence
  ENSG00000233098_34 (sequence is synthesized)
tatttcatattatacctcaacactagactacacccagcaccgtctgacttcttcacttgggtgtcagccaagaatttcaaaatgaagttccacatggagcctccaatactccccagactt

SEQ ID NO: 954174 - DNA, 120 bp, Artificial Sequence
  ENSG00000233098_35 (sequence is synthesized)
gcccttcccctatctgtttaatggcaactcccattttatagtttctcagctcaatattcttgatatccccttttagttctctctgtatctgtctggttctcattctctatctctccatca

SEQ ID NO: 954175 - DNA, 120 bp, Artificial Sequence
  ENSG00000233098_36 (sequence is synthesized)
cacacacacacacacacacactttcagatctgttgtgtatggaaaacctgccagctttgcctttaaagtgcagtaattccaaatggtgttttcaaattcaccttcccaccctcaccactt

SEQ ID NO: 954176 - DNA, 120 bp, Artificial Sequence
  ENSG00000233098_37 (sequence is synthesized)
ccctcaccacttggtaactacactacttccctcacacggtcagggctctactgcagacatttcttggaggaaataatgagaactattataaattcttatttcaggcaccctcaaaattat

SEQ ID NO: 954177 - DNA, 120 bp, Artificial Sequence
  ENSG00000233098_38 (sequence is synthesized)
aggctagccatattctatatgaatttaagcttttatcattgccctttttttcattccagtctctacacagcaaccacagtatgcaattttttagaattccaagccgcatcataacacttt

SEQ ID NO: 954178 - DNA, 76 bp, Artificial Sequence
  ENSG00000233098_39 (sequence is synthesized)
atgcaattttttagaattccaagccgcatcataacacttttttttttgagacggcgtttggtcgcaacctccgcat

SEQ ID NO: 954179 - DNA, 120 bp, Artificial Sequence
  ENSG00000233098_40 (sequence is synthesized)
aggcgtgagccaccgtgcccggccaacgctcctgttttaaagtacctgcgctattacttcttttctccctcattagaatttaagcttaacaaacctgggtaactttatatacttttccac

SEQ ID NO: 954180 - DNA, 120 bp, Artificial Sequence
  ENSG00000233098_41 (sequence is synthesized)
gggtaactttatatacttttccactgatctgtctccatgagctggagatcacttagtgtaaggtaaatgatcaataaatgttttcaaataacagaatcaattattaatagttttctttct

SEQ ID NO: 954181 - DNA, 120 bp, Artificial Sequence
  ENSG00000233098_42 (sequence is synthesized)
ttgagtatacatttagactttcaaaaatcaagaaaatagattggtcaagagatttccatttgttttgattttgttatcctttgattagattagctgtgttagtatagatttcagtgtggg

SEQ ID NO: 954182 - DNA, 120 bp, Artificial Sequence
  ENSG00000233098_43 (sequence is synthesized)
aagctataagcatttcctaaattttaaaatgaaaggcatgggatttgaatatccattccttttatttaaggaataaagacaagcctagcttttaaaatatattttatatatgtaaactat

SEQ ID NO: 954183 - DNA, 120 bp, Artificial Sequence
  ENSG00000233098_44 (sequence is synthesized)
ctaaatttatttttctctttatccctgaatactttttcaagttattcatctcattttaaaaaatctacctcgataacattttaaaatacatatgcaacttcattaagaatatctttgttc

SEQ ID NO: 954184 - DNA, 120 bp, Artificial Sequence
  ENSG00000233098_45 (sequence is synthesized)
cactgaatagcttgtcaaataatacattagcagtacaatttcctcataattcttagacttgtttgattaaatttatagatttcctactctcaactaataaattcattcaagtataataca

SEQ ID NO: 954185 - DNA, 120 bp, Artificial Sequence
  ENSG00000233098_46 (sequence is synthesized)
gacagtgcctctgatcttctcatgacttaaacgcgatggaaggctcttgaagacgcatttatattacatattgggaggtacagaagctcaggcagaaaggtgttaaatggtttgcagaat

SEQ ID NO: 954186 - DNA, 120 bp, Artificial Sequence
  ENSG00000233098_47 (sequence is synthesized)
tgttgggaaggctaagcttccaggagcagctcccaaagtctccacacacaactggaccaccagggaacctgctccctccaccaggacaggacttggaaacctgccaccgcaattaccagc

SEQ ID NO: 954187 - DNA, 120 bp, Artificial Sequence
  ENSG00000233098_48 (sequence is synthesized)
accagaaggatcttgtctctgctaagtctctgtcgacatagtgaataccctgtgccctgcctctctctccctgactcaggtcccattccaggtcttgcccaagtctttctgattggtggg

SEQ ID NO: 954188 - DNA, 120 bp, Artificial Sequence
  ENSG00000233098_49 (sequence is synthesized)
acttaaatcacacccaaaattccagctgcaggagagctctgagatttcatctttccaacctctgtgtgctacgtgggggttggagcacttgctgacaagccttgcaaccaccattgacag

SEQ ID NO: 954189 - DNA, 120 bp, Artificial Sequence
  ENSG00000233098_50 (sequence is synthesized)
ctattagaatcccccaaagtgggataccagtgaggacctcaccagcagctgctgtctctccaatgcagctccacagggcctgtgagcagggctggctatgagatcctgccctgaagagca

SEQ ID NO: 954190 - DNA, 120 bp, Artificial Sequence
  ENSG00000233098_51 (sequence is synthesized)
gtactgggctgctctgctaggcacctgcatgtcctgcaaagccatctgcaaccatcagagccagcgcacctgtgcagcctcctgcgctctgctgacaagctcaatcacggtgtcatttta

SEQ ID NO: 954191 - DNA, 120 bp, Artificial Sequence
  ENSG00000233098_52 (sequence is synthesized)
ctgccaccacgcccgaaagtacaccaaatgtaaagcagaggcagacgagacaagatgcaggctccaccagaggccactccagcttcgcgaccaacacccttggctgccaggcagcggtag

SEQ ID NO: 954192 - DNA, 120 bp, Artificial Sequence
  ENSG00000233098_53 (sequence is synthesized)
ccaggcaatgggatagaaggcaaagaaaatacgagggacagaacccatcagacaccggcagacactgcatttactccagactgagatgacagacacaccgtatgagctgcagcacaactc

SEQ ID NO: 954193 - DNA, 120 bp, Artificial Sequence
  ENSG00000233098_54 (sequence is synthesized)
tcctccgctgcgcccactgccagccaccagcagacaccaaggcacccagaggagccaggcacacagggcgggcagcaacataaacggcacccattaaaaagcaagactcgctcttgagac

SEQ ID NO: 954194 - DNA, 120 bp, Artificial Sequence
  ENSG00000233098_55 (sequence is synthesized)
cccagatgtaggcaaagcgtcctccatgtgttcctggaggaccgtcccaagtccttctccattctcccaacctcttgggcctggtcccattccaggtcttgcccaagtctttctgattgg

SEQ ID NO: 954195 - DNA, 120 bp, Artificial Sequence
  ENSG00000233098_56 (sequence is synthesized)
tgatgggagtgcctcatgaagctttcctggagcaccatctgggagtttcaggagcgactttttcagagctgggccccggaggacaacgtggtcctcaggaaccttcaaacctccgtgaag

SEQ ID NO: 954196 - DNA, 120 bp, Artificial Sequence
  ENSG00000233098_57 (sequence is synthesized)
gaactcacaaggaaacactgggacctgccacccccagtgcaggcagtctgcaccccggagcctggcccaacagcgccccgagtgccctagtccactatgccaacatggtacccggaggct

SEQ ID NO: 954197 - DNA, 120 bp, Artificial Sequence
  ENSG00000233098_58 (sequence is synthesized)
tcgaggccctgcctgctgcaccacccgcctcctggaggccttgttctgcagcctagcccctgccgcagccacagcaggcaccactgccaagtgccttccagccgggcttcccagaggaca

SEQ ID NO: 954198 - DNA, 120 bp, Artificial Sequence
  ENSG00000233098_59 (sequence is synthesized)
actggggaatttggtgcaagcaggagcttcacctcatgcagaattgcagtgtgattttagagtgctgttaccattcttatgcttagaaggcagagtgtcttcagttaggattctgtcgtg

SEQ ID NO: 954199 - DNA, 120 bp, Artificial Sequence
  ENSG00000233098_60 (sequence is synthesized)
ctggaagtcagacaagtaccggtgattgccggtttcttgtctgatttttgcacttctctggcaagctgccccctctgaagagttgactatttgggagttactcactgatggttcagccac

SEQ ID NO: 954200 - DNA, 120 bp, Artificial Sequence
  ENSG00000233098_61 (sequence is synthesized)
ttccagaacctaccccaagagcaagacttgaaaccaactcgcaccctcaaagctccggaagccattcagtgtttccatcttggctgagtgagttcttcactgaaactcaatttgactttg

SEQ ID NO: 954201 - DNA, 120 bp, Artificial Sequence
  ENSG00000233098_62 (sequence is synthesized)
acagtcatctaatgagaactcaaaagtcattcttggttcagccacagtcaaagaacttgcagagcattctctgacgaggtcctcaaggacaactgagagaaggtcccattccaggtcttg

SEQ ID NO: 954202 - DNA, 120 bp, Artificial Sequence
  ENSG00000233098_63 (sequence is synthesized)
cctgagcccaggggacagtgtgatcacccccaacgcctgtccccagagcaccctctggccccacagtcaggtggctgaggagaggatggcaggaggagatgtacagtgtggcacctctta

SEQ ID NO: 954203 - DNA, 120 bp, Artificial Sequence
  ENSG00000233098_64 (sequence is synthesized)
tccctccaccttcctgctctggccacactgcctcctttcagtgtcgaacatgccatgttcttccctgcctcgggttctttgcacatgttgttcccgctgcctggaatgcatgctctctat

SEQ ID NO: 954204 - DNA, 120 bp, Artificial Sequence
  ENSG00000233098_65 (sequence is synthesized)
catcttccctcagctccctcctacccaactttcaggtctcggcccaaacatcgggggtctcctctgaccacacagtagtactgggccctcctttgtactgctagtgttactttcttttga

SEQ ID NO: 954205 - DNA, 120 bp, Artificial Sequence
  ENSG00000233098_66 (sequence is synthesized)
aacttttaattacagaacttaccacacatatacatagagaggactgcacaatgatgccctcctcatccattaccagcttcacaaatcatttaaattctgccttgtactttcccaaccagt

SEQ ID NO: 954206 - DNA, 120 bp, Artificial Sequence
  ENSG00000233098_67 (sequence is synthesized)
tgttttggcttgtgtattttaaagcaaagccaagacctcatatcattttacctgcagatactgggccataaagatctgtaaaacataacccaaatatcctatcactgccagcaataattt

SEQ ID NO: 954207 - DNA, 120 bp, Artificial Sequence
  ENSG00000233098_68 (sequence is synthesized)
attaacatcatctaatattcaggccatatccaattttccctgattgtcttgaaaactatccattgcttgctgttctttttcataatctgtctttttccttgatagaacttaccacaattt

SEQ ID NO: 954208 - DNA, 120 bp, Artificial Sequence
  ENSG00000233098_69 (sequence is synthesized)
agtgtggagagagagtgtgtatgtgttctgtaaatttgattacactgcgcatttattccgaaatccatttcactttaccgttggaacgtaagctctgtgagggcagagacttttgtttat

SEQ ID NO: 954209 - DNA, 120 bp, Artificial Sequence
  ENSG00000233098_70 (sequence is synthesized)
tgcacttgctgttagagctcttgtctgtaacagtggctggcacatggtcacatcatagtagaagctcaataaatatttgttgaatgaatgaaaaaatacgtccaagacatcttcagattt

SEQ ID NO: 954210 - DNA, 120 bp, Artificial Sequence
  ENSG00000233098_71 (sequence is synthesized)
agagaagggtgtcccagatgtaggcaaagcgtcctccatgtgttcctggaggaccgtcccaagtccttctccattctcccaacctcttgggcctggcagaaaggtgttaaatggtttgca

SEQ ID NO: 954211 - DNA, 120 bp, Artificial Sequence
  ENSG00000233098_72 (sequence is synthesized)
ttctttaaaaaagcgtttttgttaaggagtctgggaatcatggaatcatagtgaccagtaactgttatggactggattgtatccccctccaattcagttatggtgctgcttcagaaagaa

SEQ ID NO: 954212 - DNA, 120 bp, Artificial Sequence
  ENSG00000233098_73 (sequence is synthesized)
aagagatagtttcccttgcaaagttatcaaagtgctccccagaagacattaggtatttgctttctagtctacatacaatgaaaaggaaaaaacgtcagttcctgaagctctctcaaaaca

SEQ ID NO: 954213 - DNA, 120 bp, Artificial Sequence
  ENSG00000233098_74 (sequence is synthesized)
tcaacagatggaaagacgtgcccatgtcctcccctccctccactctgggggcttggaaatgctgcagcagggagcaggccccaggctggacctgccctgtcctcacgacgagtgtgtgca

SEQ ID NO: 954214 - DNA, 120 bp, Artificial Sequence
  ENSG00000233098_75 (sequence is synthesized)
aaagtgaacaataaatcatttcaaagatgcaaggaagaaaaaccaaaacatcaacagaatcttctttcccataatcttcatgcacctcctggtccggatgagtttatgttcccatctccg

SEQ ID NO: 954215 - DNA, 120 bp, Artificial Sequence
  ENSG00000233098_76 (sequence is synthesized)
agcacagggattgattgtgatggcatttataggactgagtgccccacactctgtgatccagcatggagttatgatttacatcaccacaggaagagtacagaggcttcaacagaaaaaaag

SEQ ID NO: 954216 - DNA, 120 bp, Artificial Sequence
  ENSG00000233098_77 (sequence is synthesized)
gtacaacctaatgaaagttatctgaatgtgatctctctcaaaatatcttattgtagtgtaccatgggtaactgaaatgatagaaaacaaaattgctgataaagggggatattgtagtaaa

SEQ ID NO: 954217 - DNA, 120 bp, Artificial Sequence
  ENSG00000233098_78 (sequence is synthesized)
ataaagggggatgggtagagcgtaggaagcattcacaattagaacagttggcagtagggaaagaaacatactttaaattggaatgtggatcacatggctgcctcctgccagtcatgatcg

SEQ ID NO: 954218 - DNA, 120 bp, Artificial Sequence
  ENSG00000233098_79 (sequence is synthesized)
cagggtacagaggcctctggtatgtcaggtcttctctcccaccactaatactgcccaaaagactccatcagcaaccagagctgaatcacacacaacccagattgtcatttctgatgactt

SEQ ID NO: 954219 - DNA, 120 bp, Artificial Sequence
  ENSG00000233098_80 (sequence is synthesized)
tgacttaaacaaacagacatatttttaatctttttagtgtgtgtgaaactagcaaggcctaatgaattgagtatatggatgaggtttgtggcctctgtaacgttttctccaaccagaacc

SEQ ID NO: 954220 - DNA, 120 bp, Artificial Sequence
  ENSG00000233098_81 (sequence is synthesized)
tactgaaatagcacagatggtgatgagtatggttcaaacacaagaattcttgggtaagtgacaagaatctcggtctcctgccatttccatctctgcatttacttactgtgtgaatttgga

SEQ ID NO: 954221 - DNA, 120 bp, Artificial Sequence
  ENSG00000233098_82 (sequence is synthesized)
cgagtcatgtaatcttctggcttcagtgtgtttatctctgtaattaatatgttcagtaacagttcttccctctgacctaaaaataaccacttcttccaaaggtatatattagaactatat

SEQ ID NO: 954222 - DNA, 120 bp, Artificial Sequence
  ENSG00000233098_83 (sequence is synthesized)
acatatatactatacaaatatctaacatttatatacttaatatatgtaataaacatactacacatgtaaatttaatgatctaccctattctcagcctctactttcctctgacaatgacat

SEQ ID NO: 954223 - DNA, 120 bp, Artificial Sequence
  ENSG00000233098_84 (sequence is synthesized)
cattcaaatactctaaaaagctcatattatagaatctttatatttaaaaaagttttgtaatgctctaaacttaattgcatattgctaagtgaaagaggccagtctgaaaaagctatgcac

SEQ ID NO: 954224 - DNA, 120 bp, Artificial Sequence
  ENSG00000233098_85 (sequence is synthesized)
tgtatgattccaactatatgacattctggaaaagccaaaactatagagacaataaaagtatcaaaggcctttagggggttcagggaaatgggtgaggaattaaataaatggagtacagca

SEQ ID NO: 954225 - DNA, 120 bp, Artificial Sequence
  ENSG00000233098_86 (sequence is synthesized)
gtatggtactctaacagtggatatgtaacattacacttttatcaaaacctataagccccaaacagaatgttgtaaatgtaaactctggacttcatttatttgtagagacaggactttagt

SEQ ID NO: 954226 - DNA, 120 bp, Artificial Sequence
  ENSG00000233098_87 (sequence is synthesized)
taaaagtccatattggtttattaatggtagcaaatataccacacgaacgccagatgctagtaagagcagaaactgtgttgggaggagggaagatgtatgggaactggactttctgtgcag

SEQ ID NO: 954227 - DNA, 120 bp, Artificial Sequence
  ENSG00000233098_88 (sequence is synthesized)
tttctctcggtaaacctaaaactgctctaaaatttttctattgaatttttcaattattccagttattctctataaattagcatacctattggcccccaattaccttgctaattttaggtt

SEQ ID NO: 954228 - DNA, 120 bp, Artificial Sequence
  ENSG00000233098_89 (sequence is synthesized)
acttatttttatatggttctcgatttagtctccttgggcaaatagtaaactgcatggcttttactctctctgactttctttttctgtccttcacagaaattgaagttgaagtataaggag

SEQ ID NO: 954229 - DNA, 120 bp, Artificial Sequence
  ENSG00000233098_90 (sequence is synthesized)
ttacagttctggaggctggggagtccaccccaggtgctggcatcttgtgagaaccctcctgctgtgtcattccatggcagaaggcaaaagtgcaagagaatgccagagagcaagaagggg

SEQ ID NO: 954230 - DNA, 120 bp, Artificial Sequence
  ENSG00000233098_91 (sequence is synthesized)
aagaactcagttttataacaaactcactctcaagataactaacccattcctgctatagcaacattcatccattcatgagggcagagcccacatgacccaatcacatcttacttggctgca

SEQ ID NO: 954231 - DNA, 120 bp, Artificial Sequence
  ENSG00000233098_92 (sequence is synthesized)
tctctcaacactgttccattaggaattaagtatttaacacatgacctttgggagacgcattcaaaccatagcatatgtcctctatgcagttgccttgtctagatgtaggacactgagaat

SEQ ID NO: 954232 - DNA, 120 bp, Artificial Sequence
  ENSG00000233098_93 (sequence is synthesized)
ttaccacccttccagcattgacgtgctctctaggtggctcaagaattcttggctgtgtctccaccaggcttcaagaccctccattagcctggcttttggacctctgtggttccagccctt

SEQ ID NO: 954233 - DNA, 120 bp, Artificial Sequence
  ENSG00000233098_94 (sequence is synthesized)
gctagacacgggtttctctaagagatctgtattctccacagtctgtatacagaaaagatagtctcaaatctcctctgatttagggccctgataaaaattacttggtcttctactctacaa

SEQ ID NO: 954234 - DNA, 120 bp, Artificial Sequence
  ENSG00000233098_95 (sequence is synthesized)
cctcaccataccccttcaggttttgaacctgggagagacagaatatggaacactttcttaaaaataaatgcatacttgacattaataagggatttacaatctattcactatgaaatcctc

SEQ ID NO: 954235 - DNA, 120 bp, Artificial Sequence
  ENSG00000233098_96 (sequence is synthesized)
aggaacatgtaggtttttccaagaagtaaaaaacaattattttcatttaagtcatatgtcaattaacaatattttttacacaattaaaaatctcatttttgttatgaaatgtgaaacaca

SEQ ID NO: 954236 - DNA, 120 bp, Artificial Sequence
  ENSG00000233098_97 (sequence is synthesized)
gaaacacatttcctttgtttttgaggcagggtctcactcttgtcgcccagactgcattgcagtggggtgatctcggctcattgcaacctctgtctcccggattcaagcaattctcctgcc

SEQ ID NO: 954237 - DNA, 120 bp, Artificial Sequence
  ENSG00000233098_98 (sequence is synthesized)
agtgggataccagtgaggacctcaccagcagctgctgtctctccaatgcagagcttcctgcctcctgcccagcccctgctgtcagagatacttggtgcttccagttctggagacttcctt

SEQ ID NO: 954238 - DNA, 120 bp, Artificial Sequence
  ENSG00000233098_99 (sequence is synthesized)
gaggacctcaccagcagctgctgtctctccaatgcaggtgatctcagggcctgtccctctccatggggcctctccacctggacgacttgagtggtgctcaaagctcccaagggagcaaac

SEQ ID NO: 954239 - DNA, 120 bp, Artificial Sequence
  ENSG00000233098_100 (sequence is synthesized)
accgaggctgtcaggccttcttgaggcggaggcccagagtggcacagcctcacccccacggcactctcctggaatgagtcccagatagtccacaagggtgtgatgttgggtgaccgtgct

SEQ ID NO: 954240 - DNA, 120 bp, Artificial Sequence
  ENSG00000258885_0 (sequence is synthesized)
ttaggcggagtctcgccctgtcgcccaggctggaccagaaggcaggagccccatgcagtcctgtgctgatgaagacccatttttttctaggagatttacactttcatatgtatcccctgt

SEQ ID NO: 954241 - DNA, 120 bp, Artificial Sequence
  ENSG00000258885_1 (sequence is synthesized)
gaccagcccacacacctggctgagagatggctctgcagggagggagtcagcaggaggggaggggagggaagaggaggggaggaaagatatcttgggaggccaaggaaagataagtgaaga

SEQ ID NO: 954242 - DNA, 120 bp, Artificial Sequence
  ENSG00000258885_2 (sequence is synthesized)
cccagagatgtcctgaggagccctggtggcatctgccttgacaccaggtccactgcagacagtcgcaatttcatccatccattcatctatcagatattgagtgagggcctactaggtacc

SEQ ID NO: 954243 - DNA, 120 bp, Artificial Sequence
  ENSG00000258885_3 (sequence is synthesized)
aggcccactgcagacagtcgcaatttcatccatccattcatctatcagatactgattgagggcctactaggtaccaggtcctgaggatatagccctgaacaaagcagataacagtccctg

SEQ ID NO: 954244 - DNA, 120 bp, Artificial Sequence
  ENSG00000258884_0 (sequence is synthesized)
ggccccagtccccatgggctgaaggcaggttgagttcttccccaggtctgcgagcctcgaaggcttctttcagacagcagaccccttagaagcgcaaggctgctttctgacaaagaatca

SEQ ID NO: 954245 - DNA, 120 bp, Artificial Sequence
  ENSG00000258884_1 (sequence is synthesized)
agtgttcctttcaaccagccaagggactggttttctcgctgaccctttgacaggtatgttcccgggattttgctgggaccttcatcttcccctccctacgtccgtgacacatctggcttc

SEQ ID NO: 954246 - DNA, 120 bp, Artificial Sequence
  ENSG00000258884_2 (sequence is synthesized)
ccactcgtttcagtcgtgtattccgtggagttttctcttgcttcgcagtagatggacttctgaagccccaccttactgttaaatgccagtgatcatctccccccacagctaactcgggaa

SEQ ID NO: 954247 - DNA, 120 bp, Artificial Sequence
  ENSG00000258884_3 (sequence is synthesized)
ttagtccactgacacccccagagaggggacacgcctttcacaaggtcacacggcaggtcagttacagagatgaaaatcaaatccaggtttcctaacttcaagagttttttcagatgcctt

SEQ ID NO: 954248 - DNA, 62 bp, Artificial Sequence
  ENSG00000258884_4 (sequence is synthesized)
ttagtgatcttggttcactgcaatctctgcttcccgggtttaagcgattcttctgcctcagc

SEQ ID NO: 954249 - DNA, 120 bp, Artificial Sequence
  ENSG00000258884_5 (sequence is synthesized)
attttttttttaatttgcttcctgagagctcagaaaggaacctcagctgtatgggagcacccatataccaatcccattccagccactctcactttgacaggacagaatcaacgaccagag

SEQ ID NO: 954250 - DNA, 120 bp, Artificial Sequence
  ENSG00000258884_6 (sequence is synthesized)
cccaggacctccttgactagcactctcctcttacaaataaggaaactgaagggtacctgatcatgaacaagctgatgggcagcacttgacccagaccttttacttcttacccctccaccc

SEQ ID NO: 954251 - DNA, 120 bp, Artificial Sequence
  ENSG00000258884_7 (sequence is synthesized)
cagtttggactcccaaatgtggggaggaatggaatgccctaccagtccccagggaatggttcatgcagtcagcatggttttagtacctttagcatttgatttgggagaaagataataacc

SEQ ID NO: 954252 - DNA, 120 bp, Artificial Sequence
  ENSG00000258884_8 (sequence is synthesized)
agaagtgtctgtatgcctcaccagctgtccagcagatcccataaaccttcacccccaacccttctgaccaccaagtgctttgctgcaggaaaggagaccagattgttgggtttttctcat

SEQ ID NO: 954253 - DNA, 120 bp, Artificial Sequence
  ENSG00000258884_9 (sequence is synthesized)
ctgatggtcgggggtgatctgggactgcatatgtctgaatactgggaccctattttgagtgcaagagttttgaaaacccaggaccactttgttagatggtgagggttggtgagcagactg

SEQ ID NO: 954254 - DNA, 120 bp, Artificial Sequence
  ENSG00000258884_10 (sequence is synthesized)
gacctgagatcctttttcaaggcttggcttgggggcaacattctccaggaagacttactggagcacccaccacagttaattcctggcgttcctctgggtccggctgcagagctgttgctc

SEQ ID NO: 954255 - DNA, 120 bp, Artificial Sequence
  ENSG00000258884_11 (sequence is synthesized)
acttctttcccccactagactgtgagttccttgagggatgggaccataccctacacaatattgtatcactaaggcctaacactgtgtccggcacatagtaggtactcaataaacgtttgt

SEQ ID NO: 954256 - DNA, 120 bp, Artificial Sequence
  ENSG00000258884_12 (sequence is synthesized)
agccggtccctccattcgaggtccctgacttcctgcaacagactgagatggccttctgagcttttccagggctgacgaccaccttcttgataccttcccctctctcgttctgaatccgtg

SEQ ID NO: 954257 - DNA, 120 bp, Artificial Sequence
  ENSG00000258884_13 (sequence is synthesized)
tcttgataccttcccctctctcgttctgaatccgtgcccaccagacggactctggctcttgttgcccagactggggtgcaatggcgcaatcttggctcaccataacctccgcctcctggg

SEQ ID NO: 954258 - DNA, 120 bp, Artificial Sequence
  ENSG00000258884_14 (sequence is synthesized)
agggctcccactgattctacatgatgggaatccaggctttcggagatgaggactgggaggtctccagaccacacaagccccctatttgcactggcctttggaatgagcctacagcctgcc

SEQ ID NO: 954259 - DNA, 120 bp, Artificial Sequence
  ENSG00000258884_15 (sequence is synthesized)
cactggcctttggaatgagcctacagcctgcctccactcctcctggtaccccagctgttctcaaggaattggccagaagtcagactcctttcccagctgtcctccacttctttcctgcca

SEQ ID NO: 954260 - DNA, 120 bp, Artificial Sequence
  ENSG00000258884_16 (sequence is synthesized)
ggcaccctaggccccatggtgggattgggcctataggctgtgattttccacatccttgtcaaacctgtactacctgaatgcctagaggaaaagatactgccttaattactattatgagca

SEQ ID NO: 954261 - DNA, 120 bp, Artificial Sequence
  ENSG00000258888_0 (sequence is synthesized)
gttcttaaatgctgtaaaatgaatctccttcgtggggggtgtagtgagactacgaacagctagagaactgctgcttaggcctggatacttgacttgtggtttgtagcccagcagcatcag

SEQ ID NO: 954262 - DNA, 120 bp, Artificial Sequence
  ENSG00000258888_1 (sequence is synthesized)
catcacttgagaatttattagaagtgcaaattcttaggacttagcccagattttctgaaccagaatcatttaacaagattcccatatgatttgtgtgcacattaatgtctgaaaagcgct

SEQ ID NO: 954263 - DNA, 72 bp, Artificial Sequence
  ENSG00000258888_2 (sequence is synthesized)
cgggattagaggcgagagccactgtgcccagccttgaaattaaactatcataggtgtctaggtataggaaaa

SEQ ID NO: 954264 - DNA, 120 bp, Artificial Sequence
  ENSG00000258888_3 (sequence is synthesized)
cttgaaattaaactatcataggtgtctaggtataggaaaaaaaaatgtatatatagggttcagttctgtcctcagtttcaggcatccattgggggtcttggaacacaactcccccttgaa

SEQ ID NO: 954265 - DNA, 120 bp, Artificial Sequence
  ENSG00000258888_4 (sequence is synthesized)
taaggggtctatagtatttcaggcagagtgaaggggaagggcaaggggtaatggctctttcttccagctgaatcagttcccttgaaaaagacttcgcagaaacctcaccctgggactttt

SEQ ID NO: 954266 - DNA, 120 bp, Artificial Sequence
  ENSG00000265485_0 (sequence is synthesized)
aaatggtcagtgataataaacaagaaggagggatttccaagggagcagagcattaataaggttttatctactacaaaggatatcacttgggaaggaatttcttgaaactgctcccaagag

SEQ ID NO: 954267 - DNA, 120 bp, Artificial Sequence
  ENSG00000265485_1 (sequence is synthesized)
agccattggaccatgtggtaaacaactcctagctgatggattattgggaatattaacatcatccagaatgctatggggagaagacaactggaagctccgtgtggacaaacctcctggact

SEQ ID NO: 954268 - DNA, 120 bp, Artificial Sequence
  ENSG00000265485_2 (sequence is synthesized)
ctgccccacatatctcttcccttggctgatttgaatttgtatcctttcactgtgataaaccacaaccagattattacagctgtcagcaagttcttctattgaattgttgaaactgagggt

SEQ ID NO: 954269 - DNA, 120 bp, Artificial Sequence
  ENSG00000265485_3 (sequence is synthesized)
ggtcttgggaacccctgaactctactgttggtgtcaggagtgagggaagtcttgtggactgtactccctgacctcacaggtgcattttccaactttatttggacattccccaacaacatc

SEQ ID NO: 954270 - DNA, 120 bp, Artificial Sequence
  ENSG00000265485_4 (sequence is synthesized)
atccccttcttcaaatatgtttctgctacaaacattgtcctttagatggttcctttgctgccattatgactatggcgtaatctgtagtaaagcaccattaagatgttaatacagatgtat

SEQ ID NO: 954271 - DNA, 120 bp, Artificial Sequence
  ENSG00000265485_5 (sequence is synthesized)
gtgtgaattaaaaagtgatgctaaatgcatagtaaccaatttacttcgcattaataatttagctatttttatttgtttctaaacaaaaagcaaagaggatccagtccagagagcagttgc

SEQ ID NO: 954272 - DNA, 120 bp, Artificial Sequence
  ENSG00000265485_6 (sequence is synthesized)
aacagtgtgcacaatttttattaaaccgaaataaaagttcttgggctatggaagtcacctaaattcacttctcttttcctatgaactttcactttttttccttccaactctagttagaag

SEQ ID NO: 954273 - DNA, 120 bp, Artificial Sequence
  ENSG00000265485_7 (sequence is synthesized)
ctgacagctgacacgcccttcctttgtgcattttatcctgggacaaaatgagaagacatccttcagttcccctcatcaacaagaatttaccaagaagaattctccaatgccagtgagatt

SEQ ID NO: 954274 - DNA, 120 bp, Artificial Sequence
  ENSG00000265485_8 (sequence is synthesized)
ctgaaatctcatagttgtactcaattataaattacttattcacatgatccaggttttacatgggttaatttttttagataatcatcagaatgaaaacatgacatttaaaaaagcacaaat

SEQ ID NO: 954275 - DNA, 120 bp, Artificial Sequence
  ENSG00000265485_9 (sequence is synthesized)
aagactacaaagattgttacatgttctcaggatccctgagtccaggttgagaaatgctcttttaaagacgcccaggcacatgcattttggtttaacaatacttgatctactaatagttct

SEQ ID NO: 954276 - DNA, 120 bp, Artificial Sequence
  ENSG00000265485_10 (sequence is synthesized)
catcatgcagtaatttaagtatttggttgtatttttgtaagaattaataaaatgttatatgtgaaaatattttgcaagttataaagcattgcaaatgtatgtagttaattttttctacct

SEQ ID NO: 954277 - DNA, 120 bp, Artificial Sequence
  ENSG00000265485_11 (sequence is synthesized)
ctttcatttcttcctcgaagactgtgtaagacataccagtcttttgatatatttcccttttaaaattttgtcaccttggtctttttcattagagtattgatcagctgtcatctagtactt

SEQ ID NO: 954278 - DNA, 120 bp, Artificial Sequence
  ENSG00000265485_12 (sequence is synthesized)
cagaggcaaacttcatctgactatttaccacactgacagatactgataaacccttcgtgatttcctggctatttggcaaagtgtttgaaataatgattcaaaagggggcttcttgaaaac

SEQ ID NO: 954279 - DNA, 120 bp, Artificial Sequence
  ENSG00000265485_13 (sequence is synthesized)
agaaatacatgggagcagtacatggagctcaggttgtatgtattgggaacagaaacacttcaatcctgctaattgtatttaaagcagatggggaaagggagccaaacatcagagtttgtt

SEQ ID NO: 954280 - DNA, 120 bp, Artificial Sequence
  ENSG00000265485_14 (sequence is synthesized)
ttgctgcagacacttaatacacactgtccggattgctggctttagtttcccattgtgtaggggggaaactgatgttcagaaaacttcaataatttgactaaaatcacagaaggagatgga

SEQ ID NO: 954281 - DNA, 120 bp, Artificial Sequence
  ENSG00000265485_15 (sequence is synthesized)
gcaagatttgatccctggtcctgatttccaagtgaatatcatttcccatatgtctggctatggaagagggaatgagaatgtaggaaatggcaaaccagggtcttgggctgagaaaatgga

SEQ ID NO: 954282 - DNA, 120 bp, Artificial Sequence
  ENSG00000265485_16 (sequence is synthesized)
gcttcccaggctggcatttaccaaatcatgtgtggcctcaaatccagttctccaagacaatttcctgctccctacacccctacctcccttagttacatccacgttcctccatcattggca

SEQ ID NO: 954283 - DNA, 120 bp, Artificial Sequence
  ENSG00000265485_17 (sequence is synthesized)
ccatcgttcagtgtcagcttcttcctggaaaactagtttgccttaaaaacttgctcaaagactgtttttccctctctctctctctttctaggactgacctctctaactcagtagttagac

SEQ ID NO: 954284 - DNA, 120 bp, Artificial Sequence
  ENSG00000265485_18 (sequence is synthesized)
tcttgagtccttgaaattgagcacaggtatgggctaccacaggaacaccaatacaaatgctaacatttcctgagtgactacagtgggccgagtactgcattaactgctttatacgtatta

SEQ ID NO: 954285 - DNA, 120 bp, Artificial Sequence
  ENSG00000265485_19 (sequence is synthesized)
tttcatttaatcctcaccacaaccctctgtcgttcctactattattgccattttatagataagaaaacggaggcacagaaagacccagccatttgtccacggttacacagctgaaataag

SEQ ID NO: 954286 - DNA, 120 bp, Artificial Sequence
  ENSG00000265485_20 (sequence is synthesized)
gccatagtagactaaaacccattgtcattccatccccagggctttgtgttgtctttctgagcaaacttgggtgaattgtgactatgggttcctcggcatgtgctgcattcttctgatctc

SEQ ID NO: 954287 - DNA, 120 bp, Artificial Sequence
  ENSG00000265485_21 (sequence is synthesized)
ctgtctctggttgcaaagttctggtccaggaatcaagtgttcaactttccatgcagctcccatagtacagaacagttctgagcaaacagcgagtgtttagtgaacagggttgacttttac

SEQ ID NO: 954288 - DNA, 120 bp, Artificial Sequence
  ENSG00000265485_22 (sequence is synthesized)
tacatgaaacactaatgttcagttatgtacttgtgaaggcagagggaagtagcatattccaagtgtcgtgttgatcctcagagtatattaaaagggaaaccagactttgtctcagagaaa

SEQ ID NO: 954289 - DNA, 120 bp, Artificial Sequence
  ENSG00000265485_23 (sequence is synthesized)
ctaaactaatattaaataatgttatgggctacattgtgatttccccctccctcatatagatatgttgaaattctagccccctgcccccatacctcagaatgtgactgtatttggagatag

SEQ ID NO: 954290 - DNA, 120 bp, Artificial Sequence
  ENSG00000265485_24 (sequence is synthesized)
ggtctttaaagaggcaactaaggtaagagaagttcgttaggctgtgccctaatccaatatggtgatgtccttataagaagagattaagacacagacacccacagagggaagaccatgtaa

SEQ ID NO: 954291 - DNA, 120 bp, Artificial Sequence
  ENSG00000265485_25 (sequence is synthesized)
agacacggagaaggtggccatctgcaagccaaggaggagagaggcctcacgagaaatccaccttgccaacaccatggggaataaatttctgttgtttaagctacttggtctgtggtattt

SEQ ID NO: 954292 - DNA, 120 bp, Artificial Sequence
  ENSG00000265485_26 (sequence is synthesized)
tgtgatggcagccctgaaaaactggtatagacaccatttgggcaaaaagataagagcctgcctctttttcttgtggtaaagggagttggtgggcatagggctgctgtttggggcatacac

SEQ ID NO: 954293 - DNA, 120 bp, Artificial Sequence
  ENSG00000265485_27 (sequence is synthesized)
gacatccttcagttcccatcttggatggcataacttcaaaaccaagggagatggaggagttttagaggagtagaaggctgcaagcaagaactgatgcattacatctccagtcacctcact

SEQ ID NO: 954294 - DNA, 120 bp, Artificial Sequence
  ENSG00000265485_28 (sequence is synthesized)
ctaagattgtcctgtagctaagactgttgaatgagactgttgttcttcagtttgcagccacaaagcacggaggcatctccccaagaatccactgcagggaggatgaacagcccttacctg

SEQ ID NO: 954295 - DNA, 120 bp, Artificial Sequence
  ENSG00000265485_29 (sequence is synthesized)
gatttttgctttatctaaaaatatatttgtagaagaaggagcattctagtttccaaatacaaagggcaatctccttctctgtgtgtgcacgtgcaaacaaacacacttctacaagtaagc

SEQ ID NO: 954296 - DNA, 120 bp, Artificial Sequence
  ENSG00000265485_30 (sequence is synthesized)
attcttctttattatcatagtcatcatcatcactgggttggcaactaaaaacaaaactacaaaactctcatgttagcagttgagtaacttttaataaccagatacaaaccattcttcatt

SEQ ID NO: 954297 - DNA, 120 bp, Artificial Sequence
  ENSG00000265485_31 (sequence is synthesized)
gaaaaggaggttgaactgcaatgtgaagtgtagttaaatatgtagacatcttggattctagaagagtttgtaatggattaaagggttaagctatgaaattgttgccctctgtgatttttc

SEQ ID NO: 954298 - DNA, 120 bp, Artificial Sequence
  ENSG00000265485_32 (sequence is synthesized)
cacactagaacagactgacatggtttgaagcagttgggctttaacctatagataggaggacagagatgattgcctatgaagcaattattaaatagctgcattttggcatgttctagttga

SEQ ID NO: 954299 - DNA, 120 bp, Artificial Sequence
  ENSG00000265485_33 (sequence is synthesized)
aaagatttagttttacctatatcacctcatcatcactaatttaatcatcctcagaaaatgcaaaaataatgatgtacatttgacaagtcttatacaaaattatgtttcatagctttgtgg

SEQ ID NO: 954300 - DNA, 120 bp, Artificial Sequence
  ENSG00000265485_34 (sequence is synthesized)
tcagaattaagccatgttctaaaatacaaatgaatagtttacagcccactaattcctaactgtaagtgttaagtctatataaaaataagagacaagcttgtgatcaggaatagcttccaa

SEQ ID NO: 954301 - DNA, 120 bp, Artificial Sequence
  ENSG00000265485_35 (sequence is synthesized)
ttatgaaaaatttaaataaaaataatagaatgtgcttaatttatttatcatatacaaagtagacatatgtgaccaaaatgattcattatttttacgattttcatgggaataagtttgaca

SEQ ID NO: 954302 - DNA, 120 bp, Artificial Sequence
  ENSG00000265485_36 (sequence is synthesized)
atattaagtgctggagatagaatatcaggtaatcttaaatactgttcataggaatgtacaaccattttggagaacagttggaattatccaaagaaagctgaagattttcctaacttataa

SEQ ID NO: 954303 - DNA, 120 bp, Artificial Sequence
  ENSG00000265485_37 (sequence is synthesized)
ttttaaaaattggcacatgccctcaagtaacagttgcatacctaaggagacatgtgtaagtatttttacagcagcattatttataatagcccaaattggaaataacctaaaatcatatgt

SEQ ID NO: 954304 - DNA, 120 bp, Artificial Sequence
  ENSG00000265485_38 (sequence is synthesized)
tcttacaaaggagtactacacaacagtgaaagcaaataaactatagctaaatgttatctatcttgaaggcatttataagaataatgatgctttcacaaagtaaattgcaggatgttatat

SEQ ID NO: 954305 - DNA, 120 bp, Artificial Sequence
  ENSG00000265485_39 (sequence is synthesized)
acaatgtgatacaattcatgtaagttaccaaacatgcaacacaatacataacattgtccaaggataagtataaatgcagtaaaggtataaataaatgtaggattatgatgcttgcttgaa

SEQ ID NO: 954306 - DNA, 120 bp, Artificial Sequence
  ENSG00000265485_40 (sequence is synthesized)
gtcagtgataataaacaagaaggagggatttccaagggagcagagcattaataagctgcctttgtttctggcattggcgctgatgagcacagaaggtgttgaagcatagaagccagctga

SEQ ID NO: 954307 - DNA, 120 bp, Artificial Sequence
  ENSG00000265485_41 (sequence is synthesized)
cccagagtataatgaagcactaagatggagtggaagaattgccaagaaattcaagctgggctacttgtgcaagaagctacaatgagaaaaaaaatagcaagaaatagatgagggaaggag

SEQ ID NO: 954308 - DNA, 120 bp, Artificial Sequence
  ENSG00000265485_42 (sequence is synthesized)
gttctgtagagggaaaaacaaagagagaaaaggagaatgaattgtgctgagaaagagatgcctggatgaagaagctggccctagcacccataaagctggaaagaaagtggggccttggaa

SEQ ID NO: 954309 - DNA, 120 bp, Artificial Sequence
  ENSG00000265485_43 (sequence is synthesized)
acttctggaaggatgcgaggaaagaaaaatgcaaggaaatgagatggagaggagaaagagaaaccaggaagcacttcggaagcatgtaaattacaaggaaatgaggaacagcctttattg

SEQ ID NO: 954310 - DNA, 120 bp, Artificial Sequence
  ENSG00000265485_44 (sequence is synthesized)
aaacagtctgtgaagtctgtgctagcgctgagagcttcattttactgtcctggcaaggaggtaggtgctcaaagaactttgtcttggaagcccactgtggctcccccgggcctggcactt

SEQ ID NO: 954311 - DNA, 120 bp, Artificial Sequence
  ENSG00000265485_45 (sequence is synthesized)
taagccccgtacttttgctctcactgttcctctctgcctgctccctgtggtctcttctcggctgtctcccacttagcccaccttggcctggccatccgagtagaatagactttcattttc

SEQ ID NO: 954312 - DNA, 120 bp, Artificial Sequence
  ENSG00000265485_46 (sequence is synthesized)
cttaggtgtgcgccgcgcataccgactaacccacttcctgcacaggtgtggcccctctccagtgcccagcacctcatcgctgtggtaacagaagacacgcttatcttccggattttgcct

SEQ ID NO: 954313 - DNA, 120 bp, Artificial Sequence
  ENSG00000265485_47 (sequence is synthesized)
cagagacttgggctgtacaagctgctttcctggggtggcttgtccttttgcagttaaccgagatgcctggggagaagagcttcccccaacaggatggcaggcgatgcttccagatgcggt

SEQ ID NO: 954314 - DNA, 120 bp, Artificial Sequence
  ENSG00000265485_48 (sequence is synthesized)
cacttggcacgtctgagccgaatgtctccataaaaatatgatgtaattaacagagccgcagcagctggaacaattcagcacctcacattgattttccatgtctcctatttactttcagtt

SEQ ID NO: 954315 - DNA, 120 bp, Artificial Sequence
  ENSG00000265485_49 (sequence is synthesized)
cggcatttccttgtgaaatcctgagattaatcagtttcctatcactcaatcatcccttttcacttctaaaggaaaactgtcctcccaaatgctacgaaatagcagtctatttttggatat

SEQ ID NO: 954316 - DNA, 120 bp, Artificial Sequence
  ENSG00000265485_50 (sequence is synthesized)
taaaaaaatcaattgtattattttaaaatttgagaggagtgtttttaaaaaaagtcagcccgaagcaatattcacttatctgttttcccattcaagtttaataggagttggcaaaggcat

SEQ ID NO: 954317 - DNA, 120 bp, Artificial Sequence
  ENSG00000265485_51 (sequence is synthesized)
ttgggtgcagtgagacacaagtactatattcacccttcccaagttttgagagcttggaaaagttacttggtggaaccaaagagaggaactgcattccaagtttttttgatcactgaaatg

SEQ ID NO: 954318 - DNA, 120 bp, Artificial Sequence
  ENSG00000265485_52 (sequence is synthesized)
aaggaaaataagtttccccatatgtggttattcatgagccttcatctgaagctggtggttttctcatagttggtcactgtatttccagctctgtcaggtgaaagtcagaatcttgggtta

SEQ ID NO: 954319 - DNA, 120 bp, Artificial Sequence
  ENSG00000265485_53 (sequence is synthesized)
atttcactttgggttccttaaaatgctggagaaaataggcagctgcggttgtagtggggaaacaggcctctgtctgaagtcagcttgctctagattgtgtttgaaaacatgcctcagatt

SEQ ID NO: 954320 - DNA, 120 bp, Artificial Sequence
  ENSG00000265485_54 (sequence is synthesized)
taagtggtcttgctttttttccagactcccttgccttggcagattctgtgtcttggccatactgtaagaactcacttttctttgtctttttattgattcaagcaatataaccatttcata

SEQ ID NO: 954321 - DNA, 120 bp, Artificial Sequence
  ENSG00000265485_55 (sequence is synthesized)
aataattaggaaaataaagaagaaaatttctcataattctactgctcaaacgcaatagctatgattgctttggagcaattgctttgggtcattttcaaatgctgagttttggtatgattc

SEQ ID NO: 954322 - DNA, 120 bp, Artificial Sequence
  ENSG00000265485_56 (sequence is synthesized)
taagcataatgtacaaacaactttacatgttgctttttcacttaatctatgtcagaagcatctccccaagttatgattagcttcagtaattatctttttaattgctgcccaaacagctgg

SEQ ID NO: 954323 - DNA, 120 bp, Artificial Sequence
  ENSG00000265485_57 (sequence is synthesized)
aacaattcagtccctcttattgactttccatgtgtcctatggaagtagagacagtctattaactatttctgtattttgggacaatagatcaaattcatttttcactgtaattaatcccat

SEQ ID NO: 954324 - DNA, 120 bp, Artificial Sequence
  ENSG00000265485_58 (sequence is synthesized)
gataagtatctttataaataagccttttctatatataagataatttctttaggataaattcctagaaattacagggtcaaagtggatacatattttatgactcttgatatttcttattga

SEQ ID NO: 954325 - DNA, 120 bp, Artificial Sequence
  ENSG00000265485_59 (sequence is synthesized)
aatcactaatgacctcatcttcaaatggtcagtgataataaacaagaaggagggatttccaagggagcagagcattaataagctacttgtgcaagaagctacaatgagaaaaaaaatagc

SEQ ID NO: 954326 - DNA, 120 bp, Artificial Sequence
  ENSG00000265485_60 (sequence is synthesized)
gctttacgagcgtattttattgactaaatatgcagtactgagagagctttatgtgtgcagtttgatgatgctgacagatatcccggagataaacattttttaatttaaagatgttctgtt

SEQ ID NO: 954327 - DNA, 120 bp, Artificial Sequence
  ENSG00000265485_61 (sequence is synthesized)
tatgtttaacatacagaagttaatgttaaacatgatgcctattttgtttaacatacagaagtgactgtattaaagccatttcttctaaatgtgcaataaactatgaattctttgcctggt

SEQ ID NO: 954328 - DNA, 120 bp, Artificial Sequence
  ENSG00000265485_62 (sequence is synthesized)
cacctggcctggcagatggctgcagtatattttagagaagtccctaagtgtgcctcagtacacactgctcttcacctctgttctcttcaacaatgcgttttatctactacaaaggatatc

SEQ ID NO: 954329 - DNA, 120 bp, Artificial Sequence
  ENSG00000265485_63 (sequence is synthesized)
aaaactgctggaggagaggtggagattgcaagacataaatgggtttagaattttttccctgtattttcctctgtgacagtagatattaagttgctattttctttagaaaataagttcaaa

SEQ ID NO: 954330 - DNA, 77 bp, Artificial Sequence
  ENSG00000265485_64 (sequence is synthesized)
agatattaagttgctattttctttagaaaataagttcaaagagggagacgatccccattccatattttttttttccc

SEQ ID NO: 954331 - DNA, 63 bp, Artificial Sequence
  ENSG00000265485_65 (sequence is synthesized)
cctctgcttcctgagttgaagcagactaatttttctatttttagtagagaagggggtttcacc

SEQ ID NO: 954332 - DNA, 120 bp, Artificial Sequence
  ENSG00000265485_66 (sequence is synthesized)
gtgctgggattacaggcatgagtcaccgagcctggccctattccattttttatctatcacattttttttttttattctgagagggcataaagatatggggttatggaagcaagtctttca

SEQ ID NO: 954333 - DNA, 120 bp, Artificial Sequence
  ENSG00000265485_67 (sequence is synthesized)
atatggggttatggaagcaagtctttcagaaggccctcctctttgagggacatgattagttcagtatgtcttaagcagataatttctgagtcagtgttatattagattggaaccagatat

SEQ ID NO: 954334 - DNA, 120 bp, Artificial Sequence
  ENSG00000265485_68 (sequence is synthesized)
tgatcaaactgtggcagtgcttaaatgtaagcgtgaagaggtgagactgtgtcatagacattagagtgctactaatatatgtatgcatgtagggaaacaagataaggatacataaattaa

SEQ ID NO: 954335 - DNA, 120 bp, Artificial Sequence
  ENSG00000265485_69 (sequence is synthesized)
ggaaacaagataaggatacataaattaatagagataggtacatacttttatatacagctatacgtaaatacataagcatatatatcttacacctgtaagtatgtgtctattatctatcta

SEQ ID NO: 954336 - DNA, 120 bp, Artificial Sequence
  ENSG00000265485_70 (sequence is synthesized)
caattatatatcctcattagaatactctgacttatccaggattgggatgggggtggggggcagagtgttgaagaaaagttataaaaatattagctggtgggccaggcacggtggctcact

SEQ ID NO: 954337 - DNA, 120 bp, Artificial Sequence
  ENSG00000265485_71 (sequence is synthesized)
ttggcacattttactcttctggcagctggagagagctctgacctgtgtctcatcagtgaatgctggttgtgacaataatgaatttctaatggcaattaacacagtgacagggtttataaa

SEQ ID NO: 954338 - DNA, 120 bp, Artificial Sequence
  ENSG00000265485_72 (sequence is synthesized)
ttatagattatgacaacactccctgcgatctggttttttcctttgaagaccacctggctaccaataacggtctcaccagccaaatcctgtatttgtgggccaagacagaagaagaacaac

SEQ ID NO: 954339 - DNA, 120 bp, Artificial Sequence
  ENSG00000265485_73 (sequence is synthesized)
aatgaaaaaaagctggaaatcttagagcagactcacatcttaactaggagaatacgtgctggcccaagtgccccaggactgaagcaaatcagacataggggaggagggagaatgttagaa

SEQ ID NO: 954340 - DNA, 120 bp, Artificial Sequence
  ENSG00000265485_74 (sequence is synthesized)
tgaggcacacctgattcagccgctaaatagtctggttggctaagaatcacaatcgaggcattttgcctttctagttttctttggtgaagatctgtgagcatccaaatgatatgaagagca

SEQ ID NO: 954341 - DNA, 120 bp, Artificial Sequence
  ENSG00000265485_75 (sequence is synthesized)
atatggctaatctgcactacttcggaagcctgggaggaatacttcctctttgctggatgtggcgtctgcgtgtaccatctggaattgctgtagccaacttacaaatacagacgaaagctt

SEQ ID NO: 954342 - DNA, 120 bp, Artificial Sequence
  ENSG00000265485_76 (sequence is synthesized)
agtttcaggaatagaattaggggagcaagctggtgttcaccgcaccctccagtgatctctgatgatatgcggggataatgggttacaaagacagacattaataagctacttgtgcaagaa

SEQ ID NO: 954343 - DNA, 62 bp, Artificial Sequence
  ENSG00000265485_77 (sequence is synthesized)
atcctggctaacacaggcctgtagtcgcagctaccggggaggctgaggcaagagaatggcgt

SEQ ID NO: 954344 - DNA, 120 bp, Artificial Sequence
  ENSG00000265485_78 (sequence is synthesized)
agagcagagtatagctcaggagggatggagcacatttagtggtttgctgatagcaggtatttaggaggctgatctgggccatgctggaaccacctggcctggcagatggctgcagtatat

SEQ ID NO: 954345 - DNA, 120 bp, Artificial Sequence
  ENSG00000265485_79 (sequence is synthesized)
tttagagaagtccctaagtgtgcctcagtacacactgctcttcacctctgttctcttcaacaatgcctacttgtgcaagaagctacaatgagaaaaaaaatagcaagaaatagatgaggg

SEQ ID NO: 954346 - DNA, 120 bp, Artificial Sequence
  ENSG00000265485_80 (sequence is synthesized)
gggcccaggaatcccgaaggaggccgaggcatcattgtacttaggtctgtcctctctaggtgtctcccagagcaacaccttcaaggtcttatcacctccctgggtactccctgaaacggg

SEQ ID NO: 954347 - DNA, 120 bp, Artificial Sequence
  ENSG00000265485_81 (sequence is synthesized)
tgtggatgcgagcttcccacaggacttatatgcctctcttcattctccaaaatatgtttctctgtgttatgggctgaactttgggctcctccaaattcgtatgttgaagtgctacagcac

SEQ ID NO: 954348 - DNA, 120 bp, Artificial Sequence
  ENSG00000265485_82 (sequence is synthesized)
cttagaatgtgactgtttttgcagatagggcctttaaagaggtaattaagtaaacatgaggtcatccatgtgggccgtaatccaataagcttggtgtctttgtaagaaggggagattaga

SEQ ID NO: 954349 - DNA, 120 bp, Artificial Sequence
  ENSG00000265485_83 (sequence is synthesized)
acacagggagagacaccagacagatgcagcccagagagatgagcatgtaacacacagcaagaatgcagccaccaggcaagccaaggagagagccttcagaagaaaccaaccctgccgaca

SEQ ID NO: 954350 - DNA, 72 bp, Artificial Sequence
  ENSG00000265484_0 (sequence is synthesized)
cactatcacgagaacagcatgggagaaaccgccccccatgatccaatcacccgctaccaagcccgacgcagc

SEQ ID NO: 954351 - DNA, 120 bp, Artificial Sequence
  ENSG00000265484_1 (sequence is synthesized)
caaaccataacactcagaatgtttaacagggaggaaccctatcttctgggagctgcaaaatatgcttgcaccaaaaagtaagccaaggaaacagggaacgaagtaaaaaaccaagcacgt

SEQ ID NO: 954352 - DNA, 120 bp, Artificial Sequence
  ENSG00000265484_2 (sequence is synthesized)
ttcatgtgcctgtgagatgcctggattcttcaagatggcgagacccaaggaaagaaaggtcaagttgtcggcaagtcacctcaggacttttctggctactttatggaaataaaatcctga

SEQ ID NO: 954353 - DNA, 120 bp, Artificial Sequence
  ENSG00000265484_3 (sequence is synthesized)
ggctggcccgttagggaactactaaaattgtccaaataagaaatgatagagtgttggatcaaaaggcttcagagttctacatcgtatcctacttacagccctaaatacctgttaactgcc

SEQ ID NO: 954354 - DNA, 120 bp, Artificial Sequence
  ENSG00000265484_4 (sequence is synthesized)
accccctggacagattattacagtgacaacagaaatataagtcacataaggagctgctgaatgcactcaagactcaacaatctccaaagatactggaaggcacgaatggaaatctggact

SEQ ID NO: 954355 - DNA, 120 bp, Artificial Sequence
  ENSG00000265484_5 (sequence is synthesized)
ctgacaactgtccttagcatgttatcttttacgccaatgctggccaaagagaaggacttaaaacgttgtactgatccttacaagaacttagtttccactgtttctttccactacttttgc

SEQ ID NO: 954356 - DNA, 120 bp, Artificial Sequence
  ENSG00000265484_6 (sequence is synthesized)
taaattcaaattgaccaaccaatagctgcttaactaggaccacaccttgctcttcctgcatcttatcccatgagcaacacgatttcagtttccccataatttccaagaacttgccagtga

SEQ ID NO: 954357 - DNA, 120 bp, Artificial Sequence
  ENSG00000265484_7 (sequence is synthesized)
ctgtgaaactgcctttgcaaaaatcataactgagaaaagaaggtaaaagagatgtgtcctaactgccttcatctttcttttaacctccaagctgtcttattcattgctggtgtaggctaa

SEQ ID NO: 954358 - DNA, 120 bp, Artificial Sequence
  ENSG00000265484_8 (sequence is synthesized)
actaattttggaagaaacttagtttatgatttaactttgaaaccaagataatagcagccctttccctaaacaaacccccttcctgcctacagcctagactggctttgcaggattaacaaa

SEQ ID NO: 954359 - DNA, 120 bp, Artificial Sequence
  ENSG00000265484_9 (sequence is synthesized)
atagccacaaaattagaaattatggcttaggagtcatgcagctggagggtacaagaatctgaacctctccaaattgctcctgaggataacatcactattgtaaaatctaagatcagtgct

SEQ ID NO: 954360 - DNA, 120 bp, Artificial Sequence
  ENSG00000265484_10 (sequence is synthesized)
tcagatattttgcagactctgtgcttaaaggatcagctggcactacccaggtcttgataaactggctcagttggacttgtggcctctgcctaggaactgattcagcataagaggacagct

SEQ ID NO: 954361 - DNA, 120 bp, Artificial Sequence
  ENSG00000265484_11 (sequence is synthesized)
ttgactccctattattttatctctgacctgatcaatcagcactgccaactttctgaccccctatacaccaaattattcttgaaaacctcagtctccaagttttgggagagactgatttga

SEQ ID NO: 954362 - DNA, 120 bp, Artificial Sequence
  ENSG00000265484_12 (sequence is synthesized)
gtaaaactctggtcccctgtacagtcagctttgcatgaattaaactctttctctattgccattcccctgtctagataaatcagctctgtctaggcagtgggcaagattaacccactgggt

SEQ ID NO: 954363 - DNA, 120 bp, Artificial Sequence
  ENSG00000265484_13 (sequence is synthesized)
tacatgtggcctttcccaattctatcttatgaaatatttatctacttggtccccatagtcatcttgaaatgtgtttcatgttgcaatgttttaataaaggctttagctaatatcttttga

SEQ ID NO: 954364 - DNA, 120 bp, Artificial Sequence
  ENSG00000265487_0 (sequence is synthesized)
aaaaagtccagattcagtgtggatacggccatggggacattcacatcaaattaatgtgctccacttttattgctgaaagagcgcaggagatcagagaatctatgtggagctgaattccca

SEQ ID NO: 954365 - DNA, 120 bp, Artificial Sequence
  ENSG00000265487_1 (sequence is synthesized)
aatgatgaagctgaagccaaaagaggttcagtacttacccaaggccacatacggttgataagtagcagagacattttggaattcgggtttgctatctctaggccctaagttctggagaat

SEQ ID NO: 954366 - DNA, 120 bp, Artificial Sequence
  ENSG00000279750_0 (sequence is synthesized)
acacaggcttcatcctgaacagatacgatgtacagagcatcgcactggctggcccatagggttcttgtgggagaggccaggcctctgtgaccatgaaaggggttgcaactgatacagtca

SEQ ID NO: 954367 - DNA, 120 bp, Artificial Sequence
  ENSG00000279750_1 (sequence is synthesized)
gggagggatcccaggaaggggagtgattcccttaaatttgcttgttgaaacccgtatctggcaggggaaaggaggatccggtgcagagcttggattcagcagaggtggctgttgatgtga

SEQ ID NO: 954368 - DNA, 120 bp, Artificial Sequence
  ENSG00000279750_2 (sequence is synthesized)
aaagtgaatcaccaacttaattattcctctgcaaattaccatcagtgatacgagattcaacgacaaggagctgtgagagcgcacaggaagggagctcatttctggggctttaccccataa

SEQ ID NO: 954369 - DNA, 120 bp, Artificial Sequence
  ENSG00000279750_3 (sequence is synthesized)
agacaaagaaactggctgaggagacaagagaaagaaagtagcagaagatgggaaggaaacagacggagtctcacttgtgttgccaagagagcttgagcatcaactggcagtgaggatggc

SEQ ID NO: 954370 - DNA, 120 bp, Artificial Sequence
  ENSG00000279750_4 (sequence is synthesized)
tggcattgtggtcagagaatatacaaatcgctgaagaatccattgtttatggacattcctgggatagtattcatttaaatatctctatgtacactgtaatggaatataatacaaaaatgg

SEQ ID NO: 954371 - DNA, 120 bp, Artificial Sequence; identical to SEQ ID NO: 807133
  ENSG00000279751_0 (sequence is synthesized)

SEQ ID NO: 954372 - DNA, 120 bp, Artificial Sequence; identical to SEQ ID NO: 807134
  ENSG00000279751_1 (sequence is synthesized)

SEQ ID NO: 954373 - DNA, 120 bp, Artificial Sequence; identical to SEQ ID NO: 807135
  ENSG00000279751_2 (sequence is synthesized)

SEQ ID NO: 954374 - DNA, 120 bp, Artificial Sequence
  ENSG00000274104_0 (sequence is synthesized)
tcccgggacgtgggcagaccttgtaccaggcgagctctcgcctttgctagcaaaagagctcctctcttcccaaaccctgctactacgctgtccaccctgtatggtctttgaggtctttga

SEQ ID NO: 954375 - DNA, 120 bp, Artificial Sequence
  ENSG00000274104_1 (sequence is synthesized)
ggtttttttggaattcacttgctggagactacagctcacagaacgccctgggctggattgtgccagctgtagttcgcgaaccaaggacatttcctggaaatgcatgcggccacgtatctg

SEQ ID NO: 954376 - DNA, 120 bp, Artificial Sequence
  ENSG00000274104_2 (sequence is synthesized)
cttgagtgagcactgagaggacacagaccctcatcctgggaggagtcactcctcccgcagccatcagagcctgacaaccgcttctcaccagaggcgcttcttagaccctgaccttgcccg

SEQ ID NO: 954377 - DNA, 120 bp, Artificial Sequence
  ENSG00000274104_3 (sequence is synthesized)
gctcacccaaaggggcaatggccttctttgtatgcaagccagacagtctactgttgtatatttgaattttttactttatttttaatattttaattaaattttaatttaatgctgcctcta

SEQ ID NO: 954378 - DNA, 64 bp, Artificial Sequence
  ENSG00000274105_0 (sequence is synthesized)
gaaaaaacttcgtatctacagtcttgttcctagacacccttcctgccttatctcctattatgtc

SEQ ID NO: 954379 - DNA, 120 bp, Artificial Sequence
  ENSG00000274105_1 (sequence is synthesized)
tgttcctagacacccttcctgccttatctcctattatgtcccatcactatacttgctgttctccaaaaacattattcttgcattattctttgctgttgccaagcctaaaatgccctctca

SEQ ID NO: 954380 - DNA, 120 bp, Artificial Sequence
  ENSG00000274105_2 (sequence is synthesized)
ttctattcagagcccaattcaaatgccttcttaaatgtggagttctcccaaaccctgaaataaatgtaaatggtctctcttcagtgtctgaaacgcttgattaggtggacacagataatt

SEQ ID NO: 954381 - DNA, 120 bp, Artificial Sequence
  ENSG00000274105_3 (sequence is synthesized)
ggtttattaactgtttataaagtgtgcatatacactgtatgtacttttctgaatatgaattatatctaacaataagaagtatttaaataaaagttatacttttgcagcctaatcaagccc

SEQ ID NO: 954382 - DNA, 120 bp, Artificial Sequence
  ENSG00000274105_4 (sequence is synthesized)
agtattaccttgacctactttacccactaaactcttcaaaggcccatttgtggtaatctatttttctcaatatgccgtacatataaccaataattagtctgataaatactctctttacgg

SEQ ID NO: 954383 - DNA, 120 bp, Artificial Sequence
  ENSG00000274105_5 (sequence is synthesized)
agttgactcatatgaagaccatcttgggcacactaaagtatacagaactacacatacacacacacacaaattcacgtataaatctgaacaagctctgtggattgtacccatgtccaattt

SEQ ID NO: 954384 - DNA, 120 bp, Artificial Sequence
  ENSG00000273221_0 (sequence is synthesized)
attttgcttaaatttaaaaaaataacattaaaacttagtttatctttccactgagtaaaactgagaaaaagttggcttttagatcatatatttatttaaaaaaataaaatgggaaattga

SEQ ID NO: 954385 - DNA, 120 bp, Artificial Sequence
  ENSG00000273221_1 (sequence is synthesized)
tatttaaaaaaataaaatgggaaattgacaaagttaccacattattctgcatgctaacaggatttcccaagcctgtgagagaatcatttcttgagcaattaaaaaaaaaaaaaaaaaaaa

SEQ ID NO: 954386 - DNA, 120 bp, Artificial Sequence
  ENSG00000273221_2 (sequence is synthesized)
acaagctagtgggatgtatctgtgtcacaagctgaattcctcagtaaagaaagcttgagaagacactaaacaaggatgttactaaaagacaatgatttgttaaaattataaagcaatcat

SEQ ID NO: 954387 - DNA, 120 bp, Artificial Sequence
  ENSG00000273221_3 (sequence is synthesized)
cttttggcctgcaaacagtcaacattagaactctccaccactgcggatctggctccccatcacagtattattctgaatccaggataattacaatcacatggcatttttttctgcatgctt

SEQ ID NO: 954388 - DNA, 120 bp, Artificial Sequence
  ENSG00000273221_4 (sequence is synthesized)
tcttggcccaaaccctgcatgacaacatatacaatttacaagatgggacttgaaattcccattctcacacaggatagttagggcgtgttaccaataataaagaataaaagttatacaaca

SEQ ID NO: 954389 - DNA, 120 bp, Artificial Sequence
  ENSG00000261540_0 (sequence is synthesized)
cctggacaggtcccttgtttctaagaattcagaggcttgctgactctaactgtgcttgaagcaagatgactgcaggttgcagagtgaaccattgggaaagtttgcctttttggggatgaa

SEQ ID NO: 954390 - DNA, 120 bp, Artificial Sequence
  ENSG00000261540_1 (sequence is synthesized)
cctttttggggatgaactgattttccaaccctgatgctggcggaaattgagtgatggaactaaggtcatctggtgctctccttgagctgcttaataaacagtaaagctattcctttctat

SEQ ID NO: 954391 - DNA, 120 bp, Artificial Sequence
  ENSG00000261540_2 (sequence is synthesized)
cataaaaaggaattgatttttagtcacctttccaggaagtgcttcctgaacctgaaaacctgcatggagaaattgaagaaattgttcttaaagggtaaaccaaggaaattgtgtccaaga

SEQ ID NO: 954392 - DNA, 120 bp, Artificial Sequence
  ENSG00000261540_3 (sequence is synthesized)
tccctgtttctcacaaaaaataagaaaaggaaccaggtaattagatggattgttcgttcaaggcattatgtacacttcttttggttctgaggttaataaagacaaagaagagaaaaaggc

SEQ ID NO: 954393 - DNA, 120 bp, Artificial Sequence
  ENSG00000278112_0 (sequence is synthesized)
agacacacttaaatggcatctagcgtgggtccggctcccaaagggttagctcaggaggagcacggcagcagccctcctgcctgagtggagagacggggcagatgccaggcatgcctttcg

SEQ ID NO: 954394 - DNA, 120 bp, Artificial Sequence
  ENSG00000278112_1 (sequence is synthesized)
ggtggagcccgggaagtgacggctaagaatgtgctgggcagaggccaggggtagaccgaggacttgggggtgtgcagtcgtccgattcctatgtggggggtgagggggtgctgagaggag

SEQ ID NO: 954395 - DNA, 120 bp, Artificial Sequence
  ENSG00000278112_2 (sequence is synthesized)
ccagccccgcatggaacagtgtggccttcccagcagttcaacttggacactgtgctcagaggcacctggcaggctcctgtacccccggaagtctccagattaaaaagcactttgctcccg

SEQ ID NO: 954396 - DNA, 120 bp, Artificial Sequence
  ENSG00000261541_0 (sequence is synthesized)
cttagccaggtgccatggcacaggcctgtagtcccaactgctgggaagattgaggtgggaggatggctgcagtgccggagcccaggagttcaaggccaggctgggcaaaatagtgctctg

SEQ ID NO: 954397 - DNA, 120 bp, Artificial Sequence
  ENSG00000261541_1 (sequence is synthesized)
cctctgctggactctgtagggaatcctttctgttctgaaagagttaccatttaaccctcttcactgagtacatttctgagaccttgctaggcactatggaaactgcttagttgagaaaag

SEQ ID NO: 954398 - DNA, 120 bp, Artificial Sequence
  ENSG00000261541_2 (sequence is synthesized)
acaaatacaaaagcttttctttagtctatttaagatacaatttattcagttcactttgctttctttttataagaaggtacaagaggcagaggtaatccttctagaaataaaactaattgt

SEQ ID NO: 954399 - DNA, 120 bp, Artificial Sequence
  ENSG00000261541_3 (sequence is synthesized)
tattgagaactcgtatgtaccagacagtacactaagcatggtacttgtgtttttaatttattacatgtaatgtcagtaggttcaattatatgatcagaacatcttcatgaccagcagcat

SEQ ID NO: 954400 - DNA, 120 bp, Artificial Sequence
  ENSG00000261541_4 (sequence is synthesized)
gtattttagagttagaaatgtagtctggtttctgagaagttttacaaggtgtatgtccaaaattattgctctttcctcacatgtcagtgggggataaatacagcattgctctcacttctt

SEQ ID NO: 954401 - DNA, 120 bp, Artificial Sequence
  ENSG00000261541_5 (sequence is synthesized)
tgactctgggcacttttttagatacattttcttcaacactgttaagggacctcactgtcagattaaccaattatttttccacagttggtcaccagactttggaaaaaatccagctcacca

SEQ ID NO: 954402 - DNA, 120 bp, Artificial Sequence
  ENSG00000261541_6 (sequence is synthesized)
aaattttggatatcctggtctgtggtcatgaaatgcttttctttttgtaaaatctgtcactgtgtctcacagcaacttgctttcacacatgttctagtcgttcccataacttagatttta

SEQ ID NO: 954403 - DNA, 120 bp, Artificial Sequence
  ENSG00000261541_7 (sequence is synthesized)
caggaggcaaatttactaaaaatgaggcgactaaaatgaatgaccaactttgaattttgtcaaataacattgaaaatgaattatctcataaaaggtaattttaataccccaaaagtaaga

SEQ ID NO: 954404 - DNA, 120 bp, Artificial Sequence
  ENSG00000261541_8 (sequence is synthesized)
tggttatactctcagaataaagactttttccctgccacattttcagttgttaaaatatgctatgcccatatcttttcccacctgtgcaaatttttcagaagcctacagttggtagtaagc

SEQ ID NO: 954405 - DNA, 120 bp, Artificial Sequence
  ENSG00000261541_9 (sequence is synthesized)
tgttgctttaataactcttttaaataagcattattagcagtttccattacttcttgtaaatttacacaattttatcttgtccatctttaaaaaatagatatctaataaccaaatgtattt

SEQ ID NO: 954406 - DNA, 120 bp, Artificial Sequence
  ENSG00000261541_10 (sequence is synthesized)
gaattgatacagtataagtaacttgtagaacttgaggataagtggtaaaggaaaaaaaaagtaacttgactcttgaaatacgtcttgggtttctagagccttcaaaatacagccttgttg

SEQ ID NO: 954407 - DNA, 120 bp, Artificial Sequence
  ENSG00000261541_11 (sequence is synthesized)
ttactgtgtcacattatgattgttttgacggctacttctgcttacctaggaaactactcatgccttactcagcaaatgagcaccaccattacataaacatcaggtatccaaaagtgttag

SEQ ID NO: 954408 - DNA, 120 bp, Artificial Sequence
  ENSG00000261541_12 (sequence is synthesized)
caggcttgaggtatgaatgattaattcatatgggtaattaagcaagttgaattatggaaagcatctcacaattcacacaattcagctttgagttcaatgccaaatatgatgattcattaa

SEQ ID NO: 954409 - DNA, 120 bp, Artificial Sequence
  ENSG00000261541_13 (sequence is synthesized)
gttgcctttgtattttgtaacctaatttgttaataagttacaggaagccaattaagccagctgctgatctatatagtactaccttcctcattgtgattccatagtcttccaatagaaatg

SEQ ID NO: 954410 - DNA, 120 bp, Artificial Sequence
  ENSG00000261541_14 (sequence is synthesized)
tgctatcagaatctgtataaagagtttgtaaattgcactatttaacaaggttcttaagaatttaggtggatgttttatttgatacctaccaaagaaacttaactaattgtataacactta

SEQ ID NO: 954411 - DNA, 120 bp, Artificial Sequence
  ENSG00000261541_15 (sequence is synthesized)
acccatttagaattcagttgtggcagcataaccaatctggagagaccaggggagatgttactaatgcttgtactttattcagaagtgattgcctcattgtcttggtgcagtaactacaca

SEQ ID NO: 954412 - DNA, 120 bp, Artificial Sequence
  ENSG00000261541_16 (sequence is synthesized)
gcactttgggaggctgaggtgggtggagtacttgatctcaggagttccataccagcctgggcaacatggtgagatctcatctctacaaaaaaatacaaaaattaaccgggcaccaatggc

SEQ ID NO: 954413 - DNA, 120 bp, Artificial Sequence
  ENSG00000261541_17 (sequence is synthesized)
ctccagcctgggcaacaggagtgaaaccctatcttaaaaaaaaagtatttttttcttcatataatcaaatttattggggcagaaatcagtacaaagttcataggacaggaggaaaccaat

SEQ ID NO: 954414 - DNA, 120 bp, Artificial Sequence
  ENSG00000261541_18 (sequence is synthesized)
agaaatcagtacaaagttcataggacaggaggaaaccaatataaacatctcagcattgtaggaaatttaacccatggaaagcaggactgaattaaagaccactttgaaggccaggaaaag

SEQ ID NO: 954415 - DNA, 120 bp, Artificial Sequence
  ENSG00000261541_19 (sequence is synthesized)
cagataatttagatatagtcaaagtatgaaatcattgatagatccagaacaagggaatgatatatgtgtttacatattagatctacattattaacaattttccctctgttaaactaatat

SEQ ID NO: 954416 - DNA, 120 bp, Artificial Sequence
  ENSG00000261541_20 (sequence is synthesized)
cgactaatagtagtctaggtaagtcaagttcaaattaagtggtaattgaaaagtcttcctttttaaaaatttttaatggtagaggcagcagctacccagagtctacttattcttacttca

SEQ ID NO: 954417 - DNA, 120 bp, Artificial Sequence
  ENSG00000261541_21 (sequence is synthesized)
catagaattctaacaagttaggttatctgatttctgcttcctaacaaatcacaagtatcgaaagggtcttgcagaaggggtgaactataaaatgtgacagctgacagcaaggcatgggaa

SEQ ID NO: 954418 - DNA, 120 bp, Artificial Sequence
  ENSG00000261541_22 (sequence is synthesized)
caaaaataaacttaaggtgaacattaaaaacatagcagcttgagacaatttataggattctgcatacaaccgtctctgaggacatcactgtgatcaaattatacaagtgatgtttagtga

SEQ ID NO: 954419 - DNA, 120 bp, Artificial Sequence
  ENSG00000261541_23 (sequence is synthesized)
tgaattggaatcaagataagtagtaggtgttatttaaaaaggcagtatatgtgttgcattcagtggcaacaatttccccttagctatttagttaaaagcttagtgcttaacatgttggaa

SEQ ID NO: 954420 - DNA, 120 bp, Artificial Sequence
  ENSG00000261541_24 (sequence is synthesized)
aatttatgtgtaaaatatattgacttattccttgatgattggaggctttatcacaggaagttttcccattcaattgaaacatttttcaagcttaatgactataatttactacataattta

SEQ ID NO: 954421 - DNA, 120 bp, Artificial Sequence
  ENSG00000261541_25 (sequence is synthesized)
ttttgttaaagtttgagaaaaactaaataaagaagtagcaatttaagtcataataaattttgttagatgacttcttccactttagggggaattaaaaatcttgtttaaaaaccacatgtg

SEQ ID NO: 954422 - DNA, 120 bp, Artificial Sequence
  ENSG00000261541_26 (sequence is synthesized)
cagcagttctgtgactgcctcaacacctagttggccatatagtccctttgcaccacagaggttggagtatagaatatgcccaaagctgttttgttttgttttaactatgctgcatcatct

SEQ ID NO: 954423 - DNA, 120 bp, Artificial Sequence
  ENSG00000261541_27 (sequence is synthesized)
gaggttgtgttaacatagtttgtcctaatagtcttttactggaaagttgctatatttgattatgttcagcaagtaaactaattttatctactttcatatattttgagacaaagtctggcc

SEQ ID NO: 954424 - DNA, 120 bp, Artificial Sequence
  ENSG00000261541_28 (sequence is synthesized)
tactttcatatattttgagacaaagtctggccctgtcatccaggctggagtgcgggggcgtaatcgtacctcaccacagcctcagcctcttgtgctgaagtgatcctcccacctcagcct

SEQ ID NO: 954425 - DNA, 120 bp, Artificial Sequence
  ENSG00000261541_29 (sequence is synthesized)
catgcccggctaattttttactttcctaagagacagagtctcactatgttacccaggctggtctcgaagtcctggactcaagtgatcctccctgcctcagcactcccaaagtgctgggat

SEQ ID NO: 954426 - DNA, 120 bp, Artificial Sequence
  ENSG00000261541_30 (sequence is synthesized)
tgcaggtgtgagcaaccatgcctggtgttttatcttttgcagaaatccagtttagttaagtcatgttgtagcaagcatcattttcatataaaaagtgtacagttcatattattagcaaat

SEQ ID NO: 954427 - DNA, 120 bp, Artificial Sequence
  ENSG00000261541_31 (sequence is synthesized)
gtattctgtaattttatattagttgtggtcttgaaggacattgaaaatctgttcagaaagactgtgtttttcaaccagagatgacatcactctaactttcctttggtttaaatgcttgat

SEQ ID NO: 954428 - DNA, 120 bp, Artificial Sequence
  ENSG00000261541_32 (sequence is synthesized)
tctttgcttacaaaatttctgttttgaacaattatggtgagaaagtatatttgtgatactgttttcttagaacactgttgtcagatagatcagccataatgttaacacgtttctgatctc

SEQ ID NO: 954429 - DNA, 120 bp, Artificial Sequence
  ENSG00000261541_33 (sequence is synthesized)
tattataaggctgtaattttccaaaataagatagaaaaggagaaaagggtagtacatttcataattactgagatgaaccctgtactagtgagaaaataaaaatgccaacaatttattaaa

SEQ ID NO: 954430 - DNA, 120 bp, Artificial Sequence
  ENSG00000235293_0 (sequence is synthesized)
tgagtccgtgttgcatgatttcctttgtccacaaggcagtgaagtcaactctgaccagccttgcactattttcttgtctgttctggcaaaacaaggactatacatccacatttcaatgtg

SEQ ID NO: 954431 - DNA, 120 bp, Artificial Sequence
  ENSG00000235293_1 (sequence is synthesized)
aaggtcctataaagaaggaaattgtcagaagagttctgcagggtttccagctccaggagccgatgtaagtagggagaagaacagtgccaaggagaaactgctgttgccaaagaggaggga

SEQ ID NO: 954432 - DNA, 120 bp, Artificial Sequence
  ENSG00000235293_2 (sequence is synthesized)
gcacacagatggataatgggaagacaaagatatggagagttggatgcctttggcagtaagtatatcggaaaggctcattcaggcgacatcacccaagatctctgctctgggtaaaaagag

SEQ ID NO: 954433 - DNA, 120 bp, Artificial Sequence
  ENSG00000235293_3 (sequence is synthesized)
aacatcagcttgaaaagcttaaaattctactggcagacactgtctgacatggaaatatctctaaccgcaagatgatttgcaattagcattctttctagtggcacagtaactgcctcatat

SEQ ID NO: 954434 - DNA, 120 bp, Artificial Sequence
  ENSG00000235293_4 (sequence is synthesized)
gattgctaaggagattaaataaggtagagcttgagaaagaccccattaaactgtaatgggctattcaatgttagctattgtcattttcagagttaccaaataaaattcgacttgcataaa

SEQ ID NO: 954435 - DNA, 120 bp, Artificial Sequence
  ENSG00000261543_0 (sequence is synthesized)
aaggggcaggatctggggaggagaagcgacttcaggaatgctggggaagcagtgtgactccaggtgtggaggcttggaggaaagcagacctcagaagcctggaggaaagagagaagctgc

SEQ ID NO: 954436 - DNA, 120 bp, Artificial Sequence
  ENSG00000261543_1 (sequence is synthesized)
ctaaaccttggccaagccaaagcagacggcctcacaagatcaagatcctctcttgcttctctagagaatgtgctccatcaaaaagagagaataaaccaagaagaggaagacagaggatcc

SEQ ID NO: 954437 - DNA, 120 bp, Artificial Sequence
  ENSG00000261543_2 (sequence is synthesized)
gcagaaggatggggagctctgggagtgtctccaagaaagaaaaagaaactgatcaaatatctaatttttaaaacatattgaggggaaatttatacttctgcaataaattttaggatatcg

SEQ ID NO: 954438 - DNA, 79 bp, Artificial Sequence
  ENSG00000261543_3 (sequence is synthesized)
taatagaaactgtaattatcaaccgcgggagaagaaaggttgtatgagaaaagaaataaaaacagaattcagtacatgg

SEQ ID NO: 954439 - DNA, 120 bp, Artificial Sequence
  ENSG00000227579_0 (sequence is synthesized)
ctcatgaagctgacatcttttttggatggaagcacagagaccagggaaggctggtaaatgtaataatgtctgcaaagccgtcggagtgccttggaagaaaattcaaggggatgatgtagc

SEQ ID NO: 954440 - DNA, 120 bp, Artificial Sequence
  ENSG00000227579_1 (sequence is synthesized)
aagaaggacctcaccagatgctggcaccttgatgttagacttcccagtctccacaatgtgaacttgcttgtcaaatgcctctttaaaaagaaagtgaagataactgcaagtcagctggaa

SEQ ID NO: 954441 - DNA, 120 bp, Artificial Sequence
  ENSG00000227579_2 (sequence is synthesized)
gtgctgccaagatatgacctccaggaaggcccagaagacaagtgatattgtgtggactgctacagcgcaatgtctaactgatgcaaaatgaagaatcaatttgaaattaagatgagtaaa

SEQ ID NO: 954442 - DNA, 120 bp, Artificial Sequence
  ENSG00000227579_3 (sequence is synthesized)
ggcatccagcacttacagcaaaaaacattgtcatcaggccctggggagatgaggacacctcccttcccttctcaggctccctttccctgtcagactctagctctcaaaggctgtcatcct

SEQ ID NO: 954443 - DNA, 120 bp, Artificial Sequence
  ENSG00000227579_4 (sequence is synthesized)
ccaagggtattccctacgtactgcatagcatctctgttaccctttgaattcaacagtattcatctcctccaacattcattcattcctttagtcaaaagtcagttgtcaaacacaaggcac

SEQ ID NO: 954444 - DNA, 120 bp, Artificial Sequence
  ENSG00000227579_5 (sequence is synthesized)
ggccaatatttgtcatgtcatttcatgaattgtctgagaaacataaaacatacaatgaggatactgatccaagatacatggcacacaattaaattgcgaaaaacatgactctgagtccaa

SEQ ID NO: 954445 - DNA, 120 bp, Artificial Sequence
  ENSG00000227579_6 (sequence is synthesized)
aagttcttattttttcacagtcttcagagtattgtatagaccccttgaaaaataaatttgcagagtgtgaatgttaattactgtcaccttcagaaaagagattttacacatgtataaaag

SEQ ID NO: 954446 - DNA, 120 bp, Artificial Sequence
  ENSG00000227579_7 (sequence is synthesized)
agaaatagtgactattctagattatagagcacagaaagaattctcaaactagtataaccctatttctctatatcacaaagacatcttgtaggcatgttcctctgaaggacttgagaatta

SEQ ID NO: 954447 - DNA, 120 bp, Artificial Sequence
  ENSG00000227579_8 (sequence is synthesized)
tgctttttttcctccttgtctctctaaaagcaaaaagcacagtaatctcgctgaagtataatcaaaacagagcctgatgtgaaaccagagccttgagttttcatcctgcatttgttactt

SEQ ID NO: 954448 - DNA, 120 bp, Artificial Sequence
  ENSG00000227579_9 (sequence is synthesized)
aaaagctgacataagaaaaattatttaacttctcttaacctcagtttcttatctataaaatgggattataaaatgtatctcacaaggtagttatgaggattaaaggaaatgaaaaaatgc

SEQ ID NO: 954449 - DNA, 120 bp, Artificial Sequence
  ENSG00000227579_10 (sequence is synthesized)
tccatcctggggcacaccaacgtttagagatttggaagaggagagctgtcagaggacactgagaagtggcagtgacgttggaagaaaataagaatgctgtgtttctggagtcaagttaaa

SEQ ID NO: 954450 - DNA, 120 bp, Artificial Sequence
  ENSG00000227579_11 (sequence is synthesized)
actccattttaaagatggagtggtcacctgtatcagatgtccccaggaggccaaggaagaatgctccaaatcataataaaatccatccattacttcagacagatgaaaacagttccttct

SEQ ID NO: 954451 - DNA, 120 bp, Artificial Sequence
  ENSG00000227579_12 (sequence is synthesized)
aaaaagaggctaatgtttttaaaagacagtaagagaagaatgtcagctccccatggctgcagtagaaagtgctggatgagaggagcatctccagagcatggaagacaaagcagctttatc

SEQ ID NO: 954452 - DNA, 120 bp, Artificial Sequence
  ENSG00000227579_13 (sequence is synthesized)
ctcaacttttccacctcaatttccattttcctccaaggcaaaactcccactcctggcagattaaatgaaatgaagacactgagctctgcaagtacactgctttttgaatcccagagtgaa

SEQ ID NO: 954453 - DNA, 120 bp, Artificial Sequence
  ENSG00000227579_14 (sequence is synthesized)
ggacgtgtttgcttccccttccaccacaattttaagtttcctgaggccttccccagccctgcggaactaatgctccaaatcataataaaatccatccattacttcagacagatgaaaaca

SEQ ID NO: 954454 - DNA, 120 bp, Artificial Sequence
  ENSG00000227579_15 (sequence is synthesized)
gaaggacgtgtttgcttccccttccaccacaattttaagtttcctgaggccttccccagccctgcggaactattaaatgaaatgaagacactgagctctgcaagtacactgctttttgaa

SEQ ID NO: 954455 - DNA, 120 bp, Artificial Sequence
  ENSG00000227579_16 (sequence is synthesized)
tcttttagccttgcagtggctacagttcaaacagaatagcagattttggccaagcaccaaggttgaaggctgactggtgcttcctaatcccatttataaaaattcaacacagcttctgca

SEQ ID NO: 954456 - DNA, 120 bp, Artificial Sequence
  ENSG00000227579_17 (sequence is synthesized)
agaacagtgggatgtatcattgtctgcttatctgaagatatgcctgctgtcagctcagcatcattaccggggcccaagacatttccataggcctttgaaaagctttcaagctggaggtct

SEQ ID NO: 954457 - DNA, 120 bp, Artificial Sequence
  ENSG00000227579_18 (sequence is synthesized)
cctgcctttcgacagaggagccctggtggcagcaagcctttccacctaggccaacacccatcccttgcctcaaccacaggaccactgaggctgacctggtgaggtggaccccttgagaag

SEQ ID NO: 954458 - DNA, 120 bp, Artificial Sequence
  ENSG00000227579_19 (sequence is synthesized)
actgctgttggtgaggtccacattagggtagatttagctcccacaagagaagtttgtgtcaccagatctccacgatgattccatgaaagtctgagaatgctccaaatcataataaaatcc

SEQ ID NO: 954459 - DNA, 120 bp, Artificial Sequence
  ENSG00000227579_20 (sequence is synthesized)
aggaagcctcctatcagactctctgcctggcctgagatatccagttaacacctgcaattcagaataccctctcacccagcaataaagcatccagcctttgcatctgtaacaacctcctct

SEQ ID NO: 954460 - DNA, 120 bp, Artificial Sequence
  ENSG00000227579_21 (sequence is synthesized)
gcagagctaatgatacacatattttggaatcatcagcaaacagtggtatttaaagccatagaagtggatggggttatttagggagtgggagagagagaggaaaggagagacttttcaaaa

SEQ ID NO: 954461 - DNA, 120 bp, Artificial Sequence
  ENSG00000223586_0 (sequence is synthesized)
ggcccccgacccgggatctctacccaaaaggaggcggttagaacacagagattgatcatgcctacaatgacaactggaaaacagaaatgaaaccatataagccaagcactcacgcaatct

SEQ ID NO: 954462 - DNA, 120 bp, Artificial Sequence
  ENSG00000223586_1 (sequence is synthesized)
tctttagatctcaggaactgttggtgtccctactttccagatggagaagttgaagcccggagaactcaacttgaaagtacaacctgctggcctaaacaagatgctgtgccttgtatttca

SEQ ID NO: 954463 - DNA, 120 bp, Artificial Sequence
  ENSG00000223586_2 (sequence is synthesized)
acccaaagaataagatggagatggagacgaatgagaggcatgcaaatcataaaagtccacagaatcttgtacattacttgatacatggaatgtactaataaatatttgctaaatgaaaaa

SEQ ID NO: 954464 - DNA, 120 bp, Artificial Sequence
  ENSG00000223586_3 (sequence is synthesized)
gtggaacaccaagacaagtggctagaaaccttgtacatgaaaacagcggcccacccaaagtttgtcttttcctaggaagttatagagaaatgaggaggtaacagaagagcagtcaataaa

SEQ ID NO: 954465 - DNA, 120 bp, Artificial Sequence
  ENSG00000223586_4 (sequence is synthesized)
agaaaaatttctttaaaagacatatgggtgggatgagaacgaatgattcttactttatctgtagaaattgaattttgctgcaactaagagagacctcgaaaatagtgatttacacaaata

SEQ ID NO: 954466 - DNA, 120 bp, Artificial Sequence
  ENSG00000223586_5 (sequence is synthesized)
aaattttgttccatcaagaaaactgatattcagcagtccaggctgatgcagtggcttcaagagctcttcagcaacccaggcaccttccaggtcttctttcccaattctagtgctagtaac

SEQ ID NO: 954467 - DNA, 120 bp, Artificial Sequence
  ENSG00000223586_6 (sequence is synthesized)
gcatgcacgctcactttaaagaagacttctaagaagaaccacctaaaattccccaacctagtcccaaagctcacttggctgctttcaagcctggaaaatgcagtctttaagctgaaaaat

SEQ ID NO: 954468 - DNA, 120 bp, Artificial Sequence
  ENSG00000223586_7 (sequence is synthesized)
aagaaaatgtggcgtctttagatctcagatcccttgtttccaactggttcaaataaatagacaactcttcattccgatggtacttcttagagataaaccacatgcatgtatcagagaaaa

SEQ ID NO: 954469 - DNA, 120 bp, Artificial Sequence
  ENSG00000223586_8 (sequence is synthesized)
tggatatgaatgttcacagcagcattattcataatagtcaaaaaatggaaacaaccgaaatgcccaccaactgatgcatgaataaacaaaatgcagtgcatccattcaatggaatattat

SEQ ID NO: 954470 - DNA, 120 bp, Artificial Sequence
  ENSG00000223586_9 (sequence is synthesized)
tcagccattaaaaaggataaattactgatacatgctacaacatgtatgaacttcaaaaacatatgctaagtgaaagaagccagccatcaaggaccacaaattgtattattcaatttatat

SEQ ID NO: 954471 - DNA, 120 bp, Artificial Sequence
  ENSG00000223586_10 (sequence is synthesized)
gaaattctaaagtaggcaaatctgcaaagacaaaatagtttagtggttgtatagggctggggtcaggagaggagaataggagtgactgccagtgagcaagaggtttctggtgaaaacatg

SEQ ID NO: 954472 - DNA, 120 bp, Artificial Sequence
  ENSG00000223581_0 (sequence is synthesized)
gagttcacaggaggctcttcccacgtattgactacctttctccagtgctgtaccacgtacggatggacaataaaaatgccactaacctctcctctatattttttccagggataattctga

SEQ ID NO: 954473 - DNA, 120 bp, Artificial Sequence
  ENSG00000223581_1 (sequence is synthesized)
tacaaaaaaaaaaaaagcattgttggtagcatgcattgggtgttcaataaatgtcaccagtcaggaataaatgtcaccagtcaagaataatcatgaaggaaagacaggaaagtgggtgcc

SEQ ID NO: 954474 - DNA, 120 bp, Artificial Sequence
  ENSG00000223581_2 (sequence is synthesized)
ttgaggaggctctggaaaagagataagtggggctaatagcactggcccagaggccatgtagtggagaacttccaatctcccagcacaccacctgggggacggtgcatcctcctggaaagt

SEQ ID NO: 954475 - DNA, 120 bp, Artificial Sequence
  ENSG00000223581_3 (sequence is synthesized)
acacagctccactggaaacaggagacttccgccaaacatgagacaaggggcctggaatatttcagttgtgtcctattaggtgctccgctaacattctgctttctcttctgagccgtcaat

SEQ ID NO: 954476 - DNA, 120 bp, Artificial Sequence
  ENSG00000223581_4 (sequence is synthesized)
acgctgccccagcacgggtggaagatgccccctacacatttcaagccgactaatcacaggggaagaaacacggcttgttttaaccgctttctacgggcttcttatgccttcagtctgcgc

SEQ ID NO: 954477 - DNA, 120 bp, Artificial Sequence
  ENSG00000223581_5 (sequence is synthesized)
gttcctgcagagtcacctctgaagggggaaccagattatccaaagcttctggctctcataccaggtgggcttatgtaaactgtctcagggtcctcattcgtaaataaaggacttaaacta

SEQ ID NO: 954478 - DNA, 120 bp, Artificial Sequence
  ENSG00000236605_0 (sequence is synthesized)
gtactttcctgccttcctgttaacggtagcataatcccgccatgtgtgccagccccgtggcagaaggatgcgttcatattttctggaggtaaaagggaccggttcaatttacaggcttga

SEQ ID NO: 954479 - DNA, 120 bp, Artificial Sequence
  ENSG00000236605_1 (sequence is synthesized)
ctacctcagcagtttcactaagttctggtacataaatggatgttttattaaagaagaaaaggaagggggaagggaaggaggaggaagacgaagaagaagaaaagaagagaaggaaaggag

SEQ ID NO: 954480 - DNA, 120 bp, Artificial Sequence
  ENSG00000236605_2 (sequence is synthesized)
aaaaaaggaactaagctcacctctgctgagagaagctgtgcatggcgagtggcccccacacacctggctggatgacatctgagggctcggaggtccctgctgctcagtgtgccaggatgg

SEQ ID NO: 954481 - DNA, 120 bp, Artificial Sequence
  ENSG00000236605_3 (sequence is synthesized)
tcccaccgtcctcacattcacattttttatggatgatgcgtcattctgctaaggcaacaaaagtgaaaacaatcaatagttctacccaaatacctgttattttaagaatggggccagagt

SEQ ID NO: 954482 - DNA, 120 bp, Artificial Sequence
  ENSG00000234601_0 (sequence is synthesized)
aggctccctccctgccaggttgtgggtgcaacattcagggaatggttactgaagtgttccaggcaccagagctcaggcaagaagtggaaaactgcgcaagatcctgcaccattcaacggc

SEQ ID NO: 954483 - DNA, 120 bp, Artificial Sequence
  ENSG00000234601_1 (sequence is synthesized)
taaaatgacttttaaaactacctggtgaatggcaataccacatcaaaccactaggtggcaaagcagactcggagaacgacctctctgccagcaggcgctgaagcagctacccgttcccca

SEQ ID NO: 954484 - DNA, 120 bp, Artificial Sequence
  ENSG00000234601_2 (sequence is synthesized)
tgaccaggaacttcagcttagctcagtcatgcagttcgcggaggatatcaaacagagtcaacaaagctttgcaatcaaacgtgtctttaaagggaatccaacttgtgaacctggctcttg

SEQ ID NO: 954485 - DNA, 120 bp, Artificial Sequence
  ENSG00000234601_3 (sequence is synthesized)
atattcatttgaagctgcaagggggaaaagatgttacctaatatggagcaatggctcttattgtgaacaaaacatctctgaacaccaaaaccggaataaaattctatttaaaaaggggaa

SEQ ID NO: 954486 - DNA, 120 bp, Artificial Sequence
  ENSG00000234608_0 (sequence is synthesized)
tacaaggtagccgtttggcgtcgtgagtatgtgccaaatctactagacattggagaaacagtaggaacaacacatggtaccggcacatggatctttcaggaaaacgaagtaggtaataaa

SEQ ID NO: 954487 - DNA, 120 bp, Artificial Sequence
  ENSG00000234608_1 (sequence is synthesized)
caggaaaaagcccgagtctgatgctaagaagaacataaacaggatgctgagagattgggtctctccacattgccccggctgctctccaacccctgagttcaagtgattcacctcccttgg

SEQ ID NO: 954488 - DNA, 120 bp, Artificial Sequence
  ENSG00000234608_2 (sequence is synthesized)
acatattttggagcggaaagtgaccagaagaggtgtgcagtttccaggcctggcccatacagacctccaacaggtgctcccctgtgctgttactccttctgccaactggaagcagatggt

SEQ ID NO: 954489 - DNA, 120 bp, Artificial Sequence
  ENSG00000234608_3 (sequence is synthesized)
gaccaggctctggagaaggcaaggcctgaagatgggagattcctaagtggaggagaactgtgccttactgacctaaatatccactcagtattgttatgtgagaataaataaacttgtgtt

SEQ ID NO: 954490 - DNA, 120 bp, Artificial Sequence
  ENSG00000234608_4 (sequence is synthesized)
gccaacatggcgaaaccccgtctctatttcaaaaaaagaaaaaaaaaagtataaaaaggatgaggttggagatgtgggcaggggctgcatcatatgtggcctttgggggtcataatcagg

SEQ ID NO: 954491 - DNA, 120 bp, Artificial Sequence
  ENSG00000234608_5 (sequence is synthesized)
atcatatgtggcctttgggggtcataatcaggactttggattttattctaagctattgtaaggttttaaagtaaagagtgatgtgaacaaatttgttttaaaagatcactctgctttgta

SEQ ID NO: 954492 - DNA, 120 bp, Artificial Sequence
  ENSG00000234608_6 (sequence is synthesized)
gagaatagaatataggaaagcaagaatggaaacagagctattaggaggctattggagaataatgcagatgagagattattacactgtctgaactaaggaggtggcggtaaaggtgtagag

SEQ ID NO: 954493 - DNA, 78 bp, Artificial Sequence
  ENSG00000234608_7 (sequence is synthesized)
tgcagtggcgtgatcacagctcactgcaacctagacctcctgggctcaggcgatcctcccacctcagcatcctgagta

SEQ ID NO: 954494 - DNA, 120 bp, Artificial Sequence
  ENSG00000234608_8 (sequence is synthesized)
aggtagccgtttggcgtcgtgaggtatggatgttcccatccctaatttgcaaaataggtaactgaggctcaggagagctagactagtttgtgcacagccgagaagtggtcaagctagaat

SEQ ID NO: 954495 - DNA, 120 bp, Artificial Sequence
  ENSG00000234608_9 (sequence is synthesized)
gggaccccaggtttgtgctccctactctccaccgataacctatcaaagggctttgcaagagcttttgactaatcgtctgtcaatggttcttcattcacgtattaattgcacatcagtatg

SEQ ID NO: 954496 - DNA, 120 bp, Artificial Sequence
  ENSG00000234608_10 (sequence is synthesized)
acgcctggaaaacgctcttctgagaggatctgtggaggtcaacccaggagagagaagacaggactgaagcactgaaagggtcctgccgttaagggcgcaggattgtatagaatatataat

SEQ ID NO: 954497 - DNA, 120 bp, Artificial Sequence
  ENSG00000234608_11 (sequence is synthesized)
agcaactggatggataatgatgccattgagtgagtgaaaaacttgatggaagtggaagattcagagttcatttctatctaggttaatttgagacataccagagcataagttaagtaagta

SEQ ID NO: 954498 - DNA, 120 bp, Artificial Sequence
  ENSG00000234608_12 (sequence is synthesized)
attgaatattggagtggagacttatttgtctaccgaattattgttttctttgtcggacatacacctacactgcattcctcaaagtaaaatttaagtgtggctctgtgcctatgctctccc

SEQ ID NO: 954499 - DNA, 120 bp, Artificial Sequence
  ENSG00000234608_13 (sequence is synthesized)
acggaatccgggggaggccgaaacccggtagtcgatggaacctctcactgcaaaatctccctgctttttgaggctagagccgagaagaacgccacaggacaacgcgggggaagagggggc

SEQ ID NO: 954500 - DNA, 120 bp, Artificial Sequence
  ENSG00000234608_14 (sequence is synthesized)
acctcccccttaccttgatggctttgtccatgtcgctctcctccgacatactcagtggggcccccacagccgggagaggcggaggctgctcagcagccctgtccccgcgcggccgaggga

SEQ ID NO: 954501 - DNA, 120 bp, Artificial Sequence
  ENSG00000234608_15 (sequence is synthesized)
gcaaagggctcggcactcgggcccctgggcctcgtggcgacgggcagcagccgcccctcgggaccggtggggatgaggaccccggcgccggctctgcttcggcgggcggctctaggctgg

SEQ ID NO: 954502 - DNA, 120 bp, Artificial Sequence
  ENSG00000234608_16 (sequence is synthesized)
cggcagcagcagcggcggaggcggcggcccctggggacaggtctttgtgctgggccccacgcggccgcctcctagcctcatccccagctggggaggcaggctcctggggtagggcgaggc

SEQ ID NO: 954503 - DNA, 120 bp, Artificial Sequence
  ENSG00000234608_17 (sequence is synthesized)
ggggagggcctcgacccggggcgccgtgcaagggcctcgcggggccgccgcttagacctgggctcgccaggtcctaaagaagagcctgcgcctccgcctccgccgcctgcaccgccgcga

SEQ ID NO: 954504 - DNA, 120 bp, Artificial Sequence
  ENSG00000234608_18 (sequence is synthesized)
cctgcgcctccgcctccgccgcctgcaccgccgcgaagccgaagccgaagccgaagcagagctcggcgccgctgctcccgccgccgcctcagcgccacacatcgccgggacacccgcgcc

SEQ ID NO: 954505 - DNA, 120 bp, Artificial Sequence
  ENSG00000234608_19 (sequence is synthesized)
gccccgcgggagctccaggccgcccctcctgccgcccagcttcgtgactccacggccccacgcgccccttgctgccttccgctggggtttccgagccgcccccgaaccgcgcacccgact

SEQ ID NO: 954506 - DNA, 120 bp, Artificial Sequence
  ENSG00000234608_20 (sequence is synthesized)
tgcaggcgtccgcctgggcctccctaagacacgccgcatacaggacaggcccctgggccttccgcggcgatggcgctgcgctaatgacgtcataggcccggactcgcgtgagtgcgcgtg

SEQ ID NO: 954507 - DNA, 120 bp, Artificial Sequence
  ENSG00000234608_21 (sequence is synthesized)
ttcgtattagatgattaaggaaggaatctcaggaggtaacatttaagctgagacccctgaggaatgagaaagggctggctattggaaatccaaggaaagatttctgggcagatgggtaga

SEQ ID NO: 954508 - DNA, 120 bp, Artificial Sequence
  ENSG00000234608_22 (sequence is synthesized)
aattttaaggtggaaataagctaaatatgttcaagaatcagcaagaaggtcattgtagctggagtagatcgagtaggaggagactgataaagggtgaggttggaggctgggcgcggtggg

SEQ ID NO: 954509 - DNA, 120 bp, Artificial Sequence
  ENSG00000234608_23 (sequence is synthesized)
gcgtgagccaccgtgcctggctgagaagatggatttaagacatattttggaggtaacattgtcaggacttcctgaaggattagatgtggaagggaaggataagaaacagaccaaggataa

SEQ ID NO: 954510 - DNA, 120 bp, Artificial Sequence
  ENSG00000224583_0 (sequence is synthesized)
tttgaacctgaatctcaaggatcttcttatgctaagcctgagaccagaccaagaggatacatggcacagtgcttttgaccatcttgaccagaaccacaaaacccaggaaatttctcagaa

SEQ ID NO: 954511 - DNA, 120 bp, Artificial Sequence
  ENSG00000224583_1 (sequence is synthesized)
ttatctcagctggattattcacacctgtaagtgtaaagtactggcagtcaacttataaccataaagtcaacttcatctgagatttgaccaatacctctctacaacaagtaaaaggcagag

SEQ ID NO: 954512 - DNA, 120 bp, Artificial Sequence
  ENSG00000224583_2 (sequence is synthesized)
ccaagagttacagagaaaaagcaggtcccgatgatataatttaccatggttaagctttgaccaaagctagacttattcctgaacatattggttagctgaggcaataaattttatttttgt

SEQ ID NO: 954513 - DNA, 120 bp, Artificial Sequence
  ENSG00000224582_0 (sequence is synthesized)
atctcaggagtaggctctgattccttggggccccaggagcctctcaggagtctacatcccaagatgttctaacttccagagtctccaagcccatcaagagcaagttttgctaaaagtgtt

SEQ ID NO: 954514 - DNA, 120 bp, Artificial Sequence
  ENSG00000224582_1 (sequence is synthesized)
ctgagagcttatgaagcacatggtgagtggtcagtccctcagctcttccccagaggccctgggtcccatggggttagcagggacaggggaagcctggggctggtgagaggccaacttcca

SEQ ID NO: 954515 - DNA, 120 bp, Artificial Sequence
  ENSG00000224582_2 (sequence is synthesized)
gccagggcttgatctggttttcaatggattcaaagtttggcctccttttccttacctggaggggacagaggcactgggaccaggccaagctctggctgagccagggctaggggaagtaca

SEQ ID NO: 954516 - DNA, 120 bp, Artificial Sequence
  ENSG00000224582_3 (sequence is synthesized)
tccactgggggcccatgccatggggaggtgttggggcacagccaccactgttctacctcttggggaagggtctgcagtggggtctggaatacagaggttttcacggaagcccaggggacc

SEQ ID NO: 954517 - DNA, 120 bp, Artificial Sequence
  ENSG00000224582_4 (sequence is synthesized)
ctgaacacttctattccttctatcaggacaaggaagggttgtgcatccggctttccaccttaaactggtttctatggtgcttcatcgatgagataaggatgcataggagaccccaggcca

SEQ ID NO: 954518 - DNA, 120 bp, Artificial Sequence
  ENSG00000224582_5 (sequence is synthesized)
ggtacctcctttccccacagtgctcagctcccccagcccaggggtctggcttccccaggaggacccagctcacccccaccccacaggaggcacaggcaggtctctgcagggcacacaagc

SEQ ID NO: 954519 - DNA, 120 bp, Artificial Sequence
  ENSG00000224582_6 (sequence is synthesized)
caggacctgtatgatgggagctttacacaccagacaccagggaattctgggcagactgggccaagacccatcttggaagagccaaaggagccagggaagccacaagccctcaggaagccc

SEQ ID NO: 954520 - DNA, 120 bp, Artificial Sequence
  ENSG00000224582_7 (sequence is synthesized)
cttattctgggaaccacatttctgctgagatgagtccatccccatgaagagctgccggaccttgtctgacccagccttatggaagattgggtgggtctcttcccaagcagagggagcctc

SEQ ID NO: 954521 - DNA, 120 bp, Artificial Sequence
  ENSG00000224582_8 (sequence is synthesized)
aggaagtccagactgaggctacagtgggccctgctcaagccaccagccccgaggttggaaaggccaggtcctcccacacctgctgttcccacagacttccttcatgctcatcctgtggct

SEQ ID NO: 954522 - DNA, 120 bp, Artificial Sequence
  ENSG00000224582_9 (sequence is synthesized)
ctgggatgtctacctactgggaggtgagtgtgtggtgacaactatggtatacatggccttcacagccacagaattaagtccctgggtggccaatggtgcccagaaggagcatgcaggaca

SEQ ID NO: 954523 - DNA, 120 bp, Artificial Sequence
  ENSG00000224582_10 (sequence is synthesized)
gaccctgggacctatagccaggacagattcctggcttctggtgtgtgatgacctgagagcagcatccacactgtccagatggctctctgctccagcctggaggtagggccagaccaggcc

SEQ ID NO: 954524 - DNA, 120 bp, Artificial Sequence
  ENSG00000224582_11 (sequence is synthesized)
tggtgggctgggcagggagtggacccaggtaccaaacccactcctgacacaacccagatgaaaggcaagagtgtgttgagcacttccctgcccaggccttcctccagctgtggttttctg

SEQ ID NO: 954525 - DNA, 120 bp, Artificial Sequence
  ENSG00000224582_12 (sequence is synthesized)
tgaacatctggacccctggggcagccacagtaggatccagcaccgcccagtggtgggtgcctggggcaggaacaaggtgcagacactgactctcccacagacccctcccagcctcatagt

SEQ ID NO: 954526 - DNA, 120 bp, Artificial Sequence
  ENSG00000224582_13 (sequence is synthesized)
caccctgtccctagaacaccccctgaagctgttcctgtttggcttgcaggagttccttcaggacacactgtcctaggcctgggccctggaggaggacatggtgatgaggcaccctgaggc

SEQ ID NO: 954527 - DNA, 120 bp, Artificial Sequence
  ENSG00000224582_14 (sequence is synthesized)
ctccatgggggaactgagaagcatgcactgtgacctgcacacccaggtgggcttcagcaccaagtctcctcctgtgtcaccctgcggggcagtaaatagtgggaagtgcccagacctcac

SEQ ID NO: 954528 - DNA, 120 bp, Artificial Sequence
  ENSG00000224582_15 (sequence is synthesized)
cagccctgctccctgggccttcctccagcccctcctctccctcctcctctaagaagcttctgaaaccaggctgcctgagcctagggcaaaagctgaccttgggtttactggacatgcctc

SEQ ID NO: 954529 - DNA, 120 bp, Artificial Sequence
  ENSG00000224582_16 (sequence is synthesized)
agagacaatgagacgtgagcaagactcttccaagcccctcccctgtaccctcctgctctcactcctgaaagccccagaaggacactggaggggtcagatccatctgtgcaagcccacaac

SEQ ID NO: 954530 - DNA, 120 bp, Artificial Sequence
  ENSG00000224582_17 (sequence is synthesized)
gggccttcactcctgagcacccctccaagggcctaaaatcagtgtcagagaccctaagagaatctagggagagggcataggtgaaaccctggcccagagccagaattgattgctcagctg

SEQ ID NO: 954531 - DNA, 120 bp, Artificial Sequence
  ENSG00000224582_18 (sequence is synthesized)
agtgtgggaacagtccagccctggcatggagatcccccagaggagtggagggtgtctcatccactgtggagataagcccccatattgcgtggcaaaggggctaggtaacagttaaggcct

SEQ ID NO: 954532 - DNA, 120 bp, Artificial Sequence
  ENSG00000224582_19 (sequence is synthesized)
catccatctgagctctgaatcaaggctaaagcccaggctaagcagccctggggcaagagtgtgaggcaggaagactgagtcagcctgaaccctgggggctgtccctggagtgacttgagc

SEQ ID NO: 954533 - DNA, 120 bp, Artificial Sequence
  ENSG00000224582_20 (sequence is synthesized)
ttccctgacagcttccccactctaggctgcacacacacctcgctctgggagtagcagcctgcaggagtgtcctcagcattagaccagggggaccacacggggaccctgaggactgcaggg

SEQ ID NO: 954534 - DNA, 120 bp, Artificial Sequence
  ENSG00000224582_21 (sequence is synthesized)
acccaggtctgtggggtccagcctggcaaaagcaagatgttctcaatggaaaagctgaccaaatctgctttcctttcagccaaacctgagcaagcacccccaccacccaggcctctgcag

SEQ ID NO: 954535 - DNA, 120 bp, Artificial Sequence
  ENSG00000224582_22 (sequence is synthesized)
atatcccccagcattgagaccctccccaaggggatgggctgcttctccctggcccacagcccagctccagcagcccatgggtatagccctcctgaaacaggagcctcatcctccctcacc

SEQ ID NO: 954536 - DNA, 120 bp, Artificial Sequence
  ENSG00000224582_23 (sequence is synthesized)
ctcacctggctatgctgtacccaaggccaaagcccagaggcataagggagcttctgcagagcccaggacagcaggctgctctctgggggccctggggactcagagtgtggccagcccatc

SEQ ID NO: 954537 - DNA, 120 bp, Artificial Sequence
  ENSG00000224582_24 (sequence is synthesized)
cccagctcaggatagaccacagagtgcttggtgattcctgcattggaactccctctctaagctccccatggacctggacctcagaggcctgtggttttcacagtagagcttggagcagag

SEQ ID NO: 954538 - DNA, 120 bp, Artificial Sequence
  ENSG00000224582_25 (sequence is synthesized)
atgctaggcccctatcacttccatatgtgtcctggacacctctaagatcataggactggcctagcccccaataccagacactgcccagccccctgatagcccagaggtagggccagagac

SEQ ID NO: 954539 - DNA, 120 bp, Artificial Sequence
  ENSG00000224582_26 (sequence is synthesized)
aactctcctgcatgtgatgcctacagctgatcactcttggcagacagtgaacatcacggcccagaaggagccagggcagcacttggcaagctgccccaaagccccagagagctccttaga

SEQ ID NO: 954540 - DNA, 120 bp, Artificial Sequence
  ENSG00000224582_27 (sequence is synthesized)
catggaaagtcaatactgatggggaagctggacacttggaggccactggagggaggggtgagcatggtgtccccacagcccaggccacccagcagcatgccctgcatccatggtcccaac

SEQ ID NO: 954541 - DNA, 120 bp, Artificial Sequence
  ENSG00000224582_28 (sequence is synthesized)
ctgtagggcagaacccccctctcaacgcacaattcctagacccagagggccctagcccagactcaacctgagccctgaaagggaaggggcaccaggggtgccttggggcctccagcagca

SEQ ID NO: 954542 - DNA, 120 bp, Artificial Sequence
  ENSG00000224582_29 (sequence is synthesized)
gccaagatacacaggagatggagccccctgtggccctggccagaactagtatttggcttaaggcggagcaagcccccttggagcactgcgtacatacccggggcctatgtgtgcctggca

SEQ ID NO: 954543 - DNA, 120 bp, Artificial Sequence
  ENSG00000224582_30 (sequence is synthesized)
aggccaagctgatgatgttaccaagctcaaactaccactggccaccttggtgagggtggggcagaaacacgtggaccagccaccaacctcatccattcaaggaagcagaaatggtcaggc

SEQ ID NO: 954544 - DNA, 120 bp, Artificial Sequence
  ENSG00000224582_31 (sequence is synthesized)
tcctgcaggataagtggccaccaccagaccaccaatggggcagagttctgaggcccaagcagatggcactggggccctgcttccagggtccacaatctgctccaggacacaagactgaag

SEQ ID NO: 954545 - DNA, 120 bp, Artificial Sequence
  ENSG00000224582_32 (sequence is synthesized)
aaaactaagcaaatgagagtccaggaggctggatccctcatctgccattcttggcagttgcattttgtggtcagaaaaagtcaggaaacttggctctactcactgcaggaggctccaagg

SEQ ID NO: 954546 - DNA, 120 bp, Artificial Sequence
  ENSG00000224582_33 (sequence is synthesized)
tgggaccagagcttccagcatagattcaacaatgcctaagaatgcctcttcttggggaaaaggaccccttccttggcctcaaagcccccacttattttgattaaagcacaataaagtctt

SEQ ID NO: 954547 - DNA, 120 bp, Artificial Sequence
  ENSG00000224582_34 (sequence is synthesized)
agtggacagctacccacgaggcatcacacagccaggacaggggacggccacactggctggagtctccaagcccatcaagagcaagttttgctaaaagtgttctgagagcttatgaagcac

SEQ ID NO: 954548 - DNA, 120 bp, Artificial Sequence
  ENSG00000261338_0 (sequence is synthesized)
ttgagataactgtagatttaaatacggttgtaagaaacaatacagagagatcctgtataccttccacttggttcccccaccatgctaacatcttgtataattgttgtataacatcacagc

SEQ ID NO: 954549 - DNA, 120 bp, Artificial Sequence
  ENSG00000261338_1 (sequence is synthesized)
caagaaaaaatcattagtatagtccacacaccttcagatttggccggatttacgtgcactgtatgagatgtacatctgtgcatttttatcatacgtgtagctttgtgtgacgccagcatt

SEQ ID NO: 954550 - DNA, 120 bp, Artificial Sequence
  ENSG00000261338_2 (sequence is synthesized)
tttaagcaattgaatagtatcagagtgcattacatctgttaagggtaagtgttgatgtggaaacgtattttagttacatatgcacatcatgactggattgtagaaatgtctcttgactgt

SEQ ID NO: 954551 - DNA, 120 bp, Artificial Sequence
  ENSG00000261338_3 (sequence is synthesized)
gagtcacagtggagaattttgaaaaccacaggtcgttcagtcatcagacttgattttatttcactaaaatgggctgctagagagctcaaggtactctgatttctaattggctgctcaggg

SEQ ID NO: 954552 - DNA, 120 bp, Artificial Sequence
  ENSG00000261338_4 (sequence is synthesized)
tgcccctgaccacttacttctggtacttggaaaacctagattaattggatatattgacagcaacatatgcattctctaccccatgagttatttaaggggttttcaagtgtaattttgact

SEQ ID NO: 954553 - DNA, 120 bp, Artificial Sequence
  ENSG00000261338_5 (sequence is synthesized)
ttagagacagggtctcactgtgttgccgaggctgtactcaagctcctgacctccggagtagctggaactacaggcacctgccactatgtccagctgagtttttgctttcttccttagtag

SEQ ID NO: 954554 - DNA, 120 bp, Artificial Sequence
  ENSG00000261338_6 (sequence is synthesized)
ccactatgtccagctgagtttttgctttcttccttagtagaacataactaatgttggagctcactgtactcttttgccagtagtaggaatccgatttctggtaagtactgtaggtgacag

SEQ ID NO: 954555 - DNA, 120 bp, Artificial Sequence
  ENSG00000261338_7 (sequence is synthesized)
aaccaaggttgcttagaagatatggagttaggagaaaaatgaaaaggcataaatattttctacagcagtaaatcctaaggaagtaactagttccaagacactgtcaacattaaaaatcca

SEQ ID NO: 954556 - DNA, 120 bp, Artificial Sequence
  ENSG00000261338_8 (sequence is synthesized)
gctgagcacagtggctcacacctgtaatcgtagcactttgtgaggatgaggaaggaggattgcttgatcccgggagtttgagaccagcctgggtaacggtgagactccttctccatctct

SEQ ID NO: 954557 - DNA, 90 bp, Artificial Sequence
  ENSG00000261338_9 (sequence is synthesized)
gtgtagtgcagcctggacaacatggcaagaccctgcctctacaaaaaataaaaatcggctggatgtggtggtgcatgcctgtggtcccag

SEQ ID NO: 954558 - DNA, 120 bp, Artificial Sequence
  ENSG00000261338_10 (sequence is synthesized)
cctgggcaacagagtgagaccctgtcccagaaaaaagaaaaatccatactggtgtaaacccgtatccagattgactcttctcttaacaaggacacacttggcgttagtatggatctagcc

SEQ ID NO: 954559 - DNA, 120 bp, Artificial Sequence
  ENSG00000261338_11 (sequence is synthesized)
tcaaagaccctcgtcacagatgaagcagcccatcgtgaccagtcgaggccttaggaccgcaggaggaatgtctcaggatgagggtcaagcacactgagggtgtgggctggaaaaaaggga

SEQ ID NO: 954560 - DNA, 120 bp, Artificial Sequence
  ENSG00000261338_12 (sequence is synthesized)
tctagttgtttcttcctagtctcaggaagccagtgccccaagggttcacacctggtaagtgtaggcgtccttggatatgggctgtagaggaacagtttgaatccaggtgccgccatctaa

SEQ ID NO: 954561 - DNA, 120 bp, Artificial Sequence
  ENSG00000261338_13 (sequence is synthesized)
tagctatgtgacagcaaatttcttaatctgagccctggtagcctcatttaaattggacataatgccacctacctgaggatttgtaaaaggaaaagagaataaatgtctgttacatcataa

SEQ ID NO: 954562 - DNA, 120 bp, Artificial Sequence
  ENSG00000273450_0 (sequence is synthesized)
tctcctcaggcccctgccaataaggcaaagcccagagcgaacacatctcaccaggaggaaaagcagaatgtgatggactgagggcagtgggagtgaaggttctcaggaagactgaaatct

SEQ ID NO: 954563 - DNA, 120 bp, Artificial Sequence
  ENSG00000273450_1 (sequence is synthesized)
caaatactatagggataattcaggatgtgaagcttctgggccacctccacaagagggccagcatcaccccctgctcagtcctgctttatatctgtgtgctgatttgcacgggtgacagta

SEQ ID NO: 954564 - DNA, 120 bp, Artificial Sequence
  ENSG00000273450_2 (sequence is synthesized)
aagcaatggactgctatgggtggctcttggtaagttttcctttacaaaacttcagcagtgctttgtgatagtggacactaaagtacatggactgatgtattaaaacaaaaccaaaacaaa

SEQ ID NO: 954565 - DNA, 120 bp, Artificial Sequence
  ENSG00000273455_0 (sequence is synthesized)
aatatcctttcaataatcctgcttgatgaagctaaatgtagataaaaaaaaaattgcaaagctagttagaaacatgctccataaaggcaatacttttcacaaatttgcttttcactagct

SEQ ID NO: 954566 - DNA, 120 bp, Artificial Sequence
  ENSG00000273455_1 (sequence is synthesized)
aaaataacaggcaaatgaatgtggctgacatctgggaagtattaatatagttgaatgctaagttaggtctgaacatcctgacagctaggacaaaaatatataggatttgttttgatctta

SEQ ID NO: 954567 - DNA, 120 bp, Artificial Sequence
  ENSG00000273455_2 (sequence is synthesized)
tccaatgagaccaattttcctataaacaagacaagttttatccttaaattcaagggagaactgattgtgtaagctcctaaaacaatgtaaaataaaacaaaacgaagttaaaacaatgga

SEQ ID NO: 954568 - DNA, 120 bp, Artificial Sequence
  ENSG00000273454_0 (sequence is synthesized)
cagtgtgaacagatgaagcagacaggaagggggaaatggcaatgtatactgtgtgacaggcactatgctaagcatctcatctttaccgaaagcatttatgaaggttttctcttttaaaaa

SEQ ID NO: 954569 - DNA, 120 bp, Artificial Sequence
  ENSG00000273454_1 (sequence is synthesized)
tgagccacctgggccatgaagaagttaagtgacttgaccacagtcacaacctaacccatgtggtagcatcaggatttcagtccagatctgactcagaactcatgctcttaaccaccatgt

SEQ ID NO: 954570 - DNA, 120 bp, Artificial Sequence
  ENSG00000273454_2 (sequence is synthesized)
tttaaataagacatcaggtcagtgctaactcctacagtatagatgtcccaggttgaataaaatagtttcctaaaatctctacatttataacaatgacataggacagacaggtggctgcaa

SEQ ID NO: 954571 - DNA, 120 bp, Artificial Sequence
  ENSG00000273454_3 (sequence is synthesized)
gatgtatggtgaagcttatgtataccttagctattagggcaagaagtatacattttagtacttgtactaaaactaacatataaattaatcttgatgtggaaaataaaagcattattggtg

SEQ ID NO: 954572 - DNA, 120 bp, Artificial Sequence
  ENSG00000261335_0 (sequence is synthesized)
gttggtccctacagtagataaaacgggcacagtagctaaaattaacgcctaagtaaaaccgctgccggtgagttttgggagtattttcgcttttttgaaagttagtattttggctctcac

SEQ ID NO: 954573 - DNA, 120 bp, Artificial Sequence
  ENSG00000261335_1 (sequence is synthesized)
aaagcctcctgattttagtaggctttccctggaatgacccagattccttttcgttaccttagttaaggcaccccctccccgtgcagggtcagggttggaaaactaccgcgctgagcccaa

SEQ ID NO: 954574 - DNA, 120 bp, Artificial Sequence
  ENSG00000261335_2 (sequence is synthesized)
attaccgcgaagatcgtcggaaatgtgcgcaactcagctaaagcggagatttaatggatggtattcagtagaaaatgggacaagacatgaatggacagtttacaggaaaaaaaaatgcaa

SEQ ID NO: 954575 - DNA, 120 bp, Artificial Sequence
  ENSG00000261335_3 (sequence is synthesized)
ggggcccctaaacatttaagtgggtgctcagcctttttcataatcagaagaatgcaaacgaaaacctcactgagctaaggcttctgatccatcagattgtcaaaaatccaaaagtttaac

SEQ ID NO: 954576 - DNA, 120 bp, Artificial Sequence
  ENSG00000261335_4 (sequence is synthesized)
aagcgaggtacgctgttaaggacaatacaggaacctgatctgtcctgcattgttgggagggagtgcaaatttacctttgacccgcaatccacctctagaatctactctgaaagtaaactt

SEQ ID NO: 954577 - DNA, 120 bp, Artificial Sequence
  ENSG00000261335_5 (sequence is synthesized)
gcacaaatatgaaaacagcatacgcgcaaggttttatttgtagtggcactgtatgaatttgcaagactggaaaccatgcagatgtccatgagagggggagtggctgagtaaactggtaca

SEQ ID NO: 954578 - DNA, 120 bp, Artificial Sequence
  ENSG00000261335_6 (sequence is synthesized)
tccgggctggtactacagcccagctgactctgtggcgttaagaaaaatgaggaaaactacaatattttctatggcgtgatttgtctccagagatgatgtatattggctgctaccgttagc

SEQ ID NO: 954579 - DNA, 120 bp, Artificial Sequence
  ENSG00000261335_7 (sequence is synthesized)
aaattgatagcgtaaatggtggagaatccggtggaagccctagaggggttccaccaaaagaaaaataaggtgacaataataatagtaaaaagaatctgtggcagtaggaatctgccaggc

SEQ ID NO: 954580 - DNA, 120 bp, Artificial Sequence
  ENSG00000261335_8 (sequence is synthesized)
ttcctgttctggaacccagcactagacccggaaaggcatgtttggctgggtgggcctcaagttacttataattggtggccatgctatagcctgagtgaaggatttctggtaccctgccgc

SEQ ID NO: 954581 - DNA, 120 bp, Artificial Sequence
  ENSG00000261335_9 (sequence is synthesized)
tctccaaaaagacgtctctttgggaactctagaactggaatggtccatcagcacctgccttttggcagagagggcaggcctttgtaccccactagtgacttggtttggaggtgggctgcc

SEQ ID NO: 954582 - DNA, 120 bp, Artificial Sequence
  ENSG00000261335_10 (sequence is synthesized)
cccagaacaggatgtaatcttgggcaaggcagctgctgtcaggctgggcacaacctccccctcaaggctgtgaggagggaagaaaggaaacaacttctactttctttaaagtaggaaacc

SEQ ID NO: 954583 - DNA, 120 bp, Artificial Sequence
  ENSG00000261335_11 (sequence is synthesized)
tcctcatctgccacctctcctgcagtgagaagtagagactagacgtggatactcccacataggatactggggcctaatggatgactgtgggcctccaccaggcgcaggtgaccctgcaga

SEQ ID NO: 954584 - DNA, 120 bp, Artificial Sequence
  ENSG00000261335_12 (sequence is synthesized)
tatgattcagaggcagcctctcgctgctgttcatcagcagcctgattccatgtggactatactgttgctttcagaaatcatggtctgcctggacctagccaggctcactgttgaagtctt

SEQ ID NO: 954585 - DNA, 120 bp, Artificial Sequence
  ENSG00000261335_13 (sequence is synthesized)
gttgtgtgctcttccttccaggcccagagagctgcccagtagatcaacttgggctttctatcaggctctaagtacaggcaggtccttaggacaaattagaataaaacaatctcagagtga

SEQ ID NO: 954586 - DNA, 120 bp, Artificial Sequence
  ENSG00000261334_0 (sequence is synthesized)
gcaaaaccgtgcgccccggcacgcacagccccgcggcccccgaccccccacgcccctaaccctaacggggatcccagtcctagggacaccgggcgcgtgcgcgaccccaatcagttattt

SEQ ID NO: 954587 - DNA, 120 bp, Artificial Sequence
  ENSG00000261334_1 (sequence is synthesized)
atgggcgaattaattatgtagctgccatgggcgggggggccggcaggggccatgcgacgcggagaccacccggccgcggtggcggctctcctgccgggcctcggggtcgggaggcgtccc

SEQ ID NO: 954588 - DNA, 120 bp, Artificial Sequence
  ENSG00000261334_2 (sequence is synthesized)
cacgccgcccggggaggatcccgttgtgagaaagctgcctcggggtggggtccgggaggagcgcgggggaacctgaggaagcgggagagacggctcggagacctcccaattagactggga

SEQ ID NO: 954589 - DNA, 120 bp, Artificial Sequence
  ENSG00000261334_3 (sequence is synthesized)
ggggagaggggggcgggcgacggagctggaaagagcgggccgcggagaccggggcgtgggaagagcctggcctaggcatttcttcccttccttccttccttcatccccatccttactgcg

SEQ ID NO: 954590 - DNA, 120 bp, Artificial Sequence
  ENSG00000261334_4 (sequence is synthesized)
agcccactacgtgccactgcgcccacagcagagggcggtattagggaggggttaggagcaggaaggaatttcgaggtacagctgggtccaaatccggatttgtatcctatactcccctgc

SEQ ID NO: 954591 - DNA, 120 bp, Artificial Sequence
  ENSG00000261334_5 (sequence is synthesized)
tgtgtggccttaggcaacggcttgccctctcggagcctccacttcctcatctgccagtggtcttcaggacttgggagatggggcgcttgggcagagagtttgtgggggcgcggtcgaagg

SEQ ID NO: 954592 - DNA, 120 bp, Artificial Sequence
  ENSG00000261334_6 (sequence is synthesized)
gaggtcctgtccttgggaaactttacatagaggggaacatgcccagtcccccagtattccccatctcgaagccccgactttgggtctcatataatctgcctctccccggggcccacacat

SEQ ID NO: 954593 - DNA, 120 bp, Artificial Sequence
  ENSG00000261334_7 (sequence is synthesized)
ttgaaggtcgttattaaaaccacaccacccccaaggccactgctcaggacgctcacccctagctggcttctcaccagcctggccctgcagaaggtcgtgcatatggcagccagaggggct

SEQ ID NO: 954594 - DNA, 120 bp, Artificial Sequence
  ENSG00000261334_8 (sequence is synthesized)
tactccccacctccgctgcctcccccgactctgcccttcacatccccacctgggttctccttccaacctgcttctagtctgggctagggagattggagccctgaggccatgggggctacg

SEQ ID NO: 954595 - DNA, 120 bp, Artificial Sequence
  ENSG00000261334_9 (sequence is synthesized)
gggcagtgagaacaggggtgggggctcagctggccctccctggacaagtgtcccccttatctggagtgtcaaggcgttctacttccaagactcagaagtgaaggaggcttccgtttgcga

SEQ ID NO: 954596 - DNA, 120 bp, Artificial Sequence
  ENSG00000261334_10 (sequence is synthesized)
cccaggattgcctaggggtttgcctgtcttctttcaccaaaacttgcaataactctgttaggtgaatggggcagatccaggttttatggggcctgaaggttttacaatcctggggaccca

SEQ ID NO: 954597 - DNA, 120 bp, Artificial Sequence
  ENSG00000261334_11 (sequence is synthesized)
cttgaagaagaatagtgcaaagttatgaataggcggttaagctcagggccttggtaaatgacagtcccaggagctaaagcttcattagcccctcggtaactcacctctgtagatggacaa

SEQ ID NO: 954598 - DNA, 120 bp, Artificial Sequence
  ENSG00000261334_12 (sequence is synthesized)
cacaactgtcatccctttgcagaggtggaaacaaagcttaggctggcccaaggtcacaacaggtagaaaggacaagctgggatcaaacccaggtcccaccccacaggcagcaccctgaac

SEQ ID NO: 954599 - DNA, 120 bp, Artificial Sequence
  ENSG00000261334_13 (sequence is synthesized)
taactgcctcagtaggaatgccaccttccatatcatctaccccatgccacatctcacctgtccccaccagtgcccagcccaggcagggtcagtcagaacagcctttgcttccagaacagt

SEQ ID NO: 954600 - DNA, 120 bp, Artificial Sequence
  ENSG00000261334_14 (sequence is synthesized)
ctgtgtccctccctccagaggcctccatgtcccaaggctcaagcctcagagatactgtcttgtgacaacactcacagatctagtaagtaggtctcttctaaacttttgattccagcaatg

SEQ ID NO: 954601 - DNA, 120 bp, Artificial Sequence
  ENSG00000261334_15 (sequence is synthesized)
gtaacctgctcactccagaactccagctcccccgtccacctggagggagcgcacccctgttccccggtgggctccctggtgttcggggctggatctgttttatttggctcagtattcccc

SEQ ID NO: 954602 - DNA, 120 bp, Artificial Sequence
  ENSG00000269102_0 (sequence is synthesized)
caaaatttttctctttcttctccctcgctctccgtctctctttctgcacacattcacatggaaggaattgggatccgatgtccacaagcagaacaccttttcagtggggtgttatttggc

SEQ ID NO: 954603 - DNA, 120 bp, Artificial Sequence
  ENSG00000269102_1 (sequence is synthesized)
accaccatcctccaggaagggtacaggggctggagactgagttaataccaatcatgcctaagtaatgaagcctccataaaagttcctgagagcttccacatgctgaacacgtgcggtggg

SEQ ID NO: 954604 - DNA, 120 bp, Artificial Sequence
  ENSG00000269102_2 (sequence is synthesized)
cctcaagggcggcacacccagtgaatcttcccatgtgcctcgccttgtgaatctcctcatctggctgtccatctgtatccttggaaacatccttcctcatgaaccaataaacataacgaa

SEQ ID NO: 954605 - DNA, 120 bp, Artificial Sequence
  ENSG00000269106_0 (sequence is synthesized)
gataacgctagggcatatccgcccgcctccagctgttcccgtggcaacgttcaggagcgttgcctcgacttccgaagaggctggaagtggcggcccagtggtttcctaggtcgagtagtt

SEQ ID NO: 954606 - DNA, 120 bp, Artificial Sequence
  ENSG00000269106_1 (sequence is synthesized)
accaccctgagcctgggctttctcccgccaggagggtgcgagggccatctttgacctctgttaagcgccctaaggaggtaccgacggttgtgaccgcagtctctgacgtcttcagatgtc

SEQ ID NO: 954607 - DNA, 120 bp, Artificial Sequence
  ENSG00000269106_2 (sequence is synthesized)
agtcctacaaagtcgggggtggaggtttccctccaggctgatcggacatgctcaaccgtttatttacctttgaatttggggagcagaactagccagggtgacactagtttctcccaataa

SEQ ID NO: 954608 - DNA, 120 bp, Artificial Sequence
  ENSG00000273748_0 (sequence is synthesized)
atggctttgttggcctcaaatggctgctttattagatgcaatgaagcaggggacatagaagcaaaaagtaaaacagcaggagaagaagaaatgatcaagattagatcctgtgctgaaaga

SEQ ID NO: 954609 - DNA, 120 bp, Artificial Sequence
  ENSG00000273748_1 (sequence is synthesized)
aaagatgacattccagaagaagacaaaggaaatgtaaaacaatgtgaaatcaattatgtaaagaaatttcagagcttccaagagcacaaacttaaaataagtaaagaagacagtaaaatt

SEQ ID NO: 954610 - DNA, 120 bp, Artificial Sequence
  ENSG00000273748_2 (sequence is synthesized)
cttaaaaaggctcagaaagatggatttttgcaagagacgcttctggacagtttaggctatgagcatagatggaagaggtggctgttgtattggatcaaggatatgagcagagatggatga

SEQ ID NO: 954611 - DNA, 120 bp, Artificial Sequence
  ENSG00000224057_0 (sequence is synthesized)
gtctgtttcctcagaacaccggtcttcaccaaaggcgtgggaaagggcagagagcacaggacatattctggaattcaggtcaccttttacatctgcctggagttgggtgagcgcctcacg

SEQ ID NO: 954612 - DNA, 120 bp, Artificial Sequence
  ENSG00000224057_1 (sequence is synthesized)
aatgactcggcaggactgactgccactgctaaccaggcggatgcaagcaatgaggaggacctgcccaggccgggtgggtgtctgctccctccctctggtccctggcacatctctggaccc

SEQ ID NO: 954613 - DNA, 120 bp, Artificial Sequence
  ENSG00000224057_2 (sequence is synthesized)
cctgccctgctgtcggagagagatgacgggcaacggcgtattctcagagacagggcctgcctgcaaatcctttaaagtcaatgggatgaaatgtatacccattgttagaaaaaaatagga

SEQ ID NO: 954614 - DNA, 120 bp, Artificial Sequence
  ENSG00000224057_3 (sequence is synthesized)
cttagcaagttgagtgcaaataactgatgcaagactgggatggagatgggaggggtttggggcaaaagcagaagtctttctgggtccgcaccagctgtgaaatacctggcttgttgttct

SEQ ID NO: 954615 - DNA, 120 bp, Artificial Sequence
  ENSG00000224057_4 (sequence is synthesized)
gtgcctgtctccagcacccaggcagggctacctgaccactctgctctctcagccccgccctggctctggagcgagcctgtggaaagggggacacttagccaaggccccagccacatagca

SEQ ID NO: 954616 - DNA, 120 bp, Artificial Sequence
  ENSG00000224057_5 (sequence is synthesized)
gcagcagctgcgccctctgtcagctccttgcacctcctcactgggcctcctgcaaggcacctgctccactccaccactatcacctgggtcctcctggccttggcctggcttgcttacctt

SEQ ID NO: 954617 - DNA, 120 bp, Artificial Sequence
  ENSG00000224057_6 (sequence is synthesized)
gttatcaagtcctgaatgggggaagcaatattccttctccactacaaatcaccacagtattcacaaagaattccagagaaataagaacagagacatcagaccacactgagcactcaataa

SEQ ID NO: 954618 - DNA, 120 bp, Artificial Sequence
  ENSG00000224057_7 (sequence is synthesized)
agagaaaattcttcaaaggtagctgattgatgagagtttccacatgcagatgggacaggcactgatttgtgcacaagaagatcaacttgattgaatccaaaataaaggaatgtgtgtgtg

SEQ ID NO: 954619 - DNA, 120 bp, Artificial Sequence
  ENSG00000224057_8 (sequence is synthesized)
ctgcatgcacgcacacacatatccccatggcaaactcttgctatcccaggagcgcagaccgcatgtgaggatcctggctccttatctcccctccccgtatctcccttccctgattacctt

SEQ ID NO: 954620 - DNA, 120 bp, Artificial Sequence
  ENSG00000224057_9 (sequence is synthesized)
tgcgatctgcacacaccagttgagcaggtactgggagccaatattgtctttgtgttcccggacatagtccaggaggcagccgaagggcatgagctgcgtgatgagctgcacggtggaggt

SEQ ID NO: 954621 - DNA, 120 bp, Artificial Sequence
  ENSG00000224057_10 (sequence is synthesized)
gaggcagatgcccagcaggcggcacacgtgggggttgtccacgctggccatcacgtaggcttcctggagggagggagaggcacgtcagtgtggcttcgcatggtggccagaaggaggggc

SEQ ID NO: 954622 - DNA, 120 bp, Artificial Sequence
  ENSG00000224057_11 (sequence is synthesized)
tcaaaatacgtactcatggaggaaaagctgtgcctgcaaaagacctagcacagggacgtttacgcagggctgtgaagtgacagatgcagtgggagagggcccctcctgggtgcatctggg

SEQ ID NO: 954623 - DNA, 120 bp, Artificial Sequence
  ENSG00000224057_12 (sequence is synthesized)
gattccccatgacagagaggcccaggcaacagtggccatgaggagcacattggataaaggaggagtcggagtcacctgatctctgagtttgggaactgatagtatctttgttatgaagac

SEQ ID NO: 954624 - DNA, 120 bp, Artificial Sequence
  ENSG00000224057_13 (sequence is synthesized)
ctccgcctcaaggttgaggatgctgtgttttaaaatatcatgagggcctgtaggaatctgtgtggggtccggaacaccctgggtaatgactgaccctgcacatcaggaacgctggctgtg

SEQ ID NO: 954625 - DNA, 120 bp, Artificial Sequence
  ENSG00000224057_14 (sequence is synthesized)
ggtgctgcagaggacaagcgatggagaaggcatccggggagcaccgagccagcagggagaaaggcctcccttccccacaggccaggcttggccctgactgtgctctgggaaatgggtggg

SEQ ID NO: 954626 - DNA, 120 bp, Artificial Sequence
  ENSG00000224057_15 (sequence is synthesized)
catttgggctggggaccctgcccacagcacctctgcaaagagtagctggataagctctttcaatagaccagtcccaggttttgaaatggacagagcattcaatctacagtgactaaaggc

SEQ ID NO: 954627 - DNA, 120 bp, Artificial Sequence
  ENSG00000224057_16 (sequence is synthesized)
tgcctggctgcccgggacccatttctaaagagaagtggtctctctgtgctgtgcccccaggctccctatgggaaatccatgctgcactgagtcaggcatctgctgccctgctaattccgg

SEQ ID NO: 954628 - DNA, 120 bp, Artificial Sequence
  ENSG00000224057_17 (sequence is synthesized)
ctggctgccaaggcaggggccttcctttgacagagccataaatacagactttattttaacccttctgctattcttgggctgaggaagctaaatttatttgcaatcaggcacacaatgggg

SEQ ID NO: 954629 - DNA, 120 bp, Artificial Sequence
  ENSG00000224057_18 (sequence is synthesized)
ccctcttttctgtctgactgagaatgagggaatccccaatttccacccataaattctctttctctttaaaatacaaatggtggtgaccttttattcagatatggaaaagaacacacagac

SEQ ID NO: 954630 - DNA, 120 bp, Artificial Sequence
  ENSG00000224057_19 (sequence is synthesized)
tgtagcagaaagcatccacagctgcttttcacatctcagcaatgcctatgttttgagtgtggacttgggcaagttagtttctctgcagaagtgaacacactgagccaggctctgagatag

SEQ ID NO: 954631 - DNA, 120 bp, Artificial Sequence
  ENSG00000224057_20 (sequence is synthesized)
ggtgctgctccagggtgcccgggcaggtcaggagcaacaggctggcgggaggcagggtggagataggagacaggagacaaaggcaaggtggggcgaggggacacagacagtggaccctca

SEQ ID NO: 954632 - DNA, 120 bp, Artificial Sequence
  ENSG00000224057_21 (sequence is synthesized)
gtatctggggaattggttccaggacctcccttaaatatcaaaatgtgaggatgctcaagcccctgatataaagtggcacagcatttgtgtgtaacctacagacatcctcccatctacagc

SEQ ID NO: 954633 - DNA, 120 bp, Artificial Sequence
  ENSG00000224057_22 (sequence is synthesized)
atctcctgattacctatagtacctaatacagtgcaaatgctatgtgaataattgttatgctgtattgtttagggaataatgacaagaaaaaaagtccgtatatgttcagtaccgatgcaa

SEQ ID NO: 954634 - DNA, 120 bp, Artificial Sequence
  ENSG00000261485_0 (sequence is synthesized)
cgtgcgcgctgagacgcgagggcttatgggtagcgggagcgctaggggaagcctggccggcgtcgggcccccgggggcatccgcgagctatcggcggttggaccggcggctctcggtggg

SEQ ID NO: 954635 - DNA, 120 bp, Artificial Sequence
  ENSG00000261485_1 (sequence is synthesized)
gttccggacgcggatctggcgccgaattctcacgagacctgataccttccttatttgtatattctcttacttaaaaagccagatgtcttttttttttttttcattgaaaagagaaaattg

SEQ ID NO: 954636 - DNA, 120 bp, Artificial Sequence
  ENSG00000261485_2 (sequence is synthesized)
acaaggtaaacggtcgtttggaggggccacctggggacgcggcccgagccctggctctacctgaagaatatcttctatttgccacacttcctctccccgtttcctttcttcgcccctctc

SEQ ID NO: 954637 - DNA, 120 bp, Artificial Sequence
  ENSG00000261485_3 (sequence is synthesized)
ctctttccccttcccctcgaaggtaatgagaactactggaccgattacgctaacctcttggccctttgtcaaaaaatggagccaaaaaggttgatttagacagaccccctgctcagtgca

SEQ ID NO: 954638 - DNA, 120 bp, Artificial Sequence
  ENSG00000261485_4 (sequence is synthesized)
gcacctgttattctctgtatttatattaccaagggccttcggtaaattatgaaaaataggatgccacctgggacaacactgcttagacagcactggaagacctttataaatatactaggt

SEQ ID NO: 954639 - DNA, 120 bp, Artificial Sequence
  ENSG00000261485_5 (sequence is synthesized)
gaaattcatttttattttttttgagacggtgaaattcatttttaaaagatagttttaacctcagcgatctctgatgtttgcgctaatacccttttaaaggctttcagaaattttaaagaa

SEQ ID NO: 954640 - DNA, 120 bp, Artificial Sequence
  ENSG00000261485_6 (sequence is synthesized)
ttgctatgaaaggaaaagtaacattctagtttttctctgtaaaagaggttcacaaacggcagatcgctgttatgaaaaggaggggtggaagtatttaaggaattgtggcaaacaaagtca

SEQ ID NO: 954641 - DNA, 120 bp, Artificial Sequence
  ENSG00000261485_7 (sequence is synthesized)
cagaagaatggatataagcaaaagtagcacactgaaaaaaatggggaaaagtggagtctagatcacaaactggtaagcttggtgatgttctctagccaaattcgaaggtaataacattgt

SEQ ID NO: 954642 - DNA, 120 bp, Artificial Sequence
  ENSG00000261485_8 (sequence is synthesized)
attatggctttctgtttaaaagcagtttcgcttatttgattattcaacaaatctttattaacacgcattacgtgtaccagaaactgtggtacacttaactgtggagctggggaagcaaaa

SEQ ID NO: 954643 - DNA, 120 bp, Artificial Sequence
  ENSG00000261485_9 (sequence is synthesized)
gtgaacatgccgccttaagtgagttcagatggcttatcttccggttggggaggcatcaagtacacaggtccgttgtaaaccagtgtcttaagtgctaaccttatcacatttgctattaga

SEQ ID NO: 954644 - DNA, 120 bp, Artificial Sequence
  ENSG00000261485_10 (sequence is synthesized)
ggatattaaacatgtcagacttcttggagaaagttgatattttcatgttccaagtttgggaacatcattgaattcagacagatctggattgaaacagattaaagtgcctacactttaata

SEQ ID NO: 954645 - DNA, 120 bp, Artificial Sequence
  ENSG00000261481_0 (sequence is synthesized)
agcagaaaacgcccctgcaaagtgggggaactgtgtccctgcgcccgtgcagttccttcccctcgccacgcgcgccaggagaggaaactgaggcacagagaggcgaccagcccatgggca

SEQ ID NO: 954646 - DNA, 120 bp, Artificial Sequence
  ENSG00000261481_1 (sequence is synthesized)
cggccagtcgagagcagcccctgaaggcgagcctagatcccgggaccagggtcagcttggtatttgaggggcgcggggaaggagagaggtccccggagctcgcccgggacaacagggccc

SEQ ID NO: 954647 - DNA, 120 bp, Artificial Sequence
  ENSG00000261481_2 (sequence is synthesized)
actgtgcctgcctcactctgcagcccctattggggccactggggaaaaggcccagcagcgaaaccaactagtccaagccaggcaaggaaccgtcctagacggctggtgggaacaaccgcg

SEQ ID NO: 954648 - DNA, 120 bp, Artificial Sequence
  ENSG00000261481_3 (sequence is synthesized)
cagctgctgtggaaaaagcccggcggttcctcaaaccacgagccctggagtctccataaaacccatcaactccactcctaggtgtctgcgcgcccaagagaaataaaaatgtttgtccac

SEQ ID NO: 954649 - DNA, 120 bp, Artificial Sequence
  ENSG00000261480_0 (sequence is synthesized)
agctcccagcggcaagtacactaggctcttaacttcgcttgtcctctctgcaggccctgccgaagctccccctggtttcccgcagcgatcccgcgcagggctgaagcagtgcctactcaa

SEQ ID NO: 954650 - DNA, 120 bp, Artificial Sequence
  ENSG00000261480_1 (sequence is synthesized)
tagaaccagtcatcgtgcaaagaaatgccacctgactcaaaggcaaagccagagtgcagcttggagcaaagaaggtattttattaagaattttacataaaccataagatatattttatat

SEQ ID NO: 954651 - DNA, 120 bp, Artificial Sequence
  ENSG00000261480_2 (sequence is synthesized)
ttcttgttacaaagatgatgtatagaaaatatagaagtataagaaaattaaagatactaactgataattgcttaatgatttagtatctgcttgtttagtctttgttatatttacagtagg

SEQ ID NO: 954652 - DNA, 120 bp, Artificial Sequence
  ENSG00000261480_3 (sequence is synthesized)
caaacatgtctaccgttgtaaatttattactggtatgtataccctagtaagttaaaagttatatgtactttgaagttttgcaaaattgagttcatattatagaattaattcctgatgaac

SEQ ID NO: 954653 - DNA, 120 bp, Artificial Sequence
  ENSG00000261482_0 (sequence is synthesized)
aaaacacctttcctacttgttttgggaatatccactctgggtgcagcctgtgtttgctgggcctgtgtgttgttttctgggagactctggctgctggagaggattctcacaaaggcatgc

SEQ ID NO: 954654 - DNA, 120 bp, Artificial Sequence
  ENSG00000261482_1 (sequence is synthesized)
acacctgggcaggctgctcccccgtggtgacctgctcactggttttcacgttgccgcccgtcttgtcctcctgcacgctggtgtggctgctctgcctgttttgggcactgccatccagcc

SEQ ID NO: 954655 - DNA, 120 bp, Artificial Sequence
  ENSG00000261482_2 (sequence is synthesized)
ggcctgggtggagggaaggctggctgtggaagtcagcagcccgctgctcaccttgtaggtgagggcactgctgcccaagctgatgaagctggcgctggacaggatgctgctgccgctgcc

SEQ ID NO: 954656 - DNA, 120 bp, Artificial Sequence
  ENSG00000261482_3 (sequence is synthesized)
gctgccgggcaggctggcctcactctttccctccagtctgcttggtgctgtgggcgggggggccctgggaggcctctgaatgttggctgtgacctctctggggagaggtgactccgtata

SEQ ID NO: 954657 - DNA, 120 bp, Artificial Sequence
  ENSG00000261489_0 (sequence is synthesized)
ggaggctcttcacctgcaatatctaccaggcccacatgttgttctgccgcctctcctacagagcatcttgatcactgtggcctttgtcctcctaccacaatgagcggctcccatggagag

SEQ ID NO: 954658 - DNA, 120 bp, Artificial Sequence
  ENSG00000261489_1 (sequence is synthesized)
tccctgtaaatcagagagcatgaggggtccaaagaacatacctttcctttggacttggcatatgctggactcaagtttagggtcatagttataaacccaactggctcaaaatacttcccc

SEQ ID NO: 954659 - DNA, 120 bp, Artificial Sequence
  ENSG00000253888_0 (sequence is synthesized)
gcactttgctgtgggacactggacgagtcaccatcctacggggattgtaaaaagggcttggtgtcctctcgctcacacttcgtaactccacgaccctcatggcgcacaccagaggaaaat

SEQ ID NO: 954660 - DNA, 120 bp, Artificial Sequence
  ENSG00000253888_1 (sequence is synthesized)
cttgttgtggaatccttcatcagtagtgctgtgagcttcatatcatatcacaccaggaggtatacaatctctagacatcccgtggttagtgatgcatgaccgatcaatgaattcagaagg

SEQ ID NO: 954661 - DNA, 120 bp, Artificial Sequence
  ENSG00000253888_2 (sequence is synthesized)
tggcagtctgatctcctctcctcccccgctataaagcttcccatcaacctttcacctagtgcttcatctattggtgatcatgaactgctgcaaaatgtctgattgcattttccctgttga

SEQ ID NO: 954662 - DNA, 120 bp, Artificial Sequence
  ENSG00000253888_3 (sequence is synthesized)
cacgtccttgaacaaggacaattctacatgaccctggcattgccacctactcaaacctttgatctggaatgccacaaatctaagagatcttctatccggtgacaacagctctttgcagac

SEQ ID NO: 954663 - DNA, 120 bp, Artificial Sequence
  ENSG00000253888_4 (sequence is synthesized)
caaggggtgagcagcagtgttagaacagatgtgacacacctgcagcctaccactgcagcctggcctttttggaggaagtcttccctactttctaccagcctggcaacctgaacatagaac

SEQ ID NO: 954664 - DNA, 120 bp, Artificial Sequence
  ENSG00000253888_5 (sequence is synthesized)
atgaccacatgagtccagaagacctgaagagaagtgtacagatttgggttttcttcccaaagaagaagaggtgggcaggagaaacttcttcctgcttgtggatgcagttgtgcgagaata

SEQ ID NO: 954665 - DNA, 120 bp, Artificial Sequence
  ENSG00000253888_6 (sequence is synthesized)
taattcccaaagcaacaacagcagccactttgtgaccacgaggtaaccaacccaaatggaagccaatgtggtaaggaaggcagaacaaaatttgtttaatacagatttttaatgatctta

SEQ ID NO: 954666 - DNA, 120 bp, Artificial Sequence
  ENSG00000253888_7 (sequence is synthesized)
ttaagctcttcgaaccaagtttggaactaccttcctcagaatgaaaaaaacaaaaacaactgggaattctgtatccgagatgcttgtagcccgcctttctagcatagggtacattcactc

SEQ ID NO: 954667 - DNA, 120 bp, Artificial Sequence
  ENSG00000253888_8 (sequence is synthesized)
cagctggtttacctcttgctatcaaaatacatagggcctttgttggttgtttggatttcctctcagtgttgtgcagaccaacaaaatttgggggtatattaaagtaaatatgctttaaaa

SEQ ID NO: 954668 - DNA, 120 bp, Artificial Sequence
  ENSG00000189275_0 (sequence is synthesized)
gtactcttgcaatcgtggctgatgcaggcagcatccttctgcagaagtaaattgccttgccgagaaaactttttgtctgagtgcaggttcttctttgtggcaccgagcatttgtttccaa

SEQ ID NO: 954669 - DNA, 120 bp, Artificial Sequence
  ENSG00000189275_1 (sequence is synthesized)
caccaggaagccagcccgccatctacactaaccaacctaggaagccagcctgctgtctacagtgatcagcccaggagcctgcctgctacgtaccaatcagtctgttatggaacaatccga

SEQ ID NO: 954670 - DNA, 120 bp, Artificial Sequence
  ENSG00000189275_2 (sequence is synthesized)
atgactgaatcacagcaccacagtaatgattctgcaacactgaacttgactgtcccaaggaaatcacaactgccatctcaagaaagcctgtctgcagcaaccattccatggtcctcaaag

SEQ ID NO: 954671 - DNA, 120 bp, Artificial Sequence
  ENSG00000189275_3 (sequence is synthesized)
tcgtggccaccggagaggctggtttcaattcgcccccaactccggctggagagagttgaggaggaaggcagcggcctgggctgagtgggaaatgcctgcactggagggttggtggccccc

SEQ ID NO: 954672 - DNA, 120 bp, Artificial Sequence
  ENSG00000189275_4 (sequence is synthesized)
atgctggatggaggcaggaacgggaggctcctggaattgtcctctcttctgccagagaggggaggcgggccgtcactgtgcagaagcccagccagcaccgagaaggaagtgggtgcctgt

SEQ ID NO: 954673 - DNA, 120 bp, Artificial Sequence
  ENSG00000189275_5 (sequence is synthesized)
gggaccctcgcctctctgcggaggggcctgtggaaatgcagcctgtgccctgggccagccctgctcctaggagggtcctgctgcctcatttgctctctctccctccttctcctctccact

SEQ ID NO: 954674 - DNA, 120 bp, Artificial Sequence
  ENSG00000189275_6 (sequence is synthesized)
cccacctttttttctaggaactttgaaccctcgttttcacccagtcccatcgagaagccaagtgctccctcctcaggccagagctcccagctgcagacacaggttcagcccccagctgag

SEQ ID NO: 954675 - DNA, 120 bp, Artificial Sequence
  ENSG00000189275_7 (sequence is synthesized)
cgaggagcggcttccatgccggggcctgcctctctgccgctctccaccggtccttcgcagccgctccgatgctctccacgggtcctttgcagccgcgtcctggccctgaggcggtgacac

SEQ ID NO: 954676 - DNA, 120 bp, Artificial Sequence
  ENSG00000189275_8 (sequence is synthesized)
agaagcccacgtccgtttcctttctgcttgcctgtttgtaggtgggaccaggcttcctgtctgcccatccccagaaggcaaagcctttaggtcccccctctgctgactcaggcacaaaag

SEQ ID NO: 954677 - DNA, 120 bp, Artificial Sequence
  ENSG00000189275_9 (sequence is synthesized)
ggttttttctttcttagttttggaatctgagtggaagggcacatgctgtggatcatattctccttctagtctctcggttgctcacgtgggagtaagtaggagctgtgggaccttgtcctt

SEQ ID NO: 954678 - DNA, 120 bp, Artificial Sequence
  ENSG00000189275_10 (sequence is synthesized)
aagccattaaagatgtggtgagttttattgagcctgctgcccaccctgtgatatcttttgctggtttgcttctccacaagcagattccagacaaggatcagtgtctgtggggtggtctca

SEQ ID NO: 954679 - DNA, 120 bp, Artificial Sequence
  ENSG00000189275_11 (sequence is synthesized)
ggaacaccttgttgggagtgggggtgaaacagaagaggcaagaatcccaggctgggagcaggccctgcacgggccactgagctcagcccactggggcgttggggagtgggtgtgcttctg

SEQ ID NO: 954680 - DNA, 120 bp, Artificial Sequence
  ENSG00000189275_12 (sequence is synthesized)
ccttcatgacacctggggcctcggggtctggagcgagctcagggaggccccacagagtgtgggggctgcaggctggtcttttcttcgctgaccgctgaggctggggcctcgtcctgcttc

SEQ ID NO: 954681 - DNA, 120 bp, Artificial Sequence
  ENSG00000189275_13 (sequence is synthesized)
tgggtcctgatgcccgagccggcgacgactctgagcacactgtgagcagagaacctcctggagaaacagaggccatgggtcctgacgcctgagccagcaacttactctgagcacactgtg

SEQ ID NO: 954682 - DNA, 120 bp, Artificial Sequence
  ENSG00000189275_14 (sequence is synthesized)
aagggcggctgtgaatttttcttctttctcaaacaacgatgcaatcattgggatcacttgtcctcctgggatgggtttgtgtgagactgatgtcttccgaaaaacacagccccaagggag

SEQ ID NO: 954683 - DNA, 120 bp, Artificial Sequence
  ENSG00000189275_15 (sequence is synthesized)
tcgagacgatgtaccaggtagaataaggcacaggggagccgcttgacaaatcagacgacggcagccggcctgcctgcccgggtgatgccagcgagttgtgtttctgagagacgaaggaag

SEQ ID NO: 954684 - DNA, 120 bp, Artificial Sequence
  ENSG00000189275_16 (sequence is synthesized)
ccttccttccaggtttccacgtggagcagtgcctctctgcgtggttcctggcagcaggggatgccaggctgcagtggcagaatgttgagctgcatggccggcttccactcatgcgaagcc

SEQ ID NO: 954685 - DNA, 120 bp, Artificial Sequence
  ENSG00000189275_17 (sequence is synthesized)
agcagcaaccccctcctcaggggtgacaaccagagtgtcctccagacactgccagatgtcccctggggggaactgtctttggctgagaatcactgctttagacggatgatgatcgtttaa

SEQ ID NO: 954686 - DNA, 120 bp, Artificial Sequence
  ENSG00000189275_18 (sequence is synthesized)
atggacagtgctgttcctggctccaagcagtcagttccctccctccctgtttacttacaaaacagccgcatccccgggattacgagtgagccagcggaggtgtgaccaaagagatgtcac

SEQ ID NO: 954687 - DNA, 120 bp, Artificial Sequence
  ENSG00000189275_19 (sequence is synthesized)
agttcgcttttctttgtgatcaatacgtggaatgatttaggggcctgtgttaaaattacaaatcttctatagaagattttggcagcaaaatattttaaaagcctacgaaataaacagaga

SEQ ID NO: 954688 - DNA, 120 bp, Artificial Sequence
  ENSG00000189275_20 (sequence is synthesized)
tggcacattcagaggctccaaatcacagagcaaggaactgcatccacagtagcttttgccttcctcctctgccgctgttttgactcattgatctttgggtctggtggattttttgtgttg

SEQ ID NO: 954689 - DNA, 120 bp, Artificial Sequence
  ENSG00000189275_21 (sequence is synthesized)
gggagagaagagggaagaggcaggagggccattctcatggcaagctgaggtctcaggggccgggctgggagttagggggcgctggggtcccacccaggtggcagggccaggcaggtcatg

SEQ ID NO: 954690 - DNA, 120 bp, Artificial Sequence
  ENSG00000189275_22 (sequence is synthesized)
gcacctgctatggtcgtgctgaagtcctggaggcaacaaccattgttacttctaaacgataccaagagggaaagaacacatcccttcaacttttccttaaggagatctgtaaggcaggtt

SEQ ID NO: 954691 - DNA, 120 bp, Artificial Sequence
  ENSG00000189275_23 (sequence is synthesized)
ggaagaatttgaagtccttctgccttcgcatgaacaaaaatgtgaagggggtttttaaaactcagatttgatctttacagtaaccagatggattttatttcaacatgccagagtttccac

SEQ ID NO: 954692 - DNA, 120 bp, Artificial Sequence
  ENSG00000189275_24 (sequence is synthesized)
atcacgtcaccactgcacttcaacgtgctgttcttgaggctgtttaaagttcagccttggcacctgacatggcgcatctgttttaactccaggcgtgggggctcctggggaaacgacgac

SEQ ID NO: 954693 - DNA, 120 bp, Artificial Sequence
  ENSG00000189275_25 (sequence is synthesized)
ttctgatgcctgaccacccccaggctgacgccctccctcctgcccagggctgaggctggacccagggcacctccttcgaatggcctctctcttcctccctaacacagagcaatcaacagc

SEQ ID NO: 954694 - DNA, 120 bp, Artificial Sequence
  ENSG00000189275_26 (sequence is synthesized)
agaagctaagagccagcacttgttcaccatgtgctcatttcctgtctctatgacaggctgccgtgctccagtttgcgaatgcccatccacctgtgaagggctgagccaagccctgggcac

SEQ ID NO: 954695 - DNA, 120 bp, Artificial Sequence
  ENSG00000189275_27 (sequence is synthesized)
gtggcttcatctcctgtgtcaattcaggcaagaggaagagagaggaggaagcttctagatccaagccagaggaggtggatgcagcatctgccgcccacagctttggggcctggcccagcc

SEQ ID NO: 954696 - DNA, 120 bp, Artificial Sequence
  ENSG00000189275_28 (sequence is synthesized)
agaagcccacgtccgtttcctttctgcttgcctgtttgtagggttttttctttcttagttttggaatctgagtggaagggcacatgctgtggatcatattctccttctagtctctcggtt

SEQ ID NO: 954697 - DNA, 120 bp, Artificial Sequence
  ENSG00000262681_0 (sequence is synthesized)
aatgctgtcaggagcaacatgccacccttcagtcctgcatcttctgtggtctcagatactgcacacaacagacggatcagcagctcactctcaggaacagggctgccaatcccctagaat

SEQ ID NO: 954698 - DNA, 120 bp, Artificial Sequence
  ENSG00000262681_1 (sequence is synthesized)
atacaagcaagtccgggcgatgctggaccctttcccttctcagctgatcacttgtttccaaggcccttatttcctggggcacatggcctatgacattctcccgatgccagttgccgtgtc

SEQ ID NO: 954699 - DNA, 120 bp, Artificial Sequence
  ENSG00000262681_2 (sequence is synthesized)
agccacgttctctgatggaaacagtagaaacgaactgggatcatgtcagcagatggaagaagggaggaagggggagaggagatcattattgccaggtgatacagaagagggctgagccgc

SEQ ID NO: 954700 - DNA, 120 bp, Artificial Sequence
  ENSG00000262681_3 (sequence is synthesized)
cagccttgagaagggagactctggactctcagggtgattcagggaaaggtgactcagcccaaacaccttcagtcccagaggcaaattcctggaagactggggcaagagccaacctgaaca

SEQ ID NO: 954701 - DNA, 120 bp, Artificial Sequence
  ENSG00000262681_4 (sequence is synthesized)
agaatggaggtggaaagggtgggaaggagggaagctgtgagctacctgaagtggggcagggggccccccagaggatgggatgctatgaaagtgaaaacatggctacacaccctgcctcat

SEQ ID NO: 954702 - DNA, 120 bp, Artificial Sequence
  ENSG00000262681_5 (sequence is synthesized)
ttatctattaccagcccccccaaaattggtgtcttaaaaccattatcatctgtgtcatgagtctgtgcggcgagttgggtggtccttctgcctcccctagtctagctgtgtctgcagtca

SEQ ID NO: 954703 - DNA, 120 bp, Artificial Sequence
  ENSG00000262681_6 (sequence is synthesized)
ccggggactggcccaggctggccagtcttccaggctcatgtccaggccgcggtgggtgcctgctatcagctgagactgtcagtcggagcatctccacctcccctcataggacctcctcat

SEQ ID NO: 954704 - DNA, 120 bp, Artificial Sequence
  ENSG00000262681_7 (sequence is synthesized)
gcaccacgggcatctcagcataaagtgacctccccgtgcaccacaggcatctcagcatggagcgacctcccaacgcaccatggacatctcagcatagagtgacctccccacgcaccatgg

SEQ ID NO: 954705 - DNA, 120 bp, Artificial Sequence
  ENSG00000262681_8 (sequence is synthesized)
gcatctcagcatggagcgatctccccgcgcaccacaggcatctcagtatagagtgacctccccacgcaccacgggcatctcagcatagagtgacctccccatgcaccacgggtatctcag

SEQ ID NO: 954706 - DNA, 120 bp, Artificial Sequence
  ENSG00000262681_9 (sequence is synthesized)
catggagcgacctccccgtgcaccacgggcatctcagcatggagtgacctccccacgcaccacgggcatctcagcatggagtgacctccccgtgcaccacgggcatctcagcatggagct

SEQ ID NO: 954707 - DNA, 120 bp, Artificial Sequence
  ENSG00000262681_10 (sequence is synthesized)
ggaacagaagacaggacattcgatggtgcaagtggaagctgcatacaggtcaagagccagcctgggaggtccccatgcccctctgcctcatcctgttgaccacagctaatcatggactcg

SEQ ID NO: 954708 - DNA, 120 bp, Artificial Sequence
  ENSG00000262681_11 (sequence is synthesized)
cccaaatttcacaggagagggaacagcctccacttctaggtgggagtggccgagaggccatgcctttaaccagcactctcctcttcctcctttctattcctccctctccattctctcttc

SEQ ID NO: 954709 - DNA, 120 bp, Artificial Sequence
  ENSG00000262681_12 (sequence is synthesized)
tgctctctcttgtgccacccgctgtccacacttggccccgagcaagggcaagcagataaagacccctgaggtcagtgatgagaggactcacgcatatcgaggacctctttggggaaggag

SEQ ID NO: 954710 - DNA, 120 bp, Artificial Sequence
  ENSG00000262681_13 (sequence is synthesized)
gacccaaagctacaaaatcctaggaatggcaggaggcacggggagaggcaagggagtggagagtcctggcaagcccccagcacacaccctgggattagggaggctcccagccagcaagag

SEQ ID NO: 954711 - DNA, 120 bp, Artificial Sequence
  ENSG00000262681_14 (sequence is synthesized)
ccagggggagctgctcccccagccccagcagcctcgctgaggcagagccaagaggcatgtgggcatgccaggaagtccccctcacttgagggctcagctcctgcaggctcggagcctgct

SEQ ID NO: 954712 - DNA, 120 bp, Artificial Sequence
  ENSG00000262681_15 (sequence is synthesized)
gggggcaagggccaggtccttgggccctgccttcacgtgactaatttcctggagtcctgccaagtacagtctgggtccagggcctctgttaaccttttctcacttggttacacctcactg

SEQ ID NO: 954713 - DNA, 120 bp, Artificial Sequence
  ENSG00000262681_16 (sequence is synthesized)
ggcccaaaggtgttgcatttgccctttggctcccagagacatgcaccacaagggctgtggaccaatgtcctttcctctaacccctctccgctgcctcctgactgcaaaacacccatttct

SEQ ID NO: 954714 - DNA, 120 bp, Artificial Sequence
  ENSG00000262681_17 (sequence is synthesized)
cccttgggagggtggggactctggctgatggctcagccccacattcagggcaaaggacagttggggaggattgagctgtccgccccctgcctcgtcccccaggtctcccaccagacagtg

SEQ ID NO: 954715 - DNA, 120 bp, Artificial Sequence
  ENSG00000262681_18 (sequence is synthesized)
accaacaactgctaaatccctgaggcgcccctcctccactcctcctcaactgtctcatagattttggcagctgcctctctctctctgcctccacctagtaccctctccctccatccctca

SEQ ID NO: 954716 - DNA, 120 bp, Artificial Sequence
  ENSG00000262681_19 (sequence is synthesized)
ccccttcctatcttcctctctccctcctcccgcaaggtctccctgggcaccttccaggcccaggtgctgcacccctagaaatgaccagggctcagtccctgagctgacatcacccctccc

SEQ ID NO: 954717 - DNA, 120 bp, Artificial Sequence
  ENSG00000262681_20 (sequence is synthesized)
aatcctgcaggccaggggagagacagagccagctggcaaagccctcagcaagtggcggcaagacccccagaagacactgccaagtgctggaagatggtgggcctttccatctggagaaaa

SEQ ID NO: 954718 - DNA, 120 bp, Artificial Sequence
  ENSG00000262681_21 (sequence is synthesized)
gctacgataaataaaaataaatattactcatcaataaaaagaaatgagctatcaagccacaaaaagatatggagcaacctcaaatgcatattgctaatctaattggaagaagccagtctg

SEQ ID NO: 954719 - DNA, 120 bp, Artificial Sequence
  ENSG00000262681_22 (sequence is synthesized)
aaaaggctgcatactgtacaattccaactctatgatattctgcaaaaggcaaaactatagaaacagtaagatcagtggttgctgtgggggttcgggatgaacaggtggagcacagaggag

SEQ ID NO: 954720 - DNA, 120 bp, Artificial Sequence
  ENSG00000262681_23 (sequence is synthesized)
ttttagggcagagacactattctgtaggatcctgtaatggtggatacctcgcattatttctgcaaacccataggatgtacaacaccactagtgaactctaatgtaaattatggactttag

SEQ ID NO: 954721 - DNA, 120 bp, Artificial Sequence
  ENSG00000262681_24 (sequence is synthesized)
ttcataatagtgtgtcaatacttgttaatcagtggtaacaaacgtactactatcctcatgcaagatgtcaatggggaaactggtggggaggtgggggtggaggtcacgaggtcactgcaa

SEQ ID NO: 954722 - DNA, 120 bp, Artificial Sequence
  ENSG00000262681_25 (sequence is synthesized)
actctgttctttctgtgcaattctgtaaatgtaaacctctaaaacagaaagtctattttttaaaatggtacacaaaataataacaacggggcatttcttgagatctctagggaacatgtc

SEQ ID NO: 954723 - DNA, 120 bp, Artificial Sequence
  ENSG00000262681_26 (sequence is synthesized)
cccctcttgcccatgcatttcatgttggatccagaatgcagcagcagcacttttcacagttgccaaaaactgtggcaagctcaaatgtccatgcactgatgaaaggaatcgcaagatgtg

SEQ ID NO: 954724 - DNA, 120 bp, Artificial Sequence
  ENSG00000262681_27 (sequence is synthesized)
gaatatccaataatggaatattattcagccataaaaagaaatgcagtattgatccactaaaaacatggatgaactttgaaaacatgatgctatgtgaaagcagccaatcacaaaaggtca

SEQ ID NO: 954725 - DNA, 120 bp, Artificial Sequence
  ENSG00000262686_0 (sequence is synthesized)
gcgagagctaggttcctgctctcctgaaagcctcggaggcccagagcggggagcagcgggcctgcaaccagggaaccctgaaaggaagcgggtcctctgtaagatggggctgcatccctg

SEQ ID NO: 954726 - DNA, 120 bp, Artificial Sequence
  ENSG00000262686_1 (sequence is synthesized)
ttcaaccccagggagaaaccaatgcagtgctgcacatccaatcactattgagtgcttctccttcgtccgtaacgttcagcacggagaacagtgcctggcacatagtaggtgcttaataaa

SEQ ID NO: 954727 - DNA, 120 bp, Artificial Sequence
  ENSG00000269815_0 (sequence is synthesized)
ccttatttaggaaacatttttcaaatctccaaaagtgtaaactgtatttaaaaaagcaaatgactagcccacaggccgtacatagtttgttgacccctgcttttgtaggaatgaggagct

SEQ ID NO: 954728 - DNA, 120 bp, Artificial Sequence
  ENSG00000269815_1 (sequence is synthesized)
cagctttgggggcttctcaggccttccatcttgtataaggaagacagatatgtcatgcccagaggcaggtggcagaacatcctgaaagggaagggatagtaggaaacagtgacctcccct

SEQ ID NO: 954729 - DNA, 120 bp, Artificial Sequence
  ENSG00000269815_2 (sequence is synthesized)
ttaatcagattgctttcctaccacttgctgatgagtaattcttaccgcttttgggtcatggtggcttgaagaatctgatgagggccgggcacagtggctcatatctataatcttaacact

SEQ ID NO: 954730 - DNA, 120 bp, Artificial Sequence
  ENSG00000269813_0 (sequence is synthesized)
ctgaaaataatttaaaaagcttaaaagttacataggcatcttcaaaagaacacaatgggattcattttattgttgacttttggacaccagtgtcagactttattgaaaacaaacccatgt

SEQ ID NO: 954731 - DNA, 120 bp, Artificial Sequence
  ENSG00000269813_1 (sequence is synthesized)
aaaaacaaagttaaaatgaaaaatggcacctgaaaaataaattattttatataaaacaaatcaataacttaaaacacactaatatacaaaaggtctaaccatctactgtacaacatggga

SEQ ID NO: 954732 - DNA, 120 bp, Artificial Sequence
  ENSG00000269813_2 (sequence is synthesized)
aacatcacatggtcatggtcaaagaggtggccccaaaccaacggaaaaggcttctcttctggtggaagaaaaatccagtcctgtcaaagtctccgttagcctaacttaggtactggcggt

SEQ ID NO: 954733 - DNA, 120 bp, Artificial Sequence
  ENSG00000269813_3 (sequence is synthesized)
ggagggtggggtggagggacaggatagaggcctcctgtcagctgaattcttattctctttcatccaacacaggaaggctgcgaaaagcacatggaaataaaagggggctgaatcggatgt

SEQ ID NO: 954734 - DNA, 120 bp, Artificial Sequence
  ENSG00000263220_0 (sequence is synthesized)
tgctctggctaaagcccactggctcttattgtcttcagactagaatccactgtgctttatgatcactgtcacccatttacaacaaaatcttagtatcccaccaccttctggatatgaaag

SEQ ID NO: 954735 - DNA, 120 bp, Artificial Sequence
  ENSG00000263220_1 (sequence is synthesized)
aagggaaaaaagaatatgtatatatttgcttgtttttgtaaagagaaaaacagaaggataagccaaaaataaattaaaataattacgtataagagtgagtggaaatggggtgaaaaggac

SEQ ID NO: 954736 - DNA, 120 bp, Artificial Sequence
  ENSG00000263220_2 (sequence is synthesized)
tatacttttgattatgaaccatgttacatattcaaaatataaatcaagaaagaaaaatcaaatctgaaaatgtaatataaagagaaacagcccaggcgcagtggctcacggtaaaattta

SEQ ID NO: 954737 - DNA, 120 bp, Artificial Sequence
  ENSG00000263220_3 (sequence is synthesized)
aatctcttcaatcatcacccctccctaagtgatgtcttcatggctttcccttgtagcttacattcccattatttcgtaacagtcaccccctgtgcccagccacataactactcatacttc

SEQ ID NO: 954738 - DNA, 120 bp, Artificial Sequence
  ENSG00000251132_0 (sequence is synthesized)
cttgcctttgttaataataagctgtcagctaccgaagacagaaacttcaaatccttccgtccccttccctctctcagaccaggaattgggctttgatgattttgcataaaaatgtaaata

SEQ ID NO: 954739 - DNA, 120 bp, Artificial Sequence
  ENSG00000251132_1 (sequence is synthesized)
atcacttatttggatgattgctattacgtaaccccagatggcagtgagtgccctgaaataatctttctgcagaatctttcagctaaagcagtgaagaaatccaagagcctcctggctcac

SEQ ID NO: 954740 - DNA, 120 bp, Artificial Sequence
  ENSG00000251132_2 (sequence is synthesized)
agtcacctctctgtcttcagagcctgtgtcccctctgtgagggtcaagaagggcttggaatggaagaaatgccagcaggcatactggacacactcctatgactggcctatccttgctgcg

SEQ ID NO: 954741 - DNA, 120 bp, Artificial Sequence
  ENSG00000251132_3 (sequence is synthesized)
gcatcattgcgcacatggtagcagtggcttgatcagagagacttagaaagttgcttagtggagtacctatagatgagtgttccagtggctttcaggagttctttttgactgtgtacacag

SEQ ID NO: 954742 - DNA, 120 bp, Artificial Sequence
  ENSG00000251132_4 (sequence is synthesized)
tgaacatcatggccagtaggaagccaagaagctgagggaggtgtgtatccttccaggagctagaataaataacataatgatgaagtacttttgtagggaggaagaacacatcactgctta

SEQ ID NO: 954743 - DNA, 120 bp, Artificial Sequence
  ENSG00000215374_0 (sequence is synthesized)
tctcacttccaactggatgtctggatgaactactgaaagctgctgagtgtcctgcagcaggtgagctgtggccagagcccaaggatgaagggggctccctcactctgtgactgtgaagag

SEQ ID NO: 954744 - DNA, 120 bp, Artificial Sequence
  ENSG00000215374_1 (sequence is synthesized)
gaagcctgaggtgtagcaggcccaggccccagaagtatggaaaaaatgagcttgactaccacacaaatgaatccactcaaatgttggcaagtggagcagagtcccaggacaggtacagaa

SEQ ID NO: 954745 - DNA, 120 bp, Artificial Sequence
  ENSG00000215374_2 (sequence is synthesized)
acacccccagttcaaggatcttcacacctggatttaggcctactcctgcaactaccccagaacctggaatttatatgttcaacatggagccatcccagccatgacaacagagaatgtacc

SEQ ID NO: 954746 - DNA, 120 bp, Artificial Sequence
  ENSG00000215374_3 (sequence is synthesized)
actctcacagttactatgaattattatattgtggctacttacaccaagatgaagataatttattagttcaggaagaacctgcattctgaaggcaaatggaagttccagctacagatgggc

SEQ ID NO: 954747 - DNA, 120 bp, Artificial Sequence
  ENSG00000215374_4 (sequence is synthesized)
agacacatgccccctcaattcctgatggacctccttgtgcctcatggacctaaggggcctccctcaatgtttcaagatgccaccaaggcagggatcagctagtgcattcctgagaacatc

SEQ ID NO: 954748 - DNA, 120 bp, Artificial Sequence
  ENSG00000215374_5 (sequence is synthesized)
caggatgaattgaggctctggaaaaatgcaagagtttccacataatcccaaaaaaccctacaggtgaactggatgccacagaaagaggagtggtctttgtcacaacaaaatcaacaaaat

SEQ ID NO: 954749 - DNA, 120 bp, Artificial Sequence
  ENSG00000215374_6 (sequence is synthesized)
tatttcgaagtcaattaggaaactcagaaatcactcttgctgccattaagaggaagaacagcagcctgtgaatggcatccctggccttcccgagactccacagatatttctatgtggctt

SEQ ID NO: 954750 - DNA, 120 bp, Artificial Sequence
  ENSG00000215374_7 (sequence is synthesized)
cagacaccagaaatctctgtgattttcagaaaggcagggacagctcatgcaagcccatccctctgcagaatgtgtcccagcagatcagtggcatggaaccatcatggacagcacagaggc

SEQ ID NO: 954751 - DNA, 120 bp, Artificial Sequence
  ENSG00000215374_8 (sequence is synthesized)
tcaagggcagcatcccaggtgggcctgtgactctagataagttctgagtccccatgggggatcaggaaaggttagtgatgacctggaaagaagggacaggtggaaaccgcccctaagcaa

SEQ ID NO: 954752 - DNA, 120 bp, Artificial Sequence
  ENSG00000215374_9 (sequence is synthesized)
tctgcaggattccaacttcagcaggaaaccaaggaccagctcgtaccacacctgcgccccctgaaaactggatacaatcccattctgcagaaagttccacgtagaagtggctgggaattt

SEQ ID NO: 954753 - DNA, 120 bp, Artificial Sequence
  ENSG00000215374_10 (sequence is synthesized)
tgcattctagaatgaattttacagtgcctctggacatgtgatgagaaagttaacattggtgtatctaagtgacattttccacgaagtgattttttaagctgttttaaaacagacaaaata

SEQ ID NO: 954754 - DNA, 120 bp, Artificial Sequence
  ENSG00000215374_11 (sequence is synthesized)
taattaaaacatatgtattatatgtcaaagtatggttcgctggaatcaagtagactcaccttgagatacaatcttggacaacctccatattcagaatatctactttttcaaaccgaaact

SEQ ID NO: 954755 - DNA, 120 bp, Artificial Sequence
  ENSG00000215374_12 (sequence is synthesized)
ctccaaccaaaaatcaataacatcaaaagtttgcaactacaagccaacggaaaataaatacatgaattctaccaaagtgaattggactgctttgggaaacacagatgaagaaagtcaaca

SEQ ID NO: 954756 - DNA, 120 bp, Artificial Sequence
  ENSG00000215374_13 (sequence is synthesized)
ccgctttgtctttcagtgcctggctcccttttcagctcgtcttgcgacaccagacattatacctgaaaagtctcccggacgcctgtgaggctctaattccctgggtcctattgtcatttc

SEQ ID NO: 954757 - DNA, 120 bp, Artificial Sequence
  ENSG00000215374_14 (sequence is synthesized)
tctggatttgcaaagatccacctcaccttctgtggaacccccatgtcggtgaacttttgggccacggcccctaattctgcccatagtcatctggaactgcacgagttagggtccatgttc

SEQ ID NO: 954758 - DNA, 87 bp, Artificial Sequence
  ENSG00000215374_15 (sequence is synthesized)
tcgagctttggaaccagtcgcgtcccccttgacactgcacccgactcccagttttggatgaattgcacctgctgaaactcgagtccc

SEQ ID NO: 954759 - DNA, 75 bp, Artificial Sequence
  ENSG00000215374_16 (sequence is synthesized)
ttggaaggcctgcttacgactccctgtggccgttctctgagctttccggtcacatcgtttccttccacgctcttt

SEQ ID NO: 954760 - DNA, 88 bp, Artificial Sequence
  ENSG00000215374_17 (sequence is synthesized)
agctttccgattgtggtcctgctgcttctgctgtcagaggagcagagagtagatcttattgattctggatacggatactttctaggtg

SEQ ID NO: 954761 - DNA, 120 bp, Artificial Sequence
  ENSG00000215374_18 (sequence is synthesized)
aagataacgaccctcaacagcggcggaaagggagcagccattcagtgtgtctcagaaaataccgctcagttccgaggcctcctagatgtggaatcctgctcagagttgttcccaggtcag

SEQ ID NO: 954762 - DNA, 79 bp, Artificial Sequence
  ENSG00000215374_19 (sequence is synthesized)
gcctcctagatgtggaatcctgctcagagttgttcccaggtcagagaatagagagagtctgtgcatgatgagatatccc

SEQ ID NO: 954763 - DNA, 120 bp, Artificial Sequence
  ENSG00000215374_20 (sequence is synthesized)
tccggaaagaagatgggatgaatgttttacctctgaagtacatcccaaatctgggagttaactacagctttgctggggactatttggtcagtgaaactctgcctggttcattcgcacatc

SEQ ID NO: 954764 - DNA, 76 bp, Artificial Sequence
  ENSG00000215374_21 (sequence is synthesized)
agccacttcacggggggccgtcgcaaccggaaccacacacttggcataggcggttgagccaaatggggactcggtt

SEQ ID NO: 954765 - DNA, 86 bp, Artificial Sequence
  ENSG00000215374_22 (sequence is synthesized)
gtgttggtagagtggggctgaggttctctttctcctgtggatgtatacgaagtcaaaggtcctgcccagccgtaacgatttggatt

SEQ ID NO: 954766 - DNA, 86 bp, Artificial Sequence
  ENSG00000215374_23 (sequence is synthesized)
cctgcccagccgtaacgatttggattgctaacaagtcaagaaatgttcaagcccttggatgtagggaaaagaaagagagatcagac

SEQ ID NO: 954767 - DNA, 79 bp, Artificial Sequence
  ENSG00000215374_24 (sequence is synthesized)
tgtgcaggacgtgccttgttaaccaaatgtttacaagccgtatacttggtaaaagtcgtgtggaaagctgcagggacgt

SEQ ID NO: 954768 - DNA, 120 bp, Artificial Sequence
  ENSG00000215374_25 (sequence is synthesized)
aaccaggggcacaatgcaccgtggaaagctgcagggacgtctgcccttgaaagtagggcattgtccaaggtttctcccgatgcgatactctgaaatatggccttgtgggataaaaaagac

SEQ ID NO: 954769 - DNA, 78 bp, Artificial Sequence
  ENSG00000215374_26 (sequence is synthesized)
tgcgatactctgaaatatggccttgtgggataaaaaagacctgactgtcccctagcctgacaccggtaaagtagttga

SEQ ID NO: 954770 - DNA, 120 bp, Artificial Sequence
  ENSG00000215374_27 (sequence is synthesized)
tcctgctcgcccctgggagctgaatgtctcggtgtaaaatccgatcgtacatttgttcaactctgagctaggagaaaagctgccctgtggcgcgaggcgagacatgttggcagtaatgct

SEQ ID NO: 954771 - DNA, 60 bp, Artificial Sequence
  ENSG00000215374_28 (sequence is synthesized)
gctttgctcacatgtttttttggttgaccttctctttattatcaccctgctctcctacta

SEQ ID NO: 954772 - DNA, 80 bp, Artificial Sequence
  ENSG00000215374_29 (sequence is synthesized)
agagccccgcagaggctgaggtggcgcgggggcggccccggctccgcgagaagcggcggcagcgagggctggaggacccg

SEQ ID NO: 954773 - DNA, 120 bp, Artificial Sequence
  ENSG00000215374_30 (sequence is synthesized)
ggctacggggctccggggcgtctggcctggttgggactgagcccatccagggactgggactctgggattctggtgtaggtggatccggggcaggctcaggaccaagtccctctccttcca

SEQ ID NO: 954774 - DNA, 120 bp, Artificial Sequence
  ENSG00000215374_31 (sequence is synthesized)
gcggcgggccgggtctccagggaggacctgagttttcttcacccatggtcagggaagcgccatcgccctggctttgaggctggggcctccggggaggttccggtaggggctttgaagagg

SEQ ID NO: 954775 - DNA, 120 bp, Artificial Sequence
  ENSG00000215374_32 (sequence is synthesized)
cagtgctcctgtatcaccagcccttaatgagaccctgaggaaaccacatcatggagatcagcccttctctcctgtaaggaactcatcctatgaaagagcaattagtgcctgcaagagctg

SEQ ID NO: 954776 - DNA, 120 bp, Artificial Sequence
  ENSG00000215374_33 (sequence is synthesized)
tctctgggacagcggttcatgtctatatctgcagggtaacactcatagtcatatgcagtcatatccatagtcatatcgggagtcagactccagtttgactgagtgaatggagaaactaaa

SEQ ID NO: 954777 - DNA, 120 bp, Artificial Sequence
  ENSG00000215374_34 (sequence is synthesized)
gtttgactgagtgaatggagaaactaaacatttattactgaataataacattaataaaccatcttaatgataataataataaacatattgatgagtattaacaggaatgatgatgattat

SEQ ID NO: 954778 - DNA, 120 bp, Artificial Sequence
  ENSG00000215374_35 (sequence is synthesized)
tttaatattgataatagtactaaccctgtggacttgggacctaaagagcagtttccccttacaattatcccatatttggccacagggggtaatatcgagttccagaaggcaaggattaac

SEQ ID NO: 954779 - DNA, 120 bp, Artificial Sequence
  ENSG00000215374_36 (sequence is synthesized)
gggactctatggataaatactaaagtgactcttgttctggatctccatgttaacaaacatgcaccagctttcaggaggtaggacagctggctgatggggcaaggcttcttgaggacatgg

SEQ ID NO: 954780 - DNA, 120 bp, Artificial Sequence
  ENSG00000215374_37 (sequence is synthesized)
caggagtcagaaatcacacatgctgcccagcagcagagctcatgacaagcagtaaaccccagcgaaaggacctggctgccctttctgccatctgctctcccatgacctctcttgactggt

SEQ ID NO: 954781 - DNA, 120 bp, Artificial Sequence
  ENSG00000215374_38 (sequence is synthesized)
acatctaggcactggagtaaccttcactggctataggagggcataatcctcagtattctcccacctgcaagaaagacaaaaattaattgaataccatggcttctgggtattcttagtggg

SEQ ID NO: 954782 - DNA, 120 bp, Artificial Sequence
  ENSG00000215374_39 (sequence is synthesized)
cttgacatattttgcctttgctttaacaggccagttatccaggcagtgactttcagtgcagctacagtcacctctggaaacctgcggagactttaaaaatttccagaaggtcaggaattt

SEQ ID NO: 954783 - DNA, 120 bp, Artificial Sequence
  ENSG00000215374_40 (sequence is synthesized)
ttggagacctttctcatggctacattgcctgcaaaggtgaatcaataagcttctgaactgacttagaaaatgttgcagagactcttgtgaacagatagaccctctcctgccactcagata

SEQ ID NO: 954784 - DNA, 120 bp, Artificial Sequence
  ENSG00000215374_41 (sequence is synthesized)
gacgtatcagggtcacacacacctgatttaacaacatgtcattatctcaggtgggcaacagacagcaatttaggacctatcccagtgtggatgaaagacattgagttggcttagaaaaat

SEQ ID NO: 954785 - DNA, 120 bp, Artificial Sequence
  ENSG00000215374_42 (sequence is synthesized)
gttacatagactagatggggcaagaaagcccattctgggtctcaaaagcctgcacatagagttgctgacacataaagggtatgtataaattctttcttagcccatgagatcaggatgtac

SEQ ID NO: 954786 - DNA, 120 bp, Artificial Sequence
  ENSG00000215374_43 (sequence is synthesized)
ttcatcagtataccatgctggtataaagagattcttgcctccaaagggactcagaatatttcagggaacctgtattagtccatttttacactgttgtaaagacactaccccacactgggt

SEQ ID NO: 954787 - DNA, 83 bp, Artificial Sequence
  ENSG00000215374_44 (sequence is synthesized)
catttttacactgttgtaaagacactaccccacactgggtaatttacaaagggaaggtgtttaattaattcacagttctgcat

SEQ ID NO: 954788 - DNA, 120 bp, Artificial Sequence
  ENSG00000215374_45 (sequence is synthesized)
ggaagaccttctagaagaggtgatgggtgggagagtgctggcatactacgtgaagctactatttggagttggacacgagtgcatgtgaccttgtgccacagcgggaatgtgagctggatg

SEQ ID NO: 954789 - DNA, 120 bp, Artificial Sequence
  ENSG00000215374_46 (sequence is synthesized)
acaaatggagatttggacttgtgataattggcctctgtgtcattgtgtggaagactgactggtccctttatttcctgtagcttgactaccacacaaatgaatccactcaaatgttggcaa

SEQ ID NO: 954790 - DNA, 120 bp, Artificial Sequence
  ENSG00000215374_47 (sequence is synthesized)
ctacaggtacagaaacacccccagttcaaggatcttcacacctggatttaggcctactcctgcaactaccccaggccagttatccaggcagtgactttcagtgcagctacagtcacctct

SEQ ID NO: 954791 - DNA, 120 bp, Artificial Sequence
  ENSG00000215374_48 (sequence is synthesized)
acatgtcattatctcaggcaccaatttgatcttctactatgttgcagacatctgttctgcaaacaccaaacaaattgagacaatgaccttccgcaggacccaaaccacctcttactgaag

SEQ ID NO: 954792 - DNA, 120 bp, Artificial Sequence
  ENSG00000215374_49 (sequence is synthesized)
gaaagaagatccagtgagatagttagtccacaaatggaatgtaaatccataaacactcttaagtaacagaataaatttagtatgaacgtttttatgtgggagctcttgacatggttgctg

SEQ ID NO: 954793 - DNA, 120 bp, Artificial Sequence
  ENSG00000215374_50 (sequence is synthesized)
ctcatatgtcagagacacatgcagtttaagaaaggtagcagttccaatcctggtttggcccaacagtcactgcatttttggtggggaaaagggatgtgggaggagatggtacctcttcat

SEQ ID NO: 954794 - DNA, 120 bp, Artificial Sequence
  ENSG00000215374_51 (sequence is synthesized)
ctttttctctgggttttctgtcagaaagggatgttgcttactccagtggcaaaaaatgccagtgtcttctgccagagtgggttactgagggccctggtgcttccaccttgtggctgatac

SEQ ID NO: 954795 - DNA, 120 bp, Artificial Sequence
  ENSG00000215374_52 (sequence is synthesized)
agatagtccctttctgcttttgtttctagccaaaaaagatgtttctggcatctcaggtatgctgatttcagcagctgttttttctatatggctattttttttttctttcactctctctct

SEQ ID NO: 954796 - DNA, 120 bp, Artificial Sequence
  ENSG00000215374_53 (sequence is synthesized)
ctctctctctttttttttttttttgttggcttcactgtgttgccatagtttcttaaatggtcccttgaaccctcccagtgctattttggtttgtacataactatctatatattttttttc

SEQ ID NO: 954797 - DNA, 120 bp, Artificial Sequence
  ENSG00000215374_54 (sequence is synthesized)
tttgggggagtgtgtagagctaaaggctggtatatgctgctcctgctccccgaaagtgacattattcccctaagctaatatttcaggctttcaatttattcgtggtttcacctgtttaaa

SEQ ID NO: 954798 - DNA, 120 bp, Artificial Sequence
  ENSG00000215374_55 (sequence is synthesized)
cataagtagaaattactttttctctccatatttagatttgatctatctactttaattgctaatagtgtcttagtcatagaatagattagttagaaaaaagtgtttttgacattataaatg

SEQ ID NO: 954799 - DNA, 120 bp, Artificial Sequence
  ENSG00000215374_56 (sequence is synthesized)
attctttcaatttgtgtctaaaagtggaaaatactagaaagcttaacatttattattgtattcagaccagtatttcctccagatgacctttattacaacaaagataatttaatgaagatc

SEQ ID NO: 954800 - DNA, 120 bp, Artificial Sequence
  ENSG00000215374_57 (sequence is synthesized)
tctctaatggtaaagctgatggctttgtgctattacaatatccttcgaataaagtgacagtctggtggaaagaacaactaaagcaaggattaggaagaaaatagttaataccttcatttt

SEQ ID NO: 954801 - DNA, 120 bp, Artificial Sequence
  ENSG00000215374_58 (sequence is synthesized)
ggtctcactctgcattaagagttgtcatcgtgttaagggtttattatacattaagtaatttaatgtttatttaataataaatggatcctattaaatatgatttttaaaattataatcaca

SEQ ID NO: 954802 - DNA, 120 bp, Artificial Sequence
  ENSG00000251138_0 (sequence is synthesized)
gaaccacagggcccagccttggcttgtggttcttttactaaatatggaatagcgataaagcttatgtatcatatttgtaaaagaaagctaggcacatgaagcagaattaattcatgaggg

SEQ ID NO: 954803 - DNA, 120 bp, Artificial Sequence
  ENSG00000251138_1 (sequence is synthesized)
aaaatatttattttactctcaagtctcccgaaagttattgtattcatttaaactcaatttctaatttttttagttacccaaatactattgcattaaatgcattaaagagagcattgtacc

SEQ ID NO: 954804 - DNA, 120 bp, Artificial Sequence
  ENSG00000251138_2 (sequence is synthesized)
tagcagatatgtgagaaacagtttgactttttaaccactaaaaaatgtccaaatatcagaatttattttattttaaatttcaaaaaaatccttattttatatgataaaaatcaagttgat

SEQ ID NO: 954805 - DNA, 120 bp, Artificial Sequence
  ENSG00000251138_3 (sequence is synthesized)
ttgtaagtcatatatatcagcttattatcaagaactattgctatgtaaaagaacttaggactgtgtaattagaactatgtaatagaaatatttacagaagactatatctgccaacatgag

SEQ ID NO: 954806 - DNA, 120 bp, Artificial Sequence
  ENSG00000251138_4 (sequence is synthesized)
atactctaccaccataacttatatcaatgactcttgttctatcatcgtgtgcattataaatagtgcaaaatttcaagaaatttccattttgagatataagaaatcaatatgctgggaaaa

SEQ ID NO: 954807 - DNA, 120 bp, Artificial Sequence
  ENSG00000251138_5 (sequence is synthesized)
atgctgggaaaactaatatcaaactctgaagtagatatatttcattttatatatattttaaatgacctttaactaaaggttaaattggattgacacactgaagataaatttttttattat

SEQ ID NO: 954808 - DNA, 120 bp, Artificial Sequence
  ENSG00000251138_6 (sequence is synthesized)
attattattttgtgactattactattcaactaacactacatctgataatataatgataaacacattccttttttatattaactagcatttttttcgagtttcttaaagctttgtttgcaa

SEQ ID NO: 954809 - DNA, 120 bp, Artificial Sequence
  ENSG00000251138_7 (sequence is synthesized)
ctctggatgatttatgtgggacatgataaaaccaatctccacacaggctaatttgagacctggcatcattgtctctctctgaacaatctggaagcttttttatggtagtgaattgctcat

SEQ ID NO: 954810 - DNA, 120 bp, Artificial Sequence
  ENSG00000251138_8 (sequence is synthesized)
ttggggtgcgaggattgaagcaggcaagtgtctgggtcattatgtgctcagccatgtcttacataggtgtttggatttgtatagcactggttaatctgtaatgtgttttaatttagagac

SEQ ID NO: 954811 - DNA, 120 bp, Artificial Sequence
  ENSG00000251138_9 (sequence is synthesized)
ataactgaacattttatccatgaagtcacaggtccagtgagtcatcattgcctagaataccctacttcaaacaatgaaactcactttcaatctatcatcatctttcactcttcagtgaaa

SEQ ID NO: 954812 - DNA, 120 bp, Artificial Sequence
  ENSG00000251138_10 (sequence is synthesized)
ccccatgtagcttccagatgtggtttcaggatttctctatattgttggagagaacaagaacctgagacctgccgaacagcaggtgccaaagatgctgctgtaacaccacagccctcccat

SEQ ID NO: 954813 - DNA, 120 bp, Artificial Sequence
  ENSG00000251138_11 (sequence is synthesized)
cttccatcctccactggcgctgagtggcagtcccatgtgacaggaagtggaggcagagctgggccagcccaggagccacgtgctggagccagatactctgtttttctacaaatggaaagt

SEQ ID NO: 954814 - DNA, 120 bp, Artificial Sequence
  ENSG00000251138_12 (sequence is synthesized)
ttgtggcatccttgactcaagcaaatttttcagcaccatttttcaagagcgtgtgctcacttcacctctctgtatcgtgttttgatgcttgtcctggaaaccaaccatgagctgtgatga

SEQ ID NO: 954815 - DNA, 120 bp, Artificial Sequence
  ENSG00000251138_13 (sequence is synthesized)
aatccaggcaactgagttgtgtttcagcccaaagcagcaaatggaatccagcttcaggaccatcatctgacataggggaagaagacttacatagaaggcctaaccagcacccaagatcat

SEQ ID NO: 954816 - DNA, 69 bp, Artificial Sequence
  ENSG00000251138_14 (sequence is synthesized)
aactgttgggaaggcatgattggttttaaatatgaatatatgagatttgggagggggtcaggggtggaa

SEQ ID NO: 954817 - DNA, 68 bp, Artificial Sequence
  ENSG00000251138_15 (sequence is synthesized)
agactttggggaactgttgggaaggcatgattggttttaaatatgaatatatgagatttgggaggggg

SEQ ID NO: 954818 - DNA, 120 bp, Artificial Sequence
  ENSG00000251138_16 (sequence is synthesized)
gtgggagatgattgaatcatgagggcgggtctttctcatgctgttcatgatcccattcatgtgagaaagacccatgtgatcatgaatgggtctcacaagatctgatggtgttaaaaatgg

SEQ ID NO: 954819 - DNA, 120 bp, Artificial Sequence
  ENSG00000251138_17 (sequence is synthesized)
tctgatggtgttaaaaatgggagtttctctgcacaagctctctgcctgctgccattcacaaaggatgtgacttgcttctccttgccttctgctatgattgtgaggcctccctagccatgt

SEQ ID NO: 954820 - DNA, 120 bp, Artificial Sequence
  ENSG00000251138_18 (sequence is synthesized)
cctttcttcaagtcgcattgacgtaagaagagttgtatttttatagaaagaaaatattttgcctaatcgccttcaaaggagccttgtacacaatctctagaggagagtgtgcacagagga

SEQ ID NO: 954821 - DNA, 120 bp, Artificial Sequence
  ENSG00000251138_19 (sequence is synthesized)
gagatcatgtgaggacacagcgagaagacaatcatctgtaagccaaggagagaggcctcagaaaaaaatccaccctgctaagagcttgatcttggacttacagcctccaggactatctca

SEQ ID NO: 954822 - DNA, 120 bp, Artificial Sequence
  ENSG00000251138_20 (sequence is synthesized)
tggtaccggaagacggtctccaaggcgcggaactactcagtggtgaaggctgtgcggacactgggggcccgccaggggtttggccccttactcaacccaaccacggtcctctccggcgca

SEQ ID NO: 954823 - DNA, 120 bp, Artificial Sequence
  ENSG00000251138_21 (sequence is synthesized)
ggccgatttgaggacctagactccttgatgctgacggcctgagggggctcccgggtgccggatatctgacacaggccagggaggctcccctgggagacctggcaggcctggaggtgtgag

SEQ ID NO: 954824 - DNA, 120 bp, Artificial Sequence
  ENSG00000251138_22 (sequence is synthesized)
tcggctctgagcagctgctctgggagagccagtccacggagccaaagctggagggcagctgccggccacaagttggggaggaggagagacgcaaggccgtcagatgcttgtcctggaaac

SEQ ID NO: 954825 - DNA, 120 bp, Artificial Sequence
  ENSG00000251138_23 (sequence is synthesized)
ggtaacaaggaccctcacatggtattaatgaagaccaaatgtttgaatttctgcttgacttcttcaattgtgaaatctggatctatgcagatttgctgcttgttgaacctctcaaatact

SEQ ID NO: 954826 - DNA, 120 bp, Artificial Sequence
  ENSG00000251138_24 (sequence is synthesized)
ccaggaccttatcctctgcagataagtgaatacagagcattcagtaccatgtcattggaggtaaaaagaaggatgtgaaagaagagtctctcttaacagcagcactccagaagatgtgga

SEQ ID NO: 954827 - DNA, 120 bp, Artificial Sequence
  ENSG00000251138_25 (sequence is synthesized)
aatcttccattatcatgctacctctgtgttcatcatccattgtcaccattttcccaaacagaaaacaagtgaatggcagaattcatctgattctttcttcaatgcagagctaaacaaatt

SEQ ID NO: 954828 - DNA, 120 bp, Artificial Sequence
  ENSG00000251138_26 (sequence is synthesized)
acttgtagaaattatatctacaaaggcccttagccttttctcagactcctgaaacccaaagcaacctaacttcaaacacagagagcagaagcatctctttgttaaagacgcttataaacc

SEQ ID NO: 954829 - DNA, 120 bp, Artificial Sequence
  ENSG00000251138_27 (sequence is synthesized)
aagctgtattctagatattatttattgtctgataagtaccctgtactgttgatgccaatatatctttgtaaaatataagtttagagaatatttatttaagatagttactcaggtttctaa

SEQ ID NO: 954830 - DNA, 120 bp, Artificial Sequence
  ENSG00000251138_28 (sequence is synthesized)
atcttcttgtgaaatgctacatgcaatatggatttctgagtgctccttaaacaggttggaaaatactagtttcataaataagtaaaacgagcaaacaaaataaactaatattgtaaaaaa

SEQ ID NO: 954831 - DNA, 120 bp, Artificial Sequence
  ENSG00000251138_29 (sequence is synthesized)
gctgtttactaaaggaatagtttccgatctgctgtaagaagtactatgctgtccatttgttccaggaccttatcctctgcaggtttaatgcgcgtccgtgtgaagagacctgtcaataga

SEQ ID NO: 954832 - DNA, 120 bp, Artificial Sequence
  ENSG00000251138_30 (sequence is synthesized)
ctcttaggtggaagggacttgccttgtattagatgagactttggacttgaatttctaagtaaattctggaatgaggtaagactttgggggattgttggtgaaggcatgattgtgttttga

SEQ ID NO: 954833 - DNA, 120 bp, Artificial Sequence
  ENSG00000251138_31 (sequence is synthesized)
aatgtgagaagaacatgtgatttaggaggggccaggggatggatgacatgatttggctctgtgtccccatcaaaatttaacgtcaaattgtaatcttcatgtgttgaaggaggggcctgg

SEQ ID NO: 954834 - DNA, 120 bp, Artificial Sequence
  ENSG00000251138_32 (sequence is synthesized)
tgggaggtgattgaatcatgggggcaaacttcccccttgctgtttttgggatagtgagcgagtactcatgagatctgatggtttaaaagtggcactttcccttgtgctctctctctcctg

SEQ ID NO: 954835 - DNA, 120 bp, Artificial Sequence
  ENSG00000251138_33 (sequence is synthesized)
ttcccttgtgctctctctctcctgccaccatgtaagatgtaccttgtttccccttcaccttgtaccatgattgtaaatttcttgaagcctcccaagccatgtggaactatgagtcaatta

SEQ ID NO: 954836 - DNA, 120 bp, Artificial Sequence
  ENSG00000251138_34 (sequence is synthesized)
tttacctgtaaagtttgtgttggttttcaaatatcagtcctgaaataatagtctcttttcctccattcatgtttctcagaaagactttattcattaccacatagttcacatgaaccctac

SEQ ID NO: 954837 - DNA, 120 bp, Artificial Sequence
  ENSG00000251138_35 (sequence is synthesized)
aggcttgataatttcttatctttctaatgtccagatagcaatacacaagatgtactcatcatcttagagacaaacatggtggaatagagaaaggaaaaaaaatatatgtagtaaaaactg

SEQ ID NO: 954838 - DNA, 120 bp, Artificial Sequence
  ENSG00000251138_36 (sequence is synthesized)
cccactcggcagagaccccagaaggagccgggggcagcatcagagcctggggcctgggcaggggtgcccgagagcacagcagctgcaggccattgggaaggccagaagacagggaatgga

SEQ ID NO: 954839 - DNA, 120 bp, Artificial Sequence
  ENSG00000251138_37 (sequence is synthesized)
aagccagggacgcatggagtgactcagagaagggactattcagctgggagtcctgcatttgccctttgtgtttcatccggggattttgaaaccaggtttttatctggacctcccagagct

SEQ ID NO: 954840 - DNA, 120 bp, Artificial Sequence
  ENSG00000251138_38 (sequence is synthesized)
aatttttaatgttactatgttgtcaatatattgtaaagcttaaactctttttccttaagaccacgtaatttgagttttttttaatttttgccaattaaaagtgagattactttgatttaa

SEQ ID NO: 954841 - DNA, 120 bp, Artificial Sequence
  ENSG00000251138_39 (sequence is synthesized)
atcgccttcaaaggagccttgtacacaatctctaggtgaggaatgactttgtaatccgaggcataagatctcaaattaacagcccattattatggaagttctttattgatcgccaaaatg

SEQ ID NO: 954842 - DNA, 120 bp, Artificial Sequence
  ENSG00000251138_40 (sequence is synthesized)
tataaaatgcatggagcaatgggactctttatatgcaactggtttgtgtgtacatttttacaatcattttgaatactctggtattatctgctgaaattgaaagtatccatacccgataaa

SEQ ID NO: 954843 - DNA, 120 bp, Artificial Sequence
  ENSG00000251138_41 (sequence is synthesized)
caaacaattccagccttgagtgaattgcccataggagcatatcaggacccatgcatagagatgcttgtagcaggattattaataattgtcccaaattaaaaataacaatatttatttaca

SEQ ID NO: 954844 - DNA, 120 bp, Artificial Sequence
  ENSG00000251138_42 (sequence is synthesized)
ataggatggatacacttctatatatttataaaatggaaggctttacagtgaagaagttaatcaaaccaaagctaaattcaacaccatggattcattttttaaaaaaatattgagccaaag

SEQ ID NO: 954845 - DNA, 120 bp, Artificial Sequence
  ENSG00000251138_43 (sequence is synthesized)
aagcacactaaaaaaatgtatttagtatgatgttttttgattaaaaatacataaagaggaaaaactctgctctattatgatgcacatatgggaggtaaaactataaaggaaattacaaaa

SEQ ID NO: 954846 - DNA, 120 bp, Artificial Sequence
  ENSG00000251138_44 (sequence is synthesized)
gtgaatacaataagagtcaagacaatgttaacctcaaggggttaggaaggaaatgtgattatgaagggatatagggttgatgggaatgttttctaacttaacctggatgttggttgcata

SEQ ID NO: 954847 - DNA, 120 bp, Artificial Sequence
  ENSG00000251138_45 (sequence is synthesized)
aatggtcaatgcatgattttccattttaatgtacatttatgtaatgttgacatctctgacatatttcataataaatatttttaaaggtaccagcaactcatatacctgataaactgaatg

SEQ ID NO: 954848 - DNA, 120 bp, Artificial Sequence
  ENSG00000251138_46 (sequence is synthesized)
caaatactatgaatgagcattagcattgcttagctaataaacaaaagttcaaggagcaaaaaagctcaattttgtgccattgtaacaactgcaaataaggagtatgtaatgaatcagatt

SEQ ID NO: 954849 - DNA, 120 bp, Artificial Sequence
  ENSG00000251138_47 (sequence is synthesized)
ttattgttaaaccagaaacattcttatgctaaaatcagcttaacataaacaaaagttgattcagtttgttcaagacttcagagggaaagcataaagtgacaaaattgttttcactataaa

SEQ ID NO: 954850 - DNA, 85 bp, Artificial Sequence
  ENSG00000251138_48 (sequence is synthesized)
gagggaaagcataaagtgacaaaattgttttcactataaataggttaagtaaagattgtggggttttgttgttgctgttgttttt

SEQ ID NO: 954851 - DNA, 120 bp, Artificial Sequence
  ENSG00000251138_49 (sequence is synthesized)
tgatcgcagcatattgatccataactgaacattttatccatgaagtcacaggtccagtgaggtaagttacatttttaattccattctgattatagtctattatcaggacaatgtataatt

SEQ ID NO: 954852 - DNA, 120 bp, Artificial Sequence
  ENSG00000251138_50 (sequence is synthesized)
tgcatgtttttcatttgagagtaatgatacatagccattgataagccatgttcctcttcctttcaccccattaagctacaagtttggataaacaagtgtacttaatttcaatttcatata

SEQ ID NO: 954853 - DNA, 120 bp, Artificial Sequence
  ENSG00000251138_51 (sequence is synthesized)
ttgtttgatggcacccctgagaataaagaggcaggtttcataagacaatgggctaacttaaaatcagtttttggatactgtttcatacaaactgaatacacttaactagaaaatgatatc

SEQ ID NO: 954854 - DNA, 120 bp, Artificial Sequence
  ENSG00000251138_52 (sequence is synthesized)
tagaatgatgttactcattatctgcaaccacatgagaaacccggagcaagaaccacccagccaaggccaatctctagaactttgaaagataatcataaataaaggtgtcgttttacacta

SEQ ID NO: 954855 - DNA, 120 bp, Artificial Sequence
  ENSG00000251138_53 (sequence is synthesized)
aatagaagagatgcacacaggcatctatgttgtcagcaagctagcactatcaaagcatctggagacaacaataggagtcaaggataccatctctagcacagatccccgaacaagaacctg

SEQ ID NO: 954856 - DNA, 120 bp, Artificial Sequence
  ENSG00000251138_54 (sequence is synthesized)
atttctctatattgttggagagaactgaaagtcatagaggacaccaagcatcacgcctgaccagcaatggaacagccctaccttaatgtttatcacttcgcttccactttcctaatttca

SEQ ID NO: 954857 - DNA, 120 bp, Artificial Sequence
  ENSG00000251138_55 (sequence is synthesized)
tcaaatcctaattgtgagtgcatttactttaggcttctgtacattcaaagtgaaccacttatggctttttctcaagttgatgagcaaaggtaattctgctaaggtaatgtgtgggcactg

SEQ ID NO: 954858 - DNA, 120 bp, Artificial Sequence
  ENSG00000251138_56 (sequence is synthesized)
tcccagactccaagtggattaagctttttgctaccttgctttttttggtatttatctttttacttttggcatttatctttttacttttggcatttaaaatcttttttaaaaaatgtttaa

SEQ ID NO: 954859 - DNA, 120 bp, Artificial Sequence
  ENSG00000251138_57 (sequence is synthesized)
atggtgtagttaatatttcatcaataatatctatgaattagagtggataaagtaaagttgttttgctcttttggccacatagacccagaaatacatacgttttaacaaaacaagagtata

SEQ ID NO: 954860 - DNA, 120 bp, Artificial Sequence
  ENSG00000251138_58 (sequence is synthesized)
ccagggtcttttagcatgcaataattcagcatatatacatttttgttccgtttacatagcgctttcacacatgactttaggatttgaaaaaatatatttttgagatatattatttttatt

SEQ ID NO: 954861 - DNA, 120 bp, Artificial Sequence
  ENSG00000251138_59 (sequence is synthesized)
gatttgaaaaaatatatttttgagatatattatttttatttttgtgtgtaatgcatatccaactcatgatttgaaagtttttaaaaattacaccaattttcttaatccagtctatcattg

SEQ ID NO: 954862 - DNA, 120 bp, Artificial Sequence
  ENSG00000251138_60 (sequence is synthesized)
tacaccaatttgacaaaaacagtcttattttctactggttttactgcaaaagaaaaaaaacataaaaatatgtgattaaagaaagagaacattaacgtagatatagactaattaaacaaa

SEQ ID NO: 954863 - DNA, 120 bp, Artificial Sequence
  ENSG00000251138_61 (sequence is synthesized)
gaaattttgacccaattatttcttctcattaaactatttcaagtctgtttttgagtatttgtttagagctcctgtaaaaagaactctctaataataagataatataaaaagtcagttgca

SEQ ID NO: 954864 - DNA, 120 bp, Artificial Sequence
  ENSG00000251138_62 (sequence is synthesized)
cctgggcacggtggctgacgcctgtagtcccagcagtttgggaggccaaggtgagcggatcacctgaggtcaggggttcaagtccagcctggccaacatggcgaaaaacagtctatagta

SEQ ID NO: 954865 - DNA, 120 bp, Artificial Sequence
  ENSG00000275944_0 (sequence is synthesized)
aaacagattcatgcagcccctgaaataccttttttgtctgaaactcaattccagccttcaggttgaggccctagaaaggaaaaccagatctgagggatccaaagcctggcaacaggcaca

SEQ ID NO: 954866 - DNA, 120 bp, Artificial Sequence
  ENSG00000275944_1 (sequence is synthesized)
ataatgggcgatcagctgtcttcaccacccccagcttatactcctctagagtgtatcctgaaccactgggactgctttgaccctcagactctggaggaaaatggctcatagccctctgca

SEQ ID NO: 954867 - DNA, 120 bp, Artificial Sequence
  ENSG00000275944_2 (sequence is synthesized)
caaaggtttgggcaaattatgaaggactggcttggcctcaggaagaaaccattcatttcgatatcatccagcagttggagcttttctgtaaacgtgagggcaaatgctctgaggcccata

SEQ ID NO: 954868 - DNA, 120 bp, Artificial Sequence
  ENSG00000275944_3 (sequence is synthesized)
tgtgcaggctttctataccgtgcagggcaatccagaccttagctgacaatgtagaattaatccagaccggtttgccatctcgggagaggctgcaaggggcaatcccagggaaccaaaaaa

SEQ ID NO: 954869 - DNA, 120 bp, Artificial Sequence
  ENSG00000275944_4 (sequence is synthesized)
acaaatcccagaggcatccccagcagaggagccagctccctccagccctgctccgccaggtccaccccatcccccctatccagcttcagtctctcacttgccccctcctagaaattctca

SEQ ID NO: 954870 - DNA, 120 bp, Artificial Sequence
  ENSG00000275944_5 (sequence is synthesized)
ccctagacaagccccagtctcattctttcccctccaacagatgcctggtgaatttaccccataaggtccaggtactcttctctctacagaacttgaagcaaattgagggggatcttggca

SEQ ID NO: 954871 - DNA, 120 bp, Artificial Sequence
  ENSG00000275944_6 (sequence is synthesized)
agttttcagatgaccctgagagatatatagaggcttttcagaacttaacccaagtatttgagctctcctaggaagacgtcatgttactttgaaccaaaccctgactaacactgagaagca

SEQ ID NO: 954872 - DNA, 120 bp, Artificial Sequence
  ENSG00000275944_7 (sequence is synthesized)
gtatcatacgtagcacccaggaaagggggtgaatattatccaactggaagagaaggagtatcaatgaatgtccctaaatgggatcccaatgacaagatgggagaatgcaagaggagagtt

SEQ ID NO: 954873 - DNA, 120 bp, Artificial Sequence
  ENSG00000275944_8 (sequence is synthesized)
tcaggtgtgcataatagagggcttttgtaggattagaactaagcctctctactatatcaagatatccatgagagaccagggatttaatgaaaatcccactgccttcttggggaggctaag

SEQ ID NO: 954874 - DNA, 120 bp, Artificial Sequence
  ENSG00000275944_9 (sequence is synthesized)
agggacctttgtaaagcataggtctctgtgtcccgattccatcatgggacaactaatcctaaatgataaatgtattactcaggcagcccctgatatcagagggaagttgcagaaatgggc

SEQ ID NO: 954875 - DNA, 120 bp, Artificial Sequence
  ENSG00000275944_10 (sequence is synthesized)
cctggcgtcggggagtactttaggagacctcctgaaagaggccaccttggtcttttacagtacagatagggagacacaagaaagaggcagaagctttaagggtcaccatgcaaacccaca

SEQ ID NO: 954876 - DNA, 120 bp, Artificial Sequence
  ENSG00000275944_11 (sequence is synthesized)
aaccccagaattcctaaggtgcatctgttaactcctacagatgtggcaagaacagttatctctcttctaaaatttaaccacacccatgcaagtcttaatttctttcactaaggtgaaaca

SEQ ID NO: 954877 - DNA, 120 bp, Artificial Sequence
  ENSG00000275944_12 (sequence is synthesized)
gctcagggtacaatgttgttagtatattacacttcctatttcggtaatctttggtggcaagaacagttatctctcttctaaaatttaaccacacccatacaagtcttaatttctttcacc

SEQ ID NO: 954878 - DNA, 120 bp, Artificial Sequence
  ENSG00000275944_13 (sequence is synthesized)
agggtgaaacagctcagggtacaatgttgtgagtatgttacatttcctatttctgtaatctttggcactagattatttctttgtataatacacgtttaacccatgcatacttaacacctt

SEQ ID NO: 954879 - DNA, 120 bp, Artificial Sequence
  ENSG00000275944_14 (sequence is synthesized)
tttgtgaactgggcctgggatccaaggacagcaacaagcatgaggcaggagagggcagccacggagaccttcatcctcctggtgggcaggcagggctggccgaggactcctgggctcact

SEQ ID NO: 954880 - DNA, 120 bp, Artificial Sequence
  ENSG00000226349_0 (sequence is synthesized)
caccgaggcagagcactttctatctctttttcagaaaaatcccaaggaacaattgttttggattacttagtggactcagcatggaaactgcttgtgtggcccagctaggtaggggcgttc

SEQ ID NO: 954881 - DNA, 120 bp, Artificial Sequence
  ENSG00000226349_1 (sequence is synthesized)
agacaaggagacctgacctggagcctctgggatgattccaagacagtcttgctctgtcaaccatgctggagtgcagtggtgcaatcttggcttctgcaaccttcaccttccaggttcaag

SEQ ID NO: 954882 - DNA, 120 bp, Artificial Sequence
  ENSG00000226349_2 (sequence is synthesized)
gaaattcaccccactgaaattgagtcagtaggttgggggcaagcctgggactctcgaagctcccccaggtgattctgatgatcagccagatttgggaacctttgatccagttcaccctcc

SEQ ID NO: 954883 - DNA, 120 bp, Artificial Sequence
  ENSG00000226349_3 (sequence is synthesized)
cacccagtgctccagcatccctgccgagaggttgactcagcttttccaagaagcattccctgacttgccttgccaaggtgggagctccacccaagtgcttcgaaaatgctgtgctcatca

SEQ ID NO: 954884 - DNA, 120 bp, Artificial Sequence
  ENSG00000245148_0 (sequence is synthesized)
aatgtgtcctcaggcctgtccccgcaggtgggctccctccaggagcaccagctctgcctgagtcatccttcattctgcaggattcagaagcaaccggacggggtgcaggagactgaggaa

SEQ ID NO: 954885 - DNA, 120 bp, Artificial Sequence
  ENSG00000245148_1 (sequence is synthesized)
ttgggagagagacagacagatgctggggatgtgcccttggcccaagggtcaggcctggctcctccctgcatggccagaacttttcacatggcttaggcagggcccttctgccctccaaac

SEQ ID NO: 954886 - DNA, 120 bp, Artificial Sequence
  ENSG00000245148_2 (sequence is synthesized)
atcagtttccccatatgccaagacatctccctgagctggtagatgagatgggttaagacagcatgaggaacagggcagcagaaagacgggggtggtcccaaggggccccagagctgcagt

SEQ ID NO: 954887 - DNA, 120 bp, Artificial Sequence
  ENSG00000245148_3 (sequence is synthesized)
gccctgaccttgtccagctcctcctggttgccaaagagcgggtggtagcggcggtacttgccctcacggtacttggcctccaggtggcaccgccgggtgctggggctgctgctgggctgc

SEQ ID NO: 954888 - DNA, 120 bp, Artificial Sequence
  ENSG00000245148_4 (sequence is synthesized)
agggcctcactggggggcacgttggctgcccagaagcggttcccagcgccattccccagctgtaagaagagctgtgggggtgtgcaggaggtcagacgggccagctgacagccaggggcc

SEQ ID NO: 954889 - DNA, 120 bp, Artificial Sequence
  ENSG00000245148_5 (sequence is synthesized)
gtgccgggcagaaacttggtttctgaggttgttaggaaaggggctgggagagccaggccatctgcccactttcccaatggggaaggtgaggacagcctggcctgctggtggctggggatg

SEQ ID NO: 954890 - DNA, 120 bp, Artificial Sequence
  ENSG00000245148_6 (sequence is synthesized)
ctcctgccaccagcactgggctctgagcctaggtctcaggctcagtgacaggacagggagtcagcagactgacaggtggatgcctcaggccttgcacctggtcccaggggccttgctgct

SEQ ID NO: 954891 - DNA, 120 bp, Artificial Sequence
  ENSG00000245148_7 (sequence is synthesized)
gctctgcattcctgaggctgtgacagctggggatgggtgcctaacctgtcagccaatggggtgggcagggattttggaaacctctcctatccctgacattcctctctgggcaagagggat

SEQ ID NO: 954892 - DNA, 120 bp, Artificial Sequence
  ENSG00000245148_8 (sequence is synthesized)
gggggtggattctgggtgagtgcagggatccagcatttggtaatcagttccttcattcggctcctcattccacagccatttcctaggccccccaccttgcctccttgtcaggtcctgtat

SEQ ID NO: 954893 - DNA, 120 bp, Artificial Sequence
  ENSG00000245148_9 (sequence is synthesized)
ggggtgctggagtcacagcacagaacaaagcagaaaagtccttgccactactgattcactctgtgtcttccagcaagttattttctctccctgggcttcaaggctgtaaactggttattc

SEQ ID NO: 954894 - DNA, 120 bp, Artificial Sequence
  ENSG00000245148_10 (sequence is synthesized)
taatcctaactcctggcttgttctgaaagtcagttaattaacatatgcaaagtccttagcacttatgtgccaaacacaccgtggggaggtgagaaacggatgtgacactccaagtgtctg

SEQ ID NO: 954895 - DNA, 120 bp, Artificial Sequence
  ENSG00000245148_11 (sequence is synthesized)
gagtctgcagcctgggtctaccctcccattgcaggttctcccctatatctaccacatatgggtacctgggagtttccagtacaggggcataaatgtacacgtgtgtgcacacacagcaca

SEQ ID NO: 954896 - DNA, 120 bp, Artificial Sequence
  ENSG00000245148_12 (sequence is synthesized)
catatatatacccactggtacatgtgagttcacatgaaatggaggctgagggcctctgaggggctgtgcaaggtaggggagaaggccctgggtcagccagaagtgggatggaaagaggca

SEQ ID NO: 954897 - DNA, 120 bp, Artificial Sequence
  ENSG00000245148_13 (sequence is synthesized)
gggatggtggtcaatatgcatttacagggtaatctcaggcagattacagccctgcccaggacctcagtttacacatctattcaatggatgacagtgaaattagatcagaagttagcaaat

SEQ ID NO: 954898 - DNA, 120 bp, Artificial Sequence
  ENSG00000245148_14 (sequence is synthesized)
tctttctctaaagggcgaaatagtaattattttcggctttacagaacacatacagtctctgctgcattttcttcctttttttttctttaaaaaaaaataacactttacaactataaaaac

SEQ ID NO: 954899 - DNA, 120 bp, Artificial Sequence
  ENSG00000245149_0 (sequence is synthesized)
gcgcttttcggtagccgcgctttccggcgttggagttgcagcttcaccctcgcagattcggcttagcgagcgagtcggtgcttccgcggatcaaaattattagccgttttattagagccc

SEQ ID NO: 954900 - DNA, 120 bp, Artificial Sequence
  ENSG00000245149_1 (sequence is synthesized)
attaaacgttgcataaacatggttcagagctgcctgggagaagaaaagccaaaggatgccaccctctcgatttatcccaccctcgggagtctgaaagccgacgccaggagaaatcccgcg

SEQ ID NO: 954901 - DNA, 120 bp, Artificial Sequence
  ENSG00000245149_2 (sequence is synthesized)
aaggccgcccgggatcctggtagaggcgacgctgtgtgcgtttatggagcgcttgcggtgcgtggcactaggctgggtgtggtgggtgctgccgaaaaaagggttcctcccatccatttg

SEQ ID NO: 954902 - DNA, 120 bp, Artificial Sequence
  ENSG00000245149_3 (sequence is synthesized)
cacgtcacccttcccacctcctgcccagatggacagaagtgaggacattcatcggccgcattttactaatggcaaggagatagcgactgaagggcaagaacctagggtttcctgtctttg

SEQ ID NO: 954903 - DNA, 120 bp, Artificial Sequence
  ENSG00000245149_4 (sequence is synthesized)
atatttctcatctttgagagaagccagtatttggagatgtttaccctgctgttttggaagttgtccactttacttgatattgggacatatcaagagaccactatatggtcttgagtgtaa

SEQ ID NO: 954904 - DNA, 120 bp, Artificial Sequence
  ENSG00000245149_5 (sequence is synthesized)
actacaggtatattccttcctgccatcatcgtgtagcaataacgctatttcctcctgatgattggattcatttaccccaactaacatggtgactcttccttgcctgctggtctcctagca

SEQ ID NO: 954905 - DNA, 120 bp, Artificial Sequence
  ENSG00000245149_6 (sequence is synthesized)
caaggaccttgaaccgggaaacctcagcaagttaaagtttaaaggatctattattgtgtctcttgatgaaaaggttcctctcttgggaatcaggacttctaattcacaaagttgcgggga

SEQ ID NO: 954906 - DNA, 120 bp, Artificial Sequence
  ENSG00000245149_7 (sequence is synthesized)
tgagaagtccaaactccccacttgggtcactgggagtgagagtatgtggttatattaatttcctatcactgctatgacactacgaacttagtggtttcaaacaacacaaatttattttct

SEQ ID NO: 954907 - DNA, 120 bp, Artificial Sequence
  ENSG00000245149_8 (sequence is synthesized)
tacagttctggaagcctaaaatcaagatatcaactggactgtttttcctgaagtcttcaagaaaaagtctgtttccttgcctttttcaatttctagaggctacctacatttcttggctca

SEQ ID NO: 954908 - DNA, 120 bp, Artificial Sequence
  ENSG00000245149_9 (sequence is synthesized)
tggccccttactcatatcaccccatcctcctgcttaagtcattgcatctactaggcaaatctgcctctctcttgtaagaatctttatgattatattgggcctattggatagtccaggata

SEQ ID NO: 954909 - DNA, 120 bp, Artificial Sequence
  ENSG00000245149_10 (sequence is synthesized)
atctctgtatcttgagatcattaacttagtcatatccacaaagtctcttttatcttgaaggtaaaatattcatagaatccaggattaggatctgaacatatttgggggccattattcagc

SEQ ID NO: 954910 - DNA, 120 bp, Artificial Sequence
  ENSG00000245149_11 (sequence is synthesized)
ctactacacagtaggaattctatttatatcctttcattcccaaacatgcatgttatgtatatatgagacacagcaccataaaatgagtgttgatttagagtatatactgtaccctggtgg

SEQ ID NO: 954911 - DNA, 120 bp, Artificial Sequence
  ENSG00000245149_12 (sequence is synthesized)
acaaggtcattccattttcacaggctattatcttcaagcttttgcttcagtttcaccttcaaaagggtttttcatcattccatcagacccgcattttctcggttatatagtatgtgatag

SEQ ID NO: 954912 - DNA, 120 bp, Artificial Sequence
  ENSG00000245149_13 (sequence is synthesized)
gactagtggatctcatggttatgtacctgctgatacacctcctttgctgtaaagtgcatccctaaatcaaaggcaatattacacaggatacatgttgatggatcaaatacctgtaaacct

SEQ ID NO: 954913 - DNA, 120 bp, Artificial Sequence
  ENSG00000245149_14 (sequence is synthesized)
gtgagtagtagagctggccaacaacttataggcaaggaagtcaaactcatacatgcagatgggcagtttctagtcaaggagaatcactgcccattctaggatggaaggaatccaacataa

SEQ ID NO: 954914 - DNA, 120 bp, Artificial Sequence
  ENSG00000245149_15 (sequence is synthesized)
atcaatttgctgcccaagtagctgtttggtatccttgagggttggtgctgtatcaggaacttggtgtttaacactggggagtggctattttgttgttgttgttgttgttgttttgttttg

SEQ ID NO: 954915 - DNA, 120 bp, Artificial Sequence
  ENSG00000245149_16 (sequence is synthesized)
tgggattacagacaggagccaccgcgcccagcctggggagtggctattggataagtggaggctatctattggcttcttgctcacttgcattcctgcaagatgactactttgtcataagcc

SEQ ID NO: 954916 - DNA, 120 bp, Artificial Sequence
  ENSG00000245149_17 (sequence is synthesized)
ccctgtgccattcctgggggcggagggagggggcggtggagccgatggttgtagctgctgaagtttactggctaaatctgtctacttggttatttaatgctgcttacatgttggattgtc

SEQ ID NO: 954917 - DNA, 120 bp, Artificial Sequence
  ENSG00000245149_18 (sequence is synthesized)
tctggcagataaagattgtgttatacaatacaaaaagccctccttatgtgccatatctgatatatttctcctctgcttctccagacttcttgtccctgatataccagtcttattccagac

SEQ ID NO: 954918 - DNA, 120 bp, Artificial Sequence
  ENSG00000245149_19 (sequence is synthesized)
ccctgatcaactagccaacttatttgccatgaaaatatgttcttagttcaagacactttctttccacacacagttgatgaccaggaatactgccccacattatgccttttgggagggttc

SEQ ID NO: 954919 - DNA, 120 bp, Artificial Sequence
  ENSG00000245149_20 (sequence is synthesized)
tccttactgctgtcttttaaggccagtcctgtgtggggctgtagggcagtagcagtccatttttgttttgaacctatattccaagaaacctcagtgaattcagctcaggcttttttgtcc

SEQ ID NO: 954920 - DNA, 120 bp, Artificial Sequence
  ENSG00000245149_21 (sequence is synthesized)
tccataagctagacatgagagcctcccaagtggccataattgtgagctgaggaagggacattggtaaagaatcagatatgacatgggagcctgaccacctgcctttgcccagctcatgat

SEQ ID NO: 954921 - DNA, 120 bp, Artificial Sequence
  ENSG00000245149_22 (sequence is synthesized)
gggcctctctggctacatggtcacttgatgtccataatcagttcttaccaaggcacattagcatggatagagttgtttttgggattttgcactgcagatggcccagccttgccacagaat

SEQ ID NO: 954922 - DNA, 120 bp, Artificial Sequence
  ENSG00000245149_23 (sequence is synthesized)
gccaggagtcgaccttgtgattctcccattggagcttgccttcaactttcatggcttcttatcacatttactcttgtcccatagaatatcctgaattggtccatgcaacagggctaaata

SEQ ID NO: 954923 - DNA, 120 bp, Artificial Sequence
  ENSG00000245149_24 (sequence is synthesized)
caccatacctgctagagaacttttacatgctatggatcccactgaaaactggcagatttctatctcacccagtttacgagtcagaacagtactgccaacttctgaattcccacagaagcc

SEQ ID NO: 954924 - DNA, 120 bp, Artificial Sequence
  ENSG00000245149_25 (sequence is synthesized)
tacacagcttggtgtgcttccctggtggcagaataattttggtgaaatgagtgggtgagatgcaataatttgtcctttactgtgaaggggatatcttggcattcaagcagcctactgggc

SEQ ID NO: 954925 - DNA, 120 bp, Artificial Sequence
  ENSG00000245149_26 (sequence is synthesized)
cctaaaagtttcactgaggtaacagcttgctgggtcttaaggattatttcccatcctccagtgtacagtatgctagctgcttattattcaccttatccagctagcatgatgtcatcaatg

SEQ ID NO: 954926 - DNA, 120 bp, Artificial Sequence
  ENSG00000245149_27 (sequence is synthesized)
tggtaggtcattgtgacattatgtgggatgtttagatggtctagatctcttcggattatgacgcagtgtggaagagttaacataaccctaagccaatactataaatgggtactgctgtcc

SEQ ID NO: 954927 - DNA, 120 bp, Artificial Sequence
  ENSG00000245149_28 (sequence is synthesized)
tatataaacacaaacttaattcttgtccagcactctcaggacccagttccatacacatgctcatggttcctgttggtacatgttggttagatcctgcatctctttggtcatataagccca

SEQ ID NO: 954928 - DNA, 120 bp, Artificial Sequence
  ENSG00000245149_29 (sequence is synthesized)
tttggaattgaaagtagacacacagaatgagggcaaaacacctgcagaacagctgcttcatcatggtgggcttttttcatattaggttttgttacctttgagtttttaaattatgtgtaa

SEQ ID NO: 954929 - DNA, 120 bp, Artificial Sequence
  ENSG00000245149_30 (sequence is synthesized)
attattaaaaagaaactgagacagtctatccacctatctctatttacccagtgctgttgttgtgttacataaaattcaattttagcttcatgttcatgcaatattttcgtttacccttga

SEQ ID NO: 954930 - DNA, 120 bp, Artificial Sequence
  ENSG00000245149_31 (sequence is synthesized)
ttcaaccttgacctttaaaaagccaaaaagacaaatacctattttgacactggttctgatctctctgaaattctgtgtgaccaatggtcaagtaaccttgcaggttatttatcatgtcta

SEQ ID NO: 954931 - DNA, 120 bp, Artificial Sequence
  ENSG00000245149_32 (sequence is synthesized)
atctgaaaaaagtcattgtatttactaatattttaatattcaccttataggtaagcattctaaacatgattgtggcaagaaattcttatatgctttacatgttgaaattctgtgtcaaat

SEQ ID NO: 954932 - DNA, 120 bp, Artificial Sequence
  ENSG00000245149_33 (sequence is synthesized)
gaagtacatatgtatattattgcaagagtgaatttcttcagtaatgattgtgacagctagtaaatttaagtagaaagtaattataaacttccaaatactttttttaaatgggcaaaatat

SEQ ID NO: 954933 - DNA, 120 bp, Artificial Sequence
  ENSG00000245149_34 (sequence is synthesized)
atgaaacaatggccctgaaggcattggacataggcagtgaaggatagtaatccatgagagatggaatgcaaacaaggtgagcaatacaattgctccaacttgctgcctgaagaaaggctt

SEQ ID NO: 954934 - DNA, 120 bp, Artificial Sequence
  ENSG00000245149_35 (sequence is synthesized)
tggcatggggagagggaacccagaagactctgtgaggtgaggagatataagtgggagtcctgagagcccaaggcaactagagttcacagggtagaatactagagaggacagagtgacaca

SEQ ID NO: 954935 - DNA, 120 bp, Artificial Sequence
  ENSG00000245149_36 (sequence is synthesized)
gagagaactccagagatctgctgaccattctcctgaagtattaagctaaataatgattagtacatgcatgagaggaaataaccaaaggcttggcaaagaaccatcagaaaggattaaaga

SEQ ID NO: 954936 - DNA, 120 bp, Artificial Sequence
  ENSG00000245149_37 (sequence is synthesized)
aaacaatactcaaagctcacacaggatggtgaatgattcctgatcccgtcagcaagagtggaaaagatcctaattcacaaggcaccagttagagtactaagaaaggtcttgcttcaatag

SEQ ID NO: 954937 - DNA, 120 bp, Artificial Sequence
  ENSG00000245149_38 (sequence is synthesized)
cgggaaaaattaaccctcgactaaatgctctagaataacctaacaaagcttaaaagagagacccaaaaacattcaaactgtgtccaaataacttaatcatactccagaagaaagttcaaa

SEQ ID NO: 954938 - DNA, 120 bp, Artificial Sequence
  ENSG00000245149_39 (sequence is synthesized)
ctgttttagggatatgaaaataatctacaaagtaaaattcacaatggctggcatccaatcaaaaattaccaggcatgcaacagaaaaatacaacccataataagaaaaataaaacattct

SEQ ID NO: 954939 - DNA, 120 bp, Artificial Sequence
  ENSG00000245149_40 (sequence is synthesized)
caagactccatctcaaaacaaacaaaaaataaaacattctgtcaaaactgactcagaaattacagatgatgaagattattagacaaggacattaaaacagttattataattatattccat

SEQ ID NO: 954940 - DNA, 120 bp, Artificial Sequence
  ENSG00000245149_41 (sequence is synthesized)
acagttattataattatattccatgtattcaagaaaccagaggaaagactgaagatattacagacaatgaaggtataaaaagacccgtatcaaacttctagagatgaaaactccaatgtc

SEQ ID NO: 954941 - DNA, 120 bp, Artificial Sequence
  ENSG00000245149_42 (sequence is synthesized)
tgagatgaaaaatatgttagatgagattaatggcagattagatattgcagaaagaaagatcagtgaacttgaagatgcagcagtagaacctccctgaaacagagagaaaaaagaataaaa

SEQ ID NO: 954942 - DNA, 120 bp, Artificial Sequence
  ENSG00000245149_43 (sequence is synthesized)
agaaatcccgcgaaggccgcccgggatcctggtagaggcgacgctgtgtgcgtttatggagcgcttgcgatggacagaagtgaggacattcatcggccgcattttactaatggcaaggag

SEQ ID NO: 954943 - DNA, 120 bp, Artificial Sequence
  ENSG00000245149_44 (sequence is synthesized)
tgggtagaggagataggtgagtactattatattatgttcatggaaaatgagttcatgggctttcctctaatttttattttaaaaataaatgtaaatattaaataaaattttttaaatgaa

SEQ ID NO: 954944 - DNA, 120 bp, Artificial Sequence
  ENSG00000245149_45 (sequence is synthesized)
ctcatctttgaggtaagtacacctggacagtcccttccttcctcctcagggctcatgctttcttgcctatccgtgtaattaatatgatctggctatctttgtctttgttccgaaacttca

SEQ ID NO: 954945 - DNA, 120 bp, Artificial Sequence
  ENSG00000245149_46 (sequence is synthesized)
gctgcaaatgaaagtgtaagttaggtctgagtctgcactatagacctagctatcctaggttaaaggggataaaataggaatcaagaagcctggcccgcttgggctcccagctcaagtgca

SEQ ID NO: 954946 - DNA, 120 bp, Artificial Sequence
  ENSG00000245149_47 (sequence is synthesized)
ttctgcaatccagtttatattaggcctccatgtgggtggctatcctttatcaagatcccccccagggggaggaggattattagtcacattatcaaactcccctccaacccctttctctgc

SEQ ID NO: 954947 - DNA, 120 bp, Artificial Sequence
  ENSG00000245149_48 (sequence is synthesized)
taccctactccctaataatgaccgccatcatttatctactgcttaatggatactaggcactgtgctaagggttttatgttttacttcaatcttttcatcggctttattttgatagtttgt

SEQ ID NO: 954948 - DNA, 120 bp, Artificial Sequence
  ENSG00000245149_49 (sequence is synthesized)
tttatagaggaggaaacagacttaggtaagttacaagatgacaaggttactaccttgttcagttagtagtcagcagctagtatatccaaagatagtacgagtcagaactaggattataaa

SEQ ID NO: 954949 - DNA, 120 bp, Artificial Sequence
  ENSG00000245149_50 (sequence is synthesized)
ctcagggctacctgaaactcacaacttcaggcatctttgatttcttcttttcacccacagccaattcttcaactaaattgtatccattctgttttcaccgtctcttgtactggtctcctt

SEQ ID NO: 954950 - DNA, 120 bp, Artificial Sequence
  ENSG00000245149_51 (sequence is synthesized)
tctattgtaactgtcatcatcctaactcaagatccttctgtagctttccccggttattggaatatccttattacgactgccaccttttctaatccagtctgtttactactgccgggttaa

SEQ ID NO: 954951 - DNA, 120 bp, Artificial Sequence
  ENSG00000245149_52 (sequence is synthesized)
tttccccaaactgcatgtctggggaataaccttgtggttatgacagaattcccaaaggaaagcaaacttggcaaggtgcaaagactatgaagacttagaacttaagagttctatggagat

SEQ ID NO: 954952 - DNA, 120 bp, Artificial Sequence
  ENSG00000245149_53 (sequence is synthesized)
cttcagaaatataaattagctactcaacatatctgttattctgccctgattgcactgtaaagcaaaaggagagaggccattatggggaaaaagatccaaaaggactcatctaaaacacaa

SEQ ID NO: 954953 - DNA, 120 bp, Artificial Sequence
  ENSG00000245146_0 (sequence is synthesized)
ttcctccacccaccgcccacagcgccccagaaggacctattactcgtttggcttctgaaggccgaagccaggctctggcggggatagaaccctgaagggcctgcgccagctccaacttag

SEQ ID NO: 954954 - DNA, 120 bp, Artificial Sequence
  ENSG00000245146_1 (sequence is synthesized)
ggccctgtgcgtcgttgcgacttctgctaccaccctatcacgcggcacccccgccccaactccgcccgggtctctgaagaggcaataggcctttcatctccggggaaagtctcaccttgg

SEQ ID NO: 954955 - DNA, 120 bp, Artificial Sequence
  ENSG00000245146_2 (sequence is synthesized)
ccctcagacacccgccaagaggggtcggaaggacagaattagcatagagaagagtggctagagcacttttcaggctctggccccaggaatccttgacaggaagcgtggggttgctgccca

SEQ ID NO: 954956 - DNA, 120 bp, Artificial Sequence
  ENSG00000245146_3 (sequence is synthesized)
gcctcccacgcagtgtaatatgttgaagccgggcccctttgagggaatgcgacttccttgggccgagggggaaagggcagtgcctgatggctgagaagaatcgcagaggactagaaaagg

SEQ ID NO: 954957 - DNA, 120 bp, Artificial Sequence
  ENSG00000245146_4 (sequence is synthesized)
tttgagtctgaaattatctggcacagaggattaaagctcagaaataagtgattgcgaaacagttcaacttccctgttaatgacaacaacaacagcaacacgcttattaattcctagctgg

SEQ ID NO: 954958 - DNA, 120 bp, Artificial Sequence
  ENSG00000245146_5 (sequence is synthesized)
agcatcaagcttatgaagatttccaagactttattgttgacccttgttgaagagaactctacttggcttctttcctggctttcctaaattgttcacatacaagataaactaccgtcattc

SEQ ID NO: 954959 - DNA, 120 bp, Artificial Sequence
  ENSG00000245146_6 (sequence is synthesized)
agacttacagaagtgagaagacaagctgaaccaaatgtaaaatggtagcaatttacagatgtcagaactaacatgtggatgaacttagagatggagaagaaagctgggcttttccaaaga

SEQ ID NO: 954960 - DNA, 120 bp, Artificial Sequence
  ENSG00000245146_7 (sequence is synthesized)
gtggatctatctgaactggatagcactattgaactttgttgcatattttgtggtagctctaaaactcctctgcttgcttacatacaaccagacaccagtgccttctgaagctaatccagg

SEQ ID NO: 954961 - DNA, 120 bp, Artificial Sequence
  ENSG00000245146_8 (sequence is synthesized)
ccatttttataacctaatgcagtagcactttgcaattagatgaagaagatcggtgggatttctttctgtggtgattaaaatgtgtcaggggaagaaatcaagacaatactccaagtgaaa

SEQ ID NO: 954962 - DNA, 120 bp, Artificial Sequence
  ENSG00000245146_9 (sequence is synthesized)
atcaagacaatactccaagtgaaaaatataaagtcagttatttctttaatattttgtgttatagtaatcatttttatattttgagcatactttttcttgtctacttaaatactcaaaatt

SEQ ID NO: 954963 - DNA, 120 bp, Artificial Sequence
  ENSG00000245146_10 (sequence is synthesized)
caatgagataccatctcatcccagttaaaatggcttttatcaaaaagatagggaataatgaatactggtggaaggatgtggagaatggggaaccctcgtacactgtcaatgagaatgtaa

SEQ ID NO: 954964 - DNA, 120 bp, Artificial Sequence
  ENSG00000245146_11 (sequence is synthesized)
ccagcaattacactagtgggtatatattcaaaagaaaggaaatcaacatattaaagagatagctgcattctcatgtttattgaagtcctgttgaaatagccaaaatatggaatcaaccta

SEQ ID NO: 954965 - DNA, 85 bp, Artificial Sequence
  ENSG00000245146_12 (sequence is synthesized)
gcggggcacagtggctcatgcaagtaatcccagcactgacctcatgaagacagagagtagattggtggttaccagaggttgagaa

SEQ ID NO: 954966 - DNA, 120 bp, Artificial Sequence
  ENSG00000245146_13 (sequence is synthesized)
gaagacagagagtagattggtggttaccagaggttgagaaggggagaggagaggagggatgaagagaggttgattgatggatagaaatatacagtttgataatgataaatcagtagggtg

SEQ ID NO: 954967 - DNA, 120 bp, Artificial Sequence
  ENSG00000245146_14 (sequence is synthesized)
actatagtttataataacctattgtatggttcaaaatagctaaaagagaataattgaaataacgtaagacaaaaatttaagatgatagatatcccaattacactgatttgatctttacaa

SEQ ID NO: 954968 - DNA, 120 bp, Artificial Sequence
  ENSG00000245146_15 (sequence is synthesized)
ggaaataaatatttacttaagtatgtttatgatgaagagtttttttatattactataaaaatagacaccttacataaacatattacagttggtgtttagatggctcttttttttctggcc

SEQ ID NO: 954969 - DNA, 120 bp, Artificial Sequence
  ENSG00000245146_16 (sequence is synthesized)
ttgaatttctggaaagtaggtatggcctgctatgtcaggactagttcttggaattctttgttgtttttcagtcagccttattttcttgggtcatgttttgaacaatatttatcaaatgtc

SEQ ID NO: 954970 - DNA, 120 bp, Artificial Sequence
  ENSG00000245146_17 (sequence is synthesized)
tgtttaccagacgttgttccagatgcttgaacaaaatgaaatgtctgctgtcatagagtttccagtctatgtaagacagtaaacaaatgtataatataatgctagatagtgataagtgct

SEQ ID NO: 954971 - DNA, 120 bp, Artificial Sequence
  ENSG00000245146_18 (sequence is synthesized)
aaaaagaagaagaaaataggaaaggggaaagagagtttctgtgtgattgtatgtgaaagtgtccatgcatgccgctcacccagtattttaaatagagtgatcaaggaagcctgtctgaag

SEQ ID NO: 954972 - DNA, 120 bp, Artificial Sequence
  ENSG00000245146_19 (sequence is synthesized)
aagtaacatttgaacagagatctgaaatagtcagtcacgggaacatttagggagatgttccaggcaggcattgtggacaatttatgtcacaaaaaagtcacccaagtgttaagtcaagta

SEQ ID NO: 954973 - DNA, 120 bp, Artificial Sequence
  ENSG00000245146_20 (sequence is synthesized)
acatcctgtatgataactatatatacatttttttgttttttcttaagtgaaaaacaaacttattaggttttctgggtactcattaggttttcagaaaagtttttcatttaatatcattat

SEQ ID NO: 954974 - DNA, 120 bp, Artificial Sequence
  ENSG00000245146_21 (sequence is synthesized)
gtccaccaaaagatgtcaaaccaaatccagcctattgtaaagctctgggacctcccttccaaggacaccgaacacaagcttagacaccgctgcgaaaagctgtccaaaagcgcctggccg

SEQ ID NO: 954975 - DNA, 120 bp, Artificial Sequence
  ENSG00000245146_22 (sequence is synthesized)
gacagaaatggttgccgtgcagggagtgtcagccacgtctagcgcacagtcccaggccccagggcgaaggcggccaggggaaatggggctcagggattgctaagcaaacgcatcactggt

SEQ ID NO: 954976 - DNA, 120 bp, Artificial Sequence
  ENSG00000245146_23 (sequence is synthesized)
cttacagaagtgagaagacaagctgaaccaaatgtaaaatggtagcaatttacagacagtgtctccttctgtcgtccaggctgaagtgcagcggcgcgatcttggctcactgcaacctcc

SEQ ID NO: 954977 - DNA, 120 bp, Artificial Sequence
  ENSG00000245146_24 (sequence is synthesized)
ctggagtagctgggactactaggcgcgggcaaccacactcagagaatttttgtatgttttgtagagatgaaatttcgtcatgttgtccaagctagtgggagctaaaatggtacaatcttt

SEQ ID NO: 954978 - DNA, 120 bp, Artificial Sequence
  ENSG00000245146_25 (sequence is synthesized)
ctctcgcgtccctccgttttagctgccgccgcggcggccgccgagcgcgctctttccgcccccttctcgcgcgtgagcgcgccctatcggctcctggcgcgtcaacattccgcgggccag

SEQ ID NO: 954979 - DNA, 120 bp, Artificial Sequence
  ENSG00000245146_26 (sequence is synthesized)
ggaaagggtaaaagttaattttcataaaatgctatgcaagggctaaatgtgaaattataaaatgtcctttaagacagtcttcttgaaatcgtatcaagtttgacaagatttttggtgcac

SEQ ID NO: 954980 - DNA, 120 bp, Artificial Sequence
  ENSG00000245146_27 (sequence is synthesized)
ggtaacgcttttgctcgctttctacgctgtcacgtctccatcctgcaacactgaatacgtagatggaacgtggatcagctaataactgcagcaaaataaaaactgcatttatcatcttta

SEQ ID NO: 954981 - DNA, 120 bp, Artificial Sequence
  ENSG00000245146_28 (sequence is synthesized)
tcattatttaaatagacctccgagaagtcaaactgtgatttaggaaaacttaatcattgcctcaacctatttaactattttgttttgaagttactttgcaaatataccacaaaatccctc

SEQ ID NO: 954982 - DNA, 120 bp, Artificial Sequence
  ENSG00000245146_29 (sequence is synthesized)
tttgttaggcagtggtagacttttaaactcacttgttagagaatctttcccagaagcatatctagttgagcctgcgaggcaagtaggactaaggtataattactcccattttacagatga

SEQ ID NO: 954983 - DNA, 120 bp, Artificial Sequence
  ENSG00000245146_30 (sequence is synthesized)
aaatttagttatcaaaatgtaagtcagttgttcagcattgtgaggagtctatcactgataaagggaaaactctaaggtctattattgcctgctttattcactaaaccagaaatctctcaa

SEQ ID NO: 954984 - DNA, 120 bp, Artificial Sequence
  ENSG00000245146_31 (sequence is synthesized)
ggctctacagatacagcttcacaatcccttatctgtaattccaaaatacaaaaaaatttcttaattcatttagtggcaaaatctgaactgacatgaatctatttaaaattatcctttatg

SEQ ID NO: 954985 - DNA, 120 bp, Artificial Sequence
  ENSG00000245146_32 (sequence is synthesized)
gcgaaactcttgtctcaaaaaaaaaaaaagtatttattccatttagtgtgactactgatacatttcattgtagaaacattagtgtgtttgatgaagggttgctacacattaagtaaaata

SEQ ID NO: 954986 - DNA, 120 bp, Artificial Sequence
  ENSG00000245146_33 (sequence is synthesized)
gctacacattaagtaaaatatagataatacaatgtattgtaccctaaaatataaaaaaaattaaatccagaaacacgtgttcccaagaattttggataagggattgtagatctgtgtcag

SEQ ID NO: 954987 - DNA, 120 bp, Artificial Sequence
  ENSG00000245146_34 (sequence is synthesized)
atttcttcttgattttctgattaaatgttaccattgttgttaatctttagatacattgtttttagaagtataatgctatatagtgcccttattatatactggcattgcataagcactcta

SEQ ID NO: 954988 - DNA, 120 bp, Artificial Sequence
  ENSG00000245146_35 (sequence is synthesized)
ggcggctcggatggctggctcggctctcgctcgctctccctcccatgggcaagtccggctcacaccctgcttctcccgctcactcacagcccccttggctctccctcctcctcctccttc

SEQ ID NO: 954989 - DNA, 120 bp, Artificial Sequence
  ENSG00000245146_36 (sequence is synthesized)
ccctgcgggatccgctcgccgccgccgccgccgccgcagacggcaagtcgtggcagccagacgtcggcgcgtaacccggcgctccgtgcgtgactccaggcgacgtcagcgcgcgctccg

SEQ ID NO: 954990 - DNA, 120 bp, Artificial Sequence
  ENSG00000245146_37 (sequence is synthesized)
cttggtaatatgtatcaaaagccttatttaatgcacatatcctttggtatagcaattttatttctgcaggttgatttttaaaaattaattcaagatacatatctattagaatggccaaag

SEQ ID NO: 954991 - DNA, 120 bp, Artificial Sequence
  ENSG00000245146_38 (sequence is synthesized)
ctggtgaggatgtggagcaacaggaactctggttcattgctggtgggaatgcaaaagggcacagccactttggaagatagtttgacagcttcttacaaaactaaacatacatcttactat

SEQ ID NO: 954992 - DNA, 120 bp, Artificial Sequence
  ENSG00000245146_39 (sequence is synthesized)
acgtgcacatggatgtttatagcatcttttataattaccaaaacttgaaagcaactgagttggccttcattagaggaatgaataaactgtggtatacccagtaaatgaaatattcattgc

SEQ ID NO: 954993 - DNA, 120 bp, Artificial Sequence
  ENSG00000245146_40 (sequence is synthesized)
taaaaagaaaaaagctatcaagccatgaaaagacgtgcaggaaccttaaatccatattgctaagtgaaagaagccaattgaaaaagttacgtattatatgattccaaactgtatcacatt

SEQ ID NO: 954994 - DNA, 120 bp, Artificial Sequence
  ENSG00000245146_41 (sequence is synthesized)
ctggaaaaggcaaaactatggagagagtaaaaggatcagtagttgccagagtatggggcgagggaaggatgaatagatggagcacagaggattttcagggcagtgaaaatactatatgat

SEQ ID NO: 954995 - DNA, 120 bp, Artificial Sequence
  ENSG00000245146_42 (sequence is synthesized)
actataatgaatgtatgtccaaacccatagaatgtacaccaccaagagtgaaccctaatgtaaggtatagactttggatgatagtggtgtatcaatgtaggtttatctgttgtaatgtat

SEQ ID NO: 954996 - DNA, 120 bp, Artificial Sequence
  ENSG00000245146_43 (sequence is synthesized)
gtaccgctctggtgggggatattgtaattgggagcctgaacatgtatgacggcagaggccataagggaaatctctgtaccttcctttcaatttggctgtgtgcctaacactgctctaaaa

SEQ ID NO: 954997 - DNA, 120 bp, Artificial Sequence
  ENSG00000245146_44 (sequence is synthesized)
aaaaaatacaatcttaaatataataaaattggatcacatcacacaccataaaaaagaaagacattaattgaatttgtatgaagattaaggtacaaggatgttcattttagacctttattg

SEQ ID NO: 954998 - DNA, 120 bp, Artificial Sequence
  ENSG00000245146_45 (sequence is synthesized)
gagcaaaaaatattgtaaacaacttagatataccataagagcagagtttaattatggaatatttgtacaatagaatattccttgcctcccacatctaagtcatcagagcaagttctccat

SEQ ID NO: 954999 - DNA, 120 bp, Artificial Sequence
  ENSG00000245146_46 (sequence is synthesized)
tacctccagaatagattctgattctgttcaatactctccatctcaatggccaccattcgagaacaatgcctcaccctccttcatctggatactaaacatcttcctaactggtcatcctgc

SEQ ID NO: 955000 - DNA, 120 bp, Artificial Sequence
  ENSG00000245146_47 (sequence is synthesized)
tccagcttctactcctttgatccattcttcacatagcagtcagagctgtctactttgctgcctggctagctagctaaccatttgtttaaagtattaaaagcacccataaacctaccacat

SEQ ID NO: 955001 - DNA, 120 bp, Artificial Sequence
  ENSG00000245146_48 (sequence is synthesized)
taggcccctacccgtaccatgccctaactcctcccatgccaggcagccatcaacctgaatccccactcccttgctttcctttttatatagtgttattgtatttataagcattcctaaata

SEQ ID NO: 955002 - DNA, 120 bp, Artificial Sequence
  ENSG00000245146_49 (sequence is synthesized)
tgtgatatatgggggttatttggatcaagtgttttctaagtagaactttgtcataattaattttatgtatttatagtagttctccctgtgtccctttatccaagcaacacaatacaattg

SEQ ID NO: 955003 - DNA, 120 bp, Artificial Sequence
  ENSG00000245146_50 (sequence is synthesized)
aatttatatgcatttcaaaatagactccatttgatttaccgtgtaaatacaaccaccaaggaatatagaggtatgacaatcaggagtgagaaataaaagcatttctggatagaggatgaa

SEQ ID NO: 955004 - DNA, 120 bp, Artificial Sequence
  ENSG00000245146_51 (sequence is synthesized)
agatatattggttgggtgccttcccctacaaacatcacagcccgcctccggggcccaccgccgctcacagagaagacccctcagcttcacatccgttccttttgccctcggacaaaggca

SEQ ID NO: 955005 - DNA, 120 bp, Artificial Sequence
  ENSG00000266765_0 (sequence is synthesized)
ctactatgcatcagatattcttctggctcctgaggatatactggggttttgagacaaacaagatccacagttggggctaatgggagcttccacgtctgtggcacctgaattaggcaatcc

SEQ ID NO: 955006 - DNA, 120 bp, Artificial Sequence
  ENSG00000266765_1 (sequence is synthesized)
aggggtaaaagatgcacagagagaagcgtcctcctgtttgcaagaccccaccctgcatgtgggagagagctgcagctgccaccaagtgacatcactcacctgtgaaggatggcagagtgg

SEQ ID NO: 955007 - DNA, 120 bp, Artificial Sequence
  ENSG00000266765_2 (sequence is synthesized)
atagaagagagctgctagtagctgacaatatcatcaagcctcagatttatccaattttgcaaccctatctgtccccaagcttttctttatgtaagataataaacccttattgttaatgtt

SEQ ID NO: 955008 - DNA, 120 bp, Artificial Sequence
  ENSG00000266767_0 (sequence is synthesized)
tccacattccagctaccagggagcagacagagggactatccagctctctgtggcctcctcagaaagagatgagagactcaagaccccaggacatgaaatcacttacctggaatggcatgg

SEQ ID NO: 955009 - DNA, 120 bp, Artificial Sequence
  ENSG00000266767_1 (sequence is synthesized)
tcaataaaggcagattatggcagtggcaatgtattaagaggagtatcaatgggaattgaagatccaagcaagttaaatatgtgggtggagggatacaaaaacgttgaatgagattctaac

SEQ ID NO: 955010 - DNA, 120 bp, Artificial Sequence
  ENSG00000266767_2 (sequence is synthesized)
attttaggctatttacaacagcacagtgagtcaggggagggtccagtggaaagcgactggagacacatccggcagacaggcagaaatgtcagtttcacctcaaagttgtggcagaagtag

SEQ ID NO: 955011 - DNA, 120 bp, Artificial Sequence
  ENSG00000266767_3 (sequence is synthesized)
atcttcgaggctgatgcttcccagtcagtgcttcccagccttcctcattaccatggcacatacagaaagcaaatatgtgtgcatctcactgggcagtgactgagtgggctacctcccagg

SEQ ID NO: 955012 - DNA, 120 bp, Artificial Sequence
  ENSG00000266767_4 (sequence is synthesized)
cctgttcctgcagtgccccttggttcttcatgagactattcagggtgtttttctgggcaagtaactccaaaggcaagcatgagagcagctcgaagacttaagaacatgtcacagggagaa

SEQ ID NO: 955013 - DNA, 120 bp, Artificial Sequence
  ENSG00000266767_5 (sequence is synthesized)
caagaatgccatatgagtaaaaaggcagaggcaggagtgatgcacctacaaagccaaggaacagaaaagagagccagaaaaccaccaggagccaggacagaggcatgaaacagattctcc

SEQ ID NO: 955014 - DNA, 120 bp, Artificial Sequence
  ENSG00000266767_6 (sequence is synthesized)
ggaaggttctggattgcagggagaaaggcaattaatgagtgattactatttaaagacaaaacccctgtcaaaacagcttgaccaaaaaaaaatgtgagttttttttgttgtttttttttt

SEQ ID NO: 955015 - DNA, 120 bp, Artificial Sequence
  ENSG00000266767_7 (sequence is synthesized)
taactcacaacttgcagtagtgctgccagcaaaaatagtgggtggtaattctgccagctaaaagggtgccgaaatgcagttgggtgagaagaacaactctgtcccctcctccattccctt

SEQ ID NO: 955016 - DNA, 120 bp, Artificial Sequence
  ENSG00000266767_8 (sequence is synthesized)
tttcacttatactgaagaaattcttggtttcctccagaacagaacaccctgaaatatgaagctaatctcatcagagggacaggcaccttaccaagatgaaaattccttaagatttatttg

SEQ ID NO: 955017 - DNA, 120 bp, Artificial Sequence
  ENSG00000266767_9 (sequence is synthesized)
cccagccttaaagcttagacaacttattaagagttacaatagttttgtcaaaaatgacagccttcagtgcttcacagaagccataaaaaaaacaaagtccaataccgatgtgttttcgtt

SEQ ID NO: 955018 - DNA, 120 bp, Artificial Sequence
  ENSG00000266767_10 (sequence is synthesized)
aactgaaaatatcagtgaccaacaaatacaaagtttcattagaaatcatcaagaaaaaccaggcttgggaagataaattccttgatgcccatgttttaaaaatgatcctgtctgtggatt

SEQ ID NO: 955019 - DNA, 120 bp, Artificial Sequence
  ENSG00000266767_11 (sequence is synthesized)
aaactgcaagtcatttgggccattgctcagccgaaaagacaaatgtttcagagtagaaggccactctcctctggcctcaatgaaaacgcatgtcaccttccggctacagacccaggtggc

SEQ ID NO: 955020 - DNA, 120 bp, Artificial Sequence
  ENSG00000242641_0 (sequence is synthesized)
atatggagcattctgatatgaataagacacttgctcacttctcaattccttggtgtccagctctacaagtgtatatagacttccaaagaatatttaaatcctttaacaaaaatgccacct

SEQ ID NO: 955021 - DNA, 120 bp, Artificial Sequence
  ENSG00000242641_1 (sequence is synthesized)
tgaaatacttcagtctgtctgtcagtgctcacttcctgtctagaaactttcaggctccggcacaaatgaaccatgttcttcgcctaagtcatttatggaacatctgctttcggtttagca

SEQ ID NO: 955022 - DNA, 120 bp, Artificial Sequence
  ENSG00000242641_2 (sequence is synthesized)
tcagctttgtgacctagtaatatctttctcgagtgcatgaaacatctcagaaatgcaaacatcaaggaagatactaatcctttcttccagtttctgtgtgagggttggaggctgactttg

SEQ ID NO: 955023 - DNA, 120 bp, Artificial Sequence
  ENSG00000242641_3 (sequence is synthesized)
gtggtgatcttgctccaaattatagaactacatcctgtcatgaagagaagtttgtcttctcgataaagccaagtagctaacagagatggtcaccccaattaccagatggacataattata

SEQ ID NO: 955024 - DNA, 120 bp, Artificial Sequence
  ENSG00000242641_4 (sequence is synthesized)
cttgaatgctgacctacaacattttgtgctgtgcagaggctttgaaaatcaaacaactttgaaaatacaaagcaccgcgtggatgtaagtttattaaattttgttttcatcaacattcaa

SEQ ID NO: 955025 - DNA, 120 bp, Artificial Sequence
  ENSG00000242641_5 (sequence is synthesized)
agactgctagggagcggtgccctttgtgcatgggggctacataaacaggcaatgtgccaggcgtgacctgaaagctgtggtttgctgatatcaattctaccatttcccagagatcaccat

SEQ ID NO: 955026 - DNA, 120 bp, Artificial Sequence
  ENSG00000242641_6 (sequence is synthesized)
tgggaatgagctccatttgcccacaacagtgatcggctgatggctccaccctctacttagtcgcttctgtttcctgtcccatggattcctcaccccacactaatgcttccaggaacaact

SEQ ID NO: 955027 - DNA, 120 bp, Artificial Sequence
  ENSG00000242641_7 (sequence is synthesized)
tctcaaataaatcacttgcacgttactgatggatccgtcctaaatgccatccatctcaagacagaggcccacagaagtcaatgtatcttcaagatgggagtacctggagatggctgtaga

SEQ ID NO: 955028 - DNA, 120 bp, Artificial Sequence
  ENSG00000242641_8 (sequence is synthesized)
gaccatgtagcaggaaatggtgacagagaagagctgggcctctggtaccaacatgcttcccccccgttacagctatgcgggctgatagtgacgcaatgtgtggtttcaatacttcatagt

SEQ ID NO: 955029 - DNA, 120 bp, Artificial Sequence
  ENSG00000242641_9 (sequence is synthesized)
agataaggccttccagtatggaggtgataaaaatcagggaagacaggtaatcacaatggatgacagaccaggattcccagatatcttggcatggctggaacaatgtacagatcaaaccat

SEQ ID NO: 955030 - DNA, 120 bp, Artificial Sequence
  ENSG00000242641_10 (sequence is synthesized)
gtaaaacttaatgggtataaaccaactcttcactttggtctaaaaaagtccatttgcatggcttctagttaaaggtggacaggctcactttagaatcctattatatacaaaggatttagg

SEQ ID NO: 955031 - DNA, 120 bp, Artificial Sequence
  ENSG00000242641_11 (sequence is synthesized)
gggtttagttcacaatgtgctaaagccatctcacagtgaccatggtatgagctgtgtgatttggtttaaatataatagagaatgaaggacaaggttgagggtggtggttacagtcctgcc

SEQ ID NO: 955032 - DNA, 120 bp, Artificial Sequence
  ENSG00000242641_12 (sequence is synthesized)
tgattctgtagtgctcaggtgacctttgaagaatgaagaaagaagtcaaaaccccacactattaagacattggaagactgggaatgtttattttctgaagaataaaagatgtaggaaaca

SEQ ID NO: 955033 - DNA, 120 bp, Artificial Sequence
  ENSG00000242641_13 (sequence is synthesized)
aatgtaaatctaatcagcctttagaatttaaaggcttaaaaaagactaaagaaaagtaacaaccaaatgcaatatgtagaacttatatggagcctgattcgaacatcaagtataaagaga

SEQ ID NO: 955034 - DNA, 120 bp, Artificial Sequence
  ENSG00000242641_14 (sequence is synthesized)
tatttttgagaaaattgagaaattttaaaacatgaaattagtattatatgatattgaagactgctgctttttcaagacatgtcctcaaatttattttacattccttccatactaactctt

SEQ ID NO: 955035 - DNA, 120 bp, Artificial Sequence
  ENSG00000242641_15 (sequence is synthesized)
ctccttgcatgtagacagacttgtggctgctttcaatgacttctgaaattaggtcattaaaagtcatacattctttggctagtaatcttgggttactcactcatgagaggccaagcttta

SEQ ID NO: 955036 - DNA, 120 bp, Artificial Sequence
  ENSG00000242641_16 (sequence is synthesized)
tctaggaagttcaactactcgagactgtcatgctgctgctatgttccgggtactgggctctggtcttttggtgactcctggccactagacttttctgcagttgtcctggggattgaacag

SEQ ID NO: 955037 - DNA, 120 bp, Artificial Sequence
  ENSG00000242641_17 (sequence is synthesized)
gcaggtagagatgacctaggagaaaggctggtggaaaagtctgaggaggtgacaagtttggaagatcaccggcagaggtgacaaagttactaaatgtgcaaggcctcatagcttagatag

SEQ ID NO: 955038 - DNA, 120 bp, Artificial Sequence
  ENSG00000242641_18 (sequence is synthesized)
acaaagcaaagaagaatgacactgaagaatcaaaaaaaaaaatgagcataagacccatgaagattacagacacatacactcctaaaattaaacattaagcggaataaaaataatcccaga

SEQ ID NO: 955039 - DNA, 120 bp, Artificial Sequence
  ENSG00000242641_19 (sequence is synthesized)
ggctgaaaaagtcttcagtgatataaattttaccacacttaaagagagagaggaaaagtttaagtggaagctcctactcagccatgctgtctaaggaagatttggcaaaaccttgagcta

SEQ ID NO: 955040 - DNA, 120 bp, Artificial Sequence
  ENSG00000242641_20 (sequence is synthesized)
caactttgaaaatacaaagcaccgcgtggatggcctcactctgtcgctcaggctggagtggcacgatcttggctcactgcagtctctgcctcctcctcttggatgcaagcaattcggcct

SEQ ID NO: 955041 - DNA, 120 bp, Artificial Sequence
  ENSG00000242641_21 (sequence is synthesized)
ccaagtagctgagattacagagaggctgaaaactcaagaaatgtggactaagtgtgtgggcaagtgtgtcactgctgactaaaactatgaacagacagagtctcactctgtcatccaggc

SEQ ID NO: 955042 - DNA, 120 bp, Artificial Sequence
  ENSG00000242641_22 (sequence is synthesized)
tggagtccagtggtatgatcttggctcactgcaaacctttgcctccctggtccaagtgattctcctgcttcagcctccaaaagtagctaggactacagctaatcctagtgaatcctccat

SEQ ID NO: 955043 - DNA, 120 bp, Artificial Sequence
  ENSG00000242641_23 (sequence is synthesized)
gaggccattgttctgaatggaagaagagagatatatgcaataggaaaaggtgacgtggaatctatgagagtcccatgtttatgtagcatattgtgcctactgtatctattcaggagggga

SEQ ID NO: 955044 - DNA, 120 bp, Artificial Sequence
  ENSG00000242641_24 (sequence is synthesized)
ttcttaatataagagatacatttacaaaattgcttccattacctacaaacaccataaagaaaagtaacagtgatgcatatggacagaactgcatcaccagaagttagaggaggaaagcat

SEQ ID NO: 955045 - DNA, 120 bp, Artificial Sequence
  ENSG00000242641_25 (sequence is synthesized)
ttcctatccaactttaaatgctgagaatgaataaccaggaaaaatggtacagaggacaaaataccaacaaaagtctccaaaagtgatgtgaagaaaataaggggctcatcattctaaatt

SEQ ID NO: 955046 - DNA, 120 bp, Artificial Sequence
  ENSG00000242641_26 (sequence is synthesized)
ctgcaggagagcagtagaagaaatcaagggaatcccacattatgtgggactctgcgactgtattggacacatagaataatctaggataatctctctgtctcaagatcttcaaatgaatcg

SEQ ID NO: 955047 - DNA, 120 bp, Artificial Sequence
  ENSG00000242641_27 (sequence is synthesized)
cagctgtaacgtcccttttgccagggaaggcaatatattcacagattctgaggattaggaatgagacctccttggagccattgtttaacctttcataggctggataatatagttttgcaa

SEQ ID NO: 955048 - DNA, 120 bp, Artificial Sequence
  ENSG00000242641_28 (sequence is synthesized)
actcaatttgggcagctggacagtgatcaggcaactttccgagtccctgactcccacctagactgagattccaatgctaggtgcccagaagtttccaaccaatgcaaaggtggcagctgg

SEQ ID NO: 955049 - DNA, 120 bp, Artificial Sequence
  ENSG00000242641_29 (sequence is synthesized)
aaaattctggacttcaaactcaatgcaatgattggataagactttcggagtaacttcttttgggattgcgtaagagatcaagactacagactttgaggtaaaaacaacctagattcgtga

SEQ ID NO: 955050 - DNA, 120 bp, Artificial Sequence
  ENSG00000242641_30 (sequence is synthesized)
gaagaggaagagtaaaagaactgcagctttcctcccactcttaaggtataaatatgaagtctaggtcatttcgagttggagaagccccagctacttcataagtgtgatgctagttttgaa

SEQ ID NO: 955051 - DNA, 120 bp, Artificial Sequence
  ENSG00000242641_31 (sequence is synthesized)
tgtgcattgagggacagctggtgttgagaaaaaaggaaattaccttaataccaataatttcagcacagattgtcatgtggttgggaaaatatttgatatgaagacattgaatccaccttc

SEQ ID NO: 955052 - DNA, 120 bp, Artificial Sequence
  ENSG00000242641_32 (sequence is synthesized)
taaagaataacaagatatattcatgaatggaaggatttggtagggtacatgaggacagatataaaactgcacaaccaatgttacacaaaggaggtttattcttcttcacaagaaagtgat

SEQ ID NO: 955053 - DNA, 120 bp, Artificial Sequence
  ENSG00000242641_33 (sequence is synthesized)
gtgtagagatattcactgaattattgaagattatatgtggcagagtcagcttggggatccaggttgtctaatccaaagattgtttaaccaagaaacaaggtcaaggcatgttcttcgatg

SEQ ID NO: 955054 - DNA, 120 bp, Artificial Sequence
  ENSG00000242641_34 (sequence is synthesized)
cttgttcattaacagctctgcgggtgatgctcctagagaggtctgatgtgttgtgtgatgttctcacacaaactatgttaatttttgatcagtgattgtgagttttaattgtgttgaggt

SEQ ID NO: 955055 - DNA, 120 bp, Artificial Sequence
  ENSG00000242641_35 (sequence is synthesized)
aactagagatttgttaagtggacgttacttcaaaaaggtaagttgaagcagtaaatgttaaaaccaaggaatcccccaaattcttgccctttattttttgcatgttaattccagaaaaga

SEQ ID NO: 955056 - DNA, 120 bp, Artificial Sequence
  ENSG00000242641_36 (sequence is synthesized)
aaaaaaaaaaagcttgtgggttaacgtggtatttatgcaaggctgccaatgtaaatataattctgtgatttaattttttactggcatgacattatatatatgtataaaatgtgcatacat

SEQ ID NO: 955057 - DNA, 120 bp, Artificial Sequence
  ENSG00000242641_37 (sequence is synthesized)
gtattaatatatacatatatctagtatatacaatatatacatatctattatatttatacacacatacatatacatatgtgtatgtgtatgtctgtgcctgtgtgtctttttgtcttgcaa

SEQ ID NO: 955058 - DNA, 120 bp, Artificial Sequence
  ENSG00000242641_38 (sequence is synthesized)
ctgtccatgtttgcttagctagtatgaagcagaatctggattcaaattcaagaagtctgattcccaaacagccacccaattaggaccgctttgaaaactccgagtcttctatttgatata

SEQ ID NO: 955059 - DNA, 120 bp, Artificial Sequence
  ENSG00000242641_39 (sequence is synthesized)
agtatagctcattgccatggaaataaacatatgtttcttttttaaattaaaaaaaatatttttattttgttttcaacatttagcatttttttgcatcaaagttctaagtagctgcatgtc

SEQ ID NO: 955060 - DNA, 120 bp, Artificial Sequence
  ENSG00000242641_40 (sequence is synthesized)
tgtttataatgtgtatatttgttgtttgtttttctgttttgtttctgtatagtttctttgtttgtatcactggtaatttaatccctcatgctatgctgtgggattatgtacaacaacaca

SEQ ID NO: 955061 - DNA, 120 bp, Artificial Sequence
  ENSG00000242641_41 (sequence is synthesized)
acttcttagcctcttcaaaccctttcactgcaagctgcttttttgtgctttttgaaagaaaaggaagaaaaacacattgcattttcttaagataaaatgatacctgcttcttcatttcct

SEQ ID NO: 955062 - DNA, 120 bp, Artificial Sequence
  ENSG00000242641_42 (sequence is synthesized)
cctactccttcctattatcttttgtagaaagaattgctgaatctattgatatgtaattttcatttaattctccaacatcttattgctatttaaaatggtttaagaaaactggcttaatat

SEQ ID NO: 955063 - DNA, 120 bp, Artificial Sequence
  ENSG00000242641_43 (sequence is synthesized)
agccaagaaaaattctatagtaatacttgtctgtaatttctctatatttaaataaaatatcatttctatcttggaggtttgatttggccatttaaaaatgctaatgttttattgtttttt

SEQ ID NO: 955064 - DNA, 120 bp, Artificial Sequence
  ENSG00000242641_44 (sequence is synthesized)
caaaaaaatactacatgcatgctcatagtataaacatcaatgtttcattaggatatatagtgaaaagtcagtaactttacaacctctgtttcaaacccaaccagtaatttaagttgtttt

SEQ ID NO: 955065 - DNA, 120 bp, Artificial Sequence
  ENSG00000242641_45 (sequence is synthesized)
cataacaaagtgttattatttatcttctaatacctataaaatatttatttactccccaaattaaatagagtgttggttcttcaatgaaggtatgaagttactttcaattaaatatgcagt

SEQ ID NO: 955066 - DNA, 120 bp, Artificial Sequence
  ENSG00000242641_46 (sequence is synthesized)
ttgattagaagaaaaaaaaatccatcagatctcagccaagctcttttggatgattatttttcttcaaaatcaaatacactaaaatttccaaacagtaacagttacaatgtttcagtttct

SEQ ID NO: 955067 - DNA, 120 bp, Artificial Sequence
  ENSG00000242641_47 (sequence is synthesized)
tttaaggtagcctgaactgagacacattaaggtttatatctaatttcatagttctgttcagtaggaaataagtaaattagtttaaaggactgatccatatcaggagatcaggactggaca

SEQ ID NO: 955068 - DNA, 120 bp, Artificial Sequence
  ENSG00000242641_48 (sequence is synthesized)
aagtgttaatttatctacagattttaccaggcagattgccaatatccaagttcattagacaggtcctaggactaataagaactcttgggggctacaatgtgaaatacctgagtatatgag

SEQ ID NO: 955069 - DNA, 120 bp, Artificial Sequence
  ENSG00000242641_49 (sequence is synthesized)
tcaggtaaagactttagaaagtttggcttctactctcatattcccaggagttgaatagattggagtggaaaaaatgtggtcaaaaactagtgattttggattagaagtagggcataaagc

SEQ ID NO: 955070 - DNA, 120 bp, Artificial Sequence
  ENSG00000242641_50 (sequence is synthesized)
tcctattattgcacttgggcaatattaactggattgcaagaaactgtaatatgcagaaacagcatatttcccttagggagtacattttgttaaacttagtattcttgctacctgttttgt

SEQ ID NO: 955071 - DNA, 120 bp, Artificial Sequence
  ENSG00000242641_51 (sequence is synthesized)
tacctaagcttaatggacctggccctagactttagcttggtgcatggtgaaaattgaccttaagcaactgcagcattgtccaaatatttggtttcacatagaccagttttggttcttgtt

SEQ ID NO: 955072 - DNA, 120 bp, Artificial Sequence
  ENSG00000242641_52 (sequence is synthesized)
tctgtgtgactttgaggggctctttaagaaatccaaggacaaggtgccacatttattaaggccccgccattcacaatgcatgatgctagagcctgacagtgcaccatgctagagactgaa

SEQ ID NO: 955073 - DNA, 120 bp, Artificial Sequence
  ENSG00000242641_53 (sequence is synthesized)
gagacataaaaaaaagaaaaggcagagttcttgctatcaggttcttaaaattttctttgttttggttaaattcttgattggattttttcactaaatgtttggccctattaaaaataagta

SEQ ID NO: 955074 - DNA, 120 bp, Artificial Sequence
  ENSG00000242641_54 (sequence is synthesized)
aagaaaaaatgaaggaagaatggaagagagggagaataggaaatgaatgaaacaaagccaagtaagagatacgtctactacagacctgcaagttggcagtgcttgcagaagacagttgac

SEQ ID NO: 955075 - DNA, 120 bp, Artificial Sequence
  ENSG00000242641_55 (sequence is synthesized)
atattctagcctggttcacattttctggttaacttttgagcatagaataaagaatataataaaatgcttttttttttttttgcacaatgaactttaaacaaatcaggagagtatattggt

SEQ ID NO: 955076 - DNA, 120 bp, Artificial Sequence
  ENSG00000242641_56 (sequence is synthesized)
aatttagagaagtagcaattctcattaaatctgtttttcattgaattatcatgcccttaaaattatatgatagattattatcttcggtagtattagtttaaataagaattatatacaacc

SEQ ID NO: 955077 - DNA, 120 bp, Artificial Sequence
  ENSG00000242641_57 (sequence is synthesized)
aaaatatcagtaaggctaattctctgagaccataagagaaccaagtcaatatccccatagctacatcatattgatcattcatttgatttaagaagaaagaagacaaatatgttagtgaaa

SEQ ID NO: 955078 - DNA, 120 bp, Artificial Sequence
  ENSG00000242641_58 (sequence is synthesized)
gggagacaaatgagtatgtgcctggcctggccaattcctgactcatttacagaggaagctaatataactctcttactcattttatgggaaatatgatagatctgattatataatttatgc

SEQ ID NO: 955079 - DNA, 120 bp, Artificial Sequence
  ENSG00000242641_59 (sequence is synthesized)
ctcctttcagacttcctacaccccactaattgtctcttcctttcttttctccaccttttgctcaggtatttggcagttattgcacttttttggatcttttttttaaggatgttactatca

SEQ ID NO: 955080 - DNA, 120 bp, Artificial Sequence
  ENSG00000242641_60 (sequence is synthesized)
atcttttgcctacatctaaatgacttacctatgaagaagatcccatttttagccttaatatttgcaaattacttgagagatggagtctcactctatcacccaggctggaggacagtggca

SEQ ID NO: 955081 - DNA, 120 bp, Artificial Sequence
  ENSG00000242641_61 (sequence is synthesized)
caggaagttgaattatcttgattaaatgggcagaggacacatgcactactgaaataatagattgaggaaaagtgacaccaaaaccacatgtactgaaattcgggaagtaatagtttacct

SEQ ID NO: 955082 - DNA, 120 bp, Artificial Sequence
  ENSG00000242641_62 (sequence is synthesized)
gaaggaaatcagagtgctgataccttaaacagtgttatgttattcaaattctgatcgttttgttgtgttccaaatgttctgtgtatgcatttcttaaattacaattaaaatgaaaaagac

SEQ ID NO: 955083 - DNA, 120 bp, Artificial Sequence
  ENSG00000250665_0 (sequence is synthesized)
aaccacaaactctcagggttgaactccagattctctcaatagctcccacaatgttctctgctctaaggaaagaaacgaatggacccatctagtttaagagttcaagatttcagcttgaga

SEQ ID NO: 955084 - DNA, 120 bp, Artificial Sequence
  ENSG00000250665_1 (sequence is synthesized)
tttaagagttcaagatttcagcttgagagagggagccaggaggagatgactgcatcataggggcaggtttttcccatgcggttctcatgattgtgaatgggtctcacgagatctgatggt

SEQ ID NO: 955085 - DNA, 120 bp, Artificial Sequence
  ENSG00000250665_2 (sequence is synthesized)
ccttctgccatgattgtgaggcctctctagtcatgtggaactaaattcaatttggacctggaccagcgagccagcaagatgtcttgtctctccttcagccagtgtcaactttgtcacctg

SEQ ID NO: 955086 - DNA, 120 bp, Artificial Sequence
  ENSG00000250665_3 (sequence is synthesized)
cttcagccagtgtcaactttgtcacctgaaagagctcaacttgagctggaatagccactttgaatatgggtatgacacatgaatggaaagttggtgttggctatcagccaggagcttaga

SEQ ID NO: 955087 - DNA, 120 bp, Artificial Sequence
  ENSG00000250666_0 (sequence is synthesized)
taggcgataactgccgtccttctctgctgtctgcccctaccttgggccccaaatggctcagcactaaagtgccttgagcaggctccagcccaaaggtggcctccatggttaccacttccc

SEQ ID NO: 955088 - DNA, 120 bp, Artificial Sequence
  ENSG00000250666_1 (sequence is synthesized)
actctgctgccctgcctcgctttcctcctcggccttcccggatggatgaccgatgtcattcccaggttccctaacactcaagcctagcccctcagtttctagcaagcatcaagcttcact

SEQ ID NO: 955089 - DNA, 120 bp, Artificial Sequence
  ENSG00000250666_2 (sequence is synthesized)
tcgcaattcatccacaccacagtcctgtaagaaggctgcaaaacatacagcagaaaggatggcttgaaggcaattgatgtttgtaaaaaaatccacaacaggatccaagctgaagaggtg

SEQ ID NO: 955090 - DNA, 120 bp, Artificial Sequence
  ENSG00000250666_3 (sequence is synthesized)
aacacgtcagcctggtgggacaattctcagcatgtgcaaacataggtaaattctagcctatgttacattaaaaacaatgtcagtgcattttttcatgttaaagtttttttcaaagctaaa

SEQ ID NO: 955091 - DNA, 120 bp, Artificial Sequence
  ENSG00000258416_0 (sequence is synthesized)
tacagaatgactagacagaaaatacttccttagttctgtaacaagcaatgattcctggagtgggaaatgttcttgtgggaccagagctcagttgcagcctttgcagactaatgctcctga

SEQ ID NO: 955092 - DNA, 120 bp, Artificial Sequence
  ENSG00000258416_1 (sequence is synthesized)
aagccagggaactggggagatgccaaagtaatcactttctgcttgctcaagtttgcctgcagttttcaattggatgcagtgccttccatttcccaccctacatttttgcagagctgtgac

SEQ ID NO: 955093 - DNA, 120 bp, Artificial Sequence
  ENSG00000258416_2 (sequence is synthesized)
actgtacttcagagaagagctacaaatctacatccacatgctggcagaaatccagaaggatgcacactcagtcatgacagcatctacgagaccaggatggtgggcttctgattaaaggat

SEQ ID NO: 955094 - DNA, 120 bp, Artificial Sequence
  ENSG00000250668_0 (sequence is synthesized)
gtggggtgagagagctgccctaaggaactccaggcccaaaagagagagcaagtgggattagctgcttattgtgtaaacttagaaagggaaaacagaattaaagcttcactgagaagatga

SEQ ID NO: 955095 - DNA, 120 bp, Artificial Sequence
  ENSG00000250668_1 (sequence is synthesized)
acctgccgatgaggtgtgcagagaactttggctgcacaagttaagaggaagaggctgagtctcagctcagagagtgctggtaatgccaagcacagcagagctgccagagggatctacttg

SEQ ID NO: 955096 - DNA, 120 bp, Artificial Sequence
  ENSG00000250668_2 (sequence is synthesized)
gaatctggggaggccctggggagactaactggtacaatttaaagagatgcaaagcaaatgatatgcggggcaatcatgtgaaaagcctgctgccttacaggatggactccagctgctcag

SEQ ID NO: 955097 - DNA, 120 bp, Artificial Sequence
  ENSG00000250668_3 (sequence is synthesized)
ccggatggagtgatggacactctaactcactactccgccgtccaatacagtccagattgttcaacaactctgagaataaatggtcttttttaaaaaattggtgtcaaacctactgtactg

SEQ ID NO: 955098 - DNA, 120 bp, Artificial Sequence
  ENSG00000250668_4 (sequence is synthesized)
ggttgatgtgaaattgaaattgaaataagttgtatataaaatgtctggcacatagtagtgatcaataaatattaatcccttccccagaccaatgctgtatttccatttctggggcacatg

SEQ ID NO: 955099 - DNA, 120 bp, Artificial Sequence
  ENSG00000250668_5 (sequence is synthesized)
ccacattgtctaaatcaatgttttattcactcatacatcaaagataatggaaacacttatattttagaaagaacttactgtacattttatattctttttggtaaattgaataaacactct

SEQ ID NO: 955100 - DNA, 120 bp, Artificial Sequence
  ENSG00000250668_6 (sequence is synthesized)
tcagagatatataaacctagatttcctgatagactttgcattagaacattggtggaagagaatgcaccagaaaatctcctctttaggtgcccacttctgagctttagtcctccaacccca

SEQ ID NO: 955101 - DNA, 120 bp, Artificial Sequence
  ENSG00000250668_7 (sequence is synthesized)
gctcctgactgctgctctcaagctcaagtgggagaattaagacagcctcattcactgctcagcacttcctttgctctgatgatcatcagaaatcatctcagtcttccttgcgctgctcct

SEQ ID NO: 955102 - DNA, 120 bp, Artificial Sequence
  ENSG00000250668_8 (sequence is synthesized)
tcttttcctgaagttccgatgctccagcttcaatcctcaaacttggaaaaaaaaaaaaaaaaggaaatatctgtagtccttgcaactgctttttgaagttgtgctcgggcccctgttgtt

SEQ ID NO: 955103 - DNA, 120 bp, Artificial Sequence
  ENSG00000250668_9 (sequence is synthesized)
tctctactgaagcttgcagtgtgctttcatcggagctggcccctgccccagccagcaccagccctcaaagacttttttattctaacatagcccgagtatgttaggaaactagagctgcat

SEQ ID NO: 955104 - DNA, 120 bp, Artificial Sequence
  ENSG00000250668_10 (sequence is synthesized)
aaccactgcctcttaactctgctagccctggcatcttatctgtatgatttctgcagtgatgggagggaagctagtagctctctagttcattaaacggaacgtctgtctaggaagatacca

SEQ ID NO: 955105 - DNA, 120 bp, Artificial Sequence
  ENSG00000250668_11 (sequence is synthesized)
ggaagatattttataaatgaatgtcgatatttttccttccaatgtaattagatattctgtttcaatctaaggctcttcttacaggcaaaaggaataatgaagctttcaaccatgatacaa

SEQ ID NO: 955106 - DNA, 120 bp, Artificial Sequence
  ENSG00000258412_0 (sequence is synthesized)
caaatggtctgtcctggacccaaaagccactctcctcaggcccttcctcctagtcccaccagccaaaaaacttggggaccccaaacctgttcttcactctctggcacctgtgctcatgtg

SEQ ID NO: 955107 - DNA, 120 bp, Artificial Sequence
  ENSG00000258412_1 (sequence is synthesized)
cagctcacagccagctcctttcaaggtagatttgggcccaaacatttcgggaagcatcaggagatgtccccaaatcccgaaatgtggtttgagtcccagtccctcatctctccagcctcc

SEQ ID NO: 955108 - DNA, 120 bp, Artificial Sequence
  ENSG00000258412_2 (sequence is synthesized)
aagccctcacctatgcaatggtgccttgcccggctcacaggttatgaaaaggggtgagacgagacagtgtcccctaaatacatctgacagcacttttgaatggaaaagagaaaaagaaaa

SEQ ID NO: 955109 - DNA, 120 bp, Artificial Sequence
  ENSG00000258413_0 (sequence is synthesized)
gtcgacttgcgccagcccagaggctggggaggcgtccgagcctccgtcccgcctcgtcgttgaagaaggttaaggacaagcgccagctcacctgcgctggggcagggaagggcagagtgg

SEQ ID NO: 955110 - DNA, 120 bp, Artificial Sequence
  ENSG00000258413_1 (sequence is synthesized)
ctgggctaccctatctgtgcttctggtgaggtgggcccagaaccatcgtgtgaataatgattgacctcagctagtggttctcatggagtgattgattttgcttcccagaggacatcagca

SEQ ID NO: 955111 - DNA, 120 bp, Artificial Sequence
  ENSG00000258413_2 (sequence is synthesized)
atgtctggagacatttccagttgtcactacttgagaggaagcgtgatcggcctctagaagggagagaccagggatgccgctgctcaatatcctataatgcacagaacagcttctacgaca

SEQ ID NO: 955112 - DNA, 120 bp, Artificial Sequence
  ENSG00000258413_3 (sequence is synthesized)
acggatccagagtttcacggcgccccctgccggacactgggggcgggaagggggaagtgaaaagggagacctggatgacgcgtctgcggcccccaagtggtagagaatgaaagtttgagc

SEQ ID NO: 955113 - DNA, 120 bp, Artificial Sequence
  ENSG00000258413_4 (sequence is synthesized)
agtaactgattcaactcacataataatcttatgggagtgtgatgtaattctagccaataaaatgcaatgggaagttggccgagatacttctgaaaaaatcttctcttacccctaaaaaga

SEQ ID NO: 955114 - DNA, 120 bp, Artificial Sequence
  ENSG00000258413_5 (sequence is synthesized)
gacattcattttctgttgaaatgcattactttcctaaataaaatcatatttaccaacaacgagaaaaagagaaacatgcaagaaaccatctgtttgctgctagatgccattgtgtctgca

SEQ ID NO: 955115 - DNA, 120 bp, Artificial Sequence
  ENSG00000258413_6 (sequence is synthesized)
atgtgatatctggaactatggctgtcatcctggaaccatgagaggagttagctgaagaaacaggaggatggcaaagcggaaggatggaagttacctgaggctgaggacatcagtgcacct

SEQ ID NO: 955116 - DNA, 120 bp, Artificial Sequence
  ENSG00000258413_7 (sequence is synthesized)
ctgatttaaccaatccttgagacttcttgttatatgagataataaattctattgctatttaagtcatgtatagggctttaaaacatttcatagctgaaaacatcctgatatatattttat

SEQ ID NO: 955117 - DNA, 120 bp, Artificial Sequence
  ENSG00000258413_8 (sequence is synthesized)
atttttatttgatatgtggaagagaaaataaaatatgggaggaaagacactaacctcctttgggggcaggctctacaattgtccagtaataaaataattttctttgctgtgcttccagaa

SEQ ID NO: 955118 - DNA, 77 bp, Artificial Sequence
  ENSG00000258410_0 (sequence is synthesized)
gagatacagcgaaggcggagcagtgttcacctcagcacagacccgggcgggcgggcgggccggtggcacactgcctc

SEQ ID NO: 955119 - DNA, 85 bp, Artificial Sequence
  ENSG00000258410_1 (sequence is synthesized)
atgcctggctgctgggtgctagagtctgccggtgacagagactgcagcatgaccagagtggcttttctggctttgcccgcccagc

SEQ ID NO: 955120 - DNA, 120 bp, Artificial Sequence
  ENSG00000287703_0 (sequence is synthesized)
atagaaaattaacaccatgtgaaggtgaaggcagagactgggtgatgcttctataaaccaagaaactccaaggactgtcagcaaaccagcagaagctaggagagaggcatggaacggatt

SEQ ID NO: 955121 - DNA, 120 bp, Artificial Sequence
  ENSG00000287703_1 (sequence is synthesized)
tctcctcacagccctcagaagaaaccaaccctgtcaccattttgatcttggactttagcctctggaactgtgagacaatacatttctgtttgtttcagccacctagttcatagtactttg

SEQ ID NO: 955122 - DNA, 120 bp, Artificial Sequence
  ENSG00000287703_2 (sequence is synthesized)
aagtgacctttacaccactctcacttagagatgaggtctgtgtcccctcctcttgaaattgagtggcttttgtgactgtgtacacaggtagagtaaactgcagagctgcctgtctgtgac

SEQ ID NO: 955123 - DNA, 120 bp, Artificial Sequence
  ENSG00000287703_3 (sequence is synthesized)
ttccaaggctaggtcataaaaggagataaagcttcttcctggctggttgggctgcttgctcttgaagccttcagtctctatgcacgcagcatgccttcccagcctcctgtggttgtagag

SEQ ID NO: 955124 - DNA, 120 bp, Artificial Sequence
  ENSG00000287703_4 (sequence is synthesized)
tgtatagaaggcagttggatcactatggacagcgggtaagagctgaggaagcagcctccgccaggtggtaacatggaggaccctgaagtgccctgagggttcgaggtcttggacttgcta

SEQ ID NO: 955125 - DNA, 120 bp, Artificial Sequence
  ENSG00000287703_5 (sequence is synthesized)
accactcacaacagttccttgaggtaagtatggttacacccattttacagatgaggaagctgagtttggagagatttagtaatttacccagggccatatggaagcaaggtggagctgcag

SEQ ID NO: 955126 - DNA, 120 bp, Artificial Sequence
  ENSG00000287703_6 (sequence is synthesized)
ttccactccagtgccagaggtcaagggaaaatgcactctcccacggggcatcttggcggtgaggtgccaggaaagagttttaagtagaaagatgacacaatcaaacctttgtttggaaga

SEQ ID NO: 955127 - DNA, 120 bp, Artificial Sequence
  ENSG00000287703_7 (sequence is synthesized)
tggatccaatgtggggtgaccagaaaggaggtgttatagtggtccaggctggaactagggcagggactgtgggctggagaggcagggctggataagagttacatggcaaaggacaaatcc

SEQ ID NO: 955128 - DNA, 120 bp, Artificial Sequence
  ENSG00000287703_8 (sequence is synthesized)
ccagcacattgggttggagtggacagagcagtgggagattctgaggttttcagtggtgtggcaggaaggatgatggcagagacaaggaggagtggaggaagaggaggttttgggggcaga

SEQ ID NO: 955129 - DNA, 120 bp, Artificial Sequence
  ENSG00000287703_9 (sequence is synthesized)
tgagagcttcacagcctagaagtagccctgtcctggcactgcggaagagcctctgtccagacagcagtgcctgaggtcatctgtggtgtggaattctatctttctttcttaatggtttcc

SEQ ID NO: 955130 - DNA, 120 bp, Artificial Sequence
  ENSG00000287703_10 (sequence is synthesized)
ctgtggtgtggaattctatctttctttcttaatggtttcccaggcaggggccatatcttcctgtttactcttttaagaattatttgaaatggagtgtatgtgtgtgtgtgtgtgtgtgtg

SEQ ID NO: 955131 - DNA, 120 bp, Artificial Sequence
  ENSG00000222044_0 (sequence is synthesized)
gacaactagtggggatgaggagcagcgtggacaggcccaaggagctgggggacagatggtggtgacagggtctcactctggggcccaggctggagtgcggtatcatgatcacaactcact

SEQ ID NO: 955132 - DNA, 120 bp, Artificial Sequence
  ENSG00000222044_1 (sequence is synthesized)
gcagcctcaacctcctgggctcaaagatggctcacagatggctgctttgatgtttacaaggaggtgttgcgtcacaggttgggaggtcatgaattatgtcatgctccatgtgggggacat

SEQ ID NO: 955133 - DNA, 120 bp, Artificial Sequence
  ENSG00000222044_2 (sequence is synthesized)
gaattatgtcatgctccgtgtgggggacatgaattatggacggcagtaagggattccagaggcagctcaccagtggcccacggagcccttctcagcttggcctccccacctcccaccgtg

SEQ ID NO: 955134 - DNA, 120 bp, Artificial Sequence
  ENSG00000222044_3 (sequence is synthesized)
gccacccctcctgcccctgcaggccttcataactgcgcatccaggcagcttccttgctgaagcaccctctccgcagaactcctgctcattcctcaagacccagctcgactgtctgtcctc

SEQ ID NO: 955135 - DNA, 120 bp, Artificial Sequence
  ENSG00000222044_4 (sequence is synthesized)
gtccccaatcagggtgtggacagggcctatgcctcaagcatcctggtttccctgccccatgcccagtgttgggcctaaggaatagcagagctcagtggactatgtgcctgactgtgggca

SEQ ID NO: 955136 - DNA, 120 bp, Artificial Sequence
  ENSG00000222044_5 (sequence is synthesized)
gagaccccggtctctcctgggcacactcagcctcgaggcagcagctcggctcctgactgatggattcaggggcaggtgatgggtgtgaagcagtttcccctgtcagatacccgctgtgca

SEQ ID NO: 955137 - DNA, 120 bp, Artificial Sequence
  ENSG00000222044_6 (sequence is synthesized)
tttttgggaggaccgtaacagtggaactccagagctctcctgggaagatggctgtggtggaaggtgagaggacactggccagttagaaaatggataaaagcaggccaggtgtggtgcagt

SEQ ID NO: 955138 - DNA, 90 bp, Artificial Sequence
  ENSG00000222044_7 (sequence is synthesized)
agttagaaaatggataaaagcaggccaggtgtggtgcagtggttcacatctgtaaccctggcactttgggaggccaaggtgagagaattg

SEQ ID NO: 955139 - DNA, 120 bp, Artificial Sequence
  ENSG00000222042_0 (sequence is synthesized)
gatgaatacatgagggataggtgtgtctaagactatacagctaataagtgattggaataaatagaagcattgacatcctgagctgtaagatccttccacttcctgtctggttccctttga

SEQ ID NO: 955140 - DNA, 120 bp, Artificial Sequence
  ENSG00000222042_1 (sequence is synthesized)
tcccagcctctctgacatcactggagaaatgccagcctatggaagacaacctctgagtctcctggtgccaaaaccaagaacttacttgcatctacatgtaaatcagattttcccttgggc

SEQ ID NO: 955141 - DNA, 120 bp, Artificial Sequence
  ENSG00000222042_2 (sequence is synthesized)
agcatggagcaaatcccactgtgaaaaggtttcctccgtcttcctctttgtcagactgcatgctgagtcacaggatggaccagatgtgttggtatgagatgaagtcaggccgggagacaa

SEQ ID NO: 955142 - DNA, 120 bp, Artificial Sequence
  ENSG00000222042_3 (sequence is synthesized)
attccggtgtggtcctccagcccttctggattgtcataaagtgattttctttggcccatggaatgtggtagaagtgattaaacctaagactctaatagctgtgtgcactcctgctctctc

SEQ ID NO: 955143 - DNA, 120 bp, Artificial Sequence
  ENSG00000222042_4 (sequence is synthesized)
gttgaatccctgccaccaccataaggacaagtcctgagttagcctactgaaggatgagagaatatatgaaggagaactgagtcactccaactaaggccaaactacagcagcatgctacaa

SEQ ID NO: 955144 - DNA, 120 bp, Artificial Sequence
  ENSG00000222042_5 (sequence is synthesized)
cctgtctgttgtgtgcagaatcatgggcaaggtcagccaacatcaagtgagccaagaaagtcacccagcaaacttgtagatttggtagcaaaaaataaatatttatttttatttgtcaca

SEQ ID NO: 955145 - DNA, 120 bp, Artificial Sequence
  ENSG00000222042_6 (sequence is synthesized)
aggacctgcacctccgccatcttcggcagccgcttgggaaaaagcgcttctcccatttttaaagctatgtcccacgtcttctccatttcaccccaggtggagctgcagcccagctggaga

SEQ ID NO: 955146 - DNA, 120 bp, Artificial Sequence
  ENSG00000222043_0 (sequence is synthesized)
cggctctacccagcgccgcggtcctggctctggccagacgtgggggaagccggttgcggctgtccctcccgggccgcggttccctagctcccccgcccccgtcccggcaccaccgcaggg

SEQ ID NO: 955147 - DNA, 120 bp, Artificial Sequence
  ENSG00000222043_1 (sequence is synthesized)
tcccccgcccccgtcccggcaccaccgcagggcccagagggccgaggcagcacctgctgggacgggagtcccggcggcggcagctccaagtccatcatgatgagctgtggaccgtgtgtt

SEQ ID NO: 955148 - DNA, 120 bp, Artificial Sequence
  ENSG00000222043_2 (sequence is synthesized)
gccgaggcgcggcgcggacagggcggctctggtggcggcggcggcggcggtggcggctgcgtcggcggctcctccgggctccccggcactcgctcaggtcgtcaaaggcaaacggagaag

SEQ ID NO: 955149 - DNA, 120 bp, Artificial Sequence
  ENSG00000222043_3 (sequence is synthesized)
caaacggagaagcccctttaggtcggagagtggtcagtattgcccacccagagctgggagaaaaacgggaaccccaagagaacctcttcccaccaaagcgcagccaccacgccacagatg

SEQ ID NO: 955150 - DNA, 120 bp, Artificial Sequence
  ENSG00000267414_0 (sequence is synthesized)
cgccgccgccgccgctgctgctccatggccgcgcccgccccgcgcccccgccgcgtcccgtcgccgcccgcccgcgtccccgagaattggacacttgatgaagggaaggacacggagaga

SEQ ID NO: 955151 - DNA, 120 bp, Artificial Sequence
  ENSG00000267414_1 (sequence is synthesized)
aagggaaggacacggagagatgacaaacgcagactggcatgcagttgttttcagggtgggaagaacaaagtggaatgtcttcagttcttacaaaatatggtggcatttgtaatctctgag

SEQ ID NO: 955152 - DNA, 120 bp, Artificial Sequence
  ENSG00000267414_2 (sequence is synthesized)
tttttgtatttggcctacaaagggggtcttttcagggaaacacgaatggaacccttcagagacatgtctacattgtaaaacaatataggatagatacggattcgggaaggtctgcaaatg

SEQ ID NO: 955153 - DNA, 120 bp, Artificial Sequence
  ENSG00000267414_3 (sequence is synthesized)
gttccgctcaaagaacttggggtaaagttgaccgaggactcggattctgagaggactcctatcacgttcttcatgagagttttaggctatttggactgaggaatgatttggaggtacgtc

SEQ ID NO: 955154 - DNA, 120 bp, Artificial Sequence
  ENSG00000267414_4 (sequence is synthesized)
gggggcattccctcactgaggccatcagtggctgcctccctgcattggctgctggtttgagttccttcacagaacttcttcgtcaagtttttcataggaacgctgcagtgaagtggagtg

SEQ ID NO: 955155 - DNA, 120 bp, Artificial Sequence
  ENSG00000267414_5 (sequence is synthesized)
aaagagactggggattgaagggtgaaccccttccagccccaatcccatcccgattcctgtctggatgcagattcagtctgactcagaacggatagttcacccttttactgatccaagtgc

SEQ ID NO: 955156 - DNA, 120 bp, Artificial Sequence
  ENSG00000267414_6 (sequence is synthesized)
tctgtcctctttttttcagaggaatgttctgactggctacaaacttttcttctgtcactgcaggacctcccgtggagcaattttcgataggtcttctactatgcttttttaccgcgtcat

SEQ ID NO: 955157 - DNA, 120 bp, Artificial Sequence
  ENSG00000267414_7 (sequence is synthesized)
tgttattgctgagaaaataatgcttagttaggaaaaaaaatagcagagcatatgagctgatgatagaagtagagatcaaggcacagaatacaatatcaaaacaactattctctgtaatca

SEQ ID NO: 955158 - DNA, 120 bp, Artificial Sequence
  ENSG00000267414_8 (sequence is synthesized)
acccagatttctgaaatcctacaccaaagtccacagagaactaagatagcatgtggcctattccccgcgcttttccagtggagaaagtagccccagaaatcagaagggtttgtccacaag

SEQ ID NO: 955159 - DNA, 120 bp, Artificial Sequence
  ENSG00000267414_9 (sequence is synthesized)
catatggctgtctgatgtcatccaaaccagaactaaagcctattgccctagtcgtttcccttctataacctaggcgtatttacagagtcttccttcctgtggtgttgtgtggattagaaa

SEQ ID NO: 955160 - DNA, 120 bp, Artificial Sequence
  ENSG00000267414_10 (sequence is synthesized)
agtagctaagaaaagcacataccttattaaaattcactgcaatagatgataagtctgtagaattatagtgcagtagaagtttacctgtgagatcatctattagaatcccatctttttaaa

SEQ ID NO: 955161 - DNA, 120 bp, Artificial Sequence
  ENSG00000267414_11 (sequence is synthesized)
actgaggaaacgatgcactaccccaagccactaagttaattcaaagccaggaatagatgctatgttccttgacttcttatccaacgttccttccttgtatgtagcccatctctgaatcat

SEQ ID NO: 955162 - DNA, 120 bp, Artificial Sequence
  ENSG00000267414_12 (sequence is synthesized)
gtatgtagcccatctctgaatcatgagaggggagaggagagaaaggaaaggagggatattctcactctcttacatatatatgaaaaaatatatatgcctctgtgtgtgtgtgtgtgtgtg

SEQ ID NO: 955163 - DNA, 120 bp, Artificial Sequence
  ENSG00000267414_13 (sequence is synthesized)
cacccataataatgtttcagtgaacaacagaccacatatattactgtgatcccatataatataatactgtatttttgctgtacattttctgtgtttagatacacaaatacttaccattgt

SEQ ID NO: 955164 - DNA, 120 bp, Artificial Sequence
  ENSG00000267414_14 (sequence is synthesized)
cacagtatttagtacagtaatattctgtacaggtttgcagcctagaagcaataggctaccccatatagcctgagtgtgcagtagcctatatcatctagatttgtgtaagtgcactccatg

SEQ ID NO: 955165 - DNA, 120 bp, Artificial Sequence
  ENSG00000267414_15 (sequence is synthesized)
agatttgtgtaagtgcactccatgatgtttgcacaaagtcgcctactgatgtatttctcagaacacctccccataagctaattgacgcatgattggagatatatatatatatatatatat

SEQ ID NO: 955166 - DNA, 120 bp, Artificial Sequence
  ENSG00000267416_0 (sequence is synthesized)
ggagatttttcgccggccactccttcttgagccctgactgaaaagaaaaatgaacagggctaccttctgcctggactcacccaaaagccggtctcctgcagcctgaagctcttgtacctc

SEQ ID NO: 955167 - DNA, 120 bp, Artificial Sequence
  ENSG00000267416_1 (sequence is synthesized)
aaatttataccttccacccgctgagctggaatgcaaggccaggggtgggactagggactgcagacacctaagccctgcccagaaactgacatttctggagaatagccacccaccctgtgt

SEQ ID NO: 955168 - DNA, 120 bp, Artificial Sequence
  ENSG00000267416_2 (sequence is synthesized)
accctgggtccttctacattacctaagcaaggctctgagccaagggaacgccctcctctgacagaaaaataagactcctacaccaggccagttgcagtggctcacatctgtaatcccagc

SEQ ID NO: 955169 - DNA, 120 bp, Artificial Sequence
  ENSG00000267417_0 (sequence is synthesized)
gggagaggatgcagagtaggcagcgaagctgcttccccacacccgggtttgactctcccaccagcccgccgcctgggaaacgcgccctcggctggcatcggggtaccagagcccggctcc

SEQ ID NO: 955170 - DNA, 120 bp, Artificial Sequence
  ENSG00000267417_1 (sequence is synthesized)
tttcttcctttctttcttttttaaacggctctagcgcaaaccaggcagtgggtcagggcccagaggcgggggagggaagaggagagggctgtctccaactcggggagaagaacggccggc

SEQ ID NO: 955171 - DNA, 120 bp, Artificial Sequence
  ENSG00000267417_2 (sequence is synthesized)
gaccggagcggagggaacggcggcgccttttcagtggcggagatctcaggtgccccacgccagggtctactagagaatcggggcgaccgcaagctcagtcgcgggacaggcgaggctcgc

SEQ ID NO: 955172 - DNA, 120 bp, Artificial Sequence
  ENSG00000267417_3 (sequence is synthesized)
cagctccacgaagcgtcaccggcacgtatttttctttttttaacagcctgtttctaccattcagcctctgtctcacatgctttataaaaaaaaaagaagtaataaaactcctttaaatta

SEQ ID NO: 955173 - DNA, 89 bp, Artificial Sequence
  ENSG00000267412_0 (sequence is synthesized)
cgatcaacgctcagtgcagcctccacctccccggttcgagcgattctcctgcctcggtctcctgagtagatgggattacaggcgcccgc

SEQ ID NO: 955174 - DNA, 120 bp, Artificial Sequence
  ENSG00000267412_1 (sequence is synthesized)
tgcctcggtctcctgagtagatgggattacaggcgcccgccagcatgcccggctaatttttaattttttgtagagacctggtgttgctctcttggccaggctggtctcgaccttctgagc

SEQ ID NO: 955175 - DNA, 120 bp, Artificial Sequence
  ENSG00000267412_2 (sequence is synthesized)
ttacaggcgtgagccattgcacccggcctaagagatatttttaaatggtattatcaaataaatcattaaatagattcgggctatgcaccgtcttgcccacctgccttcaagccccacgca

SEQ ID NO: 955176 - DNA, 120 bp, Artificial Sequence
  ENSG00000267412_3 (sequence is synthesized)
ctatgcaccgtcttgcccacctgccttcaagccccacgcaggacgggaccccctcctgccacggtcctgggacggggcacctcgagctcactcagtggtgacagcgaggccgcctgtcgg

SEQ ID NO: 955177 - DNA, 120 bp, Artificial Sequence
  ENSG00000267412_4 (sequence is synthesized)
gccatgaccagcaggtggcagcacagaccagctcccgggagacctgtcctggctccagctcccagcgtcccagaaacaccgcagtctagacgctcgccaggcggaattcctcgcccctga

SEQ ID NO: 955178 - DNA, 120 bp, Artificial Sequence
  ENSG00000267412_5 (sequence is synthesized)
agtcagtctgcgtgtagacattcgcgataccagctcccagtcatcatttcccactctgcgtctcccaggctgtctcgccagggccctggatccctgggctgagcggcttagtaagggtcg

SEQ ID NO: 955179 - DNA, 120 bp, Artificial Sequence
  ENSG00000267412_6 (sequence is synthesized)
gggtggcggggaaccctgggcgccgcacccggtgcgaggggcccacttcccagaaagcagattgcgagagggaagccatccaaggccggtgccgggcgtggtcctttctgagaatgttga

SEQ ID NO: 955180 - DNA, 120 bp, Artificial Sequence
  ENSG00000267412_7 (sequence is synthesized)
cgtgagcccgttccccccctcccacccgccccctcgtccccaccgcctgataggaactgaaagtgtcaagtttagtgcccaggagacaggtgtctgcacgctcaggccgactgaaaccaa

SEQ ID NO: 955181 - DNA, 120 bp, Artificial Sequence
  ENSG00000267412_8 (sequence is synthesized)
acctggcctgggagaaacgtatcccaggggccacctgggtccctgaggccgctttggttcaaacctcttctgaaacctgtcagcatcttgcaacaataaaagagggtctcttgtgcctgc

SEQ ID NO: 955182 - DNA, 90 bp, Artificial Sequence
  ENSG00000267412_9 (sequence is synthesized)
agacagcaagaccccgtctctactaaaaaataaaaaaattagtggccgggcgtgatagctcatgcctgtaatcccaccactttgcgaggc

SEQ ID NO: 955183 - DNA, 73 bp, Artificial Sequence
  ENSG00000267412_10 (sequence is synthesized)
accccgtctctactaaaaaataaaaaaattagtggccgggcgtgatagctcatgcctgtaatcccaccacttt

SEQ ID NO: 955184 - DNA, 90 bp, Artificial Sequence
  ENSG00000267412_11 (sequence is synthesized)
gagcaagactctgtcttaaaaaagtaatgccaggtgtggcagtgcacacctatagtccaagctgctcgggaggctgaggcaggagtattg

SEQ ID NO: 955185 - DNA, 62 bp, Artificial Sequence
  ENSG00000267412_12 (sequence is synthesized)
gcaggagtattgcttgagtccaggtgagaccctgtctccaaaaaaaataaaaaattaataat

SEQ ID NO: 955186 - DNA, 120 bp, Artificial Sequence
  ENSG00000267413_0 (sequence is synthesized)
agcccgtcggaaaagcgcagtattcaggtatcaccagctgtttatttcttcagacatagttaaaatctaaaagaaaaaagaaaaaaaagtccaacattcagaatccccaagatgcatacg

SEQ ID NO: 955187 - DNA, 120 bp, Artificial Sequence
  ENSG00000267413_1 (sequence is synthesized)
aaaaaaaagtccaacattcagaatccccaagatgcatacgtaaatcctaatagaaaatgctcagttcaagaagttccattgaggtgaagcaatgatgcaaggcttttggcaaccgttccc

SEQ ID NO: 955188 - DNA, 120 bp, Artificial Sequence
  ENSG00000267413_2 (sequence is synthesized)
cagctcccagccacacatcgctccacttaccttgagtgacagcctccaaagaaaagtttccaccgcgccagagtcttgaccctgagtggcatcggcagggtctcctgcggcagaccaggg

SEQ ID NO: 955189 - DNA, 120 bp, Artificial Sequence
  ENSG00000267413_3 (sequence is synthesized)
tgcacgtgcagtgccgcccggacggcggcgaaaggacagcggtgcaccccgcccgaggccccagcgatccatcagggcggctgtacgcgggaagacgcttcatctcatccctagatggca

SEQ ID NO: 955190 - DNA, 120 bp, Artificial Sequence
  ENSG00000267413_4 (sequence is synthesized)
gcaggattctgaagctggcgcagccctgggcagccctttctggtctattttcctgaacagattgccaggggatacggcggctaaacagccaggcgcctccccggagcgcagctcagacag

SEQ ID NO: 955191 - DNA, 120 bp, Artificial Sequence
  ENSG00000267413_5 (sequence is synthesized)
aagagcaagccggacagacgccgctggcgaggcttcgggggtcagatcctgcagcttggacaccacattctctctttttgcacacagatgtgctactgtgtaaaaataagcaaacaaaca

SEQ ID NO: 955192 - DNA, 120 bp, Artificial Sequence
  ENSG00000267413_6 (sequence is synthesized)
aaaacgggagttcagcttcttggagaatgtgtcatggtcaagaccagtgattctggacggtgacaaaagtcctggaggcctgagtgcacagaggacacacgcacagatgcacatgaactc

SEQ ID NO: 955193 - DNA, 120 bp, Artificial Sequence
  ENSG00000267413_7 (sequence is synthesized)
atggagaaacactggtcttctctgccagggaccaggctggccatgcaggaagggagcaggatgtgaagattcagactttagctccagcttcactaccgtcctgccgtgcactttggggga

SEQ ID NO: 955194 - DNA, 120 bp, Artificial Sequence
  ENSG00000236283_0 (sequence is synthesized)
gcctgaatcagaaacagaaacttctagactgatgtggttcagtggtgcttacataggctattgtttactacatctgcaccaacctttcaggaagcatttggcttgtacatttagctctgt

SEQ ID NO: 955195 - DNA, 120 bp, Artificial Sequence
  ENSG00000236283_1 (sequence is synthesized)
ggcccactgaagagaatttcctgtgggcagtggggtgaggaaccctgccttaatctgcttctcagtcatctgtggaccacacctacaccagcgcttccttctgcgcatcctatggcacct

SEQ ID NO: 955196 - DNA, 120 bp, Artificial Sequence
  ENSG00000236283_2 (sequence is synthesized)
agcacagtgctgaacttgtaaaaattctggaggttagaagtccaagatcaaggtgccatcaggattgatttcttgtgaggcctttcttcctggcttgctgtgtcctcagatggctcttca

SEQ ID NO: 955197 - DNA, 120 bp, Artificial Sequence
  ENSG00000236283_3 (sequence is synthesized)
tctgtgtatgtgcagagagaaaaagatttctctggtggccttctaaaaaaaaatcagtcttcagaggcaaagttggacatcccaaagatggcatagataaacatgaccaggaagagcagg

SEQ ID NO: 955198 - DNA, 120 bp, Artificial Sequence
  ENSG00000236283_4 (sequence is synthesized)
aggccgatgttaaacaacgcaggaagggacatcatcaaagcaaagagcagcgtgcggatcccctttgctcctttgatcagacgtaggattcggccaatcctggcaagacggatcactcgg

SEQ ID NO: 955199 - DNA, 120 bp, Artificial Sequence
  ENSG00000236283_5 (sequence is synthesized)
gccatcttcaaaggtactgcctacctgaacctgccttgtcccaaaggacacacttcaatctggggagagtttaaagttgtagacatatccattttcatttaaggaatatgaagatcaggg

SEQ ID NO: 955200 - DNA, 120 bp, Artificial Sequence
  ENSG00000236283_6 (sequence is synthesized)
aggcaaaatatagagatatagagaggaaaaactgagagatgatcagaaattcagacgcattcggaatgagcacccttgaccataccaagaacaaagactctataaaaatgtgaagtctta

SEQ ID NO: 955201 - DNA, 120 bp, Artificial Sequence
  ENSG00000236283_7 (sequence is synthesized)
ttattgttcatccatgttctacgtgggatccacccaagacattgaaaactgtacagaacagggtgaaattgaatcagatcattctgtactcctaacaaggtccaccccatgagagacttg

SEQ ID NO: 955202 - DNA, 120 bp, Artificial Sequence
  ENSG00000236283_8 (sequence is synthesized)
cagcagaattaatgacactgtatattttcctctactaacaacaacaagaacaacaacaacaacaatctaggaaaatcaaaggcagcccgacatggaaaaaaacacaaaatgaatatttgg

SEQ ID NO: 955203 - DNA, 120 bp, Artificial Sequence
  ENSG00000236283_9 (sequence is synthesized)
attacaaatagtgtgatgggaagaacacactgccaaaagtccacctagtatgttgaaattactgtttctagcacatataagatttgctgccaatttgtactgacttctgaaaaatacttt

SEQ ID NO: 955204 - DNA, 120 bp, Artificial Sequence
  ENSG00000236283_10 (sequence is synthesized)
atccattgtcttcttacatcagaatcaactccctaaattcttcagcactggctttgtaaactggtttctggtctttgtttctggtgaataacaataaggcaatgtagaagaaagcaagtc

SEQ ID NO: 955205 - DNA, 120 bp, Artificial Sequence
  ENSG00000236283_11 (sequence is synthesized)
ccatcaaagggagctccagtctctatagactgataaaaaggagcctcagaacttaaacctctggatcaggagaatcaaaaaacatcatgcctctctatgatacccgcccaaactctttca

SEQ ID NO: 955206 - DNA, 120 bp, Artificial Sequence
  ENSG00000236283_12 (sequence is synthesized)
gctaaacagaagcactttcaaatatacaattccggcagagtctgcatttttgttgtaagagcctcatgtttttagtcagacacatccgggagttgagtgctttggatgacacaaaacaaa

SEQ ID NO: 955207 - DNA, 120 bp, Artificial Sequence
  ENSG00000236283_13 (sequence is synthesized)
acaagcagatctgacctcttcccccagctcctgcatccactgaaggctctgtcacttcctcactctcagctcacttgtattctgattctgttctatagacaaaaccttggtttacattaa

SEQ ID NO: 955208 - DNA, 120 bp, Artificial Sequence
  ENSG00000236283_14 (sequence is synthesized)
tatataaagctgctcaggagaatccttcttaggaatcactctgaacattaaaactgattcatttaaaaacgcacacccacacaaatgggaaaagcagtcttcgcttgcggattggaagaa

SEQ ID NO: 955209 - DNA, 120 bp, Artificial Sequence
  ENSG00000236283_15 (sequence is synthesized)
tacccaaagcaatctacagattcaacactattcctatccaacatcattttttaaatttagaaaaaaactattatgaaattcgtatggaatgagaaaagccccattagctaaaacaaccct

SEQ ID NO: 955210 - DNA, 120 bp, Artificial Sequence
  ENSG00000236283_16 (sequence is synthesized)
agccccattagctaaaacaaccctgaataaaaagaacaaagccagaggcatcacattatctgacttcaaactatattatgaggctacagtaaccaaagaagcatcatactagtacacaaa

SEQ ID NO: 955211 - DNA, 120 bp, Artificial Sequence
  ENSG00000236283_17 (sequence is synthesized)
ataaagccacacacctacaaccatctggtctttgacaaagtcgacaaaaataagcaatggggagaggattccctagccaataagtggtgctgagataactggctaaccatatgcagaaga

SEQ ID NO: 955212 - DNA, 120 bp, Artificial Sequence
  ENSG00000236283_18 (sequence is synthesized)
taagtggtgctgagataactggctaaccatatgcagaagaatgaaactagacccctacctttttccatatacaaaaactaacttgagatggattagagatttaaatgtaagacctcaaac

SEQ ID NO: 955213 - DNA, 120 bp, Artificial Sequence
  ENSG00000236283_19 (sequence is synthesized)
tataaaaatcctagagaaaacctaggaaatacccttcccgacattggccttggcgaggaatttatggctaaggcctcaaaagcaatcacaacaaaaacaaagactgacaagtgggaccta

SEQ ID NO: 955214 - DNA, 86 bp, Artificial Sequence
  ENSG00000236283_20 (sequence is synthesized)
gatatttacaaactctgtatatgacaaagttccaatatccagaatctgtaaggaacttaatttgacaagcaaaaaccaaataactc

SEQ ID NO: 955215 - DNA, 120 bp, Artificial Sequence
  ENSG00000236283_21 (sequence is synthesized)
tgtaaggaacttaatttgacaagcaaaaaccaaataactccattaaaaggtgggcaaaggatatgaacagacatttcccaaaagaagaagacaaacaaatagccaatgaacatatgaaga

SEQ ID NO: 955216 - DNA, 120 bp, Artificial Sequence
  ENSG00000236283_22 (sequence is synthesized)
aagcactttcaaatatacaattccggcagagtctgcatttttgtttcaacttacctataaaaggatacaaaaactgaagaacagagaggagcagataccctggaaagccgaaagttttat

SEQ ID NO: 955217 - DNA, 120 bp, Artificial Sequence
  ENSG00000236283_23 (sequence is synthesized)
tgaccaaagactgagtctcggaatgttttgattgtggagtttatagagttcaggctgaagttttataaaaataacttgcagcagcatggaggactgatgagaaagtagacagatgctgga

SEQ ID NO: 955218 - DNA, 120 bp, Artificial Sequence
  ENSG00000236283_24 (sequence is synthesized)
agcaggaaaactgaacagcaggtcactggccaaggagaatcaaagagctagatgctgagaataatgcagccataacgtgaaatctttttgaggctccgtggtggtcttaaaatatatcca

SEQ ID NO: 955219 - DNA, 120 bp, Artificial Sequence
  ENSG00000236283_25 (sequence is synthesized)
ttgaaaccacctatggagaaaggcccacatggtgagaaagtaaagcctcttcccaataccaaaattctgtaagtctgctacggtgacatttctggttaggagtcagagtggatgggacac

SEQ ID NO: 955220 - DNA, 120 bp, Artificial Sequence
  ENSG00000236283_26 (sequence is synthesized)
tgagcaataagtcatctgtggaccacacctacaccagcgcttccttctgcgcatcctatggcacctgtctacttcctgttttgggaatccccacagaggctagcacagtgctgaacttgt

SEQ ID NO: 955221 - DNA, 120 bp, Artificial Sequence
  ENSG00000236283_27 (sequence is synthesized)
ggtacccaagctctctctcctccacaatgacctgcccgcaaaaattatccatctcttcacctggccactaaactgtttccttactgcaagtcagctcaagtttttgagatgatagtctga

SEQ ID NO: 955222 - DNA, 120 bp, Artificial Sequence
  ENSG00000236283_28 (sequence is synthesized)
gagataatctactgggatagtgggaaacaaagatacttttaatcaaggagatcttctttacaatttttgcttactgcaggctgctgtttgatctttccactttacaaaagagaatgtttt

SEQ ID NO: 955223 - DNA, 120 bp, Artificial Sequence
  ENSG00000236283_29 (sequence is synthesized)
gaaatcgcaagccttctgccacaacttttaaaatgttaaatgctagatatgcatgctttctttctactttacaaataacaatgttagtaatgaaagttagttgcctttttgtaataccta

SEQ ID NO: 955224 - DNA, 120 bp, Artificial Sequence
  ENSG00000236283_30 (sequence is synthesized)
tccaaatctcatgttgaaatgtgaccaccaatgttagagatgggcctagtgggaggtgtttgggtcatggggcaggatctctcatgaatggcttggttgtcttcctgataatgagtgagt

SEQ ID NO: 955225 - DNA, 120 bp, Artificial Sequence
  ENSG00000236283_31 (sequence is synthesized)
ttggttgtcttcctgataatgagtgagttccactatgagttcatgggagatctggttgtttaaaagagcatggtacctcctccctctctctcttgctctctctgttcccatgtgatatat

SEQ ID NO: 955226 - DNA, 120 bp, Artificial Sequence
  ENSG00000236283_32 (sequence is synthesized)
tccctctctctcttgctctctctgttcccatgtgatatatcggctccctctttaccttttgccatcactggaagcttcctgaggcctccacaggagcagatgctggtgccatgcttgtac

SEQ ID NO: 955227 - DNA, 120 bp, Artificial Sequence
  ENSG00000236283_33 (sequence is synthesized)
attacccagcctcagatgttactttatagcaatgcaaatacgctaactttaataccacagtaggccaaaaacacattatctaatttaattctgctacaaatcctgctaaaatagtattct

SEQ ID NO: 955228 - DNA, 120 bp, Artificial Sequence
  ENSG00000236283_34 (sequence is synthesized)
tattttactgatgagaaaagtaagattcagggagatgaagtaactactttagcgttacacagtaaccaactgggaaattcaagcccaggtctttttgaatctttattttttacttttatt

SEQ ID NO: 955229 - DNA, 120 bp, Artificial Sequence
  ENSG00000236283_35 (sequence is synthesized)
cattctttaaactgtaaaagaagtacaagtatctaaacttaaaacatggaaattgtaaaatattttaggaaagaaccatttacgtattgttttggatgtatttttccatataaattatag

SEQ ID NO: 955230 - DNA, 120 bp, Artificial Sequence
  ENSG00000236283_36 (sequence is synthesized)
tgaggcaataaatatgtgtaatgtccctaatcactgagatacagttatatggtattatatacatacatataatggtattacacaccattatatggtattttctttgcttgagtggatgta

SEQ ID NO: 955231 - DNA, 120 bp, Artificial Sequence
  ENSG00000236283_37 (sequence is synthesized)
gcacaaatgataatttactgttaaatttatgactagacaattttgattgtatgctaagtaagcattttttgtggtttctttaatgtacatttgacattgtctactaagataaacttcagc

SEQ ID NO: 955232 - DNA, 120 bp, Artificial Sequence
  ENSG00000236283_38 (sequence is synthesized)
gcgggctgacagctggcacaccctcctgtcgccctccacccgcctgcagaaagcccactccctacagtcaccttgacattgctcacctgcctgggcctcagcccatgaccaaggaaactt

SEQ ID NO: 955233 - DNA, 120 bp, Artificial Sequence
  ENSG00000236283_39 (sequence is synthesized)
aagacccacctaggatgcatcacctttatctctggaagcctgtgttaactcattccagcagagatggctacttcctcttcagtgcttcttacaataccaactttattgcattacaatgat

SEQ ID NO: 955234 - DNA, 120 bp, Artificial Sequence
  ENSG00000236283_40 (sequence is synthesized)
ttgttttttaagccatctgcctcttttagcctgtgaccttggtttaagattaggagagtacctgataatgtttatttcctgtcttcttcacctctttcccaaatctggtattcctaacat

SEQ ID NO: 955235 - DNA, 120 bp, Artificial Sequence
  ENSG00000236283_41 (sequence is synthesized)
ggtttctaactagttagctttgtgaataaacccaggtttcagagtttttattcaaatatgctagtgttgaactttacatctatatgcattattattctcagacctaatttccatgttaat

SEQ ID NO: 955236 - DNA, 120 bp, Artificial Sequence
  ENSG00000236283_42 (sequence is synthesized)
cagctagaaggtcctggggcaactgtttctctgtaactatacctcttggtaattaagctgttcttacctacaatggagagaatcaccaccacaaagtcaaagatgttccagcctatagtg

SEQ ID NO: 955237 - DNA, 120 bp, Artificial Sequence
  ENSG00000236283_43 (sequence is synthesized)
tctgagggagacgagcttcagcacaaattctccagtgaacagaacaatgaacactaggttgatccgggacaaaactagggtcatgtatttgccctggtcatccgtttccaccatcatggt

SEQ ID NO: 955238 - DNA, 120 bp, Artificial Sequence
  ENSG00000236283_44 (sequence is synthesized)
gaccatgttgaggcagatgaggatcatgatgctgatatcaaagacttgtctggttacaaaatcaaagaccattccttggaatttgttctagaaagtgagagaagagaaataaggttacta

SEQ ID NO: 955239 - DNA, 120 bp, Artificial Sequence
  ENSG00000236283_45 (sequence is synthesized)
tatatatttcataaagaataatgcagtaaaattgtagataaagcccttccacatacgggatggatgtgcaccctcctcatattaccccaaacaattttgtgtgctttttttctcttcatg

SEQ ID NO: 955240 - DNA, 120 bp, Artificial Sequence
  ENSG00000236283_46 (sequence is synthesized)
ttaaaaaaaatggaaaaaaaatttatatagctaaacaaagcatatttggtttatataggtcctatggaaagacaaagctggatgagacataaattaaggctgggcgtggcaactcatgcc

SEQ ID NO: 955241 - DNA, 76 bp, Artificial Sequence
  ENSG00000236283_47 (sequence is synthesized)
cttgaggccaattaaaaaaaaattagcctggtatggtggcacaggcttgcagtcccagctacgagggaggctgagg

SEQ ID NO: 955242 - DNA, 120 bp, Artificial Sequence
  ENSG00000236283_48 (sequence is synthesized)
tggcacaggcttgcagtcccagctacgagggaggctgaggtgaatcacttgaccccaggtgtttgaacttgcagtgagctatggtcttgccactgtactccagcctgagagacagagtga

SEQ ID NO: 955243 - DNA, 120 bp, Artificial Sequence
  ENSG00000236283_49 (sequence is synthesized)
gaccctgtctcttaaaaaacaaaacaaaaacaaacacataaatttgtgacaattggctgataatatatgtagtctttgcttgatttgaataagtatgataatttttataaaaaatagtga

SEQ ID NO: 955244 - DNA, 120 bp, Artificial Sequence
  ENSG00000236283_50 (sequence is synthesized)
ctactaataacaaagatttacaaagcaggttaatatcaacagatatttagatagagaatacaccaattcatttatcaatattttagaaattttggtttataccttatttccctcccctga

SEQ ID NO: 955245 - DNA, 120 bp, Artificial Sequence
  ENSG00000236283_51 (sequence is synthesized)
aatacatcagtcatatttctattgaattctacctctctagctctgtgaatctatgtatgggcttgttaatttatctgtatttctttccatctgtccttctttacctatgccctgtgcttt

SEQ ID NO: 955246 - DNA, 120 bp, Artificial Sequence
  ENSG00000236283_52 (sequence is synthesized)
aacaaaaatgcatgactttaaacactttttttctttgtcttattaacaatcatctcaggaacaacatgctttcaaagattcttatattaatatggctagtaaatacagttttattaaaga

SEQ ID NO: 955247 - DNA, 120 bp, Artificial Sequence
  ENSG00000236283_53 (sequence is synthesized)
aatatattattaatcatttagagtaaaaacttaaaacttcatggcttaccaaaaatcaaaggtcatgaagtgaccatgttttaatttttaaagaactctagtaaagtcagttcaatcctt

SEQ ID NO: 955248 - DNA, 120 bp, Artificial Sequence
  ENSG00000236283_54 (sequence is synthesized)
tcccctcttaccctgctccctcacattccagctccaactactcttataaatatggtaaagtcaagtcacttagagaatttatggggccttgtcaagtcccagttctggcaattacaagat

SEQ ID NO: 955249 - DNA, 120 bp, Artificial Sequence
  ENSG00000236283_55 (sequence is synthesized)
ttgtgacttggggcatgattcgtatgttctttgggcctcagtttccttactccttaccaatctcagaaaatagctgagttagagtccagctctgtgaacataatctgtcattattacatc

SEQ ID NO: 955250 - DNA, 120 bp, Artificial Sequence
  ENSG00000236283_56 (sequence is synthesized)
attccatcatcatgaggctctacagagtatgcattctgaatatgccttattctgttttggtgtatttggtgaaacaaacaattttgatgacaccttttccctttctaaacaggtttggaa

SEQ ID NO: 955251 - DNA, 120 bp, Artificial Sequence
  ENSG00000236283_57 (sequence is synthesized)
tattttctagtcttaagaatggagggagcagagagtatagagggaggccttggagagtgggatgggaaggctagaggaggaggaaccaggtgtgctgttggtagcaggaaagtgaacctt

SEQ ID NO: 955252 - DNA, 120 bp, Artificial Sequence
  ENSG00000236283_58 (sequence is synthesized)
aaacttcatgttgaagatgactgaataataagacagaggggtctgggtccctggtggatattccagatctgggtgttcgtggagatatgagaaagcaataaacttcaattttgcttaaat

SEQ ID NO: 955253 - DNA, 120 bp, Artificial Sequence
  ENSG00000236283_59 (sequence is synthesized)
agacacattctttgtagctcttaccaaagagctgcatgccgaccacagcaaaaatgaagacgatgatggccaacaccaagggattgtagcaaccaaactgctgaagactggcgtggtctg

SEQ ID NO: 955254 - DNA, 120 bp, Artificial Sequence
  ENSG00000236283_60 (sequence is synthesized)
taagaaactgactagtgagggcagtaatcctgaggagaaacctaagaagaggtgagagggaagatgccaggagggagagatgccctgccgtgtgccaggtgtgccacctgagctgtctcc

SEQ ID NO: 955255 - DNA, 120 bp, Artificial Sequence
  ENSG00000236283_61 (sequence is synthesized)
tcaaggacatggaggattcaggatcctgataaaattgccagtgcaaaatcagacattgagttcactcattcttcaagtgtcactcctctttaaaaattaacagactttttttagaacaat

SEQ ID NO: 955256 - DNA, 120 bp, Artificial Sequence
  ENSG00000236283_62 (sequence is synthesized)
tttaggtttacagaaaagtctatcagaaagtattgagttcccacatcgagtgccctattgaatgtcttaaatatctgtcttcaaaatttttattgagaaataaattgagagaataaatag

SEQ ID NO: 955257 - DNA, 120 bp, Artificial Sequence
  ENSG00000236283_63 (sequence is synthesized)
gtcaacataaatcgaagatgtcaccacagattttctagacaaagtagctgtgctttgaatttaataagactacacaataaaggaagaaatattatttatactcatccagacaaaatatta

SEQ ID NO: 955258 - DNA, 120 bp, Artificial Sequence
  ENSG00000236283_64 (sequence is synthesized)
taaaaagtacgcaataaatgatcctcttcctgaacgacattggatgataataaaatctcttgtgagagagaggcaaagttggacatcccaaagatggcatagataaacatgaccaggaag

SEQ ID NO: 955259 - DNA, 120 bp, Artificial Sequence
  ENSG00000236283_65 (sequence is synthesized)
caaaaatgaagacgatgatggccaacaccaagtggtggtgccctgcaaaccaaatactgatggctcaaaccactcttcccaataagtaatacaacaccacatagcatttctttggcaaat

SEQ ID NO: 955260 - DNA, 120 bp, Artificial Sequence
  ENSG00000236283_66 (sequence is synthesized)
catgctacatgcaatttttccaggctccgagcacatcattggcaccaaaatagagcaaaggactgtgtgcactgccctgatttaggtgtggatgatgccacttactgcagcggggaatgc

SEQ ID NO: 955261 - DNA, 120 bp, Artificial Sequence; identical to SEQ ID NO: 329391
  ENSG00000236283_67 (sequence is synthesized)

SEQ ID NO: 955262 - DNA, 120 bp, Artificial Sequence; identical to SEQ ID NO: 329392
  ENSG00000236283_68 (sequence is synthesized)

SEQ ID NO: 955263 - DNA, 120 bp, Artificial Sequence
  ENSG00000236283_69 (sequence is synthesized)
ttccacccacgctgccctgccccgatctcacagagttatgaccgcctcgttgcagtccgttcctaagttagcttctcctttgctggggtctgaagcccagaccactcactctgggagaaa

SEQ ID NO: 955264 - DNA, 120 bp, Artificial Sequence
  ENSG00000236283_70 (sequence is synthesized)
gcaactggctatgtcatgaggaaattgaaaccacctatggagaaaggcccacatggtgagaaagtaaagcctcttcccaataccaagtgagtgagttatactaaaaggggatcctccagc

SEQ ID NO: 955265 - DNA, 120 bp, Artificial Sequence
  ENSG00000236283_71 (sequence is synthesized)
tatactaaaaggggatcctccagccccaatcaagttttcatatgactgcagcccctgtcagcatcctaactgcaacctcataaaagaccgtagcaatggccgggtgtggtggctcatgcc

SEQ ID NO: 955266 - DNA, 76 bp, Artificial Sequence
  ENSG00000236283_72 (sequence is synthesized)
cagcactttgagaggctgaggcaggtgggtcagctgaggtcaggagttcaagattagcattaactgggtgcggtgg

SEQ ID NO: 955267 - DNA, 120 bp, Artificial Sequence
  ENSG00000236283_73 (sequence is synthesized)
cagaaaagaccctagcaaggaccccttaaccaaactgctcccaaagccttggcccacacaagtgtgagataataatttatttttttaggccactaggttttggcattatttgttttacac

SEQ ID NO: 955268 - DNA, 120 bp, Artificial Sequence
  ENSG00000236283_74 (sequence is synthesized)
atttcaaaatattgtattctcaacgagaaaactcaacaaagaaagagacagacataaaatcactgacaatcctcccatgcagaggtaaataaagttaacattttagaaccctacagttta

SEQ ID NO: 955269 - DNA, 120 bp, Artificial Sequence
  ENSG00000236283_75 (sequence is synthesized)
gtcagattatacagtatttagtttgttgaagtgcatattcacatgtgcaaaaatagttttattgagtctgtcttagccccagacagaggctatgggaactggactttcacaaatatagag

SEQ ID NO: 955270 - DNA, 120 bp, Artificial Sequence
  ENSG00000236283_76 (sequence is synthesized)
agccctaatttgagctttttatcaaattatataattatgtagatcatacgctaagcctttgtagaattattatgtttcattattatttggttacagtccaggcgaggtgacttccaaggt

SEQ ID NO: 955271 - DNA, 120 bp, Artificial Sequence
  ENSG00000236283_77 (sequence is synthesized)
tacccagctctcttagaaataataaaagaaggctctatcttggcagaaattcaaatttagaaagctcttcctgatgtgtaatctgactcctttctgatattattgaagtccaaatttgga

SEQ ID NO: 955272 - DNA, 120 bp, Artificial Sequence
  ENSG00000236283_78 (sequence is synthesized)
tgagactagatataataattttcaatacatatctctgggaaagagtgactttttcctccaccttagaaatgagtctaagaggagtacttttgttttttgtgaaaaactggatgcgtgaca

SEQ ID NO: 955273 - DNA, 120 bp, Artificial Sequence
  ENSG00000236283_79 (sequence is synthesized)
ttctccacagtattcggttattggcttcattgctgtaacaaacagagcaccaatatttagagtttcaaacaagctaaaccttactttctctctttttaaattttccagaggtagatgtct

SEQ ID NO: 955274 - DNA, 120 bp, Artificial Sequence
  ENSG00000236283_80 (sequence is synthesized)
caatctttgttgggaagtcttctctaatatgttcaactaaataatcaaaatatatctttttttaggattcatcaccttaaacatcatttttgtaattattttatgtgctctgtatattac

SEQ ID NO: 955275 - DNA, 120 bp, Artificial Sequence
  ENSG00000236283_81 (sequence is synthesized)
atgatggccaacaccaaggtgaggtttcctagagcccccacagaattgccaatgatcttaattagcatatttagtgtgggccaggattttgccaacttgaaaactctaagctgtaatcaa

SEQ ID NO: 955276 - DNA, 120 bp, Artificial Sequence
  ENSG00000236283_82 (sequence is synthesized)
gtgaaaagatgctgttagtagtaatcataatataattttagacattattttattagtatgtggtatcatagaaccacacgtggtagatgtaaaaactcaaaatatactgaactgattcaa

SEQ ID NO: 955277 - DNA, 120 bp, Artificial Sequence
  ENSG00000197536_0 (sequence is synthesized)
gcggccgccagcctggagcgcgggccctggggccgcaacccgcgccgggcgaggtggcagcacaccctgggccccccactccccgccgcaagtcctgaggatggccagcagagaaacaag

SEQ ID NO: 955278 - DNA, 120 bp, Artificial Sequence
  ENSG00000197536_1 (sequence is synthesized)
aaaatggactccctggctgctggagagttgaatgccagccaccagccatgggtgccagagtttgtagcctattggaggaaaacacaccaagccccgaacagcacagtgaatggatagggc

SEQ ID NO: 955279 - DNA, 120 bp, Artificial Sequence
  ENSG00000197536_2 (sequence is synthesized)
agcagatgagctctgccccacgccggccctgtttcagaacagcactccagagtgccgcactgcttgctgaaccacagctgttactgcagattgaggagcctcagagggaacagaagataa

SEQ ID NO: 955280 - DNA, 120 bp, Artificial Sequence
  ENSG00000197536_3 (sequence is synthesized)
agatcattatggaatttaggattgcaggacattctttgacatttcataacagccaggggagatcaactgtggtcaggggacaggggcaggaagaaaccatggccaaggcctgtctggcag

SEQ ID NO: 955281 - DNA, 120 bp, Artificial Sequence
  ENSG00000197536_4 (sequence is synthesized)
gacttgaaggggcagagggacccttgcaaatgaccctgcctggaacccacccccagttggcccctgtatagcactgatccagctggggcttttatcccaggataccctcttcagggatgc

SEQ ID NO: 955282 - DNA, 120 bp, Artificial Sequence
  ENSG00000197536_5 (sequence is synthesized)
ctgtatttgttgattatctgccatatgcctggtcactgcagaatacaaggaagaaaatagccttcagcagaagctgagacaggagcctagaggatggacagtaaggagtcgaaggctcag

SEQ ID NO: 955283 - DNA, 120 bp, Artificial Sequence
  ENSG00000197536_6 (sequence is synthesized)
tcctgactttctcccctagaggactgatgttctctactggtacagaccttgttttattcatccttatgtccctaacctggaatgggcccagggtgacagttataataagtgtttgtcaag

SEQ ID NO: 955284 - DNA, 120 bp, Artificial Sequence
  ENSG00000197536_7 (sequence is synthesized)
tgagcaagtgtgtggagtgtgcattgtagagagtaaggtctctacaggatcctgctggagaggcagcccactgggctcaccacttctccagaggagggactggtcccttgccagacagcc

SEQ ID NO: 955285 - DNA, 120 bp, Artificial Sequence
  ENSG00000197536_8 (sequence is synthesized)
ctgccagctggagcaggcttcctcaggggtgcctggagctgttgaccatggctgttgccctctggcccctcttgggaagagcaacctgtcaggtgttaaagacggtcttcatttctcttc

SEQ ID NO: 955286 - DNA, 120 bp, Artificial Sequence
  ENSG00000197536_9 (sequence is synthesized)
tccaagtaaacatgactagtttccatctcaccatcttctggccctcagcagactggttatccagtctggagaggcaacagtagtatccagatgtgatccgaacagacagaacgatggatg

SEQ ID NO: 955287 - DNA, 120 bp, Artificial Sequence
  ENSG00000197536_10 (sequence is synthesized)
cagacggaaaattcagatcacctctgcagcctgcacagccgggcctttggactcctggatgctagagtgacctgggcgctgaggagggcccccgagccagtaccaggaaaggatagactc

SEQ ID NO: 955288 - DNA, 120 bp, Artificial Sequence
  ENSG00000197536_11 (sequence is synthesized)
ctgcttgcagcattcccagcagaggcatcgcctgtggacaccgcgtctgtgtctgtatatggcagagctcccagatatatgcacaagggagtgaaaaaatgtgtttgcaccccagtctct

SEQ ID NO: 955289 - DNA, 120 bp, Artificial Sequence
  ENSG00000197536_12 (sequence is synthesized)
aaaaattcaacagcctggttacttctgggtggtatatcgtaggtggctttaatacgtgttatttgctcatctgtatttcttactctttgcacaattaaaccatgttccttttacttatgt

SEQ ID NO: 955290 - DNA, 120 bp, Artificial Sequence
  ENSG00000197536_13 (sequence is synthesized)
cgcgggcgcctttccacttacggcgggcctgcccagcctcccgcccagcccgggcccgggtcccgccgaggcaggtgtgcgtggcggactagctctcgggcactcggctggcccagctcc

SEQ ID NO: 955291 - DNA, 80 bp, Artificial Sequence
  ENSG00000197536_14 (sequence is synthesized)
cactcggctggcccagctccaccccgaacgccaccgggccaggccacgcgcagacccgagcccggggcccccgcctctgg

SEQ ID NO: 955292 - DNA, 120 bp, Artificial Sequence
  ENSG00000197536_15 (sequence is synthesized)
tccactggctcctgctgtgctcctgtctccatcacctgtataatgcttcctgccatcctgccttccccgtggagtacagccatgctgtctgctgcttacagccaagattctggaaagaaa

SEQ ID NO: 955293 - DNA, 120 bp, Artificial Sequence
  ENSG00000197536_16 (sequence is synthesized)
tgtctcctttttcctcgtcatcaaccactcatttattcagcaagtgtttcttttacacttgcctgtgctgggcatggcagcaatgcagcagtgaacaaaaccatcagccctgctctcatg

SEQ ID NO: 955294 - DNA, 120 bp, Artificial Sequence
  ENSG00000197536_17 (sequence is synthesized)
cagcttataatcaagtagagagacagacataaatgattaatagatgctcctgtaatggtggttgtgaggtgtgctgccacagcccagccacacacgccagttcccttctctgcacatgta

SEQ ID NO: 955295 - DNA, 120 bp, Artificial Sequence
  ENSG00000197536_18 (sequence is synthesized)
catgtctgctcatccttcccacctgaactcatgtgccacctcacttatgccccttcccaatgccgcacccacacaacagggtgtccctctgtgcccacagcagcccttgggtataactgt

SEQ ID NO: 955296 - DNA, 120 bp, Artificial Sequence
  ENSG00000197536_19 (sequence is synthesized)
tccccacagaggctgaaccccaagggcagagtccaggccacactcaccacggagacccctgcctggcacagagcccagcccagcagagatgctcagaagatgaatgaaagtccctgctga

SEQ ID NO: 955297 - DNA, 120 bp, Artificial Sequence
  ENSG00000197536_20 (sequence is synthesized)
gattgatccaatctgtttgtgaacatctctggggtccaagaattcacggctttctttttctttagagagccttttgtttctttttgccattatatactatatttgggttagggcacaaca

SEQ ID NO: 955298 - DNA, 120 bp, Artificial Sequence
  ENSG00000197536_21 (sequence is synthesized)
atgtgaatatacttaatactgaactctacacttgaaaatggttaagatggtaaagttttaagttatatgtattttgccacaattttttaaaatgcagagcataggtacaaagaaggaaaa

SEQ ID NO: 955299 - DNA, 120 bp, Artificial Sequence
  ENSG00000197536_22 (sequence is synthesized)
aaagggggcaaggtccattttattgagaaataaagaacaaagggttcaattcagagaggattggattttaaaacgtaatttagattagggaaatgcaaatgaaaaccataataagtaaga

SEQ ID NO: 955300 - DNA, 120 bp, Artificial Sequence
  ENSG00000197536_23 (sequence is synthesized)
taccacttcacatctgttaggatggctattttaaaacaacaaaaacaacctgaaaataagtgttggcaaggatgtgaagaaatagatacccttgtgcattgctattgggaacgtaaaatc

SEQ ID NO: 955301 - DNA, 120 bp, Artificial Sequence
  ENSG00000197536_24 (sequence is synthesized)
atgcagcctttgttgaaaacaatgtggtggttcctcaaaaacttagttatcatatgatcccgcagttccacttctaggaatatacccaaaagaattgaaagcagggactcaaagtgatat

SEQ ID NO: 955302 - DNA, 120 bp, Artificial Sequence
  ENSG00000197536_25 (sequence is synthesized)
ttgtacaccagtgtttgtagcagtattattcacaatagccaaaaggtggaaacaacccagatgtccatgacaagaggagtggataaacaaaatatggtgaatatgtacaatggaacataa

SEQ ID NO: 955303 - DNA, 120 bp, Artificial Sequence
  ENSG00000197536_26 (sequence is synthesized)
aaacaaaatatggtgaatatgtacaatggaacataattcagctttaaaaaggaatgaaattctggtacatgttataacatagatgaaccttaaaaacattatgctaagtgaaataagcca

SEQ ID NO: 955304 - DNA, 120 bp, Artificial Sequence
  ENSG00000197536_27 (sequence is synthesized)
atgaggtacctagaatagtgaaattcatagagacagaaagtagaaggatggttgccaggggctggaaggaggaagaacagggagatactgcttagtggatgcagagtttatgttgagggt

SEQ ID NO: 955305 - DNA, 120 bp, Artificial Sequence
  ENSG00000197536_28 (sequence is synthesized)
gatgaaaaagttctggagatggatggtggtgatggctgcacaacagtgagaatgtacttcatactatggaactctgcacttaaaaatggttaaaatggatgtagacattttatgtctatt

SEQ ID NO: 955306 - DNA, 120 bp, Artificial Sequence
  ENSG00000197536_29 (sequence is synthesized)
ttgccataacaagaaagtaatttgggtgtattttagagattttagaaaatactgtaagcacaagaggaaaaaaattaaaatcattcgcaatcaccaggtagagacaacgactgttgaaag

SEQ ID NO: 955307 - DNA, 120 bp, Artificial Sequence
  ENSG00000197536_30 (sequence is synthesized)
aagtgtgtgtgtgtgtgtgtgtgtgtcttcagatgtcacactggactttcaggaaaggttcccctctctgctgcttccctgctggagccatggagagcaagtctatccctgttccatagg

SEQ ID NO: 955308 - DNA, 120 bp, Artificial Sequence
  ENSG00000197536_31 (sequence is synthesized)
gctggagccatggagagcaagtctatccctgttccataggtcaatcctttgaatgatttctcatggctgagttcactcccctgcacctccagggttgcacttctctgaaaatactcattt

SEQ ID NO: 955309 - DNA, 120 bp, Artificial Sequence
  ENSG00000197536_32 (sequence is synthesized)
ccttctcacacactacacatcttagcgatggccgagtgagcatgttggctctctggactcctcagtctgttggtctgggctgcgccaggctcaggctccctgcctcccccccaaccttga

SEQ ID NO: 955310 - DNA, 120 bp, Artificial Sequence
  ENSG00000197536_33 (sequence is synthesized)
tccccttgcttcttgaacctgatgctgggcctcacattctccgttgattctagctcttaaatcctgcttctccagcttgtcaggaggctgtgccctcacaccccaaagagcagatctgcc

SEQ ID NO: 955311 - DNA, 120 bp, Artificial Sequence
  ENSG00000197536_34 (sequence is synthesized)
ctctccactgagagggaaggagtgaaggtcccacagcctctgacccctgctgggcccaagagaggaacagctgcttgctttatttctcgtgggagaagtgtgtctcctctttgtctcagg

SEQ ID NO: 955312 - DNA, 120 bp, Artificial Sequence
  ENSG00000197536_35 (sequence is synthesized)
cacccctctgccctgtacagcagcaagtcagcaggaatgagctgagccgcccaagtagtggctccctccactatgggggctctgtggtcctgggggctgtcctgcctccactgccatagg

SEQ ID NO: 955313 - DNA, 120 bp, Artificial Sequence
  ENSG00000197536_36 (sequence is synthesized)
cctggccccagagcatgctgcagtggtcacaacctgtggaggtgcccccagacccccatatttgggcccaactacagcctccttccccagctttgccacctggcttgggagccagggcac

SEQ ID NO: 955314 - DNA, 120 bp, Artificial Sequence
  ENSG00000197536_37 (sequence is synthesized)
caccagcttcactggcagggagagatgaagaaagaggccatagccacgcaagtgactgaagttcatgttcgtgcacaccaattagagagggacagcacgttcatttacctccaaatccag

SEQ ID NO: 955315 - DNA, 120 bp, Artificial Sequence
  ENSG00000197536_38 (sequence is synthesized)
ccacagacacatcgcccttttctcttggctctgaggcctccacagaagggttttttaaggttgcagccaggacctttatagcctagtcctgagaagattatctttttattgcaactttga

SEQ ID NO: 955316 - DNA, 120 bp, Artificial Sequence
  ENSG00000197536_39 (sequence is synthesized)
ttaatgattgatcaaaaactgatactagaaacactgaagaacaaatttgctgtagacattaggaaaggtctacatctggcaggcctggagacctgcccaccctctccccccacggtcaaa

SEQ ID NO: 955317 - DNA, 120 bp, Artificial Sequence
  ENSG00000197536_40 (sequence is synthesized)
ccagggcaaaggtacattggaagacccaacccctacacactcttacacgtgcactcgcacacacacactgaggggaaagaaatatttaattgtccttaaatcctcttggattaggctata

SEQ ID NO: 955318 - DNA, 120 bp, Artificial Sequence
  ENSG00000197536_41 (sequence is synthesized)
aattgcaaataaatggagcaacagacagagcaaaagcacataaggtcctttaatagaatttctctatcttattctgtttctatgaatgcctgttacaaattagcagcttaaagggaaacc

SEQ ID NO: 955319 - DNA, 120 bp, Artificial Sequence
  ENSG00000197536_42 (sequence is synthesized)
tggagtgtgggaaagagcgacccttgtgtgaagtccacagccggggtttcctacagacctcaggtcccagagaacatctaagatgcctccaacaccagatggaggagggcaggagatgct

SEQ ID NO: 955320 - DNA, 120 bp, Artificial Sequence
  ENSG00000197536_43 (sequence is synthesized)
gcacagagaagcagcacttcccgagcatctgtggcaggaagtgacttggagaggatgaggccgtgcctcaggtgtgctctagctgttctgatggtctctgaggccacgactgccatggtg

SEQ ID NO: 955321 - DNA, 120 bp, Artificial Sequence
  ENSG00000197536_44 (sequence is synthesized)
aggtccacagcctgcatcagaatcaccaaagggcccaaacgtacggcctcagagcctggagagccaggaatcggcattgcaacaactccctgctcagtgggttctaccagtccagtacct

SEQ ID NO: 955322 - DNA, 120 bp, Artificial Sequence
  ENSG00000197536_45 (sequence is synthesized)
gccctctgagggtgcccagggagcagggtgcttgctggctggaacactttttcctgcccctcagctcctctgtgatgccctgaggcacgggcactggaaagctggcagagctgcttctaa

SEQ ID NO: 955323 - DNA, 120 bp, Artificial Sequence
  ENSG00000197536_46 (sequence is synthesized)
attgaaactggaaaatgaaactggaaatcacagtttcattttccagtttcactcgctccccctactgttggggtttcttttccacaaggagagtcccccagggagaaagaagcaggagtg

SEQ ID NO: 955324 - DNA, 120 bp, Artificial Sequence
  ENSG00000197536_47 (sequence is synthesized)
ggagtgggggagcatgttgggggaaggcagtgagggtgtcctgtctgcagcagggcatggaggggccccagcgctgcacttgcttcctttaagcctggcctgcttgctgtcagccccggg

SEQ ID NO: 955325 - DNA, 120 bp, Artificial Sequence
  ENSG00000197536_48 (sequence is synthesized)
ggtggtttcctctctaggaaaagctaatgtcatgcttatgctgaaaaactcttttcagaggtactttaggaggggcctggctctcgattaatctgggccatttcataccggctgtgctca

SEQ ID NO: 955326 - DNA, 120 bp, Artificial Sequence
  ENSG00000197536_49 (sequence is synthesized)
cccaggcacaaacactgaaagcaacagctggcaaagccatcgcttggtagcagcttggaagacaccaccaaagaagctctcatggaagcggcagatttcctgaagcgactggaatgcggg

SEQ ID NO: 955327 - DNA, 120 bp, Artificial Sequence
  ENSG00000197536_50 (sequence is synthesized)
gaaggagggcagtcggggagagccgagaaccagcccccctgccaactccaccccattcctctcctcacctgaaatgtctcatccttagaacagctgccctaaccccctaatcccacacac

SEQ ID NO: 955328 - DNA, 120 bp, Artificial Sequence
  ENSG00000197536_51 (sequence is synthesized)
tcctttgtaggttaagacccctgaagttgcaccctctcgtaggagctatgtttttcagagatccatgtgattatttgcctaatgtctgcctccctcagggaagtaaagtctgtgacgcgt

SEQ ID NO: 955329 - DNA, 120 bp, Artificial Sequence
  ENSG00000197536_52 (sequence is synthesized)
agcgtccctgcccagcagagctacaggaggcccgaggccccttcctgttcactcttgctctatagacgccacgctgcaaagcagatgtgcagggacaccacctgaagacccagcctgcag

SEQ ID NO: 955330 - DNA, 120 bp, Artificial Sequence
  ENSG00000197536_53 (sequence is synthesized)
ctcagccctacacactgtggatggtggagatcccagagggccaagagaagcttattgagacttctctgcactgcccctcccacagcaggaggttcatggcccatgcatttctgggagggt

SEQ ID NO: 955331 - DNA, 120 bp, Artificial Sequence
  ENSG00000197536_54 (sequence is synthesized)
tgacagggcccaggttgtggaatacctgtctgtgagccccatgtcctgtcttgtcccagctgcctgtagtttgacagagtatgctagaggtcagccattgctagggaggctgccactaac

SEQ ID NO: 955332 - DNA, 120 bp, Artificial Sequence
  ENSG00000197536_55 (sequence is synthesized)
aaggaagaccagggtgctaagtgttggcagctggataaagggaaggcccaagagactttgcgttgacttcctggatagagtgagagtcctggggacagtgaggcagctcagtatagtcag

SEQ ID NO: 955333 - DNA, 120 bp, Artificial Sequence
  ENSG00000197536_56 (sequence is synthesized)
tgatggctgtgaggtctttagactcaggaagacagtgttgcacttgggaaaatgtagcagcctcccccaagccagttggttgtgggcccacagcatggccctcttgccctcacttcccta

SEQ ID NO: 955334 - DNA, 120 bp, Artificial Sequence
  ENSG00000197536_57 (sequence is synthesized)
gtgacacctggaagttgtacagatcactggtgctgtccggcacaacttccactgggatgtgccagtcggggagagtgctgctgacagcacatggcgacagtgctggggaacagcagaagc

SEQ ID NO: 955335 - DNA, 120 bp, Artificial Sequence
  ENSG00000197536_58 (sequence is synthesized)
cacaggtcaaggttgtgtgctttcttagtttgcaagacatcgagcgccctccgaccaaccctgcagcctgcactaatgggccaccatgtgccagcaccatgcctccaagagaaagagtca

SEQ ID NO: 955336 - DNA, 120 bp, Artificial Sequence
  ENSG00000197536_59 (sequence is synthesized)
tcccactgacctgtggggtctcctgccagacctggaccagctcacctggagtcagggcctgctccacctccaagtcctgcatgtagcctggaactgtgtagctgctgtggtcatcaggca

SEQ ID NO: 955337 - DNA, 120 bp, Artificial Sequence
  ENSG00000197536_60 (sequence is synthesized)
gagtggagctgctgagtccatcagagaaggtatcagggctggaatccccacatgactgtcgagggagaaagcagcttaggcccaggcccaccttagcatttcttccactgctcaccctgg

SEQ ID NO: 955338 - DNA, 120 bp, Artificial Sequence
  ENSG00000197536_61 (sequence is synthesized)
cccacaggtgaccaaaggcctggctgcttaggaccacactcaccttcctcttggccttgctcttagcatctcggctggacttcgactttctttctgtggggcagacgggctgtcagcctt

SEQ ID NO: 955339 - DNA, 120 bp, Artificial Sequence
  ENSG00000197536_62 (sequence is synthesized)
ggtgcaggctctccagccccagctgacctccttctaccctccctccctgagggcttcccaaggacccagagtccttggataccttttctctggttcttggtgagaggtggaagcatccgg

SEQ ID NO: 955340 - DNA, 120 bp, Artificial Sequence
  ENSG00000197536_63 (sequence is synthesized)
tacactcgcacagctgagctgcccttgttcctgctctggtctttcacctcctcgatatctggcagggagttcatggcacagcgaaagttggccttccacgtcttgggatctggctccttt

SEQ ID NO: 955341 - DNA, 120 bp, Artificial Sequence
  ENSG00000197536_64 (sequence is synthesized)
tcccctgctttgtatcggcctagagggcaggagaaaaaagaggatcgtcagggccatgggtagggatcctcagctgcccctggcctgaaggaggaaggcaaggtacccctgacctcttat

SEQ ID NO: 955342 - DNA, 120 bp, Artificial Sequence
  ENSG00000197536_65 (sequence is synthesized)
aggtactcccggtgacactctgcaggtcctaggccctgggccttctcaaatgcccaggcttggcttaaacacatctagcgggcctcagtgaagggcccagccagaagcactagagtcccc

SEQ ID NO: 955343 - DNA, 120 bp, Artificial Sequence
  ENSG00000197536_66 (sequence is synthesized)
atatccccaaagtgtactatctgtgtctcagactatgcccagtcttcctccttgggctatcagcagccagagggtagagtgggcacagactgggcagcagagaacagttactaaatgggt

SEQ ID NO: 955344 - DNA, 120 bp, Artificial Sequence
  ENSG00000197536_67 (sequence is synthesized)
gggctgactgttctgagatgggcctagagctccatctctcaaggataaaggaggccaccaaccacatgaggcttggaccaagggccttggtcaacacgaagaaaaaggcagacctgggtc

SEQ ID NO: 955345 - DNA, 120 bp, Artificial Sequence
  ENSG00000197536_68 (sequence is synthesized)
tctttcagtgccctggcttacagctgcttttcacagatgcttttgccagggagaactttcatctagccacaaaccccctgaagccacacactttctaagatcttggcttttccctttgag

SEQ ID NO: 955346 - DNA, 120 bp, Artificial Sequence
  ENSG00000197536_69 (sequence is synthesized)
aatttgctgagatgatcgactctcttctccagaaacacaagtctgccaccagcccctcttcccagtaattctgcatgttgtctcagggagctcagggaccccagtgaagagcctctgtgt

SEQ ID NO: 955347 - DNA, 120 bp, Artificial Sequence
  ENSG00000197536_70 (sequence is synthesized)
taacgtgagtgcctcctcttgtctctaccctgggcttcctaggcctgagtcccaggcacacacctgtgtgaatggcccagctccggaacaaacaggcatccttgttgatgtcccagccat

SEQ ID NO: 955348 - DNA, 120 bp, Artificial Sequence
  ENSG00000197536_71 (sequence is synthesized)
gcttggcagcatgcttccatgggatctggaagatcatctcctcctgaacaatacacacatacacataaggctgtgtcaggtcagagaccacagactttggggctgagtctgagacccagg

SEQ ID NO: 955349 - DNA, 120 bp, Artificial Sequence
  ENSG00000197536_72 (sequence is synthesized)
cctgcccagccagacaggtctgagaaaaggctgacttccccttttttcccctgacatctggcttggacacccatcttgaggctggcttaaacagaccactctggatctctcaggagggac

SEQ ID NO: 955350 - DNA, 120 bp, Artificial Sequence
  ENSG00000197536_73 (sequence is synthesized)
acctagtttggatgagctgcagcattattagctcacaaagacctccctctgcctgttacacatgtgctaggacccacacagggcaccctcccccaaagccctggttttgaagctctggga

SEQ ID NO: 955351 - DNA, 120 bp, Artificial Sequence
  ENSG00000197536_74 (sequence is synthesized)
tgtttctctctggcttgtaagcacccacatggaagtaagaacttcttccattagaaaggactcctcaggacacctgggagcatgggctcttacacagggggtcctggtcataccactgag

SEQ ID NO: 955352 - DNA, 120 bp, Artificial Sequence
  ENSG00000197536_75 (sequence is synthesized)
ggagctctgggctagacttggatggtgaacactgtgtaaccctggcattgtcactgtatctctttgcccctcagttttctcttctcggaaatgagaaaacatatccaacaaaattttgag

SEQ ID NO: 955353 - DNA, 120 bp, Artificial Sequence
  ENSG00000197536_76 (sequence is synthesized)
gattaaaaaccagaggatgtgtagggacacagtgacaaatatgaagtctaaggtcttactgttattatatcacttatggttaacagtaaagatttctgagtcagaccgttcaagttcaaa

SEQ ID NO: 955354 - DNA, 120 bp, Artificial Sequence
  ENSG00000256542_0 (sequence is synthesized)
aagtgtcaccgcgatgccacgtccagtctgagccattcctcgcccatgtccctgtccttgttgcatagccggcctccagcgtgtggcttcgtgcagcgaccagaccgtcgtgtgactttc

SEQ ID NO: 955355 - DNA, 120 bp, Artificial Sequence
  ENSG00000256542_1 (sequence is synthesized)
tgccacggttgctggggttggcactggggcagacctgctggggggttctgggttgcagctggagcgctgggactggcaggacgcctctcttcgtgctgccccagggcccatccacgtcga

SEQ ID NO: 955356 - DNA, 120 bp, Artificial Sequence
  ENSG00000256542_2 (sequence is synthesized)
ctcccggcgtgaagcgtgtgggctgcctcacagcctggcagctccaggactgctgggggctccccccgcggccccggctctgctggcagcactgggccagaagcaactcaccttcacaca

SEQ ID NO: 955357 - DNA, 120 bp, Artificial Sequence
  ENSG00000256542_3 (sequence is synthesized)
gccgccctgaaggcacgtaggttccggaagggaaccttgggaaatgggattcgtgccatactcatgggagtcccaagctccctcgcccatttcactccatgaggataggaggggacagct

SEQ ID NO: 955358 - DNA, 120 bp, Artificial Sequence
  ENSG00000256542_4 (sequence is synthesized)
gctgacgacctggcagagaccctgcgccaggccccaccccaccggcaccctgatcttgcacttccggcctcgagaatgcccccgcccgggagggtctgagccaggcagcctccccgggag

SEQ ID NO: 955359 - DNA, 120 bp, Artificial Sequence
  ENSG00000256542_5 (sequence is synthesized)
ccggtgctgacacggccagagaaaccattccagacccggaccccactgtccccaacacctgcgggccagtgactcagggcggtggagagagccaagaggaagtggaggctgagtggccct

SEQ ID NO: 955360 - DNA, 120 bp, Artificial Sequence
  ENSG00000256542_6 (sequence is synthesized)
ccccggggctggggcccgccgtctggttgtgtctccagccgctggtttaggggaatcgggagggctcacttaagcatcccttccctgcgtgctcttccatcgcgggacagaagacccgac

SEQ ID NO: 955361 - DNA, 120 bp, Artificial Sequence
  ENSG00000256542_7 (sequence is synthesized)
tgctgccagcaccaaagggtgttcccacggcacacgccgcttgggctcgggcaggcagggacccctcctcgtgcctcgggagcctggagctgtcggccctgcagctgaggaccacaggag

SEQ ID NO: 955362 - DNA, 120 bp, Artificial Sequence
  ENSG00000256542_8 (sequence is synthesized)
gtcagggacatgcaagctcagtgcccgaagtcacttctagagtgcgattcggtgtccctgaaggtcccaactctgccctgacacattacagaaaatgtcgctgccccctggtgtggatgc

SEQ ID NO: 955363 - DNA, 120 bp, Artificial Sequence
  ENSG00000256542_9 (sequence is synthesized)
tggcccgcccccggggaggcttctgccccatcacccagcccagcccatcccatcccaacaggactcagcctccagtggctaccatcagaccccacggcatggtgactgtcactgcagagg

SEQ ID NO: 955364 - DNA, 120 bp, Artificial Sequence
  ENSG00000256542_10 (sequence is synthesized)
gctagagagggccgcgtgtgggacggcaggggccgacggggggctctgcattccccagtaacccaggtttctgctggggctgctccccagctgctctgctccccagctccctacaacgcg

SEQ ID NO: 955365 - DNA, 120 bp, Artificial Sequence
  ENSG00000256542_11 (sequence is synthesized)
gatttattcttatttcccacagggaaggcctaacaaggcttgaccaatcagtgaagggcattccccagactgctggctgtgactgggtcccagataagcacgtgacccactatgggccaa

SEQ ID NO: 955366 - DNA, 120 bp, Artificial Sequence
  ENSG00000256542_12 (sequence is synthesized)
acggtccaaagtcctcagtggggacggctggctgcagctgtcagacttggagcgtgaggacagagctgggccggttcctccctgggatctcccctccccgagcacaggctctgctctgcc

SEQ ID NO: 955367 - DNA, 120 bp, Artificial Sequence
  ENSG00000256542_13 (sequence is synthesized)
cagccccatgctgtcccctgtgcgaccgctgtgggcttcctgccaggctcctgcaccctccggcttctgttgggttcagttctgggaggcagccccggagtctggagggtggaaggagtg

SEQ ID NO: 955368 - DNA, 120 bp, Artificial Sequence
  ENSG00000256542_14 (sequence is synthesized)
aggggcatcccctgtcccctccccacagtcttggcagtggtttcttctctccagagttactgtccctaccccctgtcctctctctgcagctccagctcttgctgggcgcctgtgattctc

SEQ ID NO: 955369 - DNA, 120 bp, Artificial Sequence
  ENSG00000256542_15 (sequence is synthesized)
acccctgtcccttcaggccgtggggagaagaacatcccagtgcggtcacttcctggatccaattcctggatgcccagtgtccgccgggtctcctggattcaccgtggtcactgcctggat

SEQ ID NO: 955370 - DNA, 120 bp, Artificial Sequence
  ENSG00000256542_16 (sequence is synthesized)
gcccagtgtccactgggtctcctggatccaattcctggatgcccagtgtccgccaggtctcctggattcactgtggtccctgcctggatgcccagtgtcctccaggtctcctggattcac

SEQ ID NO: 955371 - DNA, 120 bp, Artificial Sequence
  ENSG00000256542_17 (sequence is synthesized)
ttcctgaatgcccagtgtctgctaggtctcctggatccacttcctggatgcccagtgtctgccaaatctcctgaattcacttcctggatgcccagtgtccaccaggtctcctggattctg

SEQ ID NO: 955372 - DNA, 120 bp, Artificial Sequence
  ENSG00000256542_18 (sequence is synthesized)
cctgtgtccacgtgagggcaccatcaatttcctgcaaggatcctgacagtcaaggtacatctaacctgagagcaggcaggggctggactatcccctagatcaagccatgcctgaagcccc

SEQ ID NO: 955373 - DNA, 120 bp, Artificial Sequence
  ENSG00000256542_19 (sequence is synthesized)
acctttcagttgcctgagtcaacagattccctttttgggttgagccatttctaattggattttatgtcttactgactgaactatcaggatggccagcagtaaggggtttcgttttggagg

SEQ ID NO: 955374 - DNA, 120 bp, Artificial Sequence
  ENSG00000256542_20 (sequence is synthesized)
atgagggacacaaatgtctcttctccaaggtgaggagatgcctgaaggacaggagacactcacaggaggccctggagacagatgtgcctcacaggcattcctgaggacctgtggcctggc

SEQ ID NO: 955375 - DNA, 120 bp, Artificial Sequence
  ENSG00000256542_21 (sequence is synthesized)
agcacagagactgggtgaaaacagaaccttgtgatctgcaagttctgccgctgccctgtctgtgtctgtgaagcaaagtgtccagaaggggcccgcgtggaagcttctgagagcggttag

SEQ ID NO: 955376 - DNA, 120 bp, Artificial Sequence
  ENSG00000256542_22 (sequence is synthesized)
gggaacggggccccacgtcctccccggagggctggagacagaggcaggccgtgcccccagcccagagtagggaggaggctggcaggcggcagctgtggaaaggaggcggagcccccagac

SEQ ID NO: 955377 - DNA, 120 bp, Artificial Sequence
  ENSG00000256542_23 (sequence is synthesized)
tcctgagccagcagaggaaggagtgggacagagcccaccccagagggagacaagaccccggggaagagacccctcagggtggccccccagcccctcccaggctcagctttcagcctgcac

SEQ ID NO: 955378 - DNA, 120 bp, Artificial Sequence
  ENSG00000256542_24 (sequence is synthesized)
ccccgtctggtccctcagaatgactgaggtttccactctttttctgccaaatctctagactccacgtccccgctctgccacctactctctgtgggatctgaataaagagacttaaccttt

SEQ ID NO: 955379 - DNA, 120 bp, Artificial Sequence
  ENSG00000256540_0 (sequence is synthesized)
ttctggcagaaccacttctggacctgtccctctgcaccccccattcctgcgccctcatttaacctccctgactctgacctgggcttggtctatcttggggcctggctgccgtcctgggac

SEQ ID NO: 955380 - DNA, 120 bp, Artificial Sequence
  ENSG00000256540_1 (sequence is synthesized)
gggaaggggagcagatcagaactcagcctgcggctccaggccgctgggcgctggctgggcctcacgttctcctggaaggaccacctcccttgccctccacggggtctgcctttgctccca

SEQ ID NO: 955381 - DNA, 120 bp, Artificial Sequence
  ENSG00000256540_2 (sequence is synthesized)
aggctccgccctggacggagcgtccttcttgcctgggcgtcttcagaccttcatctgtgacaccgggggccatgtggctcaccccgaggaagagacgaggactcgctgtgttggctgttc

SEQ ID NO: 955382 - DNA, 87 bp, Artificial Sequence
  ENSG00000256540_3 (sequence is synthesized)
accccgaggaagagacgaggactcgctgtgttggctgttcttgagcttctgggctcaagcaatcctccctcctgagcttgagcccag

SEQ ID NO: 955383 - DNA, 120 bp, Artificial Sequence
  ENSG00000256540_4 (sequence is synthesized)
tgagcctttcttcctgctcttttacccttgaggcagcaggagaggatattcacctcctgacatgacagattctgacgctatctgctcctctgtgactttgggaagcggggtatgtgctgc

SEQ ID NO: 955384 - DNA, 120 bp, Artificial Sequence
  ENSG00000256540_5 (sequence is synthesized)
tcctgggctgatgggggaaagtgcctctcccagcaatgctggtgccacttggtgtgctacggccccccagggcagtgcggagccatctgggacagttagacaatgagagacgtgaagcca

SEQ ID NO: 955385 - DNA, 120 bp, Artificial Sequence
  ENSG00000256540_6 (sequence is synthesized)
tttcaaggtgcttccttgaaaatgctccagaaaaacagcagaggcggcctctctggggatccggtccagcccttgaaaagaatctgtttgtttcaccactgaactcaaataagccaacag

SEQ ID NO: 955386 - DNA, 120 bp, Artificial Sequence
  ENSG00000256540_7 (sequence is synthesized)
attgaaggaagggagtttccacgcgcccctccccaccaagcagttacctgagttccagagtccagtccgatggatcccattttaccctggtttaaattgtttccttagaaaaaaataaac

SEQ ID NO: 955387 - DNA, 120 bp, Artificial Sequence
  ENSG00000256540_8 (sequence is synthesized)
gaaagtatagaatcaaacgtaaatgaaaatgacagtttctaacatgcgcgacctggacacgcggctgaactccgagcctcagctgcagagtggggtcaatgcacctaccttgcagcgtca

SEQ ID NO: 955388 - DNA, 120 bp, Artificial Sequence
  ENSG00000212743_0 (sequence is synthesized)
aaaatatgaacagatacagcttcatgctttcaggaaaccaccttctcttccatcttctcctttggcctgctcagacagccagacttcttaaacatatttttcctacaggctcatgcaaat

SEQ ID NO: 955389 - DNA, 120 bp, Artificial Sequence
  ENSG00000212743_1 (sequence is synthesized)
taagggatgtggctgagcatctccttcagtgccctcaaacaggtcatgaatgttgcaaagcccagaatcgtgctaacctggtagaaggctggtttagccagaacacacagagaggacctt

SEQ ID NO: 955390 - DNA, 120 bp, Artificial Sequence
  ENSG00000212743_2 (sequence is synthesized)
ctcatgatggtgtggctgaattccacatgtcactaacagtatcttgccctgacccgactccaagtactgatccccaaggaaggcataatagagagcccatcttggggagggatgatgact

SEQ ID NO: 955391 - DNA, 120 bp, Artificial Sequence
  ENSG00000212743_3 (sequence is synthesized)
tcatgtgcaaacaagtcaaattcaggatgtgtgttgtgggcagagatggcaatgcccagtcatctgttaggtatacaggtccgctgtacaggagaaaaatcagaacagaatttctatttg

SEQ ID NO: 955392 - DNA, 120 bp, Artificial Sequence
  ENSG00000212743_4 (sequence is synthesized)
tagtgtttcttttagagactagggaattgaaaccacaggtgaataagaatgtacaaggaaccaggccttcttgaagaaatagctgaaccagattggtgtcaggagctgtacaaggggatc

SEQ ID NO: 955393 - DNA, 120 bp, Artificial Sequence
  ENSG00000212743_5 (sequence is synthesized)
caagaatgtcttgtcatacaagccggacagctattaaagacaactgaggtcatggcaaaagggcccaggcttctactggccaacaatgagacaatttgagcatcccaaagaataatgact

SEQ ID NO: 955394 - DNA, 120 bp, Artificial Sequence
  ENSG00000212743_6 (sequence is synthesized)
ttagtggactgaaacacatcaacatgtatacatccatgaattcataatactcaaaacggtaaaaccaaactcatttgttacctttggaggagtctgtcacctctgattattctgaaaact

SEQ ID NO: 955395 - DNA, 120 bp, Artificial Sequence
  ENSG00000212743_7 (sequence is synthesized)
ggtaaatagaaggggaaaattcaagcatttattctgcttttcttgtataaactgtacctcacagttacggaagagctgataagggaaatgtcttctttattgaaaaattcagctgataca

SEQ ID NO: 955396 - DNA, 120 bp, Artificial Sequence
  ENSG00000212743_8 (sequence is synthesized)
tttggaaggaatgagagaattacagtaccaccattaggtgacaatgagggtctggttttttatttttcttttgctgagtgctgggaacatagtgataacaaaaaaagccatagtgttctg

SEQ ID NO: 955397 - DNA, 120 bp, Artificial Sequence
  ENSG00000212743_9 (sequence is synthesized)
gcccttctggagttttgattctagcacattaaccaaataatcccagagcaaaaataaaatgtcaactatggtaagtgtagagaagggaaaatacacagaacttttaacagcttagatccg

SEQ ID NO: 955398 - DNA, 120 bp, Artificial Sequence
  ENSG00000212743_10 (sequence is synthesized)
actttgcagctgtgatgatggatgactaagagttaaccaaggaatgggaggagggaggaggagacagagaaggctttccaagcagaagccagagcatgtgcaaagatcctgtggcaagaa

SEQ ID NO: 955399 - DNA, 120 bp, Artificial Sequence
  ENSG00000212743_11 (sequence is synthesized)
ggagcctggtgcaggggaggaacgaagagacatgcaagctggctggagtgcagagagggagacaggcaggcaggcaggtggttggatggggaggcaaggatcagatcctgagtcccttgg

SEQ ID NO: 955400 - DNA, 120 bp, Artificial Sequence
  ENSG00000212743_12 (sequence is synthesized)
agaagcaggaaggcatcatgatgactaatgtcagaggcaggggaggacaggtagggatagacagggaagcagtgctgggaagatgctaaaatgctgcagtttgtgcttggaaagatcatg

SEQ ID NO: 955401 - DNA, 120 bp, Artificial Sequence
  ENSG00000212743_13 (sequence is synthesized)
gcctggttcttccattgtcatgatgggttgttctctttcttattgtttttctaatttgtcttgactaatggagaagatcaggagctcaaaaatagaggttgtttacagcactcagtttgg

SEQ ID NO: 955402 - DNA, 120 bp, Artificial Sequence
  ENSG00000212743_14 (sequence is synthesized)
ctgctataggttaatgggcttagactctttaaggggattaggcttttgctcagagaccagtggagtattctagccaggctgtcttgtgaaggtggtatgttaagaactaggtttgtctga

SEQ ID NO: 955403 - DNA, 120 bp, Artificial Sequence
  ENSG00000212743_15 (sequence is synthesized)
tttctcaaattaaaatgtggtacatcaaattaaatttgaatttcagataaataacaactaatttcagatgtgtcagataaagaatggatatggctctagtacaatatgggataatgaata

SEQ ID NO: 955404 - DNA, 120 bp, Artificial Sequence
  ENSG00000212743_16 (sequence is synthesized)
ttttcagataaatagatgccctgtattctgtgtagcaagcataactagagaatcaatgttagtgctcaaactaagaagacttttgagaaattatcagaggtaaatacaaatatacatttc

SEQ ID NO: 955405 - DNA, 120 bp, Artificial Sequence
  ENSG00000212743_17 (sequence is synthesized)
catccatccatccatccatccatccctgttgagctccaactatgtgtcaggcacttctggggggttgagggtattgtgatcagtaagacaaactctctgcctttatagtgtttacattct

SEQ ID NO: 955406 - DNA, 120 bp, Artificial Sequence
  ENSG00000212743_18 (sequence is synthesized)
ctctctgcctttatagtgtttacattctaggagaaaaatattcatcttagagagattataaaaaacaaatcttccgaaatagtatctgttacgtccaaaatagaggaatgtataaataaa

SEQ ID NO: 955407 - DNA, 120 bp, Artificial Sequence
  ENSG00000212743_19 (sequence is synthesized)
tgttaatatgatggactaacacgcagccattacaaaaatcctgttttgaaggctattaaatgtcatggtgaattgattccaatataaaaccaaatgaaataaaagcagttcacaaaacca

SEQ ID NO: 955408 - DNA, 120 bp, Artificial Sequence
  ENSG00000204934_0 (sequence is synthesized)
cggaggctcagagagggagtgtagggggaggatgtcaatgggaggccccagcctgagccctgagcagctggccagccaggaactggcatgtgagtgagaggcatcctattctcctgctgc

SEQ ID NO: 955409 - DNA, 120 bp, Artificial Sequence
  ENSG00000204934_1 (sequence is synthesized)
gaggacaggccccagctgggagccaggcaagctttgtgatggtctgaggtccatgaagggattaaaaccaggaactggctccttctccaaccactaaagcctcatctgggcccacaagcc

SEQ ID NO: 955410 - DNA, 120 bp, Artificial Sequence
  ENSG00000204934_2 (sequence is synthesized)
ctggctgttccctggagcgtgactggaagatgtgagcagctttgtgctggagccccatttccatggtgcatgctgctgccaaaccagagatcacttgtagacttgaaagggaacatgagc

SEQ ID NO: 955411 - DNA, 120 bp, Artificial Sequence
  ENSG00000204934_3 (sequence is synthesized)
cgcggacagagagaaatgccgaggaataggggcgcggccgcccggtttcggcgatgggttatagggtccgcgtcagccccgcgcccgcacagccaacgtcacgccgcattcttatttcca

SEQ ID NO: 955412 - DNA, 120 bp, Artificial Sequence
  ENSG00000204934_4 (sequence is synthesized)
aagacccctggagcttggggtcccaccccagcggtctttcggggcgtcccctgcccttcacgcgccgcgccggctcggcccgaagcgccctgcggacccgcagcctgggccgccccgaac

SEQ ID NO: 955413 - DNA, 120 bp, Artificial Sequence
  ENSG00000204934_5 (sequence is synthesized)
ctgacggccccgcgggggtcggacgcgggaggaacggcctcgctttcagagacgcagcgggagggcggtccccgctgtccctctggccgggtcctcagcacgcgttctcctcactcccag

SEQ ID NO: 955414 - DNA, 120 bp, Artificial Sequence
  ENSG00000204934_6 (sequence is synthesized)
gactagcgagcggcgggcgcggaccggggcctggggtcggaggcggcgcagccagaaaggccccagcggcgctgagacgtttgggggaaggcgggggcttcgcgtttcgatggcgggaag

SEQ ID NO: 955415 - DNA, 120 bp, Artificial Sequence
  ENSG00000204934_7 (sequence is synthesized)
cggaatgaggttggaccggccgggccggcgttcagggacccggcgggaggcggagggctggcgtcctcgcggacatccatctgcagcgaaccaggcagaggctttgggattagatccttg

SEQ ID NO: 955416 - DNA, 120 bp, Artificial Sequence
  ENSG00000204934_8 (sequence is synthesized)
aggattcccagcccccaacagaggccaaaaagctaccacccagccaggcagaaggaacataaagtatgcattttatgatacgactcagcttggagggatgaagtagaaggtcctcactgc

SEQ ID NO: 955417 - DNA, 120 bp, Artificial Sequence
  ENSG00000204934_9 (sequence is synthesized)
acctcatggcaggctgctgacggcagatattttaccgggctcactgaactgggcagtcagggaagggtcggctcctgctctgtccagctgtcttcataagggactctgtgacacttttta

SEQ ID NO: 955418 - DNA, 120 bp, Artificial Sequence
  ENSG00000204934_10 (sequence is synthesized)
taaaaatgactttgatttctgcataagaaggcttcccaagcttgctgtctagcagtggctgctacagggaattattcacatggcagcaagagagccctggctccctggaccaggacattc

SEQ ID NO: 955419 - DNA, 120 bp, Artificial Sequence
  ENSG00000204934_11 (sequence is synthesized)
cctttgtgtgtgttggaatgagagcaggaggagtgctggtcagaagcccctccccagggctctgggacttcagtgttctcagacaaactgggccgctcctctgagctgggatgctgaccc

SEQ ID NO: 955420 - DNA, 120 bp, Artificial Sequence
  ENSG00000204934_12 (sequence is synthesized)
acacttggccccggctctggcatccacaggacgctgccttatccgtcatctcgctggggctgggggctagaggctgagcaggtcacactgaacaaaagaagtgtgtccccatcactaggc

SEQ ID NO: 955421 - DNA, 120 bp, Artificial Sequence
  ENSG00000204934_13 (sequence is synthesized)
tctgcaggcttctgggaagctgaaaaaccccaaggccagactggcctcagaatgcctgagtccttttgattccactggaaaagccatccatctgtgccaagtgtgtggagagcttcaaga

SEQ ID NO: 955422 - DNA, 120 bp, Artificial Sequence
  ENSG00000204934_14 (sequence is synthesized)
gccatatagccctggccaccatgagcacagccacgtgggggagtagtcctgaaagtgtcctggtgtggcaaaggctttccactaagtggacctcagatggcacaggaagaccctcctggg

SEQ ID NO: 955423 - DNA, 120 bp, Artificial Sequence
  ENSG00000204934_15 (sequence is synthesized)
gatgtgggaggacactgcctagtgggtgaggggccgctctttcaggtgtgcacactaaatgcagagacagcctctcctggctgccaagaagcctgtgcatgatccaggaccacaaaacac

SEQ ID NO: 955424 - DNA, 120 bp, Artificial Sequence
  ENSG00000204934_16 (sequence is synthesized)
ttgcaaactcactgcccagaggccctgtgcctgtctggagtgtgcccagtgtgtctgcgccccacagcttgtcctggcccgccagcagagccgcagcactgcagggcccttctgttgtga

SEQ ID NO: 955425 - DNA, 120 bp, Artificial Sequence
  ENSG00000204934_17 (sequence is synthesized)
gtgccagggcccttgctggctgcctgagcaaggcaaaaggttcaaaacaggaagtctctgggcagctattcccaggtgcagaggggagcagcggccacacaggtgccagtgtggcaggag

SEQ ID NO: 955426 - DNA, 120 bp, Artificial Sequence
  ENSG00000204934_18 (sequence is synthesized)
ctgcagtcagaggcagcatctcaagagccctgggagcaggggccagccacgtgaagcccacgagtgtcgctggcacagggaagggacacgaggatcacactgacccaagagaaggcccac

SEQ ID NO: 955427 - DNA, 120 bp, Artificial Sequence
  ENSG00000204934_19 (sequence is synthesized)
agtgaggaggccccaccgaagcatccccagcaacagggactgaggcatctgaggcagccagcccactcggaaaggcctgctgactgcactccagatgtcaagagcacccttgggaaaaag

SEQ ID NO: 955428 - DNA, 120 bp, Artificial Sequence
  ENSG00000204934_20 (sequence is synthesized)
aaaggcaggagtgcagcactttctagagcctcagctcacttctctccttctagctccagccggagtgatggaagaggctgcgctgggagctgcctccctgggagcctaccctgcccagcc

SEQ ID NO: 955429 - DNA, 120 bp, Artificial Sequence
  ENSG00000204934_21 (sequence is synthesized)
tgagagtggaggctaccagcatcacgcttcccctagtgaaatccatctgtcctgaagggaaccctgggacggggtcaaggaaaccctgttcacccccaccacggggtcaggtcttcacca

SEQ ID NO: 955430 - DNA, 120 bp, Artificial Sequence
  ENSG00000204934_22 (sequence is synthesized)
aagggaggccgcacggattcccagtcgcaaacccaaagccttgctgcctttgcctctgtttccatagttgtttcaatgtcttttttaaaaatcacatacactcgagtaagactgagtctc

SEQ ID NO: 955431 - DNA, 120 bp, Artificial Sequence
  ENSG00000204934_23 (sequence is synthesized)
ctcaccgaagagatctggctgtatcccgagtctctgaaacctttgctccagtcccgtgggagcgtgccgtcccgaggatgtggagccgcaagggctcgccagagggatctcaggagctag

SEQ ID NO: 955432 - DNA, 120 bp, Artificial Sequence
  ENSG00000204934_24 (sequence is synthesized)
gcctcaaggagcgctgttgagtgacaggtctgatgcagtagcttttactattggtggaaatcgatgttttttccttgaaagtctacctttctaagttcagtaaaccaaattagatcatgt

SEQ ID NO: 955433 - DNA, 120 bp, Artificial Sequence
  ENSG00000232100_0 (sequence is synthesized)
aggtgggcagcagggcccttcctttccccacaggcagggaacacttgtgtttcctttgtttacttctttagcttatgtcttccgcgatgaaacggtaacttcctgaacgctctgcagttc

SEQ ID NO: 955434 - DNA, 120 bp, Artificial Sequence
  ENSG00000232100_1 (sequence is synthesized)
atcgctacactcttcctccatatctagaacgtggcctggcacatattagatgctcaatcatcattttaaaataaacgagtagtgatccattcaagtaacgtggataaacatcaacaacaa

SEQ ID NO: 955435 - DNA, 120 bp, Artificial Sequence
  ENSG00000232100_2 (sequence is synthesized)
cagctgctttcaggaaaaaagggcagactctgaattatgaagaatgtgagaaacttagatcagtatcatgaagattgtgtacttttactttttagggcagctttattgagggacaaatca

SEQ ID NO: 955436 - DNA, 120 bp, Artificial Sequence
  ENSG00000232100_3 (sequence is synthesized)
cccattttattttttagttttactgaggtatgattgatataaaaaatggcacacatttaaggtatacatcatcatgagttaagacatatgcatgcgcccatgatgccatcgccataacca

SEQ ID NO: 955437 - DNA, 120 bp, Artificial Sequence
  ENSG00000232100_4 (sequence is synthesized)
accaaaggttaaatatatccattaaatatatccatatctccagaaattgccttgtgctattttgtaaatcatccatttaaaatttataattcaggctgggtgcagtggcttacacctgta

SEQ ID NO: 955438 - DNA, 76 bp, Artificial Sequence
  ENSG00000232100_5 (sequence is synthesized)
gtggcttacacctgtaatctctccactgagttccacaacatgataagactgtctctacaaaaaatttaaaaattag

SEQ ID NO: 955439 - DNA, 88 bp, Artificial Sequence
  ENSG00000232100_6 (sequence is synthesized)
ccctgatcataacactgctgtccagcctgggtgatagagggaaacccccatctcaaaaaaaaaaaaagtgctaatttctactagactt

SEQ ID NO: 955440 - DNA, 120 bp, Artificial Sequence
  ENSG00000232100_7 (sequence is synthesized)
ttactgtatcagaagacatgtaaaaattatagggcagatcatgagtgttgaaactttgaataattgtatttccccaagtgtttatttttgcaatctcttgttataatttgcaccacttcc

SEQ ID NO: 955441 - DNA, 120 bp, Artificial Sequence
  ENSG00000232100_8 (sequence is synthesized)
ttcccccagattatgtttgtgcttgtttgtactggagagcatggaagagctcacaggagaaattgtgcctccttcgccatccaggggatgttgtataggaatcaagagcttggtagacag

SEQ ID NO: 955442 - DNA, 120 bp, Artificial Sequence
  ENSG00000232100_9 (sequence is synthesized)
aagtcttagaggcggagctgcctagattcaaattctgactctaccacttcctagctgtggcaagtgactaaacctcctacctaagagtcacgcgggctggagtacagtgtcatgatcaca

SEQ ID NO: 955443 - DNA, 87 bp, Artificial Sequence
  ENSG00000232100_10 (sequence is synthesized)
ttctgtgcattctgtggcaagacaacaaatagatgggatgatttctgtggaagtctacaggtgacatttaatcatggctacagtatt

SEQ ID NO: 955444 - DNA, 120 bp, Artificial Sequence
  ENSG00000232100_11 (sequence is synthesized)
tggaagtctacaggtgacatttaatcatggctacagtatttcatgtgagcacaaagaacaagccaagactcatttggggaaaaaattaatcattcatctaataaatgtcttttgaatgcc

SEQ ID NO: 955445 - DNA, 120 bp, Artificial Sequence
  ENSG00000232100_12 (sequence is synthesized)
tgtcataaccaggaacagagccaggtacgtgatgaacaaataggctggtccctgccctgatgaaagttataggctagtgtggtcacagactatgaacgaataaacaaatacatatagaca

SEQ ID NO: 955446 - DNA, 120 bp, Artificial Sequence
  ENSG00000232100_13 (sequence is synthesized)
agtcatcatccctcatcaattattttgatatcacaaagactctgaaaagtatttttttaacccctttagcagtaaaacctaatttgtattaaaataaagcattatttatttgtctatcca

SEQ ID NO: 955447 - DNA, 120 bp, Artificial Sequence
  ENSG00000248730_0 (sequence is synthesized)
agcctccccgagtagctgggattacaggcgactgccgccaccacgcccggctaattttttaagtatttttagtagagacgggtttcaccgcgttagccagcatggtcttgatctcctgac

SEQ ID NO: 955448 - DNA, 89 bp, Artificial Sequence
  ENSG00000248730_1 (sequence is synthesized)
cctgtagggttttaaaggagagaggcagcatcccagagggcaaaaagggcttcattcatggagaaagcaactgagctgggcagagcaca

SEQ ID NO: 955449 - DNA, 120 bp, Artificial Sequence
  ENSG00000248730_2 (sequence is synthesized)
cttcattcatggagaaagcaactgagctgggcagagcacagacggaatttgaattggaggccagaggcaaagggaactccaagtggaagaagaaacggcatgaaaaaagggattgagaag

SEQ ID NO: 955450 - DNA, 120 bp, Artificial Sequence
  ENSG00000248730_3 (sequence is synthesized)
gaaaaggacaagatggtttggagagagagcaacttcagcctggaaaagcagaaatgagatgcggccaagaaaaagactccagcccagcctgccttggttctaaccctgactgttacttaa

SEQ ID NO: 955451 - DNA, 120 bp, Artificial Sequence
  ENSG00000248730_4 (sequence is synthesized)
cctctttctggctcagtcaagaaacttgagcactgcaagatgatcatgtggaatacctacttcaaacggatgttaagaggagtaaaagtgttcttgtttctaagtgcttgaaatgcagct

SEQ ID NO: 955452 - DNA, 120 bp, Artificial Sequence
  ENSG00000248730_5 (sequence is synthesized)
ggcatataattaagctatgcaaatatttactttttttttttgaaatgctgagtttactgatcactctaatttttacatatgtgtgtcattacagaagattcaggctttagcgatgactgg

SEQ ID NO: 955453 - DNA, 120 bp, Artificial Sequence
  ENSG00000248730_6 (sequence is synthesized)
aatttcatcagttggaactaaatcatggtgagcaaaagaaagtctacctaagtgatatggtttggctctgtgtccacatccagatctcatctcgaattgtaattcccacaagttgtggga

SEQ ID NO: 955454 - DNA, 120 bp, Artificial Sequence
  ENSG00000248730_7 (sequence is synthesized)
cggaggtgattgaatcatgggggcaggtgccccaatgctgttctggtgataatgagtgagtccccaagagaactgatgattttataaggggctcttcccccttcactttctcttctctct

SEQ ID NO: 955455 - DNA, 89 bp, Artificial Sequence
  ENSG00000248730_8 (sequence is synthesized)
tttataaggggctcttcccccttcactttctcttctctctcctgctgccttgtgaagcaggtgcctgcttcgccttctgccatgattgt

SEQ ID NO: 955456 - DNA, 120 bp, Artificial Sequence
  ENSG00000248730_9 (sequence is synthesized)
gacgggagttttgacactgtacaaatgcactgtcttcacatctacgctgacacccctgcctttctacctgcaggtgtctgtggcttacaagctggtgcctcccacagaccctgtagtttg

SEQ ID NO: 955457 - DNA, 120 bp, Artificial Sequence
  ENSG00000248730_10 (sequence is synthesized)
gagctaatgaagagctgagaagctaccaggatctgcaactttttgcctgagggttttctcagaagacacagaaactgttctgcctataagccttgaagtgccagggaattaacacctacc

SEQ ID NO: 955458 - DNA, 120 bp, Artificial Sequence
  ENSG00000248730_11 (sequence is synthesized)
ttcccacagccctccccacagtgactgatagcattgataacgatacccaagcttcacccctcaggtgggataactgagctgcttgttctataccatgttctagagtttctcccatgagtt

SEQ ID NO: 955459 - DNA, 120 bp, Artificial Sequence
  ENSG00000248730_12 (sequence is synthesized)
taggttctaatcatccacatgtaaattgcttgataagaaaccttcattgactccttgtctcacttcccctccccttatttgttttgtttgcacctttcaaataaactattttcattcaaa

SEQ ID NO: 955460 - DNA, 120 bp, Artificial Sequence
  ENSG00000196634_0 (sequence is synthesized)
gcagaaatggtttccgttcagcaaatccacaccagcaatcctcttacagcaaatttccaagaaacatggttggataacagtgctggacctaaaaaaggtgttggcccacgagtgcctctc

SEQ ID NO: 955461 - DNA, 120 bp, Artificial Sequence
  ENSG00000248736_0 (sequence is synthesized)
caaacaccgcatgttctcactcatagggtatgtttgcaggtttgttacatgggtatattgcaagatgccgaggttcgaggtaggaaagatcccaacaaccagtttcaagggccctagcct

SEQ ID NO: 955462 - DNA, 120 bp, Artificial Sequence
  ENSG00000248736_1 (sequence is synthesized)
gggccctagcctcagaaaactgcatcaatgtcttctgaacggccatcaagctcaaagccctgctcgtttcttcaggaaagcttattaacaaatacattcagcacagcttgcaggaagcag

SEQ ID NO: 955463 - DNA, 120 bp, Artificial Sequence
  ENSG00000248736_2 (sequence is synthesized)
caagtttcatgtagagtaccacggcgtcatcatgcaagtgtctgtctgagcatggccagtaagagaactggtggtttcggtccatgaaagagctggggttcctggaagtttttggaatgc

SEQ ID NO: 955464 - DNA, 120 bp, Artificial Sequence
  ENSG00000248736_3 (sequence is synthesized)
gaactaaggcacttgaaaatttcgaagcaggctctcgtgcaatgctgatatgttgaagcctccatgtgatcaagcctcagccacatttttatggaagccgagcaccagggaggcccttct

SEQ ID NO: 955465 - DNA, 120 bp, Artificial Sequence
  ENSG00000248736_4 (sequence is synthesized)
aggaaggagcttcattcccatcggaaaggttggccatggcaccagcctcacactggttggaaagggctcattgaggaatctttccagagtgtttcatgacttaacgtttcacggctggct

SEQ ID NO: 955466 - DNA, 120 bp, Artificial Sequence
  ENSG00000248736_5 (sequence is synthesized)
ctgcacaacctgcgaataaacaaaaactaaaacaaaaaaactacagtgtcgtagtgactaattaggtaaatacaacactttcatttcatagaaactcaagacatctgcaatttggaggta

SEQ ID NO: 955467 - DNA, 120 bp, Artificial Sequence
  ENSG00000248736_6 (sequence is synthesized)
gcaatatggtcatttttattcaaatcctgttttgttttcatgaaataaaaattgcaatgctgattttcacatctgggcagttgggtgtcaacaaatcgagaacaaactgtcaaccaagta

SEQ ID NO: 955468 - DNA, 120 bp, Artificial Sequence
  ENSG00000248736_7 (sequence is synthesized)
aacaatagaactttcaattctgaaaactgattttgatgaagagtaatttcttaaagaaggatgatcactccaaaaatttcctgattatgttctgaaatctttcagtaaaaatcattaaca

SEQ ID NO: 955469 - DNA, 120 bp, Artificial Sequence
  ENSG00000248736_8 (sequence is synthesized)
tgggcgacagagcgagaccctgtctcaaacaacaacaacaaaaaggcgttagaaccctgtggcttccaatgtccattgcaggagctgtggccgccatgttcttctggcatagctggttac

SEQ ID NO: 955470 - DNA, 120 bp, Artificial Sequence
  ENSG00000248736_9 (sequence is synthesized)
ggccgccatgttcttctggcatagctggttaccttggccacatacctgataaccacccactgacaaacagatgaattgctctgccatggctcagaagcagacactcagacaggaactttt

SEQ ID NO: 955471 - DNA, 120 bp, Artificial Sequence
  ENSG00000248736_10 (sequence is synthesized)
cttttttctttcatggaactttacctgtagacccttttgtttcgccccaaaccatcaggataactgaaagccactccaacatgttgattggggtagccgaggaatgatgcagaccagagc

SEQ ID NO: 955472 - DNA, 120 bp, Artificial Sequence
  ENSG00000248736_11 (sequence is synthesized)
atcagagtaggtgacaggcatttgacagtggacacccaaaaaagcactacttacaatagcaaaaacttagaaccaatccaaatgtccaacaatagtagactggattaagaaaatgtggca

SEQ ID NO: 955473 - DNA, 120 bp, Artificial Sequence
  ENSG00000248736_12 (sequence is synthesized)
tgaaaatttcgaaggtaaaactgtcacccgtgcaaatcaaatcaaaattaataatgtttttctgactcaatgcaaaaggcgaaaacaccaatttagttgttgctgcggctgcttttcatg

SEQ ID NO: 955474 - DNA, 120 bp, Artificial Sequence
  ENSG00000248736_13 (sequence is synthesized)
cagtgctttagagttacagatcccacatgtggttgaaaaccggttactttcctgttggcttaaactcaaaggcatttgtatgtgtgctaaaaacatttcttactatgcactgtgttggaa

SEQ ID NO: 955475 - DNA, 120 bp, Artificial Sequence
  ENSG00000248736_14 (sequence is synthesized)
gctgtaacacaaacagactgaaacacacaaacactggaaacacctccctgctcaccacgcttcaggtggcaaaaaggagagaagagctgaagcccttctgggatcccagaccttggggct

SEQ ID NO: 955476 - DNA, 120 bp, Artificial Sequence
  ENSG00000248736_15 (sequence is synthesized)
ccacaagcctgagctgtgacatgctgtaacaccctctctggggttctgtggtttttggcatcttcaagcttttgggcactaccatgttccctggcgccttcagtagaaactgtttgcgat

SEQ ID NO: 955477 - DNA, 120 bp, Artificial Sequence
  ENSG00000248736_16 (sequence is synthesized)
acgcctggtccagttgcagcgtcacacagagctggcatctgtgctggtaccaggagctgcccacccactggcactgcgcagtggctggacctgtgcttgctcggtcttacacccccttgc

SEQ ID NO: 955478 - DNA, 120 bp, Artificial Sequence
  ENSG00000248736_17 (sequence is synthesized)
tgctccatgcctggctcacccttggcaggtgtgggatctgggctggtagcgagagccaagcacagcctgccaggccgagtgggtggaatgagcccagtgggagcaaacaaaaccaaagca

SEQ ID NO: 955479 - DNA, 120 bp, Artificial Sequence
  ENSG00000248736_18 (sequence is synthesized)
gagggaccgccagccatcatggaggtttcctgctggagaagtgacatcctaaggaccctgtgacagccatatcctcgcagcctcacgtcctcactgcatctcagggggaagatacccacc

SEQ ID NO: 955480 - DNA, 120 bp, Artificial Sequence
  ENSG00000248736_19 (sequence is synthesized)
tgggcgtcagtaacagctgctttccaccttgggagagtttgcaagagaaagagaaagagaaagaacaagaaaaagataatgaaagccagaaaaaatgaaaaagtctcactggctaaaatc

SEQ ID NO: 955481 - DNA, 120 bp, Artificial Sequence
  ENSG00000248736_20 (sequence is synthesized)
aagatgttggcaggaccacgttcctttctggaggtctaaaagagactctgttgccctgacttttcaccttctaggacccttccacatttcttgcctcatgaccacttccacgcagccgtg

SEQ ID NO: 955482 - DNA, 120 bp, Artificial Sequence
  ENSG00000248736_21 (sequence is synthesized)
agatgttttttctcatgtgcaggctgtttactaaagggccacacagcatgttaccttcaatccgtagacatttctgggagtcagctgcgtgcactgcagttgaagatgagaactattgaa

SEQ ID NO: 955483 - DNA, 120 bp, Artificial Sequence
  ENSG00000248736_22 (sequence is synthesized)
tgcttacccagtgccaggcctgtgtctccacgcctctcgcctgtccccccttagcaccctatgaggtcgacactgtggtcaccctcccttggcaggtgcagagcagaggtttggccttgc

SEQ ID NO: 955484 - DNA, 120 bp, Artificial Sequence
  ENSG00000285709_0 (sequence is synthesized)
gggcctcagattcctctgtggtgacatggaaataataacagggccgccccctccttgaggagctgtggaattagagaatgagcctgcacagaaatgcccacgcctccagaatggcaacag

SEQ ID NO: 955485 - DNA, 120 bp, Artificial Sequence
  ENSG00000285709_1 (sequence is synthesized)
tgcccagtccagggctttctcagattcctgaagatggagcttgggaagaaagagattgcctgctctcttaaccccagatgggaaggtagcagacagcccagcctgctcagccatgctctc

SEQ ID NO: 955486 - DNA, 120 bp, Artificial Sequence
  ENSG00000285709_2 (sequence is synthesized)
actgtggaggggacagtgactcaccagtccttcttcaccagcctggcaagaatatccctcaacatcatccaactcctgttatatcacttccatagttactaaaccctccagtgaaccctt

SEQ ID NO: 955487 - DNA, 120 bp, Artificial Sequence
  ENSG00000285709_3 (sequence is synthesized)
gctgcatcacagaggaccctaaaacctagtggcttaaaacaacagccattttattatctttcatgatgatgggggtcaggaattagggcagggctcagttgggtgattcttcagcaacac

SEQ ID NO: 955488 - DNA, 120 bp, Artificial Sequence
  ENSG00000285709_4 (sequence is synthesized)
atggcattgaatggggtcacttgatgatattcatctagtaactgctctagtctggaggatccaagatggccccactcctgtgcctggtgccttggcaagggaggctggagggctggctca

SEQ ID NO: 955489 - DNA, 120 bp, Artificial Sequence
  ENSG00000285709_5 (sequence is synthesized)
tctccctttccatgtagcattgtgaccattccacggggtctctccagcagtgtggtccagcttctcacatggtgacttggagctccaaggaaccaaggcaggagcctttgaaaagtctaa

SEQ ID NO: 955490 - DNA, 120 bp, Artificial Sequence
  ENSG00000285709_6 (sequence is synthesized)
gcctgacactggcatggcatcacttctgccatcctccattagtcaaagcagcttgggcccagcccagactcagggaaggggtaactgaccccacttctccataggagaagcctcaaagtt

SEQ ID NO: 955491 - DNA, 120 bp, Artificial Sequence
  ENSG00000285709_7 (sequence is synthesized)
tctgtggtcctctttaaatggccaagcaatctttggacccagggcccaggctcctgggtaggtctgtctgcccatcaggaagttctgtgcccaaggtcaatcccattactcactccagac

SEQ ID NO: 955492 - DNA, 120 bp, Artificial Sequence
  ENSG00000285709_8 (sequence is synthesized)
tgaacttatgggctgaattgttcccctcaaattcatatgttgaagtctcaggacctcagaacgtgaccttatttggagatagggcctttacaaagataatcgagttaaaataaagctatt

SEQ ID NO: 955493 - DNA, 120 bp, Artificial Sequence
  ENSG00000285709_9 (sequence is synthesized)
agggtgggcttaatccaatctgactgttgtcctcataagaagagggaatttagacacacagagagacaccagggtgtgtgtgcacaaaggaaagattgtgtcaggacacagtgggaaggc

SEQ ID NO: 955494 - DNA, 120 bp, Artificial Sequence
  ENSG00000285709_10 (sequence is synthesized)
aatcatctacaagccaaggaaagaggcctccgaagaaaccaaccctgcagagaccttgatcttggacttctagtctccagaactgtgagaaaataaaatttctgtcgcttaagcccctca

SEQ ID NO: 955495 - DNA, 120 bp, Artificial Sequence
  ENSG00000269970_0 (sequence is synthesized)
ccacccgtctgtattcttttttagtccattcactaatgcacaatgagccatggtctgtgctattttgttttttgccttttctgtttccttttgtataataaatgtttacacggaattgtt

SEQ ID NO: 955496 - DNA, 120 bp, Artificial Sequence
  ENSG00000237402_0 (sequence is synthesized)
gcacagtgtacctccaccttcctccttctgcttctgtttttgggagttcagtcaaagctgacatgttgcccaagactagaggggagagtttggaggccggagaggatggccaggtcctgg

SEQ ID NO: 955497 - DNA, 120 bp, Artificial Sequence
  ENSG00000237402_1 (sequence is synthesized)
gaggttgcttcctgcccctcctcctcccccaccacaggggcctggagaagactgacagcagcaatcacagtcacattccacagcctctccagcacccagccagctctccgcgggggcagc

SEQ ID NO: 955498 - DNA, 120 bp, Artificial Sequence
  ENSG00000237402_2 (sequence is synthesized)
agggactggtccacccaacaacagcagccatgtcctcacctcttgctacagcagcaactttatttgatttgatgtatatgaagaaataaaactcagaagtcaattgacttaaacatggaa

SEQ ID NO: 955499 - DNA, 120 bp, Artificial Sequence
  ENSG00000237400_0 (sequence is synthesized)
atcttgctagtgttcctcaagtaatcttcactgccaacaaggaggggagggagcggacggcaattgagacatctgacttccccttgacttcctctaacactggcagcatctcagaagaat

SEQ ID NO: 955500 - DNA, 120 bp, Artificial Sequence
  ENSG00000237400_1 (sequence is synthesized)
agagccaaatttgtggtccagcttttggaattaatcaagaccagacagaatacatttgagagtactaagttgactgcaggactgccagcctattcactttcatcactgacagagaggcca

SEQ ID NO: 955501 - DNA, 120 bp, Artificial Sequence
  ENSG00000237400_2 (sequence is synthesized)
cttccactttgagggaatccgggagaacaagaccaattatagtttgccagtaagatgttcagacgtgtccagagtttcttccttctgatgggttcgtcatctcgctgacttcaggagtaa

SEQ ID NO: 955502 - DNA, 120 bp, Artificial Sequence
  ENSG00000237400_3 (sequence is synthesized)
ctgatgggttcgtcatctcgctgacttcaggagtaaagccgcagaccttcgcagtgaacattacagctcttaaaagtggcgtgtccagagttatttgttcctcctggtgggttcgtggtc

SEQ ID NO: 955503 - DNA, 120 bp, Artificial Sequence
  ENSG00000237401_0 (sequence is synthesized)
acaactgcctcacaagcatcccagagtccagtcagcagacagcagaagagactgtcagcagaccaccttggaggggatgcttggagctgcctaacgtgtgattcaaagatgaattccatg

SEQ ID NO: 955504 - DNA, 120 bp, Artificial Sequence
  ENSG00000237401_1 (sequence is synthesized)
tgtttggagaagaagccctagcctcaacacaaaggttggccacattccagccaaggtagcacggagtgaaggcccgtggagggagagctgggcttttctgaactacttcagtacaccttg

SEQ ID NO: 955505 - DNA, 120 bp, Artificial Sequence
  ENSG00000237401_2 (sequence is synthesized)
ctgtgccttggcctgccgtgtttcatccccatggctgtcctcagtgatgtgcatggtcactgctcccttcaccactgagaagacgggcacaggacagtcaggggatgtgtccaaggtccc

SEQ ID NO: 955506 - DNA, 120 bp, Artificial Sequence
  ENSG00000237401_3 (sequence is synthesized)
acagcaggaagggctggagccagaatgtggtctgagaggctggatatacaaagagacaatggcatgaccatctgtacaaatggaactatggcccacaacctgcagcagccagcccaggaa

SEQ ID NO: 955507 - DNA, 120 bp, Artificial Sequence
  ENSG00000237401_4 (sequence is synthesized)
gccaacccgtcacctgcagcagccaggatggatgctggcctgccctcaggtgcccttgttggagaacatggggggccaaattccaaacgtggcaagagataacaaatgacttgtctggtg

SEQ ID NO: 955508 - DNA, 120 bp, Artificial Sequence
  ENSG00000237401_5 (sequence is synthesized)
gctgaaccctgagctgggagcactgcctggagaaaactctgatactcaagtctagttttatatggctccaaacgcctccaccatgagctcaaggcagtgagactgactgaaaaaccctct

SEQ ID NO: 955509 - DNA, 120 bp, Artificial Sequence
  ENSG00000237401_6 (sequence is synthesized)
ctattacagaccacaacattgaacccaacatccccctaagtaggttgtactcacatcattggtcttatggggaaattttaagacctcccacttgtaaggttttatagccctctatggaat

SEQ ID NO: 955510 - DNA, 120 bp, Artificial Sequence
  ENSG00000237401_7 (sequence is synthesized)
attgaagaaagagtaaaatgcatccaaaaaaaaaaaaaaacactaaactggataaattctaaggcctcttcaggtcttaagatggccattttctaggtcctcttgctgcagcagtgaaat

SEQ ID NO: 955511 - DNA, 120 bp, Artificial Sequence
  ENSG00000237401_8 (sequence is synthesized)
ccacaaacacggacaagtcagtcagttacgtgcctttcagagaaaacttctgacttaggaattccagctatttggcccaacccatattagattgtgttataaagacatggtaaattacat

SEQ ID NO: 955512 - DNA, 120 bp, Artificial Sequence
  ENSG00000237401_9 (sequence is synthesized)
attttgggtttgaacttggtacttcccagcagccctgggagtggggtcagaagccctgctgggggccaaagaactctgaggatcaaagatgttgagcatcaccttagaggccaaagatca

SEQ ID NO: 955513 - DNA, 120 bp, Artificial Sequence
  ENSG00000237401_10 (sequence is synthesized)
gaacagtggaggtggcctttgaagcccaacctgtctttcaccagagagtgagaacggcctctatttccaggaagctcactgcagcaataatcatgatgctctgagcctgacaaggtgaga

SEQ ID NO: 955514 - DNA, 120 bp, Artificial Sequence
  ENSG00000237401_11 (sequence is synthesized)
atttactttcagcacctgcaatagtttcctattaaagttacatatgaaaccctgccgtcttgtaccaactaatgttcacaccagcgttcctattttcaagataaattgcaaaataaaaac

SEQ ID NO: 955515 - DNA, 120 bp, Artificial Sequence
  ENSG00000237401_12 (sequence is synthesized)
tcttgttttcgttagcaaaagaaaacttctttaggaggataaaagggagatgaagaaacagaaaacacatcagctctccatccagattacagaaagcagaaaacatcctgaagtgaataa

SEQ ID NO: 955516 - DNA, 120 bp, Artificial Sequence
  ENSG00000237401_13 (sequence is synthesized)
cataggaatcgctctttttcccccctgagatagcaggttacttatgagaaacaagcttgaaatctctgcacctggaccagcttccagaggcttttgtcctgaccagctggctttggggaa

SEQ ID NO: 955517 - DNA, 120 bp, Artificial Sequence
  ENSG00000237401_14 (sequence is synthesized)
gtaaaggaaaccagagaagaagaggctgaaagaattggtttccaccgtgacctttgaaccctcgggcgagttgtcagcctcactgaggatgagtgtactccatatcaagtgaggtcactt

SEQ ID NO: 955518 - DNA, 120 bp, Artificial Sequence
  ENSG00000237401_15 (sequence is synthesized)
tactcgcaagcttgttgtgaggactgaatgaaaccttttcttttttcttggagtttcagagcaacgtccctgagcccagccccacactggcttgagccctgtcgtcggtcaagacacggt

SEQ ID NO: 955519 - DNA, 120 bp, Artificial Sequence
  ENSG00000237401_16 (sequence is synthesized)
gctttctcccctcccctctgcactccagcttactctgcagtcaggaggtggcaccacgatcccctttaagactttgccacttgggccagctgcgcccctgtgaaattccctgtttctatt

SEQ ID NO: 955520 - DNA, 120 bp, Artificial Sequence
  ENSG00000237401_17 (sequence is synthesized)
gcaggccacaaggacgagctgagaaatggcttccagtcaccatctagattagaaagcctatatttcaaatatagatatatcaattatgcctgtaaaaagacattaaatcccacagggctg

SEQ ID NO: 955521 - DNA, 120 bp, Artificial Sequence
  ENSG00000237401_18 (sequence is synthesized)
taattcctagactctacgaatttcatcttgcaccaaattttattatttcatttataattcggattcttcaaatctaagagtgcctggctcaaaattaaaatacctacaactatgccaaaa

SEQ ID NO: 955522 - DNA, 120 bp, Artificial Sequence
  ENSG00000237401_19 (sequence is synthesized)
ctacagaattcaattatagcaacaacaatcacatggaataataataaatcagtagttataggccaggcacacttgtaatcccagcactctggggagctgagtcaggaggactgcttgagg

SEQ ID NO: 955523 - DNA, 72 bp, Artificial Sequence
  ENSG00000237401_20 (sequence is synthesized)
aggctgaggcaggaagatcacttgagctggggagtttgatgctacagtgagccgcgcaactcaaaaaaaaaa

SEQ ID NO: 955524 - DNA, 120 bp, Artificial Sequence
  ENSG00000237401_21 (sequence is synthesized)
gatgctcaggatggaacaatccacaaactgaaccaggctgcctgtccacaggtgcactaaccaccttcccacccaggaaggtgttggaaccccactctcaatggagaaaagctgatactc

SEQ ID NO: 955525 - DNA, 120 bp, Artificial Sequence
  ENSG00000237401_22 (sequence is synthesized)
tgaactcatttttggactgagtttgcggcacttgcagccctgagggacacattcccccaccacactgagcctgcactcccatcaatgcaaatgaacattttgcttattcagattgggggg

SEQ ID NO: 955526 - DNA, 120 bp, Artificial Sequence
  ENSG00000237401_23 (sequence is synthesized)
gtgaaggaagtcacaaaagggttaatacatatggcatttcattgtaatatgtactcactactaactaaattaaaagagatgtgagttattaaaaactccatcttaagaaagtaacagaaa

SEQ ID NO: 955527 - DNA, 120 bp, Artificial Sequence
  ENSG00000237401_24 (sequence is synthesized)
atcgaagatgagctgcactaaagattcatattacatatcatgctgcaataagaaaatcaaataaggcctttccatattcaataataaagtttaaagaaaagtaatatttgtttagccagt

SEQ ID NO: 955528 - DNA, 120 bp, Artificial Sequence
  ENSG00000237401_25 (sequence is synthesized)
tagccagaaattagatgtatcagaatacatcattctttgagcattttagaaaaatcagggtatttctacattgtgtttttctttgtaagccctcaaaaaatatagagaatattcttgaaa

SEQ ID NO: 955529 - DNA, 88 bp, Artificial Sequence
  ENSG00000237401_26 (sequence is synthesized)
gtcggtcagtgggtaaacagtgacacccagtggtcacttagataaccagctgtgcattctcccaattcaactatccacatagaaaaaa

SEQ ID NO: 955530 - DNA, 120 bp, Artificial Sequence
  ENSG00000237401_27 (sequence is synthesized)
cctgccctcatgtgggctccaccaccctcctgcctgctgtgggaaatcaggagggtgaaggtgaagctggacttggcccagaggtgcccacagggacgcccagagctgcacaagctccct

SEQ ID NO: 955531 - DNA, 120 bp, Artificial Sequence
  ENSG00000237401_28 (sequence is synthesized)
ccatcttgcctctgggaccagctctgcattgctccaaagccctcatcagtgtctgctttctgttgcaataactgaatacctgagattggacaatttataaagaaaaaaattatatctgac

SEQ ID NO: 955532 - DNA, 120 bp, Artificial Sequence
  ENSG00000237401_29 (sequence is synthesized)
cagctgtgcattctcccaattcaactatccacatagaaaaaaaaatggtcaagtagtatgcattttgttattcaacagatatttactgaataactagaagatgctagatgttattctatt

SEQ ID NO: 955533 - DNA, 120 bp, Artificial Sequence
  ENSG00000237401_30 (sequence is synthesized)
caacccgtcacctgcagcagccaggatggatgctggcctgccctcactggagataagcagcctctgtctgtcctcgtttgggcaccttgctccttcccaggagtctgagagactctcctg

SEQ ID NO: 955534 - DNA, 83 bp, Artificial Sequence
  ENSG00000237401_31 (sequence is synthesized)
aaccagacagtctttggaaatggtctttgcagtgagacctagatcatcgtcttacaggcaccagacaaaagtggcaagaactc

SEQ ID NO: 955535 - DNA, 120 bp, Artificial Sequence
  ENSG00000237401_32 (sequence is synthesized)
tcatcgtcttacaggcaccagacaaaagtggcaagaactctagtgggtgagttggcaggccaagacacaagccccaggtttaacatcaacagactgaaaggtgcttggcaaactacttcg

SEQ ID NO: 955536 - DNA, 120 bp, Artificial Sequence
  ENSG00000237401_33 (sequence is synthesized)
tctcattgctaatattaaatggggctggacaatctctgaggtttttaaggcttctagatttttagaaacttctacttttacatccagagaccttcacataattaaaaatcaatatcctcc

SEQ ID NO: 955537 - DNA, 120 bp, Artificial Sequence
  ENSG00000237401_34 (sequence is synthesized)
cttagaggaggaacaagtgaggtaccagcatcattattggcaaacattatttcacacctctagtgcagcttgataaacacacggagtgtgtgagagataaatgctgctcactaatgcatc

SEQ ID NO: 955538 - DNA, 120 bp, Artificial Sequence
  ENSG00000237401_35 (sequence is synthesized)
cagttctcccccttgggaaatgtagacttgtatttcctgcctctctgaagttagacgtagccacctgacttgctttcaccaatgaaatatgagcagaagtagcttgtatttcttctagac

SEQ ID NO: 955539 - DNA, 120 bp, Artificial Sequence
  ENSG00000237401_36 (sequence is synthesized)
agatgcctttcagaatgaatgcacgatgcacaatttcctcttcctcttgcctggtgacaggggatgtcccagagctcctgcccaccataaagcgacacacaaatgaacaagagatacacc

SEQ ID NO: 955540 - DNA, 120 bp, Artificial Sequence
  ENSG00000237401_37 (sequence is synthesized)
ccgagagctggggcttgcttgttactgcagcgtatgcaggctgtcctgactgatacactgagcaccttgcaagtgccaggcacatttccaggctcaggagatgccactggtgagggcagc

SEQ ID NO: 955541 - DNA, 120 bp, Artificial Sequence
  ENSG00000237401_38 (sequence is synthesized)
tgctgttgacgagcacccccttgtcaggcaacacctgagttctttcaggaagacagttgaaaagttacaggagattggaagagacatcctgagatagtccacagtggagctctgtggtca

SEQ ID NO: 955542 - DNA, 120 bp, Artificial Sequence
  ENSG00000237401_39 (sequence is synthesized)
ggacatgccagcaccctgtcaatgtcacagtgcaaagccaactgactccatcataagggactgtcagtgtgtgtgaatgccacctacaccagccagtcctgtctgccataaggactatag

SEQ ID NO: 955543 - DNA, 120 bp, Artificial Sequence
  ENSG00000237401_40 (sequence is synthesized)
tgacacaaaggaggcaggaagggagggcccctgtgtgattagctcttacacgcagtcccttaggcatttgtctgagtggatcatctgctgtagacagaacagattgggtccttagtgcac

SEQ ID NO: 955544 - DNA, 120 bp, Artificial Sequence
  ENSG00000237401_41 (sequence is synthesized)
attcagggcaaatggaactgactacctgtatgcagcattcatgcttttagcaaagctttctcactgcatagctatttggcttgttaagcctgcaattctgggtctgggccaagacatggg

SEQ ID NO: 955545 - DNA, 120 bp, Artificial Sequence
  ENSG00000237401_42 (sequence is synthesized)
gaacagtgatgctaatgagaacaccaaagaaacacagcagtaagcggcgagccacagccgcctattaccttcacacctgccacattcccttcagtgtaaattgactcgctgtcccatcca

SEQ ID NO: 955546 - DNA, 120 bp, Artificial Sequence
  ENSG00000237401_43 (sequence is synthesized)
tccttatcatctctctggggttcaggtctccagaaatgtcccggcctctactcacatatctatacaacatgccattgataaggcagtcgttaaacaactagcattttgcattctgaagtg

SEQ ID NO: 955547 - DNA, 120 bp, Artificial Sequence
  ENSG00000237401_44 (sequence is synthesized)
aaaattaaaaatgcacagtcctttttaattcaatttctaattagtgcactatatacaacccagaatgatggcaaattgataaaatatgcaaatgaagcaacaattcatagactatattaa

SEQ ID NO: 955548 - DNA, 120 bp, Artificial Sequence
  ENSG00000237401_45 (sequence is synthesized)
aatttccatttaaactgttagttaagctatacacatttgtaaatgtaaacattaaccctcaggaaaaatattttctaaactacagcataattggaaactccagaatcatatacaacagaa

SEQ ID NO: 955549 - DNA, 120 bp, Artificial Sequence
  ENSG00000237401_46 (sequence is synthesized)
aagagatcattacacagacgtgtacctttatcgccataaataaaagaacatttccacagagttgttgcttcctctcggctgctcccacagcactttccctggctctccgtggagccattg

SEQ ID NO: 955550 - DNA, 120 bp, Artificial Sequence
  ENSG00000237401_47 (sequence is synthesized)
tttatagcctcctccagggtaggcagtggggtacgcatctgcctcctgagccagcaagccatgccctcaagggcagcacgaagcctggcccatccgtactccccgtattgcccagagcac

SEQ ID NO: 955551 - DNA, 120 bp, Artificial Sequence
  ENSG00000237401_48 (sequence is synthesized)
ctcacagctgccccaactcctgccctgacatcccactgaggacaaaccaagaaagacaaatgtgctccccttaaacgcacacgggatgccccgattctagttgccgccccagcttccagg

SEQ ID NO: 955552 - DNA, 120 bp, Artificial Sequence
  ENSG00000237401_49 (sequence is synthesized)
ccagcagcctccactggggctcaccgggtaccttcccttgccctggaaagctcccacgcccacaccgggtgccttctcttcccctgggaagctcccacacccagcctgcctgagtcgctg

SEQ ID NO: 955553 - DNA, 120 bp, Artificial Sequence
  ENSG00000269976_0 (sequence is synthesized)
tgcttaatttttgcttttggaggctttgaatgtaccaaagctttatattattatattgtcaaagctattagcttttctttttgtgacattgtttgttagaaagtccttcctgggaaatgg

SEQ ID NO: 955554 - DNA, 120 bp, Artificial Sequence
  ENSG00000269976_1 (sequence is synthesized)
tcccaaataccattttcccgggaacatctggaatgcgcttgcttttatttcttcctccccagaggacggtgtattggggtgggaagaggctgtcacactgagatgatctctgggtggaga

SEQ ID NO: 955555 - DNA, 120 bp, Artificial Sequence
  ENSG00000269976_2 (sequence is synthesized)
aactggacggggaagccctgagcttcagaaacagccccttccccagcttcaaggtggctgtgctctgttgtgaaagatgtctgatctttcccgccaaaaaaataaaaacattgtccaaaa

SEQ ID NO: 955556 - DNA, 120 bp, Artificial Sequence
  ENSG00000240254_0 (sequence is synthesized)
gggccaggaagcctccggggaaatctgagggcagtcattggctaacatggaagggctcacaaaacaggcttcctccagaggttcctttaagggcagtaaaatttcccagaacttgaaccc

SEQ ID NO: 955557 - DNA, 120 bp, Artificial Sequence
  ENSG00000240254_1 (sequence is synthesized)
ataactccacactctgagacaagaatttcctctactcctttcaaggataaatgaggcaagaaagcttcaagttgagcttttccaatctgattgcgaacttgatgacaactgaagatacaa

SEQ ID NO: 955558 - DNA, 120 bp, Artificial Sequence
  ENSG00000240254_2 (sequence is synthesized)
ctccaacagtctaaaacgcaatcacaaaagacacgttgtttcaaatggaaattctatcctgaagtgattcactccagcacaaactgaaaacccatccccgatggaccttgactaaccgta

SEQ ID NO: 955559 - DNA, 120 bp, Artificial Sequence
  ENSG00000240254_3 (sequence is synthesized)
atgatctcaatgtctgcaatttcctgtcaaatatgagaacaacatcccaaagtgggagaacagatgaaacaagacggataaaatactgagaagtcttgaatataagtgataggtacctga

SEQ ID NO: 955560 - DNA, 120 bp, Artificial Sequence
  ENSG00000285993_0 (sequence is synthesized)
tggtgatagatttgagtgtttctgggcatggctccaggtcataaccaagatctaggtcctgccagcatcttcctgggacgaaattgacagcaattgtcagaaggcttgttcagcttgtta

SEQ ID NO: 955561 - DNA, 120 bp, Artificial Sequence
  ENSG00000285993_1 (sequence is synthesized)
agggtgagccttcagctgaggctgtcagtgcaaccctggatgggatagctggaaagcagaaaagccaaggtgagaggaagcagcagagctgaggtgcaagaagccaagcttggctaagca

SEQ ID NO: 955562 - DNA, 120 bp, Artificial Sequence
  ENSG00000285993_2 (sequence is synthesized)
tttggggccttaagaaatgggatctgaccagagcagggccctgaggtcatgtgaccttagaagtggaagatgtattgatcgcttgatcaccaagacctcccacccactactcctcaccac

SEQ ID NO: 955563 - DNA, 120 bp, Artificial Sequence
  ENSG00000285993_3 (sequence is synthesized)
ataagtaaaacagcagggcccacagttggcagtaagattataatttggtgcaacctctaaggagagtgatttggcaagatcatgaaaatcacaaatgctcaaatcctgtctactgcaatt

SEQ ID NO: 955564 - DNA, 120 bp, Artificial Sequence
  ENSG00000285993_4 (sequence is synthesized)
ccacttggcatcttaaagacaaaatgcatataactccatgcagatacacaaacaaaatgtgctctatggctggtaagtacaaaagactggaaacaacgaaatgtccatcaataggagaac

SEQ ID NO: 955565 - DNA, 120 bp, Artificial Sequence
  ENSG00000285993_5 (sequence is synthesized)
aatctccaggatgccttgaagccaagaaagcaagacgcctgaagggcccatctatcctgaatcctcccttttacaaaaggggagcctaagacccagagtgaggactgagtggcagaaagc

SEQ ID NO: 955566 - DNA, 120 bp, Artificial Sequence
  ENSG00000285993_6 (sequence is synthesized)
catgcccctgctactcagaggcaagttcaataccaggactgagactgcctgacccccagaccagaggtccctcctctgcaccacaacttccactctggttagatgtggccaggagcccac

SEQ ID NO: 955567 - DNA, 120 bp, Artificial Sequence
  ENSG00000285993_7 (sequence is synthesized)
agcctcttagcttcccccaatcctaatactcagcagctcagagtcagacgtctcttctactgtcaaatccagattctcagtgtcatttcttcacttcatttcctcctgccctgtcctcgg

SEQ ID NO: 955568 - DNA, 120 bp, Artificial Sequence
  ENSG00000285993_8 (sequence is synthesized)
ctaaactaacgaagagtgcatcaccaccaccgtttacctgcagatgggccaaacctcaaaggatcccttgagctcattccttccctctttctcagaagatcacgtcaatctcaccggact

SEQ ID NO: 955569 - DNA, 120 bp, Artificial Sequence
  ENSG00000285993_9 (sequence is synthesized)
tgtttgttctagatcatgatggctgctcccaggacagtgtctgtcctggcaaaggtatctcatattgctgttccccttttttctcctttgaagtggaaaataaacttgcagactatcctt

SEQ ID NO: 955570 - DNA, 120 bp, Artificial Sequence
  ENSG00000285992_0 (sequence is synthesized)
gtctcaaaaaaaaaaaaaaaaaagataaacatatggttaaattaaaggtgttctcacacagtttgaattgtacaatatactaggtgtccacatccagatgggaccatttaattgcaggaa

SEQ ID NO: 955571 - DNA, 120 bp, Artificial Sequence
  ENSG00000285992_1 (sequence is synthesized)
tgtccacatccagatgggaccatttaattgcaggaaaacaagctcagagattccactcattctacattatggatatgtgcagccgaagcaagcacaaagccccacttttacacatggaca

SEQ ID NO: 955572 - DNA, 120 bp, Artificial Sequence
  ENSG00000285992_2 (sequence is synthesized)
gtgatgagtcacgaacaagatttggctctcagtctaactaacctacttgagatctcgagaattatctccaaaggtttcctgtgaggtagaattagaaaatatttttaaatcttgaggaag

SEQ ID NO: 955573 - DNA, 87 bp, Artificial Sequence
  ENSG00000285992_3 (sequence is synthesized)
gtctttctgccacattatttgaacctctctgacagtttagaacaagcccaactaatatctgctagagaaaagaccaacacaggactc

SEQ ID NO: 955574 - DNA, 120 bp, Artificial Sequence
  ENSG00000285992_4 (sequence is synthesized)
ccaactaatatctgctagagaaaagaccaacacaggactcaaaagatctcttaacatgaagttctcagttaagtctaggataagatgtgggttccacatcaggttttgaatgtgggggga

SEQ ID NO: 955575 - DNA, 120 bp, Artificial Sequence
  ENSG00000285992_5 (sequence is synthesized)
attgaaaaactgatggtaggaaggaaaaggtattattctgtaagctgatagatactgccaataatattcattttaatgtcccaatcacagagataaaagtcaaattaggccaggcgtggt

SEQ ID NO: 955576 - DNA, 88 bp, Artificial Sequence
  ENSG00000285994_0 (sequence is synthesized)
caggggagccgacgtccaagggccggagatggatgtcttagctccaggagagagaaaaaccaggtgtagcggcacgcacctatacctg

SEQ ID NO: 955577 - DNA, 84 bp, Artificial Sequence
  ENSG00000285994_1 (sequence is synthesized)
accactgcaccaaaaaagggaagaagaacaaattgattcttcctctgcctttttcttctattctggctctcaatggatttgaac

SEQ ID NO: 955578 - DNA, 120 bp, Artificial Sequence
  ENSG00000285994_2 (sequence is synthesized)
ctgcctttttcttctattctggctctcaatggatttgaacatacccgcttacacgggtgaggataatctttttactcagtctgctgattcagatgctaatctcttccagaaattccctca

SEQ ID NO: 955579 - DNA, 120 bp, Artificial Sequence
  ENSG00000285994_3 (sequence is synthesized)
cagacacaccagaaatacagaaatactgttttaccggctgtctgggcatcctttaggccagtcaagttgacacataaaattatccattacattgaccaagtggatggcaggttcctcaac

SEQ ID NO: 955580 - DNA, 81 bp, Artificial Sequence
  ENSG00000285994_4 (sequence is synthesized)
ggagagagagaatgaggattcctttatggcaacagagtatacttaaatctggtctggcctctcctgccaccttgtatacta

SEQ ID NO: 955581 - DNA, 120 bp, Artificial Sequence
  ENSG00000285994_5 (sequence is synthesized)
cttaaatctggtctggcctctcctgccaccttgtatactatacatattactctgtagatatttagagtagttgaagaaacaatgtgttttatcacacttttaaaaccagtgttgcgtctt

SEQ ID NO: 955582 - DNA, 120 bp, Artificial Sequence
  ENSG00000285994_6 (sequence is synthesized)
tgcatgtttatttccttgtgccatctctgtcatctaatgtggatatttacatgggagttcagctaatatgtggactagttggtggtttaaattcctctaataatatatcttggcagatct

SEQ ID NO: 955583 - DNA, 120 bp, Artificial Sequence
  ENSG00000285994_7 (sequence is synthesized)
ttcccctttcttctgtaaacttacttagctaatgatttatacagattccagttaaatgatttgaagagcagtctgtctgtctatctatctagatatctatctagatagatagatctgtct

SEQ ID NO: 955584 - DNA, 87 bp, Artificial Sequence
  ENSG00000285994_8 (sequence is synthesized)
aggctaatatttttaaaaagtcagaatagcttacattggagaaccacactaatgaaagattaaatgcaagtaggcctgagatggact

SEQ ID NO: 955585 - DNA, 120 bp, Artificial Sequence
  ENSG00000285994_9 (sequence is synthesized)
actaatgaaagattaaatgcaagtaggcctgagatggactaagatggcagatatagaaaaagaaatagacaccaaagattcaatttttttttttctgttaagctttatgttgtgtccgtt

SEQ ID NO: 955586 - DNA, 120 bp, Artificial Sequence
  ENSG00000285994_10 (sequence is synthesized)
ctgtcttctatgtggttttggcatgattcatatggcaaatgaattattttagtgaagctttatttatgactcactgtgtattttaagttgtatgtaattggattaacaaatttcatttca

SEQ ID NO: 955587 - DNA, 120 bp, Artificial Sequence
  ENSG00000285994_11 (sequence is synthesized)
catgtgtgaagtccagggctatcgtttgagtagtttgaagagttgtttactgtttttaagctatataactgtttttctcaaagcttaaagttgaggtcagaggctctgatgattggtctg

SEQ ID NO: 955588 - DNA, 120 bp, Artificial Sequence
  ENSG00000285994_12 (sequence is synthesized)
aagccaggtttgggggaataaattttttctaaagtaatagttggatagaatttggtaaatggattaatatccattttttagctatttgcatttttctgttatgaatatttaaaaaatagt

SEQ ID NO: 955589 - DNA, 120 bp, Artificial Sequence
  ENSG00000285994_13 (sequence is synthesized)
tttgactatatgatatggataagtaggaggtatcacttgggatacaaacacataaaagggtatcttttaagaaatacagtgctgcaatagatgtagtgtttttggttcttgtcaaaagct

SEQ ID NO: 955590 - DNA, 120 bp, Artificial Sequence
  ENSG00000285994_14 (sequence is synthesized)
gtagaactgatgacctaagtatacacacatgtaaatgtactatatgtaggtgtgtaaataaatatgcatatacacacattgtaaatatgtcttggaggccaatcacagtgtctcatgcct

SEQ ID NO: 955591 - DNA, 79 bp, Artificial Sequence
  ENSG00000285994_15 (sequence is synthesized)
tggaggccaatcacagtgtctcatgcctgtagtcccagaactttgggaggctgagatagaaggaccacttgaggctggt

SEQ ID NO: 955592 - DNA, 120 bp, Artificial Sequence
  ENSG00000285994_16 (sequence is synthesized)
cgacatctcagttttgtatatctttttattgaagaacaaaatgtacttttgcttcatttagtaaatgtaccttcaagggttttaaagttagcaacaagtgacttctacaagcattgtttc

SEQ ID NO: 955593 - DNA, 120 bp, Artificial Sequence
  ENSG00000285994_17 (sequence is synthesized)
atttaatcgtcaccataaacctgtaaagtggatattatgatctgcatttcacagatgaggaatttggacttatttaagacatttttaggggccacataactggtaatatgtggagaggaa

SEQ ID NO: 955594 - DNA, 120 bp, Artificial Sequence
  ENSG00000285994_18 (sequence is synthesized)
gttacccaggtctgtgtgtctctttccaatatgatttgacccgtctgctgtccctgtgttctcttgtgaagaaaggggccgcttctccttgatataggcaatagcccactctaggtagga

SEQ ID NO: 955595 - DNA, 120 bp, Artificial Sequence
  ENSG00000285994_19 (sequence is synthesized)
ggtgttcactaatggtgaaagaataaatccgtaactgtggcttctcagctactagaaaggcaggatacagtgtggtgaagtcctgagaatcagctcatctgagtttgcatcagactcctg

SEQ ID NO: 955596 - DNA, 120 bp, Artificial Sequence
  ENSG00000285994_20 (sequence is synthesized)
ctttagaagctacttgaccttgggcaagtcatttcaactctcagcccccattttcaggataatggggatgataatagtatctgcctccaatagtcgttgtagggatcaaacagtcagtgc

SEQ ID NO: 955597 - DNA, 120 bp, Artificial Sequence
  ENSG00000285994_21 (sequence is synthesized)
atgcctggcacatagtgtgggctctccaaatgtttgctgtgtacattattattatgtgtaagggacatcttgctagacagcgggaatagggggaaggttccttcccagaagtcacatcac

SEQ ID NO: 955598 - DNA, 120 bp, Artificial Sequence
  ENSG00000285994_22 (sequence is synthesized)
gcaagtgtcgtctccctaaggctccctgttgaagcctaagggagcccttcttgaaataggagacagaggcagcagcgatgaggtggccggccttcttccaggggtgaggctgctgctgtc

SEQ ID NO: 955599 - DNA, 120 bp, Artificial Sequence
  ENSG00000285994_23 (sequence is synthesized)
atagacccaacactgctgcagagttgccaaggatacatcagtttcaccatttttcttgctgactaaactcctgtgaaaactcttgctttcctcggttatctgaccgtctgcttctcttaa

SEQ ID NO: 955600 - DNA, 120 bp, Artificial Sequence
  ENSG00000285994_24 (sequence is synthesized)
tgttagagtcaccagagcattagaactagaaaaggaacttagacatcttggtccagttctctagactttcagatgaggaaaggggtgcagagaggtaaagtgattgcccgaggtcatgga

SEQ ID NO: 955601 - DNA, 120 bp, Artificial Sequence
  ENSG00000285994_25 (sequence is synthesized)
gctaagccgggcagacgcggagccagaaggatggtttctgaccttcgaattcagaactctttccacataaccatacttgcagagcctctttcaggagaatgcgggaaagtaactcttcct

SEQ ID NO: 955602 - DNA, 120 bp, Artificial Sequence
  ENSG00000285994_26 (sequence is synthesized)
catcttgcagaggtccttggtatgttgcacaggactgaagaagctaccccagtaggttggccagattccacaatgggatattgaatctggtttcagaaattcccctggtgatttcaatta

SEQ ID NO: 955603 - DNA, 120 bp, Artificial Sequence
  ENSG00000285994_27 (sequence is synthesized)
gatgcgctgttctttctgacttcccctccctggcagcgatgcagtgttttttccagctgcttggattgccgtcgtatgctgctccaagctgcctccagtgctctgctgttcactagaaca

SEQ ID NO: 955604 - DNA, 120 bp, Artificial Sequence
  ENSG00000285994_28 (sequence is synthesized)
gagctcagaggcccgtcgccgagcctgcagtacaggttaaacattggagaggctttgctctcatttgaggtgtatctaatgattgtggcccagtgtgccagtttcttgtgaatacaatga

SEQ ID NO: 955605 - DNA, 120 bp, Artificial Sequence
  ENSG00000285994_29 (sequence is synthesized)
agatactacttctcggaagtgcagtgggaagaaaccagttacagatcgtggaatgatctagaaaatacggcaaatgctactctggtgtgaggtcataatccagaaagaccttttccatcc

SEQ ID NO: 955606 - DNA, 120 bp, Artificial Sequence
  ENSG00000285994_30 (sequence is synthesized)
tctccttcagctgcaggcctgagagctgtgctgttccttctctgtcctgtttgatcctttgctttctctgtagctttccaagatgttctagaaacaaagggaggcagctttcccacgtac

SEQ ID NO: 955607 - DNA, 120 bp, Artificial Sequence
  ENSG00000285997_0 (sequence is synthesized)
aggctgcccgagccagcagcggcaacctgctggggtcctcttccacgatggagttttgttcttttgctcattgcactaaatcctgttgctgatccctgtttggggccgcactgcctttat

SEQ ID NO: 955608 - DNA, 120 bp, Artificial Sequence
  ENSG00000285997_1 (sequence is synthesized)
ctgatccctgtttggggccgcactgcctttatgaaatgtaacactcacggagaaggtctgcagcttcactcctggggttggccagaccacaaacccaccaggaggaatgaacaactccag

SEQ ID NO: 955609 - DNA, 120 bp, Artificial Sequence
  ENSG00000285997_2 (sequence is synthesized)
cttaagagccttgacactcactgtgtaggtctgcagcttcactcctgaaaccagccagaccacgaacccaccagaaggaagaaattccagacacatcataacatcagaaagaacaaattc

SEQ ID NO: 955610 - DNA, 120 bp, Artificial Sequence
  ENSG00000285997_3 (sequence is synthesized)
ccaattctgggcacattaggggaatgtctctgcctctaggccattcaacagaccatggggtggggaagatgcaggcttgtcctctaccctgtgactgtctgggccacctaagagaggtag

SEQ ID NO: 955611 - DNA, 120 bp, Artificial Sequence
  ENSG00000285997_4 (sequence is synthesized)
cctggaggagtggccaggagcagaaactttggcatcacactgcctgagatgatacctgctattatttaccagttttggggccttggataagctccctctctacccagctgagccacatag

SEQ ID NO: 955612 - DNA, 120 bp, Artificial Sequence
  ENSG00000285997_5 (sequence is synthesized)
agagaatgaagcctgccattttgcacacagttttgcctttgcggctgtttattttgctaagactcttaaacctgtcagcgaagcggtttccagcccagtctctgtggtaataatctccct

SEQ ID NO: 955613 - DNA, 120 bp, Artificial Sequence
  ENSG00000285997_6 (sequence is synthesized)
ttctaagagataagcaccccgagtgagacagattggaagacaaactaacacaccaaagttgctgagtacacacgactctttaaagatggcctcattcactactcaggctttattaacttc

SEQ ID NO: 955614 - DNA, 120 bp, Artificial Sequence
  ENSG00000285996_0 (sequence is synthesized)
caggcatgagccaccgcgcctggccttaagatttttttcataagcaatcatgtcacgtgcaaatagacagtgtattcatttctggtctgtgctgttcttttttttctcatcttattgcaa

SEQ ID NO: 955615 - DNA, 120 bp, Artificial Sequence
  ENSG00000285996_1 (sequence is synthesized)
tattgcaattgctgtgtgacctccaggacagtgttgaatgaaagtgataaatgtaggcacccttgttttgctttcagtcttaggaggaaagacttagtggggaggaagtggcaactctga

SEQ ID NO: 955616 - DNA, 120 bp, Artificial Sequence
  ENSG00000285996_2 (sequence is synthesized)
gtcaggatgtagacttcttagcatatgcatttgcacatcttgctcaaatcccagatttccctataccctctatgctccctttaaaacaatgctttctttccacagtatctttcccccaag

SEQ ID NO: 955617 - DNA, 120 bp, Artificial Sequence
  ENSG00000285996_3 (sequence is synthesized)
tcaataatgggtcaaatttcagcagtcccaaactggggaagttctgggactgctgtggtaagaaatggattcagacaccaaaggagctgtaggacctggctaacatgtacaagcaagaac

SEQ ID NO: 955618 - DNA, 120 bp, Artificial Sequence
  ENSG00000285996_4 (sequence is synthesized)
cagaagagtatacctgggaggagatcctgagattactgcatcattaggtagaatacaaagttgaataggggagagttttttgctatggggtcactgtatgacaggattaacacactggca

SEQ ID NO: 955619 - DNA, 120 bp, Artificial Sequence
  ENSG00000285996_5 (sequence is synthesized)
agggaaaaagatgcttctaatggatgctgggacagtttttgaagcttggaaaaagcattggttctcattaaataaaatgaagatagcagaattgccatgacaaatgaggatgggatcaaa

SEQ ID NO: 955620 - DNA, 120 bp, Artificial Sequence
  ENSG00000285996_6 (sequence is synthesized)
agaagtggatatacaagggagaacaagcgtcatggagatggccaatagtagctgtcccctaggcgagggctggctgcaagaggtgctgttaaggaactgggctctctagttgcaatggga

SEQ ID NO: 955621 - DNA, 120 bp, Artificial Sequence
  ENSG00000285996_7 (sequence is synthesized)
atgataggatctcagaataatggcagccaggtgatagctcttagcatcaaacgcaaggagggccataattaccatatgggtagaaggcttagaatagaatctggggagattgatcttcag

SEQ ID NO: 955622 - DNA, 120 bp, Artificial Sequence
  ENSG00000285996_8 (sequence is synthesized)
aaatctatggttctggctcatagcacatgagtttgccaatggcaagtcatctgcttccaataagagtaaacttattgagacaaggggttgctccgttgcccaggctggagtacatggcat

SEQ ID NO: 955623 - DNA, 83 bp, Artificial Sequence
  ENSG00000285996_9 (sequence is synthesized)
caaggggttgctccgttgcccaggctggagtacatggcatgatcacagctcaactgcaaccttgaactcctgggctcaaataa

SEQ ID NO: 955624 - DNA, 120 bp, Artificial Sequence
  ENSG00000285996_10 (sequence is synthesized)
gcttcagtgagccatggctgtgccactgcactccagtttgagatgccatctcaaaaaacaaaacaaaaaaaccagacagtaaatataggtgttgtggccatatagtctctgtggcaacta

SEQ ID NO: 955625 - DNA, 120 bp, Artificial Sequence
  ENSG00000285996_11 (sequence is synthesized)
ctcagctctgctgtagtgaaaccaaagcagtcgtagaccataaatgcaatgtgtcactcagactttataaagcaggtagcgggctggatttggtttttataccctgcactaggcaaaatg

SEQ ID NO: 955626 - DNA, 120 bp, Artificial Sequence
  ENSG00000285996_12 (sequence is synthesized)
ggatattatgtaaagataaaggtataattcataaatagagggttagtagtatgtccctgtaagtcaaacaatataaattaaaaagcgtaaatgtctggaaactcaaggtgttggcaacat

SEQ ID NO: 955627 - DNA, 120 bp, Artificial Sequence
  ENSG00000285996_13 (sequence is synthesized)
acttgtatccaaaaatgcagaatacatattttttcaatgttcatggtatacagaaatcaatcttgtatttaaccacacacacacacacacacacagtcaaactgggtggcacagcggctc

SEQ ID NO: 955628 - DNA, 86 bp, Artificial Sequence
  ENSG00000285996_14 (sequence is synthesized)
tcaaactgggtataggaagtgctgggaggccgaggcgggtggatcacaaaggtcaggaaatccagaccatcctggccaacatggtg

SEQ ID NO: 955629 - DNA, 76 bp, Artificial Sequence
  ENSG00000285996_15 (sequence is synthesized)
aaaaacacaaaaattagctgggcatggtagcgtgcacctgtagtcccagctactggggagccactgcactgcagcc

SEQ ID NO: 955630 - DNA, 120 bp, Artificial Sequence
  ENSG00000285996_16 (sequence is synthesized)
gagcgagactccatctccaaaaaaagagtaaaattcaaaaagtagataacttcaggccacatttaccaaccataataaaattaaattagatattatatcacttaggatgcttttggctgc

SEQ ID NO: 955631 - DNA, 120 bp, Artificial Sequence
  ENSG00000285996_17 (sequence is synthesized)
gaatttacaaaatatccaactaaaactaactgagcaatcaagttttatttttctcagataacaaggcatcaaaaaggcagttccagaattggcctagtagctgagtcttctcaggctctg

SEQ ID NO: 955632 - DNA, 120 bp, Artificial Sequence
  ENSG00000285996_18 (sequence is synthesized)
ggtcagcttctctgaggtccacttttttctcttcttggttccaagacagctgcagcagcttcaggcatcatgttcttatataaaaatgtttaaaagcaggaagtgagagaggaggaagtc

SEQ ID NO: 955633 - DNA, 120 bp, Artificial Sequence
  ENSG00000285996_19 (sequence is synthesized)
ttcatgataaacctgtctcttctgaatgaggaaaatctttcccagaagccccggcagattccactgagcaacactgggagatactggccatactgtgctgcacaggagactggaaaatta

SEQ ID NO: 955634 - DNA, 120 bp, Artificial Sequence
  ENSG00000285996_20 (sequence is synthesized)
gcatctgatattctcagagtccaaggcaagacacagatgctgccaataacaaggggaattgggtatggctgctgggatgacaaccaatggttgtctgtgccagtcacataaaacaatgta

SEQ ID NO: 955635 - DNA, 120 bp, Artificial Sequence
  ENSG00000285996_21 (sequence is synthesized)
acaatgtggaaattaagaaatattctcctaaatttagattatttctggatcagaaagaaacaaaaactgagattattgtaagatggtctctttatttcatcattttctgttactttcttc

SEQ ID NO: 955636 - DNA, 120 bp, Artificial Sequence
  ENSG00000285996_22 (sequence is synthesized)
tttcactgcctggatgtttggtagacttgaatagcatgtttagtgcatatgagtttatctttcagattttcatgtatatgcatgcattcaaaggctataaaaattcctccagtgtagctt

SEQ ID NO: 955637 - DNA, 120 bp, Artificial Sequence
  ENSG00000285996_23 (sequence is synthesized)
tggctttccccttaccctcacatctctttggccacatttcacatctcttggcatgttaaactctcaattcattcttttcattaccatttatggtaattgcatgatttctttgttaagcaa

SEQ ID NO: 955638 - DNA, 120 bp, Artificial Sequence
  ENSG00000285996_24 (sequence is synthesized)
atgataatctggctgtttttttaacttgtaagaaaactataacttttgctcttgataaaattactacactgtggttagaaaatgtggttctggaatgtgttagaaataaaatttctccca

SEQ ID NO: 955639 - DNA, 120 bp, Artificial Sequence
  ENSG00000285996_25 (sequence is synthesized)
acctttcccagcatttttgacaattatgatctgaacaatttacatccataaaattttctttgatatgaattttcagacttaggataaaggcttacctctgaatgaaggcattgtcactgg

SEQ ID NO: 955640 - DNA, 120 bp, Artificial Sequence
  ENSG00000285996_26 (sequence is synthesized)
cattacattcttcaagtctttctccaagagggagaagtaagtcacagtcacaattagcctaggctaatgggctttccccattacttccattcatatggttgcttgccaacataaattctc

SEQ ID NO: 955641 - DNA, 120 bp, Artificial Sequence
  ENSG00000285999_0 (sequence is synthesized)
taaatacagtttgactctactgcatcttatctatctttctagtgatggacacctgtgatactgccaatttctccacttcactgctgccatagacaatgtagtggctttcactgtatagaa

SEQ ID NO: 955642 - DNA, 120 bp, Artificial Sequence
  ENSG00000285999_1 (sequence is synthesized)
gatatcctgttggttggaaagagaagccttggtgtcaatggccctgaaggcagaattatagcacctccatcagaagggatggactgataaaccctgaaaaaattcaggagcctgcctgct

SEQ ID NO: 955643 - DNA, 120 bp, Artificial Sequence
  ENSG00000285999_2 (sequence is synthesized)
aagtgttttggaactatgtggcacattaacaatgctcagtcttcctggaagtgaaggaagagctgttgtctctttagcatcccaccacagaaacacaggcctagcaccttattggtctct

SEQ ID NO: 955644 - DNA, 120 bp, Artificial Sequence
  ENSG00000285999_3 (sequence is synthesized)
atggagtctaatattagagatagtatatgccttacttgagcattacactttgtcctttatatagactatcccacaaaccagttattataagtggttctgtgcattataagtggttctgtg

SEQ ID NO: 955645 - DNA, 120 bp, Artificial Sequence
  ENSG00000285999_4 (sequence is synthesized)
attgctgtgaagccatctgtggcaacctctctacctaaagacccccaaatcctaatgacatttttgaacaataagtctcaatgactgaagattttgccagttggagtttcttgcaatggg

SEQ ID NO: 955646 - DNA, 120 bp, Artificial Sequence
  ENSG00000285999_5 (sequence is synthesized)
acgctgcccccgaggttttgaacttgtcatctcctgttgtggggaacacctcttgaaaagccgctattagtttgctaccggggaatgactgacctatggaggccttgtgactcttttgcc

SEQ ID NO: 955647 - DNA, 120 bp, Artificial Sequence
  ENSG00000285999_6 (sequence is synthesized)
tgtaccaaattattcctatttagagactcaatgacctagcaaggtgggaagggtccaacatgctcatttgtcaagtagtaacggtatatttcaggtgtacttcccacctccattctcaca

SEQ ID NO: 955648 - DNA, 120 bp, Artificial Sequence
  ENSG00000285999_7 (sequence is synthesized)
taccctaaggcagctcctccaaaataaggagtagacttacttatctaaactggtctgggactccttcattgcataagccagccaagaagccacattggaggcactgtcaatctgtgcccc

SEQ ID NO: 955649 - DNA, 120 bp, Artificial Sequence
  ENSG00000285999_8 (sequence is synthesized)
tcaactgatatgtaagtgcaacttggacaattaacttgccttcttcctgaaaacaatgtgacttgcactttaggggtggtaatgagagacctgcaaatgtttacggaaacatcaccagta

SEQ ID NO: 955650 - DNA, 120 bp, Artificial Sequence
  ENSG00000285999_9 (sequence is synthesized)
gatcatgtatccctcaagtgattgcaattatctcttcaaagtgcaaatattggatattcaagagaacttcctgatgggatgactgacttattacatatgtgcagctgatgcaggcagtta

SEQ ID NO: 955651 - DNA, 120 bp, Artificial Sequence
  ENSG00000285999_10 (sequence is synthesized)
tccccaattagagttattcaattagaaaaggtaatatttcttcttgaatttagcttacactttcaatgatatcaccttgaccctggagatatccaggtcagcttcaactcaatggccagg

SEQ ID NO: 955652 - DNA, 120 bp, Artificial Sequence
  ENSG00000285999_11 (sequence is synthesized)
gttattatgggtgatagaattgtcctagacttccactttgcaggccagagcagtgtgggcaattgctaatacaacttgctctacccatattaatgtctcaagccaagtgaaaaggtcagc

SEQ ID NO: 955653 - DNA, 120 bp, Artificial Sequence
  ENSG00000285999_12 (sequence is synthesized)
aggatcttaagaggaaaatcacctggctttcaaaggtaaatcctagcagtttatgggatttgtttagctggttgggtctaggaccttagggggcatggttgagtttactgttacgttatt

SEQ ID NO: 955654 - DNA, 120 bp, Artificial Sequence
  ENSG00000285999_13 (sequence is synthesized)
ggtgtcatcctattgtttggagtcttcattatctttcttatcaaagtgttacttttaagatatctgataagaatctgattcagattctttgttcctttatatgtaacagatatttctgta

SEQ ID NO: 955655 - DNA, 120 bp, Artificial Sequence
  ENSG00000285998_0 (sequence is synthesized)
tttatcatgtcttgaatgtcaagatttatctctcaaatgtcaaatgtctgagggtatgcggcctttgcagtgactccccatcaagatttcatactttctacgagccattgactgcctcgt

SEQ ID NO: 955656 - DNA, 120 bp, Artificial Sequence
  ENSG00000285998_1 (sequence is synthesized)
gccattcattcttcttttttcctaacaagagattgtattgggtgtcttcttttcctgctccaccactgagtgttttaggaagataatacggattttggtttcttccttatgaatcatggg

SEQ ID NO: 955657 - DNA, 120 bp, Artificial Sequence
  ENSG00000285998_2 (sequence is synthesized)
gcgatgcatctgaacctgatgatgagaattgtgcatcacctgcagtttctggaccttgagctgactgcggctcttctttaaatatgaagaagaatgtttccaacagaagatataaccatt

SEQ ID NO: 955658 - DNA, 120 bp, Artificial Sequence
  ENSG00000285998_3 (sequence is synthesized)
atctcactgaatgagcagttgtgactataatgtatatacttctatcttctcacaccaccaaactgacagtcaaacaagagagttaaagcactgcctgaaatcagtacttgaatgaaaaga

SEQ ID NO: 955659 - DNA, 120 bp, Artificial Sequence
  ENSG00000285998_4 (sequence is synthesized)
taaagtgtggaccagggaagaggactgctagatagactttgggatgttcacacttacataaaggagctttttgttatttatctggaattcaaactcaactgggttgcctatgtttttgtt

SEQ ID NO: 955660 - DNA, 120 bp, Artificial Sequence
  ENSG00000285998_5 (sequence is synthesized)
ggataaggacaatgcactcttggaaatcagaagattcccaggcactattgctctttctttccctctctagctatttttagtccacgtccttttcaccatacaaaatattgttatagtcat

SEQ ID NO: 955661 - DNA, 120 bp, Artificial Sequence
  ENSG00000285998_6 (sequence is synthesized)
aacatatgtgcttgctttggttgtacctctacaatcaatcctgtatactagaataggaaagtgaaactaaaagagctaacataccatgtcattcctctgctcaaaaatcatcagagactc

SEQ ID NO: 955662 - DNA, 120 bp, Artificial Sequence
  ENSG00000285998_7 (sequence is synthesized)
tttgctacagagataaagttcaaacccctaagcatggaattcaaaggctttcacgcttcatgcttttctctcacaacatccttaagtgaactccttaatgcagccagaagtgttttcttc

SEQ ID NO: 955663 - DNA, 120 bp, Artificial Sequence
  ENSG00000285998_8 (sequence is synthesized)
actgatgcatgtttcctctcataaacctatctcaatctgaggcttaaagtttccgttttctgttaaagtttctctatcattctgtagatctgcaatcatatctctgtatacattttccaa

SEQ ID NO: 955664 - DNA, 120 bp, Artificial Sequence
  ENSG00000285998_9 (sequence is synthesized)
aattgacagtaatctctttccttagaatcacactgaatttcagaaatacttcaaattacacgtgtcttgagaattaacatgtactgtgtggtagggttgatgccaaaccctttatgtatc

SEQ ID NO: 955665 - DNA, 120 bp, Artificial Sequence
  ENSG00000244952_0 (sequence is synthesized)
agaagagctcagctttaaaaaaggatcacgacgtagaaaaagacacaacactgaagattgtcatgggtctttaagaaaaggaaatttgagacggctaaaacgccgaacagtgtggagttt

SEQ ID NO: 955666 - DNA, 120 bp, Artificial Sequence
  ENSG00000244952_1 (sequence is synthesized)
ggggaagagatgtggctaaagacagcgcatttgcttcctgaatgatggtcccactcagccatccacctatactttctacaaagtcaatttatactgattcttcagatcagttaatcactg

SEQ ID NO: 955667 - DNA, 120 bp, Artificial Sequence
  ENSG00000244952_2 (sequence is synthesized)
tgtttcttatatcccaagaaacagaatattttgatgggatcgctgatgtttcagactgcaaaagcagctcagggcgtttgcagtcgtgcaagtcaacaagataaccgtctggaccggaag

SEQ ID NO: 955668 - DNA, 120 bp, Artificial Sequence
  ENSG00000244952_3 (sequence is synthesized)
ctgggctcctcccggtctcctaacgccaaatccaacaccaagcttctgcagctgccacctcccgtagacttcgcatttcttccgcactctcctctcacgacgggtcttctttgttgtact

SEQ ID NO: 955669 - DNA, 120 bp, Artificial Sequence
  ENSG00000244952_4 (sequence is synthesized)
taatttcctacgcaataagatttcagcatgaccatcagtcccccaaagactaattcccacagagccgaagttcccaccaagggccgagggttaaggttactaaaatcagcgtttctgaat

SEQ ID NO: 955670 - DNA, 120 bp, Artificial Sequence
  ENSG00000244953_0 (sequence is synthesized)
agagctgcttgcttaaaagactctggcctccctcttgctccctctctggccatgtgacatgcctgctccccctccaccttccaccatgagtggaagcttctcaaggcctcaccagaagaa

SEQ ID NO: 955671 - DNA, 78 bp, Artificial Sequence
  ENSG00000244953_1 (sequence is synthesized)
ccaccatgagtggaagcttctcaaggcctcaccagaagaagatgttggtgccatgcttgtatagcctgcagaactaga

SEQ ID NO: 955672 - DNA, 120 bp, Artificial Sequence
  ENSG00000244953_2 (sequence is synthesized)
gattacaggcgtgaaccactgcccggctgagaaggaggttcttccgcgagagaaggctatgcagaggggaggatctcaggcctgaagggtctagaagcccactggaaggtcttccagaca

SEQ ID NO: 955673 - DNA, 120 bp, Artificial Sequence
  ENSG00000244953_3 (sequence is synthesized)
cttgggacatctagctcctgaagagtagaaagaggagctgctgccgaagaggtaagacagagagaggggcacaggatgtggagtccgcccctctgtcctcagggagtttctttggagaga

SEQ ID NO: 955674 - DNA, 120 bp, Artificial Sequence
  ENSG00000244953_4 (sequence is synthesized)
gaagagaatgaggctgggctcagaggaagttcctcccactccgtggagctcaaactagtccagtggtggcagctgccctggctggaataaagcatcgacccacagtggcctcacatctct

SEQ ID NO: 955675 - DNA, 120 bp, Artificial Sequence
  ENSG00000244953_5 (sequence is synthesized)
gaggcctttgcaggttaagagtctcctgccatgataccccaccacagtggaacccgttgttgggccagcgtgttctcagggactgggacacgggccaaatactacagccaccaaggccat

SEQ ID NO: 955676 - DNA, 120 bp, Artificial Sequence
  ENSG00000244953_6 (sequence is synthesized)
agcctgtgctctctctgagccgagggaagaacaccctctccggccctgtagttccatttttgtttctttgtttcgtttcctctgctgtcttctccagagctctgcgctgcagctgagaga

SEQ ID NO: 955677 - DNA, 120 bp, Artificial Sequence
  ENSG00000244953_7 (sequence is synthesized)
ctgggtatctcctagagattcctgacccccacgcaccagccccaccaccagagggcgcccgagcacagagacgccgcaaccggagcaggagccctaaacctgtcagggtgggtcagccct

SEQ ID NO: 955678 - DNA, 120 bp, Artificial Sequence
  ENSG00000244953_8 (sequence is synthesized)
aatcctggagggagggtctgggagagggccccagtgtggggacctgcccggctcaaccaaatgtagtttgttaccttggtggccatctgcagccaggtggccctgccacactgctaaacc

SEQ ID NO: 955679 - DNA, 120 bp, Artificial Sequence
  ENSG00000244953_9 (sequence is synthesized)
agaggatttaggaagcagacagggattcgggaagtggctgaagagcactggaaagacaaactcctgcggtgcaagagtcctggaccaggagtgcggagaactgggggcgctcctctccct

SEQ ID NO: 955680 - DNA, 120 bp, Artificial Sequence
  ENSG00000244953_10 (sequence is synthesized)
gttaccctaggcttgttttctcatatgtaaacaaaggcaggggcggggagaagggaaggactcgatggtacccaggtgcccttcaggctctaaccaaagacatgccccaccctcctggag

SEQ ID NO: 955681 - DNA, 120 bp, Artificial Sequence
  ENSG00000244953_11 (sequence is synthesized)
gaaccctgcggagcgcagagaacggctggagacatagcggccgcggttttccccgcagcgcaggagcgccaggcactgcgctgggtcaactgcggtcagggagtcacctgcccgcgacag

SEQ ID NO: 955682 - DNA, 120 bp, Artificial Sequence
  ENSG00000244953_12 (sequence is synthesized)
cgagcgcgcacccacactctcgaccaacccaggctggcctccagcccactctcgggtcccaacgcccaaacatctcgcattgctggctccgacatctccccacccgccgccaggaatcag

SEQ ID NO: 955683 - DNA, 120 bp, Artificial Sequence
  ENSG00000244953_13 (sequence is synthesized)
cgcagagggagatgcgtcttctgtggcgggtgcggggcgaggaccctgaccccagctctgggaagtgaactgtacggaggagagagctctccatcgtcagctctgcctccgcccctcctg

SEQ ID NO: 955684 - DNA, 120 bp, Artificial Sequence
  ENSG00000244953_14 (sequence is synthesized)
cggcttcacttcagcccggatgccggcgatggggaatagaccagggacgcaggagcacactggaccgggggtggatccacttggggaggcaggcaaccgacccgcgcaccggtggcgcaa

SEQ ID NO: 955685 - DNA, 120 bp, Artificial Sequence
  ENSG00000244953_15 (sequence is synthesized)
cctcgttccggtgaccgaagcttgtggaggtagctccactcccggctccctggtccgacatccccctgccacctcctcccccacctccccgagtcttgggagcctggaccccgaaggtgc

SEQ ID NO: 955686 - DNA, 120 bp, Artificial Sequence
  ENSG00000244953_16 (sequence is synthesized)
aaaaagtcaagagcctggaaaactgcactgtgcaaatatattgactttatttgtctcctttcaggagcctcacagacatatccaggtaaaaagatcgttaaataaatgccttcagccatc

SEQ ID NO: 955687 - DNA, 120 bp, Artificial Sequence
  ENSG00000287131_0 (sequence is synthesized)
gccggaaccgcttttgtggtctccgagacactcatttgctgtcctggtttccaaagctccacgtgctcagcgccgaaaacttgcaaatcatttgctgtctatactgggcgcccgctgcgt

SEQ ID NO: 955688 - DNA, 120 bp, Artificial Sequence
  ENSG00000287131_1 (sequence is synthesized)
gccaggtactgccaccggctctctcctcacggtggaataacttaacagagaagacagacatcaatcaaataccctggaaacgtggaaggcaggggaaagaacaaagggagagcaaaatcg

SEQ ID NO: 955689 - DNA, 120 bp, Artificial Sequence
  ENSG00000287131_2 (sequence is synthesized)
ccccaatcccacatcacccgcgacgtgaaaggatttgtccttccagctgcgggactcctatttgtttatttcaagtcagaggccttccctttatgcccacatctgttcccgaccctctcc

SEQ ID NO: 955690 - DNA, 120 bp, Artificial Sequence
  ENSG00000287131_3 (sequence is synthesized)
agctccaggcacagccgttcagggtgatgccaaagggaaatgagaacgcctggtttcgagtgccagcctgaggccccttaagccctaggtacgcagctctctcttctttcttaaactttc

SEQ ID NO: 955691 - DNA, 120 bp, Artificial Sequence
  ENSG00000287131_4 (sequence is synthesized)
cagcccaggaaaatcacccttcggttttacagatgcgatagggcgttattgtgattccttcattcacgtaaacatgaattgagtgtctagtgggttccaggcacaccaggaaagaataag

SEQ ID NO: 955692 - DNA, 120 bp, Artificial Sequence
  ENSG00000287131_5 (sequence is synthesized)
tgacagatttgccctccatctctcatcctagcctggctccaaaaactgcagcctgtttccctcaacaaaaatgacgtcaagaatacctagatgtgaccacaccgaacttgcttgcccgtt

SEQ ID NO: 955693 - DNA, 120 bp, Artificial Sequence
  ENSG00000287131_6 (sequence is synthesized)
ttgggaaacccaactttcttcctgaatagtcagaacctctggctttcctggtctcttaagaaccgcaaactattgaaaagcagatgcgtctttcagcctctttaataaatgcagtaagga

SEQ ID NO: 955694 - DNA, 120 bp, Artificial Sequence
  ENSG00000255158_0 (sequence is synthesized)
actcccatccagcacataaacgctccccacgtccttgtttgaccctgagctgatgacacagcatgtggggaagactcagcagaaatggacggctgaagaccgagaacactgagcagagac

SEQ ID NO: 955695 - DNA, 120 bp, Artificial Sequence
  ENSG00000255158_1 (sequence is synthesized)
tgcggctgctgctcaccacctgaaagtctggagtttgaaccttcacaagttagaggcttaaaaacaccacggacttcccaggaacatccagaaaaccacagcttcgcagatccaagacta

SEQ ID NO: 955696 - DNA, 120 bp, Artificial Sequence
  ENSG00000255158_2 (sequence is synthesized)
aggatgtgtcaggcagaagaaaaagccagacagacctgccctaacagcatcaacactgatcctcttcagggtgatccataagaattcagcctgcgagaacaaagcccaacactcttcagg

SEQ ID NO: 955697 - DNA, 120 bp, Artificial Sequence
  ENSG00000255158_3 (sequence is synthesized)
taaaattccaacacacaatcaggaagtactggacgtgtgaagaagggataacaggatccatgatgaagggaaaaagtagccaaaagaagcagatcctgaggctgggcacggtggctcaca

SEQ ID NO: 955698 - DNA, 120 bp, Artificial Sequence
  ENSG00000255158_4 (sequence is synthesized)
cctgtaatcccaggcgggcagatcacgagtaataggaagctacagaaaacatgggcactacgccctgtgagcctcccaccatgcacaggagccgccttctgaagaacgtgccagaagctg

SEQ ID NO: 955699 - DNA, 120 bp, Artificial Sequence
  ENSG00000255158_5 (sequence is synthesized)
ggagggctttgtgacagcagatggacggagctcggctcccaggaaggggctcagcattcgccctgccagtcgctgatactcagagactcaatagatgatgttctccaaacttcataaaat

SEQ ID NO: 955700 - DNA, 120 bp, Artificial Sequence
  ENSG00000255158_6 (sequence is synthesized)
ataagcacatttcactacaggaagacaaaggatgaataatgcctagaaaagataccgaatgtctatgccagctctggagagaccaagacctgccactggggagtgtctaccctcaagagg

SEQ ID NO: 955701 - DNA, 120 bp, Artificial Sequence
  ENSG00000255159_0 (sequence is synthesized)
gctgaagaaacagatgggcttttggacttggacctcatccaaggagctggctgcctgcactttcacagaccgtcagcttcatccccaggccccaaatcctgaatttgccgtgtcaatgaa

SEQ ID NO: 955702 - DNA, 120 bp, Artificial Sequence
  ENSG00000255159_1 (sequence is synthesized)
cgcaaactcttctgtggctgaaattcccctcactcttcctgcctctaaccgaaaaggaggatacagaccaaggagcacttcatgaaggtcagacatagcagcaccaagagacaaaacaga

SEQ ID NO: 955703 - DNA, 120 bp, Artificial Sequence
  ENSG00000255159_2 (sequence is synthesized)
cagtgttcactaggacgaacaagcggctcaaaaggcactggagtttccctgtaagaactacaaacaccacgggagtgatgttaactcagatttttccatataaaagattcttcctgtaaa

SEQ ID NO: 955704 - DNA, 120 bp, Artificial Sequence
  ENSG00000255159_3 (sequence is synthesized)
cccctcactcttcctgcctctaaccgaaaaggaggatacagaccaaggagcacttcatgaaggaaaaccaaggcccaagtcatacagctagtaaaaggaggagccacaattcaaaccagg

SEQ ID NO: 955705 - DNA, 120 bp, Artificial Sequence
  ENSG00000255159_4 (sequence is synthesized)
cacccaagtcacagctgactcatgccattgctctttgtaatgagattctgaacctgccacaggaccagctcctttggtgagcgaagtgtgtgagcgaaggaaagattcttgggtagaact

SEQ ID NO: 955706 - DNA, 120 bp, Artificial Sequence
  ENSG00000255159_5 (sequence is synthesized)
tcataaagtctgtcataagatcagccccagaggaggagacttttcagatcccatccctcatacacattcagaaggccaaggaaacaccctcaggattgaactatgataaagaaggctttt

SEQ ID NO: 955707 - DNA, 120 bp, Artificial Sequence
  ENSG00000255159_6 (sequence is synthesized)
cctggtcactataatcccatgatttgtaatgtgggcttcattccgcaaaagcccagggctggtgttatctaggagtgatggcagtcatttccagatcatgagcagtcgcacagataaggc

SEQ ID NO: 955708 - DNA, 120 bp, Artificial Sequence
  ENSG00000255159_7 (sequence is synthesized)
aaagggcaactcctgcctagcatgtgtgacccaagagatgacagagaagagaagggaggaatgcactccttcacctggtccctcagcactgagccagcctcccatttgtacatggaagga

SEQ ID NO: 955709 - DNA, 120 bp, Artificial Sequence
  ENSG00000225083_0 (sequence is synthesized)
caccccatgcggtcaccagcagacagccgctttctgcacaagttccaagatggactcacagcagtccccgccagccatgacgctgagatgggtgtacacccagctctggaggaacccaac

SEQ ID NO: 955710 - DNA, 120 bp, Artificial Sequence
  ENSG00000225083_1 (sequence is synthesized)
aaactgcagaaccaagcgtggacttctgctcctgagggggacggaaggacagtcccctgcggtcatctctataggagatgggggccatgggtgggagagaaactccctgttgcactttgt

SEQ ID NO: 955711 - DNA, 120 bp, Artificial Sequence
  ENSG00000225083_2 (sequence is synthesized)
agccctcagtatgattaaagtgtttaccatgtacataaattatgctttttaagttcacatgtcttatatacttttacgttactttttaaaattaaaagacagttaacttttaagaataaa

SEQ ID NO: 955712 - DNA, 120 bp, Artificial Sequence
  ENSG00000225083_3 (sequence is synthesized)
cgctgaccaagtgccaggcctcactgaagctgacctccgcgttaaccctggacacaagccgagcaggaaggataatgccggcttgacaactccactggtttctgctcccactggccctac

SEQ ID NO: 955713 - DNA, 120 bp, Artificial Sequence
  ENSG00000225083_4 (sequence is synthesized)
cactgggtggaaaccggttccttccggcccccgggccctgcaccagagctcgacccccaccgcctcacctgtcctgatggcgtcctccagcctggggtttctctctccctggagaagctg

SEQ ID NO: 955714 - DNA, 120 bp, Artificial Sequence
  ENSG00000225083_5 (sequence is synthesized)
gtggtagtagccgggattctggtccatctgcgcctgggccccactcagcaccatccagacgcgggcacggtgctccagcgggacccctttccggacatagcgcttcactgaaggccgaga

SEQ ID NO: 955715 - DNA, 120 bp, Artificial Sequence
  ENSG00000225083_6 (sequence is synthesized)
ggacggacagcgtgtgagctggaccaggggcctgcggggcccacgcgttcctgccacactttccactctcaccagttctcttcttaaatcaaatattaaagagacccagaacttcgtcca

SEQ ID NO: 955716 - DNA, 120 bp, Artificial Sequence
  ENSG00000225083_7 (sequence is synthesized)
tctccaccaaaactggtacatatactcctttaaaaattctgctctcctctccctctcaacagagcacaaaccagactggctacagaaccgcccccacgcccacttcaccattcaatgcag

SEQ ID NO: 955717 - DNA, 120 bp, Artificial Sequence
  ENSG00000225083_8 (sequence is synthesized)
ctgcaaagcttcctggcagccgtgcagagcagcagcaaaggggcaaagcagtgagaggcccagctgagtacaaggaggccggctgggctcagctgtgagcacctcaggtgggacgccaca

SEQ ID NO: 955718 - DNA, 120 bp, Artificial Sequence
  ENSG00000225083_9 (sequence is synthesized)
gctgggagaacacggtttcagtggcagacgtcactgtccaactcgtgcagttaatctctatatattgaaagctactccattttgtagggatattttaattgacaataaaaatgtgaaaaa

SEQ ID NO: 955719 - DNA, 120 bp, Artificial Sequence
  ENSG00000255153_0 (sequence is synthesized)
tcgagccctgcagcccggcgaaatggctcccggcggggccgtttgcgcatgcccagtcatgacggttgtcggcgcgggccctagcgtggcggcgctgcagtctgggcagtgggttggttc

SEQ ID NO: 955720 - DNA, 120 bp, Artificial Sequence
  ENSG00000255153_1 (sequence is synthesized)
ctcctcggtcctctgtcgagtggcgacagggcctagccacctggcgggggtgaccttcggacgtgcgacccgctcggagaagggagggaactgtggcccgcaacaaagcagtgacaggcc

SEQ ID NO: 955721 - DNA, 120 bp, Artificial Sequence
  ENSG00000255153_2 (sequence is synthesized)
cgacatcccctgcagggcgatctttccctcagctgcctgccggaggaagggcctttctgtttcacagggctaaagatggggcgcggttcctccacggggcggctgccgggtgaacggaac

SEQ ID NO: 955722 - DNA, 120 bp, Artificial Sequence
  ENSG00000255153_3 (sequence is synthesized)
gctccggagaaccccagtccggcctgacctcggccctcgcggtcaggcgctccaaccagagcgactccagctcgaacagcgctgggtaaactgaggctgaaccccgctggctgcatcccc

SEQ ID NO: 955723 - DNA, 120 bp, Artificial Sequence
  ENSG00000255153_4 (sequence is synthesized)
aggagtcgggcgtttacggtcacgggaacaggttaataaacttttacgcagcagacccggaacttaggtcccgatgtccgggtatcttaagaacaagaagcattcttagttgaagtttcg

SEQ ID NO: 955724 - DNA, 120 bp, Artificial Sequence
  ENSG00000255153_5 (sequence is synthesized)
ctttaaagataatgatacagatgcttgcggaggacaggcgttatgcaaagattggcaatcctttgacgagcccaggtagtacagcacgtctcccccgtgatgttttttggcttttatctt

SEQ ID NO: 955725 - DNA, 120 bp, Artificial Sequence
  ENSG00000255153_6 (sequence is synthesized)
acatataaacaagcgtacccaggtggacgccttcctcctcgtgcttttgggaacaccctgctctatggagtagccattcttttattccttcactgccttaataaacttgctttcacttta

SEQ ID NO: 955726 - DNA, 120 bp, Artificial Sequence
  ENSG00000225085_0 (sequence is synthesized)
tcctcactgctcgcagtgtccacaggcagcagcagcagaatctgggagtttattagatatgtaggatggcagatccactgcaggcctcctgagtcagaatctgtcctttaagaagatccc

SEQ ID NO: 955727 - DNA, 120 bp, Artificial Sequence
  ENSG00000225085_1 (sequence is synthesized)
atggaagtggaggaaacaattgaacaacattagagtcaagtgagagttgactgtgaagggcatggggagtttcacagtgactcctgggttttgagcttttgtgaagataacaaaagatgc

SEQ ID NO: 955728 - DNA, 120 bp, Artificial Sequence
  ENSG00000225085_2 (sequence is synthesized)
ctcttgattttaatttttctaatcagccttcccaaatttattatggaaaattactttaagtgtttatactttccacctcttctctgtatgatctgtataaaataaaattactttacatga

SEQ ID NO: 955729 - DNA, 120 bp, Artificial Sequence
  ENSG00000225084_0 (sequence is synthesized)
ggcccaaccgagaggagatcaaggtctctccaccaacacccgtgaaccctgtccaaagcttttctacacacttgaaaagtaatcacagtaaaacgttagcaacaatatgatttccatcct

SEQ ID NO: 955730 - DNA, 120 bp, Artificial Sequence
  ENSG00000225084_1 (sequence is synthesized)
ggattactgatattgcagaaagaagatagttatacaagggtggcactgaacacacaagaaacaaatgattcacggtagcattagaggcaccagcaaaggacacacttttagagaaaggaa

SEQ ID NO: 955731 - DNA, 120 bp, Artificial Sequence
  ENSG00000225084_2 (sequence is synthesized)
tctgcttccggctggaatgctccttctccacagagtccggaaactgacatatgcagccacccacccagaaggacatgtccaagaaggaatggaaagaaaaatgatggcccagatgttctg

SEQ ID NO: 955732 - DNA, 120 bp, Artificial Sequence
  ENSG00000225084_3 (sequence is synthesized)
tagcttgcagtgactgccaattcaccacagaccccagtacctgggagggcaaggcagcatcaggctcttgcttcctggtttcaggcagccagggccctgatggtgggtggcaactctgac

SEQ ID NO: 955733 - DNA, 120 bp, Artificial Sequence
  ENSG00000225084_4 (sequence is synthesized)
agaatgcagactggccaggggagaaacctttagaagggcactggctgacgggacttgggggttgaacacacagcgctgatttatcacttccttactcataaaaatgtgattcgaactgct

SEQ ID NO: 955734 - DNA, 71 bp, Artificial Sequence
  ENSG00000225087_0 (sequence is synthesized)
gttctggagactgggacatccaaggtcaatgtgctggcagattcaatgtctggattggcaaacacaaatca

SEQ ID NO: 955735 - DNA, 120 bp, Artificial Sequence
  ENSG00000225087_1 (sequence is synthesized)
tgctggcagattcaatgtctggattggcaaacacaaatcatgttccaagttctgccttccacctgagtgaaatacatcaccgctttccctgctcccgccgccattaaaattgtgtttggc

SEQ ID NO: 955736 - DNA, 120 bp, Artificial Sequence
  ENSG00000225087_2 (sequence is synthesized)
atctgaccaccaagatacagatatttcctagactgttttgcagctaggtacttagctcaacattattgtgcagttgaaaatatttggctcaccccatggaatttggaaaatatgttgctt

SEQ ID NO: 955737 - DNA, 120 bp, Artificial Sequence
  ENSG00000225087_3 (sequence is synthesized)
ctgattatcaaaggtaagtactttcttgaaaaacactgccagataccacagcttgctgagggaaaaatgagagatgccaaaattcatttcaaaataccccatgcatgtgtttagaaaaga

SEQ ID NO: 955738 - DNA, 120 bp, Artificial Sequence
  ENSG00000225087_4 (sequence is synthesized)
gttttagcaacaacaaaggtgttcactattataagatgttcagccgcttacctctagcttcagagagtctattccctgttcttgtcacctaactctaatgttgggaggcagctgagtggc

SEQ ID NO: 955739 - DNA, 120 bp, Artificial Sequence
  ENSG00000225087_5 (sequence is synthesized)
ctccaggataaccatattgcaggacaaaagaaaggagatgagatggaagagttccagcttcagccctgcggagcctgtgagctggtgccaaagataacagagtagcatcaaaggctgtat

SEQ ID NO: 955740 - DNA, 120 bp, Artificial Sequence
  ENSG00000225087_6 (sequence is synthesized)
gggacagctgtactggcagggagctacaaaggcaaaagagagagagaaaggcaggagagagagacagagagagagagagacaaacagagaaagacaaagacagaaacagagagacattga

SEQ ID NO: 955741 - DNA, 120 bp, Artificial Sequence
  ENSG00000225087_7 (sequence is synthesized)
gacagagacagaaagatacagagaggaagatcttaaaatatgtatattttagtattatgagttctaaaggatgcgggagaaatgggatgaagagatgaaagacaacaggaaaatagagaa

SEQ ID NO: 955742 - DNA, 120 bp, Artificial Sequence
  ENSG00000225087_8 (sequence is synthesized)
aggtacttagatagtaatgaagataggggccaccattccctgtgaaaatcaagtgggaaagtcctgagtcctttaatgactttacagaggacagaataaactcctatcatattcatgcaa

SEQ ID NO: 955743 - DNA, 120 bp, Artificial Sequence
  ENSG00000225087_9 (sequence is synthesized)
actaaacctgttttcccagcactgcctctttttccattctgcagatagtaatgaagataggggccaccattccctgtgaaaatcaagtgggaaagtcctgagtcctttaatgactttaca

SEQ ID NO: 955744 - DNA, 120 bp, Artificial Sequence
  ENSG00000225087_10 (sequence is synthesized)
gaggacagaataaactcctatcatattcatgcaattgtgcctatgggtctcctgtcttgttgttagaatggatttatttgaacactaacgaatattgataagtataaaagaaaaataaaa

SEQ ID NO: 955745 - DNA, 120 bp, Artificial Sequence
  ENSG00000225087_11 (sequence is synthesized)
gtgggcgtaggaccctccaagccaggtgcgatataatgtcgtggtgcgccgttttttaagctggttggaaaagcgcagtattcgcgtgggagtgacccgattttccagtgagatgaaccc

SEQ ID NO: 955746 - DNA, 120 bp, Artificial Sequence
  ENSG00000225087_12 (sequence is synthesized)
gtttcagatggtaatccaatgtataagcaatggactgttttattcttggtgctttcaagacctgatgctttgttttgaacaggttgatacatctaggagtgaaatacatcaccgctttcc

SEQ ID NO: 955747 - DNA, 120 bp, Artificial Sequence
  ENSG00000225087_13 (sequence is synthesized)
ctgctcccgccgccattaaaattgtgtttggcatctgaccaccaagatacagatatttcctagactgttttgcagctaggtacttagatttcatactaggacctttcattggctgaacaa

SEQ ID NO: 955748 - DNA, 120 bp, Artificial Sequence
  ENSG00000225087_14 (sequence is synthesized)
gtaaataagtcatatgacagacaggcagtattttcttattttaataacaagtttaaaaatcccacttcttgtacttaccttctgtctgacgtcatcagtattttaaaatgccaactggga

SEQ ID NO: 955749 - DNA, 120 bp, Artificial Sequence
  ENSG00000225087_15 (sequence is synthesized)
tcaagttcaacactgcattactgaagaatccagattatctacatttcaagtgccaaatgaaagaaagaacccagaaaataaaacaatatgatgataacagtaaaattttttaaaatgaaa

SEQ ID NO: 955750 - DNA, 120 bp, Artificial Sequence
  ENSG00000225087_16 (sequence is synthesized)
atagatgaaattttacagtttggacaagagaggatttgacagacagcccagtaaaacaggactatcggagccaagactgaggaatataatagcattgtgtgtttgggcagacaaaacttt

SEQ ID NO: 955751 - DNA, 120 bp, Artificial Sequence
  ENSG00000225087_17 (sequence is synthesized)
ctcttatatgcagtcctgtccagttcccctgcttcatctcaagctttgtattaagaaacatgaagagcttatgtgcatactttctcatctctgtatctttgcatgtgctatcacatccat

SEQ ID NO: 955752 - DNA, 120 bp, Artificial Sequence
  ENSG00000225087_18 (sequence is synthesized)
ttggaacccctcccaaaacttccaaaatgggaaaaagcttcctgtttcctttaaaattcaactcaatgaccaccccaactttaagtctatcttccttttctcctctgtccttttatagtc

SEQ ID NO: 955753 - DNA, 120 bp, Artificial Sequence
  ENSG00000225087_19 (sequence is synthesized)
ccctagtatagcatgttatttaattttacatgtttttaacttatctttttatttgtcagtagtgtctcacacaactactagtacatggcaaataattaaaattctattgaattaattaaa

SEQ ID NO: 955754 - DNA, 120 bp, Artificial Sequence
  ENSG00000225087_20 (sequence is synthesized)
aatgtataagcaatggactgttttattcttggtgctttcaagacctgatgctttgttttgaacaggttgatacatctagcctgcaacatccgacagcttcagttattgagtgaaatacat

SEQ ID NO: 955755 - DNA, 120 bp, Artificial Sequence
  ENSG00000225087_21 (sequence is synthesized)
caccgctttccctgctcccgccgccattaaaattgtgtttggcatctgaccaccaagatacagatatttcctagactgttttgcagctaggtacttagcatttctctttcctctggagaa

SEQ ID NO: 955756 - DNA, 120 bp, Artificial Sequence
  ENSG00000225087_22 (sequence is synthesized)
tagactgttttgcagctaggtacttaggtaagtactgccctgagattgaatttaaaccaacgtatgtaagcataaatattgtgtccaaattgtgtacaacttcttggtcatccctttaaa

SEQ ID NO: 955757 - DNA, 120 bp, Artificial Sequence
  ENSG00000272574_0 (sequence is synthesized)
taacataagcttatacggggttaaaaataccattctgaagatgtgtcttgtggaattgggtgtatgctctcagtatacaggctgattgttcctgtcatatttgatggcccttaatatgga

SEQ ID NO: 955758 - DNA, 120 bp, Artificial Sequence
  ENSG00000272574_1 (sequence is synthesized)
gaaaactgttctgttgatttattctcacactaacagctctcctttttggtcactgcattaattttagtcagttactttcttgcttctaaagaatctttttatcttaatggcagatcattt

SEQ ID NO: 955759 - DNA, 120 bp, Artificial Sequence
  ENSG00000272574_2 (sequence is synthesized)
tcccatctgggtactgacagagtttggaaaagccattatctttatagtttaagagacagcttgatgttattgttacactttgaaagttaaagtttttaaggttgggtgcggtggctcaca

SEQ ID NO: 955760 - DNA, 120 bp, Artificial Sequence
  ENSG00000253389_0 (sequence is synthesized)
gtgagaatctctgcctcgagacacaacaacaagttgtttgtcccacatcatgctggggtggctgggaggggatagggtgagacagggagcagccactccactgaagaccaggccatgcag

SEQ ID NO: 955761 - DNA, 120 bp, Artificial Sequence
  ENSG00000253389_1 (sequence is synthesized)
aggggatgagaagggcagcgttacctcccgagaggctactccaaggagagcggctcggggtcactgtttcccccttttcaggctggcccgcttcactatctgcgcccccttcctgccctc

SEQ ID NO: 955762 - DNA, 120 bp, Artificial Sequence
  ENSG00000253389_2 (sequence is synthesized)
gacagatcgcaaagacgggcagaacacaggcagaagatcgaaaggaggccacacggaggtggcagacacactgcccaccagggagaagagagactggagagagagctcataaagagcagg

SEQ ID NO: 955763 - DNA, 120 bp, Artificial Sequence
  ENSG00000253389_3 (sequence is synthesized)
aaacccggctcagcatgtagcaggagccatgccagggctcccagggcgtgggcggcgcccctgagggtctgggaggcctgaagacgaacggtcgagctcacaattgtgcacttggccctc

SEQ ID NO: 955764 - DNA, 120 bp, Artificial Sequence
  ENSG00000253389_4 (sequence is synthesized)
cagaatgtgacttgcttgaaaccccagagccagttggtgacagaaacaggacgatccgggtgcaatcccatggtggctcacgcctgctatcccagcactttgggaggccaaggccggagg

SEQ ID NO: 955765 - DNA, 72 bp, Artificial Sequence
  ENSG00000253389_5 (sequence is synthesized)
agatttacagagtgcttttacttttcaaagagcatttttttctttctggcttttttttttcttttttttgta

SEQ ID NO: 955766 - DNA, 120 bp, Artificial Sequence
  ENSG00000253389_6 (sequence is synthesized)
cagacatgagccactgtgcccggcccaaaaggcattcttacaaaaccgtgcggtccctgataagtggatattattaactctgtttccttgatgaggaagctggggttcagagccaactgt

SEQ ID NO: 955767 - DNA, 120 bp, Artificial Sequence
  ENSG00000253389_7 (sequence is synthesized)
tggccctctcggctgaagcagcccggcccaagtgcccttctgcccagcagccaggctctgccctgagtggcccgggtgacatcacgctcctataattttacctccccaaaccagctgccg

SEQ ID NO: 955768 - DNA, 120 bp, Artificial Sequence
  ENSG00000253389_8 (sequence is synthesized)
gagctgtccaaccgggctagaaggaagccggcaggtgcccatgtcctgagcactgaaagcacaagtgaaagtcactgtgtgagtgacacccgctgctgcctaaccccgccctgcccagag

SEQ ID NO: 955769 - DNA, 120 bp, Artificial Sequence
  ENSG00000253389_9 (sequence is synthesized)
acctggaagtgggggctcggcctctcacctatcctgcccatccccatgggaactagaaagagttctgcccagggaaagtttcttactttcagaaaataatacagtccgagaaagcagcta

SEQ ID NO: 955770 - DNA, 120 bp, Artificial Sequence
  ENSG00000227824_0 (sequence is synthesized)
gtccacatcacatggtacaagaattgtaggtaaagagatttctcctgaagttggcagactcagaccaaccatgggaaagatctgactttgggaaagatatggaagtatgacactctgtgg

SEQ ID NO: 955771 - DNA, 120 bp, Artificial Sequence
  ENSG00000227824_1 (sequence is synthesized)
agaagccagctaccatgacttgaggacacttagccccaaggaaaagccattagcaaggaactgagacttcccgtcaacagccatgtgagtgggccttcctggaaattgatcctgcagttt

SEQ ID NO: 955772 - DNA, 120 bp, Artificial Sequence
  ENSG00000227824_2 (sequence is synthesized)
cagtcaaggcttcagatgatgcaacccagatgctgaaccagaaacacccagtgaaaccacgcctagattcctgactctcagaaactgtgggagaataaatgtttgttttaagccactaaa

SEQ ID NO: 955773 - DNA, 120 bp, Artificial Sequence
  ENSG00000236968_0 (sequence is synthesized)
aaaatgtgggaagacctgcctttgccaataacaagactccttggaagataagatggccccttactctctctaacaacagacttccaagaggaatttctctatgatcttgttccaggaatg

SEQ ID NO: 955774 - DNA, 120 bp, Artificial Sequence
  ENSG00000236968_1 (sequence is synthesized)
tgtttcccaagaagcaagtctggattcatcttatgtacactcctggcctgtctctgaaattcggggatctgctcagcagaccggaacaacccaggaggcatctgggctctggaaggaaat

SEQ ID NO: 955775 - DNA, 120 bp, Artificial Sequence
  ENSG00000236968_2 (sequence is synthesized)
taggtcagaaatcatcccagcgtggaaccctccttgactcacgctgtctgggtgaacacacagacccattccactgtttcctggccagcttgacttcactcttcttatttttcttgggct

SEQ ID NO: 955776 - DNA, 120 bp, Artificial Sequence
  ENSG00000236968_3 (sequence is synthesized)
aagaaaagacattctttgctggatataaatatcatgcatttcagaaagttcatatgtacaaataacatggattcgggatcattacagttgttaattttagtaaaataatttttttctttg

SEQ ID NO: 955777 - DNA, 120 bp, Artificial Sequence
  ENSG00000225552_0 (sequence is synthesized)
gttacaggttgaaagaatgaatgagcgacacaggatgaaagacagcaagggaacaggctactggggagatacctgtaacaacatcaccaaccacagttggggtaatggagaatttctaaa

SEQ ID NO: 955778 - DNA, 120 bp, Artificial Sequence
  ENSG00000225552_1 (sequence is synthesized)
aaaaaaaaaaaaaaggccttactactttctgatcatatcttagatatgtcataagccaaacatcctactttgagtcaactcaagtcaatggggtatatcatctataagaaaaatgtggga

SEQ ID NO: 955779 - DNA, 120 bp, Artificial Sequence
  ENSG00000225552_2 (sequence is synthesized)
tatttgggaacatctacagaaacactataaagtagaactataagatgaatacccctgaactacatgaaaagttaaaattatactctcctgtaccagaaagagagctacgatcaagaggac

SEQ ID NO: 955780 - DNA, 120 bp, Artificial Sequence
  ENSG00000225552_3 (sequence is synthesized)
cacttggaagggcaaataactcacaaagcccaacagactgtcccttaagagaggtagaagaaaactgaataactgaagcaatcaccagcaggttccagcagctagacacaatgatatcaa

SEQ ID NO: 955781 - DNA, 120 bp, Artificial Sequence
  ENSG00000225552_4 (sequence is synthesized)
ttagaagtaaccaataaaaatacagaaatgaaaaaaagaaataacagaaaactaaactattcattcatttttctagttttcagcagcaaaccatctgtagttattttgtcatagaggcaa

SEQ ID NO: 955782 - DNA, 120 bp, Artificial Sequence
  ENSG00000225552_5 (sequence is synthesized)
atgacactctttgaggactcaattgtattataaaagaatatataacttgaccttcaatcaacaagagaaggttaaatgttatttaagtagattttgagaaacataacaactgtgatacct

SEQ ID NO: 955783 - DNA, 120 bp, Artificial Sequence
  ENSG00000225555_0 (sequence is synthesized)
gcgcagtgagcccaggcgggcagccctggccagcagctcttgtccctgtggctggaggctgaagtccacgtaggccccggcggggagccgctggggtgtaggccgggtgcctttgtccaa

SEQ ID NO: 955784 - DNA, 120 bp, Artificial Sequence
  ENSG00000225555_1 (sequence is synthesized)
gcctggcgccactgcccagacactttacttcaaatttggctttattttcatcattgatattgattaaaatgacattcacttgcccggaaagtaaaagaggtcttcagcacaaaatattgc

SEQ ID NO: 955785 - DNA, 120 bp, Artificial Sequence
  ENSG00000225555_2 (sequence is synthesized)
tccaacaagcaagcataaatcactgagattgaaatgtcatctatctttattggccaaccacataatctccatgaaaattctcaacagagagcaaggaactcactttcttctaagcaaaga

SEQ ID NO: 955786 - DNA, 120 bp, Artificial Sequence
  ENSG00000225555_3 (sequence is synthesized)
caatttggatttgcctcgtggcactggcatctcttcatgtctggacgtcagatgttagcttggtgcctttctcccttatcagggggacattttgaacccagccgcaccaatgttctcatg

SEQ ID NO: 955787 - DNA, 120 bp, Artificial Sequence
  ENSG00000225555_4 (sequence is synthesized)
gatggtggccttcgattcttctagattcaagatttggctcttgtacttttcctgccagtcctctacaatgtactggtggtaggggtcattggagtgttcccgtctcttggatttcacagt

SEQ ID NO: 955788 - DNA, 120 bp, Artificial Sequence
  ENSG00000225555_5 (sequence is synthesized)
gctcaccaggatggccacgatgatgaaagagaacattccaatcatcaccatgaggtacaggatgacatagtagaagttctcagcatcaactttggcttggagggcctcttgctcagctgt

SEQ ID NO: 955789 - DNA, 120 bp, Artificial Sequence
  ENSG00000225555_6 (sequence is synthesized)
tgtgttctggcgccaattgtccatataagtaataaaaatccttcggaagacgtcttccagcgtctgtgtgaaattggataaagtagacatgcttccctcctgctgcaatttaaataataa

SEQ ID NO: 955790 - DNA, 120 bp, Artificial Sequence
  ENSG00000225555_7 (sequence is synthesized)
aataggcgaacaagaacttgagctccatgacaacagggaccttacctgtattgcccattctgtgtctggctggaaaaaagctctcactgtatcccaaaagaatggtgataattctagatt

SEQ ID NO: 955791 - DNA, 120 bp, Artificial Sequence
  ENSG00000225555_8 (sequence is synthesized)
ctggctgtgatgaaatcaaccacctcatctatttacaaggtactaagattatcattccgatgaaaaagactctggaaaagaaagttttcaccttttcaaaaccattaacaatacatgacg

SEQ ID NO: 955792 - DNA, 120 bp, Artificial Sequence
  ENSG00000225555_9 (sequence is synthesized)
tttctaattgagctcacagagtaggaagctttccttgatgctattaatgtgagcacaatggttttgtgaaaagctggaaatgggggcattgagaatctctggtaatttcatttagctatg

SEQ ID NO: 955793 - DNA, 120 bp, Artificial Sequence
  ENSG00000225555_10 (sequence is synthesized)
cactgagcttctactttctctgtgcctggttcagaatattagaagagatggcaatgattctggagtggattacaccatttgactgaggaactactggaattttcttcttctctaagatac

SEQ ID NO: 955794 - DNA, 120 bp, Artificial Sequence
  ENSG00000225555_11 (sequence is synthesized)
caagcatgacgacttccaatgaacaggcctcaccaagaactctccaaacatgtagggtttctttagtttatcaatgaaacaagcaacttggtaggatgcttctgaaatgccgctgctgtg

SEQ ID NO: 955795 - DNA, 120 bp, Artificial Sequence
  ENSG00000225555_12 (sequence is synthesized)
atagagcaaaccaagttttgataaagttgattctcttctgatggagccttcccccaaggtgctttcccagccttgctggcttcatgcttctgggattgagaagcttgtcaccatcatcaa

SEQ ID NO: 955796 - DNA, 120 bp, Artificial Sequence
  ENSG00000225555_13 (sequence is synthesized)
caggcctagtttgcaacggaaagccagagaacgtctcagcttccttgtgttctgtttgccctgacattactgaactttagcaagacccaaagttaacaaagacccctgtcacaggccgaa

SEQ ID NO: 955797 - DNA, 120 bp, Artificial Sequence
  ENSG00000225555_14 (sequence is synthesized)
tggcagggtatgttctttgatttctgttagtggaaaatgaatgtaacacagagatcacatgggctgtgaggcccccctgtagcctccagcaccctttcttcctggagcatgaatctggac

SEQ ID NO: 955798 - DNA, 120 bp, Artificial Sequence
  ENSG00000225555_15 (sequence is synthesized)
ggaaatggtgccgtattaggtttgttttacaaagatgattttcaaagaggaagaggatcaaaagaaacagaaaagaacccccagcgtgcaggccacaggtgtgtgggggttaaaactgga

SEQ ID NO: 955799 - DNA, 120 bp, Artificial Sequence
  ENSG00000225555_16 (sequence is synthesized)
tgggaaggagagggggaagtcctggaactcaaggaggcacaaccgtgggggcttcattttccccaggaactataaaaggccaatgggctcttgtaggaaaaaagcagatcagcacagatg

SEQ ID NO: 955800 - DNA, 120 bp, Artificial Sequence
  ENSG00000225555_17 (sequence is synthesized)
ggagcagagaaagggctctcacagcaaattttgccggctttccagtttttccatagatcagaccactttttggcctttgcttagaaccatcaagcttcctccttaggcatccagcacagc

SEQ ID NO: 955801 - DNA, 120 bp, Artificial Sequence
  ENSG00000225555_18 (sequence is synthesized)
tctttccatatatgtggcggttttttgttttgttttaataaagaaaaatgtttataagcattgtacacattgcatactggaaatctgccaagagagtaggttttaggtgctcttaccaca

SEQ ID NO: 955802 - DNA, 120 bp, Artificial Sequence
  ENSG00000225555_19 (sequence is synthesized)
catacccccccccaaaacacacacgaacatggacatgttaatggttggtgtaatatgttaacggtatgttaatttgcttgtctgtggtaatcactccacatatgtacgtcagaacatctt

SEQ ID NO: 955803 - DNA, 120 bp, Artificial Sequence
  ENSG00000225555_20 (sequence is synthesized)
aatcactccacatatgtacgtcagaacatcttgttgcatatcttaaatacagacaataaaaaaagaaaatcttggctgggcgtggtggcttttgcctgtaatcccagcattttgggaggc

SEQ ID NO: 955804 - DNA, 120 bp, Artificial Sequence
  ENSG00000225555_21 (sequence is synthesized)
gaccagactgggttaacatagtgagatcccatctctacaaaaaaaaattttaaaaagaaaatctttgaaaagttaaaagagaaatattgaagaacagtgaaaacaggtgttatagaaatc

SEQ ID NO: 955805 - DNA, 120 bp, Artificial Sequence
  ENSG00000251015_0 (sequence is synthesized)
agagcacaggcagccccgagcacgcccggttgcaaaggaggctcctcggaaatcgcagcccaaccttaccccaggcccgggttccaggagccgcagagaaagcggggccggcaggaggag

SEQ ID NO: 955806 - DNA, 120 bp, Artificial Sequence
  ENSG00000251015_1 (sequence is synthesized)
gcacgggccaggacttacctggcggcagcggccccacacctcctccaacccggactcagttgtaacaagaacctgaggccgctggagaaaaggaaaaaatgccgtcgcgggcggggcaga

SEQ ID NO: 955807 - DNA, 120 bp, Artificial Sequence
  ENSG00000251015_2 (sequence is synthesized)
gacagccccagatggggacacggaggggcggggcccgtcccaagtgcccctcaggatcttcccctgccgctgcctgagggagctgcccgggactcggtgacacctgatgtggcctccgat

SEQ ID NO: 955808 - DNA, 120 bp, Artificial Sequence
  ENSG00000251015_3 (sequence is synthesized)
atcgactgggaggtggaagagaaatttggggaacgcatcgagaaccgtggaaaagcaaccttcgcagggggcaaccttctcacggtgcccccgtgaaccttcacagttggatggaactca

SEQ ID NO: 955809 - DNA, 120 bp, Artificial Sequence
  ENSG00000251015_4 (sequence is synthesized)
ggccccaggttgagcttaaacaatctcttttctgtgctccaacttggactctaggtgagtacctggatttttggccacacaatgttttgaaatcaataaaatttggacccctttgaagta

SEQ ID NO: 955810 - DNA, 120 bp, Artificial Sequence
  ENSG00000286749_0 (sequence is synthesized)
attgtgcctgtgaggtaggaaaccagaaatagtcagtgaacatgtgaatgactgttcacttccccactccagggcctgcgaccttgctgttctctcatcttggtatgatgttccttcacc

SEQ ID NO: 955811 - DNA, 120 bp, Artificial Sequence
  ENSG00000286749_1 (sequence is synthesized)
tctgcacagagctggctccttttcatcctttggttctagaatttcccttagagaacttctgtgactaatagcattcttcaagtgggagagagctaataaagatagctgtaaccgacctgt

SEQ ID NO: 955812 - DNA, 120 bp, Artificial Sequence
  ENSG00000286749_2 (sequence is synthesized)
atggtgactggaataatattcaacagggtaaccagcctgaaggtatcagggcttcgtctgggatcccattctcctccgggatcccctctcatgaggagacacgttccgctgcctcactgt

SEQ ID NO: 955813 - DNA, 120 bp, Artificial Sequence
  ENSG00000286749_3 (sequence is synthesized)
ggcagccttgggggtaaggaattgagacccaccgagtttgacaaataaacccggactctcagcaatgcaggatgaaaaggcctacagataccacaatgaccaggactcaaggtcttctag

SEQ ID NO: 955814 - DNA, 120 bp, Artificial Sequence
  ENSG00000286749_4 (sequence is synthesized)
cacagactccacccctcgaatttccagttcaccagcgccaacctggagattacgtccttgtcaaaagctggaaagagggaatgcttgagccctcctgggaaggaccttacctggtgctcc

SEQ ID NO: 955815 - DNA, 120 bp, Artificial Sequence
  ENSG00000286749_5 (sequence is synthesized)
tcacaactgagactgcagtccaaactgctgaaaaggggtggacgcatcatatgcgagtcaaaaaggcatcgccctctccaaagccatggaccattgtcccagggccaactcccaccagag

SEQ ID NO: 955816 - DNA, 120 bp, Artificial Sequence
  ENSG00000286749_6 (sequence is synthesized)
taatgttaaaaagaaaatattaatctgtttcttcctccttttcctcttctccccagctgtctcacatcttattccaaagccaaagaaagctagcctcttcagaaaagtactcccgcacca

SEQ ID NO: 955817 - DNA, 120 bp, Artificial Sequence
  ENSG00000286749_7 (sequence is synthesized)
aatgagcacagggcagtcattggaagttctgttttggttggggagatgtggtctgaacaatcaagtatcaaggctggacctccccaggaggaggttgcactaacctaaacccttacatcc

SEQ ID NO: 955818 - DNA, 120 bp, Artificial Sequence
  ENSG00000286749_8 (sequence is synthesized)
actttacaaaaaagacaactccctctaattgtcaactccaacaatgtaaccctgtgcaaatctctattactgtcaccacctctaccaacactaaccccactgtaggttgcttctatggca

SEQ ID NO: 955819 - DNA, 120 bp, Artificial Sequence
  ENSG00000286749_9 (sequence is synthesized)
taggagctgatgttcctggaatagaccctataggatcctttgaaatgcacttcattactcctccaccctcttcccttcctccaccttctaaaccttattccaatcaaacagctgttcttt

SEQ ID NO: 955820 - DNA, 120 bp, Artificial Sequence
  ENSG00000286749_10 (sequence is synthesized)
acatacccaacgacgaaactatagtaaacattgtagaagttaaggatttaaaagaaaccctagccatagaaactgggtatcaagatgtaaatgcctggctggaatagattaaatattctg

SEQ ID NO: 955821 - DNA, 120 bp, Artificial Sequence
  ENSG00000286749_11 (sequence is synthesized)
ttcacaccctaaataagagttattgttacgcttgtgccacaggcaggccagaaacccaaattgttcgctttccacttggatggttctccaaccaacagagtatgagttgtatggtagctc

SEQ ID NO: 955822 - DNA, 120 bp, Artificial Sequence
  ENSG00000286749_12 (sequence is synthesized)
tcttccaagaccctgcagcttggggcagtaaggcatgctgaactctctcgctgctattcttggaagtttaaggccctgtaggtcagcccccaagggccttccggcctctggttagcaatg

SEQ ID NO: 955823 - DNA, 120 bp, Artificial Sequence
  ENSG00000286749_13 (sequence is synthesized)
tcagttttaccttgtgtctctcatgacaaagggaaaatttagcattccttggaagcctaatgggatgcagtgagtccaagccttttcaggagctaaccaatctgtctgcccttgttcatc

SEQ ID NO: 955824 - DNA, 120 bp, Artificial Sequence
  ENSG00000286749_14 (sequence is synthesized)
ccctggcggatgtatggtggtattgcggtggaccactgttgggtactctgccaagtaactggagcggcacttgcactgtagtccaattggccattccttttacgctggcatttcatcaac

SEQ ID NO: 955825 - DNA, 120 bp, Artificial Sequence
  ENSG00000286749_15 (sequence is synthesized)
caaacaaacagaaaggaaaattgcaaaaaatggaaggtgcccctcatgggtcttttgaacctggcatttatataggtgccatcggagttccatgaggggtaccaaatgaatttaaagctc

SEQ ID NO: 955826 - DNA, 120 bp, Artificial Sequence
  ENSG00000286749_16 (sequence is synthesized)
gaaatcaagtagctgcaggatttgaatctgcattattctggtggtctactataaacaaaaatgtaaattggataaattacatttactataattgacagcaatttgtcaattacataagag

SEQ ID NO: 955827 - DNA, 120 bp, Artificial Sequence
  ENSG00000286749_17 (sequence is synthesized)
acatgatattagctgaaaaaggtacagtatatgtcataattaggacccaatgctgtactttcatccataataacaccaccccctatggaaccataacaaaggctctacaaagtcttacta

SEQ ID NO: 955828 - DNA, 120 bp, Artificial Sequence
  ENSG00000286749_18 (sequence is synthesized)
tcttagccaatgagttaggtaaggtattctgaaaattacagaataaacaacctcttcactaatttaatgggaaaatggcttggcaaatgaaagggactcactcatgacctcagtcctcac

SEQ ID NO: 955829 - DNA, 120 bp, Artificial Sequence
  ENSG00000286749_19 (sequence is synthesized)
ctcccttacaactgtaatagctgtacttattcttgtagggtgctgcattataccctgtgtctgcggattggtgcaaaaacttattgaaacagctctcactaaaaccttctccaattctcc

SEQ ID NO: 955830 - DNA, 120 bp, Artificial Sequence
  ENSG00000286749_20 (sequence is synthesized)
cccaccatatttagataagctgttactcttagaaaatcaagaagaacaacaaagccaaaatatgttagacaaatttgaaaaggaagaattataaaaatcaaaggtgggggaaattgcaag

SEQ ID NO: 955831 - DNA, 120 bp, Artificial Sequence
  ENSG00000286749_21 (sequence is synthesized)
gtacagtgagttcctcttcaaaggtttagcttgttcaacttctttgttctttgttcctaaaaacaactcccttgtacctccttgcccctagttacctgcttagttaactgctttgtaaac

SEQ ID NO: 955832 - DNA, 120 bp, Artificial Sequence
  ENSG00000286749_22 (sequence is synthesized)
aactcttcccgccagcctcgacctgtaacttatatcccccttccctttcttatttgggaaaatattcacaaacagccaatcgggtcagcttagattgtgtggtctgaccccagcccatgt

SEQ ID NO: 955833 - DNA, 120 bp, Artificial Sequence
  ENSG00000286749_23 (sequence is synthesized)
ggggagtgacacagaggtagggactgcattagggataaaaactcctctcttttctttggggtgctctaggagtagccaaaactatgagcagcacccttctgcagaagtacattttgcctt

SEQ ID NO: 955834 - DNA, 120 bp, Artificial Sequence
  ENSG00000286749_24 (sequence is synthesized)
gctgagaagttctctgtttgagtgctcgttctcttggcgactctgaccttttatttccaatattaatatggttagcattaatgtgtgtgattaaaactacacacattaatgtaaaactac

SEQ ID NO: 955835 - DNA, 120 bp, Artificial Sequence
  ENSG00000286749_25 (sequence is synthesized)
tacattaatgtgtgtgattaaaactactaaaactacattaatgtgtgtgattaaaactactaaataagataaataatttcatctgcaaagggtacaagaaaaacaagatatatttttggg

SEQ ID NO: 955836 - DNA, 120 bp, Artificial Sequence
  ENSG00000286749_26 (sequence is synthesized)
aaacaagatatatttttgggaagaaagattataaagaagatataaaaatgtgatttttgttaaaagaaaaaaatttcccattttagagatgacttaaatattgttttaaaatgaaggaat

SEQ ID NO: 955837 - DNA, 120 bp, Artificial Sequence
  ENSG00000286749_27 (sequence is synthesized)
aaactaaatgaatattgaaagctaaaatgtaaaagaaaatcttgtgtggttaaactgactcaggttaaatgaatgtattataagtgttttcaaaattgagccttaatatcaaaagtatac

SEQ ID NO: 955838 - DNA, 120 bp, Artificial Sequence
  ENSG00000286749_28 (sequence is synthesized)
caatataaaactaaaattcagttttctcttttaaataatatctttttgtagtaataataagagagcaaaagactttcattcaccttttgagtgaactacaaaaaacaaaaaaggggtagg

SEQ ID NO: 955839 - DNA, 120 bp, Artificial Sequence
  ENSG00000286749_29 (sequence is synthesized)
ggagagaaagggaaaaagattttgtgtgttttctgctgtctttattaggtcttttgattatttggaaaattgagtgtctatcaaacagtgaaggttttttctttctcaaatcttttggtt

SEQ ID NO: 955840 - DNA, 120 bp, Artificial Sequence
  ENSG00000286749_30 (sequence is synthesized)
attattttggctaaatgaagaattattatcatggcctgtgatcctattttgatcaattattttaaacctctgacatatttgactgactttccaaaatcaaaattcaaaatcaaaatgaag

SEQ ID NO: 955841 - DNA, 120 bp, Artificial Sequence
  ENSG00000286749_31 (sequence is synthesized)
tctttttgacctcaaactaactttggatgtcccagagggcccctgaagcatctaaaaaagagaaaataaaataaacaaagataataaatgaaggcatatctgatatgttaaattacacaa

SEQ ID NO: 955842 - DNA, 120 bp, Artificial Sequence
  ENSG00000286749_32 (sequence is synthesized)
gtagcactgtcttgtaacaggaaagaatgtttaaccttttttttgaattatgtttctatggatatgctattaatacatgttccaaacttgtatgagattcctaaaattctgatatgtctt

SEQ ID NO: 955843 - DNA, 120 bp, Artificial Sequence
  ENSG00000286749_33 (sequence is synthesized)
gatgtatattatcagtcataattattactattatataaaattattacaggccacaggaataaccaaatttccttgtcaatcgcatctttaaccatgactgttttaagtctacttgtacac

SEQ ID NO: 955844 - DNA, 120 bp, Artificial Sequence
  ENSG00000286748_0 (sequence is synthesized)
tgaggtccggaagggaaggagagcgacagctcagcgcgcttcgtgtcccttcctctggcctcacacagagcctgcgctgagttccaggtcctcactgtgaaaaagaagctgcctgcaggt

SEQ ID NO: 955845 - DNA, 120 bp, Artificial Sequence
  ENSG00000286748_1 (sequence is synthesized)
gtttagatgaccataggaagaaaaagcgagagatagaggaagttaaagaagaaatgttggctgccattgaaaaccaatcacaaataaagttacaaagtcaattggaaagcaagtgattct

SEQ ID NO: 955846 - DNA, 120 bp, Artificial Sequence
  ENSG00000286748_2 (sequence is synthesized)
tcacaaatgcaaatcctaggacagtgcctggcagagaggaactcctcactccaccattctaattcaataatagtcagttactaagggcacagcacttttaggaggagctctcccctctcc

SEQ ID NO: 955847 - DNA, 120 bp, Artificial Sequence
  ENSG00000286748_3 (sequence is synthesized)
cgcttgcattggggatgctaaaggaagcaggtgctgagcatgaaggagatcagaatcaatgagttacacaggcgtgtattctcaaccagaggtgtggctgcaccattaagccagggaaag

SEQ ID NO: 955848 - DNA, 120 bp, Artificial Sequence
  ENSG00000286748_4 (sequence is synthesized)
gtgggctgggacacaggactcaaataatccctctggctggaccaacgcagaggccatgaagacagaggagtggaatgttggggaaaggagcttttccatttttctctcctttcagagcca

SEQ ID NO: 955849 - DNA, 120 bp, Artificial Sequence
  ENSG00000286748_5 (sequence is synthesized)
ttttgcctgttttcaaatctagtaacagcattgcttcaccagcgcagtgttgtagatacagcctgtgggtcacaccaggatgcaattacactgctggcggcacagtgagccaagaggctc

SEQ ID NO: 955850 - DNA, 120 bp, Artificial Sequence
  ENSG00000286747_0 (sequence is synthesized)
agtaactaagggcaaggaggcatggagaacaagaaaggaaacaggagacatcaatcaacatatgtaagatgaacactggtttgatccgggacaacctgaagcaaaagcgggtcaactcga

SEQ ID NO: 955851 - DNA, 120 bp, Artificial Sequence
  ENSG00000286747_1 (sequence is synthesized)
agccaggagggggcttccaggtcacagaaatggggtctccctcagttgcccaggctggtctctggtgcccaacgccgggctcccggtaatctctacaaataatccagtgaaggaatgcca

SEQ ID NO: 955852 - DNA, 120 bp, Artificial Sequence
  ENSG00000286747_2 (sequence is synthesized)
gagagtggaaagtggaggatgactgacaaaggacgcccgagtacgttttcacttcaagctctacaggagagaatcagcttcctgtctgggtacccacaagacatcttaagctgtgccatg

SEQ ID NO: 955853 - DNA, 120 bp, Artificial Sequence
  ENSG00000286747_3 (sequence is synthesized)
gacctcagaatgtctctgcgcccccagttcgtcagacggctcagatgaacatctctgttgagcagatggaaaccagtaaaactccccaagcaactccaccgacctgggggcagatgaaga

SEQ ID NO: 955854 - DNA, 120 bp, Artificial Sequence
  ENSG00000286747_4 (sequence is synthesized)
gactggctcacattgcagaagagaacctgaggtctcagaacaagccgctgaccaccagtaatctaatggtagctatgatggcggtaatctccttggtggtgagtcttcctgtagcagagg

SEQ ID NO: 955855 - DNA, 120 bp, Artificial Sequence
  ENSG00000286747_5 (sequence is synthesized)
cagatcaaaattacacctatttttgtaataggaggaaggaggaggaggaggaatgttaatgaatgtttctattggttatcgctttcctgccatctgcctggggccagcagcaggattttt

SEQ ID NO: 955856 - DNA, 120 bp, Artificial Sequence
  ENSG00000286747_6 (sequence is synthesized)
aaattatgatacacaaagttggatggtttatgttcctgcacataacggatcaaaagcctttattcatgcaatcagtggaagaacatttcaatctttggacactattaaataccttgagca

SEQ ID NO: 955857 - DNA, 120 bp, Artificial Sequence
  ENSG00000286746_0 (sequence is synthesized)
aacatgtcctcctcttctaaattacatgccgtggagacacaaaggattgccagatatgctctttaggatcaaaaggaagaccctgaagaaaagctgaggatagtggctaaacccaaaaca

SEQ ID NO: 955858 - DNA, 120 bp, Artificial Sequence
  ENSG00000286746_1 (sequence is synthesized)
agagattaaaggagaatagaggcagaaaagtcacccatacccactccttggggagaagagatgaaaccctccttgatgagaagagaagctatgaccttagaagtattataggccataaaa

SEQ ID NO: 955859 - DNA, 120 bp, Artificial Sequence
  ENSG00000286746_2 (sequence is synthesized)
tcaaagaactggccattagaggttcccagagagaggactggagtccgctttaggaactgttgagcatcttctccacccaaccaggacaagaaagtctagtggaagcccaccaagatttgc

SEQ ID NO: 955860 - DNA, 120 bp, Artificial Sequence
  ENSG00000286746_3 (sequence is synthesized)
agttcatctcttacccatccaatgttgaagaatctcagagccccgttactctttcttgtagtttgccaactgaagccactcctgtacacttaaattacccaacaaaaggagaacttgctt

SEQ ID NO: 955861 - DNA, 120 bp, Artificial Sequence
  ENSG00000286746_4 (sequence is synthesized)
ttcctccaatattctgcttatctccattcaagtacctcacctgaactacccacatctttttagtgactatgcttactctggttcaggatgaaagatgggagaatgagatgaactgtccct

SEQ ID NO: 955862 - DNA, 120 bp, Artificial Sequence
  ENSG00000286746_5 (sequence is synthesized)
ttagtagtctaaatgaggatgaagggaagaccagcactgtcccttggctagaacagtggcaaaacccattcatatttcaaatgtgtctgtaagattttctcattcattactcaggcctga

SEQ ID NO: 955863 - DNA, 120 bp, Artificial Sequence
  ENSG00000286746_6 (sequence is synthesized)
cctcaaaaactatgtctatagtaaagtaaaaaattgcccatgcactgctctttcctagtcttgtgagacaaaattatatgtgcttatgtgaaagatattagataaagacagaggtagaaa

SEQ ID NO: 955864 - DNA, 120 bp, Artificial Sequence
  ENSG00000286746_7 (sequence is synthesized)
agaaaatatgtatattttaaaataaatgttcataattatggtatatttaagcaaattgctaattaatacacagtagatgtgacctcagttaaatctcttaactaaaatgagactgcttcc

SEQ ID NO: 955865 - DNA, 120 bp, Artificial Sequence
  ENSG00000286746_8 (sequence is synthesized)
ttattttataattgttgaggttgtgaggtttgcgggacaagacgtaataagctgcaagatcctttactgtttaaaattctccatctatgattcagaaggacagcttttatggaatcttat

SEQ ID NO: 955866 - DNA, 120 bp, Artificial Sequence
  ENSG00000286746_9 (sequence is synthesized)
gaaattttaaataagattttcatcatttcaatgtgagaaaccaaaatttacataactgcttttttttaaaaaaatcttacaaagtataaaacttgagtagcagtttgaaaatacataaaa

SEQ ID NO: 955867 - DNA, 120 bp, Artificial Sequence
  ENSG00000286746_10 (sequence is synthesized)
caataaaagcccttttgtcttttaataactttatataaaaacattgcttgtaggaacaacacattgcaatattggtgattatagctgctttaactgaagggtatgaagcatgtcctgtgc

SEQ ID NO: 955868 - DNA, 120 bp, Artificial Sequence
  ENSG00000286746_11 (sequence is synthesized)
aatagttcttgttttagtaaaaaaaaaattaaagtggaatatgtagtctgcccatatgtcctgagctgttcatttcctgttactttgctggaggcagaagccaaagactcagttttcctg

SEQ ID NO: 955869 - DNA, 120 bp, Artificial Sequence
  ENSG00000286746_12 (sequence is synthesized)
cctttgtcatacatctgctggttattgctatttaagctgacttggttcttgatgaccacaaggtgacttacgatagctgtttttccaaaacgcaatagcagtaccatgtgtttttaaatg

SEQ ID NO: 955870 - DNA, 120 bp, Artificial Sequence
  ENSG00000286746_13 (sequence is synthesized)
cattcaatgttgtttggagacttttcaaataacttgggagcaatcaaatgtagactgcacacatgttgctgtaagttaatgtaaatttctttttgagaaaaaggacatagttggccacaa

SEQ ID NO: 955871 - DNA, 120 bp, Artificial Sequence
  ENSG00000286746_14 (sequence is synthesized)
attacatgccgtggagacacaaaggattgccaggtaccagcttgaccacaataggtcggaacaccaagtaggctcttggggtcctgaattcaaggccttggctcttgggtggcatttctg

SEQ ID NO: 955872 - DNA, 120 bp, Artificial Sequence
  ENSG00000286746_15 (sequence is synthesized)
agcatttctgaacctgccctgggacagagaggagtccactgcactgaagggcctccagcagatgggatggtgtcttcctatgttgaggtcacatattccccacccagtccactcaggctt

SEQ ID NO: 955873 - DNA, 120 bp, Artificial Sequence
  ENSG00000286746_16 (sequence is synthesized)
acatgctaatttcctctgaaaacaccttcataaagacactcaaaaataatgctttaccaggtttctaggtattccttaagccaattaattggatacctaaaactaggtgtcacaagcatg

SEQ ID NO: 955874 - DNA, 120 bp, Artificial Sequence
  ENSG00000286746_17 (sequence is synthesized)
aaggatgccatgtatgctattgccaatgcttggaacacgatgactaaagacacagttgagcatgcctggcacaaccactggcctgtgactactttcaatgataataaagaacaagatgtt

SEQ ID NO: 955875 - DNA, 120 bp, Artificial Sequence
  ENSG00000286746_18 (sequence is synthesized)
gactttgaaggattccatgtgtcaagtgagagtaagatgatatctgacttccttacatatgcaaaaactactccttcagagtgttagtaagctcgaagaagtgaacattgaagatgtttt

SEQ ID NO: 955876 - DNA, 120 bp, Artificial Sequence
  ENSG00000286746_19 (sequence is synthesized)
taacattaataatgaagttcttgttaattcattgactagtgaaataactgaaatggttctgaatcaaggagatagtgataatagtgatgatgaagatgaccccttcaacactgcagaaat

SEQ ID NO: 955877 - DNA, 120 bp, Artificial Sequence
  ENSG00000286746_20 (sequence is synthesized)
agtgcctagagatgatataatgaaaatatataatgggcttattgaaggactagagcagcttgcgttcataactgaacaagaaatcatttcggttttcaaaatgaaagaaacactttaaga

SEQ ID NO: 955878 - DNA, 120 bp, Artificial Sequence
  ENSG00000286746_21 (sequence is synthesized)
atctagcagaatgcctcctaatccctagaggacccatttcctgcttctgacgtgtcttctcatcttgaaaataaaaacacagtgaacggtaaacttttaatcaaaacacagcgtcatagg

SEQ ID NO: 955879 - DNA, 120 bp, Artificial Sequence
  ENSG00000286746_22 (sequence is synthesized)
tggagactgctgttgcttgttattgctgttgtttaaagaatgattcaggtattctggtgatgctattgtgctgcttaattattctaaatatattatttttttgctatattaatatatctt

SEQ ID NO: 955880 - DNA, 120 bp, Artificial Sequence
  ENSG00000286746_23 (sequence is synthesized)
ttttactgttaagtaattatgtgtgaataagggttagaaaattattgcttatcaatagcatataaattgagagtaagaaataatgatgatgtcaaacaaccacagactgtccacatgggt

SEQ ID NO: 955881 - DNA, 120 bp, Artificial Sequence
  ENSG00000286746_24 (sequence is synthesized)
ggctgagatagtgacacctttgctttctgatggttcgatgtacacaaactttgtttcatgcatgtaattatttaaaatatggtataaaataccttcaggctagtataagtatacgtgtaa

SEQ ID NO: 955882 - DNA, 120 bp, Artificial Sequence
  ENSG00000286746_25 (sequence is synthesized)
ataccttcaggctagtataagtatacgtgtaagtacacatatatatgtataagtacacatatatgtataagtatacataagtgtatatgcataagtatacatatgtgtatatgcataagt

SEQ ID NO: 955883 - DNA, 82 bp, Artificial Sequence
  ENSG00000286746_26 (sequence is synthesized)
ggacctaatagacatctacagaactctcccaccccaaatcaacagaatctacgttcttctcagcaccacaccgcacttactc

SEQ ID NO: 955884 - DNA, 75 bp, Artificial Sequence
  ENSG00000286746_27 (sequence is synthesized)
aaaagaatagaaattacggttaagaaactcactcaaaaccacccaaatacatggaaactgaacaatttgctcctg

SEQ ID NO: 955885 - DNA, 72 bp, Artificial Sequence
  ENSG00000286746_28 (sequence is synthesized)
gtgcaatcaaactggaactcagggttaagaaactcactcaaaaccacccaaatacatggaaactgaacaatt

SEQ ID NO: 955886 - DNA, 66 bp, Artificial Sequence
  ENSG00000286746_29 (sequence is synthesized)
cttcaaaaaatcaatgaaaccaggagctagttttttgaaaagagcaacaaaattgatagactgcta

SEQ ID NO: 955887 - DNA, 120 bp, Artificial Sequence
  ENSG00000286746_30 (sequence is synthesized)
acatgccgtggagacacaaaggattgccaggcattcagcctcatttgcattgtctggagaagaatcagcattgctagtgcaagcatattctttaataaaaatgaaaaaaagaatattttg

SEQ ID NO: 955888 - DNA, 120 bp, Artificial Sequence
  ENSG00000286746_31 (sequence is synthesized)
tctcatcaccttgcagtaatccccataagcctgtggtgttggttaccagaaggtgaagtgcctctccctgtggaaaaaggaggaaagggtgagaagaattgtgtcccatagttgagtacc

SEQ ID NO: 955889 - DNA, 120 bp, Artificial Sequence
  ENSG00000286746_32 (sequence is synthesized)
agctcagctgcactgtaaatagaacatcaggtagacttctaagctgtatcacttcagtccctggctcctagaagataatactggactcacccagggcttaagggaactcatcatcctgaa

SEQ ID NO: 955890 - DNA, 120 bp, Artificial Sequence
  ENSG00000286746_33 (sequence is synthesized)
ggaaaggatagaagcctggcttgcttcactgcctgctgatttacgtcactgcccagtgacgtaagcaaatacaggcagtagccaggtagtggttacagtgggtttggggtgagaccaagt

SEQ ID NO: 955891 - DNA, 120 bp, Artificial Sequence
  ENSG00000286746_34 (sequence is synthesized)
gctgtgctgccttcaggtcagacctaacacagtctcagaggcagaggctacagaggtgctcatttcatcccaccccaaactcgagatggctcaaaacagagggacaatccgtttgtttga

SEQ ID NO: 955892 - DNA, 120 bp, Artificial Sequence
  ENSG00000286746_35 (sequence is synthesized)
gaaaaagtaaagaaagacaacaagagtttctgcctggtgatccagagaatttttttcagttttatccaagaccataaagccattatgcctatgattctgcaagaactacagcattactgg

SEQ ID NO: 955893 - DNA, 120 bp, Artificial Sequence
  ENSG00000286746_36 (sequence is synthesized)
gcttggagtttcccctaatgcagatactgcttagatctcaatgccaaagtcctttcaaatatctggaaagccttcccaaaacgacgggtacaaactagctgagtctgctaagtctacaat

SEQ ID NO: 955894 - DNA, 120 bp, Artificial Sequence
  ENSG00000286746_37 (sequence is synthesized)
acatacctaactcttcaatgcccagacactaaaaaaattaacaagtatcaaaaccatccagaaaaacatgacttcaaccaacaaattataggaggcaccagggaccaatcctttcagaca

SEQ ID NO: 955895 - DNA, 120 bp, Artificial Sequence
  ENSG00000286746_38 (sequence is synthesized)
ggaaactcaaagaaattcaagataacacaaagaaggaattgagaaccctatcagatacatttagcaaagaaattgaaataattgaaaagaatcaagcataaattattgagttgataaata

SEQ ID NO: 955896 - DNA, 120 bp, Artificial Sequence
  ENSG00000286746_39 (sequence is synthesized)
agttgataaatataattgacatgctatagcatgcatcagattctcttaatagcagaattgtttgagcagaaggaagaattagtgagcttgaagacaggctatttaaaaatacgtagagga

SEQ ID NO: 955897 - DNA, 120 bp, Artificial Sequence
  ENSG00000286746_40 (sequence is synthesized)
acacacacacacacacacacacaatgaagcccacctacaagatgtagaaaatagcctcaaaaaggcaaatctgagttattggccttaaagaggaagtagaaagagaaggctagaaagttt

SEQ ID NO: 955898 - DNA, 120 bp, Artificial Sequence
  ENSG00000286746_41 (sequence is synthesized)
gaagtagaaagagaaggctagaaagtttattcaaagagacaataacagagaaatttccaaacctggagaaagatatcaatattgaaatacaaaagggttattgaccaccaagcagttggc

SEQ ID NO: 955899 - DNA, 120 bp, Artificial Sequence
  ENSG00000286746_42 (sequence is synthesized)
atttaataataaaatctacctgaaggcatttaataatcaaatccccaaagatcaagaataaagaaagggtcctaacaccagcgagataaaagaaacaaataacatataataaagctccaa

SEQ ID NO: 955900 - DNA, 120 bp, Artificial Sequence
  ENSG00000286746_43 (sequence is synthesized)
tataacttaagaagacttttcagtagaaatgtctgaaagtccttacaggccaagagagaatgccatgatatgtttaaaattctgaaggaaatccacttttatcctagaatagtacatgtg

SEQ ID NO: 955901 - DNA, 120 bp, Artificial Sequence
  ENSG00000286746_44 (sequence is synthesized)
gtgaaacttgccttcaaacatgaagaagaaataacttccccagacaaacaaaagctaaggaaattcttcaatatcaggtccatcgtataaggaatgctaaagggagtacttcaattagaa

SEQ ID NO: 955902 - DNA, 120 bp, Artificial Sequence
  ENSG00000286746_45 (sequence is synthesized)
agaaaagaacattaatgaacaataagaaattatctgaagatacaaatctcactggtaatagtaagtacacagataaatacagaataatataatacgtaactccagtatgtaaactactgt

SEQ ID NO: 955903 - DNA, 120 bp, Artificial Sequence
  ENSG00000286746_46 (sequence is synthesized)
taagtagaaagaataaacattgaaccaatcaaaaataataaccataataacttttcaaggcaaaaatagtaccataagatataaggaaaagtgggctgggcacggtggctcacgtctgta

SEQ ID NO: 955904 - DNA, 69 bp, Artificial Sequence
  ENSG00000286746_47 (sequence is synthesized)
gtgggcagatcgtgaggtcaggagatcgagattagccaggcttggcagacgcctgtagtcccagctact

SEQ ID NO: 955905 - DNA, 120 bp, Artificial Sequence
  ENSG00000286746_48 (sequence is synthesized)
gttagaacatgtcctcctcttctaaattacatgccgtggagacacaaaggattgccagattcctaaggtggaagctgtggtcattcattcgagacacttatgtagacataaaaacaggcc

SEQ ID NO: 955906 - DNA, 120 bp, Artificial Sequence
  ENSG00000286746_49 (sequence is synthesized)
aacaggcctttagtgctacaaatttccctctaataccaactgcgttcggacccctgtcggataggaaatcccaagtaaggtacctgccatcggcagatttgagctttcttcttggacacc

SEQ ID NO: 955907 - DNA, 82 bp, Artificial Sequence
  ENSG00000286746_50 (sequence is synthesized)
ggctgccttcggaaccctgtgggagagtaaatccctagtaaggtacctgccgttgacagatttgagctttcttcttggacac

SEQ ID NO: 955908 - DNA, 120 bp, Artificial Sequence
  ENSG00000286746_51 (sequence is synthesized)
acacctaatacccacagtcctccaggtgtgaaagaaatactcaagtgactgtgttgctggtgggaaaaagcgtatcatttcctggggtcttcagggtacagttgtgctcaaaattaaaca

SEQ ID NO: 955909 - DNA, 120 bp, Artificial Sequence
  ENSG00000286746_52 (sequence is synthesized)
attaaacacttctagggattatgctgtgacccttttaatatgtgcttttaatttttttcatttcttaatactcttttttctatactcaatggtgcaagcttctggttttctactggctcc

SEQ ID NO: 955910 - DNA, 120 bp, Artificial Sequence
  ENSG00000286746_53 (sequence is synthesized)
ttatttaagaatgtgaaaacatccagatatttgagagggtagaagtggaaattaggaatgcctaaacaaactctaaaagaagaattttagcagtattaatttattggctttatcaattaa

SEQ ID NO: 955911 - DNA, 120 bp, Artificial Sequence
  ENSG00000286746_54 (sequence is synthesized)
ttggtattatggctactatcctaactacttgaatccctacttggtcaataacaaatattatgaaaatatctaagcttttcttctggcctataaaatttaaaaaattagcaaaacatatca

SEQ ID NO: 955912 - DNA, 120 bp, Artificial Sequence
  ENSG00000286746_55 (sequence is synthesized)
cgttgaagacattcatttttcacagagagcagtgaaggcatttctctatttcctttcccccatcctaccctaggattgctctgcagtattcatgtgttagtataggtcaacaaaaagcac

SEQ ID NO: 955913 - DNA, 120 bp, Artificial Sequence
  ENSG00000286741_0 (sequence is synthesized)
gatcgcaatggagattacaaagtcagagaaattaactgttaaaccagtatcggattgagaaggaacataacattttgactcccatgaagcctgaatgctgcagacatgttggagtccagc

SEQ ID NO: 955914 - DNA, 120 bp, Artificial Sequence
  ENSG00000286741_1 (sequence is synthesized)
ccttctttataagagcaccccagcctatgctacaagtgtttcccatagcacacagtcttggtgggagatggcacccacctcctaccttggaatccaaagggatccttttctgtcttccag

SEQ ID NO: 955915 - DNA, 120 bp, Artificial Sequence
  ENSG00000286741_2 (sequence is synthesized)
cctgtactgacatacagagggaggctgcaacttggactctgaaaaccagacacataccttgggctttggcttttctgtgagggatacagtgacatggggactggctcttccagggcagga

SEQ ID NO: 955916 - DNA, 120 bp, Artificial Sequence
  ENSG00000286741_3 (sequence is synthesized)
ctttggatgttctatttcccaggcctggttgtgagctttcattttcctccgttctttgagcctccaatatccttccagtgaaattcctttttgctgaagagaacctgtttagtttatttc

SEQ ID NO: 955917 - DNA, 120 bp, Artificial Sequence
  ENSG00000286741_4 (sequence is synthesized)
ctctcagaggtaggatctgagaaaagaattcaggtgcagttagtttatcttagctggaagaaacagtggttaggagagtgaagaagtaaggtggggagaaaaagctaatgtagggtgtgt

SEQ ID NO: 955918 - DNA, 120 bp, Artificial Sequence
  ENSG00000286741_5 (sequence is synthesized)
aatcagagctatcaccatgggctcctgaaatgaatcagaagagggaaattgtgggaacatgagtctgaaagttacatcactcaagcagcataggcactcggtagttatacgtcgacttct

SEQ ID NO: 955919 - DNA, 120 bp, Artificial Sequence
  ENSG00000286741_6 (sequence is synthesized)
gttggtgctagcctgaggtctcattgtctagccctcctggctgccatcagcacaggcagggtggcctgctgctttgaggaaccgtccactcaaacagatgcaggttctggcagttgaccc

SEQ ID NO: 955920 - DNA, 120 bp, Artificial Sequence
  ENSG00000286741_7 (sequence is synthesized)
tgggctgcaacacacagagggggaagcccctatgatagggctgaggcactgacagtctcgtctccagggccagagccagttccagttgagatcaggaccaggactgagaaaccagggtgg

SEQ ID NO: 955921 - DNA, 120 bp, Artificial Sequence
  ENSG00000286741_8 (sequence is synthesized)
gaccccagctccagtgctgcctccctgacatctccacatcttcctaatagtctcagctatgcaggtgtgcccctctgtctagatttctggatgccagtgagaacaggtcagcagcttgta

SEQ ID NO: 955922 - DNA, 120 bp, Artificial Sequence
  ENSG00000286741_9 (sequence is synthesized)
tgctgactgccagggcctggggagagaggaaggctcattgacctgatttccacagcaggaggcagagcactgaatgccacctgtatttgggaaggaagcagtcagggaataaccctgacc

SEQ ID NO: 955923 - DNA, 120 bp, Artificial Sequence
  ENSG00000286741_10 (sequence is synthesized)
aatattcatcacaaccatcactttgacatctcaattttcatgcacacccgtacaatacacccaaaccaaaaattcatctgcctaacataaaattcctcatgtacctaaaaatgcactctc

SEQ ID NO: 955924 - DNA, 120 bp, Artificial Sequence
  ENSG00000286741_11 (sequence is synthesized)
cctaacataaaattcctcatgtacctaaaaatgcactctcccttatccctaaagaagaatattcaaaatcacattggttattgtattagtttactttcatactgctatgaagaaatacct

SEQ ID NO: 955925 - DNA, 120 bp, Artificial Sequence
  ENSG00000286741_12 (sequence is synthesized)
tttataaaaccatcagttctcatgagacttattcactgtcatgagaatagcacaagaaaaacccatccccacgattcaattacccccctggacccctcccatgacatgtggggattatgg

SEQ ID NO: 955926 - DNA, 120 bp, Artificial Sequence
  ENSG00000286741_13 (sequence is synthesized)
gggtggggacacagccaaatcatatcagttatggtactagcttctggatcaggatttcttaatagggtccattatttctctaagtcaataatgatccaacataatattctacaactgatg

SEQ ID NO: 955927 - DNA, 120 bp, Artificial Sequence
  ENSG00000286741_14 (sequence is synthesized)
tattctacaactgatggaccacaatgtaaagtcatcagcataactcattctaaatgtaatagtggagtaagcagacagaaaaaaggggaattgggtaaactttatatagtgggcagagtg

SEQ ID NO: 955928 - DNA, 120 bp, Artificial Sequence
  ENSG00000286741_15 (sequence is synthesized)
agatagaaacatgggtagagattagaaccctcatatctataccaaatcaggaggctgtgtattagtctgcatgctgctgaaaaagacatacctgagattgggtaatttgtaaagaagagg

SEQ ID NO: 955929 - DNA, 120 bp, Artificial Sequence
  ENSG00000286740_0 (sequence is synthesized)
gaccacccagagctcatcgccgacaaggtagctgctgtacatgtcaaccacattgtcatggtggtaatcccgcatgatcacgacctggggaaacgggaaatatacttttgacttgtgaag

SEQ ID NO: 955930 - DNA, 120 bp, Artificial Sequence
  ENSG00000286740_1 (sequence is synthesized)
atgaagttgctttttgttctcttgtggccacaactacaattcagcattatcagaatccacccttaacagctggcatatgacataaagaagaagcctgcctgcaccaaggggacaatttcc

SEQ ID NO: 955931 - DNA, 120 bp, Artificial Sequence
  ENSG00000286740_2 (sequence is synthesized)
agacaaaaaggtgctgttgtctttcacggctgctggtaagaggtacagactcttaagcaatggttgaggaacaactagtatcacaagagacaatgttttgaatgaaactcaaggcatact

SEQ ID NO: 955932 - DNA, 120 bp, Artificial Sequence
  ENSG00000286740_3 (sequence is synthesized)
catcagagaatgaactgttcacttcaagtgaggggacatgtagtcttccctcagaggacaaatagctgactctgtgaaggagaaatgcatgggtgaccccatttggggccaccaaggtgc

SEQ ID NO: 955933 - DNA, 120 bp, Artificial Sequence
  ENSG00000286743_0 (sequence is synthesized)
caagcaatcctcctgcctcggcctcccagagtactgagattacagacatgagccaccatgccctgcctgaacaaaaatttgaatgtgaattttcatagcaacattattcatgatagccaa

SEQ ID NO: 955934 - DNA, 120 bp, Artificial Sequence
  ENSG00000286743_1 (sequence is synthesized)
tcatagcaacattattcatgatagccaaaaggtggaaaaaatccaaacgctcatgaacggatgaatagggctgcagcaacaaagtaccataaactgggagacttaaaacaatagaaattc

SEQ ID NO: 955935 - DNA, 120 bp, Artificial Sequence
  ENSG00000286743_2 (sequence is synthesized)
ttctctcactgtttggaagccggaagtctgaaatcaaggcatcagcagggttggttcttctggaggctccgagggagaggcgctccattcttcccttccagcttctggggctgccagcaa

SEQ ID NO: 955936 - DNA, 120 bp, Artificial Sequence
  ENSG00000286743_3 (sequence is synthesized)
cccttggtgtgccccaggtttgctccctggtctttgatcactgcttccatccttgcctggccttcttcctgcatgtcttcatagggtgttctcatctctgtgtgtctccgtccaagttcc

SEQ ID NO: 955937 - DNA, 120 bp, Artificial Sequence
  ENSG00000286743_4 (sequence is synthesized)
cctcatcttacaaagacactagccattggattagagcccaccctaattcagcaagacctcatcttaactggattacatctcaaagacctgatttccaagtaagatctgattcacaagtac

SEQ ID NO: 955938 - DNA, 120 bp, Artificial Sequence
  ENSG00000286743_5 (sequence is synthesized)
ggggatcaggactacaacatcatgtatctttttgggaggacacaattcaacccacaacaatcaggtacaatcaaaaacaataaagatacttccggtgattaaatggtaaaaaaaaaatta

SEQ ID NO: 955939 - DNA, 120 bp, Artificial Sequence
  ENSG00000286743_6 (sequence is synthesized)
gaaaataaagagaaaagagaacgtaagcaaagccaattcaaaggaagaaataaaaatggagaggagatgaaatggggagatgtcggtcacagcgtgcaaactgagttacaaaaggaacca

SEQ ID NO: 955940 - DNA, 120 bp, Artificial Sequence
  ENSG00000286743_7 (sequence is synthesized)
gctctggatctcaggtgcagcaagggcagtgaggggtgtgttcattaatttgattctggtaatcatgacacaatgtataccaatcatcatgttgtacaccttgaatatatgcaaccttca

SEQ ID NO: 955941 - DNA, 120 bp, Artificial Sequence
  ENSG00000286743_8 (sequence is synthesized)
tttgacaattaaatattttaaaattaaaaaattaaaaaaacaaggcacattctggacactaaaatcctgctccagtgggtaccattcttcctgaatccagctccttgattatccaggaat

SEQ ID NO: 955942 - DNA, 120 bp, Artificial Sequence
  ENSG00000286743_9 (sequence is synthesized)
ctgcaaatttttttttgttaaactgatatgtgccgtttaaagtttctcaaactagtccttccttgctcgaaagtctcttgtacttaaaacactgggaggagagaggctatgggtaatgag

SEQ ID NO: 955943 - DNA, 120 bp, Artificial Sequence
  ENSG00000286743_10 (sequence is synthesized)
aaaggggaggggaaaatatattaaaggtgagacagttctttctacattagatggactatcaggtgacgccatcccataggcaggtgggaaagacgggagtagagcctagaagaggccaca

SEQ ID NO: 955944 - DNA, 120 bp, Artificial Sequence
  ENSG00000286743_11 (sequence is synthesized)
ggaccaacaccgggagctgcccgcagagaattgaggactgaagtggccataaacgccaagctctgcaagggagtgaccacagagagaaaagagcagagggtggaccatgaaatcctcagg

SEQ ID NO: 955945 - DNA, 120 bp, Artificial Sequence
  ENSG00000286743_12 (sequence is synthesized)
agaaccttggaaaggggaacagggaagaactgatgtgaagatgccagatggggggtggggacctgagctaggcaggtctccaaagtgagtggaggcagcagtgtcaggggaagggaagtc

SEQ ID NO: 955946 - DNA, 120 bp, Artificial Sequence
  ENSG00000286743_13 (sequence is synthesized)
cacaccacatcctacacacgcgatgtcaacaaagtcagagaagaggtgaggagccaaagaccctacaatgtcactgggttcagctgggaagttggtgttgattagaagagagtactttgg

SEQ ID NO: 955947 - DNA, 120 bp, Artificial Sequence
  ENSG00000286743_14 (sequence is synthesized)
cggactgagggaattagcgttgacaagtagaaagaactcctataatttgataaagactctgcttgaccaaactttagtcaggctcctgaaacttgtcctgggctcatctgtgcggttact

SEQ ID NO: 955948 - DNA, 120 bp, Artificial Sequence
  ENSG00000286743_15 (sequence is synthesized)
tgtaaatctagttttagcaaagaacccggccaagtccgttcagccagtgccgccagcctctacgctctgatcacctggatatctgatcagattcctcactctccaccatctcccaggtaa

SEQ ID NO: 955949 - DNA, 120 bp, Artificial Sequence
  ENSG00000286743_16 (sequence is synthesized)
tgttgggtcaccctggactgtcttcagccagagtcccgttaggtgtgtttagcctgaatactccttacctgtaatgtttccttttagtaattttccacccactgactgccaccctgctcc

SEQ ID NO: 955950 - DNA, 120 bp, Artificial Sequence
  ENSG00000286743_17 (sequence is synthesized)
ttggttataaactcccacttgcccaggcagtattcagagttgagcccaatctctgtctctcacccactccaagaccccgttgagcggtccctatgcccatccacatggtcctgaataaag

SEQ ID NO: 955951 - DNA, 120 bp, Artificial Sequence
  ENSG00000286742_0 (sequence is synthesized)
atcctgacacagaagaacgtactctttatctgagtatcctgcagggcagatgtgaaacctggaactactgtaaccgctttgccaatgaatgaaaacagcctttgaagatgccaagacata

SEQ ID NO: 955952 - DNA, 120 bp, Artificial Sequence
  ENSG00000286742_1 (sequence is synthesized)
gaaaagggaatgttagagaaatggagctgcagcttctggattaagccaaccctgatgctcacctatctctggaatcaccgtttatgttatggaggatggtgagcctcgctgacacataaa

SEQ ID NO: 955953 - DNA, 120 bp, Artificial Sequence
  ENSG00000286742_2 (sequence is synthesized)
tgactattcctcaaagattttaaataaacaactaggatgcgacctctaaagaaggttaatcccaactgctggccttccactgagaaatcttccctctccaaaaacagacttgtcattata

SEQ ID NO: 955954 - DNA, 120 bp, Artificial Sequence
  ENSG00000286742_3 (sequence is synthesized)
cccactcacagtactctacacttcttcacagcatttatcccacctctggttaattaactaattgtgcaggcaatggattttttctctactaggatttaagtcacccctctagaagtgggc

SEQ ID NO: 955955 - DNA, 120 bp, Artificial Sequence
  ENSG00000286742_4 (sequence is synthesized)
ctggcatacaacagtcactccataagttaattgtggactgaatggaacacttgttatagggtttccaacatgtgacatattactgttggtgacatgtgagatgatttaggggataaacat

SEQ ID NO: 955956 - DNA, 120 bp, Artificial Sequence
  ENSG00000286742_5 (sequence is synthesized)
ctttctgaatagttttagtggttatatatttattctaatgtgtatcagacaaataaataaccggtcaaatctctgatttttatacacagccatgaccctcataataacgttttggtcaac

SEQ ID NO: 955957 - DNA, 120 bp, Artificial Sequence
  ENSG00000286742_6 (sequence is synthesized)
aatgaatgaaccacatatgtgagggtggtcctaaaagattataatgaagctgaatgattcctatctcctagccatcttaacgttattgtagtgcagtgcattactcacttcacatgtctg

SEQ ID NO: 955958 - DNA, 120 bp, Artificial Sequence
  ENSG00000286742_7 (sequence is synthesized)
tggtgatgctggtgtaaacaaacctattgcgctgccagtcatattaaagtatagcacatataattatatacagtacataatatttgctaatacaagactctgttgctggtttatgtattt

SEQ ID NO: 955959 - DNA, 120 bp, Artificial Sequence
  ENSG00000286742_8 (sequence is synthesized)
actatattatacttttatcattattttagagtgtactactacttataaaaagaagttaactgtacaacagtctcagccaggcccttcacgaggtatcctagaagaaggcattgttatcac

SEQ ID NO: 955960 - DNA, 120 bp, Artificial Sequence
  ENSG00000286742_9 (sequence is synthesized)
aggggatgacagttccatgcatgttattgcccctgaagccctcctagtgggacaagaagtggacaggcaagacagtgatattgaccatcctgattctgtgtaggtctgggctaatctgtg

SEQ ID NO: 955961 - DNA, 120 bp, Artificial Sequence
  ENSG00000286742_10 (sequence is synthesized)
gtgctggattagattttcaagtaaactgctttggaagatgatagtgtctccctctatagcatgagcaggtttgtttgctcttaaacatgataatagcttctgctggggcaaagggcagat

SEQ ID NO: 955962 - DNA, 120 bp, Artificial Sequence
  ENSG00000286742_11 (sequence is synthesized)
catccaggacacaattttcctttagagttggccataaaactttcattccagaggtgcccaccctacacctggaggataggagcattcttatctctgaagacccggggacacagaatgcac

SEQ ID NO: 955963 - DNA, 120 bp, Artificial Sequence
  ENSG00000286742_12 (sequence is synthesized)
ctgaacaagcaggccttgccaggtttcccccagtttattaccattagatcatacccttggtcttccggccacacttctgcatgactgtccataaaaatgcacagttgtctctgtttcttt

SEQ ID NO: 955964 - DNA, 120 bp, Artificial Sequence
  ENSG00000286742_13 (sequence is synthesized)
gggtcttcatttctgaaggctcccatgtcacataaaacatattaaataaatgtgtatgtttttctcttaaaaaaaaaaagaattggctttcaatgtataaaatagtgactgtctctgtgt

SEQ ID NO: 955965 - DNA, 120 bp, Artificial Sequence
  ENSG00000286742_14 (sequence is synthesized)
tttataatcaaaagtgggtggcttctggacctcaagctgaatattttcatctgactcaatggctgaaagatgtgaccaggtagacctgagactttatgaccaggtagacttgaaactact

SEQ ID NO: 955966 - DNA, 120 bp, Artificial Sequence
  ENSG00000286742_15 (sequence is synthesized)
agtttgattattttcctattgtaagcagctgatggaaaagcttctagagttattccaaggagtagacctagaaggcatccaaagtaatgatgcatgagcactggtgactaagaaggaaaa

SEQ ID NO: 955967 - DNA, 120 bp, Artificial Sequence
  ENSG00000286742_16 (sequence is synthesized)
atgacatgaagcacctaaattctgcctggaaggaatatcataactcaatatacattattcttcaagcctaggcacttctgaaattctgtagaataatctttgaactgcctgtgcactgga

SEQ ID NO: 955968 - DNA, 120 bp, Artificial Sequence
  ENSG00000286742_17 (sequence is synthesized)
aaaaaactggtctgaaaaactgcttgggatgtgatctgagataatttttttttaactgacaaaatgaggttgattccttccctatcactacccaactgataaaaaggaaacccacagtga

SEQ ID NO: 955969 - DNA, 120 bp, Artificial Sequence
  ENSG00000286742_18 (sequence is synthesized)
attttacagttgaaagatgtctcttatgcatcaaaccaaacttaacaaaagttttataaaattaccatattcacttatgttttccacttaatatttttgacacagtctcactctgttgcc

SEQ ID NO: 955970 - DNA, 120 bp, Artificial Sequence
  ENSG00000286742_19 (sequence is synthesized)
tttccacttaatatttttgacacagtctcactctgttgcctagcctggaatgcagtcgtgtaatcatagctcactgcagtctccatctcccaggctcaagtgatcctcctgcttcagcct

SEQ ID NO: 955971 - DNA, 120 bp, Artificial Sequence
  ENSG00000286742_20 (sequence is synthesized)
caagtgattctcctgttttggccttccaaagtgctgggattacagatgtaaggcaccatggccaacctccacttgatattgttttaatgtagtggtagaaaaggtagcaaggcttacata

SEQ ID NO: 955972 - DNA, 120 bp, Artificial Sequence
  ENSG00000286742_21 (sequence is synthesized)
agagttcttttcttgctttactcttgacaacctttcttcatctttgagaatctcaatcctacctcccacctcaagctaaaaacagagtttagttgaaactttttgcagggtaatttggtt

SEQ ID NO: 955973 - DNA, 120 bp, Artificial Sequence
  ENSG00000286742_22 (sequence is synthesized)
tagctagcacaatttaaaaaatttgcatgtcatttgaccctgtaatttcacttctggaatttactgtacagaaatacctggacgaatgctccataaaataagcacaaagattttactgca

SEQ ID NO: 955974 - DNA, 120 bp, Artificial Sequence
  ENSG00000286742_23 (sequence is synthesized)
acactgtttgcagtaaatattgtttgtattttttgaccaaaaaacccctaaatgtccatcaagaagaaattaaattatgaaataaatgaactgacagttattaatctgtttaaaaatgag

SEQ ID NO: 955975 - DNA, 120 bp, Artificial Sequence
  ENSG00000286742_24 (sequence is synthesized)
ttaaatctctaggtactgacatattatgataaaataaagcgaataagcaatgtacagaagagtatcgggtaagcccatttctgtgagaaaaatttacatatgtacatgtgtacctatgta

SEQ ID NO: 955976 - DNA, 120 bp, Artificial Sequence
  ENSG00000286742_25 (sequence is synthesized)
ctctctctctctctctctctctctcatttgtaacaaggaagatctggaagtatatcgaggggactatctttgggagttttggagaagtacaggaaagacaatgttcacattttatacttc

SEQ ID NO: 955977 - DNA, 120 bp, Artificial Sequence
  ENSG00000286742_26 (sequence is synthesized)
gaaagacaatgttcacattttatacttctgtattaacattaggtgtttttacaaccagactatgttattttactttttcgtttaaatttttttaaaattaaataaaactaacaggcatgg

SEQ ID NO: 955978 - DNA, 120 bp, Artificial Sequence
  ENSG00000286742_27 (sequence is synthesized)
aaatctcctactttgatccttcgtacagcaatttttgtttcttaaagtgtcacgtggagtgaaagatcacagagacaatgaggctccccaggtgcaagcattttttaaagtaaggacata

SEQ ID NO: 955979 - DNA, 120 bp, Artificial Sequence
  ENSG00000286742_28 (sequence is synthesized)
ttgaggatgatccactagtgtcgataaacactttatacttgcaagtttgagctcaagcaccattaattcaggagaagaaggccaggcagctgcatcaatatcagcttggctggttttaca

SEQ ID NO: 955980 - DNA, 120 bp, Artificial Sequence
  ENSG00000286742_29 (sequence is synthesized)
tgcaagggccccaacatctatagcccctacacaaccagaaaagaagacaatgtgggacacagaagaatgagacttcaatgagaagggcactgacttattttctcccctcttcccaataaa

SEQ ID NO: 955981 - DNA, 120 bp, Artificial Sequence
  ENSG00000286742_30 (sequence is synthesized)
tggcaagttgtctctgtttcttctttaatttatccttttatttgatgacttagacctgcattgtccaatcagtacatgtggctactgagcacttgaaatgtgctgaaaaaagtctgaact

SEQ ID NO: 955982 - DNA, 120 bp, Artificial Sequence
  ENSG00000286742_31 (sequence is synthesized)
gagatgtgctgtaagtgtaaaatacacattggagtttgaacagttagtaaaaagaaagaatgtaaaaatatctcattcatccatatatttatattcattacatgttgaaatgataacatt

SEQ ID NO: 955983 - DNA, 120 bp, Artificial Sequence
  ENSG00000251011_0 (sequence is synthesized)
gcaggcattttgacatcagggatgggcaaaaacatacatccatttaagaattctagaatcagagactaggaagagttgaaacaaccttacagatcacttgatgcactttatatagaccca

SEQ ID NO: 955984 - DNA, 120 bp, Artificial Sequence
  ENSG00000251011_1 (sequence is synthesized)
ggggagaaacaaaaagaccaactactaaagctgctaaaacaagataaagcatactgcaagggaaaggctggagcagttcactggctgaagttataaactccatcaagagacacacaatca

SEQ ID NO: 955985 - DNA, 120 bp, Artificial Sequence
  ENSG00000251011_2 (sequence is synthesized)
aataaaacaattcaactttcaaggtattaaaaggattcaccaactcctatctcttaacacaatggccaaaaaactgctggactcaaggcacagtcatgtattcctggcataaggcctgcc

SEQ ID NO: 955986 - DNA, 120 bp, Artificial Sequence
  ENSG00000251011_3 (sequence is synthesized)
tgggtgttctaactcaatgagccccacatgccagactatttccacagagctgatatgggacaggaagggctaaggaacttcaaaactaatagtttggtgcaactgatatggacctgtgca

SEQ ID NO: 955987 - DNA, 120 bp, Artificial Sequence
  ENSG00000251011_4 (sequence is synthesized)
gtcactgaccacatgtagcactgagaacttgaaatgttgcaagtgtgactgaggaagtgaattattaaaacttatttttaactaaatttaaaaggtgatagctaattcagtcactagaaa

SEQ ID NO: 955988 - DNA, 120 bp, Artificial Sequence
  ENSG00000251011_5 (sequence is synthesized)
gacatcctgagttgtaaaagaggtgctgttatataacacaggcactgtatagcagccttaggttatgaatattaagagacaatctcaaatgagataatatcaataaagacctcctgtcgt

SEQ ID NO: 955989 - DNA, 120 bp, Artificial Sequence
  ENSG00000251011_6 (sequence is synthesized)
atactggacttggagtaagacaatctcagtccatgttcctagttctaggattttaggcataacacttggcttttagggcattgtattttctttatagtaacatggtattaaaatgatgcc

SEQ ID NO: 955990 - DNA, 120 bp, Artificial Sequence
  ENSG00000251011_7 (sequence is synthesized)
tatcaacaggcttgtcaggatgagtcaacagcatattagatgggaaaacaccataaagtacaaaaggcttgttatcgtcagtctcctttggttgttatattggttaagaggactaattgt

SEQ ID NO: 955991 - DNA, 120 bp, Artificial Sequence
  ENSG00000251011_8 (sequence is synthesized)
tgcctctctccaagttcagaactaattcaaacatacatagaggagtcagaggtggatcaaacattatttttattactagttaagttggatttaagaacatggcttgacttatagcttcct

SEQ ID NO: 955992 - DNA, 120 bp, Artificial Sequence
  ENSG00000251011_9 (sequence is synthesized)
actgtatcctataacacactattttttcatattctgccctttctccttgattatactataagcttttggagagaagaaattatgctttatatctctctgcatccctagagtttttcacac

SEQ ID NO: 955993 - DNA, 120 bp, Artificial Sequence
  ENSG00000251011_10 (sequence is synthesized)
agccataaccccagcaggtgtgctatctgataaaggagactgcatttgtaccacagttttctatgtgaagccttttttctccactggcctgggaactcttggagggcagggttcatgtct

SEQ ID NO: 955994 - DNA, 120 bp, Artificial Sequence
  ENSG00000251011_11 (sequence is synthesized)
tttcattcccagtgcttagcataatacctagcacatagtagattctttataaaagtgtgttgaaagatcatgaaaacagaagggtaccaaatgatctggtgccacccaggggttgcagag

SEQ ID NO: 955995 - DNA, 120 bp, Artificial Sequence
  ENSG00000251011_12 (sequence is synthesized)
agggatttatttattttttattttttttttaggattattatgaataacagtgaatataaatatggattgaaaatagtccttttggtgatttcaaaattttctggttggcctctgagacag

SEQ ID NO: 955996 - DNA, 120 bp, Artificial Sequence
  ENSG00000251011_13 (sequence is synthesized)
gtggcatcttaatgaaagaggggaagctccccatctgggaaggctcagaagtggggcctaccctatttccttaacactcaggacactaggaagccttgcagtttacttgtatccaagtga

SEQ ID NO: 955997 - DNA, 120 bp, Artificial Sequence
  ENSG00000251011_14 (sequence is synthesized)
ggggatttgcctattctgttatctactttgaaatgttagctcctaaaacatgggcaggtagcttaaaaagacatctgaaataaacactggattgaaggcaatgctaataatggaagcaca

SEQ ID NO: 955998 - DNA, 120 bp, Artificial Sequence
  ENSG00000251011_15 (sequence is synthesized)
acttctattattcttgatataaacttttcttcaaccatgttataaagtaaaaaataacgatgaactaagcagagagggatttaaaggagggctgtcttctaaggatcccattcttgacag

SEQ ID NO: 955999 - DNA, 120 bp, Artificial Sequence
  ENSG00000251011_16 (sequence is synthesized)
tttgttcatttggaaaatagcactacctgcaaattattgtgattgaaggttttatttgagacagttttccccaggagaaacttcagcttctgtttacttgttaggcaccctggctatctg

SEQ ID NO: 956000 - DNA, 120 bp, Artificial Sequence
  ENSG00000251011_17 (sequence is synthesized)
ggcatctgagccctggacatcttaattagagttggtctgctaatgtccatagcagagaggaactgtcacttggtaattaagttagagccatgacagaagcctgtgacatctgatgtttca

SEQ ID NO: 956001 - DNA, 120 bp, Artificial Sequence
  ENSG00000251011_18 (sequence is synthesized)
gaatataacaacccttgttcttctcccaagggatgcacacaccatgaaacaatttcctttggagttgctggtagaatctgctaacataatatctaagatgagatggcatgcagaggtctc

SEQ ID NO: 956002 - DNA, 120 bp, Artificial Sequence
  ENSG00000251011_19 (sequence is synthesized)
tgtaaggggtgaggacctcaaaacactcttgtgaagtatgctgctcctcagttcagggccttgcagaggatctgagacaacaaaccttcctatacagataaactctcggtgcctcagtgg

SEQ ID NO: 956003 - DNA, 120 bp, Artificial Sequence
  ENSG00000251011_20 (sequence is synthesized)
agtgagtgcatgagatgtggcttactcagctgtggccacctgggcagggttgttgtggagtcaggtcctctgctttatgtgattgtttctgtgttttttaagccctgagctgtgcttcca

SEQ ID NO: 956004 - DNA, 120 bp, Artificial Sequence
  ENSG00000251011_21 (sequence is synthesized)
tttccaatcgtaagttttatgaaatctaaccaactatttatgaaaaaaattcagtgtctaaattgaagatgtgctataaatgcacattatataggagatttaaaagacctggtctgaaaa

SEQ ID NO: 956005 - DNA, 120 bp, Artificial Sequence
  ENSG00000251011_22 (sequence is synthesized)
ctggtctgaaaaaaaaaaagaaagcaaatatttcactagatttttttattgattatatgttgaaataatgttttgaatacattggtttaaatacaaatattatttaaattgcttttgcct

SEQ ID NO: 956006 - DNA, 120 bp, Artificial Sequence
  ENSG00000251011_23 (sequence is synthesized)
tttttctactgtggctactagaaaatttgaaattacatatgtgccttgtgttctatgtccattagactgggccaacctagaccataattctcattctctctaatgaagtctcatccaaca

SEQ ID NO: 956007 - DNA, 120 bp, Artificial Sequence
  ENSG00000251011_24 (sequence is synthesized)
atatggaccacttgagaaacctgctcattgttcctctgtccagttcattccactttaatgccatgtttctttggtctcccatgtgccaggcattgttctaggctaagaatacaccatgtg

SEQ ID NO: 956008 - DNA, 120 bp, Artificial Sequence
  ENSG00000184068_0 (sequence is synthesized)
acaaaagcaaaatgggaaaatggcaaacagatccttttcaattagctgctgcatttatctcttcccccaaaagagaatcttctgctgcttctgcttcttcatctgcacaacggggatgta

SEQ ID NO: 956009 - DNA, 120 bp, Artificial Sequence
  ENSG00000184068_1 (sequence is synthesized)
gccatcatacatgcctgcaaggctgtagtgagatcctggacatgaaagcattctgaaaactgaaaagtacaatgcacctgtgtttctgcctaagctctctaagcgtgacagcaggagcgc

SEQ ID NO: 956010 - DNA, 120 bp, Artificial Sequence
  ENSG00000184068_2 (sequence is synthesized)
ccgggtctccatcccggagagatgtgtccacactccgccgccactgctctcttcatcagcaacttgcttctgcagtcgctgcccaaagtttcgcggagcacccggcgacctggccgtcgg

SEQ ID NO: 956011 - DNA, 120 bp, Artificial Sequence
  ENSG00000184068_3 (sequence is synthesized)
tcaatcctgagaagcccagggattcggggcgcggagactgggggctgggccccgggaatcccaaagacgtccccgcggccaggaagggagtgacaggtgcgacgcgcggtcgcgggcggc

SEQ ID NO: 956012 - DNA, 120 bp, Artificial Sequence
  ENSG00000184068_4 (sequence is synthesized)
gggagagcggaccacggaaaccgcgtgtgggcgcgcgagggaggcggcggccacgcgctctccttaggccgctccctgagacgcccccgcgacgtccctagccccgcgctctggaacccg

SEQ ID NO: 956013 - DNA, 120 bp, Artificial Sequence
  ENSG00000184068_5 (sequence is synthesized)
ggaacccgcgaccctcgcgccgctttcggccccgcggcgccccagatcccacggcctcccggagcggcgcagctgggtcgggctcacgctcgcagcgccggaagggttgaggaccgccgg

SEQ ID NO: 956014 - DNA, 120 bp, Artificial Sequence
  ENSG00000184068_6 (sequence is synthesized)
ggggctgtcggggggtgggcgcacgcgcacccgggcgcgccgccgtaaccccttcctccccgcgcggcccccgcactcccacccacccaccactcaccgtcgatgtctcccagggtcagc

SEQ ID NO: 956015 - DNA, 120 bp, Artificial Sequence
  ENSG00000184068_7 (sequence is synthesized)
ctcaccgtcgatgtctcccagggtcagctcgtcgcccagctccgtgagggtctccatggtctccagaccacccagctcgccgctgtcgtccatcgcccggctcagcgcagaagccccccc

SEQ ID NO: 956016 - DNA, 120 bp, Artificial Sequence
  ENSG00000184068_8 (sequence is synthesized)
tgccgtcccgctcagggagacgcgggggcggtgccgtcgccaccgcccatgacacccgacaacccccgcccggcaccgcctcaccgacgggtgccacccgccgccatgtttgcgttgcgc

SEQ ID NO: 956017 - DNA, 120 bp, Artificial Sequence
  ENSG00000184068_9 (sequence is synthesized)
ccgggcgccgcacagaaagggcggggcgggattcccccgccccagcccgcgccccctgcggccccgcctccaggccgcgcgcccccctgtttgttgtcaatgggaccaggctcatctcag

SEQ ID NO: 956018 - DNA, 120 bp, Artificial Sequence
  ENSG00000184068_10 (sequence is synthesized)
ccaatgggcgagcgaagcggtgcgtggggtgatggcgcgtcatcgatcagcagctcagatttgcatagtgaggtccctccccccgcggcctcggagcgaatgcctggagtagccgtccgg

SEQ ID NO: 956019 - DNA, 120 bp, Artificial Sequence
  ENSG00000184068_11 (sequence is synthesized)
tcatcatcttaaccttctccgccttgtttaaaggagccgctgccttctccgttggatctgcgccacacgcaagtccgtccactggcctgggagtgaagggttaacaggccaccctccacc

SEQ ID NO: 956020 - DNA, 120 bp, Artificial Sequence
  ENSG00000184068_12 (sequence is synthesized)
cccagcgctcgggacgggagtccgggtcatccaagtcccgcttctcccagcctccttacaaaggcgggcacggaggcttgacaaggttgcagattgtcccagggcggtcaggattttacg

SEQ ID NO: 956021 - DNA, 120 bp, Artificial Sequence
  ENSG00000184068_13 (sequence is synthesized)
tcttctgctttgcacccgccgtgacctcgcgcttactccagtggtcctcaatctctggcacctcggaaccactgaggacctgaaaaccacgccagtgcccaggcccaccgacggcctcct

SEQ ID NO: 956022 - DNA, 120 bp, Artificial Sequence
  ENSG00000184068_14 (sequence is synthesized)
gagaggggggccccgggcacgagttttttgaaaaagttccaccgggattctgaagtgcagcccacccactccttcaagcacctcactgccccatcttgcagctggtcgtgttgtaaactt

SEQ ID NO: 956023 - DNA, 120 bp, Artificial Sequence
  ENSG00000184068_15 (sequence is synthesized)
ctaggaatttatccaaaggaataaaaattacaagtgcttaaagaagtgctgtaactaggaagaagtgagaataaggaaatgaatatgtaaattacatccacacgatggaataccatggga

SEQ ID NO: 956024 - DNA, 120 bp, Artificial Sequence
  ENSG00000184068_16 (sequence is synthesized)
tcattaaaaattacgcacacaaatgtatatttattagcaagaaaaggcgttcacaatatattgataaaagggaaaagttgaagtttcctgccagtttgtgagaggcagctgttgcttagt

SEQ ID NO: 956025 - DNA, 120 bp, Artificial Sequence
  ENSG00000184068_17 (sequence is synthesized)
gatcaataattaagaacacacaggctgtgtggaggcagacacatggatccactaattcactgtgaccttgggttaattgttctaagcctcagtttagtcatctctaaaatggggataaaa

SEQ ID NO: 956026 - DNA, 120 bp, Artificial Sequence
  ENSG00000184068_18 (sequence is synthesized)
tagcatccctcatagctgtggttaagtgagattatttgcacattcaattgacaatatttattgaacatctctgtggcagggaaacaaatggttcctgccctctgagagcttccagtctag

SEQ ID NO: 956027 - DNA, 120 bp, Artificial Sequence
  ENSG00000184068_19 (sequence is synthesized)
caaaaaaaaaaatcagaaatcccacacccgtattaaacataaaaataaattacagatgatggtacaagtgatcaaggaaaggtaatggatgtgatgaaactaacaagggccctgacttgt

SEQ ID NO: 956028 - DNA, 120 bp, Artificial Sequence
  ENSG00000184068_20 (sequence is synthesized)
gctgtcaagaagcctctgaagaagtgacatttaagatgaaacctaaaattatgagagaactgcagctgttacagccaaaggggaaatgatgacatggacaaaggcctcgaggcaggagga

SEQ ID NO: 956029 - DNA, 120 bp, Artificial Sequence
  ENSG00000184068_21 (sequence is synthesized)
gctgctggcagccagctctcggcataagctttggcatacagtaagtgccttgcatactgctgtattgcaattgaaaaaataaggatctggccaggcgcggtggctcacaccggtaattcc

SEQ ID NO: 956030 - DNA, 66 bp, Artificial Sequence
  ENSG00000184068_22 (sequence is synthesized)
aaggatctggccaggcgcggtggctcacaccggtaattccagcactttaggaggccgaggtgtgca

SEQ ID NO: 956031 - DNA, 88 bp, Artificial Sequence
  ENSG00000184068_23 (sequence is synthesized)
tggtggcgcatgcctgtaatcccagctaaccggtaggagaactgccggaacctgggagatagaggctgcagtgagctgagatcatgtc

SEQ ID NO: 956032 - DNA, 120 bp, Artificial Sequence
  ENSG00000251010_0 (sequence is synthesized)
gtaacacatgcacagcctaggatacaaccaacggctctcttccattgttctattcgacacacttccctgcacttatagttttaaaatatcgtacacataacattatgatttcagttctaa

SEQ ID NO: 956033 - DNA, 120 bp, Artificial Sequence
  ENSG00000251010_1 (sequence is synthesized)
atgtaaaccatgatttctttttaaagacgtatggcagccttcatttccagtcaaggcatgcgacattttagggtcctgtggaagaaatgcgatatgctttcagatcacgtgtgaaggagg

SEQ ID NO: 956034 - DNA, 120 bp, Artificial Sequence
  ENSG00000251010_2 (sequence is synthesized)
tctcactgagtttatatcactgagtcatgtgagtgacctcattacatcctggaaacagccctgtgtaggtgtcatcatcatcagccccattgtagagaaggacaccaagacccaggaagg

SEQ ID NO: 956035 - DNA, 120 bp, Artificial Sequence
  ENSG00000251010_3 (sequence is synthesized)
aacagggtcccacagcactggcggtggggctggggctacaatcagttcacctctcctacatcacgttttactgagcatctgctgtgcgctggactcgcggctcggtgtgaacaggatgct

SEQ ID NO: 956036 - DNA, 120 bp, Artificial Sequence
  ENSG00000251010_4 (sequence is synthesized)
gcgtcttgcatttcctcggaaacaggctctgtaaatgtcaaggcaagccctttggcttcccttggaactactcattcttgcagaagctcagctagaagaggaagctggagagcgcgaagg

SEQ ID NO: 956037 - DNA, 120 bp, Artificial Sequence
  ENSG00000251010_5 (sequence is synthesized)
cagctgccacctcttgcacgcgtgggggtctcggggtagcaggggctgctctgtgctgggctgggccagtagggggcgccctccctgggagcagcagggccttccagaaggccagggcgg

SEQ ID NO: 956038 - DNA, 120 bp, Artificial Sequence
  ENSG00000260706_0 (sequence is synthesized)
atgcaatttcaggattgctccaggaaatagcctgttgagaattcagtgctaggagaaagctgtgctttccaaatgaatcctatgccttctaaaaagacatccatatgatccacattttct

SEQ ID NO: 956039 - DNA, 120 bp, Artificial Sequence
  ENSG00000260706_1 (sequence is synthesized)
ttctttgccttagctgccagggagctagcagttaaattaggtggctcacagcaatcattagctcttctctattttctctacaaatgtatctgcaatatttttttttccagagtaaggtct

SEQ ID NO: 956040 - DNA, 120 bp, Artificial Sequence
  ENSG00000260706_2 (sequence is synthesized)
gacctttaatgagccagcggaattggtctcctggtcctctcctcactccacagagactgaaaactatgtcagttcatcgccacgcaatatatatcaaggactaccatgagtcagagactc

SEQ ID NO: 956041 - DNA, 120 bp, Artificial Sequence
  ENSG00000260706_3 (sequence is synthesized)
tgccagcactgggcaaagaaggaagaaggccttgtctgggacatcatggtgcttaaagtctagagaagtgtccagagaagtcaacaagtgggaagaggccagaagtctcaaattaaggtg

SEQ ID NO: 956042 - DNA, 120 bp, Artificial Sequence
  ENSG00000260706_4 (sequence is synthesized)
gctaagaagacaagagtttcggcaggcatagaggctaagagagttaagagcatcctccgtgcctagtacagtccccagctgcatcataaacagatgaaatgaaaaagttttttctcccaa

SEQ ID NO: 956043 - DNA, 120 bp, Artificial Sequence
  ENSG00000268231_0 (sequence is synthesized)
aaatgctaaggaagagaaaatacatttactagccactaagtggagtgtatcatcgtaacgggctcccctgattgtcttcacgttgagtaggctgtgagcaggaggagggggcggttgtct

SEQ ID NO: 956044 - DNA, 120 bp, Artificial Sequence
  ENSG00000268231_1 (sequence is synthesized)
tgctgtctcaggagtggcagaggcaggagaaagtccacatataagtggaccacacgattcaaacccctgtccttcaagggtcaagtgtagtcctccgctggctggtaaatagctcacctc

SEQ ID NO: 956045 - DNA, 120 bp, Artificial Sequence
  ENSG00000268231_2 (sequence is synthesized)
agcccttcctgggtccccaccaccccccacccagccctcccagccctcttctgaaacctgctgttaattcccatttctctgatgaggaaactgagtggcctcttgctgcaatggtagtca

SEQ ID NO: 956046 - DNA, 120 bp, Artificial Sequence
  ENSG00000268231_3 (sequence is synthesized)
tctcctcaccccgcctctcctgggtccccgagtttccgatctgccatctgcctgaatcctcccaggcacagtgcccgagatctctcagagctggggctggggaggatggcgaagccggtg

SEQ ID NO: 956047 - DNA, 120 bp, Artificial Sequence
  ENSG00000268231_4 (sequence is synthesized)
aggactcagcttcacgcctcgagtgcccgggccctcccagcctctgccttcgcctggatctcagctccatctcggggcctcctgtcctcctgcccctttcatgcccctttgtatgcctgt

SEQ ID NO: 956048 - DNA, 120 bp, Artificial Sequence
  ENSG00000268231_5 (sequence is synthesized)
gtctgtctccctgtgactctgccactctctgcccctcgtacttctcctctttggggtccttctgtgtctgcacctctggcttgttccttgcaccaggtgagggaggagaacaggtgtacc

SEQ ID NO: 956049 - DNA, 120 bp, Artificial Sequence
  ENSG00000272328_0 (sequence is synthesized)
tgggcgtaggaccctccgagccaggaccctgggccagggaaagaaatgaatgaagatgccaccttatgcccagaacacatctctcattcaatgataaaggatttgtggttgggtcaactt

SEQ ID NO: 956050 - DNA, 120 bp, Artificial Sequence
  ENSG00000272328_1 (sequence is synthesized)
caatgataaaggatttgtggttgggtcaacttttgtgatgctcaactctttccttcgtaaggacgggctctttctcaggaggcttttgtactcccaattaacgcactgctaatctgatga

SEQ ID NO: 956051 - DNA, 120 bp, Artificial Sequence
  ENSG00000272328_2 (sequence is synthesized)
caagatagaggtggaagttacacgtcctttgtgcttactttctactggcctcatcgggtcgcaagatcccactctgataggtgcatgggggcttggaaaattagaaaaacatgtgaatat

SEQ ID NO: 956052 - DNA, 120 bp, Artificial Sequence
  ENSG00000272328_3 (sequence is synthesized)
ttggtaggcacttacaatctctgccagcatctgcccttctaatcagcaaattttcaattacttttttcttcacccacataagacatcttaatccaacctcaggggacacatcctgatgtc

SEQ ID NO: 956053 - DNA, 87 bp, Artificial Sequence
  ENSG00000272328_4 (sequence is synthesized)
cctcctcccccggaattttcttaattgaccctgggccagggaaagaaatgaatgaagatgccaccttatgcccagaacacatctctc

SEQ ID NO: 956054 - DNA, 120 bp, Artificial Sequence
  ENSG00000233875_0 (sequence is synthesized)
cctgttgggatgaatactaaaaggtggctgttcgctgtctagtcaaggtggaggccccttcccataggattgtcacgcggaataaagacaacgcatgctgaggacctggcgcagagcaga

SEQ ID NO: 956055 - DNA, 120 bp, Artificial Sequence
  ENSG00000233875_1 (sequence is synthesized)
tccgtttcaagaccattgggggaaacggtcttgcccttcctctgccgtagccttcctcagtagaacacaccacctgggggctgctgtgtcttgtttgcttttaaattttcaataacttgg

SEQ ID NO: 956056 - DNA, 120 bp, Artificial Sequence
  ENSG00000233871_0 (sequence is synthesized)
atacagcctggagacaaatggtggggagggtttcccctaaatttggacatctccagattaagacctccgccgaatccgtgaggctttccctctccaaggagctcctaagagaatttccca

SEQ ID NO: 956057 - DNA, 120 bp, Artificial Sequence
  ENSG00000233871_1 (sequence is synthesized)
gtaaaatcgcctcaactgcggtaaataggctgttccccgcgccagcatttgagaagagctggtccccagagtgtaaaggagttaggatgttggcaggaggaaggatgtgtcgccggatga

SEQ ID NO: 956058 - DNA, 120 bp, Artificial Sequence
  ENSG00000233871_2 (sequence is synthesized)
aaagaatagggaaatttggatgcagagacacagagaaaatgccatgtgaagatggatcagagacagaagtgatgcggctgcaagccaaggaatgtgaagaatggccagccaccaccggaa

SEQ ID NO: 956059 - DNA, 120 bp, Artificial Sequence
  ENSG00000233871_3 (sequence is synthesized)
gctaggggagacgccagcacagattctccctgagagtatccagaagaaaccaaccctccaacacctggatttcagacttctgaccttgagaagtgtgagccaataaaacaactgcagtgg

SEQ ID NO: 956060 - DNA, 120 bp, Artificial Sequence
  ENSG00000233871_4 (sequence is synthesized)
ctgcggtgcagtccttggtctttctggcaagtgaggcgctctccccctaaatgtctcagagggagacaaatcagcggactaccttgcttcctttgatgacttggaaaggatctgcagtcc

SEQ ID NO: 956061 - DNA, 120 bp, Artificial Sequence
  ENSG00000233871_5 (sequence is synthesized)
cccttaaagcccaagaatgtcttctcttccacgacagccgtttgtggacacatactgcttacctccctgactgcaggacaaggtccttcaaagctggaactctgactgcgctcagtgatc

SEQ ID NO: 956062 - DNA, 120 bp, Artificial Sequence
  ENSG00000233871_6 (sequence is synthesized)
ccgcagtgctcctctgtagagtgggaacccaggtccatttcaaatatctacgttggaatgagtggatctcgctgggggtgagaggcactttgtctacccacactgccagtcccagccaca

SEQ ID NO: 956063 - DNA, 120 bp, Artificial Sequence
  ENSG00000233871_7 (sequence is synthesized)
tgcctcctcccttccctcaaaaagcagtgtcttcttagtctgcttcttcaaggggagaagtcgtttttatttatggaaacgaactcactatatggtagaaagaacaagagtatcagaatt

SEQ ID NO: 956064 - DNA, 120 bp, Artificial Sequence
  ENSG00000233871_8 (sequence is synthesized)
tgcactttggacttggactcccctctaagcagctgcacaaggtggaacaaaccaataatccttgctgatctgttttgtccttaggaaaaatggtggagggagaatattagatcaggggtt

SEQ ID NO: 956065 - DNA, 120 bp, Artificial Sequence
  ENSG00000233871_9 (sequence is synthesized)
cttagccttggcttcatgaataagctcaaggatgtcaatgaagcttttgacatgatctcaacttttttgtgaacatttatatatttttctggaatggggtccatagagttacaagttctt

SEQ ID NO: 956066 - DNA, 120 bp, Artificial Sequence
  ENSG00000233871_10 (sequence is synthesized)
taagacctccagatggaccccaatatggcagaaatgaactatttaaagatacctgcctgctcccgtagtctgaccctctatggctaagcaaggttttagaggagtggaaggctggccatt

SEQ ID NO: 956067 - DNA, 120 bp, Artificial Sequence
  ENSG00000233871_11 (sequence is synthesized)
gcacagtatcagggttccagacaggctccctggctcttccctcccagtcctgctcctgagatatagttctttctggccgccacttcccttagggcaaccccagagcttaaatcatctgca

SEQ ID NO: 956068 - DNA, 120 bp, Artificial Sequence
  ENSG00000233871_12 (sequence is synthesized)
aggcagtcacctttcaggcacctttcatccggcacctgtgttcttagctggattaactagaaagctagttggaggaaggaaggtgaaagtggaggaaggggaaaagaggaaaagttggag

SEQ ID NO: 956069 - DNA, 65 bp, Artificial Sequence
  ENSG00000233871_13 (sequence is synthesized)
gggaggctgaggtagggtctctaacaaaaatacaaaaatttagccaggcatgatggtgcaagcct

SEQ ID NO: 956070 - DNA, 89 bp, Artificial Sequence
  ENSG00000233871_14 (sequence is synthesized)
ccagcctggccaacgtggtaaaaccccgtctctaacaaaaatacaaaaatttagccaggcatgatggtgcaagcctgtaatcccagctg

SEQ ID NO: 956071 - DNA, 75 bp, Artificial Sequence
  ENSG00000233871_15 (sequence is synthesized)
ctcaaaaaaaagaaaaaaaaagcagtggggcaaacacagttcactgcagcctcaatttcttgggctcaagcaact

SEQ ID NO: 956072 - DNA, 120 bp, Artificial Sequence
  ENSG00000233871_16 (sequence is synthesized)
acagttcactgcagcctcaatttcttgggctcaagcaactatcctgcctcagcctcccgaggagtagctgggatcataggtgcttgccaccacacctggctaattttttaaatattttgt

SEQ ID NO: 956073 - DNA, 120 bp, Artificial Sequence
  ENSG00000233871_17 (sequence is synthesized)
gctggtcttgaactcctgggctcaagttatcctcccgcctcggtctcccaaagttctggaattacagatgttagttaccacccggaccaattttaggattcctttagccagtgaccttgg

SEQ ID NO: 956074 - DNA, 120 bp, Artificial Sequence
  ENSG00000233871_18 (sequence is synthesized)
ttaggattcctttagccagtgaccttggtgtgaccttgtacttctgcagcattttataccttctgcggcacacccttgtagtgggtcgaattgtgttcccccaaaagatatgttctagtc

SEQ ID NO: 956075 - DNA, 120 bp, Artificial Sequence
  ENSG00000233871_19 (sequence is synthesized)
ctaattcccagtacctgtgaatgtgacttatttagaaatagggtctttgcagatgtaatctagttcaaatgaggtcatactggattagggcgggtcctcatccaataactgttgttctta

SEQ ID NO: 956076 - DNA, 120 bp, Artificial Sequence
  ENSG00000270362_0 (sequence is synthesized)
ggggcggaagacaagacaaaaatgactccagttcgctagacgcgcagaggggcggatagcgcgcggaccccgccttccccaaccgagtgtgggttccagtcgctggggaggacctggtgg

SEQ ID NO: 956077 - DNA, 120 bp, Artificial Sequence
  ENSG00000270362_1 (sequence is synthesized)
ccccctgaccttggacgagccatattggacgccccggcgccgtcccgtcttccacgctgccaactccaccgctcccgccccgaactgcggcctaggagccaccgcagcgcacccagcccg

SEQ ID NO: 956078 - DNA, 120 bp, Artificial Sequence
  ENSG00000270362_2 (sequence is synthesized)
cgagtacagccgcatgggaataatcccaacatttgcctgatttattttcttccctctccttacgcttgtacttgtttttctcctctcgctgttttcccttcacactaattcgcaacctgg

SEQ ID NO: 956079 - DNA, 120 bp, Artificial Sequence
  ENSG00000270362_3 (sequence is synthesized)
cagtttgcaaagaggaaactccctttcggaatggaaagccgcttttgcttcttgttgttgggggtggaaaacattccagcgagaatgagttcaaaaagaagggaaaccgcgtcactggag

SEQ ID NO: 956080 - DNA, 120 bp, Artificial Sequence
  ENSG00000270362_4 (sequence is synthesized)
agaaagtaacattaagagatcgatgaggacggagtgggtaggggggacagagagaggaacgtctgcaacaggcatctaaaaacaagcgtggaggagcaaagattcccaatccccgggtta

SEQ ID NO: 956081 - DNA, 120 bp, Artificial Sequence
  ENSG00000270362_5 (sequence is synthesized)
ctaccgcgcgcgttctgcgcgagccattgcaatgccagcatttactgtaagcagaatttgaaggcttttgaaatctttttttggtaagacttacctttctcttcggcataatgactatgt

SEQ ID NO: 956082 - DNA, 120 bp, Artificial Sequence
  ENSG00000270362_6 (sequence is synthesized)
cggtgaagcaaaaagtaaagcaacggactggaactgctggcgccgccgctggatgctgcctctgcctctgcagctgctcacgcgcagggcacgacgtagcccggcctcttcgacctgcac

SEQ ID NO: 956083 - DNA, 120 bp, Artificial Sequence
  ENSG00000270362_7 (sequence is synthesized)
ctccgcggctccctctgggggccctctgctcgcctccctgctgctccaatgaggagccccgccagccggccgcgaggccccattggctgaggcaacgttctaaattccacgagggcacgc

SEQ ID NO: 956084 - DNA, 120 bp, Artificial Sequence
  ENSG00000270362_8 (sequence is synthesized)
ccacctccgcgcgcggtacgcgctgttgtagtttccacttcaccgaaaaaaatctgcctggcgactgagcatgcccagttcaactagtagcctccaggccacacaatcctgaagtttcat

SEQ ID NO: 956085 - DNA, 120 bp, Artificial Sequence
  ENSG00000270362_9 (sequence is synthesized)
tgtttcgctgctctctctttgagattgtaagaataagaacagtgtgtgtcttcataggaaggaaaaagagtaagaatgaatacgtaaactttataatgtaaatatatacacagcaggtac

SEQ ID NO: 956086 - DNA, 120 bp, Artificial Sequence
  ENSG00000270362_10 (sequence is synthesized)
cttattcatttcctacccataaaggcttttaatgaatgttacatggtgggaatctgtaaagcgtgggaaggtactctgtactggaagagcgtggcaacttctaaaggcctcagtttcccc

SEQ ID NO: 956087 - DNA, 120 bp, Artificial Sequence
  ENSG00000270362_11 (sequence is synthesized)
ccctagatatatagtgacaacagtccctaaaatcacttagctctaattttctgaaatctgtgattataaatcactcactaattcagctaacttcaaactagatgtgaagacgaataggac

SEQ ID NO: 956088 - DNA, 120 bp, Artificial Sequence
  ENSG00000270362_12 (sequence is synthesized)
tatatttgaatgacacccgtcatgttacactttatgcgtaatatttctcaaagttctgcaaggcataaaatgagcattgcaaaaatatttctgaattcattttatgagaccagatttact

SEQ ID NO: 956089 - DNA, 120 bp, Artificial Sequence
  ENSG00000270362_13 (sequence is synthesized)
ctgataccaaaaccagtgaaagacttcaaaagagagttacagaccaatatcactcataaacatagacacaaaagtcgtgaacaaaattttagtaaatgaaactcaacaacatttaaaggg

SEQ ID NO: 956090 - DNA, 120 bp, Artificial Sequence
  ENSG00000270362_14 (sequence is synthesized)
acaatacatcatgacctgtggggcttatcttgggaatgcaaagctgcttttttaatatctgagaatcaatcaatgtaattggcaggattaatagaataaagggggaaaaacaatcctttc

SEQ ID NO: 956091 - DNA, 120 bp, Artificial Sequence
  ENSG00000270362_15 (sequence is synthesized)
agcagatgcaggaaaagcgctagtgaatgggtaagcaaattgtgatgagcacatgcagtggaatactattcagcaataaaaaacaataaaaaattttcctacatggatgaatatcaaaaa

SEQ ID NO: 956092 - DNA, 120 bp, Artificial Sequence
  ENSG00000270362_16 (sequence is synthesized)
caaagtgctgtacgaaagaagtcaaatacaaaagaccacactgaatgattgcattcatatgaaattatagaaaaagcaaaattgggcaaagttagtttcagaatcatcttagcaggcaaa

SEQ ID NO: 956093 - DNA, 120 bp, Artificial Sequence
  ENSG00000270362_17 (sequence is synthesized)
gctcacatcataggaaaatgtgttgaagccttacattacaaatatggccaaatccactttggtaacacagaggctgcaaatatgtattaaaaatatcatgtattaaatatgtattaaaaa

SEQ ID NO: 956094 - DNA, 120 bp, Artificial Sequence
  ENSG00000270362_18 (sequence is synthesized)
agcaatgaagtttaatatttcactttttctttagtaattttcagaatacattaattgatctagtactctccagaggtggttgattactttcttttttggaacatctttatgaactcatgg

SEQ ID NO: 956095 - DNA, 120 bp, Artificial Sequence
  ENSG00000270362_19 (sequence is synthesized)
atttttacatatttggtgtgcatcagtgtattgctatcattattattacctttttaatgctcctattaccacatctttagccaatgcataccctttcaaattagtgcttgtgtccttttg

SEQ ID NO: 956096 - DNA, 120 bp, Artificial Sequence
  ENSG00000270362_20 (sequence is synthesized)
acatgatcttaatcatttttgatagattccctgttcttgggcattcagtgaatgacaatagtatactgaaacgaattaagataaaaaccaattgcttagagctagataaaaatttacaag

SEQ ID NO: 956097 - DNA, 120 bp, Artificial Sequence
  ENSG00000270362_21 (sequence is synthesized)
tcattaaaataatatttataatgaagatgtctttcaagatattaatttgccaaatacttgatagttaaataaagaaaaagtcagtgaaaacatttttagtaagatatgtgtgagaaggat

SEQ ID NO: 956098 - DNA, 120 bp, Artificial Sequence
  ENSG00000270362_22 (sequence is synthesized)
tgtgagaaggatactgagtagcacttgcaatctggactggatggctatttttcttcatggagatggaaaggtgccacaacaaaggtagtgctaaggtgaatatttctcctctgtgatgaa

SEQ ID NO: 956099 - DNA, 120 bp, Artificial Sequence
  ENSG00000270362_23 (sequence is synthesized)
aaataactcacaaaattggcttctttgttaattttttttcaaaaccaaacactcagatcatcaacagcaaacaaaattgtgaatgtttttactgcacacaataaaaatgctacgatgaaa

SEQ ID NO: 956100 - DNA, 120 bp, Artificial Sequence
  ENSG00000278703_0 (sequence is synthesized)
aaatttactcattggaaagctgttatattcaatgtttgtaagaaataagccatagattaggaataacaattgttatggtactctctgttggggaaaaagaatgaagttctgttttcagtt

SEQ ID NO: 956101 - DNA, 120 bp, Artificial Sequence
  ENSG00000278703_1 (sequence is synthesized)
ctgttttcagttataacccatgagttcttaatatgtgcaccaggaggttttatacatgaggaattttgaatgagtttttaaaagtcagtaaagcacctgtaatcccagctactcgggaga

SEQ ID NO: 956102 - DNA, 120 bp, Artificial Sequence
  ENSG00000278703_2 (sequence is synthesized)
aatgaaaaaataaaaaataaaaaaagaagtcagtaaaaatgaaagtgcaagatgcgaataaaagaaatgaaatgatgctgattcattaaaatatttaataaagtatgtcttgctagttcc

SEQ ID NO: 956103 - DNA, 120 bp, Artificial Sequence
  ENSG00000283108_0 (sequence is synthesized)
gcgtgcaggcccgcctccttccacatcaaccagtctaaggttgctcccaccagactaggaggactggagagtagggttggggtcaaagggtagcctcctgcaggtcgcctcctcctgtgg

SEQ ID NO: 956104 - DNA, 120 bp, Artificial Sequence
  ENSG00000283108_1 (sequence is synthesized)
ctttcccggacgtcgcgctgggacttcctgccgacaccgcacttcttcccagactcccacctgcgccgctgggggcttgggtccagatttccagggtctttgaagatgttagttcactgt

SEQ ID NO: 956105 - DNA, 120 bp, Artificial Sequence
  ENSG00000283108_2 (sequence is synthesized)
agaatttgacctttcaatgaatgtctcaaatttgtttacgtcatctttaatgttttcaatactgtcttcaaaacaatttgagggaatatcttgacaagcgccagacaactgaacccctag

SEQ ID NO: 956106 - DNA, 120 bp, Artificial Sequence
  ENSG00000283108_3 (sequence is synthesized)
aaacttcaggtggttagcctgaatgtttgggtgtattccccaacaaacattcacgtctgtcttacgaaagaactcataaaggcatcaatagagaggacaagttgtgggatgtaaagatga

SEQ ID NO: 956107 - DNA, 120 bp, Artificial Sequence
  ENSG00000283108_4 (sequence is synthesized)
caatttggtaagtttaaaatttattcttccacaattttggtaagtttaaaatttattcttccatatgttataccattgttgctcttataaatggtattgacttttaaattttattatttc

SEQ ID NO: 956108 - DNA, 120 bp, Artificial Sequence
  ENSG00000283108_5 (sequence is synthesized)
ctttattaagatagtaaacattttcattaatttaaatatagatcctttgaaattttccatttaggtaatcatattataaataatgacagatttacttctacctttctggtccttaggttt

SEQ ID NO: 956109 - DNA, 120 bp, Artificial Sequence
  ENSG00000283108_6 (sequence is synthesized)
tacttctacctttctggtccttaggtttttaaatatcttttcctagcctgcctcacttaagattccagtaaaatactaagtagtggataccattgtcatcttcctgattttaaactcatt

SEQ ID NO: 956110 - DNA, 120 bp, Artificial Sequence
  ENSG00000259225_0 (sequence is synthesized)
attcttctgcaggcaaacggagtcgccatatgacccagccctggtcttgcttggctttctggatgttctcaaccttgacatgactccttattctccaattcatttggacctcaagacact

SEQ ID NO: 956111 - DNA, 120 bp, Artificial Sequence
  ENSG00000259225_1 (sequence is synthesized)
aaattacagagtcagcatatatttgaatactggataaaagggaagaggatgaaatggatttttcaaagcttctaaagaaaacagaactagctgtgtagcagactcctcttataaacctct

SEQ ID NO: 956112 - DNA, 120 bp, Artificial Sequence
  ENSG00000259225_2 (sequence is synthesized)
gcgaagttctacttgaaaagctgtggtttcatttcaaaggaaaccagcaatcagggggatctctacaggaaaatctcttccctatgtcttctttagactcttcaaaaaggagagagagca

SEQ ID NO: 956113 - DNA, 120 bp, Artificial Sequence
  ENSG00000259225_3 (sequence is synthesized)
ctttctacactgaatggcagtggaactctgagattcagtggaacctggaagtttgttcccactgggtggccaatgctacatcaaactggacttcattcttgtcaaaatgtgagatggagt

SEQ ID NO: 956114 - DNA, 120 bp, Artificial Sequence
  ENSG00000259225_4 (sequence is synthesized)
ctccctgtgttgcccagtctggtcttgagagcttcagttttaaataataaattgttctcgtctttctaaatttcaatcaaaacacaggatgtattttaaaagggaaaaactgtgaggtaa

SEQ ID NO: 956115 - DNA, 120 bp, Artificial Sequence
  ENSG00000259225_5 (sequence is synthesized)
aagaatagggtgaggggaggaaagaaataacttcatagagaaaaattcaatgaacccttggaagaaaatatatggaagtatggttactgacttgggaaagaagagaaaggtacaatgtaa

SEQ ID NO: 956116 - DNA, 120 bp, Artificial Sequence
  ENSG00000259225_6 (sequence is synthesized)
accacccaaggggagataagaggagatctcatcagaggtgcctgaaaagcacctcagccgaaggcctcacatagagagacctaagaatgaaggcacctggactaggaatgtgaatatgtg

SEQ ID NO: 956117 - DNA, 120 bp, Artificial Sequence
  ENSG00000259225_7 (sequence is synthesized)
aaagaacatgaccggccaggggccctgagttattgaatgcaacccccttcagacactgcaacacacaggctgtgcaccaagcctagtatgggaaggacagcttttcttcatgaggcctgc

SEQ ID NO: 956118 - DNA, 120 bp, Artificial Sequence
  ENSG00000259225_8 (sequence is synthesized)
gcctagtatgggaaggacagcttttcttcatgaggcctgccaggtaaagccagctatgaaacaggaagttgaccttcaccagacactgaacctactggcaccttgatcttggacttccca

SEQ ID NO: 956119 - DNA, 120 bp, Artificial Sequence
  ENSG00000259225_9 (sequence is synthesized)
tttttttttttttttttttttgcctttccactcttccaccttgtgaggacacagcaacaagctgccctcttggaagcagaaagcagctctcaccagacatcaaatctgccagcacattga

SEQ ID NO: 956120 - DNA, 120 bp, Artificial Sequence
  ENSG00000259225_10 (sequence is synthesized)
cacattgatcttggacttcccacccttcagaactactgtctgcgagggatgagcctgaggtgtcagcatcttcacaggtcttttgagcctgcatgcacaaaagggtctactgtccctggc

SEQ ID NO: 956121 - DNA, 120 bp, Artificial Sequence
  ENSG00000259225_11 (sequence is synthesized)
tacataactggagcctcagctcttcactgactgtcctcaggttccaggggccacctgcagttccttgccacatggatttctccagcatagctgtgtacttcatcaaggcacaaggagagt

SEQ ID NO: 956122 - DNA, 120 bp, Artificial Sequence
  ENSG00000259225_12 (sequence is synthesized)
ctccagtctaccagagccctatgtaatgtaacataatcaacaaagtgacgtcccattcatattcaattggtcagaagcaagttacagtccccacccaggtcagagggaggagatatgaca

SEQ ID NO: 956123 - DNA, 120 bp, Artificial Sequence
  ENSG00000259225_13 (sequence is synthesized)
aagaagtaaacatcaggaggctgggacaatggggatacttaaggtccatcctgctacaacttccacaatggcgtcttgaccatgagggctccacagacactgaagcggtcacccaggctg

SEQ ID NO: 956124 - DNA, 120 bp, Artificial Sequence
  ENSG00000259225_14 (sequence is synthesized)
gtcccattcttctgcaggcaaacggagtcgccatatgacccagtaagtttactcttaggtacattccctagagaaataaaaatatatgtccgtgcaaaaacatgtatgtgagtgttcgta

SEQ ID NO: 956125 - DNA, 120 bp, Artificial Sequence
  ENSG00000259225_15 (sequence is synthesized)
gcagtgttattcataatagccaaaaggtggaaacaagccaaatgtttgtcaactgatgaatggagaaataaaatgtggtataaccatacaatggaacattaaacaggaataaaaagaaat

SEQ ID NO: 956126 - DNA, 120 bp, Artificial Sequence
  ENSG00000259225_16 (sequence is synthesized)
ggaatgctgagacatgcaacaacatggatgaacctcaagtacattatgctaaaagaaagaagccggtcacaaaggaccacagcttgcatgattccatttatacaaaatgtccagaatagg

SEQ ID NO: 956127 - DNA, 120 bp, Artificial Sequence
  ENSG00000259225_17 (sequence is synthesized)
cagatctacagactggaagtagaacagggattgccaagggctgtgggaagggaaaagtggggaacaatgctaatgggtaagagctttctttatgggataataaaatgttccaaatttaga

SEQ ID NO: 956128 - DNA, 120 bp, Artificial Sequence
  ENSG00000259225_18 (sequence is synthesized)
ttgtggtgatagttgcacaattctgtgaaaatactaacaatttttaatgggcgactattatggcatgtgaattatatctcagtaaatctttttttattaaaaaacaaaaaagacccacaa

SEQ ID NO: 956129 - DNA, 120 bp, Artificial Sequence
  ENSG00000259225_19 (sequence is synthesized)
ggaacctggaagtttgttcccactgggtggccaatgctacatcaaactggacttcattcttgtcaaaatgtggacacagcaacaagctgccctcttggaagcagaaagcagctctcacca

SEQ ID NO: 956130 - DNA, 120 bp, Artificial Sequence
  ENSG00000259225_20 (sequence is synthesized)
gcgagggatgagcctgaggtgtcagcatcttcacaggtcttttgagcctgcatgcacaaaagggtctactgtccctggctgcttgataatctctgggatcctgcatctgcacttaccatg

SEQ ID NO: 956131 - DNA, 120 bp, Artificial Sequence
  ENSG00000259225_21 (sequence is synthesized)
tcagctggtccacccagcttcctatcacacttcagttccataaatggctgcctacagaggaaagcttcacatgtgcctaaaaactcccttcagatcgtcatcagcccgtattcagccaca

SEQ ID NO: 956132 - DNA, 120 bp, Artificial Sequence
  ENSG00000288022_0 (sequence is synthesized)
gagctgaggaagccgagctggtggagataacttttcaagagagtttggctctgaagggggagagtgagctgggacaagctgctgtaacaaagtcccacaaactgggtggcctaaaacaac

SEQ ID NO: 956133 - DNA, 120 bp, Artificial Sequence
  ENSG00000288022_1 (sequence is synthesized)
agaaatgtatcctgtcactgttgtggaggctggaattctgaaatcaagatgtcagcggaaccatgctccctctgaaggctccaggagagagctcttccttgcctcttcctagctttggcg

SEQ ID NO: 956134 - DNA, 120 bp, Artificial Sequence
  ENSG00000288022_2 (sequence is synthesized)
gtggttggcaatgcttgctgttccttggcttgtagcccctgcctcaatcatcatgtggtcttcttcccactgtgtgtgtctgtcttcacatggtcttcttagaaagacgctgttactgga

SEQ ID NO: 956135 - DNA, 120 bp, Artificial Sequence
  ENSG00000288022_3 (sequence is synthesized)
tttaggaccccttataatccagtctgatcttattttattcacatctgcaaagacgctattttcaaataaggtcacattcacagataccagaagttagggcttgaacatatcttttgggga

SEQ ID NO: 956136 - DNA, 120 bp, Artificial Sequence
  ENSG00000288022_4 (sequence is synthesized)
gacataattctatccattatcattaagacatttagaaatggttgtagagagggagagaaatgtccgagcatgcccagcgctgtcacgggcccatggggactggtgaagataaaccaatag

SEQ ID NO: 956137 - DNA, 120 bp, Artificial Sequence
  ENSG00000288022_5 (sequence is synthesized)
tgagagtatgctgcggcatcagctgctctcccacttgctcctctctgctgaccggcatccttgggcagagctggggcaccccagccctctcctgctgcagggcaggtttccctcccacaa

SEQ ID NO: 956138 - DNA, 120 bp, Artificial Sequence
  ENSG00000288022_6 (sequence is synthesized)
gaacagaaccttgtgacctctcttgactcttcctcccttcctgcctcagcctccatctctgcctcccattcagtccctttctctgccccaaggtacatgaagaactcttgaagacaggag

SEQ ID NO: 956139 - DNA, 120 bp, Artificial Sequence
  ENSG00000288022_7 (sequence is synthesized)
tgggattttcaccaaagaacgaaaggaataaacccatctccctatttttaaccccccagaagaagccttattctctcctttctggaatgtcaggaccagtgtcattttgtccaggctgca

SEQ ID NO: 956140 - DNA, 120 bp, Artificial Sequence
  ENSG00000288022_8 (sequence is synthesized)
ttgacctctttgctggaccccgggcatagggagcccttgctgcttctccacccaccagtgctgagctccgggggtgtttgccttgcaggtccaaggtgagaatgtaaacactgcaattcc

SEQ ID NO: 956141 - DNA, 120 bp, Artificial Sequence
  ENSG00000288022_9 (sequence is synthesized)
tctgaaaactggctggaacctcctccagggaggaagggttgctcatgggctggccaggctcccaaacatcatacacagcaacccggagctccaacttaacacagcttggggcaggtcctc

SEQ ID NO: 956142 - DNA, 120 bp, Artificial Sequence
  ENSG00000288022_10 (sequence is synthesized)
aaatgaccttccgtttcttgtctgcccatctgagaggaccattccattccaaacaacattcctttgataaaagtggttacacactgtaaacatcaatgagccaggaacattctccggtgc

SEQ ID NO: 956143 - DNA, 120 bp, Artificial Sequence
  ENSG00000288022_11 (sequence is synthesized)
aacaggattctgataaagcagtcctattttgcaaaaccttccagtgtgaaacatcctccccacagcaagcagggaaattcctgggatgccacaacattgggcagagtgtccagggcccca

SEQ ID NO: 956144 - DNA, 120 bp, Artificial Sequence
  ENSG00000288022_12 (sequence is synthesized)
gggaaggagcagaaagtctagaggtggagctcccattgtgggcagagggacctgagttttcaatcatctgttcatcagtcactcactcaacaaatatttgctgaacatgtcccaagcgcc

SEQ ID NO: 956145 - DNA, 120 bp, Artificial Sequence
  ENSG00000288022_13 (sequence is synthesized)
aggctctgatggagtcactggaaatgcagtgtttccacatgactgcaaagctcccctgactttcaaaaagcagcaatgatttcctctccccacacagtccaggttgacagtcgggtgcaa

SEQ ID NO: 956146 - DNA, 120 bp, Artificial Sequence
  ENSG00000288022_14 (sequence is synthesized)
tatccacacgcctctctacctcactccctctgtgagtctggatgtgttcttcttcctctccagccccctgggccctcattctgttggcttttctgctgtcactctctgttcgcaggtatc

SEQ ID NO: 956147 - DNA, 120 bp, Artificial Sequence
  ENSG00000288023_0 (sequence is synthesized)
tgcgcaggcgcggagctgccgcggtcataggagggcgcgagcagcttggctggctagggcttgtagagttgccctggtaccctagtattcctaattgcaaaatctttatgaagcttaaga

SEQ ID NO: 956148 - DNA, 120 bp, Artificial Sequence
  ENSG00000288023_1 (sequence is synthesized)
aaaaaatcaccagcctgggcaacctggggaggccccgtctctacaaaaaaattaaaaaattagccgagtgtggtggcgtgcacctgtggtccagctactatggaggctgaggcaggagga

SEQ ID NO: 956149 - DNA, 120 bp, Artificial Sequence
  ENSG00000288023_2 (sequence is synthesized)
gttactgaaatacagatgtgcaattttattccttagcctagtctcacctctgctgcatgtgactattgttcacatattaattccaccacaatttaaggtcctcctgtgtgccaggcaagc

SEQ ID NO: 956150 - DNA, 120 bp, Artificial Sequence
  ENSG00000288023_3 (sequence is synthesized)
acccttaacaaaagctggggaaacaaccaggaacaagacagacgctgtgccttccctcatggggattactttctagttgagaaagcaaacattaaatgtagaaggaaaggccgggcgcgg

SEQ ID NO: 956151 - DNA, 120 bp, Artificial Sequence
  ENSG00000288020_0 (sequence is synthesized)
ggcacagaacggctgcatctgaaggtgatttaacacaggaaaacttgcaggccttgtgaggagtaactcaagatggaggatgtggattactccgatgtctgagaattgagccttggaggg

SEQ ID NO: 956152 - DNA, 120 bp, Artificial Sequence
  ENSG00000288020_1 (sequence is synthesized)
gctgagggactcgccatgcaggaagagggtgtctgggtagtgagtgagcctggccaggcaatctcagggctccccaggccacatctcacaataggtattgggtacacactacttccaccc

SEQ ID NO: 956153 - DNA, 120 bp, Artificial Sequence
  ENSG00000288020_2 (sequence is synthesized)
tgaatcctcactggcagcctccctggtccccaacaaacagatgtagtcatggcatctgcattcattgttcaagagaaatctctctccatagtggatcacagactaacacttattatgacc

SEQ ID NO: 956154 - DNA, 120 bp, Artificial Sequence
  ENSG00000288020_3 (sequence is synthesized)
ccctgagccagcccactggcagaagggatcctgccattgttcagctgataccccatcctggcacttcccgaatgcttatcctttctctggcaagttaactctaggcagcagcatctccaa

SEQ ID NO: 956155 - DNA, 120 bp, Artificial Sequence
  ENSG00000288020_4 (sequence is synthesized)
gtcccaccttcatctgaagagatcagatcacttttcttcgattgaaataggcatgcaattctgacaaacataagacttgggagaggggtcagtttctacaaagccatgttgagtgtctgt

SEQ ID NO: 956156 - DNA, 120 bp, Artificial Sequence
  ENSG00000288020_5 (sequence is synthesized)
attagttgtattgggagagcttttgcccatgaggtatttctttttgttttgagttttcatcctgtttattttaggaaaataaagattgactagccaggtgcacctctcatcctaaagaaa

SEQ ID NO: 956157 - DNA, 120 bp, Artificial Sequence
  ENSG00000288021_0 (sequence is synthesized)
ggaaatcatgttcaggactatacaggactttaaaagctttatcttcccaaactgaaaaccagacctctcaagtctagctgctctcctccaggtgctgcataaatggacctggtctttggc

SEQ ID NO: 956158 - DNA, 120 bp, Artificial Sequence
  ENSG00000288021_1 (sequence is synthesized)
taccttactttggatcacttggttgaaacagttcccttagtcaacttgtccactggacttaagctgtgggacacagaaattttccctggaagaacagaacaatgaagatgaatagttgaa

SEQ ID NO: 956159 - DNA, 120 bp, Artificial Sequence
  ENSG00000288021_2 (sequence is synthesized)
aaatgagagtgatcctggctgttggtaggagtatgagacacccctccacattagcaaaccctagattctaaatccatcagcctaagttgttggctatacaagcatgatgacagtacctgc

SEQ ID NO: 956160 - DNA, 120 bp, Artificial Sequence
  ENSG00000288021_3 (sequence is synthesized)
tcggcttctggtgagcttttactcatggcagagagcaaagtggaagcagcacttctgcaagtctcagagtctaaaggctgaaaaacctggagtctgatgtccaagggcaggaggagagga

SEQ ID NO: 956161 - DNA, 120 bp, Artificial Sequence
  ENSG00000288021_4 (sequence is synthesized)
agcaagcatctgacatggaaagaaagtgggagccagaagactcagcaagcaagactacccccatgacttcttccacctaggtcttcctcttccagtccactgacccaaatgtaaatttcc

SEQ ID NO: 956162 - DNA, 120 bp, Artificial Sequence
  ENSG00000288021_5 (sequence is synthesized)
accccaaaacaatactttgccagccatctaggaatcctttaatccagtcaggatgacaactaatgttaaccatcacagcattttctaaagagaatcctgcattctaaaggatctagtctg

SEQ ID NO: 956163 - DNA, 120 bp, Artificial Sequence
  ENSG00000288021_6 (sequence is synthesized)
gatgccaggagctgtgtataggatgagagcctggtggacctgattgaccgcctgttgttcagttcagttcagagactgaaaatcaggatttgtgctggagagtctttgaactgtgtgtga

SEQ ID NO: 956164 - DNA, 120 bp, Artificial Sequence
  ENSG00000288021_7 (sequence is synthesized)
aagtatctgaaggtccatgacaatttgaaagaaggcatatgaaaaaggtgcaggaatcgaaggcacgagatacacctgaaagtggtggagcaatgaatctgaacaggatgatggattgaa

SEQ ID NO: 956165 - DNA, 120 bp, Artificial Sequence
  ENSG00000288021_8 (sequence is synthesized)
agtgctcaaaagaggcagctaggatcctgtattcatgtcctaccactgcagccagggaaagatcctcccacatctatcagaagactggaggattatgtctggagagattgaattctaggg

SEQ ID NO: 956166 - DNA, 120 bp, Artificial Sequence
  ENSG00000288021_9 (sequence is synthesized)
atgctcaggcccaaatgaaggtttgagcacacaatgaaatgagttgatattgactgttgggaaccagagttctcagtggatgaagagacacagaaaaataaaatgaaggaaggcaaagaa

SEQ ID NO: 956167 - DNA, 120 bp, Artificial Sequence
  ENSG00000288026_0 (sequence is synthesized)
atttcagaggatttggggagtgcgcttggccactaccctcattttgcaagtatgtgacttctttcttacacagtggccctgccaggatggctccatcagaaagtcccctccgtttgatcc

SEQ ID NO: 956168 - DNA, 120 bp, Artificial Sequence
  ENSG00000288026_1 (sequence is synthesized)
gtagaccttgcgttgacaggtgcaggctactaggacgggcacaggctgggctaggctccctgctgcatctcctacacagttcccagggagaacgagcgcttgtctctggagaaggcttcc

SEQ ID NO: 956169 - DNA, 120 bp, Artificial Sequence
  ENSG00000288026_2 (sequence is synthesized)
aaggatggatgggtgttgcattctcagttccaagtctccggtaacaaaagtggaagagaacaaactagattgaggaggcaagttcccagcacagagatctctggatttacataaatataa

SEQ ID NO: 956170 - DNA, 120 bp, Artificial Sequence
  ENSG00000288026_3 (sequence is synthesized)
agatgaatttgtatgtctgtgaaggagttcaggaaatgccacctccaaatctgatgccttggtatttctgattactttgaactgaaggcacttggggaacagaagatttgggctttctct

SEQ ID NO: 956171 - DNA, 120 bp, Artificial Sequence
  ENSG00000288026_4 (sequence is synthesized)
gagctcccttgatgcgcctaaagactgatcctccaaaaggaactcaactgtcataaatcttctccctgggaatcttagcaaccagtgaagattatcttggaccacaggagataagattgg

SEQ ID NO: 956172 - DNA, 120 bp, Artificial Sequence
  ENSG00000288026_5 (sequence is synthesized)
agtttggtgccacacccagactctcacctattcttctgagggctgctctgagacaacttttaccatctgagagatcgcttagctgcacgaaaacacaagctttattcaacacgtatttct

SEQ ID NO: 956173 - DNA, 120 bp, Artificial Sequence
  ENSG00000288026_6 (sequence is synthesized)
tcccttcaccctcccatggcttttctccaccaacccttagaaaccccaaaaccctattcctttctatagctcaggatattatataagcttcaatcatctggcccttcttcaagtcacata

SEQ ID NO: 956174 - DNA, 120 bp, Artificial Sequence
  ENSG00000288026_7 (sequence is synthesized)
tgtctgtgggactctgtgcatcatatgtaattgaatatagtttttgtcttgttaatctgtcttatgtcaatttaattagcagcccagccaaggaacatagaggggtgaagggagccattt

SEQ ID NO: 956175 - DNA, 120 bp, Artificial Sequence
  ENSG00000288026_8 (sequence is synthesized)
tcactctcctacatctggaaatcacaccctaccagatttctcaaccttgtcttttttatggaaggctcagcacttagggactcttagaaatggaagcaatccgaaatgattattgacgtg

SEQ ID NO: 956176 - DNA, 120 bp, Artificial Sequence
  ENSG00000288026_9 (sequence is synthesized)
aaagggtggtccatgaacagcagcatccacactgcctgcaagcccattggtaatgcagaatctcagcttcactgcagacctattgaatcagaatctgcctttcaaccagatctccaaata

SEQ ID NO: 956177 - DNA, 120 bp, Artificial Sequence
  ENSG00000288026_10 (sequence is synthesized)
attcaagagcataatcaagaatgagaagtgctcttgtccttcagctctgaccgatccctttcacttcccctgaaagacagccaactctccaaaactttccttctcatcagctgtcacaga

SEQ ID NO: 956178 - DNA, 120 bp, Artificial Sequence
  ENSG00000288026_11 (sequence is synthesized)
gctttctgaagcagtgtgtattgtcagccctctcttctccaagcaaagcaattaacacactcaacaaatgtgtgtggggtgctcactgtgtgttatgtgtccatggggaggagagataca

SEQ ID NO: 956179 - DNA, 120 bp, Artificial Sequence
  ENSG00000288026_12 (sequence is synthesized)
tccgttctcctgacttcaggtgtttcagccagttcttggaatgacatggcttccagacccctttgtcattgtccttcagctcatccatgttgtcaaaaataattctttaatattatttca

SEQ ID NO: 956180 - DNA, 120 bp, Artificial Sequence
  ENSG00000288026_13 (sequence is synthesized)
ttcaaaaacatatttaactgaataattttgaatggatatttgaataagtcccccttaaagtctggcactcaaacaggaccctatatttccaaagttgcctgaaaaaatgagtaattgagg

SEQ ID NO: 956181 - DNA, 120 bp, Artificial Sequence
  ENSG00000288026_14 (sequence is synthesized)
gaacttttacttttgtggtctggatagaatcacctgggtgtctcaagtgtgaacgccatctctatctccaactaactatctatggtgagtggggtggccatcttcatcatgaaatgaggc

SEQ ID NO: 956182 - DNA, 120 bp, Artificial Sequence
  ENSG00000288026_15 (sequence is synthesized)
ccttggagtgcatcactaaggtcccttgtgttccacattttattcctgatgctgaaaggaaggaacaagaaatgctgccacattgcactcctcggcccctctgtccttcctttccaccag

SEQ ID NO: 956183 - DNA, 120 bp, Artificial Sequence
  ENSG00000288026_16 (sequence is synthesized)
ttaccaagccccccatgtcagggacatccctcggccctggagattcagcagtgacatgagcaaggatgcagattccattctaaaaagaaaagactgaaaacagaggaacccataagcgag

SEQ ID NO: 956184 - DNA, 120 bp, Artificial Sequence
  ENSG00000288026_17 (sequence is synthesized)
catcttgacctgcagcattctggcccactcagatggaaaccacctttgcaagaattataacagtaagaaaattatggcagtaaaagagatatgatctaactcaccctccatcttgccttt

SEQ ID NO: 956185 - DNA, 120 bp, Artificial Sequence
  ENSG00000288026_18 (sequence is synthesized)
cccttaattattgctgggcttttgggctagctaactttggaagacatttaggttatagtttaaatgataatagcccttcccccaaacttgactccctctataaagctaatgaaaggccat

SEQ ID NO: 956186 - DNA, 120 bp, Artificial Sequence
  ENSG00000288026_19 (sequence is synthesized)
ggggctatgggggtggaaaggagcctgattctgctaaggtgcagacatagattgccagccattcctgcagataacaccactattgtagattggccttttgagatagcttgtcagattttt

SEQ ID NO: 956187 - DNA, 120 bp, Artificial Sequence
  ENSG00000288026_20 (sequence is synthesized)
tgaatgtctgacacctatggctccaagccgacccaccgatcccactcctgtgaccccacccagaagcaattcagcatgcaggaggacagcttctatccccccaaccccacacttcagcta

SEQ ID NO: 956188 - DNA, 78 bp, Artificial Sequence
  ENSG00000288026_21 (sequence is synthesized)
ggaggacagcttctatccccccaaccccacacttcagctataacaggaaatatcctctccatagagcatacagtaagt

SEQ ID NO: 956189 - DNA, 120 bp, Artificial Sequence
  ENSG00000288026_22 (sequence is synthesized)
ctgtaacagagcctttgagcccctatgctcagacccgctcccacactgtggagtgtactttcattgtcaataaatcccttcattccttctttgctttgtttgtacgttttgtccaattca

SEQ ID NO: 956190 - DNA, 120 bp, Artificial Sequence
  ENSG00000288026_23 (sequence is synthesized)
gtatgccaagaacctggacaccctccaccagtaacagagggaagggtttgcttcttctcttgctgtggccctacccattgtgctttctcatctctgttttgcaagcagccttcttaagaa

SEQ ID NO: 956191 - DNA, 70 bp, Artificial Sequence
  ENSG00000253240_0 (sequence is synthesized)
atggagtttgggctgagctgggttttccttgttgctaatgtaaaagtggatatgtgtggcaggttctgac

SEQ ID NO: 956192 - DNA, 120 bp, Artificial Sequence
  ENSG00000253240_1 (sequence is synthesized)
ctttcttttgcagcctctggattcacctttagtacctttattaggtactggatgagctgggtccatcaggctcctgggaaagggctggagtaggtctcatttatgagttgttgtgtaggt

SEQ ID NO: 956193 - DNA, 120 bp, Artificial Sequence
  ENSG00000253240_2 (sequence is synthesized)
agcacaagctatgcagactctgtgaagggtcgattcaccctctccagagatgatgccaagaaatcactgtatctgcaaatgaacagcgtcagagccgaggataggtctgtgtattactgt

SEQ ID NO: 956194 - DNA, 120 bp, Artificial Sequence
  ENSG00000253241_0 (sequence is synthesized)
atagagttagggctgagctgggtttcccttgtcattattttaaaagatggtggagtcttggggagagttggcacaagctgaatgtgcctgagactctgccgtgcatcctctgaatccacc

SEQ ID NO: 956195 - DNA, 120 bp, Artificial Sequence
  ENSG00000253241_1 (sequence is synthesized)
tggaagtcagacataatatgcagactctgtgaaggtcagattcaccatctccaaagacaatgccaagcacaggttgtatctgcaaatgaacagtctgagagctgagaatatggctctgta

SEQ ID NO: 956196 - DNA, 120 bp, Artificial Sequence
  ENSG00000288028_0 (sequence is synthesized)
gggagtaacaaagaggcttttctactgcaggttttcctagagctcctctccctccctcccctggccaaagctactggtccctgaatcacatgtgctgtacagcaaggatgtcaaagctct

SEQ ID NO: 956197 - DNA, 120 bp, Artificial Sequence
  ENSG00000288028_1 (sequence is synthesized)
cttcctcaaaggcaggagcatctcctcagaccctagtatcctcctcatttcctctttgcttccttttgtcgggttccaaaaaacagtagaagtgccctggattctgatgagagaacattc

SEQ ID NO: 956198 - DNA, 120 bp, Artificial Sequence
  ENSG00000288028_2 (sequence is synthesized)
tcaagggattgctgactcgggaggcaaacaggctccagcgatcctgcagcccacgggctggtggggagatgacccacagggggctgttccaaaaaggaagagcagtgggcctggaagagt

SEQ ID NO: 956199 - DNA, 120 bp, Artificial Sequence
  ENSG00000288028_3 (sequence is synthesized)
atgatttggccttagtgttgcttcacttttctgtcttaattgccctgtggtttcatctggtcatgggagtccacgatgacatgtgccatccttgtatgaatggtgcttgcagaaccgaag

SEQ ID NO: 956200 - DNA, 120 bp, Artificial Sequence
  ENSG00000288028_4 (sequence is synthesized)
ggagctccaggtgaccagtggcacccagaacaattcttgaccctctgcaggtcctccaaagcatcctcagtaggacctgcagaaggtcaaaaattttctgctttcacgttggatggaggt

SEQ ID NO: 956201 - DNA, 120 bp, Artificial Sequence
  ENSG00000288028_5 (sequence is synthesized)
ggtcaaaaattttctgctttcacgttggatggaggtcaagactaagtcagctcaactgtaaagaaaatgatgcttttccctttgaaaactggtacaagacaaggatgtcctctctcacca

SEQ ID NO: 956202 - DNA, 120 bp, Artificial Sequence
  ENSG00000288029_0 (sequence is synthesized)
agagcgaccgttacttcccgggctgctgtgggtctggtgtctggctctgtggccccgggctgcagggacaaaagtggctggtcttctaagagcaccaagctcagcaaagccacccgctgc

SEQ ID NO: 956203 - DNA, 120 bp, Artificial Sequence
  ENSG00000288029_1 (sequence is synthesized)
tcacaggacccacgcgttcattcctactcttcttttggtctcacaagagccacactgcccttggaatgggcgtcaagtcacagctcggcgctttcctttagtcttctgccatctctgcct

SEQ ID NO: 956204 - DNA, 120 bp, Artificial Sequence
  ENSG00000288029_2 (sequence is synthesized)
ccttttcagccattttcatccgaagtgtggatctgaagcaaatgacctagagaagtttccttcatctggttgttattatttgctgaattttttaaaagaaactttttaataccttcttct

SEQ ID NO: 956205 - DNA, 120 bp, Artificial Sequence
  ENSG00000288029_3 (sequence is synthesized)
ttgctacattgttctatatgtaataattcataatccacataggaaatgcctatatgtaataattcataatccatataggaaatgccagataagcccctttaagaagaatgatgtggggtg

SEQ ID NO: 956206 - DNA, 120 bp, Artificial Sequence
  ENSG00000288029_4 (sequence is synthesized)
caatgttaggttgcccttggcgtcagatagcctgggttctgggcccagtgcccccccttagtagctactgtgtgacctagaatgagattgggccagtctccttcataaacgtccttctaa

SEQ ID NO: 956207 - DNA, 120 bp, Artificial Sequence
  ENSG00000288029_5 (sequence is synthesized)
tttattcctgaaattacctcatttgttctcttcttcactttctgtctccccactctagaaacattggcttctcaagagtagggggactccttcagggctgttcgctgtgtttatagagca

SEQ ID NO: 956208 - DNA, 120 bp, Artificial Sequence
  ENSG00000288029_6 (sequence is synthesized)
cagacgattgactccctgcccttgctgggcctcagtttcctcaaacacaaataggcatgataacaatccctacctacctcatgttaaatgggcttaatacatgcagaatgctcagaacag

SEQ ID NO: 956209 - DNA, 120 bp, Artificial Sequence
  ENSG00000288029_7 (sequence is synthesized)
tgtctgtcatgtggtaaatcctcaaggaacaatgaataaggattaaattctgcatcctcccacataactgagaaaagcctggtaggaaatcaggttaatggagagaaaagacagagggat

SEQ ID NO: 956210 - DNA, 120 bp, Artificial Sequence
  ENSG00000288029_8 (sequence is synthesized)
gagagcagctcgaaggagatgatcatttctgcagacatagaatccaagttgccgtgtgaaatgctgtgtgggtgagcacatggatggcatgctgatcacatttccaggccaccatgaggc

SEQ ID NO: 956211 - DNA, 120 bp, Artificial Sequence
  ENSG00000288029_9 (sequence is synthesized)
agaagtagagctaatagactggatgaaagaagaatgagccagagcaatgccgacagtctgcaaagccaggtcaagttaggcaacctggagcataacagagaaatgcaaagtccagccctt

SEQ ID NO: 956212 - DNA, 120 bp, Artificial Sequence
  ENSG00000288029_10 (sequence is synthesized)
gggtccagacaagttacacaacgatggcagatgttcttgatgaatggataatgttgtctttagatgttctcaaccatcctgggcacgtgaaaacccacccgatggctctcatcaagtgga

SEQ ID NO: 956213 - DNA, 120 bp, Artificial Sequence
  ENSG00000288029_11 (sequence is synthesized)
aaagaagaaggggaaatccgagcaaaaagatattacagactcgtcttcctgagacacgtgcacctgctaagggagtagcattaaggaaatctacaaagtcagcctctgattatcaaggtt

SEQ ID NO: 956214 - DNA, 120 bp, Artificial Sequence
  ENSG00000288029_12 (sequence is synthesized)
cttccttaaggagaaaaggaaaaaagcaaaagcaaaataacacatttacttcaaagaactcctgtctgattgagcgaaggaaaagtagcctcattgctttgatcctttcactgagcaaaa

SEQ ID NO: 956215 - DNA, 120 bp, Artificial Sequence
  ENSG00000288029_13 (sequence is synthesized)
caacatgaaaagcgaagacaaggctcaaaatatgggcttttgttgagcgcatcattaggagtgtttattggctgctgcaaacacacatcccagctccagagcacgcgcatgaagtggaga

SEQ ID NO: 956216 - DNA, 120 bp, Artificial Sequence
  ENSG00000288029_14 (sequence is synthesized)
ttcgtggagccctcgagccagttctttggttttcagggcctctgctcctgtggtcacctgaggactgactcaagctgatggaagccttgacatgtgctcccaccatctccctggcaagtg

SEQ ID NO: 956217 - DNA, 120 bp, Artificial Sequence
  ENSG00000288029_15 (sequence is synthesized)
aagaaggtgtgatgactcatggcttggctctctaaagttcaaccttctatacacaaaccatcggtcacagacagttatcagttatatggccaccctaatttcaaaagagagaagtacaat

SEQ ID NO: 956218 - DNA, 120 bp, Artificial Sequence
  ENSG00000288029_16 (sequence is synthesized)
tagcgggactctcagggaaaggtactgcctccgatgtctctgttgggttgtctgcctgccttacctctttaaaaatactcctgccatcttagagagcaaatgggtaatacaaaataagaa

SEQ ID NO: 956219 - DNA, 120 bp, Artificial Sequence
  ENSG00000288029_17 (sequence is synthesized)
gttatatttattccttttagaaaacaaaaggaagaagtatgtagttgagcaaaggttgaataaaaatcacaaattttgtgtttagaggtaattaataaaaataatattatcttccttcct

SEQ ID NO: 956220 - DNA, 120 bp, Artificial Sequence
  ENSG00000288029_18 (sequence is synthesized)
ggagtaaaactcatctgaaacggctctgatagcaaaaaggttagctttggaatttgaatcccatggtggatattggttagcaaacagggcctccaaaccttttaggggtatttggtaatt

SEQ ID NO: 956221 - DNA, 120 bp, Artificial Sequence
  ENSG00000288029_19 (sequence is synthesized)
attactcttttggtgactgtagttattgaggaaaaaaacctatgagtatcttgtattttcacttctatattttaagtggcagtgggatcaaggataattgtgcatgtagtttgtatttaa

SEQ ID NO: 956222 - DNA, 120 bp, Artificial Sequence
  ENSG00000288029_20 (sequence is synthesized)
ataaggcacgtgagtggaaatatcactgaatttgcctctcagaaatcagtcctcaatcgcgatgttgaaatgtgcattaaaagtacctcatgctatgataattaaatgttatgttttcca

SEQ ID NO: 956223 - DNA, 120 bp, Artificial Sequence
  ENSG00000288029_21 (sequence is synthesized)
gagatgctaaatgacaactcctgagggtctcaatatttgcaagtacctctattttatatgacaaaactttaaaaaatgagccatagtaacttttataaattgaggatttaaaatgaaaat

SEQ ID NO: 956224 - DNA, 120 bp, Artificial Sequence
  ENSG00000288029_22 (sequence is synthesized)
tagacatactcattctctcaagatattttattctactacatgaccaatcataaatctttaagtctctggatacagtacataaaaactggaaatgtttttctttcaccaatagattgcacc

SEQ ID NO: 956225 - DNA, 120 bp, Artificial Sequence
  ENSG00000288029_23 (sequence is synthesized)
aaatatgctacttttttgctttcatttggccattatgtttttaaaaagtcaaagtgacttcctttgtgataggtagtataaatttagatagaaaacaattattgtctttgatatctatta

SEQ ID NO: 956226 - DNA, 120 bp, Artificial Sequence
  ENSG00000288029_24 (sequence is synthesized)
aaaaagtaaagcatgttcactgtaggaaaatcaggaagtactgaagaatataaagaaccaaaccaaataaagcagaggttaaaaaataataactagtaataatcttactacctaagagca

SEQ ID NO: 956227 - DNA, 62 bp, Artificial Sequence
  ENSG00000288029_25 (sequence is synthesized)
gggatcatatgcagggaatttcattttctacatttttcatttaacattttttgggtggtggt

SEQ ID NO: 956228 - DNA, 120 bp, Artificial Sequence
  ENSG00000288029_26 (sequence is synthesized)
attttctacatttttcatttaacattttttgggtggtggtggtgatgaggaatgtaccaggccctgttttataacctttttcttagaattatgcaacttcctcccaaatttcagaagact

SEQ ID NO: 956229 - DNA, 120 bp, Artificial Sequence
  ENSG00000288029_27 (sequence is synthesized)
gttcttcttggaataaaagcaacaacaacccttacccacaaggacgtgccctatgggatgctattggaagcaagtatcataaatcctgactcaaattaaacaataaggaaatttattgtt

SEQ ID NO: 956230 - DNA, 120 bp, Artificial Sequence
  ENSG00000288029_28 (sequence is synthesized)
ccacgttattaggcatccagaggtaattcaggcttcagcggttgcttgatatagtggcacaatatcttcaaggaccaaggtccttcccatattgcctctccgctgtccacccgattggct

SEQ ID NO: 956231 - DNA, 120 bp, Artificial Sequence
  ENSG00000288029_29 (sequence is synthesized)
ttgtccctgggttgatggcagcaattaggtcaatgggcttccttatggatgcctagagggaaacagaaaagtacagcatgaaagtcctcctgtcacttgggggtcccattggtccagttt

SEQ ID NO: 956232 - DNA, 120 bp, Artificial Sequence
  ENSG00000288029_30 (sequence is synthesized)
aggttacattcctgcctgggcaccattagcagttgtcttgtgcagtgcttaaacctgggatccagaaggactggcctcaatctattggaaccctccctggagctgaggatggtgccatct

SEQ ID NO: 956233 - DNA, 120 bp, Artificial Sequence
  ENSG00000288029_31 (sequence is synthesized)
tttcctgcatcacaaagctgtatggggaagggctgactacctccacaaagttggaattcttttggtgggaatggatgtgatgctgaatgggtatccaacatcatccagcaaaagggcccc

SEQ ID NO: 956234 - DNA, 120 bp, Artificial Sequence
  ENSG00000287900_0 (sequence is synthesized)
gcgctgtccctgccagaaagatccttggcgcacagagcacagaatgactcgagcgggggctcgtgggttccttggcgctgtgccctccttccaggcgacagcggtgctgctggacggggt

SEQ ID NO: 956235 - DNA, 120 bp, Artificial Sequence
  ENSG00000287900_1 (sequence is synthesized)
aagtgcatgtcaggttgtcagccataagcaggggactctcactgttatttggttaaaacatctatcctcagttacagatgcttctcctgccagttcgctgataaaaggtcagtaactatc

SEQ ID NO: 956236 - DNA, 120 bp, Artificial Sequence
  ENSG00000287900_2 (sequence is synthesized)
tgtttgttctcttaaaattacataagaagggaaagtgacaccgtgggaagtggaaacttctctggtcctagaatcataagacctgatttgagtcgcgtctgtgccatttacaagctgtgt

SEQ ID NO: 956237 - DNA, 120 bp, Artificial Sequence
  ENSG00000287900_3 (sequence is synthesized)
cgcagatgtcaaaatatgtataagaattttgcctaattcagtacaataaacccttaatgtgcacaaaccatgtatctagcactatgccaaggtttgtgcagatcagaaatgaagaaatta

SEQ ID NO: 956238 - DNA, 120 bp, Artificial Sequence
  ENSG00000287900_4 (sequence is synthesized)
tgtcaacaaaatatattatgacaatatgtattttttcaaaataataatgacaataataataatcaatacaatgtggtaagtacctaaaggaagaggactgctttatttgcattcagagga

SEQ ID NO: 956239 - DNA, 120 bp, Artificial Sequence
  ENSG00000287900_5 (sequence is synthesized)
acaagtaagtcccttcaggaaatatggctctggctaatgggagttttccaaacctatcaaactggaatcacttacatttggttcagcattaaattctctctgctcagactacttaatttt

SEQ ID NO: 956240 - DNA, 120 bp, Artificial Sequence
  ENSG00000287900_6 (sequence is synthesized)
agaactctgagaacggatttttaatgacaagatttttaagggtaagatttttacacaattagaataaaataagaaataatttgtaaccatgttatagaacctttcaaacatgtattaaaa

SEQ ID NO: 956241 - DNA, 120 bp, Artificial Sequence
  ENSG00000287900_7 (sequence is synthesized)
ttctgggagaaaaatacaaacagtagattttagaggtggtaaaattttcactctaatattctgtgtatgtatatacagaaaagattgcaattatttttcagtaattggaaaacagtaata

SEQ ID NO: 956242 - DNA, 120 bp, Artificial Sequence
  ENSG00000287900_8 (sequence is synthesized)
aaagttttaaacaatgtttaaaaatattaaggcagataataacgtcaacacagcttatctgggaagcagatgctgagagaaagttaagaggggaagtttcttagggttcaatgcctaaaa

SEQ ID NO: 956243 - DNA, 120 bp, Artificial Sequence
  ENSG00000287900_9 (sequence is synthesized)
aagataaaaggcgaaagaagaaaatgaagcagagacagacttcaactgtgatgcagagctgacacctgtgaaaggaaagatggagaggtataagaagaagaattgagtagagagggactc

SEQ ID NO: 956244 - DNA, 120 bp, Artificial Sequence
  ENSG00000287900_10 (sequence is synthesized)
agactacgatgtaaatcagattttttagccatgcatcggaatcacctcaggactccactcccaatcaattatatatctgggggaggaccaaggcgttggtatttttcagaagctccactg

SEQ ID NO: 956245 - DNA, 120 bp, Artificial Sequence
  ENSG00000287900_11 (sequence is synthesized)
gtgattctgacagcacagctaggattaagaaactgatcaatgggaacggcatgcctgttgcagaggagcttccctgggaaatgtcacacacagaacatcaatcttccttccccactcctg

SEQ ID NO: 956246 - DNA, 120 bp, Artificial Sequence
  ENSG00000287900_12 (sequence is synthesized)
agatccctcattctttggcaccaggaacagttgcaattagtaaaccctggttccctgctgtctcacaaatcgcaagagtccaacgtgtggatataaacttttgttcatgggaggatcttt

SEQ ID NO: 956247 - DNA, 120 bp, Artificial Sequence
  ENSG00000287900_13 (sequence is synthesized)
ctcccagtggaaaagcaactgggaaaagcaggacacactgcacagtgactgcagtttcatccaatgccaccacccatgcaggcataaataatgaacatggatgggggagtctggagctgc

SEQ ID NO: 956248 - DNA, 120 bp, Artificial Sequence
  ENSG00000287900_14 (sequence is synthesized)
tgaattgtaaggctcataaatgtttaaactttttccattaataatatttctgctttctgtgtacgtgtatgtagaagttctgtctttataattctcaccactttgcatcatactttccag

SEQ ID NO: 956249 - DNA, 120 bp, Artificial Sequence
  ENSG00000287900_15 (sequence is synthesized)
gaggaagaaagaacacagaaattaaaattctcacaaaggttaccattaagctagaggaagaccacaccactgtgtgtccacaaagatacagagccaggccgggttcagccatgctggtca

SEQ ID NO: 956250 - DNA, 120 bp, Artificial Sequence
  ENSG00000287900_16 (sequence is synthesized)
tctgctctatataatacaattatttagagatggtgggtagagaacaactacagaaaaaaaaaaactgccagaaactagaatgtcatttttacacactcatttgtagaattcctcccagtt

SEQ ID NO: 956251 - DNA, 120 bp, Artificial Sequence
  ENSG00000287900_17 (sequence is synthesized)
gatcatcttcatgattttcctggaaataacggaagaggccctggggatgattttattggtagagtgggaatgtattaaaattctctacttccttgttacatggtctttcctccaccctac

SEQ ID NO: 956252 - DNA, 120 bp, Artificial Sequence
  ENSG00000287900_18 (sequence is synthesized)
aaggtgtgtgcttgtaactcaaatttccatttgagtaattagcaattattatttaaaactaacctgaaaataaaaattgtattcaattcattcatagggagcatctacctatttattatt

SEQ ID NO: 956253 - DNA, 120 bp, Artificial Sequence
  ENSG00000287900_19 (sequence is synthesized)
accacataggtgatgtgactctagaaacatcttggtattcaaatagccaattaaaatataaaatgtaatgattttctaaagctactcgttttccttctctcatctctatctactaattgg

SEQ ID NO: 956254 - DNA, 120 bp, Artificial Sequence
  ENSG00000287900_20 (sequence is synthesized)
aaagtctattctccaaacacagcaaagatgattgacagaattctaaaaatacacaaatttccctattaaagagggtgaatggatgttagcactgtatcagacacataatattaaggagat

SEQ ID NO: 956255 - DNA, 120 bp, Artificial Sequence
  ENSG00000287900_21 (sequence is synthesized)
acctgctgtttaacattaacattctgtgtagtttttgttttgcatcaaacagacatcaaaaagtgaataaaaacatgtcgtgaaattaccaaataataaattaacttcctggatacaagg

SEQ ID NO: 956256 - DNA, 120 bp, Artificial Sequence
  ENSG00000287900_22 (sequence is synthesized)
aagttattttagcaagttctttttaataaaagcaaagaatggggatgtaacaattagagaaatgtggaggaaaacataagaaagttgggagagggaggttaaatctcacttccagttatc

SEQ ID NO: 956257 - DNA, 120 bp, Artificial Sequence
  ENSG00000287900_23 (sequence is synthesized)
agtaaagtgcacattcttttctgtattctgtgaggctggaggtgctgctgatagaatgtcctcacatattctgtcaatgccaggatgcaaacatcactaaataaaccctcgtgtcaaaat

SEQ ID NO: 956258 - DNA, 120 bp, Artificial Sequence
  ENSG00000287900_24 (sequence is synthesized)
gtcacatagtgattatttatgcttcttgacaacatcaatgaatgacaaggctgcctctacagctgtgaaaggttgcataccaattgttagaggtaacatagatgaaggacaaagtagtta

SEQ ID NO: 956259 - DNA, 120 bp, Artificial Sequence
  ENSG00000287900_25 (sequence is synthesized)
tcagaattcatttaaactgtgctattaaattggatatatttgcagtagccatcacagtaaatactactgtgattctcctgaaagaatattgcctaaacaatttaacgcagaacatttcct

SEQ ID NO: 956260 - DNA, 120 bp, Artificial Sequence
  ENSG00000287900_26 (sequence is synthesized)
aattaccatgcatttctgaatctctgctaccatgtagatattcatactgaaagagaagtgtcatttctttttcttctttaatttgtcattgtttcccagtgttcttgcttctggaattga

SEQ ID NO: 956261 - DNA, 120 bp, Artificial Sequence
  ENSG00000287900_27 (sequence is synthesized)
atttgaagtccattttttaagggtactgcaattattaacgaagtctggcatgataatgtctcagcagaatgtacacaacgtgactaagatagttaacgccttagttgttccaattccata

SEQ ID NO: 956262 - DNA, 120 bp, Artificial Sequence
  ENSG00000287900_28 (sequence is synthesized)
ttgcttcctgttccgaatctactaatgagtaataagagatgtagcactaatcaatgggacaaaagcacgcattatgaaaatactctatcaactccatcagtaaaatttgtaaggtaatta

SEQ ID NO: 956263 - DNA, 120 bp, Artificial Sequence
  ENSG00000287900_29 (sequence is synthesized)
taaatttgttatcagacattttaaattgttacagtataattaaaaggtattattttattggggataaccttccactctgttaatcatactaaaacacttgatgctcaaaacacaattcaa

SEQ ID NO: 956264 - DNA, 120 bp, Artificial Sequence
  ENSG00000287900_30 (sequence is synthesized)
agttaccttaatcagcgtgaatttcaagatcctcttaaaaatgacctctgatactaccctgagattactggagtgtaaatccttgctttgcactttctggctgtgtgaacttaggcaaat

SEQ ID NO: 956265 - DNA, 120 bp, Artificial Sequence
  ENSG00000287900_31 (sequence is synthesized)
tactaaatttgctgttcttgtattttctcactgttaaaatgaaatagaaatagcacctacccctgtgaggtagtttgataaaaggattaaatgagaaaatctacataaagcatagtgcct

SEQ ID NO: 956266 - DNA, 120 bp, Artificial Sequence
  ENSG00000287900_32 (sequence is synthesized)
aagatctgtcacacaatattttcaagatccatgaaaacaaattctaaaattatcattacttgaaaataaaatccacatggagaacttctaatttgccactaagcctacagacgatttcgc

SEQ ID NO: 956267 - DNA, 120 bp, Artificial Sequence
  ENSG00000287900_33 (sequence is synthesized)
taatgggcactttgctctagccaactttgactattaggtatttctcaaacatgccctatattatcttcatttgctcactttttttctcatcacttagaatatcttttttctacacctgca

SEQ ID NO: 956268 - DNA, 120 bp, Artificial Sequence
  ENSG00000287900_34 (sequence is synthesized)
aagttcaaataataggcactagtatgtaaggaaagggaaggacttcttcatattttatttcaattgctattgatgtcataaagtttttccttatatactcccactaagagtaatacatcc

SEQ ID NO: 956269 - DNA, 120 bp, Artificial Sequence
  ENSG00000287900_35 (sequence is synthesized)
ctcctctgaactctcatttccctagatttgcaatgtggcatttttcacattctaactggtatttcagcttagaatttatgaagattccctctgagcaccctgagcatcgacttcttaata

SEQ ID NO: 956270 - DNA, 120 bp, Artificial Sequence
  ENSG00000287900_36 (sequence is synthesized)
atttggtaccatccggtattccatgatccaaactggccttacgcatgataaacacttgatagagttttagagagaaccaaaatttattaagaacctactttaatgtgccaggtaatgtgc

SEQ ID NO: 956271 - DNA, 120 bp, Artificial Sequence
  ENSG00000287900_37 (sequence is synthesized)
ttagaactgtacaggttagcatttatattacacagataggcagtgaagcagggattccaaaacacatctgcttattgtcaagatttctattcttttaatgacacagtcctgccagggaaa

SEQ ID NO: 956272 - DNA, 120 bp, Artificial Sequence
  ENSG00000287900_38 (sequence is synthesized)
ttaaatatttttaaggatgccattttgtcacactttaaatgtcactgaggctttgacctatttgtgacattgagttcaactccttgaaaatgttcacagatgaaccaaactcatcttttc

SEQ ID NO: 956273 - DNA, 120 bp, Artificial Sequence
  ENSG00000287900_39 (sequence is synthesized)
ctgtgagggcagctgcttccaggatgaggttctggagggcagccagccccgttgtgcagaggccaggaggatgtgtggggaatggatgatggaaggcctcctaatcaggtgctgtctgat

SEQ ID NO: 956274 - DNA, 120 bp, Artificial Sequence
  ENSG00000287900_40 (sequence is synthesized)
gaactgaagtgaaacactgcaagcagaatgggtcaaaggagagagaggcacacaatttcaggccaggccacaaagccagaaaagatctggaaaatgtaactgcagaatacaaaatcatct

SEQ ID NO: 956275 - DNA, 120 bp, Artificial Sequence
  ENSG00000287900_41 (sequence is synthesized)
ggagtctaacatttaaagatagggtggtagattacgagaaaactaccatacagttcatgagggtgggggggatcaaagctatatttaacaaactcggctaggagcaagctacatatttat

SEQ ID NO: 956276 - DNA, 120 bp, Artificial Sequence
  ENSG00000287900_42 (sequence is synthesized)
tctgcctggaaagtacttctggcagtgtcttatttgctgtgtccaaaattagtaatatcatgaataactataacttcaaaaatgaagaatatgattctgtgttttatactttctacatgc

SEQ ID NO: 956277 - DNA, 120 bp, Artificial Sequence
  ENSG00000287900_43 (sequence is synthesized)
acttatcctattatgtaactgaacggtgtggggaaaagagtatatctaatatgaaagaaaaaacctctgcccctgagaagtccaaattctaaaaatgacttaatcggccaactgtgacaa

SEQ ID NO: 956278 - DNA, 120 bp, Artificial Sequence
  ENSG00000287900_44 (sequence is synthesized)
aagcaaggctttgaacatctcagtatccctggagtctgtcttctcgtcattcacttattgccactgtgacataccacgtgacagtctgcatggccagaaatattaattactgtctgggga

SEQ ID NO: 956279 - DNA, 120 bp, Artificial Sequence
  ENSG00000287900_45 (sequence is synthesized)
agatggtattatatttaatactcctttactcctaatcctaccattctccaaaagtacaatgaagagatgggcaggcctggggatctaatgctttcatacatcaaaaggtgacacattccc

SEQ ID NO: 956280 - DNA, 120 bp, Artificial Sequence
  ENSG00000287900_46 (sequence is synthesized)
attgccaccataagttttgctatatctgggaagaggtcactctttgaaattctatatgcaattttgggaaatagaatggtgttcctttttttttaccctcctaaaaaagaatgctgaagt

SEQ ID NO: 956281 - DNA, 120 bp, Artificial Sequence
  ENSG00000287900_47 (sequence is synthesized)
tattttctctcttgccaaaaagagaagaaaaaaacgagaaggagaaatcagtttgagatttgattgcgcagacgtgagaacagaggcattgccataccatggcagatgactcatccagcc

SEQ ID NO: 956282 - DNA, 120 bp, Artificial Sequence
  ENSG00000287900_48 (sequence is synthesized)
tttaatcttggctccaaaccctggcctctgcctgaggattcggagaaaggcaatatgccattctaacttgtagaccatttatttaacaaggttttcctgacttaaaccttctctttactg

SEQ ID NO: 956283 - DNA, 120 bp, Artificial Sequence
  ENSG00000287900_49 (sequence is synthesized)
caaagctgtacattggagtatgctgatttatgaaataataaggacttttaaagtcttcaagagctcgacatctgtttaaaaagaaataactgttttatcagacctaaagttttttttggc

SEQ ID NO: 956284 - DNA, 120 bp, Artificial Sequence
  ENSG00000287900_50 (sequence is synthesized)
cccgagcccagcgtgcccattagaagagtaccacattgggaaaagatggcctggtcctaatagcccaccgagttgtcagtggctgggagctgcccttgtcagtccttgtctttagctgaa

SEQ ID NO: 956285 - DNA, 120 bp, Artificial Sequence
  ENSG00000287900_51 (sequence is synthesized)
tgctgcttcagatctggaaaggtgctgtaactggaggccatgagctaactgcatggcctccaggtgaaagggcaagctcttcctgaaggaagatccagtggcatatctccatggctgcca

SEQ ID NO: 956286 - DNA, 120 bp, Artificial Sequence
  ENSG00000287900_52 (sequence is synthesized)
gacagagtagagaaatggaacttatcggtgtctcttcagaagttttgttacaaatatccagaaatatttctataatctaatcagcagattatgaatatatgcattagactttagttttgg

SEQ ID NO: 956287 - DNA, 120 bp, Artificial Sequence
  ENSG00000287900_53 (sequence is synthesized)
tgcaatcacatgaattccattttgtggagtaagaggtgactggggtatagggtacaacccatagccatccatgttcatctttgttttgaatataattggctagaagatatacatatatct

SEQ ID NO: 956288 - DNA, 120 bp, Artificial Sequence
  ENSG00000287900_54 (sequence is synthesized)
atgtaacttcctctagcatcctccagtatggaggctgcattaagactgcatgaaggagagggagagaagggagaaacagagcagctggacaagaggacaggtatagggaataagggagaa

SEQ ID NO: 956289 - DNA, 120 bp, Artificial Sequence
  ENSG00000287900_55 (sequence is synthesized)
gccagtaaggcaggaaagaccctccgtgacaaaggggcagggaacagaactcaaacatttaatggcaggtaacccaggttagaatggtaaattgaaaggtgaatataaagggagaatggt

SEQ ID NO: 956290 - DNA, 120 bp, Artificial Sequence
  ENSG00000287901_0 (sequence is synthesized)
agacagcttccgctgacaagccagcctagggccaccctgcttcggaagcgtgtgggccctccaggcttccatctgcggactgcacatcacagggagggagtgttccgcaccaggcagggc

SEQ ID NO: 956291 - DNA, 120 bp, Artificial Sequence
  ENSG00000287901_1 (sequence is synthesized)
accatggaaacaccgtgggaaggctggagaactctgcttctggacgtgttcattcaggcccatccttgtctccacctcacttactctcttcacttctggcagggctgaatgccctcattt

SEQ ID NO: 956292 - DNA, 120 bp, Artificial Sequence
  ENSG00000287901_2 (sequence is synthesized)
tacccaacaccaggaatctccaaggaaccccagaaagttgcaggaccctggactcctttcttgtagctaggggtcaggtcaggcacatgcacatcagctgccggggaggaagtggggtgc

SEQ ID NO: 956293 - DNA, 120 bp, Artificial Sequence
  ENSG00000287901_3 (sequence is synthesized)
agggatgcagaccgggctgcaaaatagcctctcaacatcccagcctctctgcaggagagatgctgcccgtggccactccagagttggtggacctcattcatgtctccaggagagataaac

SEQ ID NO: 956294 - DNA, 120 bp, Artificial Sequence
  ENSG00000287901_4 (sequence is synthesized)
gactttaacaaaacccagcaatattagcaaagcctgtggccagaacatttcagtgagtaattttaatgcccaggtgtgtagcatggcacagaaaaacatctttgaggatggattaacaac

SEQ ID NO: 956295 - DNA, 120 bp, Artificial Sequence
  ENSG00000287901_5 (sequence is synthesized)
acattttgccatcccctgagagattttaccctgaacgcacacatctctaagagatggtgtggtccctatcattagattgttatgaagaatgctttaggaagtctctcccaggtgccaagg

SEQ ID NO: 956296 - DNA, 120 bp, Artificial Sequence
  ENSG00000287901_6 (sequence is synthesized)
ctcctctgggaaaaggttcaaagggtggtgggccagtcctctgggcacatgcattcctggtgcagaccaccagaattgtgccagtagtagctaagggtgttagcaagtcctggtgcatgc

SEQ ID NO: 956297 - DNA, 120 bp, Artificial Sequence
  ENSG00000287901_7 (sequence is synthesized)
acagtgctgtcctggactgtcctttatgaccacccccagccttggttctgcagtggggcatggttgtgtgctggtggcaacaaggacacgccctgaccctctgctccctctcttgttctc

SEQ ID NO: 956298 - DNA, 120 bp, Artificial Sequence
  ENSG00000287901_8 (sequence is synthesized)
cttttgttttaacattttcctcagattatagaattaccacatgccaactattatgagctgaattgggccttcccacccacaaatccatgtgttaaagccctaacccctagcacctcagaa

SEQ ID NO: 956299 - DNA, 120 bp, Artificial Sequence
  ENSG00000287901_9 (sequence is synthesized)
tgtgactgtatttggagataggatctttaaagaagtaaataagttaaatgagatcattagggtgggctctcatcaaatttgactgatgtccttctaagaagatggggacacagacacaca

SEQ ID NO: 956300 - DNA, 120 bp, Artificial Sequence
  ENSG00000287901_10 (sequence is synthesized)
cagggggaagaccacgtgaagacacagggcatctgcaagccaaggagagagagaggcctcaggactctgccagcaccttgagctcagtcttccagcctccacaactaatatggctgtacg

SEQ ID NO: 956301 - DNA, 120 bp, Artificial Sequence
  ENSG00000287901_11 (sequence is synthesized)
gcaatgctgagacatcacgctgagcgagagtggacatcctcattttattcctacccttaccgtggatctctcctgtgcttcaccactcagtataatgctggctgagctcttctgacaaat

SEQ ID NO: 956302 - DNA, 120 bp, Artificial Sequence
  ENSG00000287901_12 (sequence is synthesized)
accttccaagatgtgaggaaaacacacgtaggtgcagttgttgaattgtatgatctgccactgaagtaattagtgtgataattacttggattttctcctttaacaaattattgttataaa

SEQ ID NO: 956303 - DNA, 120 bp, Artificial Sequence
  ENSG00000287901_13 (sequence is synthesized)
ttatattaatatatgtcatgctaataaattatttccatattcctaggaataaagctgggtagtttgtggtatattattctttgaatttattcctggatttaacgtaaaaatattttatag

SEQ ID NO: 956304 - DNA, 120 bp, Artificial Sequence
  ENSG00000287901_14 (sequence is synthesized)
acaatttctaaactttctatgctttgggaactttaaaatagcatcatactgaattatttccctcaaagtctgataaaaatcatctatgacctggattacttataagggatccaaaggaag

SEQ ID NO: 956305 - DNA, 120 bp, Artificial Sequence
  ENSG00000287901_15 (sequence is synthesized)
gtgggaaggaagtaatttgcatttgaaaaaagctttccctccttgggattggagtcctttgatcaaaaaaagtagttttacagttctgtgtggttaaaattcataatcattttgtcatta

SEQ ID NO: 956306 - DNA, 120 bp, Artificial Sequence
  ENSG00000287901_16 (sequence is synthesized)
tttactacttgtactaagagaaaaaggcttgtagaatttctaccttatttagaatagactttgttaggcctaattcattatcaatatttataaatactgagttaatacattactttgtct

SEQ ID NO: 956307 - DNA, 120 bp, Artificial Sequence
  ENSG00000287901_17 (sequence is synthesized)
ctttgtggcttacaatgttttctatgtaggtactatgccaagtttgttaattacattattcacgctttgtatgtccttttttatcttgttaatccacaaaattctgtacaatgtgttaga

SEQ ID NO: 956308 - DNA, 120 bp, Artificial Sequence
  ENSG00000287901_18 (sequence is synthesized)
gcttctcagtaccaaacaattttatcaaatttttatgttttatattttcacattatttcctctactagtatttgaaatgcaaatgttcatgacttcaatgtcttcattgtggattgtata

SEQ ID NO: 956309 - DNA, 120 bp, Artificial Sequence
  ENSG00000287902_0 (sequence is synthesized)
gagtttgtgacctgatagacgatggctggcaaactcatttcatcataaatatcacagcagataatatacttcaatacaagtgatgcatctgcctatgccaggatcctcagaaattgccag

SEQ ID NO: 956310 - DNA, 120 bp, Artificial Sequence
  ENSG00000287902_1 (sequence is synthesized)
ccactgctggactccagaatgtgatgaccaccatgagaactccaccagctgtgatgctgagcctacctctgctgcccttggacactcactcccaaataaagttcagattgctctctctga

SEQ ID NO: 956311 - DNA, 120 bp, Artificial Sequence
  ENSG00000287903_0 (sequence is synthesized)
gaacagagagggagcttgtgcaaattcacagagaaaactgtggagccagaaaagacatactgttctttccaatatgatgtggaagtctgaaagattaggaattgtttggcttgacgcttc

SEQ ID NO: 956312 - DNA, 120 bp, Artificial Sequence
  ENSG00000287903_1 (sequence is synthesized)
atcataactcccacaggcccttcattccacagttgaaattcttctgggaaatctatttgactctgcatttcacacgtcaaaatcattttcttccttcctggttgggaaacagcaattaag

SEQ ID NO: 956313 - DNA, 120 bp, Artificial Sequence
  ENSG00000287903_2 (sequence is synthesized)
gtcttgcacagcctgttgctaaattcccccaagaccttgaggtgcactccattcagacaacttctcttccctcttagggtactttgcacaggttgggcaacagaaaatgactaaaagaaa

SEQ ID NO: 956314 - DNA, 120 bp, Artificial Sequence
  ENSG00000287903_3 (sequence is synthesized)
tacaatatttattggatagcataaaacctagtcttttttttccaataaactgacagttttctacactcttgcctaactcttccaaattttcttaaccatccttcccctcccgtatgatca

SEQ ID NO: 956315 - DNA, 120 bp, Artificial Sequence
  ENSG00000287903_4 (sequence is synthesized)
gaaagcagccctgtctttgccttctcgttaaaatgaggagaaagaggaaactaagaggtctggctaagtgttttcaaacttaattcacacagaatctaatgttattaatgatattacaga

SEQ ID NO: 956316 - DNA, 120 bp, Artificial Sequence
  ENSG00000287903_5 (sequence is synthesized)
ttcattttgccagagtgagttttttaccataatcttgtaggtttgcacttccatggctgttcttaccatgaccacttctctatttcttatcttgtctaaattaacataacttagttatgc

SEQ ID NO: 956317 - DNA, 120 bp, Artificial Sequence
  ENSG00000287903_6 (sequence is synthesized)
tccgggactgaatggtcaggctttccataggaatggcagccacaaaaacgctatcagtaatttcctgcccagttaggatttcacttattactgattctttcaattcaaaaatatagacgg

SEQ ID NO: 956318 - DNA, 120 bp, Artificial Sequence
  ENSG00000287904_0 (sequence is synthesized)
gaggcttcctgcgggcaccggcgcgctcggcctccgctcctgggcgctgcagttctccctctccttgccagcccagagataaatagacggccagaaagaaaagaaaaagagaaaacatct

SEQ ID NO: 956319 - DNA, 120 bp, Artificial Sequence
  ENSG00000287904_1 (sequence is synthesized)
ctagagctctgcgcggggagggcagtggccgcggcagctgtggtttctgatagctaacacctcagcattacaattctgttttccataaacttctgtgcagaaatctggggaattcaaaag

SEQ ID NO: 956320 - DNA, 120 bp, Artificial Sequence
  ENSG00000287904_2 (sequence is synthesized)
aactggggagtgctgatctccctggagtctgaagcctggagaaaccatccagaaggctgaagctattcatctcaaaggagcagatgttgtccctccccaaggagttattatgggttggaa

SEQ ID NO: 956321 - DNA, 120 bp, Artificial Sequence
  ENSG00000287904_3 (sequence is synthesized)
gaaatgagaaaatgaatataaacaagttattctgtgaatgttatcaaatatgatcagcaccaaccaaatagagctctaaatgagtaagtattctttactgatagaagcaaaagcaaatga

SEQ ID NO: 956322 - DNA, 120 bp, Artificial Sequence
  ENSG00000287904_4 (sequence is synthesized)
acattatacttttctaaatacattcagaagcaaataatttgagcaaaagcacagacctaattgggtcatatatgatagcatgggaaaaccgtcctggagaagtagaaagtgtgttgctag

SEQ ID NO: 956323 - DNA, 120 bp, Artificial Sequence
  ENSG00000287904_5 (sequence is synthesized)
gtcagcttagctggttgtcatccatcaactctaccccctagccatggctttgcagacttctctagaaggctttctcctttcccaggtggctaggcagagtcacagagacagtgatctaat

SEQ ID NO: 956324 - DNA, 120 bp, Artificial Sequence
  ENSG00000287904_6 (sequence is synthesized)
gtcccttaggatgcttatgggacctgtttctatgggtgcaaagccaatcaaggataggactggagaggaaccaaaatgctttcctgctgagctgtctgctagatcctggtattttcaatc

SEQ ID NO: 956325 - DNA, 120 bp, Artificial Sequence
  ENSG00000287904_7 (sequence is synthesized)
cgatttaccttatggctaaatttcaggaaaggaaccattccagcagatagcgaccacagaagtggtagcctgatgaaaaagaataattttgggtgttgtataaatgtaaaaaccatgaag

SEQ ID NO: 956326 - DNA, 120 bp, Artificial Sequence
  ENSG00000287904_8 (sequence is synthesized)
ttttttaaaaataaaaaaaattcacttgcatacactctctttgaaaagttagtgggcagctatttgctagctgaaacagaaacacttgattatgttgtggatgagtagggaaaacgtcgt

SEQ ID NO: 956327 - DNA, 120 bp, Artificial Sequence
  ENSG00000287904_9 (sequence is synthesized)
gctggaggtggatttggagctgacaataaaggatgaatgaggatcaatagtctgagaatgaaaggggaagacagacattccctgttgaataaagggcaccatgaaagtcacagggtgtaa

SEQ ID NO: 956328 - DNA, 120 bp, Artificial Sequence
  ENSG00000287904_10 (sequence is synthesized)
caatgtatatatgtttcaggaaaaagcaaatggactcaatgtggttgaaatgtggagaggattttgagagatgaagcttgaaatatagttgacccttgaacaaggtgggtttgaactgca

SEQ ID NO: 956329 - DNA, 120 bp, Artificial Sequence
  ENSG00000287904_11 (sequence is synthesized)
ggtgtccacatatgcacagatttttttcaaccaaacatgttgaaaaatacagaattcatgggatgctaagcccacatatactgagggctgactttccctatctaccttccacagagtatg

SEQ ID NO: 956330 - DNA, 120 bp, Artificial Sequence
  ENSG00000287904_12 (sequence is synthesized)
cacaggtatacatgggagtcctggaatcaatcccctgcatgtactgaaggatgactgtgtatgtttcttttaacctaaacttcctgtactaactctgcctttgtatatttccagattcct

SEQ ID NO: 956331 - DNA, 120 bp, Artificial Sequence
  ENSG00000287904_13 (sequence is synthesized)
cctgccccagaaaactagatatgtacttaagagagaaaagaaataagcttgaaatattttagcagttaccatagagaataagaaaaaaaattcatattatatgcaaggaaagtcaagcat

SEQ ID NO: 956332 - DNA, 120 bp, Artificial Sequence
  ENSG00000287905_0 (sequence is synthesized)
tgtttgccaggggctctcggaccttaggccacagacggaaggctgcaccgtctgcttccccacttttgaggtgttgggacttggactgatccactactggcttccttgctcctcaacttg

SEQ ID NO: 956333 - DNA, 120 bp, Artificial Sequence
  ENSG00000287905_1 (sequence is synthesized)
cagacggcctatcgtgggactttaccttgtgattgtgaagagggtttaactctgcaacataatcagtgcacagaaacctaaattggaaatctctttcactacagacaagacagttcagaa

SEQ ID NO: 956334 - DNA, 120 bp, Artificial Sequence
  ENSG00000287905_2 (sequence is synthesized)
gtaactggcacttgaacgtctccatccaagtgcccctttgtggcagatgaagagttcaggttttgttcctcatcagctttgtgaccttgggcaaagtccttgacctatcagagcctcaat

SEQ ID NO: 956335 - DNA, 120 bp, Artificial Sequence
  ENSG00000287905_3 (sequence is synthesized)
ttccctatctgtggaaagacgaccatgaaaaaatatgcactatggggtggttctggtggggagagttaaattagatataatttagaaattcttagcataatatttgtatcatatatatgt

SEQ ID NO: 956336 - DNA, 71 bp, Artificial Sequence
  ENSG00000287906_0 (sequence is synthesized)
cgttccgacttcacagagatgtcaaagtgtagaggtgatcgagtgtggatcaagaactggaacgtagcctc

SEQ ID NO: 956337 - DNA, 120 bp, Artificial Sequence
  ENSG00000287906_1 (sequence is synthesized)
gaggtgatcgagtgtggatcaagaactggaacgtagcctctttgtgtccactgtggaaaggaccccagactgtcgttctgagccctcccaccgctgtgaaggtagaaggaatcccagcct

SEQ ID NO: 956338 - DNA, 120 bp, Artificial Sequence
  ENSG00000287906_2 (sequence is synthesized)
gaatcccagcctggatccaccacagccatgtaaaacctgcagcgcgtgaaacctgggaggcaagaccaagcccagacaaccctttcagagtgaccctgaagaagacgacaagccctgctc

SEQ ID NO: 956339 - DNA, 71 bp, Artificial Sequence
  ENSG00000287906_3 (sequence is synthesized)
tcatcgtgatcttactcaaactggggactgttcccagtgtattcatcaggtcaccgaagtaggacagcaaa

SEQ ID NO: 956340 - DNA, 90 bp, Artificial Sequence
  ENSG00000287906_4 (sequence is synthesized)
atgaatgtgtggaaacaataaaagaaacttgtttgtataatgccactcagtgcaaggtatgtagcccgagaaatgaccgacctgatgcgt

SEQ ID NO: 956341 - DNA, 120 bp, Artificial Sequence
  ENSG00000287906_5 (sequence is synthesized)
gagaaatgaccgacctgatgcgtgttataacccatctgagccctccgcaaccaccgtttttgaaataagaataagaactggccttttcctaggtgatacaagtaaaataataactagaac

SEQ ID NO: 956342 - DNA, 120 bp, Artificial Sequence
  ENSG00000287906_6 (sequence is synthesized)
agaagaaaaagaaattcccaagcaaataactttaagatttgatgcttgtgcagccattaatagtaaaaagctagaaataggatgtggttctcttaactgagaaaggagctaaagagtaga

SEQ ID NO: 956343 - DNA, 120 bp, Artificial Sequence
  ENSG00000287906_7 (sequence is synthesized)
aaataaatatgtttgtcatgagtcaggggtttgtaaaaattgtgcctattggccatgtgttatttaggctacttaaaaaaagaacaaaaaggaaccggtttatcttcagaagggggaagc

SEQ ID NO: 956344 - DNA, 120 bp, Artificial Sequence
  ENSG00000287906_8 (sequence is synthesized)
ctaataattaccaatcccctagatccccgttggaaaaagggagaacgtgtaaccctggggatcaataggacagggttaaaccctcaagttgccattgtaattagaggggaggtccacaag

SEQ ID NO: 956345 - DNA, 120 bp, Artificial Sequence
  ENSG00000287906_9 (sequence is synthesized)
ccctcaagttgccattgtaattagaggggaggtccacaagtgctctcccaaaccagtatttcaaaccttttatgaggagctgaatgtgccagcaccagaacttctgaaaaagacaaaaaa

SEQ ID NO: 956346 - DNA, 120 bp, Artificial Sequence
  ENSG00000287907_0 (sequence is synthesized)
tgggcagccttgatcatagctgtagtgcagaggtgattccttaggcattttttatggctatgatgtaattgctgaagttccaagaatcatatttcagtgtagggcagaaaaggaggagga

SEQ ID NO: 956347 - DNA, 120 bp, Artificial Sequence
  ENSG00000287907_1 (sequence is synthesized)
aaagcagagccagctgtttctgtctctttcatcctgaagccaaaagatttcttggaattcctctagctgactttccctttgcctcattgactagaacttgattacgtggacatagccaac

SEQ ID NO: 956348 - DNA, 120 bp, Artificial Sequence
  ENSG00000287907_2 (sequence is synthesized)
tgcaggccaggcttggtgcccatatttgaatctttaatgtagggctactgcagtgacgctgccaacaaatgacttaaggagtttttgtcatttatttgggattttctacatggacaagca

SEQ ID NO: 956349 - DNA, 120 bp, Artificial Sequence
  ENSG00000287907_3 (sequence is synthesized)
tgtcatctataaacaaaggtagtactatttctttcttgcccaacactcaattttagtgaaaaactctccgatttctcaacagtaagtataatgtgagttgtagttgtttagttttttttt

SEQ ID NO: 956350 - DNA, 120 bp, Artificial Sequence
  ENSG00000287907_4 (sequence is synthesized)
ttattattttataaatggtgtttccctaattttgttttgcttatttgtttgcaaattgaaaatgtttccttctatttcaagttgttgggagtttttatcattaattagttttggattgtt

SEQ ID NO: 956351 - DNA, 120 bp, Artificial Sequence
  ENSG00000287907_5 (sequence is synthesized)
ttattcttttactgtactaattaatatgatcatcttattttccttttttattctgttgatataactgattacgttgattaatttttcaaatgtggaactaccctttcatacctagaatat

SEQ ID NO: 956352 - DNA, 120 bp, Artificial Sequence
  ENSG00000287907_6 (sequence is synthesized)
aaatttcacttgtttgtggtgcatgatgtttttatacattgttggattcacttttgtaaatattttgtaaggacttttgcacttatgtttatgagaggtattagtctagctttcttttat

SEQ ID NO: 956353 - DNA, 120 bp, Artificial Sequence
  ENSG00000287907_7 (sequence is synthesized)
tgtatgtatttggttttgattgtagggtaactctagactcaaaaatttagttagaaaatatttcttctgcatctgtttacaggtagagtttaatacttggaacaatttcttattgaacta

SEQ ID NO: 956354 - DNA, 120 bp, Artificial Sequence
  ENSG00000287907_8 (sequence is synthesized)
aatttataagtaaaataatctggatttggtaatacttttttttggaaaggcagttatttcaatttattttatatacaaacatataattactcaagttatccatttatcttgtgtgagttt

SEQ ID NO: 956355 - DNA, 120 bp, Artificial Sequence
  ENSG00000287907_9 (sequence is synthesized)
gtgagttttggtagttttacattttcctttcaagaaagtaatctatttcatccaaattatttaaattattgacatgtgtttttagtagtattttctcgttatccttttaatgtccttgag

SEQ ID NO: 956356 - DNA, 120 bp, Artificial Sequence
  ENSG00000287907_10 (sequence is synthesized)
ttggctgtgtcctcacccaaatctcaactggaattttagctcccattaccccacaggtcatgggagtgacccagtgggaagtaattgaatcatgagggtggatttttcccatgctgttct

SEQ ID NO: 956357 - DNA, 90 bp, Artificial Sequence
  ENSG00000287907_11 (sequence is synthesized)
tctcaagagacctgatggtcctcttgcctgccaccgtgtaagacttgcctttgttcctccttccatttctgccacgattgtgagacttcc

SEQ ID NO: 956358 - DNA, 120 bp, Artificial Sequence
  ENSG00000287907_12 (sequence is synthesized)
ttgttcctccttccatttctgccacgattgtgagacttccccagccatgtggaaccatgagtccattaaacctcttcttctttatgaattatccagtgtcaggcattacttcatagcagt

SEQ ID NO: 956359 - DNA, 120 bp, Artificial Sequence
  ENSG00000287907_13 (sequence is synthesized)
atgaaaatggactaagacagtggtcgtctttcatttctgattctggtaatttgtgtcatctctattttgtggaggacagtcaagtacttttcttcataagattgaagcttagattattga

SEQ ID NO: 956360 - DNA, 120 bp, Artificial Sequence
  ENSG00000287907_14 (sequence is synthesized)
agcttagattattgattttagctattctttgtttgtattctatacatttaattctataaatttttctgtacccctttcactggatcccacaattttttttattttttttattttcattta

SEQ ID NO: 956361 - DNA, 120 bp, Artificial Sequence
  ENSG00000287907_15 (sequence is synthesized)
atgagacatctttgatccatgtgttatttagaagtatgttgttcactttcaagtattttggtattatctagctgtatttttgttttttatttccatttcatttccattgttttctgaaaa

SEQ ID NO: 956362 - DNA, 120 bp, Artificial Sequence
  ENSG00000287907_16 (sequence is synthesized)
cttacttttaataatttttgttattttatatttattaagatatgttttatgctaataatgggatctatcctgatgaatgttttatacaagtttgagcagaatctacatgttgctgatatt

SEQ ID NO: 956363 - DNA, 120 bp, Artificial Sequence
  ENSG00000287907_17 (sequence is synthesized)
gaatatactgtcctacaaatggtcattagattaagttgattgacagtgctgttctgttcatctatactgttatatttaatttagcatttccttttgatttgtttttagagtttctgtttc

SEQ ID NO: 956364 - DNA, 120 bp, Artificial Sequence
  ENSG00000287907_18 (sequence is synthesized)
cttgcttacctcacccatttgatcttatggcttatccattttttttcattaacaactttaacatattatttgtaattactttaaattcactggtaatcccaatgtctgtgtcatatcacc

SEQ ID NO: 956365 - DNA, 120 bp, Artificial Sequence
  ENSG00000287907_19 (sequence is synthesized)
gtctggttttgatacttgctttgtctctctagactgctttttgttgcatgtggtgtgccttgtatgtttggttgtgttgttctgtatatgtcatattgggtaatattctgagtaaatagg

SEQ ID NO: 956366 - DNA, 120 bp, Artificial Sequence
  ENSG00000287907_20 (sequence is synthesized)
cctctaatgtgaggatttactttaatctggctaggagttgtgttttgtttcatgatttttgtagttctagatgccagaccaaatttctttggtcttcttgtgtttggtgttctcccttga

SEQ ID NO: 956367 - DNA, 120 bp, Artificial Sequence
  ENSG00000287907_21 (sequence is synthesized)
atttggacttccctaacttctctattcacagagtctgcgtctttactctcctgctagtttatactcagccttcagcaatttgtcaaaattactatttaatgttattaccaattaatttat

SEQ ID NO: 956368 - DNA, 120 bp, Artificial Sequence
  ENSG00000287907_22 (sequence is synthesized)
agattcattggcttctgctctagttaagaatatcttcattctacctttctgaaattgtctttccagatccccagttgtggtttgccctgcaaacttagttctctggtgaatccaagaaaa

SEQ ID NO: 956369 - DNA, 120 bp, Artificial Sequence
  ENSG00000287907_23 (sequence is synthesized)
gtcactgattttattttatccagatttttcttgctttatgtatgttattgacaatttttaagttgtttacatctctgagttgctatcaaattctccatagacttttggttactttgtagc

SEQ ID NO: 956370 - DNA, 120 bp, Artificial Sequence
  ENSG00000287907_24 (sequence is synthesized)
ttattgtaggtcaatcacacagagtctaaagtggtataccagatattttagcctctttaaagtctaatctgttgcttccatgtgcagaactaagagtgagctcttcttacttctgtccaa

SEQ ID NO: 956371 - DNA, 120 bp, Artificial Sequence
  ENSG00000287907_25 (sequence is synthesized)
gtgtgtcctaacccagtggaaactaaatgttacaaattttacactgcaaaggatatatcatagtgtgcccaagtaacaaagctagactatttttaaaacttgggctgaatacagatacca

SEQ ID NO: 956372 - DNA, 120 bp, Artificial Sequence
  ENSG00000287907_26 (sequence is synthesized)
aaatatcaacagcatccagacagttataagctggtagttgaagaaactagtagcagataattatttaaatttatgtcatgaaaatcaattatactctgaaattcaacttgacatttcaaa

SEQ ID NO: 956373 - DNA, 120 bp, Artificial Sequence
  ENSG00000287907_27 (sequence is synthesized)
taaaaagctaaactgttttactttagtaaagttacatcaccttactgataacagaactttacagacttcaataaatttattaaataatctggtaagcaaaggaaaaatatttgtttatag

SEQ ID NO: 956374 - DNA, 120 bp, Artificial Sequence
  ENSG00000287909_0 (sequence is synthesized)
ggctgctcagctcctcattcttttcatgtggccaccactcgcctgcttgccaggaagaggaagctcggcagccggctcttcatcatgccgacaaaaaacgctgctgttactgaagaagac

SEQ ID NO: 956375 - DNA, 120 bp, Artificial Sequence
  ENSG00000287909_1 (sequence is synthesized)
aaagaaaccacttttaaagataaaaagaggttttgaagcattacttcgcattctgcttgttcggatctcatgagacagtgaagcaggccactcagtcccatggtgtggatgctgcctctg

SEQ ID NO: 956376 - DNA, 120 bp, Artificial Sequence
  ENSG00000287909_2 (sequence is synthesized)
tccaatgatacctgacaccagatcaagggttcttcccagtatagacacctctcagttggaaagggttacaatcatcccaatttggaaatcccatcatcaattgtaaaacagacctcccca

SEQ ID NO: 956377 - DNA, 120 bp, Artificial Sequence
  ENSG00000287909_3 (sequence is synthesized)
aggtgagaaggggcgggggaatgtagagctgaatatgaaaatctgaaggactgcatggtctaagaatgaaatgttttctaaataaaattaagctacacggtggaaattgaggagaaagtc

SEQ ID NO: 956378 - DNA, 120 bp, Artificial Sequence
  ENSG00000287909_4 (sequence is synthesized)
gtggcaggcttgtgtcttgttaatttcaaacatagatttttatgtgaggctatttgattataatttgattatctgaccctgtaattaaagtttattgccaatttggaagcttacatgtaa

SEQ ID NO: 956379 - DNA, 120 bp, Artificial Sequence
  ENSG00000287909_5 (sequence is synthesized)
aatgaactggttttcttcaaagcaatatacaatcttttggactcattgacttctggttttgcatttaaatggaaaagtcagttataacgtgacaaacaggttggggttttgatcattaat

SEQ ID NO: 956380 - DNA, 120 bp, Artificial Sequence
  ENSG00000287909_6 (sequence is synthesized)
cctgctaaagcaatattcataaattcaattctgaatcagttggaatacttttcttttattagtttctgtgttattaaatgagattgtttctgactaatatatttctggactcaaactgta

SEQ ID NO: 956381 - DNA, 120 bp, Artificial Sequence
  ENSG00000287909_7 (sequence is synthesized)
gctccaagctgttattcaaatcaaataacatgccccttacttgtgcctcgcactaataaatgccaacttgtgatacatttgcaagagactgtcagcaatattaaaggaggcaataatggc

SEQ ID NO: 956382 - DNA, 120 bp, Artificial Sequence
  ENSG00000232832_0 (sequence is synthesized)
attttcaaaggaaaactttgggaagattacaaaccctgaaaaatgaagacttggtggcttgcagttccttctccttctccaagatgaggtggttgggttgctgatgaggacaggctgctg

SEQ ID NO: 956383 - DNA, 120 bp, Artificial Sequence
  ENSG00000232832_1 (sequence is synthesized)
tgaagttctgcttcaaggtctgatggtcgtcaattcttccaagccaaagccaggaatgccacttctaccatctgcatagtgccatatacacagaagaaatccagccagcagaggaaacag

SEQ ID NO: 956384 - DNA, 120 bp, Artificial Sequence
  ENSG00000232832_2 (sequence is synthesized)
ttgaaaacaaaaaactgactttctataaacaattttgggataaatcataccaattaaatattgacagatgaagagcagtgattattaaaaagtaaacaaggaccaccttgagagctaaat

SEQ ID NO: 956385 - DNA, 120 bp, Artificial Sequence
  ENSG00000232832_3 (sequence is synthesized)
caagagcaaaacccaggtataaaaaagtttttgtttcttttttaatggaggaaaaatatatatggaggaagaaatgatgtatccactatgtcaaggttaaaaaatggtatccaaaaaaaa

SEQ ID NO: 956386 - DNA, 120 bp, Artificial Sequence
  ENSG00000260070_0 (sequence is synthesized)
tttcatgaagatgtaacagtaattaagtaggaaagtactcctaatataatagaggtatttttaaatggcaagagaacaaaatatctggtttatctaaatgtggatatttacaccttaggt

SEQ ID NO: 956387 - DNA, 120 bp, Artificial Sequence
  ENSG00000260070_1 (sequence is synthesized)
cattacatattaagaatttgaatctatatggtgacaggattttttcaggtttatctcaccccgatgttgggggaaaaaaatctccagaactctatagtctcttgaaatgattgtccactg

SEQ ID NO: 956388 - DNA, 120 bp, Artificial Sequence
  ENSG00000260070_2 (sequence is synthesized)
gacattaactcctttagctatcaaaaatggataaaaaccacaggtgactgacaagactttcacaagtgcagacaaaggtttggattcaaagcctggtcatatggtttggctgtgtcccca

SEQ ID NO: 956389 - DNA, 65 bp, Artificial Sequence
  ENSG00000260070_3 (sequence is synthesized)
gggaacagtgaataagtcttatgagatttgatggtttcataagggggagtttccctgcacaagct

SEQ ID NO: 956390 - DNA, 120 bp, Artificial Sequence
  ENSG00000232835_0 (sequence is synthesized)
cttgctctgagtgaatgcacccctcgtgcacccgggagctgagacctcagcctgcagaagcagaatctccgtggtgggatccagagcttgtatcttggccaagccctcccagaagtttct

SEQ ID NO: 956391 - DNA, 120 bp, Artificial Sequence
  ENSG00000232835_1 (sequence is synthesized)
cccttgcttgtggagttctggaaacgaatgcatttggagtaggtgatgtttaatgatcctttctgttctcaattcctgtaatacaaataaacaataaaatacttacatctttattattta

SEQ ID NO: 956392 - DNA, 120 bp, Artificial Sequence
  ENSG00000232837_0 (sequence is synthesized)
tacttcattccttgaaccactgtttatggagcacttccaattaccagacacaggtgacaaaaagaaaaaggaacactcaacatttaatttgactcacagttcatggtcttgaatgcatgg

SEQ ID NO: 956393 - DNA, 120 bp, Artificial Sequence
  ENSG00000232837_1 (sequence is synthesized)
cttcggatggcaaggcaatgcgttccgtgcctaagcaaagcacctagctctcaggaactgagaccactagctgagtgctctgtgactgttgggacttgagacccttcttatctcccccaa

SEQ ID NO: 956394 - DNA, 120 bp, Artificial Sequence
  ENSG00000232837_2 (sequence is synthesized)
gactcagtgggatggggctgctgttccggagctgactccaacatgccagccttttggaaatttgcctggaggctgaactgaaggtaggtccctcttccctccccccatcatttatttctt

SEQ ID NO: 956395 - DNA, 120 bp, Artificial Sequence
  ENSG00000232837_3 (sequence is synthesized)
taacttaaaaacacttttttgggggatctcatatgttacaatctattaaatacttccttcctctcttcttccctgggtggagtaaatgtatgtgggaaagagaattctagagcaggagta

SEQ ID NO: 956396 - DNA, 120 bp, Artificial Sequence
  ENSG00000232837_4 (sequence is synthesized)
aggaaccctggatttgctaagacgtctggatctacagcaggcctgaggaaccctcgatgtacccaggactaaaggtccctggatgtgcatttgaattaaggaaacttgtctttgcacggt

SEQ ID NO: 956397 - DNA, 120 bp, Artificial Sequence
  ENSG00000232837_5 (sequence is synthesized)
tctcgtggtttacatggcctcttttgaacactccatttcttcttgtgtaaatggcacagcatgcccatcctgcccaactcactgggttacttggcacaagagaaccataaaagtgcttcg

SEQ ID NO: 956398 - DNA, 120 bp, Artificial Sequence
  ENSG00000232837_6 (sequence is synthesized)
gagccacatggctgaatgggactggcatgggcttggggcacgggtggggtgacctggccctctggtttccctgggacagtcatcattcatactagtgaccattcagctctcaaaactgaa

SEQ ID NO: 956399 - DNA, 120 bp, Artificial Sequence
  ENSG00000232837_7 (sequence is synthesized)
aaggatgtggctaacttacttctaagccccagtccttggaatcttggtccaatctctctacatcttggtttcctactctgaaatacgcaggtcacatccatgcctttaaagacagattgt

SEQ ID NO: 956400 - DNA, 120 bp, Artificial Sequence
  ENSG00000232837_8 (sequence is synthesized)
gaaagtcaaaagaaattccaattgagagctctttataaactggaaataaaaatcacacagtgggtgtcattgttatcattaagtctaggtggtgtgaaaccaggaagcagtattttgtgt

SEQ ID NO: 956401 - DNA, 120 bp, Artificial Sequence
  ENSG00000232837_9 (sequence is synthesized)
gccctctggaatctggttctttaccaagggctgtcccttccctcttttggactcctccttcctctggcccaagagaccacttgctttctttccctgagccccagttagcttttctgaaaa

SEQ ID NO: 956402 - DNA, 120 bp, Artificial Sequence
  ENSG00000232837_10 (sequence is synthesized)
acagaagaattggagtctgaatttccaagatgcctcccagtggtaacattctatggtttcatgattctaaacaacgtttggcctcctggtattggttggttgttttcttaagaacaaaga

SEQ ID NO: 956403 - DNA, 120 bp, Artificial Sequence
  ENSG00000232837_11 (sequence is synthesized)
aagccagacaacctaaacatgaaatacaaccccagcaatgaattacatgggctttgaaaaaggcattcagcgagaatgattatgtctaatattgggccttctggccttgccagggcctgg

SEQ ID NO: 956404 - DNA, 120 bp, Artificial Sequence
  ENSG00000232837_12 (sequence is synthesized)
gacctggcatcagatgtctgaacttgatatacacctgcaggtacacttacggctgttaatctgccaagctctgttgttcaagctgtttgaaagcattcaataaatttcttttagaagcca

SEQ ID NO: 956405 - DNA, 120 bp, Artificial Sequence
  ENSG00000226207_0 (sequence is synthesized)
ggggactgatgcccaactttgaatcatcttgatccttgagcttgggttaaggcgatcccagattgcaagtttctctggctgcctgacagaagcaaaggctgaatttgtctctccattgtc

SEQ ID NO: 956406 - DNA, 120 bp, Artificial Sequence
  ENSG00000226207_1 (sequence is synthesized)
cctaccctggccccatggcctctgctgtgacagtccacacagtcctggctcacaaacatgatctccaagagtggaagggtcctgataccttctacgagatttacattgtcaactcggccc

SEQ ID NO: 956407 - DNA, 120 bp, Artificial Sequence
  ENSG00000226207_2 (sequence is synthesized)
tgcagaataggtggtgagccatgtggaagagatggcagaaagagcctcttgatctgtgagacttcatactggctgtggaccaactcttctactgatgtgaaagaataagcctcagcctac

SEQ ID NO: 956408 - DNA, 90 bp, Artificial Sequence
  ENSG00000226207_3 (sequence is synthesized)
caactcttctactgatgtgaaagaataagcctcagcctactcaagccattctatctggggcttcttattacataagcccttaaaattatt

SEQ ID NO: 956409 - DNA, 120 bp, Artificial Sequence
  ENSG00000243193_0 (sequence is synthesized)
ctaagaaaaacttttggaagaatgatggtgatgggtttgcaggaagcagttttcgtcccctccttgggtccctgtgtgagctctggcatctttttgtggaacagcagccaaggttgaaga

SEQ ID NO: 956410 - DNA, 120 bp, Artificial Sequence
  ENSG00000243193_1 (sequence is synthesized)
tccctgctagactgcgcacttcgtaagaactgtatcttattattcgtggcatccccagcactgtacctgacacacaagagggactcggtaaatgtttgctgaataaactagtatattaat

SEQ ID NO: 956411 - DNA, 120 bp, Artificial Sequence
  ENSG00000243193_2 (sequence is synthesized)
ggcaccattcattcatgcaggctgtcctgacaaaatgccaagttagcaaaataagatcacacagtcactcttcatcacagctggagaatctgaatttacgagtatcttgcatcaaaacgc

SEQ ID NO: 956412 - DNA, 120 bp, Artificial Sequence
  ENSG00000243193_3 (sequence is synthesized)
tgcctcagagagaacagaaagtgaaaatacagattcctgaaatcatacaataagagggatgaaacacaaatgtttcctgtacaaactttcagcaagttaacggtcaccttcatcattttt

SEQ ID NO: 956413 - DNA, 120 bp, Artificial Sequence
  ENSG00000243193_4 (sequence is synthesized)
gtggaggccttgctggaaataaagaaatgtgcatctggccaagctatgcctggtcctctctctcaggaaaggggtttttctgaagaaaaaaacctggccaggcacggtggcccacgcctg

SEQ ID NO: 956414 - DNA, 73 bp, Artificial Sequence
  ENSG00000243193_5 (sequence is synthesized)
ggaggccgaggtaagagaaaccccatctctatactaaaaattaaaaaaaaaattagccgggcgtggtggtgag

SEQ ID NO: 956415 - DNA, 120 bp, Artificial Sequence
  ENSG00000243193_6 (sequence is synthesized)
ccctgtgtgagctctggcatctttttgtggaacagcagccaaggttgaagatgaagccaagggcatcaccaaaaacttgaagatgttgagtttgaccaaataaaaaagtcgagattacca

SEQ ID NO: 956416 - DNA, 120 bp, Artificial Sequence
  ENSG00000243193_7 (sequence is synthesized)
agcaacctgctaaaactcagcacgtctggtaagctgctgttcaaaaattgaataaaagctatgtgcatttgctgtatttgtagcctatatactctgttaggcaatgcatatattaaagta

SEQ ID NO: 956417 - DNA, 120 bp, Artificial Sequence
  ENSG00000243193_8 (sequence is synthesized)
tccatacctgtttttaaaggggagctataacttggaattctgttttaaaatatctaaggaaaaggtcagctgtaccttttttgatggtcaataaacacaacattttgtaattccttgaaa

SEQ ID NO: 956418 - DNA, 120 bp, Artificial Sequence
  ENSG00000243193_9 (sequence is synthesized)
ccctgtgtgagctctggcatctttttgtggaacagcagccaaggttgaagatgaagccaagggcatcaccaaaaacttgaagatgttgagtttgaccaaataaaaaagtcgaggtaagtt

SEQ ID NO: 956419 - DNA, 120 bp, Artificial Sequence
  ENSG00000243193_10 (sequence is synthesized)
tgcaagacaaagtctgaacagcacgtgcactcataccaagagtgggtattctagaaataccgaacccaaaaattagagatttccaaatccttataaaggaccaaaaaaaaaaaaaaaaaa

SEQ ID NO: 956420 - DNA, 120 bp, Artificial Sequence
  ENSG00000243193_11 (sequence is synthesized)
tcttttttcttttttttttttttttgatggagtatcactctgtcatccaggcttggagtgtacagtggtgcaatcttggctcaccgcaactttgcgtccctggttcaagtgattcctccg

SEQ ID NO: 956421 - DNA, 89 bp, Artificial Sequence
  ENSG00000243193_12 (sequence is synthesized)
tgcaatcttggctcaccgcaactttgcgtccctggttcaagtgattcctccgcctcggccacaacgcccagctaatttttatattttta

SEQ ID NO: 956422 - DNA, 120 bp, Artificial Sequence
  ENSG00000243193_13 (sequence is synthesized)
gagccaccatgcccggcctcaagaatctgttcttcatgggttatctactgtttcattacaacaatcatcttgtgagttaggtattatccccattttatacccagagaaactaagccttag

SEQ ID NO: 956423 - DNA, 120 bp, Artificial Sequence
  ENSG00000243193_14 (sequence is synthesized)
aaaggtaactaaggatacacacacacagagacacttttaatacgtagataggatattacggcatttactacactatgagtcatcatcagcttccctgctagactgcgcacttcgtaagaa

SEQ ID NO: 956424 - DNA, 120 bp, Artificial Sequence
  ENSG00000243193_15 (sequence is synthesized)
ccctgtgtgagctctggcatctttttgtggaacagcagccaaggttgaagatgaagccaagggcatcaccaaaaacttgaagatgttgagtttgaccaaataaaaaagtcgagatcacac

SEQ ID NO: 956425 - DNA, 120 bp, Artificial Sequence
  ENSG00000243193_16 (sequence is synthesized)
aatacagattcctgaaatcatacaataagaggtgaatattatcttccttcatgatcttcattatgattaaagattaactttgtgaaataattcataaacccaattatcaagatattatca

SEQ ID NO: 956426 - DNA, 120 bp, Artificial Sequence
  ENSG00000243193_17 (sequence is synthesized)
tttataacaaaattatatcctccaaagtgactgaaagacatacaatatttactatttatataccacaatactttagtcatatacttgcacagtcacaaattacttattaaaaacttgcat

SEQ ID NO: 956427 - DNA, 120 bp, Artificial Sequence
  ENSG00000243197_0 (sequence is synthesized)
actctgagcttttcctctgggaacagatcccagattattccagacttaagacatggagatatatcttgctagagtgtaagatgaaagaggacctgccctccattctatctactccctctc

SEQ ID NO: 956428 - DNA, 120 bp, Artificial Sequence
  ENSG00000243197_1 (sequence is synthesized)
tgcaaaggccattttgaagatctcagttttactgaaaggggtctgccacacataacttccctggtgtaccagcaacaagtgttcagtggaccatggcaacacaaagaatgacggaggaga

SEQ ID NO: 956429 - DNA, 120 bp, Artificial Sequence
  ENSG00000243197_2 (sequence is synthesized)
gaaaatgccatgcagaagtgatagtcaagatgaagatgtgggagaggagcagcccccagtatatattcagtgtgtcctctgaagtaacaaccatcccatctggctgagaagtgatggaca

SEQ ID NO: 956430 - DNA, 120 bp, Artificial Sequence
  ENSG00000243197_3 (sequence is synthesized)
cggctccttaaccacactgtaccctctgttcttggcacctctctaccagaaagatatcaacaaattggatggaattcagagaacagtaagaaaaatgattaaagagatggaggcagtgac

SEQ ID NO: 956431 - DNA, 120 bp, Artificial Sequence
  ENSG00000243197_4 (sequence is synthesized)
ttatgaggaaagatgaaaaggactaaatctatgtagcttggcaaagcaacaactgagtgacttcctattatccttctcaaagttattgctgcagaggaaagaagcatacatcttttaccc

SEQ ID NO: 956432 - DNA, 120 bp, Artificial Sequence
  ENSG00000243197_5 (sequence is synthesized)
aaagaatgaaagaaatggctttggcctgtgcctgtttgacctctgagagatactttttgcaagaaattgttaagttttggcccaaaaagtggtcggtcttttatccttccttgtggaggc

SEQ ID NO: 956433 - DNA, 120 bp, Artificial Sequence
  ENSG00000243197_6 (sequence is synthesized)
caaactgcaaaccaggatgaagaaaccatcagtggcagtttggggaggtggaggagggactatctagactcagtgaatcaccaaggaaacatgaggcctatttctctgtgaagctgaact

SEQ ID NO: 956434 - DNA, 120 bp, Artificial Sequence
  ENSG00000243197_7 (sequence is synthesized)
tcaaaaaacaatctaagagatacaaagggaaaagtgtgactgctctgacagcaaaaacaagcaaatatctccagaggggattaatccttctgcttcaaagtaactaaaacaaagaaagct

SEQ ID NO: 956435 - DNA, 120 bp, Artificial Sequence
  ENSG00000243197_8 (sequence is synthesized)
gagccagcttcactggaaacaacacctgtccatcagacaaggatgagctaatcaaaagaaaacactgcctatgtgcacgactcagcagcctggacagctaataccaaggaacacgttttc

SEQ ID NO: 956436 - DNA, 120 bp, Artificial Sequence
  ENSG00000243197_9 (sequence is synthesized)
actataaagattcagctttcaaaatccagttccctcttgtagagccacagggttaaaagggaccttagagatcatctacatacaggccaaaccctcaatgaatgccagtgttcgccttat

SEQ ID NO: 956437 - DNA, 120 bp, Artificial Sequence
  ENSG00000243197_10 (sequence is synthesized)
gggaacagatcccagattattccagacttaagacatggagatatatcttgctagaggtaggaagatgataagatcagtttctataggtagaggataatgtgtcctaaaatgtaggtagag

SEQ ID NO: 956438 - DNA, 120 bp, Artificial Sequence
  ENSG00000243197_11 (sequence is synthesized)
ataagtctgacagtggtttagacaaaaagggcctctgctaatggtggagagatcaaggaagaaaagagcaacgttaaagtgaggctgtacccacagatcatgctcaagcaaattcgaacc

SEQ ID NO: 956439 - DNA, 120 bp, Artificial Sequence
  ENSG00000243197_12 (sequence is synthesized)
gtgagcgcatttctcttaaacaatgaacacttagaataaaaattaaaatttcccacaaatttctaattttaaaatagtttcccaagatttcagtggtattgtatatatgcccatataatt

SEQ ID NO: 956440 - DNA, 120 bp, Artificial Sequence
  ENSG00000243197_13 (sequence is synthesized)
actgaggtggcgtatgaaaactgtctacaagcatttgaagaatataaacaccaagggaagagagggaactttttagaatggtctggggaataagcagagtaagaggacagaattgaagaa

SEQ ID NO: 956441 - DNA, 120 bp, Artificial Sequence
  ENSG00000243197_14 (sequence is synthesized)
ttgggggtgggggcgttttctcatcaattgtaaattttgataaataacaaaattaagtctggagagaaagagttgcatctcatgcttttaggttacaatcagtgttgacctgcactgaga

SEQ ID NO: 956442 - DNA, 120 bp, Artificial Sequence
  ENSG00000243197_15 (sequence is synthesized)
acagttcctcaaatttgaccccaaatttaagtctaatttatgaagaaagttttgcctttggagacaggtttaattttacttccatgtggaaaaccttcaaataaaatgatgactattgtg

SEQ ID NO: 956443 - DNA, 120 bp, Artificial Sequence
  ENSG00000243197_16 (sequence is synthesized)
atgacgccctagattgttctgttacacaaggggtaccaaagtccactctgagcttttcctctgggaacagatcccagattattccagacttaagacatggagatatatcttgctagagcc

SEQ ID NO: 956444 - DNA, 120 bp, Artificial Sequence
  ENSG00000243197_17 (sequence is synthesized)
gttacacaaggggtaccaaagtccactctgagcttttcctctgggaacagatcccagattattccagacttaagacatggagatatatcttgctagagctttatccttcctagtgataag

SEQ ID NO: 956445 - DNA, 120 bp, Artificial Sequence
  ENSG00000243197_18 (sequence is synthesized)
ataacactcaaaactcaagataatgctcaaacaagttaaaactcaagactaagtgggacttgctctaaacccctaagtattaaggatgacactgtactgctgcttagcacatagaagatt

SEQ ID NO: 956446 - DNA, 120 bp, Artificial Sequence
  ENSG00000243197_19 (sequence is synthesized)
gacatgcaagaaatcattcttggatgccattcaggcattggcaaagagaagagaggaagagagagtgaaagaagagctggcttgctacctgcaattggccaagagtcagaccaagcccat

SEQ ID NO: 956447 - DNA, 120 bp, Artificial Sequence
  ENSG00000243197_20 (sequence is synthesized)
ctaatcagaagagcccattacttgttcatcaactacttcagtgctatgggacatggaaaggtgaagcagcaggactctatggagccacaggggccagtgtttcagccactatttcactgg

SEQ ID NO: 956448 - DNA, 120 bp, Artificial Sequence
  ENSG00000243197_21 (sequence is synthesized)
atggataagagaaacaatgcggtgatgactaataattagcatggcttccatgctgggacagtaacaggaactggtagagaccatggctgaatgaagaccatacacattgcctatagaagg

SEQ ID NO: 956449 - DNA, 120 bp, Artificial Sequence
  ENSG00000243197_22 (sequence is synthesized)
cagcccctactcagcttagccaaattttctcatgtagaattataggtctagtggatctagatcttaatatatttttgagaaaagctagaaatgtggatttttatatcaaatgtatccgtt

SEQ ID NO: 956450 - DNA, 120 bp, Artificial Sequence
  ENSG00000243197_23 (sequence is synthesized)
tttaatgctggtgcaatttctaaaaataaacaaaaactgtatgggccaaataaaatatatacgcgagctgaattaggctagtggattactagtttgagaactcttatttagaaagatctg

SEQ ID NO: 956451 - DNA, 120 bp, Artificial Sequence
  ENSG00000243197_24 (sequence is synthesized)
cctctgagaattagtgtttccttcttgaccaggcagaatatggatctgtgtgtatgtgcttctatgtatgtgatttagcaattaaccagtaaacctgcccccttcaaaagacgcatattg

SEQ ID NO: 956452 - DNA, 120 bp, Artificial Sequence
  ENSG00000243197_25 (sequence is synthesized)
gtacaaatgtttctaccaccttattaccatctagttttcaatggctctttgaaaatatattggctaactctaaatacaagactccagatgtaatctaatcagtacagaatacatttggat

SEQ ID NO: 956453 - DNA, 120 bp, Artificial Sequence
  ENSG00000243197_26 (sequence is synthesized)
ttttacatccgaccatctggaggctatatttctattaactcaagtataagatctctttgctttctgtcataaattgtgccaacgatcaatgcttgtttttacacaaactgcaattaagtt

SEQ ID NO: 956454 - DNA, 120 bp, Artificial Sequence
  ENSG00000273044_0 (sequence is synthesized)
ggaacaaggactcagaccccttcctagcccagagctctacccactctttgctggccttgggtcttgctcctcccagcagatttgggtgttccctccacagtgctccccaagggccttgca

SEQ ID NO: 956455 - DNA, 120 bp, Artificial Sequence
  ENSG00000273044_1 (sequence is synthesized)
cagaccgctgtgaaagcatgtaccagaatctgttgtcacaaaatacgcagggttttggagaccagggacctcgtgtcatgtctccggacctacggcttcttctgtaagcctggcccacag

SEQ ID NO: 956456 - DNA, 120 bp, Artificial Sequence
  ENSG00000273044_2 (sequence is synthesized)
caccaggaaatgttggaaaaaggcaggagaagagggaggggggcagaggaaagagggatggaggagcagcaggggatggcaggggcctccactgtgaggggggtcccccaagacagcctg

SEQ ID NO: 956457 - DNA, 120 bp, Artificial Sequence
  ENSG00000273044_3 (sequence is synthesized)
tcattacagccgagtcagaaggaactgtgacctggttgactgtgagcaggaggtgtctgaatacggctttgtaacaatcatggtaatatagagttcacaaatacactctgctttatccga

SEQ ID NO: 956458 - DNA, 120 bp, Artificial Sequence
  ENSG00000215177_0 (sequence is synthesized)
atggcctgcatgatgcttctccttgggctccttgcttatgggtcaggggtggattctcagtctgtggtgacccaggagccatcactctcagggtctcctggagggacggtcacactcacc

SEQ ID NO: 956459 - DNA, 120 bp, Artificial Sequence
  ENSG00000215177_1 (sequence is synthesized)
gggtccctggtcgcttctctggctccatccttgggaacaaagctgccctcaccatcacggggactcagtagatgatgactctgatcattactgtgtgctgtacatgggtagtggcaattc

SEQ ID NO: 956460 - DNA, 120 bp, Artificial Sequence
  ENSG00000243220_0 (sequence is synthesized)
ctagctctgtggaagtttgagtgactcattgcagagaggaattgatgaagtcaacagctgctggaaaaacttctttttccttaatagctgtatcaacatgtggttgctattattcaaagt

SEQ ID NO: 956461 - DNA, 120 bp, Artificial Sequence
  ENSG00000243220_1 (sequence is synthesized)
ggatgaaataattctgcaagccagtgggaacaggaagcttcatgaagaggagaaaggcttagggctcagaaaccgcacagagcaggaggatagatgaatgtaaggaacagagctttgagg

SEQ ID NO: 956462 - DNA, 120 bp, Artificial Sequence
  ENSG00000243220_2 (sequence is synthesized)
tgggaccatcaatatctattttgaaatcttgtataaatttgcaataatgtctgtaaagtatctgacaggagctcagaaatgacacaattctttaaatccactcacacccaacttttaaac

SEQ ID NO: 956463 - DNA, 120 bp, Artificial Sequence
  ENSG00000243220_3 (sequence is synthesized)
aaaaagtagcagtatatcctacacacgatttttaaattttactatttaagttaacatcatgctatgaacatatttccatgtcattaaatattctattccatccaatatttaaaagctaat

SEQ ID NO: 956464 - DNA, 120 bp, Artificial Sequence
  ENSG00000243220_4 (sequence is synthesized)
agaagtctgttaaatgcatatgccataatttatttaaccaattcggttgttttaatatttatgttgtttccaatatattatgctattgacaataaaatgatgaacatttatgatgatgaa

SEQ ID NO: 956465 - DNA, 120 bp, Artificial Sequence
  ENSG00000231566_0 (sequence is synthesized)
ggagttgcttgagtattgtctgccggggccggcgcttgcgtcagggtgctccctcgcgctttcgggggtagggaatgggtttgctgaacttactctgagggctgattctgcacatgccct

SEQ ID NO: 956466 - DNA, 120 bp, Artificial Sequence
  ENSG00000231566_1 (sequence is synthesized)
tggcgccttgtgcatgtttggacaagggtttaatggaggcacgtgggagcagtatcgatctctggcgggtccccaaagaccctcttgggatagtccagagcgtgttcggggttgagagcg

SEQ ID NO: 956467 - DNA, 120 bp, Artificial Sequence
  ENSG00000231566_2 (sequence is synthesized)
atttgctgcaattccgtaaaccaaatcatgctttcgaggcgttaaagtaaattactggtggcagtgtagaagccagaccgggagcttccagaagtggtttctgaaagagtcaaatgtaca

SEQ ID NO: 956468 - DNA, 120 bp, Artificial Sequence
  ENSG00000231566_3 (sequence is synthesized)
tgagtaagcaagcacaggaatctgaaaaaccacaggcccactaatttgcctgcttgactaaaataaggacgagttatgtgctgatgagagacatgtttgtaatgttattcgttgtgacac

SEQ ID NO: 956469 - DNA, 120 bp, Artificial Sequence
  ENSG00000231566_4 (sequence is synthesized)
agttcaaaagaatttgcctttgattctcactaaaatgtaaagttttgcatattaagatcctttttcaacaactgagcaactctttataatgaagggcagaagacgccaaagggaagaaaa

SEQ ID NO: 956470 - DNA, 120 bp, Artificial Sequence
  ENSG00000231566_5 (sequence is synthesized)
gggactggcagaacctgcgggcgaggtgggtggctcgccagccgggacgaagggaaatgaggaccaccgctccggggcgcgagtaggcgcgtggagtccgggggctcagccgccgcgcct

SEQ ID NO: 956471 - DNA, 120 bp, Artificial Sequence
  ENSG00000231566_6 (sequence is synthesized)
cttcctcctgcagctggagactgcaacagcggcgggtgcaccggcagcagcgacgaccctgcgcgcaggtggcagtgtagaagccagaccgggagcttccagaagtggtttctgaaagag

SEQ ID NO: 956472 - DNA, 120 bp, Artificial Sequence
  ENSG00000231566_7 (sequence is synthesized)
tctctgtcgcccaggctgtagtgtagtggcatgatctcgactcactgcaaccttcacctcgggttcaagcgattcccctgccccagcctcctgagtggctgagattacaggcacccacca

SEQ ID NO: 956473 - DNA, 87 bp, Artificial Sequence
  ENSG00000231566_8 (sequence is synthesized)
ggtttcaccatgttggtaaggctggtctccaactcctgacctcgggtgatcctcccgcctcggtgcgcctaccaccgctattggtac

SEQ ID NO: 956474 - DNA, 120 bp, Artificial Sequence
  ENSG00000231566_9 (sequence is synthesized)
cctaccaccgctattggtactttcacacggatgctaaagttattgtgctggccgtgttaagggtcaggcatcaaaatggccgctcaagagaatgaagctttctctttgtgcagatgcaac

SEQ ID NO: 956475 - DNA, 120 bp, Artificial Sequence
  ENSG00000231566_10 (sequence is synthesized)
gggtgggatggggtgcacaattatcacagtgctggttgtggtgttacctcgacattctgccttacagctgaggagggatttgtttcgtccctgctaatgaaggtgttaaataaacttgga

SEQ ID NO: 956476 - DNA, 120 bp, Artificial Sequence
  ENSG00000231566_11 (sequence is synthesized)
aataaacttggatgctgttattgaagcttaaaaaataaatggaagctgggtgcgatggctcaagcctggaatcccagcactttgagagaccgagatgggaggattgcttgagctcaggag

SEQ ID NO: 956477 - DNA, 120 bp, Artificial Sequence
  ENSG00000231566_12 (sequence is synthesized)
ctagacaacatggcaacaccctgtctctacaaaaaattacaaaaagtagccaggcgtggtgatgtgcacctgtagctatgtgtacctgtagtcccacacagtcgggaggctgaggtggga

SEQ ID NO: 956478 - DNA, 82 bp, Artificial Sequence
  ENSG00000231566_13 (sequence is synthesized)
tgtacctgtagtcccacacagtcgggaggctgaggtgggagcctcccttgagcctggcaggtcaaggctgtgagacagtgag

SEQ ID NO: 956479 - DNA, 120 bp, Artificial Sequence
  ENSG00000231566_14 (sequence is synthesized)
tagtactaacccatttgctcttatgttcaatattttgacacttatataaatttctatgaagtgaaatgtattttgaggtaacctccgaggagaagcagggtctaatctatttctgacaat

SEQ ID NO: 956480 - DNA, 120 bp, Artificial Sequence
  ENSG00000231566_15 (sequence is synthesized)
gtatttaaataaaaattctgcatgtcattatattacatgactttttactgttctaaaagagttgtttttccattgtgaccatgtggctttgcatttaaccagttgtttgatatctgcttt

SEQ ID NO: 956481 - DNA, 120 bp, Artificial Sequence
  ENSG00000231566_16 (sequence is synthesized)
tcaaaacacttttcctgaaactacataaaactgccaattgttctgaataatttcatttgagataatgttaacagagtcacctgcatgaaccaataacaatatcagcttaaaaattttttt

SEQ ID NO: 956482 - DNA, 70 bp, Artificial Sequence
  ENSG00000231560_0 (sequence is synthesized)
gctggctgggcgggggggctgaccccccatctccgtcccgggcgggcagaggcgcccctcacctcctgga

SEQ ID NO: 956483 - DNA, 120 bp, Artificial Sequence
  ENSG00000231560_1 (sequence is synthesized)
gcaatctcggcactttgggaggccaagggtctgacagtttgatttttaaaggccaaatctctccagactccaaagaactctgtagccaaacagcagcacatactaatcaggcctgcctgt

SEQ ID NO: 956484 - DNA, 120 bp, Artificial Sequence
  ENSG00000231560_2 (sequence is synthesized)
tgtagccaaacagcagcacatactaatcaggcctgcctgtccttagagcagcagcatagaagcctggagacatggacttccatcccatattcacattcaacagcaaaataaatccaaata

SEQ ID NO: 956485 - DNA, 120 bp, Artificial Sequence
  ENSG00000231560_3 (sequence is synthesized)
taaggcagtgctacaattcaaagactgtctgagatcagatgagattgggcatgttcagcgtgatacgggtagagatgttccctcactccactggcccacagccacatgcagaccaaccct

SEQ ID NO: 956486 - DNA, 120 bp, Artificial Sequence
  ENSG00000231560_4 (sequence is synthesized)
gaagaatacacccaagcggtctgcactcagatcaaaccctgatctcccacaactacatcaacacacaaacaaccaccagaatacaatctaactgctgcaacaataagcaagtcccaagag

SEQ ID NO: 956487 - DNA, 120 bp, Artificial Sequence
  ENSG00000231560_5 (sequence is synthesized)
agtccaaactgaaacagttgagttgctttctccctgtttgttgggctagttcaatctgcaaatggagattccttcggaatttctcaaattgagaaaagcagatcctgctgtctggaccca

SEQ ID NO: 956488 - DNA, 120 bp, Artificial Sequence
  ENSG00000231560_6 (sequence is synthesized)
caaatgacactcacttatccagacacatactcaattactaacaagccccaagagtgtctgaactggaacagtcagggtgcttcctctctccgtcagttggccttgctgaacttgccaatg

SEQ ID NO: 956489 - DNA, 120 bp, Artificial Sequence
  ENSG00000231560_7 (sequence is synthesized)
gaaattccttcagaatttctcaaattgagaggagccattcccactgtcggtatccacaaaagacactcacctatccacatgcagaagtcaaatttgaaaggctgttcttcctaggcaatc

SEQ ID NO: 956490 - DNA, 120 bp, Artificial Sequence
  ENSG00000231560_8 (sequence is synthesized)
agaaatgtggttggggctggcagcagcaatgctaaatagaaagactaaaacccacatcctgcctaaaacacataggctgctgcttagggttgcggaaattctcccaactggtgacagcca

SEQ ID NO: 956491 - DNA, 120 bp, Artificial Sequence
  ENSG00000231560_9 (sequence is synthesized)
agccaagagcaatgtcttcctgatgagggaaccaaaatctgttactgaaatgccagaggttcagcctaggtcccgttactcattgcacagaatgccaatcactgaggcaagtatttccag

SEQ ID NO: 956492 - DNA, 120 bp, Artificial Sequence
  ENSG00000231560_10 (sequence is synthesized)
gggagatgactttattcagttgctgcagctgagaagaactgcagatcagtctcaaattcatctccccaagtgactgaaattgggggtttacatagcagaggagggatgtagctacgtgca

SEQ ID NO: 956493 - DNA, 120 bp, Artificial Sequence
  ENSG00000231560_11 (sequence is synthesized)
caagggaatgctgccagacaaccaactcagcttcagaccatcttcagatcgtaacccaccagggactgtgggctttgccagaccacatttttggttactgcaactcaagttggcttctaa

SEQ ID NO: 956494 - DNA, 120 bp, Artificial Sequence
  ENSG00000231560_12 (sequence is synthesized)
atctcaaaaaatgtgacaatgatacagatttttttatctacttttgtctaaaacatttaaatactcattctgaagtaactcatctcaaaatccaatgctagaaaaatggaaataattaca

SEQ ID NO: 956495 - DNA, 120 bp, Artificial Sequence
  ENSG00000231560_13 (sequence is synthesized)
ggcagatgcaatgatttaaaggtttaaaagaagctgtccattctaaagagtcagaggaaacctttccttatgaaatggttaatgaaataaataggaaaaaaaaatccaacacaatcacga

SEQ ID NO: 956496 - DNA, 120 bp, Artificial Sequence
  ENSG00000231560_14 (sequence is synthesized)
ggttccagaaaacattgtatatttatttaaaaagtaattttgtatgaatgaaatatttcttaaggttctgcctttctttccttccactcaacaggaaacaaaattactggatttatggtc

SEQ ID NO: 956497 - DNA, 120 bp, Artificial Sequence
  ENSG00000231560_15 (sequence is synthesized)
aaggaaaatcactaacccacagccctcagatgcactcatgaaaatgggaagaatgcatacacagggatcagagaacagagaaacaggtgaatcttgtggttggaaagaaacgcacttttg

SEQ ID NO: 956498 - DNA, 120 bp, Artificial Sequence
  ENSG00000231560_16 (sequence is synthesized)
tatgtacacacagaattaactttacttttccactaagctctctctgagacttagaaatccctacatctgggtaggctggagtcaatcccaaggcttttatggttccttgaagtaaaaaga

SEQ ID NO: 956499 - DNA, 120 bp, Artificial Sequence
  ENSG00000231560_17 (sequence is synthesized)
gcagtctcatgtcagaaattaataggtccagtctagcacagtattgaaactccaaacttcaatttaaactctacttggaagcctgcagaagaggaggcaggcggttttgctgcctctttt

SEQ ID NO: 956500 - DNA, 120 bp, Artificial Sequence
  ENSG00000231560_18 (sequence is synthesized)
tttccctagcatcatcaaatcctctattcattggctgctgtttcttaaacatttcatgggaaagagaaatagaagcacagatatctgctgttaatggttctttctcttaccaagtgctgt

SEQ ID NO: 956501 - DNA, 120 bp, Artificial Sequence
  ENSG00000231560_19 (sequence is synthesized)
tgggggtttttcagaagtcacatcatatgactgaaacttatctcctgtctgatttctcctcaacttttgggattctacagattctcaccattaggatttcagtgtctggcagtcctctgg

SEQ ID NO: 956502 - DNA, 120 bp, Artificial Sequence
  ENSG00000231560_20 (sequence is synthesized)
gaaactactttttaaaaattatggtaaaatacacataacaaaatttttcatcttaaccatttttaagtgtaaatttcagtagtaagtacattacattgttttgcaatcaatctccagaac

SEQ ID NO: 956503 - DNA, 120 bp, Artificial Sequence
  ENSG00000231560_21 (sequence is synthesized)
tattttcatcttgcaaagctaaaactctgtatctgtcaaacaatgactccccatttcctctttcccccatcacttagccaccaccattctactttctgtttctatcagcttaagtcttct

SEQ ID NO: 956504 - DNA, 120 bp, Artificial Sequence
  ENSG00000231560_22 (sequence is synthesized)
aagtaactcatgtaagtgaaatcatacagtacttgtccttttgcgactggcttattccgcatagcataaagccttcaatgtttatttatgttgtagcttgtgtcagaatgtccttccttt

SEQ ID NO: 956505 - DNA, 120 bp, Artificial Sequence
  ENSG00000231560_23 (sequence is synthesized)
ttaaagctgaataatattccattgtatgtatataccacatttttttagtccacccatcgatggacaccagggttgctttaacctgttgacttgtgaataacgctgctatgaatatggctg

SEQ ID NO: 956506 - DNA, 120 bp, Artificial Sequence
  ENSG00000231560_24 (sequence is synthesized)
tataaatctcttggagataacctgctttaattattttggctatatatccagaagcaaaagtgccaggttataatttaatgtttaatttggcggggggaaccaccatattgttgtctgtag

SEQ ID NO: 956507 - DNA, 120 bp, Artificial Sequence
  ENSG00000231560_25 (sequence is synthesized)
tggttgcattattttacattgccatgaaaatttcactagggttgcaatttatccatatccctatagtatttgttattttctgggtttttttttttccacaggagccatcttaatggatgt

SEQ ID NO: 956508 - DNA, 120 bp, Artificial Sequence
  ENSG00000231560_26 (sequence is synthesized)
gaggtgatctcttaatatagttttgattttaatttctcaaatgattagtgatattgaatgtcttttcatatgtttgctggacatttgtttatgttttatgaagaagtatctattcaagtc

SEQ ID NO: 956509 - DNA, 120 bp, Artificial Sequence
  ENSG00000279949_0 (sequence is synthesized)
ctgatactgcaagcacttcagagtatgtataagcaatttcagctggttccgtcctgatatttacaaaactgcctggatcatacttacaaccatgcaatgatatatatttctattaagaaa

SEQ ID NO: 956510 - DNA, 120 bp, Artificial Sequence
  ENSG00000279949_1 (sequence is synthesized)
gcaacgatttgcttgaaagatgaaggaaaacaaactaagtatttatgtacaatgagtcctaagtgtacaccactatgttttccatcagcttttgattttctgtcactcctctttttcttt

SEQ ID NO: 956511 - DNA, 120 bp, Artificial Sequence
  ENSG00000279949_2 (sequence is synthesized)
agactgcattcttccttctcaaaactcatgttaaagatttctccatgcagagccacaggctattttggagtttgaaatggagcagttaaaactaggaggtcacacacgttgagattattc

SEQ ID NO: 956512 - DNA, 120 bp, Artificial Sequence
  ENSG00000279949_3 (sequence is synthesized)
cttcactgcatctcgcccggcttgtgtgcctgaggagacacgcatctcagagggcagaggggcagccgttgtctagtgaggttatttcacctactatataataaaatgtacaggacaata

SEQ ID NO: 956513 - DNA, 120 bp, Artificial Sequence
  ENSG00000205628_0 (sequence is synthesized)
gacagaagatggcggatgagcagcgtgcagggttttctccctgtggctcactctctcttactgtgctgggcggttgcttcctctcctgctgcccttgggagtcagactccaggttcttca

SEQ ID NO: 956514 - DNA, 120 bp, Artificial Sequence
  ENSG00000205628_1 (sequence is synthesized)
gcctgtggcccctggggctctcgggccttggaggactgactaggagcacacggtgggcctctctggtttgggggcctgggacgtggcggagccctgcagcttctgtgcggcctgttctgg

SEQ ID NO: 956515 - DNA, 120 bp, Artificial Sequence
  ENSG00000205628_2 (sequence is synthesized)
gcgtcgcgttgaaacgccagccagttccccaagatggacgtagaactactctaggaaattcctcaaacactgccaagtacttcatggctgaaagccaaatattcagtccccctgggatta

SEQ ID NO: 956516 - DNA, 120 bp, Artificial Sequence
  ENSG00000205628_3 (sequence is synthesized)
caggagtgttgaagaaatgttgtgacacatcagaacaccgcgaaatacatggacactttcaaatcatggaagactcaagagtccttgtttttgcccagtattataaactgagttacataa

SEQ ID NO: 956517 - DNA, 120 bp, Artificial Sequence
  ENSG00000205628_4 (sequence is synthesized)
aggcagagcaaatgctaaagcaaactgtccagaaggaaggacagcagtaagtggagagacgttattgcaaacaagcacctggcaacagctgtgttagttgcccaccaggtatttttgaaa

SEQ ID NO: 956518 - DNA, 120 bp, Artificial Sequence
  ENSG00000205628_5 (sequence is synthesized)
aaagtactctgtgaaaaacagaaactgcaagcaagacagataccaggattagggatcacggtgacttctaccatcgctggatactcccaaaagggttctcgagacagcagctgtgtctgc

SEQ ID NO: 956519 - DNA, 120 bp, Artificial Sequence
  ENSG00000205628_6 (sequence is synthesized)
gaacgcgagggagtcttgctaaaactgcagcattcgagaggttttcactcatgctggctcacacttgtcctctagcaattcatcaaaattaccacgtaagtgtttcaacagtttatggct

SEQ ID NO: 956520 - DNA, 120 bp, Artificial Sequence
  ENSG00000205628_7 (sequence is synthesized)
caggtggcctcagctgtgatgctccaaatttgcctgtttctccagatgcagggtagcagtttgctgtttctcctgagttctttgatggattcaagaaaagtcatgattttcagtttgttc

SEQ ID NO: 956521 - DNA, 120 bp, Artificial Sequence
  ENSG00000205628_8 (sequence is synthesized)
tgattttttcttgtgagggcaaagtaatgactaagctttaatgtgtttcagctaaaactacatgtattttaatagcaaaatgagatataattcacatgtcataaaagtcaccatttttgg

SEQ ID NO: 956522 - DNA, 120 bp, Artificial Sequence
  ENSG00000205628_9 (sequence is synthesized)
gtgcacaactcattggattttagtatattccagggttatgcaagaataaatattctctaattttggaacatatttatctactcagaaagaaactttgtgctcattaacagttacttaata

SEQ ID NO: 956523 - DNA, 120 bp, Artificial Sequence
  ENSG00000205628_10 (sequence is synthesized)
ttctctctcccctaacctatggtaactactagtcgacttgctatagattaggttactttggatatttcatatatgttgaatcataaaatatgtgccttggcttctttcacttaccgtaat

SEQ ID NO: 956524 - DNA, 120 bp, Artificial Sequence
  ENSG00000205628_11 (sequence is synthesized)
atttacaaaattcattcatcttacaaagtacttcattctatttttgattttatgggttaataatattctactgtctggctatatacatgtatgaataatgtggcaacattttgtccatac

SEQ ID NO: 956525 - DNA, 120 bp, Artificial Sequence
  ENSG00000205628_12 (sequence is synthesized)
actcatcatgtgattagtatttgctttgttgttgttgtgtgttttttatttttcagttattatgaataatgattatgaattcagttattatgaataactacaataaatagttatgcataa

SEQ ID NO: 956526 - DNA, 120 bp, Artificial Sequence
  ENSG00000205628_13 (sequence is synthesized)
gcgtcgcgttgaaacgccagccagttccccaagtaagctccctgcacacacgcctgatagcctgttggttccgtccttctgcgggattttcactaccactctctaactcacacacagcag

SEQ ID NO: 956527 - DNA, 120 bp, Artificial Sequence
  ENSG00000205628_14 (sequence is synthesized)
aaagagcatacgggagagatgaagcagtccactccaagaacattctcatcctacggattacgagtccccctgggattacaggagtgttgaagaaatgttgtgacacatcagaacaccgcg

SEQ ID NO: 956528 - DNA, 120 bp, Artificial Sequence
  ENSG00000205628_15 (sequence is synthesized)
caacagagaaaagagagggcaaagaaaaggaaaacaaagaagacgtgggatatgaaaggtgtatgccatgtgtggacatcaagaaatgtttcagctcgcacttctgccaccaattgagcc

SEQ ID NO: 956529 - DNA, 120 bp, Artificial Sequence
  ENSG00000205628_16 (sequence is synthesized)
tggaacctcactacttggagttggggggagggcagtgctcattcatcacctgtgaaaatagggattgagagttccctaactttgccatttttcctcaagcactggcattggtcttctgaa

SEQ ID NO: 956530 - DNA, 120 bp, Artificial Sequence
  ENSG00000205628_17 (sequence is synthesized)
tgtcaggctctgtataagtgagtcctcagctgagccacaggctctgcattcctggcagtccacacacttcatatcctttgtttatgctgctcattttggaattcaaacaggttggtgggg

SEQ ID NO: 956531 - DNA, 120 bp, Artificial Sequence
  ENSG00000205628_18 (sequence is synthesized)
cacatttcaacagataatgacacacactgactgctcatgagctattttatggtgtgagaatgttgtgatgttatgaaatgcggaggcattaaaacatggggacattttctagaagatcct

SEQ ID NO: 956532 - DNA, 120 bp, Artificial Sequence
  ENSG00000205628_19 (sequence is synthesized)
tagcagagagtacagaagactaaggtccaaatctctgaaatgatgttttccaaattattgcacagctatgtcaaagtaccttgatccagttaatgttaacaaataaaaaattatgaaatg

SEQ ID NO: 956533 - DNA, 120 bp, Artificial Sequence
  ENSG00000205628_20 (sequence is synthesized)
cagatgatattttaaattcttccagtttttttttagggaggagtattaaaacatgagtaaaaattaatttgtgggctcactgacaatggggtttaatttgcatttttatcctcattgatt

SEQ ID NO: 956534 - DNA, 120 bp, Artificial Sequence
  ENSG00000205628_21 (sequence is synthesized)
agcaccaagcccagaagaacttgtgttcattaagaacttgttgattgagcagctagaaaggggcttgtcttccataaggagatctctactcttgtgggttttactctctagcagagggac

SEQ ID NO: 956535 - DNA, 120 bp, Artificial Sequence
  ENSG00000205628_22 (sequence is synthesized)
gagaaggccaactgagatcttaaatgaagtggggatggtgggcctcacagagaggagatgacacacttgaagaaggtgaaggggcaagcacagatactctggggaatgtgcattcctgcc

SEQ ID NO: 956536 - DNA, 120 bp, Artificial Sequence
  ENSG00000205628_23 (sequence is synthesized)
aggaccatcagtgctaaagccgtaagtggaggtgtgcctggcacttgccaggaataatgaggaaggggaggtggcagaggagagctgagctgccaggagaatggcacaggacattggagg

SEQ ID NO: 956537 - DNA, 120 bp, Artificial Sequence
  ENSG00000205628_24 (sequence is synthesized)
gctgatgaggtccagatgacatgtggcttcacaaaccattgcaaggatatggcatctgctctgagtcaaatggaaatttattgcaggatttgaaaaaagagtgatggctgtgtccagtgg

SEQ ID NO: 956538 - DNA, 120 bp, Artificial Sequence
  ENSG00000205628_25 (sequence is synthesized)
aggccgagacaggcagatcacttgagcccaggagttttagaccagcctgtgcaacagggtgaaacctcgtttctaccaaaaatacaaaaatgcatgggcgtggtggcacatgcaaatagt

SEQ ID NO: 956539 - DNA, 120 bp, Artificial Sequence
  ENSG00000205628_26 (sequence is synthesized)
catgggcgtggtggcacatgcaaatagttccagctaatcaggatgctgaggtgggaggatcacttgagctctggcaagtggagcctgcagtgagctgagatcaccaccacactccagtct

SEQ ID NO: 956540 - DNA, 84 bp, Artificial Sequence
  ENSG00000205628_27 (sequence is synthesized)
gagcctgcagtgagctgagatcaccaccacactccagtctgggcaacagaatgagatcctgtctcaataaaaagaaaaaagcgt

SEQ ID NO: 956541 - DNA, 120 bp, Artificial Sequence
  ENSG00000205628_28 (sequence is synthesized)
cccagtgggagatgattgaattacgggagccagtctttcccataccgttgtcatggtagtgaataagcctcgagatctgatggtttgataaggagaaacttgtttcgcttggcatttatt

SEQ ID NO: 956542 - DNA, 120 bp, Artificial Sequence
  ENSG00000205628_29 (sequence is synthesized)
tggtttgataaggagaaacttgtttcgcttggcatttattctctctttgcctgctgccatgcatgtaagatgtgaattttgctccaccttgacttctgccatgattgtgaggcttcccca

SEQ ID NO: 956543 - DNA, 120 bp, Artificial Sequence
  ENSG00000205628_30 (sequence is synthesized)
tttcaactttaccaagaaagtactacattaattgcattagggaattgtgaattgcattaggaaaatgctcattcttctttcaatagccaatatctggatactatactctcttgaatttct

SEQ ID NO: 956544 - DNA, 120 bp, Artificial Sequence
  ENSG00000205628_31 (sequence is synthesized)
actctcttgaatttctaagatttgcatccaatattctataattagctttccagtttattgaatgatttaatttacatacaaatattttctaatatattccctgtaaaatagtttaaaaaa

SEQ ID NO: 956545 - DNA, 120 bp, Artificial Sequence
  ENSG00000205628_32 (sequence is synthesized)
ctccctagctgatacaatttcatttatttgcttactttcccagctggacattcagaaattttttactcatattgtcttcaattgcatatttgccagtttctagcttttattttatttttt

SEQ ID NO: 956546 - DNA, 120 bp, Artificial Sequence
  ENSG00000205628_33 (sequence is synthesized)
atatccattttgttctaggtgtggaaattgctaagtgtagagcttaataatatttcaccagaaagatatgtgtctaactccctcatgaagaaatagtatgttaccaacactcccaaattt

SEQ ID NO: 956547 - DNA, 120 bp, Artificial Sequence
  ENSG00000205628_34 (sequence is synthesized)
cctttgatgtcaaaaagcattatttttctcgagtctttttttgtgttggtatgatatataaacgaaatcatatacacatttattttttcatttagatactttccttcagtattatgattg

SEQ ID NO: 956548 - DNA, 120 bp, Artificial Sequence
  ENSG00000205628_35 (sequence is synthesized)
agacattaacctcagtttaagtatttatgtcattttcattgctagttcattgtaagaagcacaccttttatttatctattcccttaatacatattcctgtttccagtgttagattaatgc

SEQ ID NO: 956549 - DNA, 120 bp, Artificial Sequence
  ENSG00000205628_36 (sequence is synthesized)
aaataaggctatcgtgagcattcttttacatgtttttcagtgtacaaatatatgctgagagaggaattactgaatcacagaaagcagtatatgcagctataatagatattaccatatcca

SEQ ID NO: 956550 - DNA, 120 bp, Artificial Sequence
  ENSG00000205628_37 (sequence is synthesized)
ccaaacgtttagcatttcctgtttcattttattcactctgggggatgtatagagatttcacattacattataatttaatttctctaatgtctaatgatggggagcacctttttcatgttt

SEQ ID NO: 956551 - DNA, 120 bp, Artificial Sequence
  ENSG00000205628_38 (sequence is synthesized)
ttattgtcaatttggctatcttctttttctaaatgcatgttcaagtatttcatccatttttattggtcttctttttttactggtttaattgaattctttacatattatggatatgagctc

SEQ ID NO: 956552 - DNA, 120 bp, Artificial Sequence
  ENSG00000205628_39 (sequence is synthesized)
tttgtcaattttatatgtatgcttatattcactcctacttcactctgcagcttgctttttatttttatgcttttaataatgaacataatttctttattttaataaatatcattatttttc

SEQ ID NO: 956553 - DNA, 120 bp, Artificial Sequence
  ENSG00000205628_40 (sequence is synthesized)
atctgattgtataaattactatgacttctaatattatgtgagtatcttctccttaatattttcttcacaattccatatcacccttaccttattttggcacatggggctcattaaataata

SEQ ID NO: 956554 - DNA, 120 bp, Artificial Sequence
  ENSG00000205628_41 (sequence is synthesized)
gtgtcatattttattcattttggtacataaaagtgctattttcttaatgagatcatggacaaagtggaagataaatctaactatataactcaaactgtaaaacttttagaagacatagga

SEQ ID NO: 956555 - DNA, 120 bp, Artificial Sequence
  ENSG00000205628_42 (sequence is synthesized)
actcatcagtgccactttggattaaatgtttcttatgtgatgtcaaaactattatctttaaaataactgatatacaataggaatttattaaaattaaatccactttgcttcaaaatacat

SEQ ID NO: 956556 - DNA, 120 bp, Artificial Sequence
  ENSG00000205628_43 (sequence is synthesized)
ttgcttcaaaatacatctttaataaaatttaaaagacaagatacagactgagaaaatagtccagtattatatctgataaaagaattacatgaacaatatgtaaaatttattgatacacaa

SEQ ID NO: 956557 - DNA, 120 bp, Artificial Sequence
  ENSG00000205628_44 (sequence is synthesized)
aaatacatggacactttcaaatcatggaagactcaagaagaaactttaattagaaggaaacaggaatattcaacggactcccaagacaagaatatagatgtatatcagaagctgagcatt

SEQ ID NO: 956558 - DNA, 120 bp, Artificial Sequence
  ENSG00000205628_45 (sequence is synthesized)
gaagttgctactagagtctccccgagcccttattggattctcacttcaggagctgctttcattattttgcctctcagtttcaaaatagacaaagaactcaacactcaacaataagaaaat

SEQ ID NO: 956559 - DNA, 120 bp, Artificial Sequence
  ENSG00000205628_46 (sequence is synthesized)
gaacaacttggttgaaaaatgggccaaagaccttaacagacacctcaccaaagatgatagacaggtaggaaataaacatataaaaagatgctgcacgtcagatgtcatcagaaaagtgca

SEQ ID NO: 956560 - DNA, 120 bp, Artificial Sequence
  ENSG00000205628_47 (sequence is synthesized)
attaaaacaacaatgagacaccactatgcatctcctagaatgaccaaaacccagaacactgacaccaaatactcttgaggatgtggagcaattctcattgctgatgggaatgcaaaatgg

SEQ ID NO: 956561 - DNA, 120 bp, Artificial Sequence
  ENSG00000205628_48 (sequence is synthesized)
tacagtcttttggaagacagcttggaggtttcttataaagctaaacttggatttaccataccatctaccagcagtgctccttggtatttacccagtggagctgaaaatgtatgtccccac

SEQ ID NO: 956562 - DNA, 120 bp, Artificial Sequence
  ENSG00000205628_49 (sequence is synthesized)
agaaaaacaggcacgtggacgcttacagaagttttacacataatttccaagacttggaagcaaccaagatgtccttcagtcggtgaatggaagaataaactgtggaacaatcagaccatg

SEQ ID NO: 956563 - DNA, 120 bp, Artificial Sequence
  ENSG00000205628_50 (sequence is synthesized)
gaatattattcagtgctgaatagaaatgagctaagaaagccataaaaaaacatggaggaaaaaatgttcaacaccaagactgaaccctaatgtaacctgtggactttggatgataatgac

SEQ ID NO: 956564 - DNA, 120 bp, Artificial Sequence
  ENSG00000205628_51 (sequence is synthesized)
gcatcaatgcaagtcataaatttggaaaaatgtacctctcctgggaaggagttgataatgaggtcaggagggcatctttctcggctcttcactgtgagaaccttgtgggattcctgaaga

SEQ ID NO: 956565 - DNA, 120 bp, Artificial Sequence
  ENSG00000205628_52 (sequence is synthesized)
gctctatgctccaactttatgacattctgaaatcggcgaaactatggaaaaagtaaaaatattagtgatgccaggggttaaaggaagagagaaagggacaggcaagagaacagaggattt

SEQ ID NO: 956566 - DNA, 120 bp, Artificial Sequence
  ENSG00000205628_53 (sequence is synthesized)
ttagggcagtgcaaatactctgtataatacaataatggtgggtacacaaccttatacctttgtccaaacccacagaatgttcaacaccaagactgaaccctaatgtaacctgtggacttt

SEQ ID NO: 956567 - DNA, 120 bp, Artificial Sequence
  ENSG00000205628_54 (sequence is synthesized)
gtactttctgcccagttttgctgtgaacctaaaattacactaaaagtgggcaaaggacgtgaacagacaattctcaaatgaagacatacatgcagccaacaaatataaaataaagcccaa

SEQ ID NO: 956568 - DNA, 120 bp, Artificial Sequence
  ENSG00000205628_55 (sequence is synthesized)
tgtcactgatcattagaatattgcatatcaaaaccacaatgagataccaccagatgattattaaaaagtcaaaaaataacagatactggcgaggttgtcaagaaaaaggaatgcttttat

SEQ ID NO: 956569 - DNA, 120 bp, Artificial Sequence
  ENSG00000205628_56 (sequence is synthesized)
gcgaggttgtcaagaaaaaggaatgcttttatacttttggtggaagttcaaccactgtggaagatggtgtagtgattccgcaaagactagaggcagaaataccatttgacccaacaatcc

SEQ ID NO: 956570 - DNA, 90 bp, Artificial Sequence
  ENSG00000205628_57 (sequence is synthesized)
atatataccatgagtatgtcctttgcagtgacatgactggagctggaggccattattcttagcaaactaacgcagcaacagaaaaacaaa

SEQ ID NO: 956571 - DNA, 120 bp, Artificial Sequence
  ENSG00000205628_58 (sequence is synthesized)
attgtttcggggctccctatgaagctgtttgtcaggccgagtctgattactacgggcgtaacccccggatgcactggagcactggtgcagtgatgggtcaggagggcatctttctcggct

SEQ ID NO: 956572 - DNA, 120 bp, Artificial Sequence
  ENSG00000205628_59 (sequence is synthesized)
cagcagcatgaaaacaaactaatacaagaatgatataatttggatttacgtttgaaaatacttgagactaatctgtgtgtggatagaggtaggaaaggggaaagaaatggagatccctag

SEQ ID NO: 956573 - DNA, 120 bp, Artificial Sequence
  ENSG00000250899_0 (sequence is synthesized)
acttagatatgcagctgaaggggttcctgggtttatttctcctgagaactggcatgggctctgagttttgccattcctggcttcggtcctagcattctaagctgcctgaccttgggcatt

SEQ ID NO: 956574 - DNA, 120 bp, Artificial Sequence
  ENSG00000250899_1 (sequence is synthesized)
tgtcaacctgtctgaaccttagtatcctttcctctctgtagagtgggaagagatggagtctgtgaagcgcctggtgcaagctgtactaatacacctaacaatgagctcctccctccctgc

SEQ ID NO: 956575 - DNA, 120 bp, Artificial Sequence
  ENSG00000250899_2 (sequence is synthesized)
ctccttgcctccctgcctccctccctcccatggggaggccagaatctggctgcttgctgccacctagtggctctttggggtcatcttccctcataggaaccacagatccagtagcctaga

SEQ ID NO: 956576 - DNA, 120 bp, Artificial Sequence
  ENSG00000250899_3 (sequence is synthesized)
gcagaaagggaaggaagattcaacctaggggtgtttatgtttaccgtgtgtctggcactcgtggagatagtgcatgggactacataagtaagacagcatcgaagaggtgtcttggagtgt

SEQ ID NO: 956577 - DNA, 120 bp, Artificial Sequence
  ENSG00000250899_4 (sequence is synthesized)
ggttaggagcgagggctctggagtcagacaagctacagactagctgagtgaccttggggcaagttatttcatttcactgtgcctcagtttccccatctgtaaaatttgtataacgataac

SEQ ID NO: 956578 - DNA, 120 bp, Artificial Sequence
  ENSG00000250899_5 (sequence is synthesized)
ctacctcgcgtatctacagtgcctagcatagtgccccacataaatgtgttcactaaatgtacgtcgttattaatcataggagcttgcagtctcactagggccgactggaaaactattaag

SEQ ID NO: 956579 - DNA, 120 bp, Artificial Sequence
  ENSG00000250899_6 (sequence is synthesized)
tgatcctcaaagccacaggcgctcagagactggagagatcaaggtgcagaagactcagggaagggtagtcttgagggcagctgcccttaaagggtgggcagcatttagtgaagcagatgg

SEQ ID NO: 956580 - DNA, 120 bp, Artificial Sequence
  ENSG00000250899_7 (sequence is synthesized)
agggaagttgaccggcatcccagatgtggggaagaggccagcagcctagtctcctccacggcccagcccccactgtcttaccaaagaacagctttaaccaaacccctctgggcatcagga

SEQ ID NO: 956581 - DNA, 120 bp, Artificial Sequence
  ENSG00000250899_8 (sequence is synthesized)
ccaccgctacacctcttgccaggctgcagagctatgcagtctggaggcccagctctcgtcagaagctggggcatgggctctaggggaacctggggtcggatgagcccctgagcaggtggc

SEQ ID NO: 956582 - DNA, 120 bp, Artificial Sequence
  ENSG00000250899_9 (sequence is synthesized)
aggtgcctacatgtcccagtgtgggttcgtgtttgtgtaaggctctcctgcccccacccccaggcaccagcacagcctttgccttcactctctcccctcccctgtccctgggggattgaa

SEQ ID NO: 956583 - DNA, 120 bp, Artificial Sequence
  ENSG00000250899_10 (sequence is synthesized)
taagggaagctggggttggccgtccttctagcttgattggcagcaccagcgctgtgacggaaggatgtgttgtgccagcagcctcttggccgcaggacaaatgcacatttaaagagataa

SEQ ID NO: 956584 - DNA, 120 bp, Artificial Sequence
  ENSG00000250899_11 (sequence is synthesized)
cctttttgtgtcctggctgggaaagaggtcagtgcagatgtttttgggtccaggtgttggctgtgagttttcctttcctctatgaactgacctcagcagcctagtggacagtcacctcct

SEQ ID NO: 956585 - DNA, 120 bp, Artificial Sequence
  ENSG00000250899_12 (sequence is synthesized)
tacaggtgtaaaatccaagccagtcaaccatagcaggtggcagacttagctgccttccctgtggtgtggtgcagaccatgacccttgaggcaaatgggtgagctggccccacctcgcctg

SEQ ID NO: 956586 - DNA, 120 bp, Artificial Sequence
  ENSG00000250899_13 (sequence is synthesized)
cagcctcctctgaggctcccctgctgcctccccactagccgccctgaatcacctacttcccagcacccccagcccgtggttctcatcccgtcttccatctgtgatctggcactcattctt

SEQ ID NO: 956587 - DNA, 120 bp, Artificial Sequence
  ENSG00000250899_14 (sequence is synthesized)
gaagacagtcatgcctgcccttgtgtgtcaaaagcattgcatttatgccctgttagaacccctgtcacaagcatggtgcctgaacacaggtgcctctgtggtctcttctcatcctcaccc

SEQ ID NO: 956588 - DNA, 120 bp, Artificial Sequence
  ENSG00000250899_15 (sequence is synthesized)
aatgggtactatgctagccccattttacagatgaggcaaacgtggcacggagagctccactaacttgcctggatgattcatgcatccatccattcacttagcaaatacttatttaacttc

SEQ ID NO: 956589 - DNA, 120 bp, Artificial Sequence
  ENSG00000250899_16 (sequence is synthesized)
tgctttgtgctagctagtggggatgtggcagtggggatgtggcagtggggatgtggcagtggggatgtggcagtgggaatgtggcagtggggatgtggcagtgaggaagacgacagacag

SEQ ID NO: 956590 - DNA, 120 bp, Artificial Sequence
  ENSG00000250899_17 (sequence is synthesized)
gctccttgggaagcagagtaagcaagtgaggagacaggcgggcgtggtgaggctgcgcaggcgctgagatcgagttgctgggggaggcctctctgaggtggtggggcttgagttgattct

SEQ ID NO: 956591 - DNA, 120 bp, Artificial Sequence
  ENSG00000250899_18 (sequence is synthesized)
gaaggacaagaagagccagccctgggggtctgggggaatggtattccaagtggagggaacagcaggtgctgggggcagggaggtgacagatgtgtcccaggtacagagaacagagtgaac

SEQ ID NO: 956592 - DNA, 120 bp, Artificial Sequence
  ENSG00000250899_19 (sequence is synthesized)
aggagagaggagggggccagggcattccaggtggggaaaggcagcaggtggcccggtggtaccacctcttttggcgagggctttggaccttacccggtgtgatgggaagtcctggaagtg

SEQ ID NO: 956593 - DNA, 120 bp, Artificial Sequence
  ENSG00000250899_20 (sequence is synthesized)
tgttaagcaggggagtctttttgatcagattttctagaaaacgacagtgggctgctgtggacctcagagaggcatgtgtgatagtgtgtttcgggctcttcccacgaaactcggctctgc

SEQ ID NO: 956594 - DNA, 120 bp, Artificial Sequence
  ENSG00000250899_21 (sequence is synthesized)
acagtgagacctcatttcctggttctgtttgatgagtgagcgaatgcacatggcaggcggtcatgtcccttgggcctgtgaggtgaggaagggtccctgagccctgtggggatagagact

SEQ ID NO: 956595 - DNA, 120 bp, Artificial Sequence
  ENSG00000250899_22 (sequence is synthesized)
cttccaccattctgacatgatccgagttagcaggcagcactgtccagatggaaatggggatgggagacagaccatctctctcagcgggtccagccatgagccagcagactgtttcccatt

SEQ ID NO: 956596 - DNA, 120 bp, Artificial Sequence
  ENSG00000250899_23 (sequence is synthesized)
ggcccccatctttcagagtgggatgatctttctaacaaagaaacccacacaggaatttggtgtgtgtgtgcgtgtgtgtattacctttcaggatggaagccggtggggtgtggagcgagg

SEQ ID NO: 956597 - DNA, 120 bp, Artificial Sequence
  ENSG00000250899_24 (sequence is synthesized)
ggctggcatggttggcctcgcccagctcctgtaccctgtgtgtgcctagagcatgcacctgctccctctgctgggctgagactcagaggacactgggcaggtggtggggggtaggagggt

SEQ ID NO: 956598 - DNA, 120 bp, Artificial Sequence
  ENSG00000250899_25 (sequence is synthesized)
cgtggctgtgttgggtggggccacatcaggtgtgtggcacagagggggagggggagggggagtggcagtgtgttccacccagcagtccctgtgtttgacctcttcgtacactctctgttg

SEQ ID NO: 956599 - DNA, 120 bp, Artificial Sequence
  ENSG00000250899_26 (sequence is synthesized)
gacctcttcgtacactctctgttgtattagctctcagaatgaaaacgagatacttttccccaatctatgtacgttgttcttaagaatgtacacttggccaggtgcagtggctcacgcctg

SEQ ID NO: 956600 - DNA, 120 bp, Artificial Sequence
  ENSG00000273951_0 (sequence is synthesized)
agagaagggcaaaagctgaacccagcatgtggcagattgacatttgtccctatctttaacaatcagctagctgtgtcttttctctttaggttcttatatagtaattccttacccatatgg

SEQ ID NO: 956601 - DNA, 120 bp, Artificial Sequence
  ENSG00000273951_1 (sequence is synthesized)
gggattcgatttctaagtacccttggttggtaaaaatgaaagtctcataaaaagattaagattggagttaggtaggagaaaaccataaaaatgacatcaaaacttctttttaatatttat

SEQ ID NO: 956602 - DNA, 120 bp, Artificial Sequence
  ENSG00000273951_2 (sequence is synthesized)
gtatttatcacgtacaatatgttttgaaatatgtatacatggtggaatggctaaatagagctaattagcacatgctttttgtgagaacattcaaaatccactctcagcaatcttcagaaa

SEQ ID NO: 956603 - DNA, 120 bp, Artificial Sequence
  ENSG00000273951_3 (sequence is synthesized)
tactgtacattgttattaactgtagtcaccatgttgttcagtagatctcttgaacttattccacttgtctaactaaaattttgtatcctttgaacaatacctccctaccccgccccaccc

SEQ ID NO: 956604 - DNA, 120 bp, Artificial Sequence
  ENSG00000273951_4 (sequence is synthesized)
cccagtccctggtaaccactactctaatctctgctctatgagatgtctgtattttaaaacacagtaaataaacgttctggaaagcatctgtttgcaaaataaagcatgttcatcattgtc

SEQ ID NO: 956605 - DNA, 120 bp, Artificial Sequence
  ENSG00000273958_0 (sequence is synthesized)
ctctaatcggaaggtacggcccacttctgggccgtggagaacgaagccactgggaccgtccggggagtggagtaagctcctccgaagtctttctggagagactcggcctgggcgggggaa

SEQ ID NO: 956606 - DNA, 120 bp, Artificial Sequence
  ENSG00000273958_1 (sequence is synthesized)
gtcccccccaacccccttccccgcgtccaagaccactgatacctgcaaggaaagccggaaattgtatgtgaatcacctaaatgaactccagttgccagctgatttgagccgctaaattcc

SEQ ID NO: 956607 - DNA, 120 bp, Artificial Sequence
  ENSG00000273958_2 (sequence is synthesized)
caggctcttccatatctctccagagaacccatctacaagtaggaaaagctatcgttttcataccctaaaaatgaaacactgtggtaattctgacagaaaataaagacctctgaaggtgaa

SEQ ID NO: 956608 - DNA, 120 bp, Artificial Sequence
  ENSG00000248165_0 (sequence is synthesized)
tgcatagaaatggttctggctcctgggaggagaacgaattggaggtcaaggacatctaaatgagaatgaagttggttgctcccttgagtgtaccaggctggatgtactgaggcagagttt

SEQ ID NO: 956609 - DNA, 120 bp, Artificial Sequence
  ENSG00000248165_1 (sequence is synthesized)
ggatctctgaagtctccatctggctttgtgggtctttagtgctgggattatgcagtgacaccccaaatatacacatgcttcatcggaggcagagtcacctctgctgcatggctttatttt

SEQ ID NO: 956610 - DNA, 120 bp, Artificial Sequence
  ENSG00000248165_2 (sequence is synthesized)
tcctacttcttggccttggtagtctactgtactccactttaattccttccctatatttcttctgccattttatcacagcctgattctgttgctgggtcctctgtgaagtcttttgtaata

SEQ ID NO: 956611 - DNA, 120 bp, Artificial Sequence
  ENSG00000248165_3 (sequence is synthesized)
attacacctacatcaacctttctcttttgtaaacttctattgtctgttccttagacttttatttatattttttgaggtataattgatgtataataaagtacctatttaaagtgtacaaaa

SEQ ID NO: 956612 - DNA, 75 bp, Artificial Sequence
  ENSG00000248161_0 (sequence is synthesized)
ctttctgagaacctgtgctttaatgagtaaactcacacagctgcaacaaatgctgccacctcctggcatctttta

SEQ ID NO: 956613 - DNA, 120 bp, Artificial Sequence
  ENSG00000248161_1 (sequence is synthesized)
ttctcctgcctcagcctcccaaatagctgtgattacagggaacccgttgttgctcagacacccgatgtggaaatttttcttctccctcagttcaaatgagataaagatcctcctctcctc

SEQ ID NO: 956614 - DNA, 120 bp, Artificial Sequence
  ENSG00000248161_2 (sequence is synthesized)
agaggatatggatagaaggcacatgttcaacttctggcttctgtccttgaaaagtgtgatgattccatcctttgctgtcttccttcccgctgactggaatgtggacttggtagtgagcta

SEQ ID NO: 956615 - DNA, 120 bp, Artificial Sequence
  ENSG00000248161_3 (sequence is synthesized)
ccttggactatgtggatgaagacaaagataaaaggaaccaaggactctgatgattctgtagagaagaggaaccgtagctgctcaaacgttcatgtgaaagaagaataaactatcagattt

SEQ ID NO: 956616 - DNA, 120 bp, Artificial Sequence
  ENSG00000248161_4 (sequence is synthesized)
tgaagaaactgctctcataagctaaggttccttatgattctgcaaggaagagaagactaaagcaaatcactgtctgaaaacataacagctggctaaagctggagtgcagtggcatgatct

SEQ ID NO: 956617 - DNA, 120 bp, Artificial Sequence; identical to SEQ ID NO: 922771
  ENSG00000129845_0 (sequence is synthesized)

SEQ ID NO: 956618 - DNA, 120 bp, Artificial Sequence; identical to SEQ ID NO: 922772
  ENSG00000129845_1 (sequence is synthesized)

SEQ ID NO: 956619 - DNA, 120 bp, Artificial Sequence; identical to SEQ ID NO: 922773
  ENSG00000129845_2 (sequence is synthesized)

SEQ ID NO: 956620 - DNA, 120 bp, Artificial Sequence; identical to SEQ ID NO: 922774
  ENSG00000129845_3 (sequence is synthesized)

SEQ ID NO: 956621 - DNA, 120 bp, Artificial Sequence; identical to SEQ ID NO: 922775
  ENSG00000129845_4 (sequence is synthesized)

SEQ ID NO: 956622 - DNA, 120 bp, Artificial Sequence; identical to SEQ ID NO: 922776
  ENSG00000129845_5 (sequence is synthesized)

SEQ ID NO: 956623 - DNA, 120 bp, Artificial Sequence; identical to SEQ ID NO: 922777
  ENSG00000129845_6 (sequence is synthesized)

SEQ ID NO: 956624 - DNA, 120 bp, Artificial Sequence
  ENSG00000250891_0 (sequence is synthesized)
cttctgataaccttcctatgactaagtcttctctggttgagattcctggggaggacactcatgacaattgtggtttttggaggatctatctttaggcagctaaaaggaagttcagagaaa

SEQ ID NO: 956625 - DNA, 120 bp, Artificial Sequence
  ENSG00000250891_1 (sequence is synthesized)
gccccttcctatacttcgcaggagaaaaaagagttttgagtttctcacgcctcaggtttttgaaattccagcaaaggacaatctaactggctgaatgagaggagcgggaagaagaaaggg

SEQ ID NO: 956626 - DNA, 120 bp, Artificial Sequence
  ENSG00000250891_2 (sequence is synthesized)
ccaaaagatgacagaaaattgccctttcagatgttctaaaatggccaaaatagcagtgactcctattttgtaacttggtgattcttaatacagcttccatttaatggtctaagattagga

SEQ ID NO: 956627 - DNA, 120 bp, Artificial Sequence
  ENSG00000250891_3 (sequence is synthesized)
gaccacaagtccctggagcaacaggagcaaatgtaggaagatgaaaggaaacgacacagcacttgagtatttttttcccctaaagtgtcagcttgcaaagatggagatcaggcagaattc

SEQ ID NO: 956628 - DNA, 120 bp, Artificial Sequence
  ENSG00000250891_4 (sequence is synthesized)
aaaggaatgatggaattaagaagtgctacagtcagctcacataatgaagataaaatgataattagccttgtgctaatttgaattactgaactatatctttgttgcactccaaaatattct

SEQ ID NO: 956629 - DNA, 120 bp, Artificial Sequence
  ENSG00000250891_5 (sequence is synthesized)
agcaatagatattgaatggtttaatctgttgagattttgtcattttaagaaactgagggtaatggcttttttttttttcaaaatgaaaataaactgacataattttacatgtaaacattt

SEQ ID NO: 956630 - DNA, 120 bp, Artificial Sequence
  ENSG00000250891_6 (sequence is synthesized)
cagcctgtgtagagcccaagcctcaggcatggccccaagtaaaatccagtagaaatgatcatcaaacttagttcttatgcaacctgagtatattttgttctaagtaagtttagtggagaa

SEQ ID NO: 956631 - DNA, 120 bp, Artificial Sequence
  ENSG00000250891_7 (sequence is synthesized)
ttttgttctaagtaagtttagtggagaataatattattattatgtgtacatgaagatgaactgacataaaaattaccatcttaaactttgataatttatggtctatcttaaatattgtta

SEQ ID NO: 956632 - DNA, 120 bp, Artificial Sequence
  ENSG00000250891_8 (sequence is synthesized)
ttataaaacacactatttactttatttcagtgataactgttacaggatctgatgagacacacattttctttttacattaagttttaattcatcccacagtgactaataaccaattcaaaa

SEQ ID NO: 956633 - DNA, 120 bp, Artificial Sequence
  ENSG00000250891_9 (sequence is synthesized)
atcacttttcctttcatgttttttctacatgctattatctgtatgaaatgaagaccaagaaaggatgggaagaaggagaagaaaaattttgatttatctcagaaactatactccgaagtg

SEQ ID NO: 956634 - DNA, 120 bp, Artificial Sequence
  ENSG00000250891_10 (sequence is synthesized)
agagtcctggttgcaggtgcaactgaaggactatggctatggtagctgcccaggaagactggccatccgattcatgcttgtgcagtccttggacttttagatctaccagttatcttcttt

SEQ ID NO: 956635 - DNA, 120 bp, Artificial Sequence
  ENSG00000250891_11 (sequence is synthesized)
agtctaggagccatcatgaggaaagagttggagtggatggttttaatgcagatggtctcaatatgatggatcatcacattttggagttctcagtcctgtgtacaaagtccaactatctga

SEQ ID NO: 956636 - DNA, 120 bp, Artificial Sequence
  ENSG00000250891_12 (sequence is synthesized)
ggccaccatgcacttaggatgtccaggccacctggagaggctaccagatatgtgtatgaagaagttgtcttgaaagtggatcttccagcccatgttattctagctacagctgtttgagtc

SEQ ID NO: 956637 - DNA, 120 bp, Artificial Sequence
  ENSG00000250891_13 (sequence is synthesized)
tccttgtacaagccccagacatcatggaatggagaagagctgagccacggtgtcctctccaaattctcaatccacaaaactcatgaaaataataaaatgattgtgtctttgtgctactaa

SEQ ID NO: 956638 - DNA, 120 bp, Artificial Sequence
  ENSG00000250891_14 (sequence is synthesized)
gggactcctttactactgcttttcaaagaggcctttttttctctcttctccttttcctgcaaagagggttatatccagtgctcaaggacatgggattatcagcctaaggcatgagtacat

SEQ ID NO: 956639 - DNA, 120 bp, Artificial Sequence
  ENSG00000250891_15 (sequence is synthesized)
gctgtggaaacagaaatatgtatgaagggatgtatgaaaccacagaataaatggaatccacattcttgaagtagctacaactctacttgaggtcccaaggcacgtagatagtacctatac

SEQ ID NO: 956640 - DNA, 120 bp, Artificial Sequence
  ENSG00000250891_16 (sequence is synthesized)
gaagtgctgtgaccacaaaactgaaaattcccattctgtgtccttgccaataaagaatgtccatcagagcacgcccagtatcctagctccttatccagactgtgcttctcaatgtgacaa

SEQ ID NO: 956641 - DNA, 120 bp, Artificial Sequence
  ENSG00000250891_17 (sequence is synthesized)
gaagcaaatttgactctgaatccctgatgtgtaccctcaggatccaggagcagaaaacgtctttcttcccttgcctgtttatttttaaattccttttataaaatcaaaatttgcaacaac

SEQ ID NO: 956642 - DNA, 120 bp, Artificial Sequence
  ENSG00000250891_18 (sequence is synthesized)
gaatgccatccttctggaacaccctgagaagtccagtttttcagactccttcctgctgaggactcaacctattcttcaaatgatgggtttttggattgagaactgcctgagaactgcaat

SEQ ID NO: 956643 - DNA, 120 bp, Artificial Sequence
  ENSG00000250891_19 (sequence is synthesized)
atgtgccgggatcttgattttctatctgggacaaaagactgagactgggcctcattcttctctttgttcattcttgatttctttggattatatattatattaaacaacattatcattggc

SEQ ID NO: 956644 - DNA, 120 bp, Artificial Sequence
  ENSG00000250891_20 (sequence is synthesized)
ccctgcctgttattctgaccttgttacttgttgaactttacttctagcaattaaatgctgccacatttcctttgctgttcaaggatcacatcatcttgattgctgttgagcctgctaata

SEQ ID NO: 956645 - DNA, 120 bp, Artificial Sequence
  ENSG00000250891_21 (sequence is synthesized)
gcaggctaatatttttgaatgtcatcagcccagactgtagaggacagccactatgagattttcaatgatactgttgcctccttcatcagcttattccattttggtaaatggtgggtcctt

SEQ ID NO: 956646 - DNA, 120 bp, Artificial Sequence
  ENSG00000250891_22 (sequence is synthesized)
tagatcttttcaaggaatatagttggaatgtaggtcttttggtcttaggtagttggtctattctaacatgctcctatcaatgagtcttttgatctctttctctatggcctgtcagaacaa

SEQ ID NO: 956647 - DNA, 120 bp, Artificial Sequence
  ENSG00000250891_23 (sequence is synthesized)
ttcagacatctttatgttttttcaaatttctgagtcgtcctaatagcacatcagaactgtcctgcagggttttgtcaggtattaaattaaataaaataatttccctgaaattgacaaaaa

SEQ ID NO: 956648 - DNA, 120 bp, Artificial Sequence
  ENSG00000250891_24 (sequence is synthesized)
ccttcagtactggcctgcgtagcttacaacagttaccctgtctaagaaggagattgattccagaacccagaataaagcagagaatgcagatggtggtcacatgggttcaggtaaggagta

SEQ ID NO: 956649 - DNA, 120 bp, Artificial Sequence
  ENSG00000250891_25 (sequence is synthesized)
aggaaagtcactggcccttctccaagtgctgtgcaggtgcaaaagttatttaattttctgtttctctcttgaatgaatatgctacctatttggtggtataacacgtaaactcattcatat

SEQ ID NO: 956650 - DNA, 120 bp, Artificial Sequence
  ENSG00000250891_26 (sequence is synthesized)
taaatgtcaatacatgctttaatgttttaatcaataaatgtactaaataatttaaatttacaagggattttggaaacagatccaactttaagcatggcaggaaattgatatttggacaag

SEQ ID NO: 956651 - DNA, 120 bp, Artificial Sequence
  ENSG00000250891_27 (sequence is synthesized)
gaatgttagcacattcttagatcatactcagatttaaggtaagactactctatttttcaaaccaatctaggtatataaaaccaaatctagttagaatgagaatactaaattaaacataag

SEQ ID NO: 956652 - DNA, 120 bp, Artificial Sequence
  ENSG00000250891_28 (sequence is synthesized)
tttgttattcagatattccatgtagaactgtgggatgaagtgcaatcagctgtgactggttggaataaggacctgccttatcccatggagagttagagaatctgttccaacaaggacaga

SEQ ID NO: 956653 - DNA, 120 bp, Artificial Sequence
  ENSG00000250891_29 (sequence is synthesized)
attcttcagaatccagggcagagtagagcacaagtgtctggggattcctcgcgaaagtcctggggttcactgtgtttgactgacctgggtcacatgcttaacagctacacctcttagagg

SEQ ID NO: 956654 - DNA, 120 bp, Artificial Sequence
  ENSG00000250891_30 (sequence is synthesized)
agccacgtctcccgatgcatctggattccaaatggaaattagcaggtttgaaaaggaaaaagagatgtccccagagtgtccagagcggaaggtgagggaatatcaggcagagggaattat

SEQ ID NO: 956655 - DNA, 120 bp, Artificial Sequence
  ENSG00000250891_31 (sequence is synthesized)
tttagaaaagtatcagggcaagattagaattttggttttgtttatttttctctttggtgcctataataataattgacagatagtgctcaatatatttttattaagcaaatgaatgaatga

SEQ ID NO: 956656 - DNA, 120 bp, Artificial Sequence
  ENSG00000250891_32 (sequence is synthesized)
aagaaaatgaatgaatgaaaccgtatttcagtttggctgcagcaaacgatgtacataaaggaaaatgtaaagtagtcagtgtattgaaagcaggcacacagaaaccaactttaataaact

SEQ ID NO: 956657 - DNA, 120 bp, Artificial Sequence
  ENSG00000250891_33 (sequence is synthesized)
gcataaggcaatgatcatgtttaactattcttgatgcagtttcgatactgaccagctattagccagctgctcctcaatgccatgcttgctcctggatgactttttctactgctgtagcag

SEQ ID NO: 956658 - DNA, 120 bp, Artificial Sequence
  ENSG00000250891_34 (sequence is synthesized)
tgaatgtgagaataggcacatcacttttgaccacagcctaagccagctataaataggaatgtgtacgccttctgtaaaaatagtcatacactgcattccaaaacaaaacaaaaaatgaaa

SEQ ID NO: 956659 - DNA, 120 bp, Artificial Sequence
  ENSG00000250891_35 (sequence is synthesized)
agcaagccatgagtgcctgttgaagctggaaaagcaagattgatgttgaggcttgattgaaggagtgcaaggtcactcacagaagaagtcatggtgcaagagtacatctcaatcctgccc

SEQ ID NO: 956660 - DNA, 120 bp, Artificial Sequence
  ENSG00000250891_36 (sequence is synthesized)
tagcctggaaacagcatgctctgctgcatttgcatgcccaaggcactgcttgtcctaagccccatcctagaaactctctatagctttatttcccttaagaaggtagaaaaacatcaacaa

SEQ ID NO: 956661 - DNA, 120 bp, Artificial Sequence
  ENSG00000250891_37 (sequence is synthesized)
cctatccgtactagctgaatggcctctaggcctattgggcaagtacacccagatgagcatcactcttaagtggctgcttcaggtcaaggtcttttgtgttggggcagctgcaaactggcc

SEQ ID NO: 956662 - DNA, 120 bp, Artificial Sequence
  ENSG00000250891_38 (sequence is synthesized)
tctttggctatcccaagaccctctaagtccaaggagctttcaacctctagtgatgttcaatctctgtaaagctgtgtaatgggggataaacattaaagttgtttcacatttaaaaaaaaa

SEQ ID NO: 956663 - DNA, 120 bp, Artificial Sequence
  ENSG00000250891_39 (sequence is synthesized)
acttgagggaaaataatgcttggcttcaggtatttggaaatactgcacattcgggctaagaatgagatgaccattttctcattttcaactaattatttcaagataccaaaacaaaacaaa

SEQ ID NO: 956664 - DNA, 120 bp, Artificial Sequence
  ENSG00000250891_40 (sequence is synthesized)
gtgttccagctgctggtgctaacaaagatctgaggttatacacacatgacctatcacccacacccacccgattgggaggggttgcctctccctgtgtccacacatatgccttgagttgct

SEQ ID NO: 956665 - DNA, 120 bp, Artificial Sequence
  ENSG00000250891_41 (sequence is synthesized)
atttagggaaatttgttattcagcaaagatgattagaacaagagaccacaatttgactatcatatttcagaaatgacacagatccagagaggttaaataaatcattttattcaaatgaag

SEQ ID NO: 956666 - DNA, 120 bp, Artificial Sequence
  ENSG00000250891_42 (sequence is synthesized)
tgcttctcagtaagtacacagagcctgattttaatgtcttcactcagccctggtttccaccattttcagtgaaagaaaaattctaatgaaaggctaataaatgatgtgcaaatggctaat

SEQ ID NO: 956667 - DNA, 120 bp, Artificial Sequence
  ENSG00000250891_43 (sequence is synthesized)
agggtaagtaattaagtattttaaaatgcaaaaaagtatatattatgaggtagaaactaaatctttatttttaggataaaacatttgaattcaaagggactttcagcatgtcgggaagca

SEQ ID NO: 956668 - DNA, 120 bp, Artificial Sequence
  ENSG00000250891_44 (sequence is synthesized)
agtctgacacaggaataatgtcctctgaagcaaaggctttttcagtggcaaagcttaagaatgctgatctgcatgatgggaaaatttagtgttggcacaagaaattaactaatatgtttt

SEQ ID NO: 956669 - DNA, 120 bp, Artificial Sequence
  ENSG00000250891_45 (sequence is synthesized)
gggagcaagaaaggtaaaccaggtggatgaaacatatcctatagcatattgtaattggtaagtggatgcaagtggtttcttagcaagtcagaggcatcgggctgtctaaaagaggtaaga

SEQ ID NO: 956670 - DNA, 120 bp, Artificial Sequence
  ENSG00000250891_46 (sequence is synthesized)
agattatactgacagagaggtggagcaaacaatgaggtgtctgggaggaagcatttgaagagctgcaaggaggtctgatttatggtagaaaaactgagtccccaggaactggggaagtga

SEQ ID NO: 956671 - DNA, 120 bp, Artificial Sequence
  ENSG00000250891_47 (sequence is synthesized)
ctggcaagaagaggacagggcttctagtctagaggaatcaaggcataggacatattgcttacctagagattcagtcaggggtatgggatccagcctgggtatagtttttggaaggctgct

SEQ ID NO: 956672 - DNA, 120 bp, Artificial Sequence
  ENSG00000250891_48 (sequence is synthesized)
tatggtcactctatgtgaattggttgttctttttaaagggatgacaagtaggatagggggaagggaagagaaaggcatattcctttcttagaaaggcaatgcctgcaagttgtcctcata

SEQ ID NO: 956673 - DNA, 120 bp, Artificial Sequence
  ENSG00000228106_0 (sequence is synthesized)
tccgagagcccggactggagtatctgagaacatatttcttccctataggagttgagaagaggaggaagaataatgggaggagacaggacctttttcaacttgacaaatagagtcaacttt

SEQ ID NO: 956674 - DNA, 120 bp, Artificial Sequence
  ENSG00000228106_1 (sequence is synthesized)
tataacactgttactgggaatacttgacttactaagcttttactgaacactttaattttgggagtacaatttctaaactcacgaaataatcttcatgcaacaagatgttattttatcaaa

SEQ ID NO: 956675 - DNA, 120 bp, Artificial Sequence
  ENSG00000228106_2 (sequence is synthesized)
ttttggtattacatgctcattctttgacaaattttaattaacagatttctgagagagcagacaccatcttatttctgttgaattgtatttagtaactcaaaaggcatataccaagctgtc

SEQ ID NO: 956676 - DNA, 120 bp, Artificial Sequence
  ENSG00000228106_3 (sequence is synthesized)
tttaagctagcccatgactacacaagtgcaactgtatttcccaggtagatgccggtagattgggcccagtaagtttgggccgttgggatgtgaaaggaagagatgcgggcaactttttgg

SEQ ID NO: 956677 - DNA, 120 bp, Artificial Sequence
  ENSG00000228106_4 (sequence is synthesized)
gtcatcttcttaaagaaaaagccatttgtcctggatgccctcttttcttttttctctttggctgggaaatgacaagaattaaagcagcagccttggatccagagatggacgccaattgat

SEQ ID NO: 956678 - DNA, 120 bp, Artificial Sequence
  ENSG00000228106_5 (sequence is synthesized)
gaagacagcagaactgactggctagtctgggttccctggagcagagctgtctctccaccctaggttatccacttacttttgtactgttatgtgagagagaaataaacttctatcttcttt

SEQ ID NO: 956679 - DNA, 120 bp, Artificial Sequence
  ENSG00000228106_6 (sequence is synthesized)
atgacacggggcagagttgcatctcggaggaaagtagtcattcgtgggggcgtgtcccgggtcctggcggattgactgagaggatggcaggagatggcaaagatttctgagagagcagac

SEQ ID NO: 956680 - DNA, 120 bp, Artificial Sequence
  ENSG00000228106_7 (sequence is synthesized)
ggcatataccaagctgtcagaagcagcttcatttaaaagggattataatacctacctatgacagagactgccaaatatactccagtagccattctgcttttcttcttttcagaaataaaa

SEQ ID NO: 956681 - DNA, 120 bp, Artificial Sequence
  ENSG00000228106_8 (sequence is synthesized)
ggtgagttcgcagccggaacgttgcaggcacttgtttcctcagtggatgcctttcggcgcgccgccgcccggcgccgcgggactgggagaccggtatctgagaacatatttcttccctat

SEQ ID NO: 956682 - DNA, 120 bp, Artificial Sequence
  ENSG00000228106_9 (sequence is synthesized)
tcgcagccggaacgttgcaggcacttgtttcctcagtggatgcctttcggcgcgccgccgcccggcgccgcgggactgggagaccggatggtggaattctggaaacatcctgtgttgaag

SEQ ID NO: 956683 - DNA, 120 bp, Artificial Sequence
  ENSG00000287792_0 (sequence is synthesized)
gtctcgctccctccggtgtgtctggcttgtctgggagcgtctgctgttactgaagtcccagctttgcctccgtctttctccctctaacccaagacaaagagcagtgtgctggattcctgc

SEQ ID NO: 956684 - DNA, 120 bp, Artificial Sequence
  ENSG00000287792_1 (sequence is synthesized)
tgttgctaaattctggactgctccacgcccctgggtttggcttctgtgttcttccacccattctctgcattacatttcctccctgtgaaatgtcttgagtcaattctgtctctcgactag

SEQ ID NO: 956685 - DNA, 120 bp, Artificial Sequence
  ENSG00000287792_2 (sequence is synthesized)
accacgcctgcaacactaactgttccgttcggacagaaggttcctgagaacacactggcgctgctgcgctccacaggactgctgctcacagggaaaacagagacagagatggagaaggag

SEQ ID NO: 956686 - DNA, 120 bp, Artificial Sequence
  ENSG00000287792_3 (sequence is synthesized)
actcctgagttcatcaagaaacaccttgatccagccttgcttggaacgttggggtagatgaacaacaggagaatggacaagacatcataaaggcggtaatcatgcttccttcggccagaa

SEQ ID NO: 956687 - DNA, 120 bp, Artificial Sequence
  ENSG00000287792_4 (sequence is synthesized)
acggtccccatcccatctattgatgagaacgcagccatgtgaccacatctccttgccaggcaggctgggcaatgtggcttcaccacgtaccaaggaaggaggagcagcaactggtgagca

SEQ ID NO: 956688 - DNA, 120 bp, Artificial Sequence
  ENSG00000287792_5 (sequence is synthesized)
tacagcgcagcacccacttgtggtgccagaccatcaggtaaggccagacacagccgggcagcctggcagcaaggacaacgaaacctggagctggtttatcggtgacgagtggaatctgtt

SEQ ID NO: 956689 - DNA, 120 bp, Artificial Sequence
  ENSG00000287792_6 (sequence is synthesized)
tcctgaagagcctgagaaggcaaagagcctcctctgcgggaagacgggagtgaggggctgactgccggcattccaggacaagaaattctgcccctccggggtgcatcctccttcttccat

SEQ ID NO: 956690 - DNA, 120 bp, Artificial Sequence
  ENSG00000287792_7 (sequence is synthesized)
tctcatggaagtggtcagcgacgtcaggaagctcactccgtgttttccaaggaaagaacactggtcctggaatcggcctgcctctggttccagcaggcccggccaggccatcccggcacc

SEQ ID NO: 956691 - DNA, 120 bp, Artificial Sequence
  ENSG00000287792_8 (sequence is synthesized)
tccgctggcttctcctccaacccatcaggcttggtcagtccttctcttccagcgacctcagagtggcagagccattggtgcagctataaatgactgatggcccggttgtgttggaggaat

SEQ ID NO: 956692 - DNA, 120 bp, Artificial Sequence
  ENSG00000287792_9 (sequence is synthesized)
tgtaaacaccattcataattcatcgggcgggcatgtgctttgcatttagaatggctggtacccgcagcctgctgcggagctgcagggagacctggtggacgacgtcccctgcaccctcca

SEQ ID NO: 956693 - DNA, 120 bp, Artificial Sequence
  ENSG00000287792_10 (sequence is synthesized)
ctggcttttcacagagctccatgtttgaggtattagcttatcacctgttacttaattttttcctttccatcaactaccttattttacataattcaattttaaaaaggaaaatttgcatca

SEQ ID NO: 956694 - DNA, 120 bp, Artificial Sequence
  ENSG00000287792_11 (sequence is synthesized)
ttttccaaaatgaaaatcagtatctactgcccttaatatccagtcccagcgaggaggaggaagtgcatctctgattggcttgatttggttgtgtgcccatcccttatccaatcactgtga

SEQ ID NO: 956695 - DNA, 120 bp, Artificial Sequence
  ENSG00000287792_12 (sequence is synthesized)
tgagagtgtgtgtaactctgattggcttgatctggtcatgtggttacatgttatccaatcactgtgatgaggatgtttgggactatgattggcttgatttggtcatgtgcccacctctta

SEQ ID NO: 956696 - DNA, 120 bp, Artificial Sequence
  ENSG00000287792_13 (sequence is synthesized)
tccaatcaccatgatgaggctgggctgtgtatgactctgattggccagtaataggtcacatgctcactggtgatgtgacgggctgggtcaaagtgcaggtcactttcttcagggaaatcc

SEQ ID NO: 956697 - DNA, 120 bp, Artificial Sequence
  ENSG00000287792_14 (sequence is synthesized)
tgatgttgtgacaggaggaagaggaagaggagggacatgtcaaataatatcgcccacggttctgttctctaaatgttcctctttctcccacactgctgagcagagctgttgaggtctgca

SEQ ID NO: 956698 - DNA, 120 bp, Artificial Sequence
  ENSG00000287792_15 (sequence is synthesized)
aggaactgctggtgtaaagtgtgggattgagcccctgtgctccccaggtgggccttggtgagcccctgagtgtgaacacatgcctgggctgagcccctgagagtgaggccctgtgtgtga

SEQ ID NO: 956699 - DNA, 120 bp, Artificial Sequence
  ENSG00000287792_16 (sequence is synthesized)
acacctgcttggggtgagcccctgagagtgagcccctgtgaacacatgcctgggctgagtccctgagagtgagcccctgtgtgtgaacacattcccggggtgatcccctgagagtgagcc

SEQ ID NO: 956700 - DNA, 120 bp, Artificial Sequence
  ENSG00000287792_17 (sequence is synthesized)
cctgaatgtgaacaccttcctggggtgagcctctgagagtgagcccctgtgaacactttcctgggtgagcccctgagagtgaacctctgtgtgtgaacacctgcccggggtgagcccctg

SEQ ID NO: 956701 - DNA, 120 bp, Artificial Sequence
  ENSG00000287792_18 (sequence is synthesized)
agagtgagctcctgtgtatgacaccttcctggggtgagcccctgagagtgagcccctgagtgtgaacacctgcctgggatgggcacctgtccagcatgggcatctgaatgtgggcatgtg

SEQ ID NO: 956702 - DNA, 120 bp, Artificial Sequence
  ENSG00000287792_19 (sequence is synthesized)
aacgtatgcacctgagtatgaacagcattaccataccatgctctctgaggaattctcactgtgaagttcctggtaataaaagtcaatcaaaactccatgttctatcgacccagctccctc

SEQ ID NO: 956703 - DNA, 68 bp, Artificial Sequence
  ENSG00000287792_20 (sequence is synthesized)
agtcaatcaaaactccatgttctatcgacccagctccctccacattccacatcttctttctggtctta

SEQ ID NO: 956704 - DNA, 120 bp, Artificial Sequence
  ENSG00000255559_0 (sequence is synthesized)
actcactcggctcgaccacgggaagggaaggagcgcgaacgctaaatcccgtgccgcggggagccaagccccctgggccggaaatgcctaatctgaacttccgccctgcccttcagctca

SEQ ID NO: 956705 - DNA, 120 bp, Artificial Sequence
  ENSG00000255559_1 (sequence is synthesized)
ccaaccaattgaattccaggtttcgtgggtccgctctaggcggctgatagtactcaatgctccggcagtcctgctccttcccggttacgtcccttccagcccttggcggagtctgcgggc

SEQ ID NO: 956706 - DNA, 120 bp, Artificial Sequence
  ENSG00000255559_2 (sequence is synthesized)
gagagggcgcaggtgcagaggtgccgccggcggcgtgcggctgcgaaggaagggaccccgacaccgagcgttcctgcggacgctcctcaaccgggggttgttctccgtgctctggacccg

SEQ ID NO: 956707 - DNA, 120 bp, Artificial Sequence
  ENSG00000255559_3 (sequence is synthesized)
gcccttcctcacctaggacgtctcgcggtgcactgtccccctctctcgggcgacttttcccccacctccaagtagtgatcaagctcagaatccagctcgcgcccgctgtgcacctagcac

SEQ ID NO: 956708 - DNA, 120 bp, Artificial Sequence
  ENSG00000255559_4 (sequence is synthesized)
ttcccacctgtagtcttttgacctcatcgccccctctagaaggctgctgccatcgcttaaatgaggaagccgaggtgcagagaggtttcagacctattgcggtggagctggagttcgaga

SEQ ID NO: 956709 - DNA, 120 bp, Artificial Sequence
  ENSG00000255559_5 (sequence is synthesized)
accaaccactcggtgctgagacgcgcttgcggaacgggcggcgggcgggggtgaagcggagtgaggggagaggccaggtgcgacccgggcaggtgaggagcacgggcccggagggaggac

SEQ ID NO: 956710 - DNA, 120 bp, Artificial Sequence
  ENSG00000255559_6 (sequence is synthesized)
ttacgagaatggaaaggaaagcagcccgtcttcagtgggacagtgggagcattaagatgtcagagaatgagcagttgtgggaagagccatagggtattttattttttagagatggggttt

SEQ ID NO: 956711 - DNA, 77 bp, Artificial Sequence
  ENSG00000255559_7 (sequence is synthesized)
agcaacgcgccaccacactaaatctttaattttttggggggtggttgaaggtgggggcgggacagggtctctctccg

SEQ ID NO: 956712 - DNA, 120 bp, Artificial Sequence
  ENSG00000255559_8 (sequence is synthesized)
atctttaattttttggggggtggttgaaggtgggggcgggacagggtctctctccgtctcccaggccagagtgcagtggcgcaattacggcccgactcctgggctcaagcgatcctccca

SEQ ID NO: 956713 - DNA, 79 bp, Artificial Sequence
  ENSG00000255559_9 (sequence is synthesized)
gcccagctagtttttgtatttttttgtagaggtgggcaagtgatccacccgtctcagccttccaaagtgctgggattac

SEQ ID NO: 956714 - DNA, 120 bp, Artificial Sequence
  ENSG00000255559_10 (sequence is synthesized)
ttacaggtgtcagccaccacgcccggccctaaatatttttttaaaagttggatttttcatggtgcccaagggaagagacactcctttccttttactaagaccatttcttttagaaaactt

SEQ ID NO: 956715 - DNA, 120 bp, Artificial Sequence
  ENSG00000255559_11 (sequence is synthesized)
aagaccatttcttttagaaaactttgtaataggaaaatctttctttgccctcttgaaatgtatgtaaattttttaaaaagctgcataagcctcttgccagttttataaaccaggaatttc

SEQ ID NO: 956716 - DNA, 120 bp, Artificial Sequence
  ENSG00000255559_12 (sequence is synthesized)
tttcttaaggacctttcttaaggaccttggagtgatttctttgaaataaaaaggccaaggaagatagcttccctccttgtctctgtgggagtttagcagatggctggctccaagttgcaa

SEQ ID NO: 956717 - DNA, 120 bp, Artificial Sequence
  ENSG00000255559_13 (sequence is synthesized)
ggcattaggggcaactcatgcagaagacccaggaatcttccaggtatactccatgggatgcctgttccactctggcccattggcacaagctagccttttcttttaaggatagtggggtcc

SEQ ID NO: 956718 - DNA, 120 bp, Artificial Sequence
  ENSG00000255559_14 (sequence is synthesized)
gttctgagagcggcctttgcaacatctcacttcccctgttgactgttatttcttttcttcctgctttcctactcccttgatcccaaactcactaggggtatttagtgagcacttactgtt

SEQ ID NO: 956719 - DNA, 120 bp, Artificial Sequence
  ENSG00000255559_15 (sequence is synthesized)
gcagtaagactctagccaaggaagacgaagagacagttggagaccaaagagaacttcaattcgggcacccgagcctagagcaggctcatgcccaaaatggctaccgacccagacaaagaa

SEQ ID NO: 956720 - DNA, 120 bp, Artificial Sequence
  ENSG00000255559_16 (sequence is synthesized)
agcaggcttgcttatatgtcgtttcaggcgtgaaaaacaaggcaggatacaagtttcagacaaagacagtaaattattcaacctgtgacaattctgagaaaacttacatttagttatctt

SEQ ID NO: 956721 - DNA, 120 bp, Artificial Sequence
  ENSG00000255559_17 (sequence is synthesized)
gaccagtcaaccttgaagctggacagagctggggtaagggaaaacaggaattacggaagtatgagggagtcgcgaggccggagataagcttggaaggttgagataagctcgcaggtgcaa

SEQ ID NO: 956722 - DNA, 120 bp, Artificial Sequence
  ENSG00000255559_18 (sequence is synthesized)
cttcttagcaatgctgagagtggctgcttaaatttcttagcctatgtataacttctaaatagcctacactaaatggtaactattacctatgttgtgtttgttattttaaactttaatgtt

SEQ ID NO: 956723 - DNA, 120 bp, Artificial Sequence
  ENSG00000255559_19 (sequence is synthesized)
atttattttatttcattttccttccacattacctctgctgttagcagctttgagaaatgctgctataggatgtgggaagtcattaaaggatttaagcagggagaggcaagatcagattaa

SEQ ID NO: 956724 - DNA, 120 bp, Artificial Sequence
  ENSG00000255559_20 (sequence is synthesized)
catttcagaaaaatatttactgttttccagctgaaactagtagagtacaatttactttctggtcacagcacacagcagtcacatcctggaggaactgtacttctctaagatctagtctgt

SEQ ID NO: 956725 - DNA, 120 bp, Artificial Sequence
  ENSG00000255559_21 (sequence is synthesized)
cctgtggtttaaatgacctttagcaaattgtctttattactttgtacactgctttcaccagtctgctcttccatggctaacggggcagaactgttatttttagggttttccacatccagt

SEQ ID NO: 956726 - DNA, 120 bp, Artificial Sequence
  ENSG00000255559_22 (sequence is synthesized)
atgttcataagatttctaccctgtgtgaacttccagatgtcgaataaaggctggatgctgaccaaagacctttccacattttttacatgtgtgtagggttgctcaccagtagtattcccc

SEQ ID NO: 956727 - DNA, 120 bp, Artificial Sequence
  ENSG00000255559_23 (sequence is synthesized)
tgatgcttcataatggttgatcccagagagaatgccctttcacactcattacattcatagggtttctgtccagtgtgagttctgtgatgggaaattaggttagaactttaaacaaaggcc

SEQ ID NO: 956728 - DNA, 120 bp, Artificial Sequence
  ENSG00000255559_24 (sequence is synthesized)
tttccacgtttgttacactgataaggcttatttccaatgtggattctttggtgttacacaagattagagctgtagttgaaggttttcccacactctgccttcatagaacttgtctttata

SEQ ID NO: 956729 - DNA, 120 bp, Artificial Sequence
  ENSG00000255559_25 (sequence is synthesized)
gtgaaatctctggtgttttctaaattgtgttagtccttcttaaggcttaccatgttcactacactacacaattcctctccatggtaactatttgggtgctcattaaaggctgtactctga

SEQ ID NO: 956730 - DNA, 120 bp, Artificial Sequence
  ENSG00000236276_0 (sequence is synthesized)
gcactgccagcaacttctcttcagagccatggccaggaggatactgcaattggttggatcatggcttaaaagaaaaagttgggattgatccaggccttggaagagagcaaattgtctgaa

SEQ ID NO: 956731 - DNA, 120 bp, Artificial Sequence
  ENSG00000236276_1 (sequence is synthesized)
aaaaagaaaaaagaaaagacaaaaatgttatctgttgcaaatcttatacccagtttaaagctactagtcaatgtttatgtccagattttgccatgagggtgaaatggaccccaactggat

SEQ ID NO: 956732 - DNA, 120 bp, Artificial Sequence
  ENSG00000236276_2 (sequence is synthesized)
gggtgaaatggaccccaactggatgaattcctgattatgagcactggggatatgtcgccaacggaagttacccattctttgaattttctgagtcagcactcttcctaacaagaaagtagt

SEQ ID NO: 956733 - DNA, 120 bp, Artificial Sequence
  ENSG00000236276_3 (sequence is synthesized)
tgcttcagattgcaaaccccatccagggtttcacgttcttactgttgaaaatgggtctgggggtaagactctagtgacatatccttgaccatcaggctctgagaacctctgatgaagggg

SEQ ID NO: 956734 - DNA, 120 bp, Artificial Sequence
  ENSG00000236276_4 (sequence is synthesized)
acagtgcacatgaatggtgacaagcaaatgactgccagagacacaagaaaaaagctttgcagatgcaagggaagctggcatcagaaataatgccatcggcacaatcttcctcaacaactc

SEQ ID NO: 956735 - DNA, 120 bp, Artificial Sequence
  ENSG00000236276_5 (sequence is synthesized)
aactgtgtgggtgtgtgaatttgcagcatgcaacctgcacagccaagagagtactgattccagttccagcctcccctgccctgctgcacacacataggggtttcggaaggatttcccacc

SEQ ID NO: 956736 - DNA, 120 bp, Artificial Sequence
  ENSG00000236276_6 (sequence is synthesized)
taccagctggaacattgccactggcaggggcagacaagaaaacaggaatgctcttaatgtcctcccaaagaaaacctttgatggacaaaagagtggccgaagtgcatccaggcattccca

SEQ ID NO: 956737 - DNA, 120 bp, Artificial Sequence
  ENSG00000236276_7 (sequence is synthesized)
tagcgctcccaccccaaggcctttgccggagatgttcgggtcactgtgatggtatgctcgttcctgccaacccggtcactccagccccgctctcggcagcccaaagggcagctaagccat

SEQ ID NO: 956738 - DNA, 120 bp, Artificial Sequence
  ENSG00000236276_8 (sequence is synthesized)
gtggctgctcctctctgtgagtggattcaggctcgggactacaaaaagccccccagtcctatcagcccggcagagctggtgccaagaatgacatcctgggaatactatggagatggggag

SEQ ID NO: 956739 - DNA, 120 bp, Artificial Sequence
  ENSG00000236276_9 (sequence is synthesized)
atcccatgggctgttctccccggatggaacaggacccaagctgtctggaaaacaggcagagcaaagagccagctgacaaaggaaggagctcaggcgaagggaaaagggggcgggctggga

SEQ ID NO: 956740 - DNA, 120 bp, Artificial Sequence
  ENSG00000236276_10 (sequence is synthesized)
gcagtggtgagcaaaagaaaagaaaagccacatgccacccaggaagattccaggactggcgggaggaggtggaggaggaaggacttgcaggaaacaagtacccagacatggcactgccag

SEQ ID NO: 956741 - DNA, 120 bp, Artificial Sequence
  ENSG00000236276_11 (sequence is synthesized)
tctagctggattcttttctgaattagattatgcgaaagaaagaagggaaatatatagccagccagctgttcaaaggcttacaaccttgcttttattgtccggtgtcattggaactcgaat

SEQ ID NO: 956742 - DNA, 120 bp, Artificial Sequence
  ENSG00000236276_12 (sequence is synthesized)
taagattgaaaactccacaggcacatttccatctgtgggtgtcagctgcttggtacacagtcgtaagaaggcctcagccagttctcccgttacctgaaccaaatgtattttaaaataaat

SEQ ID NO: 956743 - DNA, 120 bp, Artificial Sequence
  ENSG00000236276_13 (sequence is synthesized)
tctttccctggctggtcgaactgcctctacagttgtcccatccagaagccacacacagcagcgggcctcaggaattgcattcctcgcagtgacaggagaggatgtaccggtaggtggcag

SEQ ID NO: 956744 - DNA, 120 bp, Artificial Sequence
  ENSG00000236276_14 (sequence is synthesized)
tgagtcgcatgccccctgagcatcgcagccgcagtgccttcagcttggaagtctggggccggcagcagtgacaggaggaacggaagggttgcttgaggacagtgctgaacgacaccaaag

SEQ ID NO: 956745 - DNA, 120 bp, Artificial Sequence
  ENSG00000236276_15 (sequence is synthesized)
gctcggagcgtgacgcctggctgcagtgcccctcgcacctggccaggagcaccatctggggaaagaaaaggaggtggttactctgtgggcatgccacaaccttagccagcacttgaacat

SEQ ID NO: 956746 - DNA, 120 bp, Artificial Sequence
  ENSG00000236276_16 (sequence is synthesized)
atcagagcttctcagactggaatgtgcgtgtgaatcatctaggatcttgttaaaagagtctccagcaccttccacagcacctggacatgatatttcccccaggagtcaatggcaaaagga

SEQ ID NO: 956747 - DNA, 120 bp, Artificial Sequence
  ENSG00000272609_0 (sequence is synthesized)
gaattttagcactttttctatcagtttatctgagctatgtatttattaaggattttaatacattgctgtaattactaaaaacatcttttcccattgattatttgcttttaaattccatac

SEQ ID NO: 956748 - DNA, 120 bp, Artificial Sequence
  ENSG00000272609_1 (sequence is synthesized)
tgttgaatgatgtagtcaaataaatttactttttctttgtgttttcttccactatttctatgcttagagaataatttccatttaggagatagttattctagaattattttataattttaa

SEQ ID NO: 956749 - DNA, 120 bp, Artificial Sequence
  ENSG00000272609_2 (sequence is synthesized)
ttaattaatctaggatttattttggtatatttgttagttatactgtaattactttttccttcaaaaaaagctagtcaatgacttctgcaacattaactaaataaacttcctttttcttca

SEQ ID NO: 956750 - DNA, 120 bp, Artificial Sequence
  ENSG00000272606_0 (sequence is synthesized)
gggacttcggttccgcacgtcgtcatgttgttggatggcaccagtatgtgacgttcctaggaacttagctctgaggaaaaaacaaagcaaaccggggaagtacgtagccttgaaccggag

SEQ ID NO: 956751 - DNA, 120 bp, Artificial Sequence
  ENSG00000272606_1 (sequence is synthesized)
gaacgtggagccctttctgccgaatggaaacccgctaaaccccgttatggagtctgctacaattaagcatctaaccaggaattgtctatggacacaactctccaggcaattcatgcagaa

SEQ ID NO: 956752 - DNA, 120 bp, Artificial Sequence
  ENSG00000272606_2 (sequence is synthesized)
agtgtgttgacgatttcctgtttcttgcagagcgcttcaccgttaaggctcttagtagctggcgattgtaaagcacattttccgcttcatgaaaatacagtgctcttcttgtgtttgtaa

SEQ ID NO: 956753 - DNA, 120 bp, Artificial Sequence
  ENSG00000272604_0 (sequence is synthesized)
gtagacagaaaagtaaaatgaacccatcgccaacttcaactgttaaaatttgtggccaatttcactacagccctatccacatcaatttgtgaggaacaaagttaatcttgtttgtgccct

SEQ ID NO: 956754 - DNA, 120 bp, Artificial Sequence
  ENSG00000272604_1 (sequence is synthesized)
aattgaagaggactgacaattaacagcataaacaatagcccaaaccatctcagttggttcattttatgcaattctgactgaaaaggttaagcaaactttccactcaatcagtgccaaaac

SEQ ID NO: 956755 - DNA, 120 bp, Artificial Sequence
  ENSG00000272604_2 (sequence is synthesized)
cattgcaccagatcagctgcagacaaaaaagcacagctttcaatggaaaattttaaacgtgggatcaagatcctgaagcaattcttcaaagaactgttaacaggagatgaaacgtagttc

SEQ ID NO: 956756 - DNA, 120 bp, Artificial Sequence
  ENSG00000272604_3 (sequence is synthesized)
tacagtatcatcccaaagacaaacccaatcaaagcaatggctaccaagaggtgacatggtccagtcaaagcacaagttgaccggtcaagagcaaaggtcatggcaacacttttttgggat

SEQ ID NO: 956757 - DNA, 120 bp, Artificial Sequence
  ENSG00000272604_4 (sequence is synthesized)
gctcaaggcattttgctttttgaatttttggagtcccaaagaatgatagcatctgcttattatgagaatgttttaagaaagttagccaaagctttagttaaaaaaagcccaggaaaattt

SEQ ID NO: 956758 - DNA, 120 bp, Artificial Sequence
  ENSG00000272604_5 (sequence is synthesized)
caccagaaagtccttctctaccaccacaatgctcctgctcattcctctcatggaacagggcaattttacaagagtttcaatgggaaatcattagcatccaccttacagtcctgatttagc

SEQ ID NO: 956759 - DNA, 120 bp, Artificial Sequence
  ENSG00000272604_6 (sequence is synthesized)
tccttttgacttttttgtttcctgatcttaaaaaaaatctttaaagggcacccatttttctttaatgatataaaaaagactgcattgacatggttaaattcccagagccctcagagttct

SEQ ID NO: 956760 - DNA, 120 bp, Artificial Sequence
  ENSG00000272604_7 (sequence is synthesized)
ttagggatggattaaatggctggtatcgttgtttacaaaagtatcttgaatttgatagagcttatgttgagaaataatttttaatcttttaattccatttttccatgaactttttgaagt

SEQ ID NO: 956761 - DNA, 120 bp, Artificial Sequence
  ENSG00000272604_8 (sequence is synthesized)
ccccgtatacatactttttcatggtgagaacacttataatctactgtcagcaattttcaaatataaaatatattattaactgtagtcaccatgatatacagtagatctcttgaacttatt

SEQ ID NO: 956762 - DNA, 120 bp, Artificial Sequence
  ENSG00000272604_9 (sequence is synthesized)
cctcttttgtctgaaattttgtatgctttggccaacatctccccaatccccctgcctttcagctcttgagcatcatttaactctttttatgagtttgactttttcagattccacatataa

SEQ ID NO: 956763 - DNA, 120 bp, Artificial Sequence
  ENSG00000272604_10 (sequence is synthesized)
catccatgttgttgcaaatgacaggatgtccgtcttttaagactgaatagtatttcattgtgtatatatcacattttctttatccattcatccatggacacttaggctgattgtgtatag

SEQ ID NO: 956764 - DNA, 120 bp, Artificial Sequence
  ENSG00000272604_11 (sequence is synthesized)
tggctattgtgaatagtgctgcgatgaatacaagtgcaggtatttcttcaacatactgatttcatttcctgtggatatatacccagtggtgggaatgccagataagttctatatttaagt

SEQ ID NO: 956765 - DNA, 120 bp, Artificial Sequence
  ENSG00000272604_12 (sequence is synthesized)
gaatgccagataagttctatatttaagtttttgagaaaccaccatattgttttccataatggttgtactaattcacaatcccaccggtagtgtacaagggttcccttttctccacatcct

SEQ ID NO: 956766 - DNA, 78 bp, Artificial Sequence
  ENSG00000272604_13 (sequence is synthesized)
tctccacatccttgccaacacttgaaatctttcatcttttgttagcgttttagagatgccaagtgatcctcctgcctc

SEQ ID NO: 956767 - DNA, 120 bp, Artificial Sequence
  ENSG00000272604_14 (sequence is synthesized)
gctcagctctcttttgttttttgataacagcctttctaacaggtgtgaggtgatatctcattgtggttctaatttgcattcacccgattagtgatattgagcattttttcatatacctgt

SEQ ID NO: 956768 - DNA, 120 bp, Artificial Sequence
  ENSG00000272604_15 (sequence is synthesized)
aggccatttctgtatcttctatggaaaaatgtctatctatgtcctttgcccattaaaaaaaaaatttttttttttttttaactattgaggtctgacatgttttggatattaaccccttat

SEQ ID NO: 956769 - DNA, 120 bp, Artificial Sequence
  ENSG00000272604_16 (sequence is synthesized)
cagacatatagtttgcaaatatattctcccattgcataggttgtctcttcactcagtttatgtttttaaatcttttaatttataggtttccactgcatctttttcatccctgggaattta

SEQ ID NO: 956770 - DNA, 120 bp, Artificial Sequence
  ENSG00000272604_17 (sequence is synthesized)
tgtgttgaaaccagaagtagacttttaaatctaatattgtgccttacttgtacaaataggctctagcaataaataggctactaaaggcagtcacattttgtatgaggtcttctgtttctt

SEQ ID NO: 956771 - DNA, 120 bp, Artificial Sequence
  ENSG00000272604_18 (sequence is synthesized)
cttcctggaccatatatcaaattcagaaactggaaaaaggccaagtttgaatttcaactcactacatttcattttaaggcttgaataagtaaataatgctaatggaacttggtgtaccac

SEQ ID NO: 956772 - DNA, 120 bp, Artificial Sequence
  ENSG00000272604_19 (sequence is synthesized)
tttgatgaaaatccaaaccaggcttattgtgtatcctttaggctgcatgggatgttacaatgtttatgtttggagactacaatttatactctacctgcttttaaaaatgttttgaaaatg

SEQ ID NO: 956773 - DNA, 120 bp, Artificial Sequence
  ENSG00000272604_20 (sequence is synthesized)
atcacaacataaatatatataataaagacagaatctttttaaatcatgaaaggaagagccaaatgttactaaccacctatgttacaatgtcagctgatattaaaaacaatttttcaaggg

SEQ ID NO: 956774 - DNA, 120 bp, Artificial Sequence
  ENSG00000272600_0 (sequence is synthesized)
tttaaatgcactgacatttttatttcttgcaacccgagttaaattcacgtttcatttcctacagaatgcaaaaaagacatccacaaggcaactccacttctaagttacaaattactagat

SEQ ID NO: 956775 - DNA, 83 bp, Artificial Sequence
  ENSG00000272600_1 (sequence is synthesized)
ccacttctaagttacaaattactagatgttagaaaactttctcgaaggacagtgcactattggctcactgcaagctccgcctc

SEQ ID NO: 956776 - DNA, 120 bp, Artificial Sequence
  ENSG00000275467_0 (sequence is synthesized)
ctgtgtgaagtgctttatttgcatgatttcatttggtcttctcagcaacactctgagaagggaggtgctgttattgttcccattccacagatgaggaaactgagggccagcaagggaatg

SEQ ID NO: 956777 - DNA, 120 bp, Artificial Sequence
  ENSG00000275467_1 (sequence is synthesized)
tcaggttttactggaacagaagagaaagccagtgagatactaatcattagcaatgttaatattacctgatatttagttggctttatgcttttacaaaatgtacctccctttctgttgcca

SEQ ID NO: 956778 - DNA, 120 bp, Artificial Sequence
  ENSG00000275467_2 (sequence is synthesized)
ggaagattctagagcatgtagcaagaaaagcaagtaattgtctttctctgcagccctgtggaatcgtcgaaagagcacatactataccctaaaattaaacctagattgaagttctagctc

SEQ ID NO: 956779 - DNA, 120 bp, Artificial Sequence
  ENSG00000271553_0 (sequence is synthesized)
acaggtgtgagccaccacacccagacattcatctttatttttaaaggacatttttactgaacataaaattctctgagttggcagttttttctttcagcaatcttaagatgtttatgcctt

SEQ ID NO: 956780 - DNA, 120 bp, Artificial Sequence
  ENSG00000271553_1 (sequence is synthesized)
ttctttcagcaatcttaagatgtttatgccttctggcttcaacagttggagcaagaagattgctgtaattcttatcttggttcctctggatatttttaaggttttctttctatcagcaat

SEQ ID NO: 956781 - DNA, 120 bp, Artificial Sequence
  ENSG00000271553_2 (sequence is synthesized)
ttgattacgatgtgcctcataaggatttatttgtgtttatcctgcttggggtttattgagctttgtggacttgtacatttatagttgtcactacagttggaaatttttaagccattattt

SEQ ID NO: 956782 - DNA, 120 bp, Artificial Sequence
  ENSG00000271553_3 (sequence is synthesized)
ctttaaatacgtttctatctcaagaagtacagttatctccaaatgagcgtcatctacatgtccacaactctgatcagaccactcttagagccagtaatgattattttaatacctaccata

SEQ ID NO: 956783 - DNA, 120 bp, Artificial Sequence
  ENSG00000271553_4 (sequence is synthesized)
agagctgcacatagggaatttctttaacacctttaaagtttatttatttaaataagaaatacatgcccatggtaaatatttcaaatagtacaaaaatatttcaaatagtacaaaaaagga

SEQ ID NO: 956784 - DNA, 120 bp, Artificial Sequence
  ENSG00000271553_5 (sequence is synthesized)
ggtattctgtgaaaagtaagtctttgtttcaccaaagataccaatccctgccccctccccgtcctaaggccatcactgttagcatttccttttttctcctcccaaaattgtctgtgcatg

SEQ ID NO: 956785 - DNA, 120 bp, Artificial Sequence
  ENSG00000271553_6 (sequence is synthesized)
ttcaagtatatatggatatatatccttgtgctagcatactatatacactgttctgcatctttttaaagtttaataatcttggcgatcattctatatcagtacatataaagtgggcttttt

SEQ ID NO: 956786 - DNA, 120 bp, Artificial Sequence
  ENSG00000271553_7 (sequence is synthesized)
atgaatggcctaacattacatcatacagatgtatcataatttaattaagtggtgccctgttggtggatattcaagtcgtctggtcttttgctattgcaaataatgttgcagtaaagtaaa

SEQ ID NO: 956787 - DNA, 120 bp, Artificial Sequence
  ENSG00000271553_8 (sequence is synthesized)
attgcaaataatgttgcagtaaagtaaaatgtaaaataaaagtaaatgtcttacttacttaaaaacctattttaaaagtaaatgatggactttaggaggttaagaattaaaaattaataa

SEQ ID NO: 956788 - DNA, 120 bp, Artificial Sequence
  ENSG00000271551_0 (sequence is synthesized)
tgtccttggcgcctccatgttgcggctgctccatgtcggggccgggctgaggcgcgccgccgcccgcgccgcccaagctgttgttgttggaaatgggatgttgctgttgctgctgctgct

SEQ ID NO: 956789 - DNA, 120 bp, Artificial Sequence
  ENSG00000271551_1 (sequence is synthesized)
gctgctgctgttgctgctgctgctgctgctgctggaactggtttagctgctgctgtacccggatatgggtaaatacacgactagctgagcctatcgggcccagcatggcttgagaggcag

SEQ ID NO: 956790 - DNA, 120 bp, Artificial Sequence
  ENSG00000271551_2 (sequence is synthesized)
cgggcgagctcgagcaactattatccacttcgctcgcattactcccgcgcactcgcaaaacgcggactggactcgtccccgggccgccgccgcccgccccggcgcagcctcgcgggaccc

SEQ ID NO: 956791 - DNA, 120 bp, Artificial Sequence
  ENSG00000271551_3 (sequence is synthesized)
gggccggggccggggcggctcggcggccgctcggagcgcggcggcgtggggcggccggaacctgcactttccccccgggccgctgtctccttgccaaccgggcgttcgcatgtttgtttt

SEQ ID NO: 956792 - DNA, 120 bp, Artificial Sequence
  ENSG00000271551_4 (sequence is synthesized)
gccaaccgggcgttcgcatgtttgttttcacgtctaaaaggaacgatacaaaggtggaaaacgagtctgacgagcagacaaaagagggagaagggctgggaaacaaagttgtctattggc

SEQ ID NO: 956793 - DNA, 120 bp, Artificial Sequence
  ENSG00000271551_5 (sequence is synthesized)
gcaaaagcacggtctctcccaggagttatgtaattttcagaacgttcgcctctgccttgatttcgggccatcggcgtaattcccacaacttcttccaactgcaaaattaggaaagatttg

SEQ ID NO: 956794 - DNA, 120 bp, Artificial Sequence
  ENSG00000271551_6 (sequence is synthesized)
aaatgaaggttagccccggtcagagagccctatggcctgtacccagtaggtactcaataaatgcttatgactgactgcacccgccccaaagagaatgtttacataactctttttgaaggc

SEQ ID NO: 956795 - DNA, 120 bp, Artificial Sequence
  ENSG00000271551_7 (sequence is synthesized)
accttaaacacgtatgtaggtttgtcagtgtatttccaaaggaatatgtccacgtattcccaaaggagcatttttcttacatgcacttggatgtcctctgtggagtatgtacagtggtgt

SEQ ID NO: 956796 - DNA, 120 bp, Artificial Sequence
  ENSG00000271551_8 (sequence is synthesized)
tttctgcgccaactttcacatgaacatttaactcttggtgccagaacagcgacagctatgggttagctcgtatcttcataaatctatatgacacctttcatcatgtttcagagcttcgtg

SEQ ID NO: 956797 - DNA, 120 bp, Artificial Sequence
  ENSG00000271551_9 (sequence is synthesized)
tgcacagttaaccctctcgatatacattcatttcaaagagatgtggaacgaaactaaaatattatagacattatatttaataaatataacttcaataataatataaaacagtcaactcta

SEQ ID NO: 956798 - DNA, 120 bp, Artificial Sequence
  ENSG00000271554_0 (sequence is synthesized)
ggtctaatcaatggtgctctaactacagaacagcgaatcttaacctggggaccatgggtcatgaatggactgcagaaattctgtgacctcctgagaagtgttctgggtgagacaaggctt

SEQ ID NO: 956799 - DNA, 120 bp, Artificial Sequence
  ENSG00000271554_1 (sequence is synthesized)
acaaagaaggctggagccccgtggcagatgagatggttagatctgcaggcatactaactggaagagatacaacagaggctccctggaagaaggatgccagacacagttgagagcacaaga

SEQ ID NO: 956800 - DNA, 120 bp, Artificial Sequence
  ENSG00000271554_2 (sequence is synthesized)
ctgtaccaaaaacaagagattaaatgactttaacatattaaatgctgaatacagaagttcccccagctagaactcccaactaggcttccagaatgcaggcaaccacactgctatccttta

SEQ ID NO: 956801 - DNA, 120 bp, Artificial Sequence
  ENSG00000271554_3 (sequence is synthesized)
cctaaaaatagaaaaagtttgtagttactctcaaaattcccccaaatcccctactttaatgcattagaaccctcttttttttcttcactgtgtccataatatattttccaacaggtctaa

SEQ ID NO: 956802 - DNA, 120 bp, Artificial Sequence
  ENSG00000271554_4 (sequence is synthesized)
gcgaatcttaacctggggaccatgggtcatgaatggactgcagaaattctgtgacctcctgatcttgctgttgccttgatcatagtggaagtctgattgtctgttagcttcttgatacat

SEQ ID NO: 956803 - DNA, 120 bp, Artificial Sequence
  ENSG00000271554_5 (sequence is synthesized)
cgttgccctgccacaatattacagacctacaaatggaaaaaagttttgtactacatgtatatatcttttttttttagctcttacttagtgccaattacatgtaaataaaaatttaaaatc

SEQ ID NO: 956804 - DNA, 120 bp, Artificial Sequence
  ENSG00000271555_0 (sequence is synthesized)
ctatgtgtatatttttcttcattttccagactacatatttttgaaaaatgtaccattagtcttttgtaacttaaaacgagttctgttgtttatcatataaaatgaatgcttttttcccaa

SEQ ID NO: 956805 - DNA, 120 bp, Artificial Sequence
  ENSG00000236109_0 (sequence is synthesized)
cactcagcaaatagcaccaaatgaagacggagaataacatatagatttgccgtaagaaaaaattgatctaaatccatatatcaaatctgctgatcagagctctagagaaatgcttcacaa

SEQ ID NO: 956806 - DNA, 120 bp, Artificial Sequence
  ENSG00000236109_1 (sequence is synthesized)
tggaatgtgttcctcaaaaatctgctgagaaatcagatccccagggatttacgtgcaccttgcgctgtgatgatcagcaagagccccgcctgagtaggtcctgaagggagtctcttcaat

SEQ ID NO: 956807 - DNA, 120 bp, Artificial Sequence
  ENSG00000236109_2 (sequence is synthesized)
taagagtcttcctttttcttttcatataagttgaatagatctacatgtgagcaatattgactgaggttctgcactgtatttgcaaaactagctttgcggggaataaacttgactaactgg

SEQ ID NO: 956808 - DNA, 120 bp, Artificial Sequence
  ENSG00000236109_3 (sequence is synthesized)
aatgttacatggtgattcagcccatggcgatccctaagacatgttacttccattgaattaagacacaaaaagttgcctgatggctcttctcaccatgctaactggaacgcctgagaagaa

SEQ ID NO: 956809 - DNA, 120 bp, Artificial Sequence
  ENSG00000236109_4 (sequence is synthesized)
aatcaaatcaccgcagccggcactccctgcttccccatcctacttccctgagaaaactgaagctgtcagaagagaacttccacagattcctaccaccatagatgctctccagatggttaa

SEQ ID NO: 956810 - DNA, 120 bp, Artificial Sequence
  ENSG00000236109_5 (sequence is synthesized)
atccaactgtacttggtgtaactgcctggagcacagtggatcactcactcctccttgatacacgtgcttccctgccctctcttaggtttccacctccctctgactctttcttagtccaca

SEQ ID NO: 956811 - DNA, 120 bp, Artificial Sequence
  ENSG00000236109_6 (sequence is synthesized)
cgacttcttcatctctttccccagatgtctccatgtgtgacttctccaggcacagtcctttccctttttctgctgctactctcacttctggggtgacctgggcagcacttgcccaactgc

SEQ ID NO: 956812 - DNA, 120 bp, Artificial Sequence
  ENSG00000236109_7 (sequence is synthesized)
ccatcagggattctgccacactgcctttaaaatgtattcatgacccagtttctcacagcttccacgtctgcccccatggcagagctgccacacgcttgcccacgtcaccacatcgggctt

SEQ ID NO: 956813 - DNA, 120 bp, Artificial Sequence
  ENSG00000236109_8 (sequence is synthesized)
cctgctggacatccggtgtctgtccctgccactgccatctaaaagcccctcaacggccacaggaagcctttaaaagcagaagtcaatcatctgttcaaaaccctttcctgggtcctattt

SEQ ID NO: 956814 - DNA, 120 bp, Artificial Sequence
  ENSG00000236109_9 (sequence is synthesized)
ctattcagagtaaaaaccaaagtgcttgcaatggccaccaaaccttgctaatacctgtcccaggcccctgcaagggtcgctctgatcttgtctactacactgtccatcactcaccctgca

SEQ ID NO: 956815 - DNA, 120 bp, Artificial Sequence
  ENSG00000236109_10 (sequence is synthesized)
ctacccctcccggcttccctgttctcccccagctgcaacccctagtccgagggcttttgctctggcagttctttctggcagtaaaaagaggcccttttccccaggtatccacgtggttaa

SEQ ID NO: 956816 - DNA, 120 bp, Artificial Sequence
  ENSG00000236109_11 (sequence is synthesized)
tttccgcactggcaagtcattgctcctatgtcactttcccagtgaggccaattgcaaccacttaacacctcaacctgtctcccttacccccacacccctgctttatttgatttttgatcc

SEQ ID NO: 956817 - DNA, 120 bp, Artificial Sequence
  ENSG00000236109_12 (sequence is synthesized)
ttcttatcctatttttctttttactgtaacactcttatcatcctaatatactacataactcacttatttgatatgcttactgttaattttctgtctcccactgctacaatataagcccca

SEQ ID NO: 956818 - DNA, 120 bp, Artificial Sequence
  ENSG00000236109_13 (sequence is synthesized)
cattggtgggggggtgggggggctttagtttgttcattgacaaaccctaagcacatggaacaatgtctgatatataatggaagtgaataaatgtttgataataaatgcttacactaagca

SEQ ID NO: 956819 - DNA, 120 bp, Artificial Sequence
  ENSG00000236102_0 (sequence is synthesized)
ctgggcttgctcacacttgacccagaagcctgagatgtggcatttctgaagtgtccaatttatgaagttgaaaactggggcaagctcatctgtttgtgcaatgttgattgccaacggtta

SEQ ID NO: 956820 - DNA, 120 bp, Artificial Sequence
  ENSG00000236102_1 (sequence is synthesized)
atgcatcagcattttcacttccaactgcaaggatttcagaagacagctgaccttgggctgcctggcaggcacgggcctggcgccgatacttctgctcagagtgcctgtgctttttggtgc

SEQ ID NO: 956821 - DNA, 120 bp, Artificial Sequence
  ENSG00000236102_2 (sequence is synthesized)
atgcatcaagtcctgaagtaatagccccacgtatcagatgtgtaatggatttctctccatgctgcgggattcattaccatgatttatggctgttttaatgtacacagccttcttaaacaa

SEQ ID NO: 956822 - DNA, 120 bp, Artificial Sequence
  ENSG00000236106_0 (sequence is synthesized)
gcaggagctggggctgcctccttcccaaacactgacggctcctgttgacacagacttgaaaattctgagcgctcatggacatattagcatactacaaatatctaaaggggctgtgaaata

SEQ ID NO: 956823 - DNA, 120 bp, Artificial Sequence
  ENSG00000236106_1 (sequence is synthesized)
tcactgagaagataagctttcacatgccctttggagagtcacatcctattctgagaacccccattgtctgagccagcccatggggagcacaggcttcaggttctaagctcggtggtctgg

SEQ ID NO: 956824 - DNA, 120 bp, Artificial Sequence
  ENSG00000236106_2 (sequence is synthesized)
gaagtcccgggaagagaagaactgagccacggtcccaggaagagaaaaacagatagtggccaggctccatgtgtgcccgccctgctctcctcatctcccatggatccatgttcctgatcc

SEQ ID NO: 956825 - DNA, 120 bp, Artificial Sequence
  ENSG00000236106_3 (sequence is synthesized)
tcacagctctagtcgtattctccactttctgcagatgggatttaaacccaggtcttctgggtccagcgttcctgctcttaatcatccaggcctaaggacacgggttgaaagtcattcact

SEQ ID NO: 956826 - DNA, 120 bp, Artificial Sequence
  ENSG00000236106_4 (sequence is synthesized)
gctgcctctggaggttgagttgttttaaagtgctgcgatctactaagtcttcagaaattagttgatccaaccgtaatcttctgagcacatgagctttcttttcttgaagactcattacac

SEQ ID NO: 956827 - DNA, 120 bp, Artificial Sequence
  ENSG00000236106_5 (sequence is synthesized)
tttccttcagcttgttctcggcaggatgagtgactgcccgtcctggaggcctcctcagaagcctcatacctggctctccgatggagcccacggttcttctgtacttcctccctatggttc

SEQ ID NO: 956828 - DNA, 120 bp, Artificial Sequence
  ENSG00000236106_6 (sequence is synthesized)
ctgggcctggagtgtgggctggacagggcaaggcctggattgtgttcattaaacaagaagataagctcatggttaccacagggatgttctgtttgtgcccctgctagggttttgcttggc

SEQ ID NO: 956829 - DNA, 120 bp, Artificial Sequence
  ENSG00000236106_7 (sequence is synthesized)
tctgctacttatgggaggcattgagggagttaagcacagtggcttttgtgtctgcagatttgagctgaaattccagttctgcagcatagggcttaacaggttcactccccttccccatcc

SEQ ID NO: 956830 - DNA, 120 bp, Artificial Sequence
  ENSG00000236106_8 (sequence is synthesized)
tctcatcccccagggctttactctctcttccttccacctggatagatgcccttctcatcttcacacagcagaacactgcttgttctgagagctcgccctgctgattcttcttccatgagt

SEQ ID NO: 956831 - DNA, 120 bp, Artificial Sequence
  ENSG00000236106_9 (sequence is synthesized)
cagaaagcccacttcacttataggatgagaacatggatttaaaatcagacaaatctgggttcataccgtccttttgctagctagacaatgattggagtttgtcagtttccttgagaaaaa

SEQ ID NO: 956832 - DNA, 120 bp, Artificial Sequence
  ENSG00000236106_10 (sequence is synthesized)
aagggataatgatattcctaccttttaaggtaatggcagacattaggaaaatataaacataaaattattagtagagatttgatgagtagccagtgctcagtaataactaggcaattcttg

SEQ ID NO: 956833 - DNA, 120 bp, Artificial Sequence
  ENSG00000236106_11 (sequence is synthesized)
attgtgtctgaatgagtttgtgagtgcatatgagagtgtgtgtatgtgagtgttatgcgtgctcacacatgtgtctggtaaagggcagatattcatatagctgctcaggttggtggaaat

SEQ ID NO: 956834 - DNA, 120 bp, Artificial Sequence
  ENSG00000236106_12 (sequence is synthesized)
aatttctttttacttttattctattgttcctcccaggactgagtttctggcctgtctcacttttgacgtctaatattgcgttggttaagagtgccttctctctcccccactctacagata

SEQ ID NO: 956835 - DNA, 120 bp, Artificial Sequence
  ENSG00000236106_13 (sequence is synthesized)
ttcagaagtaactgtgaagtaattgtggatgggatccatgtctacttggtatgtttgtctcctgagcatctgttgccagtgtaatttcatgacaatcatcaatatgtattgaataaaaca

SEQ ID NO: 956836 - DNA, 120 bp, Artificial Sequence
  ENSG00000236106_14 (sequence is synthesized)
ggcggagctcagcttaaagccgttgccacccagccatgggcattttctccacattttgcaggcatcctacaactgaaaactgggtcgcaggcatttgaattggcccagaggacccctgca

SEQ ID NO: 956837 - DNA, 120 bp, Artificial Sequence
  ENSG00000236107_0 (sequence is synthesized)
accacagtcattctcctgaaatgcacagctgagggaaagaagaatgtcagatgccccgcgaacgtgcagaagctcccagttgcatcaccctggcgtgccaggtattgcagcaaataggaa

SEQ ID NO: 956838 - DNA, 120 bp, Artificial Sequence
  ENSG00000236107_1 (sequence is synthesized)
agacagtaaatcaagaggtactgacaactgagactgagtgatggtccctgcctaggatttggaatctttgcatgaaatagggactctagccaccagcgacaaagaagtcagggagactgc

SEQ ID NO: 956839 - DNA, 120 bp, Artificial Sequence
  ENSG00000236107_2 (sequence is synthesized)
gatgtccacagtgctaccttctgatgagctactgctttcattcagtttctatccgattcactactaaagtcttccgtgtttaaattttcaaagtcagattctcctacagcaattgaggag

SEQ ID NO: 956840 - DNA, 120 bp, Artificial Sequence
  ENSG00000236107_3 (sequence is synthesized)
aagctccaagctcctgaagaatccaggatccatgaatgtgaatgaaattccttccaaaaattagacttatttgagatcaattggcagtgggcagacaaaacattaaagaagcaacataat

SEQ ID NO: 956841 - DNA, 120 bp, Artificial Sequence
  ENSG00000236107_4 (sequence is synthesized)
atgagtccagaaaacagatagagctttaccacaaagcgcatttgaaggaagggagaatttcacctgtgcttactagaagaacaatcccctatgccaacaatacttagccctctttttctc

SEQ ID NO: 956842 - DNA, 120 bp, Artificial Sequence
  ENSG00000236107_5 (sequence is synthesized)
tgattcattgagggattctgtccctgaatgacattgtgagatcatcgtaaatctgaacagacttgtgcaatgcaaatgcctttgctgtgggggaatatgagcatgtaacgacacagaaag

SEQ ID NO: 956843 - DNA, 120 bp, Artificial Sequence
  ENSG00000236107_6 (sequence is synthesized)
acataacgaagcaccagtgctggggagctctctgaatgtcatcaccagcaagagcaagaagtattggcagcagcaggcagccaggcaggctgggagtttgcatggaaatcatgaagtctt

SEQ ID NO: 956844 - DNA, 120 bp, Artificial Sequence
  ENSG00000236107_7 (sequence is synthesized)
tcttgtcttcctcttttgaaatattttggaaggcgagttaagaatagctcagaaactggtctcattctttttgtgggaagaatgaccagaagcataaaagctaagtcttccagcaagtgc

SEQ ID NO: 956845 - DNA, 120 bp, Artificial Sequence
  ENSG00000236107_8 (sequence is synthesized)
aagacacctcttttggtgtttgcagtaaacctaacaagaatgaattgctatcagtaaagtcctgtaccatgacacctaaaaggaaggaaatggtaaagcaaagtaataactcaaagacag

SEQ ID NO: 956846 - DNA, 120 bp, Artificial Sequence
  ENSG00000236107_9 (sequence is synthesized)
gaacatgaccaggaagagcaggaggccgatgttaaacaacgcaggaagggacatcatcaaagcaaagagcagcgtgcggatcccctttgctcctttgactagacgtaggattcggccaat

SEQ ID NO: 956847 - DNA, 120 bp, Artificial Sequence
  ENSG00000236107_10 (sequence is synthesized)
cctggcaagacggatcactcggaacagggtagcagagatctctggaggtgaaacattgctctgaactggcattgattctagcccagctcttgtagaccaattaccaacttctccatctcc

SEQ ID NO: 956848 - DNA, 120 bp, Artificial Sequence
  ENSG00000236107_11 (sequence is synthesized)
ctccagtgcctggaactggacctggcacacaggcaaagggttatcaactgtgctgcactctgaggagcttgaccggtttaatctctagaaaggaattcaccaccccaccagacacaatga

SEQ ID NO: 956849 - DNA, 120 bp, Artificial Sequence
  ENSG00000236107_12 (sequence is synthesized)
agatgaggtcattgtgtgggtccaaatccaatataactggggtccttataagaagaaaagaccgagacacacagggagaaaactaccctttagactaaaaagaaaacaaatattacatac

SEQ ID NO: 956850 - DNA, 120 bp, Artificial Sequence
  ENSG00000236107_13 (sequence is synthesized)
cctgaatctgtgctgaaaccacaaaggagagcatctttggatccttccaagtaataaaaatattctgttgaagaagaatttgaacagttataacatcacagactttaatctgtgattgtg

SEQ ID NO: 956851 - DNA, 120 bp, Artificial Sequence
  ENSG00000236107_14 (sequence is synthesized)
ataaaggaggtcaaattaaaaaatctgattattgggagacttttggagtaatcatggaagaaagactatgaaatcagatattcttggatttgaatgttgcttctatcccttcttaactta

SEQ ID NO: 956852 - DNA, 120 bp, Artificial Sequence
  ENSG00000236107_15 (sequence is synthesized)
ttccatgctggctaccaaatggctgaatgttggtggagaaactctcacaaccaagtgaatggttatattttaagtaagtaatctccaacatcaaatttgcactcaaaatacactaaattt

SEQ ID NO: 956853 - DNA, 120 bp, Artificial Sequence
  ENSG00000236107_16 (sequence is synthesized)
ctcatgccctgatatgaccatatatataatgcattctcatcaaatcatctgtagaattttctcttcctcatttgcactctcaggcaatgatcccatcttatactttgaggaaataaaaac

SEQ ID NO: 956854 - DNA, 120 bp, Artificial Sequence
  ENSG00000236107_17 (sequence is synthesized)
cattgggtttgaactcaatcatcttttgataactctgcagtcttctcttctatctttcctcctgtttcggtggagctgtcgctcccctttactctttcactttcacgaggacttgacttc

SEQ ID NO: 956855 - DNA, 120 bp, Artificial Sequence
  ENSG00000236107_18 (sequence is synthesized)
tccctctctctcctgaattgattcatatataactactcattcattatcactagcaaaacatccatacaaaaacccatatatttttttaaatgccagccatttgccccattattctgcttc

SEQ ID NO: 956856 - DNA, 120 bp, Artificial Sequence
  ENSG00000236107_19 (sequence is synthesized)
cctttatagccaaatttcttgggagaattgtctacacatattaccttctttctgacctcttcttttcacccctgtatgcaccttattcttaccttgaaccctaccacttacccaaatttt

SEQ ID NO: 956857 - DNA, 120 bp, Artificial Sequence
  ENSG00000236107_20 (sequence is synthesized)
ctcaagaaattctctgatgacttccctgttacttaacctaatgcatatttctttcttcatcatccttactccttgatcttgcagcatgattctacacaagcacatctgtttctacaatat

SEQ ID NO: 956858 - DNA, 120 bp, Artificial Sequence
  ENSG00000236107_21 (sequence is synthesized)
gttttcttctcttggcttcattatttatatctttgcttcttactttattggcggctctttctctgtgttcttttctgggtcctcttttctacctgaattctaaatgtcagagttgtagat

SEQ ID NO: 956859 - DNA, 120 bp, Artificial Sequence
  ENSG00000236107_22 (sequence is synthesized)
cttggtaccagattgctttaaataccaggtttcccattctctatctacttaaaaatatcagggatgttcagaggtagaggtgtgtgtgtcctttctttttgctgattgctctggaattta

SEQ ID NO: 956860 - DNA, 120 bp, Artificial Sequence
  ENSG00000236107_23 (sequence is synthesized)
tctccaaactcagcaggccctctgatttctatacttaaatctccaattctctatattatatatccacctggacatctcaaaggcatctcattttaattttagctagctaatagtgacctt

SEQ ID NO: 956861 - DNA, 120 bp, Artificial Sequence
  ENSG00000236107_24 (sequence is synthesized)
cctctacaaatgtgtccaccatttcctcattaaccatcaccacccatccagttattgcagccagaaactgagaagtcatcctcaatgcttcctgtcttctttaatccatcagcaagctct

SEQ ID NO: 956862 - DNA, 120 bp, Artificial Sequence
  ENSG00000236107_25 (sequence is synthesized)
acagactttgtatgttgagctcatcttttttctcttcatttctctgccatcactctagatgaaacctttattttctcttgcctagatgagagaagcaaccttcaacttacctttcttatt

SEQ ID NO: 956863 - DNA, 120 bp, Artificial Sequence
  ENSG00000236107_26 (sequence is synthesized)
cccatctaccatctacccttgctcaatcagttgtgcacaagacagacagcaataaaaatgactgcatttaaaataaaatacaaactccttcccatgggctgaaatgtcctgcatgatatg

SEQ ID NO: 956864 - DNA, 120 bp, Artificial Sequence
  ENSG00000236107_27 (sequence is synthesized)
ggaaggagtggaagaagtcgttcatgtgccaccgtgggagcgtacagtcatcattgatcttgcagacacattctttgtagctcttaccaaagagctgcatgccgaccacagcaaaaatga

SEQ ID NO: 956865 - DNA, 120 bp, Artificial Sequence
  ENSG00000236107_28 (sequence is synthesized)
tttcataaatttgccgtttcaaaaagctgaaagtacttacgcaaaaacaatgacgacaaaatccagccagttccacgggtcacgaagaaaagtgaattctcctacacagaagcctcttgc

SEQ ID NO: 956866 - DNA, 120 bp, Artificial Sequence
  ENSG00000236107_29 (sequence is synthesized)
aaggatttttacaagtgattcaaaagtatatattccagtaaaagtgtacctaaacacaagattccattgggatactagatgtgaaaagaatacaaccaccatgtaaatctttataactta

SEQ ID NO: 956867 - DNA, 120 bp, Artificial Sequence
  ENSG00000236107_30 (sequence is synthesized)
ttttctctaattaaccactggaagacatatattggaggatggctgttgggttatggacacaccctattaaactacaataggtctatccagaaaatattaaaatgtcaatatcagaaacac

SEQ ID NO: 956868 - DNA, 120 bp, Artificial Sequence
  ENSG00000236107_31 (sequence is synthesized)
tcccagaaagcagaggtacttgaaataactaagaatataggtctcagatctgcctaaaaatttcctacattgcttctatcaaaaattcacccaatcatttaaaaatacacccatataatt

SEQ ID NO: 956869 - DNA, 120 bp, Artificial Sequence
  ENSG00000236107_32 (sequence is synthesized)
ataaaacatacacccaagaataaaatatgtgtaacatgtctaagaacaggatggagcatctgacaagttcattctttgagaaaacactgtagcatctaatttttctaatctagcaggtta

SEQ ID NO: 956870 - DNA, 120 bp, Artificial Sequence
  ENSG00000236107_33 (sequence is synthesized)
aaaggatgaaatgataataccaaaactatattaaaatgtacttatacccacttactcgacatttttggtccagtccggtgggttattcatggtcataaatatgcagtttgtcagaatagt

SEQ ID NO: 956871 - DNA, 120 bp, Artificial Sequence
  ENSG00000236107_34 (sequence is synthesized)
gcacatgatgagcatgctgaataaggtagcttagaatcaaggaacaaaagagacgacagtgggaatttgaaatatttgaggatgacacttgttgaaatgcttacaacttttcctaagaaa

SEQ ID NO: 956872 - DNA, 120 bp, Artificial Sequence
  ENSG00000236107_35 (sequence is synthesized)
aaaattctaaatgagcttgtagactattttgtctctttgaacaagagagtaataaataaaagtaacatatcctaaaatcttaatattgccactctcccagtcttctctgagacccatgac

SEQ ID NO: 956873 - DNA, 120 bp, Artificial Sequence
  ENSG00000236107_36 (sequence is synthesized)
aaattatattaataatactgaaattaataaactaaaaccagagtctttcaaggtgcaaaaggtataacatctatatttgaataaaatagcaaaaattacaccataaagtgccactggatg

SEQ ID NO: 956874 - DNA, 120 bp, Artificial Sequence
  ENSG00000236107_37 (sequence is synthesized)
taatcatttttaaaaggatatgagtgtactaaaatcttaatagatattcttcttagaggactgaaaggagaaagcatatataaagcaggtgtggcattgaaacggaagattgttttccct

SEQ ID NO: 956875 - DNA, 120 bp, Artificial Sequence
  ENSG00000236107_38 (sequence is synthesized)
ttgttcaatactatgaaagtctgcaggaggaaaaagaaaggatgaaattgagaatccaaaatatcaatttttcacatcaatatcagcagtttacctttctacatggcagtgttatattga

SEQ ID NO: 956876 - DNA, 120 bp, Artificial Sequence
  ENSG00000236107_39 (sequence is synthesized)
agaaacactgccatcagactccagcaatgtggttccaatgtcatcaacgcatctatcaatgtcaccttggccaatgaactccaagtccacttcttcatagtaactttaaaaattgagcta

SEQ ID NO: 956877 - DNA, 120 bp, Artificial Sequence
  ENSG00000236107_40 (sequence is synthesized)
tttgttagcatgtattgcttagagctttcaaaatactgtatttcatatttttcattttctttcaccagtaacaataactgtggttaagttattttaaagtacaacttctttcccttccat

SEQ ID NO: 956878 - DNA, 120 bp, Artificial Sequence
  ENSG00000236107_41 (sequence is synthesized)
tacactgcattttaagaaagccaaatagaaactagctatctctaatatttttatcataaaaccttgagaattttaatacttgctggcaattgttatggttagcagcacatgttccaaaat

SEQ ID NO: 956879 - DNA, 120 bp, Artificial Sequence
  ENSG00000236107_42 (sequence is synthesized)
atgagttatttcaaaaaatattttcctaagttgaaggaacgtcagagttggaagaatccttccaatcactgagttcaatttctttattttagttataatactaatattagcttttaaaag

SEQ ID NO: 956880 - DNA, 120 bp, Artificial Sequence
  ENSG00000236107_43 (sequence is synthesized)
ggacttaaattaagaggattcctcacttactaaccacggtaatttaaaaaacgatatgaatagaagcaaacattcttgaaatgttattgtagccattccataagtgtccttttccatagc

SEQ ID NO: 956881 - DNA, 120 bp, Artificial Sequence
  ENSG00000236107_44 (sequence is synthesized)
tttagtattcagttaagaaataaaaacaaccagcagtaacaacaaaatattaaagcaacctaaagcattggcttagaaatcagaaagacaaagttcaaatcccagccttatttttctccg

SEQ ID NO: 956882 - DNA, 120 bp, Artificial Sequence
  ENSG00000236107_45 (sequence is synthesized)
gttggcaggaagatgacttgtgttagctgaaagacactgactttctaaattttatatagggttatcagtgggtttctggcaataagcatttctcaccgtattcaggaggtaagtctgtga

SEQ ID NO: 956883 - DNA, 120 bp, Artificial Sequence
  ENSG00000236107_46 (sequence is synthesized)
gtcaggctttttatttgtatgcggcagcgttccctcaagaaaacaaatcagagtctattgttttcaggtgtccttttattttcctgctccctttcactgtatcagttctatctaaataca

SEQ ID NO: 956884 - DNA, 120 bp, Artificial Sequence
  ENSG00000236107_47 (sequence is synthesized)
atttaatgtaaaattcacttttacatggaaaattattttaaaattaatacctagtcctcaagtacaatcctttttgtcttaaatctcagtagactgtatttttaaaaaattattcatcca

SEQ ID NO: 956885 - DNA, 120 bp, Artificial Sequence
  ENSG00000236107_48 (sequence is synthesized)
ttctttctgcaattgtattgacatggtttggctctgtgtccccgcccaaatctcattttgaattgtaatccccacgtctcaggggagggacctggtggtaagtgattggatcatgggagc

SEQ ID NO: 956886 - DNA, 120 bp, Artificial Sequence
  ENSG00000236107_49 (sequence is synthesized)
ggtttccccagtgctgttctcatgatagtgagtgagtgagttctcatgagatctgatgggtttaaaagtgcggcatttccctcctctttctccctctcctgcaccatgttaagatgtgcc

SEQ ID NO: 956887 - DNA, 120 bp, Artificial Sequence
  ENSG00000236107_50 (sequence is synthesized)
actgccagagtggacaccgaggccgaggagacgccaagagcgatgaaacaagcttctggttcaagagtttcttcaggttccactacgggctgttcttctacaggtgcgccgatgtccaca

SEQ ID NO: 956888 - DNA, 120 bp, Artificial Sequence
  ENSG00000236107_51 (sequence is synthesized)
cagggcattcaataaccacttaataactacaaccctgatgatccgattcactactaaagtcttccgtgtttaaattttcaaagtcagattctcctacagcaattggtacagtcacagtaa

SEQ ID NO: 956889 - DNA, 120 bp, Artificial Sequence
  ENSG00000236107_52 (sequence is synthesized)
gactggggttgtttatgaatgacatgtaatcactttcatcaataatgtatttttcaacactgctgccagttcctataccacttgtagttccatttacatctttaagatagtcaagatctt

SEQ ID NO: 956890 - DNA, 120 bp, Artificial Sequence
  ENSG00000236107_53 (sequence is synthesized)
tcccaatttctgctgtatgattggacatacaactgtctttcttgttgtttagatcatcaagtggtttaatttcatctaaaatcttttgtttcctaatgaaggactgttgaataaattcat

SEQ ID NO: 956891 - DNA, 120 bp, Artificial Sequence
  ENSG00000236107_54 (sequence is synthesized)
ttcatgtggaaactatgcatttccagtttttaagcacccaatgttcaatccatcaacaaatcccttcagctctaacttcaaaatatactcagcatgtcacaccctcactatacaaaactc

SEQ ID NO: 956892 - DNA, 120 bp, Artificial Sequence
  ENSG00000236107_55 (sequence is synthesized)
taccatactagtctaagctcccatcacctctcacctggatttatgcagaaactccaagaaatcttccagcttctgccattgctattcgcccttccactcttaagattgcacattgtgaga

SEQ ID NO: 956893 - DNA, 120 bp, Artificial Sequence
  ENSG00000236107_56 (sequence is synthesized)
ttttaaaatcacatccttataatgttcttcaaatgtcttataatctggcctctactacatctctgatctacactttttaaaaataatgtcatttgttttatttgtttgtttgttggagac

SEQ ID NO: 956894 - DNA, 80 bp, Artificial Sequence
  ENSG00000236107_57 (sequence is synthesized)
aattctcgtgcctcagcctcacaagtagctgggattataggcatgtatcaccaagatcaattaatttttttttcattttc

SEQ ID NO: 956895 - DNA, 120 bp, Artificial Sequence
  ENSG00000236107_58 (sequence is synthesized)
ctcgtgcctcagcctcacaagtagctgggattataggcatgtatcaccaagatcaattaatttttttttcattttcagtaaaaatggggtttcgctacgttggccaggctggtcttgaac

SEQ ID NO: 956896 - DNA, 120 bp, Artificial Sequence
  ENSG00000236107_59 (sequence is synthesized)
aagtactggaattataggtgtgagccacttcacccagcctctgaccttaacttttaatcctcttcccatctttcattattctccatctattttggcctcttggtttttcccaaatgttat

SEQ ID NO: 956897 - DNA, 120 bp, Artificial Sequence
  ENSG00000236107_60 (sequence is synthesized)
gggcatgtgccttcattactctgcctaaaatactttccctccatatatttgcacggcccccttcaattttctttacatcacggaagaaacgccacctttataggcaggctttctctgacc

SEQ ID NO: 956898 - DNA, 120 bp, Artificial Sequence
  ENSG00000236107_61 (sequence is synthesized)
aatcattcattgatagcatatttatgtgctagtaagttcttccccctcactcttggtattcctcttttccatataccttctccatagcacttttcacttatctgacctgctacatcttga

SEQ ID NO: 956899 - DNA, 120 bp, Artificial Sequence
  ENSG00000236107_62 (sequence is synthesized)
tctttaagccattaagccttagctgctgcatctgtaaaatacgtataagaatacctactttataaagttgttaaatagtataaataggatattgcatgtaaaccacttgatactgtgatc

SEQ ID NO: 956900 - DNA, 120 bp, Artificial Sequence
  ENSG00000236107_63 (sequence is synthesized)
cacacattctgtactagctgctcaaaaacaggagttattataattagttaaactattatacaatttgagataaaactattgattgaattacacatcatcattttatcttacttagaagac

SEQ ID NO: 956901 - DNA, 120 bp, Artificial Sequence
  ENSG00000236107_64 (sequence is synthesized)
acagataaaacaataaagccttgcagtttgaggtgcaaatgtaggtgaaaatgtgcatgaaaagctttcctgaaaacactcctgaacctcgggaaggatgggcctggtagagtgagtatg

SEQ ID NO: 956902 - DNA, 120 bp, Artificial Sequence
  ENSG00000236107_65 (sequence is synthesized)
ggagaggataagatgcaattttgcatacataaacatccaaaatattttaataaggatggattactttagaattatcctttaaactaatgctggttcacatttatcaaccactgaggagct

SEQ ID NO: 956903 - DNA, 120 bp, Artificial Sequence
  ENSG00000236107_66 (sequence is synthesized)
gaattatatgaatgggctctggagctgtctattagcacactgctatactactgtatttaacacagtataagaatgatgaaaggtaaagcaatgcaggtagctcactctaggtttgtagaa

SEQ ID NO: 956904 - DNA, 120 bp, Artificial Sequence
  ENSG00000236107_67 (sequence is synthesized)
aactttacaataatttctaaacaactagacattaaattattaagatggttggcttcaagaagatttaaggttaacatctttaaaaatgggaaaaaattgaatgcaaagaaaaatgaaata

SEQ ID NO: 956905 - DNA, 120 bp, Artificial Sequence
  ENSG00000236107_68 (sequence is synthesized)
taaaaatgggaaaaaattgaatgcaaagaaaaatgaaatattgcttgtgcatattcaaaagtgggatgattctgaaagataaagaatgaatcacggccgggcgcagtggctcacgcctgt

SEQ ID NO: 956906 - DNA, 120 bp, Artificial Sequence
  ENSG00000236107_69 (sequence is synthesized)
aggcaactactactacttatctcccatatatatttccaggagtgatggtgaggaggaattgtgccagcttgcttcttcactgccattttggaaccagaactcagaacctgagaaagatga

SEQ ID NO: 956907 - DNA, 80 bp, Artificial Sequence
  ENSG00000236107_70 (sequence is synthesized)
atcgggagtcactgggattaaaggcatgagccaccatgctcagaatacaaacaaagacccattttctagaagaagtaaca

SEQ ID NO: 956908 - DNA, 120 bp, Artificial Sequence
  ENSG00000236107_71 (sequence is synthesized)
cagaatacaaacaaagacccattttctagaagaagtaacagggaagagagagtaagaaagagataatgatgaacattgtctaatgttacagcataatctagtaaggaacttgacatcatc

SEQ ID NO: 956909 - DNA, 120 bp, Artificial Sequence
  ENSG00000236107_72 (sequence is synthesized)
gcagcctcaacctcctgggttcaagtgattctcccatctcgcctcctgagtaactgggaccacagaaggtccctgcttccctttcaccttctgccatgatagtaagtttcctgaggcctc

SEQ ID NO: 956910 - DNA, 120 bp, Artificial Sequence
  ENSG00000236107_73 (sequence is synthesized)
gctagtcttgaactcctggacacaagtgatcctcacaccttggccttccaagtgctgagattataggcatgagccacagtgcctagccaacaactcttagaggaacaggatttcaccagt

SEQ ID NO: 956911 - DNA, 120 bp, Artificial Sequence
  ENSG00000236107_74 (sequence is synthesized)
cacccagactcgcctcgaactcctgacctcaagggatccgcctgccttggcctcacaaagtgctggaattacaggagtattcatcatcatattctgtattagtccattttcatcctgctg

SEQ ID NO: 956912 - DNA, 120 bp, Artificial Sequence
  ENSG00000236107_75 (sequence is synthesized)
tcatcatcatattctgtattagtccattttcatcctgctgataaagacataaccgaaactgggtatttataaagaaaaagaggtttaatagacacacagttccacgtggctggggaggcc

SEQ ID NO: 956913 - DNA, 88 bp, Artificial Sequence
  ENSG00000236107_76 (sequence is synthesized)
tcacaatcatggcagaaggcacttcttacgtggtgacgacaagagagaatttgtgaagggaaactccactaccaggagaacagcatgg

SEQ ID NO: 956914 - DNA, 85 bp, Artificial Sequence
  ENSG00000236107_77 (sequence is synthesized)
caaattccatgcttcaacaatgttgttggaacaaaagggatttgtctgaaggttcagccatccatatattcttgtaacttttgga

SEQ ID NO: 956915 - DNA, 120 bp, Artificial Sequence
  ENSG00000236107_78 (sequence is synthesized)
ctgaaggttcagccatccatatattcttgtaacttttggacaccctcaaaaatatatatctgaaccagatctccagagatgtgcaaactgagacccaattgacacatttacctttgctaa

SEQ ID NO: 956916 - DNA, 120 bp, Artificial Sequence
  ENSG00000236107_79 (sequence is synthesized)
atttctaggccattggcattaagggatgtcatcacaagcatcagcctcatgggatctggagaaggaagaggagggcgatagccgaaatgatggccactggctcattgtagctttaaatga

SEQ ID NO: 956917 - DNA, 120 bp, Artificial Sequence
  ENSG00000236107_80 (sequence is synthesized)
tctactctacaggtttttggaagtcacctttatcatatatatttggaaaatcatctgtgtcatcaggttgggttggcaagaacattggagttctcaggaattgaaaacataatgactccc

SEQ ID NO: 956918 - DNA, 120 bp, Artificial Sequence
  ENSG00000236107_81 (sequence is synthesized)
tttgactaatttattttctttaacattattcccgcaatcacttgactttctatcctatttttcagtgattttactttgaaatatgacgggtaatgagctgtaaaataatgagatatcatc

SEQ ID NO: 956919 - DNA, 120 bp, Artificial Sequence
  ENSG00000236107_82 (sequence is synthesized)
ttctctgtcctacatttaaatttggaatttctatatctgaacaagtatgtttagagtcagtattaaagaacatccatttttagaaagaatttgaaacaactctatgaagggataaaacat

SEQ ID NO: 956920 - DNA, 120 bp, Artificial Sequence
  ENSG00000236107_83 (sequence is synthesized)
actattgtgtcttaaaaggctaggcttcagagacaggtgaagtttgttaattgtgttatcctgagagttatttgaacactctgggccctagctctctcatcataggaataataacacctg

SEQ ID NO: 956921 - DNA, 120 bp, Artificial Sequence
  ENSG00000236107_84 (sequence is synthesized)
ccttgtatgagtctgtgaggattaaataaaactgtatttatataaagaccttaacactgagcttggcacataattcttaccctcatactacactaccctgattattgcagctttctggtt

SEQ ID NO: 956922 - DNA, 120 bp, Artificial Sequence
  ENSG00000236107_85 (sequence is synthesized)
gtttttcaaaccaggtaataaaagttctccaagtttgttactcttattcaaatttatctaggctattctaggatctttgcatttccatataaattttataattggtttgatgatatctac

SEQ ID NO: 956923 - DNA, 120 bp, Artificial Sequence
  ENSG00000236107_86 (sequence is synthesized)
tcctcaagcactgccagagtggacaccgaggccgaggagacgccaagagcgaaaatttttgttttccatgactgcaagaaatactgctgaacaagacatttcttcatcatccttgatgaa

SEQ ID NO: 956924 - DNA, 120 bp, Artificial Sequence
  ENSG00000236107_87 (sequence is synthesized)
agatgaacattaataatgcagatagaaatcaggccaagtaatgttgaagagaaaacaaggtccagtagcactacttccttttagaagataagaataaacagatttaaaatggcaagctca

SEQ ID NO: 956925 - DNA, 120 bp, Artificial Sequence
  ENSG00000236107_88 (sequence is synthesized)
ataattttaccctaacaaaaaatgagggactttctggtctccatattctcataaataaaagttgcattccatgaggagaaaacaaaaaaacccatcacagtgaacaattgaattgctccg

SEQ ID NO: 956926 - DNA, 120 bp, Artificial Sequence
  ENSG00000236107_89 (sequence is synthesized)
aggaataaatatggtccacctttcaaatgtactgcatatacttcctttccccccagatatgctgagtaaaatctgaaagaaatattaggggctcagatggccagtcgcagtggctcacgt

SEQ ID NO: 956927 - DNA, 120 bp, Artificial Sequence
  ENSG00000236107_90 (sequence is synthesized)
ccagcctgggtgatgagagcaaaactccatctgaaaaaaagaaaaagaaatattaggggcacaggtaggagaaccagtaaaaatataacacagaatatatatattttaaaataagaatct

SEQ ID NO: 956928 - DNA, 120 bp, Artificial Sequence
  ENSG00000236107_91 (sequence is synthesized)
cttgatttcagataatattaaaagctaattttgaaacaaatagtagtgatacaaagagataatgagaaagaaatgacaatccatagatggcctaaatcatgggctggagtgtgaggataa

SEQ ID NO: 956929 - DNA, 120 bp, Artificial Sequence
  ENSG00000236107_92 (sequence is synthesized)
tcaagatggtactgtttgtacctccgtggataaggaaaataaccaggctcatcctaaggagacaggaccatacttagaagagaacacctgtgatgctggctccttggccactgttcagcc

SEQ ID NO: 956930 - DNA, 120 bp, Artificial Sequence
  ENSG00000236107_93 (sequence is synthesized)
caaaccatgaccagaggtaataaatgaccaaaacagaaaagacagacaaggagtggtaaagtaaaaggcaaagctagagatctaaaagaagggaggggaaatatttctgccctgagtact

SEQ ID NO: 956931 - DNA, 120 bp, Artificial Sequence
  ENSG00000236107_94 (sequence is synthesized)
aaaaagtaaaagaggcaagattcagaaaccaaacacaaaaggttccaaaaaggaagtctgcctagaagtaaaaagagcagaggattctagacaaaaatcggggaaaggtggggacagaga

SEQ ID NO: 956932 - DNA, 120 bp, Artificial Sequence
  ENSG00000236107_95 (sequence is synthesized)
gaaatctgttaaaggacacaaaattacaactagataggaggaacacattctagctctccacaccactgtaggatgactacagttaaaaataatttattatatagtttcaaatagctggaa

SEQ ID NO: 956933 - DNA, 120 bp, Artificial Sequence
  ENSG00000236107_96 (sequence is synthesized)
ggaagatattgaatgttcccaacacaaaaaatgataaatgtttgagatgacggatatgctaattattctgatctgatcactatacatcatatgtattaaaaccactatatgcttcataaa

SEQ ID NO: 956934 - DNA, 120 bp, Artificial Sequence
  ENSG00000236107_97 (sequence is synthesized)
cagatacagtttttcacaaattgaaagtttgtggcaaccctacatccagcaagtcaattttggtgccatttttccaacagcatgtgctcacttcgtgtatctgtgtcacattttggaact

SEQ ID NO: 956935 - DNA, 120 bp, Artificial Sequence
  ENSG00000236107_98 (sequence is synthesized)
aaaaaataagataaaaggaggtataaagggctgaaactaagtaagatgagtttaatgaaaccaaagcactctcaatgttggtatgtgattctaaatctaaaagtcctttgacatagagaa

SEQ ID NO: 956936 - DNA, 120 bp, Artificial Sequence
  ENSG00000236107_99 (sequence is synthesized)
aattaatactttgacacaaaagttaaaaacaaatgggcataattatcaattgttcaagccttagatgaaaacatttactgattttacagtgtattccctttattcattttaaaaatttaa

SEQ ID NO: 956937 - DNA, 120 bp, Artificial Sequence
  ENSG00000236107_100 (sequence is synthesized)
agaatgtgtagaagattatttggtaacaagatttatatgtgcaatggaaaatacttgcaagttgaatttataaatggaattggtaaggtttttactgaacaacggtatttgttttgcttt

SEQ ID NO: 956938 - DNA, 120 bp, Artificial Sequence
  ENSG00000236107_101 (sequence is synthesized)
aatttttcataagacatactgttgtgcaagacatccttgctacccaggaagctaacaataaggccaacattaaaggaccattttttcataggatttcttctgtgagaactccatttttct

SEQ ID NO: 956939 - DNA, 120 bp, Artificial Sequence
  ENSG00000236107_102 (sequence is synthesized)
cagattgaaacatacatgcttatgtacaaacttcatagatgtagctttaaggtattgatggattttaaacagccttccaataaagcaacagtacccagacttgtatagcaacccaatatg

SEQ ID NO: 956940 - DNA, 120 bp, Artificial Sequence
  ENSG00000236107_103 (sequence is synthesized)
tataattttaaatatgatagcactttcatgtcagagtaagttccatttagaatgtcagtcttattatatgtaattgatcttatgtttgtttatttcctcaactgtctgtatcttacctcc

SEQ ID NO: 956941 - DNA, 120 bp, Artificial Sequence
  ENSG00000236107_104 (sequence is synthesized)
ttgtaattgcttacatagccaagaagccgatcattcagtttataagtgttaagaattaataaaaggatacttgtttccaaggactctcagatacagctttctcccaaaagtggcattgat

SEQ ID NO: 956942 - DNA, 120 bp, Artificial Sequence
  ENSG00000236107_105 (sequence is synthesized)
gatattgaagggagggaagagtctgaaggaaatactgtttgcttacaacaaatacttaagtagctctagagttttcaaatatataaatatttgccttccccgctatacgtataagaaagg

SEQ ID NO: 956943 - DNA, 120 bp, Artificial Sequence
  ENSG00000236107_106 (sequence is synthesized)
gctccaagagggaagagttcaaagactagctaagatattgctgtaccttaaactgtataaacaaatattgtgtagctttaagctaatcaagatttatgaactattaaattgggtgacttt

SEQ ID NO: 956944 - DNA, 120 bp, Artificial Sequence
  ENSG00000236107_107 (sequence is synthesized)
gtcttagtcctctgaatattttttctttgttcagaacctgagaaagatgaatgaaatttagtgtttcccatccccgagagacacccagcatccacaacttcacactctgatgccattgtg

SEQ ID NO: 956945 - DNA, 90 bp, Artificial Sequence
  ENSG00000236107_108 (sequence is synthesized)
agcaaaaaaaaaaaaaaatacatgaagcaattccagaaagcgatgaattaaattaaatttgattaaaggctgtctgtgtacatagagaat

SEQ ID NO: 956946 - DNA, 120 bp, Artificial Sequence
  ENSG00000236107_109 (sequence is synthesized)
aattaaatttgattaaaggctgtctgtgtacatagagaattgcaatctaacttcatatgtaaacaaattgcattctaatctattagtatattcttgtaacaagtagctgtctcagccaat

SEQ ID NO: 956947 - DNA, 120 bp, Artificial Sequence
  ENSG00000236107_110 (sequence is synthesized)
cacagcagctgagcttcagccaaccacagcctgctgatttatcagacaatgtccacataaggcaaatgtcaagctataagcaatcaagctgtttttgtgcgtcactccctttttctgtct

SEQ ID NO: 956948 - DNA, 120 bp, Artificial Sequence
  ENSG00000236107_111 (sequence is synthesized)
ataaatactcctgctcatgttgctgagttgagctctccgaacttctcttggttctgagtgctgcctaaatcattattattattatcttatttcagcaataaatactatttcattgctgaa

SEQ ID NO: 956949 - DNA, 120 bp, Artificial Sequence
  ENSG00000236107_112 (sequence is synthesized)
ataagctgctaaatttaatttgttgaaaatttttcttttaacaaaggttaagaaaaccattcacagtataaactcagaaataggagcaagactcagaataaaaggacagatcccagtgag

SEQ ID NO: 956950 - DNA, 120 bp, Artificial Sequence
  ENSG00000236107_113 (sequence is synthesized)
aaaggacagatcccagtgagaaaacttaagtttaaataagtgtggtaaaataatctacaatattaaatgtaagttactcatcagatatattaattttacagcatataaattaagaaataa

SEQ ID NO: 956951 - DNA, 120 bp, Artificial Sequence
  ENSG00000236107_114 (sequence is synthesized)
gagctggtggagaattccctggctggattcatcagtctttgctatggacaagagaatacacataagaagatattgagacttccacgttaatcaaactgaaaagtaagacaaggaattcca

SEQ ID NO: 956952 - DNA, 120 bp, Artificial Sequence
  ENSG00000236107_115 (sequence is synthesized)
aatcagagcctattttagaactatgagcattcaactgaaaacgggtctccagatttctgtgctgctccattctgttgccaccaacaattgataattggtatcatttttgtgcaagtgaga

SEQ ID NO: 956953 - DNA, 120 bp, Artificial Sequence
  ENSG00000236107_116 (sequence is synthesized)
gggctgcaggtcccgagccctgccgcgcgggaggcggctgaggccccgtgagaattcgagcgccgcaggggcaggctggcagtgctgggggacccggtgcactctccgcagctgctggct

SEQ ID NO: 956954 - DNA, 120 bp, Artificial Sequence
  ENSG00000236107_117 (sequence is synthesized)
actctccgcagctgctggctcgggtgctaagcccctcactgcctcgggccagcggtgccgacccgccgctccaagtgcggggcgggcggagcccgcgcccacctggaactcgcgcgggcc

SEQ ID NO: 956955 - DNA, 120 bp, Artificial Sequence
  ENSG00000236107_118 (sequence is synthesized)
agatataacaccaaaggcacgatccatgaaaaaaaagaattgacaatctgatatcattaaaatgaaaaattttgctctgtgaaagatactatcaagagaataggaaggcaagccacatac

SEQ ID NO: 956956 - DNA, 120 bp, Artificial Sequence
  ENSG00000236107_119 (sequence is synthesized)
taagaaaaatatttgcaaaagacatgtctgataaaggactgttaccccaaacatgcaaaaaattattaaagctcaacaataagaaaatgaacaatctgaataaaaaatgggccaaagacc

SEQ ID NO: 956957 - DNA, 120 bp, Artificial Sequence
  ENSG00000236107_120 (sequence is synthesized)
tgaacagacacttcaccaaagaagacacacagatggcaaataagcatatgagaagaagatgccccacatccatcatatgtcattagtgaaatgcaaattaaaacaataagatagcactac

SEQ ID NO: 956958 - DNA, 120 bp, Artificial Sequence
  ENSG00000236107_121 (sequence is synthesized)
accctcattagaatggtcgaagtccagaacactaacaacattaaatgctgatgaggatatggagcaatagaagctcacattcattgctggtgggcaagcaaaatggtacagcaacttgga

SEQ ID NO: 956959 - DNA, 120 bp, Artificial Sequence
  ENSG00000236107_122 (sequence is synthesized)
ggtacagcaacttggaagacagtttagcagtttcttaaaaaccaaacatactcttaccatatgatccagcaattgcataccttaggatttaaccaaaggagttgaaaacttatgtccaca

SEQ ID NO: 956960 - DNA, 86 bp, Artificial Sequence
  ENSG00000236107_123 (sequence is synthesized)
gtccttcagtaggtgaatggataaataacctgtggtacatccagacaatggaatattactcagcattaaagaaactttaaatacat

SEQ ID NO: 956961 - DNA, 120 bp, Artificial Sequence
  ENSG00000236107_124 (sequence is synthesized)
aaatacatattactaattgaaagaagcaatctaaaatggacatacagtatgattccaactatatgacattatggaaaagacaaaactacagagacaataaaaagatcagtgattgccagg

SEQ ID NO: 956962 - DNA, 120 bp, Artificial Sequence
  ENSG00000236107_125 (sequence is synthesized)
gcagtgaaaatactttgcatgacactgtaatagtggacacatgtcattatacatttgtgcaaacccatagaatgtacaataccaagattgaattataatgtaaactatggactttgggtg

SEQ ID NO: 956963 - DNA, 120 bp, Artificial Sequence
  ENSG00000236107_126 (sequence is synthesized)
attatgatatatcaaattgggttcatcagttgtaactatatacaatacctaaacactgtctctaaaatagctcttgaatcaaagaggactttgattctaatacatataatatagcacata

SEQ ID NO: 956964 - DNA, 120 bp, Artificial Sequence
  ENSG00000236107_127 (sequence is synthesized)
tgttaaaatatacctatatacaatacaggtatatttgaactgcgtttaatttgttaatttagggaaaaaattaatttttttcctaaattaattttcttccattgtattttttctcttcta

SEQ ID NO: 956965 - DNA, 120 bp, Artificial Sequence
  ENSG00000236107_128 (sequence is synthesized)
aatagattatttttacagtaatacatatgtgctactctggtgcgagatattgatagttgggggaggctctgcgtgtgtagagaaaggggaaactctatatttttggcttaattttgctgt

SEQ ID NO: 956966 - DNA, 120 bp, Artificial Sequence
  ENSG00000236107_129 (sequence is synthesized)
gaatctaaaactactgtaaaactagtctatttcaaagagaaaaagtacaatggaagaaatgtttctaaatacaatgtaagcattttttaaaagctttgaataaaccaaaagtaaatataa

SEQ ID NO: 956967 - DNA, 120 bp, Artificial Sequence
  ENSG00000236107_130 (sequence is synthesized)
atggatggaaagttatatcctattattagataggaatgctatatcataaagatattaattttccctaaattaataaattaaatgcagcctttgaaaaataatcacaaaattcatataact

SEQ ID NO: 956968 - DNA, 120 bp, Artificial Sequence
  ENSG00000236107_131 (sequence is synthesized)
agagaaatctatttgagacttcatgtggaaaaataagcaaacaagaataaccagaaaattcttaaaatgaattttggtttcaaagtcctcactgatgcaagaactatttaaaagaaagtg

SEQ ID NO: 956969 - DNA, 120 bp, Artificial Sequence
  ENSG00000236107_132 (sequence is synthesized)
tttaaatttttcaaatgatagattttccttctaagttttaaatttatgtttagttttattaccctatgctctgataatgtagttcgtaccatttctgtttcttggaatttattgtgattt

SEQ ID NO: 956970 - DNA, 120 bp, Artificial Sequence
  ENSG00000236107_133 (sequence is synthesized)
tctcctgaaatgcacagctgagggaaagaagaatgtcagatgccccgcgaacgtgcagaagctcccagttgcatcaccctggcgtgccaggtattgcagcaaataggaaaggaccttctc

SEQ ID NO: 956971 - DNA, 120 bp, Artificial Sequence
  ENSG00000236107_134 (sequence is synthesized)
atctctttgaaactctctttttgcctgctgccatccatgtgagatgtgacttgctcctcgttgccttctgccatgattgtgaagcctccccagccatttggaactgaacttgacatcatc

SEQ ID NO: 956972 - DNA, 120 bp, Artificial Sequence
  ENSG00000236107_135 (sequence is synthesized)
cagtttctgtaagtgagatggacatagaaagtaaagtcctttaattttggtaataagttgcctgccaagaaaggattattactatgaatttgttttttattcttcttgaggtagagatat

SEQ ID NO: 956973 - DNA, 120 bp, Artificial Sequence
  ENSG00000236107_136 (sequence is synthesized)
ttttagagaaaaagagagattgaataaggggaagaaataagaaaatcattgtctgtgctaacccttttaccataattcacaatgtaagcttgaaatcagattgctatgttatgaggttac

SEQ ID NO: 956974 - DNA, 120 bp, Artificial Sequence
  ENSG00000236107_137 (sequence is synthesized)
aaaaggccatcagccacatgtactgagcaaaacactgccttgtggattagagaagcaggggacacagggaagagaagagggaggaagagaaagggaaaaggagcaggagagaaagagaaa

SEQ ID NO: 956975 - DNA, 120 bp, Artificial Sequence
  ENSG00000236107_138 (sequence is synthesized)
gcttaccttagaagaaaataatgtcgttaggttattctgcagtttaatgtttgactttacatatttctttaacaatgtcttacctgtgtgtacagatactacctgttgttttcacttatg

SEQ ID NO: 956976 - DNA, 120 bp, Artificial Sequence
  ENSG00000236107_139 (sequence is synthesized)
ttactaagattcatggttaaggtgttcagagttatttactataaatgtggtcatttggagagaaattgttataaaatatgtcaaaaattacatcaataaacaaccttagagatattaaat

SEQ ID NO: 956977 - DNA, 120 bp, Artificial Sequence
  ENSG00000236107_140 (sequence is synthesized)
agacatcttcaatttctggcaagtattttagagcctgaagtgttgtaaaatgagataaatagtgtgtgggaaaattcagtttcctctgacaaatcatgtttatgttaatgtgccatgtga

SEQ ID NO: 956978 - DNA, 120 bp, Artificial Sequence
  ENSG00000236107_141 (sequence is synthesized)
atttctctttctagagttctcagaagacaaagatggcagagataatagaaaatattaactaacatattaagataggaaaaactcatgacgctctttctgaagaccagcaaactggcttat

SEQ ID NO: 956979 - DNA, 120 bp, Artificial Sequence
  ENSG00000235455_0 (sequence is synthesized)
gaaaccaagacaacccctgctgattcctcacagctgacttgtgacatgcctagtatttcccatcattatctcaaacaatgacctcctgaaaatacatctgatgaagagagctggggacac

SEQ ID NO: 956980 - DNA, 120 bp, Artificial Sequence
  ENSG00000235455_1 (sequence is synthesized)
agatatagcagacctggtcattcttttaatggaagggtggccctcaataaagacacgggaatggcagctgtgccagcgccaatagacctggatgatgcggacagcgttgagcaaacgaca

SEQ ID NO: 956981 - DNA, 120 bp, Artificial Sequence
  ENSG00000235455_2 (sequence is synthesized)
gtaacgctggcggacacaccacatgcggacccaggactgcagcctgactgctgcccattcctgctgcacatagaactccaacaccatcctccgcctctttgccagcagcttctccagcac

SEQ ID NO: 956982 - DNA, 120 bp, Artificial Sequence
  ENSG00000235455_3 (sequence is synthesized)
ctgcctccaccagcactgaatgatccaagccctgagggctgcatgcagcagtgtgcgtcgcaccagcatgccccgccaccaggcctggatgaaaacagctgcagacctttctgtcatgat

SEQ ID NO: 956983 - DNA, 120 bp, Artificial Sequence
  ENSG00000235455_4 (sequence is synthesized)
ggtcttctcttctgggccttacaagagaaaacagacacactcagggtatgctaggaaggggccctgatcctctatcaatgatggctccttcctctaaagttcagcactgggcagggcaac

SEQ ID NO: 956984 - DNA, 120 bp, Artificial Sequence
  ENSG00000235455_5 (sequence is synthesized)
agctgaacccaggagaccaggtgtacatctgccctagctacctcattccattttccatggaccttgctggccagtctagagcaagaacactgtgacttagaggtaaaagagctgccatct

SEQ ID NO: 956985 - DNA, 120 bp, Artificial Sequence
  ENSG00000235455_6 (sequence is synthesized)
acctgggatccatgactcttcccttcagagccctcccatccgctgaagaagtggtgtcctttgctcctcctgccctctttactctgacttcaagtcaaacccacaagctgctgtgttcct

SEQ ID NO: 956986 - DNA, 120 bp, Artificial Sequence
  ENSG00000235455_7 (sequence is synthesized)
tcctcctcaccaaagtggtaacagattcctccacctcacacacattgtgaacagcttgaacttcagctatgcatgcatctgtacaaacatgcacactccacacactaacacacattttgc

SEQ ID NO: 956987 - DNA, 120 bp, Artificial Sequence
  ENSG00000235455_8 (sequence is synthesized)
tcctggccacagtctccactccgtatctcagccagactcacatctctccgcctgacaagaaaatgggggcaagagacagccagtccccattcattccagctctgcataccctgacgtttc

SEQ ID NO: 956988 - DNA, 120 bp, Artificial Sequence
  ENSG00000235455_9 (sequence is synthesized)
accccagtttttctggaacaccctgattgatgtcaggtaatgaggacaggtgcctgtttccctcactgaagccactctttgtacaataaattacagggtcatagatctttgagtcactct

SEQ ID NO: 956989 - DNA, 120 bp, Artificial Sequence
  ENSG00000235455_10 (sequence is synthesized)
gctggaccacaggggtcagagatgtcactagttaaggctctctggacccagccactcacggagttgtgggtaagggtgtggcctggtaggggtgagggtgttgggggtggagtcgcttcc

SEQ ID NO: 956990 - DNA, 120 bp, Artificial Sequence
  ENSG00000235455_11 (sequence is synthesized)
ctcttctcccctttgttccttccagctctgttctatcgatgtgatttcatcattatgtttaatgatcatttaaaacagcttgccatccttctggaatcagagtgtatggggggaaatagg

SEQ ID NO: 956991 - DNA, 120 bp, Artificial Sequence
  ENSG00000235455_12 (sequence is synthesized)
gaagaaagtgaaaggtgctctcccactgctaggtgccaagtcaaacaccattctcactgtttctagacagcttcctggctttctctaggacttcaaacatggaggggggtcctgtcatga

SEQ ID NO: 956992 - DNA, 120 bp, Artificial Sequence
  ENSG00000235455_13 (sequence is synthesized)
gtaactgtggggaacttactctcccctcagaaagctagtgtggttctgactgcctcttacaaaacatctgactggggacaggtcgtaaaattcgcacaggtctggactttactaaattac

SEQ ID NO: 956993 - DNA, 120 bp, Artificial Sequence
  ENSG00000235455_14 (sequence is synthesized)
ccatggttaggggctagatggtcccatcaccctccggcccgcactcctccgatcaggactccaacaggaagagtggaggaagggcgggacctgtgatgtcataagggcacctgtgatgca

SEQ ID NO: 956994 - DNA, 120 bp, Artificial Sequence
  ENSG00000235455_15 (sequence is synthesized)
ggcaccaggacagcttccagcatatgagcctcttctaaggaaaacctagaagaccccaagtactgacccattgacacaaaggtatataatgctgctcattaaaatctggctggtattcat

SEQ ID NO: 956995 - DNA, 120 bp, Artificial Sequence
  ENSG00000235450_0 (sequence is synthesized)
agcatgaccctatgaagaaaggagatgaagagaaaaagtcataagatcagcaagaagagaaactgtagatttgcctcaactcaacatgttaagtaatcgcctgacatctacataagacca

SEQ ID NO: 956996 - DNA, 120 bp, Artificial Sequence
  ENSG00000232480_0 (sequence is synthesized)
cgcaggggctcccttggactcccaccctttcccaacctctgctggcttctccccaacgtggaattgctcgcttagggagcttctggagctccgctcggagcgaaccttctgctgccagca

SEQ ID NO: 956997 - DNA, 120 bp, Artificial Sequence
  ENSG00000232480_1 (sequence is synthesized)
gataacatcacgatcttgccggggaggggagatttataagttctctctgaaccacgtgtctgccttcaacaaagtgacgtgctaggattacagtcagaagtcctctcgttacttagacca

SEQ ID NO: 956998 - DNA, 120 bp, Artificial Sequence
  ENSG00000232480_2 (sequence is synthesized)
gcatgactctgcagccatactgaccagacagatgatttaaactggaaactctgttgaatgtactcccaaacccaagatctctatactgttctctacttcagatgttcctgagttcagaaa

SEQ ID NO: 956999 - DNA, 120 bp, Artificial Sequence
  ENSG00000232480_3 (sequence is synthesized)
agtcacaaagaactttctatcacttttggaatttatacttcagttgtgtatggggcctaggttattagtagagcactgaataaataaaataataatagctaacatatactacacttagta

SEQ ID NO: 957000 - DNA, 120 bp, Artificial Sequence
  ENSG00000232485_0 (sequence is synthesized)
gattcgcaaactatggcgacaaacaaccatagcagaagcatgtccggattatttcacatatatcacaaaatcctgcaaagggtctgtccccattggatcacctcccatcacgccacacac

SEQ ID NO: 957001 - DNA, 120 bp, Artificial Sequence
  ENSG00000232485_1 (sequence is synthesized)
gacgtgaatgacttcgtgcttctccatacctgcattgatctctgggtccattgccagttataaacctccaagggcaatagccatgaggtgatgtacagtcaagcatcacttaataaccag

SEQ ID NO: 957002 - DNA, 120 bp, Artificial Sequence
  ENSG00000232485_2 (sequence is synthesized)
gatacattctgagaaatttgtcgttaggcaattttttcattgcacgaacctcacagagtgtacttacactaacctagatagtagcatccagtaaacacctgggctatatggtctagccta

SEQ ID NO: 957003 - DNA, 120 bp, Artificial Sequence
  ENSG00000232485_3 (sequence is synthesized)
tgtatagcatgttactgtactgaatatgtaggcacttgtaacacaatggtaagtgtttttgtatctaaacatatctaaacataggagaggtaatgcattgtgctacagcattacaatggc

SEQ ID NO: 957004 - DNA, 120 bp, Artificial Sequence
  ENSG00000232485_4 (sequence is synthesized)
actaggcaataggaattttccagctccattataatcttaagggaccaccatggcacatgcagcccattgttgaccaaaagttgttatgtggtgaatgactataattggcttttcagagca

SEQ ID NO: 957005 - DNA, 120 bp, Artificial Sequence
  ENSG00000232485_5 (sequence is synthesized)
accactcacaagggggtgtagtatagcttactagacaaaactgcagccgctgctctgttttttgctcttagaaaactgagtacctgatttggacaaaatcataataaaatttagatagag

SEQ ID NO: 957006 - DNA, 120 bp, Artificial Sequence
  ENSG00000232485_6 (sequence is synthesized)
ccaacatttgtcctctggaagtttctgacaagatacaagtcaccgttataatagtcaaatgtcaaagtggtatatctaacaaaattaaaacagacagctaggagtgagaagatttaagaa

SEQ ID NO: 957007 - DNA, 120 bp, Artificial Sequence
  ENSG00000232485_7 (sequence is synthesized)
aattcaggtggcccaaaggaaagccaagacaagacattctctcccggcctttgggcctggattttcatttcagcaggtaacgaggagaccaaaggcctagttatttatggagatctgggg

SEQ ID NO: 957008 - DNA, 120 bp, Artificial Sequence
  ENSG00000232485_8 (sequence is synthesized)
ccacagcagagctcctcatggcaggataaggcagtggaaagcagactcaacggttaacccacagtcctcctcagcaagctgggagaagcaactgatgccacttagatgcttagaccgggc

SEQ ID NO: 957009 - DNA, 120 bp, Artificial Sequence
  ENSG00000232485_9 (sequence is synthesized)
acaaggtgatcatcttcactcatttcctgaggccagagccttccttacgcaggacatggataccccagtcccagctgtgctgaagcgtcaggaagcctcccccgaccccaccctgaacaa

SEQ ID NO: 957010 - DNA, 120 bp, Artificial Sequence
  ENSG00000232485_10 (sequence is synthesized)
cagtgaggggggttaggtgtcctcaaaagatctactctgtcaactggagttgttgagaaactcaggaaagggaactaaaaaggataagaaagtggtgcattccagtgtcttcctgttctc

SEQ ID NO: 957011 - DNA, 120 bp, Artificial Sequence
  ENSG00000232485_11 (sequence is synthesized)
tgttgcagagagccagctggtggaccgcagagacagacttccagccagggccaagcccttcaggaagggagtcatgcaccaaactcagctaacagaccaccagggcaccactgggtctcc

SEQ ID NO: 957012 - DNA, 120 bp, Artificial Sequence
  ENSG00000232485_12 (sequence is synthesized)
tagccatgaggaaggaggaggtgcttcactttcctgataagctaccgtaaggcccctttctgcatgaggctcagacctggttcaaactctcctggcagaaacaattcaaccatgagctgt

SEQ ID NO: 957013 - DNA, 120 bp, Artificial Sequence
  ENSG00000232485_13 (sequence is synthesized)
gctcgaggagggcatactcctggttttcaccttctggccaacaatccaagctggggaaggaaaacaagcttttggaaggctctgggtctcttgctcactccactgtgtttcactgaaatg

SEQ ID NO: 957014 - DNA, 120 bp, Artificial Sequence
  ENSG00000232487_0 (sequence is synthesized)
gagccacgttgttacggaagggctgggacccagacacagggtccagagtgtcctcgaggtatcagaagaactcctggagagcaagctgagggctgtgtcgtcgccacaccctccgtgggt

SEQ ID NO: 957015 - DNA, 120 bp, Artificial Sequence
  ENSG00000232487_1 (sequence is synthesized)
gtgcccagccgcccagtgactcagaagctgtgcacacaagggtcctgctgaaggacagcggcttctgcttcctctgatcctggcagcctggaacttcctgagaggactgggcatgtggat

SEQ ID NO: 957016 - DNA, 120 bp, Artificial Sequence
  ENSG00000232487_2 (sequence is synthesized)
agccatggggggggacgtcctttaaactggggaatgggctcccctagacacagtcgcttccacaggaatcttctagagcctcacccagggcagagcagacacccgcagcagcctggagtt

SEQ ID NO: 957017 - DNA, 120 bp, Artificial Sequence
  ENSG00000233684_0 (sequence is synthesized)
ctggggttcaggaaccagagcctcagtgtctgcaggagttgctggctgtttcctgatgcagttggagcagaatgggatgtcctgggacaacagagatgtttacccatcttgactagtgtg

SEQ ID NO: 957018 - DNA, 120 bp, Artificial Sequence
  ENSG00000233684_1 (sequence is synthesized)
gtcatctgaagaatggcctccaaagacatcctgagaacctgggaatgttgcatggatgaaggaatttgcaaaactgaggctcgcaaagaagcagtggaaccactgcatccaagaggagtg

SEQ ID NO: 957019 - DNA, 120 bp, Artificial Sequence
  ENSG00000233684_2 (sequence is synthesized)
aagatgaagctggaaggagtgagattccttgagaggcggcccaggcagtggaacagcagagagacgcttcaggctgcatcccagatgatcctgggacagatgaatctcggcatcatggat

SEQ ID NO: 957020 - DNA, 120 bp, Artificial Sequence
  ENSG00000233684_3 (sequence is synthesized)
ccactggccccagaggaagaaagctgtggttggagaggggttaatgacagcctcccagccctcagggagtcggtcgccttaaagaaggaagcagagaggctgcgttttccaaatctagtc

SEQ ID NO: 957021 - DNA, 120 bp, Artificial Sequence
  ENSG00000233684_4 (sequence is synthesized)
ctggagatgcttgaagagaaagaacattgctagaactcaggtttcaatgagcaactgaagggaagtctgtgctccgcctctgaaggactgaatgtatctggggcccactgcaggggggac

SEQ ID NO: 957022 - DNA, 120 bp, Artificial Sequence
  ENSG00000233684_5 (sequence is synthesized)
acggtgccttggaatgcagtgtgtctgtatttcctgatcagtcagctgtttaatacttctcatttaaactaggaacagagcaccaacagttactgcgcatattaggaaaattcatagctg

SEQ ID NO: 957023 - DNA, 120 bp, Artificial Sequence
  ENSG00000233684_6 (sequence is synthesized)
gaaagatagagaatggaataaacaataaagaacaaatacaaaaatttgaagactttttaagcagaagaaaactaaaatgcataatcattaatatcccgaggagggttagagatgatgtca

SEQ ID NO: 957024 - DNA, 120 bp, Artificial Sequence
  ENSG00000233684_7 (sequence is synthesized)
ggacgaacatcagagcccgcagctctcggccctgctggtggcagaggctttgtactgtgtgacaatgacctggatatggaagcagaagggagcttctaaggaccggaagctgagagtctg

SEQ ID NO: 957025 - DNA, 120 bp, Artificial Sequence
  ENSG00000233684_8 (sequence is synthesized)
atcatgctgggttaccccagtgagctctaaatgtaatcacatgtgtctttatgaaagggaggcagagggagatttgcagacagatgaggaggaagatgagaaaacaatggacacaagaaa

SEQ ID NO: 957026 - DNA, 120 bp, Artificial Sequence
  ENSG00000233684_9 (sequence is synthesized)
gaaaaggtgatgcagttcagggacccaagccaataaatgaggtgacctccagatgctggagaagggaaggaagcagatggactctagagcccccaaaagaagcagggctctgccatcacc

SEQ ID NO: 957027 - DNA, 120 bp, Artificial Sequence
  ENSG00000233684_10 (sequence is synthesized)
ttgattttgtcccaatgaaacccattggtcatttagctgccagaactgtgtaagcataaatgtgtgttcgtttaagccatgaaatttgcagtaatttgttaaagctgccatgggaaacta

SEQ ID NO: 957028 - DNA, 120 bp, Artificial Sequence
  ENSG00000233684_11 (sequence is synthesized)
acacaactggagtggtagttccgtgaatgcatgcattcaccaaaccttaacatgtactcttcggatactggcatgataggtccatgaatgcatatgttcacccacacactaatatatacc

SEQ ID NO: 957029 - DNA, 120 bp, Artificial Sequence
  ENSG00000233682_0 (sequence is synthesized)
cctttcttttccttttttccccgctgtgcctgaatctcccgggacacttagacggctggagcctcccgactccaaggcgggcgacggcaaagttaaacgccagcgcgctgcggtccccgg

SEQ ID NO: 957030 - DNA, 120 bp, Artificial Sequence
  ENSG00000233682_1 (sequence is synthesized)
gcaccgaggcgtccccgctcccgccacccacacagggcgccaagtgccccgacccgcgagtgacgaggacgcacagcctggaagcctcgcggccctccagatggactcggagcgcccctg

SEQ ID NO: 957031 - DNA, 120 bp, Artificial Sequence
  ENSG00000233682_2 (sequence is synthesized)
tgctgtccgccgccgaccggtgtcctcgcagagataacctggctgaactcaccgcccagcgctatgtcagttctccctcatgacaacccaaaacttgaccggatttgtgttctgcagaga

SEQ ID NO: 957032 - DNA, 120 bp, Artificial Sequence
  ENSG00000233682_3 (sequence is synthesized)
ggaaaaaaaaaagcggccaccgaacaccagtgcagtagccaggatgggcctgtggctctggctgcagcctccagggacaccagctggagagaaggaagccacgcatggagagcggccagg

SEQ ID NO: 957033 - DNA, 120 bp, Artificial Sequence
  ENSG00000233682_4 (sequence is synthesized)
ggccaccgaacaccagtgcagtagccaggatgggcctgtggctctggctgcagcctccagggacaccagctggagagaaggaagccacgcatggagagcggccaggctcaaaatatctta

SEQ ID NO: 957034 - DNA, 120 bp, Artificial Sequence
  ENSG00000233682_5 (sequence is synthesized)
aacgtggtcatctcaaaaatatgagcacacggaagttttcttccttcttgtcagttttgagtccaatatcaatactgttgtcctgtgaaagattttaagatttaaatgttttttcatgta

SEQ ID NO: 957035 - DNA, 120 bp, Artificial Sequence
  ENSG00000233682_6 (sequence is synthesized)
atttcctgatgtcttgattgttgcttctattttgttcatcaaaaccaaacagagtggaggttgctctggggctggatggatggccagtcattaaaatcaatgccttattagtctgcctta

SEQ ID NO: 957036 - DNA, 89 bp, Artificial Sequence
  ENSG00000233689_0 (sequence is synthesized)
ggaggccgaggcaggtggatcatgagctttttgtaaagacaggagtctcactcccaaatgatcctcccatctcagcctctcaaagctct

SEQ ID NO: 957037 - DNA, 120 bp, Artificial Sequence
  ENSG00000233689_1 (sequence is synthesized)
cccatctcagcctctcaaagctctgggattgcaggtgtgaatcatctcacctagccagcaagtgatacagctgaaagaaaacaatttgactctataaagcactgagatgtttttgacttg

SEQ ID NO: 957038 - DNA, 120 bp, Artificial Sequence
  ENSG00000233689_2 (sequence is synthesized)
caccaaagtctcagtcgtttatccagaatcacagcctccctgagatgaaaggagcctaagagatcatcaagtcagtgtgacatgatttgcaaggataccagatgatcaactcaaggctcc

SEQ ID NO: 957039 - DNA, 120 bp, Artificial Sequence
  ENSG00000233689_3 (sequence is synthesized)
aaaaagttgagacagaacttgaatgatggtctcctggcttgtaatcttctacacaacgtgccatcaaatggatcatttgggggtgatatattcacaagaatttggccaagttggcaaata

SEQ ID NO: 957040 - DNA, 120 bp, Artificial Sequence
  ENSG00000232153_0 (sequence is synthesized)
ttagaagaccctgtggcacctgaaagtgaatgtgcaattggattggagttatgctgcaacaattagctgctcaattgtgtgtttattacatataccaagatcacttaaataacactacag

SEQ ID NO: 957041 - DNA, 120 bp, Artificial Sequence
  ENSG00000232153_1 (sequence is synthesized)
tgagaagtaatgttatcagagcagcatttaaagaagctggatatgcaatcccactttgagatgaatgtgctggcagtagaatttagaggaagacacaggagaaaaatctgcactatgatg

SEQ ID NO: 957042 - DNA, 120 bp, Artificial Sequence
  ENSG00000232153_2 (sequence is synthesized)
tggagatagacacaaactacatcgtgaagaaggctgaatcaaaggttgtaacaaaacgcattctgtctgatcgccacttgcagagtccagtgacaacattgagtgacttatcttgtgtct

SEQ ID NO: 957043 - DNA, 120 bp, Artificial Sequence
  ENSG00000232153_3 (sequence is synthesized)
cactccacctgaagttcaggctggcatcacgtcgacaatggccaagttgttgactagctgtcttgaggtaagacatgaggacctcctccttgccttccacaatgattttgagacctgccc

SEQ ID NO: 957044 - DNA, 120 bp, Artificial Sequence
  ENSG00000232153_4 (sequence is synthesized)
agtcacgtggaactgtaaggccattaaacctcattctcttgtaaatggcccagtctcagctgcctacaatgtgctgccacctaaatatgaggatgtgtgaactacgcctaagatgacaga

SEQ ID NO: 957045 - DNA, 120 bp, Artificial Sequence
  ENSG00000232153_5 (sequence is synthesized)
tgacttccatccctctggatccagcagggtgcccactgtgctcctaatccagcgaggcgcccattgctgctccacatcaagttaaaggcttgccattgttcctgcaggcctaagtgcctg

SEQ ID NO: 957046 - DNA, 120 bp, Artificial Sequence
  ENSG00000232153_6 (sequence is synthesized)
ggttcgtcctaatcgagttgaacactagtcactggggtccatggttcccttccgcgacccacgacttctaatagagttataacactcaccacatggcgcaagattccattccttggaatc

SEQ ID NO: 957047 - DNA, 88 bp, Artificial Sequence
  ENSG00000232153_7 (sequence is synthesized)
aacactcaccacatggcgcaagattccattccttggaatccatgagaccaagaaccccaggtcagagaatacgactcttgccaccatc

SEQ ID NO: 957048 - DNA, 120 bp, Artificial Sequence
  ENSG00000232153_8 (sequence is synthesized)
agaaatctaccttatggctgtggttctgtgttgtattctgtacttgcttctctctaccttatgacttaaatgaactaaccttgaaagcagatgagtcttttgtataaaagactagaaaat

SEQ ID NO: 957049 - DNA, 120 bp, Artificial Sequence
  ENSG00000223623_0 (sequence is synthesized)
gttcatccaatgctatccaggagagatgtcccagtgagacaaatgtgcagtcctctccacaagtaaaaagaagagaagctgccttcgggtggtggagtctttaacccacttctcttctgc

SEQ ID NO: 957050 - DNA, 120 bp, Artificial Sequence
  ENSG00000223623_1 (sequence is synthesized)
gcagttccctgggcttggccagcagagaaaggagaagcagctggacaacgaggactatggttggaagttggagagaagcagcttgacttcagagggacagcttgatggcatagcttcaga

SEQ ID NO: 957051 - DNA, 120 bp, Artificial Sequence
  ENSG00000223623_2 (sequence is synthesized)
gaggagtctgactggggatagccagacttcaggggaagattaccttcctgctccatcccctctttggctccccttcctgctgagagccacgttcattggcaataaagtcccctgcattta

SEQ ID NO: 957052 - DNA, 120 bp, Artificial Sequence
  ENSG00000223626_0 (sequence is synthesized)
ggggctggacacccgctcatggccacagagggcagcttccgggcgacgctccagctctgcctctcggactcctcacggacacaggcgtgtgtttgaaacggatcgatgtccccccggttc

SEQ ID NO: 957053 - DNA, 120 bp, Artificial Sequence
  ENSG00000223626_1 (sequence is synthesized)
gcgtgtgtttgaaacggatcgatgtccccccggttcctttcacagacaccagaaagcccgcgaacacacctcacaggctccgaagtctcactctgatcttggctcactgcaacctctgcc

SEQ ID NO: 957054 - DNA, 85 bp, Artificial Sequence
  ENSG00000223626_2 (sequence is synthesized)
tgggattacagatgtgagccatcgcacctgtgcgtgaaggttttctaaccttctatcagattttctaacctccccaagccacagg

SEQ ID NO: 957055 - DNA, 120 bp, Artificial Sequence
  ENSG00000223626_3 (sequence is synthesized)
taaccttctatcagattttctaacctccccaagccacaggatgagaaaagtgtgcgatgctcccgcctgaggaagccagcccagccaacgcagagccaaggaccactgaaggcattgcca

SEQ ID NO: 957056 - DNA, 120 bp, Artificial Sequence
  ENSG00000223626_4 (sequence is synthesized)
ctgctacacgcttggagccatccatgcctgcagccgcgttgaatgccttctgcttctttcctatgccagcttgaactgggttacttttgcttacaaatgaagtactctaactcaggaaat

SEQ ID NO: 957057 - DNA, 120 bp, Artificial Sequence
  ENSG00000274737_0 (sequence is synthesized)
ggataatggacctcagctttagtccttggtggcctcttggcatggaagctggaactttctcaattctgatataaaacccttgagcaagagagaaactcatgtgtgatggggtagggagtg

SEQ ID NO: 957058 - DNA, 120 bp, Artificial Sequence
  ENSG00000274737_1 (sequence is synthesized)
gggaccctctggtagctgtgggcaagcatgcccaaggacttggaagacagaagcctgtggaaccccatctcctctttgccttctttctcctggcctttcattaagggctggtaattttga

SEQ ID NO: 957059 - DNA, 120 bp, Artificial Sequence
  ENSG00000274737_2 (sequence is synthesized)
aggcccagggtcacacagccagggaatggcaggcggagggggccagaaccaggccttctcactctgccagtgcccattctgctggcccaccctccacagcttggctctccctggcctgcc

SEQ ID NO: 957060 - DNA, 120 bp, Artificial Sequence
  ENSG00000274737_3 (sequence is synthesized)
ctcagttagacttcggactgaggcctccagtggggtgtggggtattgctggaagcagggcctgaataaagtctggggctagcgggagggcatctgtcctcccggaggctcccaggactgt

SEQ ID NO: 957061 - DNA, 120 bp, Artificial Sequence
  ENSG00000224939_0 (sequence is synthesized)
gtgtgacacaaactgccacctatctcccaaggttctttctttgtaacagaaccctagtttttggctggactcatttccccagtggtagaggctgctggctggtcatgtcatgagcccagg

SEQ ID NO: 957062 - DNA, 120 bp, Artificial Sequence
  ENSG00000224939_1 (sequence is synthesized)
tcttcttcttgggcacaaccagatgccatttctcagcctcccttgcagttatatgcagctgtgtgtttgagttctggccgttagtgagtggaagtgatgtgtcccttctactcacacttc

SEQ ID NO: 957063 - DNA, 120 bp, Artificial Sequence
  ENSG00000224939_2 (sequence is synthesized)
tgtagtcctggcctacagaaactcacaatggttctctatactctttatctttccacagcttaatgcagttaagtaacaagatcttggaagacaagtgttgaaggtgaaagaggcacaaga

SEQ ID NO: 957064 - DNA, 120 bp, Artificial Sequence
  ENSG00000224939_3 (sequence is synthesized)
tagaagaaacctgggtccttagatccttgcttggaggaaaaccacctgccaatccagaacatcattttggacttcatttcatattagatattatgttaccaatgagcagggactatgatg

SEQ ID NO: 957065 - DNA, 120 bp, Artificial Sequence
  ENSG00000224939_4 (sequence is synthesized)
aatgtgtctttagaacacccaatgaagtgccacttgccacaagaagctaagtcacaatctgatggccagaggaggcaatcattcttcctacagttttgtgcataaaccttcctgcctctc

SEQ ID NO: 957066 - DNA, 120 bp, Artificial Sequence
  ENSG00000224939_5 (sequence is synthesized)
tgctggggaccacctatggggaaaggaaaacttctctctcatggctctcctttcccaggaaaactttagctcctgttgagaccaacaccttccctggagaatgcagagtgaagggattag

SEQ ID NO: 957067 - DNA, 120 bp, Artificial Sequence
  ENSG00000224939_6 (sequence is synthesized)
gcccatcacaattttccattcatgatgttgggtcaagcaaggcatcacacagaatgaatagaaacagaaacagccccacatgtgaagtaggagccatgctggaatgaacaagggccacgg

SEQ ID NO: 957068 - DNA, 120 bp, Artificial Sequence
  ENSG00000224939_7 (sequence is synthesized)
tatgggtgagttacacggtacagagcacaggggctgactgctttgtgctcttccaggtgggatcattacttgccagccttccagctgatgccagtggcaacagcacgacaggctgaactg

SEQ ID NO: 957069 - DNA, 120 bp, Artificial Sequence
  ENSG00000224939_8 (sequence is synthesized)
gattctttatgactatgtattcattagggggaaaaagcacttccaatgcaaatgattgaaatggaaacaagatgtgcactctgctgcctaaatgaaagctctaccaggtaggccattcaa

SEQ ID NO: 957070 - DNA, 120 bp, Artificial Sequence
  ENSG00000224939_9 (sequence is synthesized)
gacttacagcaggagctcagcacttttactctctttgccgcttcactggaaccaggagaaaaagacattaggatgaaggataatgtgtgatacacacataaagatgaaagcgagagggac

SEQ ID NO: 957071 - DNA, 120 bp, Artificial Sequence
  ENSG00000224939_10 (sequence is synthesized)
acatgcaatgtcacttattggaaggaccactttaggctgctctgtcctctctcccctgaaaacatgttccacattgttttaaccatctgtggcccactctggagctcaaggaaccctggc

SEQ ID NO: 957072 - DNA, 120 bp, Artificial Sequence
  ENSG00000224939_11 (sequence is synthesized)
ctttctgctttattgtgagcacagccatatgaaactgcaatctggcagctgaaggggaaagtacttttactgtctctgctgagaaagggtttggatgaatcgaatcccctgttatgcgtg

SEQ ID NO: 957073 - DNA, 120 bp, Artificial Sequence
  ENSG00000224939_12 (sequence is synthesized)
aaattgtaccctctagaaagctctgttgatgacccaacccacggtacctgtgaatgtgaccttatttgaaaatatggtcttataaatgtaatcaagcaaagatgagatgatactgaatta

SEQ ID NO: 957074 - DNA, 120 bp, Artificial Sequence
  ENSG00000224939_13 (sequence is synthesized)
gggtgggcctccaccaacatgactggtgtccttatgagaagcaaggaagagacataaggagaacatggtgtgacaattgagacagagattggagtgatgcatctacaagccaagaaatgt

SEQ ID NO: 957075 - DNA, 120 bp, Artificial Sequence
  ENSG00000224939_14 (sequence is synthesized)
caagggccgtgagccacaccagaagctaagagaaaggcatgggactgaccctcccctagagccatcagaaagagcctgaccctggcggcaccttgcttttggacttctagactccagaat

SEQ ID NO: 957076 - DNA, 120 bp, Artificial Sequence
  ENSG00000224939_15 (sequence is synthesized)
tatgagaataaatttgtgttgctttaagccactcagtttgtggtaatttgttatgacagttctaagaaactaatccaccctgctaaagagtaaatgtctgatgcaaaactcactacatgg

SEQ ID NO: 957077 - DNA, 120 bp, Artificial Sequence
  ENSG00000224939_16 (sequence is synthesized)
atgaaaaggctgagatattccgaagagtcataatgaactgtgccgtcatctacaaaggaagtgcagcactgcaacaactcaagatagattctggagacgtggcaggacagacgtgcctac

SEQ ID NO: 957078 - DNA, 120 bp, Artificial Sequence
  ENSG00000224939_17 (sequence is synthesized)
cagactaggagcactttcaggacagcgtcatgccttgttctcctccacatccctccgtgcctgaaaatcagaaatgctcaattaaatgttgaaaatgtcaataaattcataggaaaacga

SEQ ID NO: 957079 - DNA, 120 bp, Artificial Sequence
  ENSG00000224934_0 (sequence is synthesized)
ggctgaggggaggagccgagcgagcggcgggtgtccctgagaggccacctttcgaccttcgagggccaggaggatacggggaggtggccggagggagttcccgaacacaggtcttcctgt

SEQ ID NO: 957080 - DNA, 120 bp, Artificial Sequence
  ENSG00000224934_1 (sequence is synthesized)
tcccgccgagcaggtgttggcggtgccaggcccggcctggcgggcccgggctggcagccaaatacccagcgtctgtgctcgggacgggagtgttcgtccaggacgtgcagctccggagcc

SEQ ID NO: 957081 - DNA, 120 bp, Artificial Sequence
  ENSG00000224934_2 (sequence is synthesized)
tgcgcgggcgaccttgaccacctttgtcggctgtttccccctgagggaagtatacctgtcctgccagccttggtctctggcagggaaggtccttccaacagagaggggtgcgcacgaatt

SEQ ID NO: 957082 - DNA, 120 bp, Artificial Sequence
  ENSG00000224934_3 (sequence is synthesized)
cctttttgccgctcttctattaatagtttgagattttcctccccgattccttgcagagagggcctggtcctcaaggacctcgggatctgggcgcgacgtcccttcccagcttcctcccgc

SEQ ID NO: 957083 - DNA, 120 bp, Artificial Sequence
  ENSG00000224934_4 (sequence is synthesized)
gcgcaccggaccagatcttgctgtcgtcagctggctggtacccaaagttcctcttcgtcaggctgttccttccccgttagagtccttcctccccaggagccctctccatctgctgacctt

SEQ ID NO: 957084 - DNA, 120 bp, Artificial Sequence
  ENSG00000224934_5 (sequence is synthesized)
caagacccagagcgaatgccacttcatccatgaagccttcccttaacccttatctggccaaaatgtctctttcctgtgcttctgtactttcacaattttagaaaatgcctttgtggttaa

SEQ ID NO: 957085 - DNA, 120 bp, Artificial Sequence
  ENSG00000224934_6 (sequence is synthesized)
aaacctatctccgggaccggactatctaggtttagattctggctgccgcttacgaatttgggcaggtttagtcaagttattttaacctctctgtggaagttcctgctctgtggaaataat

SEQ ID NO: 957086 - DNA, 120 bp, Artificial Sequence
  ENSG00000224934_7 (sequence is synthesized)
agtattttcctcagagttggtgtggggagtttgtgagttaatacatttacgaagtggttagttgcatgtaagaaggactctctaaatgtcagctattattaacattgcatatctgccaca

SEQ ID NO: 957087 - DNA, 120 bp, Artificial Sequence
  ENSG00000224934_8 (sequence is synthesized)
gcttttttttttttttttacttttattttaggttcgggatacatgcacaggtttgttttatagataaattgcttgtcatgtgggtttgttgtacaaattattttgtcacccagatagtaa

SEQ ID NO: 957088 - DNA, 120 bp, Artificial Sequence
  ENSG00000224934_9 (sequence is synthesized)
ttttgtcacccagatagtaagcatagtacttgacaggtattttttctgatcctctccctcctcccaccctctagcctcaagtaggtcccagtgtctgttgttctcttctttgtgtccatg

SEQ ID NO: 957089 - DNA, 120 bp, Artificial Sequence
  ENSG00000224934_10 (sequence is synthesized)
tgttctcaatgtttagctcccacttacaagtcagaacatgcagtatttggttttctcttccgcattagttcacttaggataaaggcctccagctccatccatgttgctacaaaggacatg

SEQ ID NO: 957090 - DNA, 86 bp, Artificial Sequence
  ENSG00000224934_11 (sequence is synthesized)
accgtattttcttcagtctactggtgatgggcatttaggttgatgccatgtctttacgattgtgaatagtgctgcagtgaacatac

SEQ ID NO: 957091 - DNA, 120 bp, Artificial Sequence
  ENSG00000224934_12 (sequence is synthesized)
cagtgaacatacatgtacatatatctttatggtagaatgatttatattcttttgggtatagacccaatactgggattgttgggtcgaatggtaattctgttttaagttctttgagaaatc

SEQ ID NO: 957092 - DNA, 120 bp, Artificial Sequence
  ENSG00000224934_13 (sequence is synthesized)
gccacactgctttccgcggttactgaactaatttacattcccaccagcattgtataagcattcccttttctccacaacctcaccagaaaccagcatctgttatttcttgacttttattaa

SEQ ID NO: 957093 - DNA, 120 bp, Artificial Sequence
  ENSG00000224934_14 (sequence is synthesized)
gactggtgtgagatgatatctcattgtagttttgatttgggtttctctagtgattagtgatgttgagtattttatatgcttgttggccatgtagcttcttttggctagggacctgtgagt

SEQ ID NO: 957094 - DNA, 120 bp, Artificial Sequence
  ENSG00000224934_15 (sequence is synthesized)
ctccctaggtttcttgcacttactaagccttcaacaaatggtagaagagtcaattctcttggtgtttcagaagaaaacaatatcacagcccctctccactggataatactataaatctta

SEQ ID NO: 957095 - DNA, 120 bp, Artificial Sequence
  ENSG00000224934_16 (sequence is synthesized)
aaatgaattttcattcagagtaataaacacaagccaaagaactttgtataacatccgtcaactttttgtgttatctatttcttttccaaaacattgcctctggttttaaaggtaactgcc

SEQ ID NO: 957096 - DNA, 120 bp, Artificial Sequence
  ENSG00000224934_17 (sequence is synthesized)
cacagtgtttcactaataacattttaagcattacaagttcaacactgaaggtcaaatgacaacgaactttcagtgcttccaaaagcaggggcagagggcaactgctgaggggggcattgt

SEQ ID NO: 957097 - DNA, 120 bp, Artificial Sequence
  ENSG00000224934_18 (sequence is synthesized)
atagcctaaccttcccagaatttgatttaaaagtatgatcttcacagcgttggccagcaatatcatggtcactccctacgtcattccctgggagaaaaacaaccctaggttacctaaaca

SEQ ID NO: 957098 - DNA, 120 bp, Artificial Sequence
  ENSG00000224934_19 (sequence is synthesized)
atgttggcgaagaccaaatatttattaacatcctaagccgccccataatcaagccaatgctgatagggacaaagaaggtgccatgtgcagtttttctccatgtccccacaatatctgctc

SEQ ID NO: 957099 - DNA, 120 bp, Artificial Sequence
  ENSG00000224934_20 (sequence is synthesized)
tgaattttaaaaggcaattactgggggagaaggaagcctatatattatgtaggatccaagtctcaaactgctttcctagggagtgtgaggttcttggagattaagtgcagtacctttctg

SEQ ID NO: 957100 - DNA, 120 bp, Artificial Sequence
  ENSG00000224934_21 (sequence is synthesized)
tcttgagccttgtaggctgcccctctaatttaatgccagtcttgaaataaacagaatgctttccaagtcatcgctaattttaacactttaaatttagaattgcttagaattgactcaaca

SEQ ID NO: 957101 - DNA, 120 bp, Artificial Sequence
  ENSG00000224934_22 (sequence is synthesized)
ctgcctccttgctgaatggataattcaagcaaacaactcaagagctggatgctgcccagacaggtaggcagccagataaagtgagtgtccagggaaagagcagtaagggtcagaagagaa

SEQ ID NO: 957102 - DNA, 120 bp, Artificial Sequence
  ENSG00000224934_23 (sequence is synthesized)
agagcctggtgttctcactgcctcctgccttccttatgactgtctgttcagaagtcctcctagcatctttcttctgccttcccctgctcctgtccctgaaaccttttcttcaaaagaagt

SEQ ID NO: 957103 - DNA, 120 bp, Artificial Sequence
  ENSG00000224934_24 (sequence is synthesized)
ggaaaagaggaactgggaacccatatagcaacagcatcacctggaatgaattcctttagaacatactgtcttggaaatctgaagcctgcagggctggacaggcaagaagagcagtgagca

SEQ ID NO: 957104 - DNA, 120 bp, Artificial Sequence
  ENSG00000224934_25 (sequence is synthesized)
gctggacaggcaagaagagcagtgagcactgcatgaacctagtcttgctgtgtcgcccaagctggagttcagtggcaccatcctggctcactgcaactgctgcctcccaggttcaagtga

SEQ ID NO: 957105 - DNA, 120 bp, Artificial Sequence
  ENSG00000224934_26 (sequence is synthesized)
gggattacatgtgcctgccaccacgcctggcaagtttttgtatttttagtagaaatggtgttttaccatgttggccaagactggcctagaactccagacctcaagtgatccacccgcctc

SEQ ID NO: 957106 - DNA, 120 bp, Artificial Sequence
  ENSG00000224934_27 (sequence is synthesized)
agcagcccaaagtggtgggattacaggcatgagcaactgtgcctggcctagccattttctataaacctgaaaatagatgccagaaaagaaggtgccgctataaaatgctttcttgagtga

SEQ ID NO: 957107 - DNA, 120 bp, Artificial Sequence
  ENSG00000224934_28 (sequence is synthesized)
tttatgtctaacatacaattaaacatttatgagaaggaaattatcaggttaaaatataaactcacttgccaattatttgattttcaggatatctgacttttgttaattactgaaaataaa

SEQ ID NO: 957108 - DNA, 120 bp, Artificial Sequence
  ENSG00000224934_29 (sequence is synthesized)
tttacacatgaataagtctttatcctcaaatggactaaagactcctcgaggacaagaactatccttcagtcccatacattggttacctggcaaaggaccctaaatgcagattatgaagta

SEQ ID NO: 957109 - DNA, 120 bp, Artificial Sequence
  ENSG00000224934_30 (sequence is synthesized)
gctatggaatttgaatgggttgattcttcagctcccagaaaaaaactttgattggtttaactggccacagtaattgatgtgggaatgaggccctgacataatttcaacttagaagacatg

SEQ ID NO: 957110 - DNA, 120 bp, Artificial Sequence
  ENSG00000224934_31 (sequence is synthesized)
ttcactggaagtgaactaggaagcatgaagtctcagacattcgacactgaaagaataagcagtcttaggatgaaggcagtgctatggacaccagaactccatggttcaggctgttcagca

SEQ ID NO: 957111 - DNA, 120 bp, Artificial Sequence
  ENSG00000224934_32 (sequence is synthesized)
tcaactgttcctgacagccaccctaacgtgcctccagtttcctgggccaacagatgcctgtcattgttgaagtttctttgagttgggtcttccgttacttacaatttaaatcaccctcac

SEQ ID NO: 957112 - DNA, 120 bp, Artificial Sequence
  ENSG00000224934_33 (sequence is synthesized)
tgattactatgtacttaattgttctcctccactctctgccaatccatatgctgaagccttaacccccaacgtgatagtatttggagactggaactttgggagataattagatttagatgt

SEQ ID NO: 957113 - DNA, 120 bp, Artificial Sequence
  ENSG00000224934_34 (sequence is synthesized)
ggtcatgaggatgggaccttcaagatgagaatagtatccttataaaaagtggtactagaaagcctctctttctctctctctgccacgtaagaacacagcaagaaggcagccatctgcaag

SEQ ID NO: 957114 - DNA, 120 bp, Artificial Sequence
  ENSG00000224934_35 (sequence is synthesized)
ccaggaagagagcccttaccagaacttgaccatgctgacaccctgatctcagatgtgcagcctccagaactgcaaaaaagacacattttcattgtttaagctacctagtttatggtattt

SEQ ID NO: 957115 - DNA, 120 bp, Artificial Sequence
  ENSG00000224934_36 (sequence is synthesized)
tgttacagcagcccaatctgactaatacgctgatacaggcatattagggtacatgccaccagcagagtggttcaactgcaggtccacacttacccagtgaaggtgactcagcctagagtg

SEQ ID NO: 957116 - DNA, 120 bp, Artificial Sequence
  ENSG00000224934_37 (sequence is synthesized)
tgactcagtctcttcccaaccctgtccgcatcacccctggaagagtcagctcctcccacaactgcagtcctgacagcagcatcatgcctctgaaatgatcttgcaaacaagctgtcattg

SEQ ID NO: 957117 - DNA, 120 bp, Artificial Sequence
  ENSG00000224934_38 (sequence is synthesized)
gagtgctgagagagtggcaatatcaactaaaaacatgaagaagaagagcaacaaagaggaggaagaggaggagaagagggaaagaagtgaggcgctgtggtgaagaatagtacttctcat

SEQ ID NO: 957118 - DNA, 120 bp, Artificial Sequence
  ENSG00000224934_39 (sequence is synthesized)
ctccaccagaacagcagagaacaatgaaagcacaccatcaggacgtctcagggtacagccagaaaagccattaccatttgtgccaatatctttgaaatcttgtattttgtcataaaaagt

SEQ ID NO: 957119 - DNA, 120 bp, Artificial Sequence
  ENSG00000224934_40 (sequence is synthesized)
tatgcagtttctgtattctacttcatcatgtgcctttatattttttatatcaaaatgtctccctaaaaacctttgagaagggccattttatctcaaatctttgaaataatttcctagtcc

SEQ ID NO: 957120 - DNA, 120 bp, Artificial Sequence
  ENSG00000224934_41 (sequence is synthesized)
caccatgcttgccctgagatgttcacaccccaatatgagaagcacatgtacatcagaaagaggactggacttagagttttaaatctaagttcttttccaataccatgctttcctagtctt

SEQ ID NO: 957121 - DNA, 120 bp, Artificial Sequence
  ENSG00000224934_42 (sequence is synthesized)
gatcttgaaaaatcactcatcatctttaagcttctctttcgtcatgagtgaaagaaaggatgacaccaacaccttctctccctttctcatagaagcatcaagctccaagtagttaatgtg

SEQ ID NO: 957122 - DNA, 120 bp, Artificial Sequence
  ENSG00000224934_43 (sequence is synthesized)
agaaaaaggacttgggagaacaggaagctctggcctttttgttgtgtagggtattttcccaagaatactttggaagtttcctttaatttgttcttggactaacctttcctattcactctg

SEQ ID NO: 957123 - DNA, 120 bp, Artificial Sequence
  ENSG00000224934_44 (sequence is synthesized)
atacctttttgttcaacccttgtatctgtgcatggaagagcacaggaggcaaaaagaataaggatttatagtcacttgtcaataggcgtggaagagaagtcagattcttatttatttgag

SEQ ID NO: 957124 - DNA, 87 bp, Artificial Sequence
  ENSG00000224934_45 (sequence is synthesized)
aataggcgtggaagagaagtcagattcttatttatttgagataaagtctagctctgttgccaggatggagtgcagtggtgtgatttc

SEQ ID NO: 957125 - DNA, 66 bp, Artificial Sequence
  ENSG00000224934_46 (sequence is synthesized)
gaactcgtgacctcaaatgatccacctacctcggcctcctaaaatgctaggattacaggcatgagc

SEQ ID NO: 957126 - DNA, 120 bp, Artificial Sequence
  ENSG00000224934_47 (sequence is synthesized)
gattacaggcatgagccaccgtgcttggccagattcttattcttgaggtgacctctatatcccttcgttcccttcatgtctgtatcttccacccttatcatggcatctcaagtttcccta

SEQ ID NO: 957127 - DNA, 120 bp, Artificial Sequence
  ENSG00000224934_48 (sequence is synthesized)
tttccctacttaagagaatctgagcctgtatccctcatacttgccttatggacaaatcacctgggatacaggaaggcaagtgacttccatctgcagtaacagctctggttcattggttgc

SEQ ID NO: 957128 - DNA, 120 bp, Artificial Sequence
  ENSG00000224934_49 (sequence is synthesized)
ttagaacattacattgagaagaatcactcaatgggaaagaatatagatgggttggagatgtctgcacagacagggaagtgagaacagccacatttgtggcatcactagctgtccttggtt

SEQ ID NO: 957129 - DNA, 77 bp, Artificial Sequence
  ENSG00000224934_50 (sequence is synthesized)
agaacagccacatttgtggcatcactagctgtccttggttgacaggctcaagatgagtcaactcagaaaagtgttgg

SEQ ID NO: 957130 - DNA, 120 bp, Artificial Sequence
  ENSG00000224934_51 (sequence is synthesized)
agaaaacagagaacacaattttcaaaatatctagagccctccaagaagtctttgtagagatctataaaatctcaaggcaatttaaagaatagaaaaatgttttagaaacactattctctc

SEQ ID NO: 957131 - DNA, 120 bp, Artificial Sequence
  ENSG00000224934_52 (sequence is synthesized)
cacatcctggggcagcagccttctccaaagaaacagaaagaaggaaatggattgccttagcaaaaaaacaaatgaagacactccaaataacagaagaatgggaaggctacagaccttgaa

SEQ ID NO: 957132 - DNA, 120 bp, Artificial Sequence
  ENSG00000224934_53 (sequence is synthesized)
gtcagaagaaaatttcctctccttgccccgtttctccttaaatggatcaccagtacagtctcttacttctagagccatgttaagctttcttccccaaagttgtaatgtccttcttttggt

SEQ ID NO: 957133 - DNA, 120 bp, Artificial Sequence
  ENSG00000224934_54 (sequence is synthesized)
tgtgtcgtgtcctaaaatcctactctttggtacaagatgaaggtatatgaagagataatgaaggaaacaaattcaatgtgtttgccaagaacacagtcttttaaataactcttaaagggt

SEQ ID NO: 957134 - DNA, 120 bp, Artificial Sequence
  ENSG00000224934_55 (sequence is synthesized)
tcgtttaaaacagtgtaataaattgtggtaatctagtacacaaagctagtaggaacctcgtttattaataatatttcaacattgagcagtagagggcagcactatccttcttttgcaaaa

SEQ ID NO: 957135 - DNA, 120 bp, Artificial Sequence
  ENSG00000224934_56 (sequence is synthesized)
aacctttctctccttccctcccttacgtatgactcctcccataatccgcacacatggattgaaccaagtgagggtatttttctgtttcctacctcatagaagggcatagagtggacacgg

SEQ ID NO: 957136 - DNA, 120 bp, Artificial Sequence
  ENSG00000224934_57 (sequence is synthesized)
tttattatggtttaggtgattatgtataaagaatgtcagagcctgcattacctggaagtggtgcaccaggtaatgcaaaaaacacggaaggtttgaggtcccccactcaggatatgggtt

SEQ ID NO: 957137 - DNA, 120 bp, Artificial Sequence
  ENSG00000224934_58 (sequence is synthesized)
ctgtctagtaaagataaacagtagcttgaccctgggtaatcagatagggttattgtatgaacagacctaatgctcctgcacgttctggatagaagtcaatctactgaaatagcaggatgt

SEQ ID NO: 957138 - DNA, 120 bp, Artificial Sequence
  ENSG00000224934_59 (sequence is synthesized)
cagaactagctcaaatacagtatgtgtattatgactttaaggagtggtgtcagacaagatgggtaaagaatgtctttcatgggactgcagttggctaaatggctgtgtataagtagtgaa

SEQ ID NO: 957139 - DNA, 120 bp, Artificial Sequence
  ENSG00000224934_60 (sequence is synthesized)
attgaagccttgtatgctcgtcgtcattctatcacagtatgatttgagtttccctaaccggtaaacagcaagaaaaaatgatctgttattttttactaaagttacttgatgctctttagc

SEQ ID NO: 957140 - DNA, 120 bp, Artificial Sequence
  ENSG00000224934_61 (sequence is synthesized)
aagctgacagaataattctaattttagcaaatacaaaaccatggtaatcctagcacatttggattctgtttaaccctgaaaactcttttggcagcaaatcttcaatgccaatttagataa

SEQ ID NO: 957141 - DNA, 120 bp, Artificial Sequence
  ENSG00000224934_62 (sequence is synthesized)
atcccactaggaataagcactgaaagacgttgagtctagttcccagctctgccatgtgaagttgggcaaattacagtctctgagcttttatttcatctgttaaatggagataatacctcc

SEQ ID NO: 957142 - DNA, 120 bp, Artificial Sequence
  ENSG00000224934_63 (sequence is synthesized)
tagatttattaaaagggtcaatttagaaaatatgtattaaaatggtttgaaagccatttaagtacctaatgaatatttctatcactgtagcccaaaaagattcctgcctagaagacttta

SEQ ID NO: 957143 - DNA, 120 bp, Artificial Sequence
  ENSG00000224934_64 (sequence is synthesized)
tgtctcttctcctcatttggtatcattctattgcctgagattgttaattaacttttatgtatactcaatattttctcccaacttggttgctagttccttgagaactgaaaccatcaattg

SEQ ID NO: 957144 - DNA, 120 bp, Artificial Sequence
  ENSG00000224934_65 (sequence is synthesized)
cacttcttggtatcctccacaataaggtatctaggtactcaaatatttgttggttgattaaaaacataaaccacaagacataattaactctttttaaaattgtggtaaaaaaacatgtat

SEQ ID NO: 957145 - DNA, 120 bp, Artificial Sequence
  ENSG00000224934_66 (sequence is synthesized)
ttaccatcttaatcatttttaagtatactgtatattagtgtttactatatgcacattgttgtgcaacacatctctaggactttttcatccagaattctttttttttgagacagagtcttg

SEQ ID NO: 957146 - DNA, 120 bp, Artificial Sequence
  ENSG00000224935_0 (sequence is synthesized)
gagtagctgcctcaaactatagcaattaacaagttaagtgaatcacatgtgctctattagggtaaaagaaaagctttcacgcaaatcgctctagaacttttttatcttgactccaaagtg

SEQ ID NO: 957147 - DNA, 120 bp, Artificial Sequence
  ENSG00000224935_1 (sequence is synthesized)
acccagaagcagtgactttccagtgctaaggagcatatctcacaaccagatcatgacttctaaaacacaaggacttaaaaggaacaaggacttttctgagaaatgactgatttcctatga

SEQ ID NO: 957148 - DNA, 120 bp, Artificial Sequence
  ENSG00000224935_2 (sequence is synthesized)
gaaggttttcaaatcaccaacgagtctcatttcgtatgtggaaaagaaaacataaagagagagatacattttcagcatcttgtgttgctgaaatattcaatttctagtaatttctccatt

SEQ ID NO: 957149 - DNA, 120 bp, Artificial Sequence
  ENSG00000224935_3 (sequence is synthesized)
gagcatgtaattttttatttgagtgatgaccatgactattttcactattgacagcttcagtcctactgccaaccgtgttagttactttacttgtttaaatctgagttgttgtaaaaaaaa

SEQ ID NO: 957150 - DNA, 120 bp, Artificial Sequence
  ENSG00000224935_4 (sequence is synthesized)
aaaaaaaaagtgaagaaaaacactcataatttttctctcatgttttcttcttagtttatctgtgaccttgaagtctttgaatgtaaaggttatcagacagaataaagaaaatttaaaatg

SEQ ID NO: 957151 - DNA, 120 bp, Artificial Sequence
  ENSG00000224932_0 (sequence is synthesized)
aggagtcggatgagagggctcacacatgcgcactaagaggcaaaatggcagtctttaactgttgacatgacctccttggaacattcagactggtaagggaaaagcacctcagagaactac

SEQ ID NO: 957152 - DNA, 120 bp, Artificial Sequence
  ENSG00000224932_1 (sequence is synthesized)
ctgtaatttgagcgaaaaaaatcttcttttggaaactccttaagatatagtctgccttactgcacgctattgagttctggaggctggagagtccaaggtcaggaggctacatctgcttgg

SEQ ID NO: 957153 - DNA, 120 bp, Artificial Sequence
  ENSG00000224932_2 (sequence is synthesized)
catctgttggttggaatgtgggtatggttgctggaggtgaaatagaaattctgaaccaggagcacattttggaaatgaggtcaccactgcacaacaacagagtaaaagaagtctgtgtcc

SEQ ID NO: 957154 - DNA, 120 bp, Artificial Sequence
  ENSG00000224932_3 (sequence is synthesized)
tgaaaccgagaaacaccattccagtcctgtagctcctgccttattttaacaagagacagaaagaaattcctattttacctaaggccctgttagtttgagctttctctaacttttggctga

SEQ ID NO: 957155 - DNA, 120 bp, Artificial Sequence
  ENSG00000224932_4 (sequence is synthesized)
tacttagcaatcagcaagaaactttatgattttgtttttgctcctaggtctacctgaatgaaggaaaaaggtattttaatattgcagattgaagtaatttagtttacatgactattatgt

SEQ ID NO: 957156 - DNA, 120 bp, Artificial Sequence
  ENSG00000224932_5 (sequence is synthesized)
acattaataagaacacataaagtattaaagtcaacacttacaatgttacctgccaaaattagcaggaagatgagttccaaattagtctcatgagatatattggctgaataacttacacat

SEQ ID NO: 957157 - DNA, 120 bp, Artificial Sequence
  ENSG00000224932_6 (sequence is synthesized)
ggattcactctatgtgtcctgaatccgtcaagttttcaagactgctaggctcagagctagtctagagtagaaaattcaatgaagaatttcactcagtgaagcctcttgggtgacagtcag

SEQ ID NO: 957158 - DNA, 120 bp, Artificial Sequence
  ENSG00000224932_7 (sequence is synthesized)
caaacattttcatgaatatattcttaagctatgtggcttctcaatttgaaacactatcaatccctggacaattaaacgttgcctgaaacataagaatgaaagcaagaatagcaattaact

SEQ ID NO: 957159 - DNA, 120 bp, Artificial Sequence
  ENSG00000224932_8 (sequence is synthesized)
ttgaatcctgaagaactgatattattcaagtaaaggaaggaaacagccatacctctagaaacttaggagagaatgtctcaagataccatggccaatatgatagaatcctggtatagttac

SEQ ID NO: 957160 - DNA, 120 bp, Artificial Sequence
  ENSG00000224932_9 (sequence is synthesized)
tatgcactatactatttgcctaatagagtgacattacaattgctgaaatgcagtcttcttcacagactgtcccgcgtattaatttcaactagaaaagagataaagcgaattaattttaaa

SEQ ID NO: 957161 - DNA, 120 bp, Artificial Sequence
  ENSG00000224932_10 (sequence is synthesized)
aatatttctactaacctctagattcagaatatacattcacagcaggctgatttatgctgtgataagaagcaatctccaagtttccgtggctcaacgcaataaatgtatacctaactctaa

SEQ ID NO: 957162 - DNA, 120 bp, Artificial Sequence
  ENSG00000224932_11 (sequence is synthesized)
acatgcgcactaagaggcaaaatggcagtctttaactgttgacatgacctccttggaacattcagactgagaactacctgtaatttgagcgaaaaaaatcttcttttggaaactccttaa

SEQ ID NO: 957163 - DNA, 120 bp, Artificial Sequence
  ENSG00000224932_12 (sequence is synthesized)
gatatagtctgccttactgcacgctattgaggcagcggtgtatgtgcagtgcctattactccatcttgacaagaaatggaagaactcaccattgtcttttgatattttaaactgcattac

SEQ ID NO: 957164 - DNA, 120 bp, Artificial Sequence
  ENSG00000224932_13 (sequence is synthesized)
tttcatatattatctcacttatttttatattttaatggaaatatctactcagcatgataaaacagttttgtttttctcatattgccagaaggaatacacagtttctttaatatgaaaggc

SEQ ID NO: 957165 - DNA, 120 bp, Artificial Sequence
  ENSG00000224932_14 (sequence is synthesized)
aattttatacatccgcacaaagagtaacacttcattcatagtatgctacacgtataggaaggttggtgaatatctgcagtttgtactttcgagttgatttttttttttttagtttttaat

SEQ ID NO: 957166 - DNA, 120 bp, Artificial Sequence
  ENSG00000224932_15 (sequence is synthesized)
gtatttgtaaactaagtgataatttttgacatatattcaagacttaagtaatattccattaaatcacccacatagcttcccaacttttgatttattctgtgagagttggcaatttatacc

SEQ ID NO: 957167 - DNA, 120 bp, Artificial Sequence
  ENSG00000224932_16 (sequence is synthesized)
acaactgattcaaataaatgcactaaattaacaatgaaataaataaataccatcaatacagtttattacagaaggacaataaactcacaacacctaatactctgtcggctgactagttga

SEQ ID NO: 957168 - DNA, 120 bp, Artificial Sequence
  ENSG00000224932_17 (sequence is synthesized)
tttttttacttatgtaaatttcatcccaatttaagagatatttaaagggtatatatttgaattgagaaacaatggtattattcctaaattgtagatagacaaactgagatttcaagacct

SEQ ID NO: 957169 - DNA, 120 bp, Artificial Sequence
  ENSG00000224932_18 (sequence is synthesized)
aaagcattttttttcacagccacagagcaagaaattgatgaagacaagttttgaacagagatcatactttcaatcgagtgctttcactataccttactgccttttttaagaatttatata

SEQ ID NO: 957170 - DNA, 120 bp, Artificial Sequence
  ENSG00000224932_19 (sequence is synthesized)
cactataccttactgccttttttaagaatttatatattaaaaatatattttaatcttgttatttgattaaaacccaatttgtacaattcatgatactggaaaaattacaaggtttgataa

SEQ ID NO: 957171 - DNA, 120 bp, Artificial Sequence
  ENSG00000224933_0 (sequence is synthesized)
gggaacttggagcagaagaaaggaaagggagacattaggagggaagccctgagcctcacaagagcagagaagtaagaaactgtggatgaaaagggagaacatgctgagaggtatgaggga

SEQ ID NO: 957172 - DNA, 120 bp, Artificial Sequence
  ENSG00000224933_1 (sequence is synthesized)
aacctgtaagaaacctcttcaagctattgcaagaaacactcacttctaaaaataaagagaaatctgttttccctacttgtatttcaagttatctaaaagtaaaaccaattacacagtgat

SEQ ID NO: 957173 - DNA, 120 bp, Artificial Sequence
  ENSG00000270607_0 (sequence is synthesized)
ggggggcccacacccctgcgttcctgaaacccttcttttgaaaaatgccctttcgaacgcaaccgtccgccccagagccacgcgggcacggctcgagggaagtttgtttcctttttcaaa

SEQ ID NO: 957174 - DNA, 120 bp, Artificial Sequence
  ENSG00000270607_1 (sequence is synthesized)
ttgctccggtcaccttaacggtttgagtcttccggagtcacgcccgcagcctcgctgcccccatctggcttgggcagggccgaagctcgtctcccgctttaagagcgcgccagccatttc

SEQ ID NO: 957175 - DNA, 120 bp, Artificial Sequence
  ENSG00000270607_2 (sequence is synthesized)
tctgcctgctcttccaggccggctgggcggggggcctcccaacggcttcctctccagttttcaaaggctgcacatttcacttaactatttgaagtatttataggcaaatacaatacgcag

SEQ ID NO: 957176 - DNA, 120 bp, Artificial Sequence
  ENSG00000270607_3 (sequence is synthesized)
ggaagcttcccgccccgagacagctcctccacgcaacctaccacagactctgtaattagagtggcctgaagaagccgggagaggctccatgaccccggcaggctctggccaaaccttgct

SEQ ID NO: 957177 - DNA, 120 bp, Artificial Sequence
  ENSG00000270607_4 (sequence is synthesized)
gcgtttcatggagcccctccctgtccgcgcctgggacgcactggccccaacaggttcctcgactcgaattcgctgtttgggttgctctgtggtttcctcgctgactgaaagtggatgaga

SEQ ID NO: 957178 - DNA, 120 bp, Artificial Sequence
  ENSG00000270607_5 (sequence is synthesized)
ataagaaggaaactgagagatgatcaggcaggccagccttcgcgatttatgaatgaggagcctcccaccctgtagaactgcttggattagaagtgggcaagttatttaagcttacatgca

SEQ ID NO: 957179 - DNA, 120 bp, Artificial Sequence
  ENSG00000270607_6 (sequence is synthesized)
tgcttataaagcttctgttttcacatgtagtaaggtggaggcttgacgacatttacctaatgagctgttgtttggattaaatgagatggttggtgcatggcagtcatttagcacaagtac

SEQ ID NO: 957180 - DNA, 120 bp, Artificial Sequence
  ENSG00000270607_7 (sequence is synthesized)
atgtaagagaccaataaaagctgggctttattttccctgttgttaaattactgctgctttcccccaaagtcatctctgtttataaactatttgtctttcttctttgtttccaggacactt

SEQ ID NO: 957181 - DNA, 120 bp, Artificial Sequence
  ENSG00000270607_8 (sequence is synthesized)
tgtgcccaccctatagcctgatcttcagtgctgatagcattgatttagaataactcagatgctattaactctgtccccctggaattcatgttaaacccgtaatccccagtgtgatggtat

SEQ ID NO: 957182 - DNA, 120 bp, Artificial Sequence
  ENSG00000270607_9 (sequence is synthesized)
taggaggtggggaactttaggaggtaataaggtcaagacagtggagccctcatgataggattagcactcttattagaagagacaggagagagatgctttcttactgccttgtgaggacac

SEQ ID NO: 957183 - DNA, 120 bp, Artificial Sequence
  ENSG00000270607_10 (sequence is synthesized)
agaaggcagtcttctgtggaccaggaagagggcccttaccaagaatctgataccgtgttggcatcctagtctcagacttccagcctctagtactgtaagaaataaatgtttgttgtttaa

SEQ ID NO: 957184 - DNA, 120 bp, Artificial Sequence
  ENSG00000270607_11 (sequence is synthesized)
gccatcctgtttatggtatttttgttatagtggcccaaagtgacaaagatctcagaccagaggaaacatcaaagtcttaacctctgaagcattaagaaatgagaaggcaccttcttagcc

SEQ ID NO: 957185 - DNA, 120 bp, Artificial Sequence
  ENSG00000270607_12 (sequence is synthesized)
attctaggtagcaactttctactctagttaggctgaaatgcacggccctgtctatgtctgtttcagttatcctccctctctctgaaatcaagtcacacatcattcatgctacttacttaa

SEQ ID NO: 957186 - DNA, 120 bp, Artificial Sequence
  ENSG00000270607_13 (sequence is synthesized)
cactttgccctttgccatctgatgccacctcccgtactattgtctcccattatttaacctgttatttattgtttcatgcattcattttcatcttagagaataaacatcttggaattagga

SEQ ID NO: 957187 - DNA, 120 bp, Artificial Sequence
  ENSG00000266149_0 (sequence is synthesized)
aaggtctgcatacagagatgctggaactattggtttggaggtgcccgttggagcccaggaaccaaggaacgggaggcgtccctgctctgatcgtgcgcctggcttggctgcctcctgcag

SEQ ID NO: 957188 - DNA, 120 bp, Artificial Sequence
  ENSG00000266149_1 (sequence is synthesized)
cccagcgctacctgcacagcttctaggagaggcggcgcctcccacgcatcctaatcacatgtctacaggaattcagaggccaaggagcccatggaggcctggagagaggaggcagggtgt

SEQ ID NO: 957189 - DNA, 120 bp, Artificial Sequence
  ENSG00000266149_2 (sequence is synthesized)
ggcagagcacaagctgctgcgtttctactctgcctcctgtgtcagcaactctccccatccacaggaaggagtctgggcagaactgaaggttgtcacaaggagctgctaaacagatcaaaa

SEQ ID NO: 957190 - DNA, 120 bp, Artificial Sequence
  ENSG00000266149_3 (sequence is synthesized)
ggcattgaaggatggagtgacatgatatatgacctgcccaatccttgactgcacatcacataagcagtcctaaggatgtgaagtatatgatgccaccagttgaatggattgaagctccta

SEQ ID NO: 957191 - DNA, 120 bp, Artificial Sequence
  ENSG00000266149_4 (sequence is synthesized)
cacgtacactgttggtttcagattctctactctacaacatcagaaaagaatctatttttggtgagataacaaatgtgctatgttactctagaataaagacatctgtttacttacaatttt

SEQ ID NO: 957192 - DNA, 120 bp, Artificial Sequence
  ENSG00000236817_0 (sequence is synthesized)
ccaatgctggaggatacatgtgatgacatgaaatgttcctattttccaaagttttcatctaccaagtcgttcatgtacggtttagcaccgttaatataagttcactcctcaaagtaatag

SEQ ID NO: 957193 - DNA, 120 bp, Artificial Sequence
  ENSG00000236817_1 (sequence is synthesized)
gttctgtgacagaagattcttggtcctaaatttctgattcaaaaatgggaaaaaattccaagatataaaagctgttcaccagtattccggttaaatgtataacatcatagaacaatatga

SEQ ID NO: 957194 - DNA, 120 bp, Artificial Sequence
  ENSG00000236817_2 (sequence is synthesized)
tgatcattgagtcacctttcccagatgtctcacagaaaacctcctctgactataatgcccatggaaaatcatcttaattccagaaagcgggggctgacgggacactgttgagaggatcca

SEQ ID NO: 957195 - DNA, 120 bp, Artificial Sequence
  ENSG00000236817_3 (sequence is synthesized)
acattccgctgctgccaggtgttgaggaaatgcacacaccctcatgagagagacacaaaccatcacagagcatcagaagtggatgaaacttcttggcctggagaattaaaaaaaaaaaaa

SEQ ID NO: 957196 - DNA, 120 bp, Artificial Sequence
  ENSG00000236817_4 (sequence is synthesized)
cactgccactttcaccatcccatatccacgcttcgcagagacacctgcaaaaacacttgcaatgcaagactcagccacaactgagcctcagagtgtgacatctaggggacaccttgacaa

SEQ ID NO: 957197 - DNA, 120 bp, Artificial Sequence
  ENSG00000236817_5 (sequence is synthesized)
tttgccccatcacagattgaaggaaaaggtgaaaaaaacagaatgtagaagtcataaaactgcagaggcctattatctaaacatctgacatgacattgccccatcttataactgaagttc

SEQ ID NO: 957198 - DNA, 120 bp, Artificial Sequence
  ENSG00000236817_6 (sequence is synthesized)
tcaagactgagtgaaaaaatcaagaaagaacatgtgttctgagatagcatcaatagtatgttctttctgtaaataaagcacattaatgtactgaataagatggatttcaaaatttggtaa

SEQ ID NO: 957199 - DNA, 72 bp, Artificial Sequence
  ENSG00000286422_0 (sequence is synthesized)
ggccaggttggtctcgaactcctgacgtcaggttatccgcctgcccattggatttacatttgttcaacaatg

SEQ ID NO: 957200 - DNA, 120 bp, Artificial Sequence
  ENSG00000286422_1 (sequence is synthesized)
tttacatttgttcaacaatgaagaatagaaaagacatcttatggatactattcctaatgagggagaaattaagtgagcagaaattttttgagaacataatttttttttaaaataaacaat

SEQ ID NO: 957201 - DNA, 120 bp, Artificial Sequence
  ENSG00000286422_2 (sequence is synthesized)
acattcaatgagttcatggctttcactttgcataaggccacaaagtgaaaagacaacaagaaaagcacaatagaaagacctgctttgaggctaagagaaaaaaagcaaaaagaaaattct

SEQ ID NO: 957202 - DNA, 120 bp, Artificial Sequence
  ENSG00000286422_3 (sequence is synthesized)
tataatctgggaacagtgatagcattatatgtggttaaggagaagagcagtgaagctaagaaggttaaacatttccaactgttttcaagtagtgggaaaaaacagagaatcaaaaatcta

SEQ ID NO: 957203 - DNA, 120 bp, Artificial Sequence
  ENSG00000286422_4 (sequence is synthesized)
gaggtataagatcatgtgaaagatgaaaagaaaaattaaatgaggaatggtgaggcttcagaaaaaaaataggaaactacttattggcctccatgagaaatatgaggattcagggttata

SEQ ID NO: 957204 - DNA, 120 bp, Artificial Sequence
  ENSG00000286422_5 (sequence is synthesized)
acactaaagactaaagtttttctaagagctattgttagttcgtttgcttgttcttttgtatttttgtgaccttcatgcctgtttttatacagaaatgcttttaatcttttattttgtttt

SEQ ID NO: 957205 - DNA, 120 bp, Artificial Sequence
  ENSG00000286422_6 (sequence is synthesized)
cacaattgttatttaacatataaagttataagttcaaaattgttatttggaacccttgatgtttattaaattttaagttgatcttgcaaaataatctcattgtttgccctaaaataatct

SEQ ID NO: 957206 - DNA, 120 bp, Artificial Sequence
  ENSG00000286422_7 (sequence is synthesized)
tgccaatcatttctaggattatcagaataattttttgtctcacagactaaaatatcgttaagccattttaaatgttttaaatacattgaatagataagtactctgttttataaaatagtt

SEQ ID NO: 957207 - DNA, 120 bp, Artificial Sequence
  ENSG00000286422_8 (sequence is synthesized)
caataatctgatttaatagacaaaataattctaagtaccaaataactgttaaattcaacagattaaaatggccattcatagaaatttatgacttagtctaaaaaattcacaagtttaaat

SEQ ID NO: 957208 - DNA, 120 bp, Artificial Sequence
  ENSG00000286422_9 (sequence is synthesized)
gaattattcaatgcattttacactggagttgtaaggctgttattgtaatagcccgtgttcttatatatcttaatacataaaccacctaatagtcacagagtctttgttaatatgatgaat

SEQ ID NO: 957209 - DNA, 120 bp, Artificial Sequence
  ENSG00000286422_10 (sequence is synthesized)
taaaaccatgcttcttattttcttaagctttcccttggattatagagtagaggaaagccaccattgaaaggacacacactcttggaacccaacaactatgctataagaaagcccaaatta

SEQ ID NO: 957210 - DNA, 120 bp, Artificial Sequence
  ENSG00000286422_11 (sequence is synthesized)
agaccacggacacatagccgtttgcagccgggaggttagggactcctgcttacggtgtatatctagaagcaggctaatcgagctttatccatcttcaaacccagtaatggcccatggaat

SEQ ID NO: 957211 - DNA, 120 bp, Artificial Sequence
  ENSG00000286422_12 (sequence is synthesized)
catggaatgcttctcatgcctcaaatctctttgtcttcccattctgctacctgactgtaaagttctcacatgaactgtgccacaatacacatatcaaagacttggaaccaatccaaatgc

SEQ ID NO: 957212 - DNA, 120 bp, Artificial Sequence
  ENSG00000286422_13 (sequence is synthesized)
tgtgagtcaattaaacctctttcctttctaaatgacacagtcttgggcagccctttagagcagtgtaagaacagactaatatatactctaacattagaatattttttaggtttattgtca

SEQ ID NO: 957213 - DNA, 120 bp, Artificial Sequence
  ENSG00000286422_14 (sequence is synthesized)
gtcaaaaatactcttatacatagcaagatgtatttattttctattctataatattcacataaaaagaacacgcttagtccaaaacataagttctcaatgtttttgattcatttacatata

SEQ ID NO: 957214 - DNA, 120 bp, Artificial Sequence
  ENSG00000236810_0 (sequence is synthesized)
agcacagtgcctgataactgtattacatcatattgctataattgttccattttattattagttgtttaatctcatcgtgcctaatttataaattaaatgtaatcataggtatgtatgtat

SEQ ID NO: 957215 - DNA, 120 bp, Artificial Sequence
  ENSG00000236810_1 (sequence is synthesized)
agaaaaaagcatagtactgtatatatagcgttcagtactatttcagtcatcccctgagggtcttggaacatatcgcccacagataaggggggactgcggataatccccagtttatggtgg

SEQ ID NO: 957216 - DNA, 120 bp, Artificial Sequence
  ENSG00000236810_2 (sequence is synthesized)
ttcgacttatgactttgtgactttacagtggtgcaaaagtggtaagaattcagcattctcctcgacaagtggacgagcatctactgtgctttcacagcggctatcactattgccagcagc

SEQ ID NO: 957217 - DNA, 120 bp, Artificial Sequence
  ENSG00000236810_3 (sequence is synthesized)
aagactgtcagctcggcgccctcgtctggttggatgggaaactgcagttgctaagggagctgggtttgtaaggagccggccagggttgcagggtggcttagctgtgatttgggagtaatg

SEQ ID NO: 957218 - DNA, 120 bp, Artificial Sequence
  ENSG00000236810_4 (sequence is synthesized)
tctcttgcactcctatgttgcaggaatctctgaggacaaatgggaattctcactgatttctaggactaccctggggcagagatggagtttcatcacattgcctaggctggtctcgaaatc

SEQ ID NO: 957219 - DNA, 120 bp, Artificial Sequence
  ENSG00000236810_5 (sequence is synthesized)
ctggactcaagtgatctgctggcctcagcctccctaactgctgggactagaggcctgagcgaccacccctggctgtaaacattttcttagctcaaggattgctgaatttgtatccatttt

SEQ ID NO: 957220 - DNA, 120 bp, Artificial Sequence
  ENSG00000236810_6 (sequence is synthesized)
cttctctcctatctcaattgggcaccctgcacagcaatacacactgaacaatgtcgagtttctgctgaatagacttcctacgttgctctggaattcgaagttggcctaactgaggtctcc

SEQ ID NO: 957221 - DNA, 120 bp, Artificial Sequence
  ENSG00000236810_7 (sequence is synthesized)
agttacagaaaacactggctctgtatcctgggctttgagaaaacttatcaggctgtcacacttaccatcccttcagtctgcttgtcaggttccttaaggacgcatatctcaaatgtatgg

SEQ ID NO: 957222 - DNA, 120 bp, Artificial Sequence
  ENSG00000236810_8 (sequence is synthesized)
catctacctctacctgggtcacaaccaagtgggtttctactagatcggtgttccttgacagccaacaagggagctgacactgccctcctaagttctgatcttgctcctgttcaactggaa

SEQ ID NO: 957223 - DNA, 120 bp, Artificial Sequence
  ENSG00000236810_9 (sequence is synthesized)
ctccctaagctggtccttccctccaaatcctgccttaaacacactcagaaggtagaaaacacttcagcagcaaagtcctcttcccaagccaacagttgtgttcttccaatcacatgatct

SEQ ID NO: 957224 - DNA, 120 bp, Artificial Sequence
  ENSG00000236810_10 (sequence is synthesized)
taccttttcaataaaaggcaaaacaaaccaatttccaacatagcattacagcctttaaaaccattcacttctcatagtgattcacagagaacaagagattaaagtgctggattttaaatg

SEQ ID NO: 957225 - DNA, 120 bp, Artificial Sequence
  ENSG00000236810_11 (sequence is synthesized)
gtatatgactccagtcctggcgctggatgctgctgctgttccagcttcctaggtgtggaaactgaaggaccaagagattaaacaggaatctctgaggacaaatgggaattctcactgatt

SEQ ID NO: 957226 - DNA, 120 bp, Artificial Sequence
  ENSG00000236810_12 (sequence is synthesized)
tctaggactaccctggggcagttgtccatggaaatcttgctggtttaccttcaagatgtatctatcatctgcccatgtctcaccacctccaatgctgccacgacgtctggaccagcatga

SEQ ID NO: 957227 - DNA, 120 bp, Artificial Sequence
  ENSG00000236810_13 (sequence is synthesized)
atgcctggcctcaacctcccgggctcaagccatcttcctgcctcagcctcccaagcagataggactacagttgcacaagagcactgagctgacaatactttctgataagtcttcctgctt

SEQ ID NO: 957228 - DNA, 120 bp, Artificial Sequence
  ENSG00000236810_14 (sequence is synthesized)
ccacccttaccccccatattctgtttttaatatgcagttacagttttaaaatggaagtcagatcatgtgatgcctctgccaacctagcaaggagtgattcatttcgctcccagtaaaggc

SEQ ID NO: 957229 - DNA, 120 bp, Artificial Sequence
  ENSG00000236810_15 (sequence is synthesized)
catagtctttctaacaccctacacagcctgcacagcggctgcccatcatctctgaccccctcctcctcttgccctctcacactgcctggctgtagtgggctcagtgctataacgcacctc

SEQ ID NO: 957230 - DNA, 120 bp, Artificial Sequence
  ENSG00000236810_16 (sequence is synthesized)
tgcctgaaggcctttgctctagtcttccatctctccaaaagctcctcctcacagatccaagtgcccaacccttacccacttcaaatctcatcttctcagtgaggcctcctctgaccagcc

SEQ ID NO: 957231 - DNA, 120 bp, Artificial Sequence
  ENSG00000236810_17 (sequence is synthesized)
attctctgtaatttactcgtggattgcttattgtctgtctccctccattagaatgtaagctccaaggcagggatctttgtctttgttcactgatgtatcctatgccccttaaacagtgcc

SEQ ID NO: 957232 - DNA, 120 bp, Artificial Sequence
  ENSG00000236810_18 (sequence is synthesized)
gttcactgatgtatcctatgccccttaaacagtgcccagcacatggtagacgctcaaaaaaaagttactggataagtgactttagtggacacacttttgttttgtttttgagatggagtc

SEQ ID NO: 957233 - DNA, 87 bp, Artificial Sequence
  ENSG00000236810_19 (sequence is synthesized)
tgggattacaggcatgagccagcgcgcccggccgtggacacacttttaaaaaagacaaaggcttgcttgctctgtctcccaggctgg

SEQ ID NO: 957234 - DNA, 120 bp, Artificial Sequence
  ENSG00000236810_20 (sequence is synthesized)
ctacaaaaagccctgccgtgtgtgtttttccttcatggtgttgaggggaaggaaagatagggaagggcagtggggagaaaccctaaaattttcaatcagaaactggaaattgtaaaagtg

SEQ ID NO: 957235 - DNA, 120 bp, Artificial Sequence
  ENSG00000236819_0 (sequence is synthesized)
ctgcagctgggcctggaggcagtggctctacagcagcagtgagagccgagctgtggcagacacatgctcttcccctgactcacggctgcccagttccctccagcgaggctgctgacctat

SEQ ID NO: 957236 - DNA, 120 bp, Artificial Sequence
  ENSG00000236819_1 (sequence is synthesized)
ttttctattaggaacaaccagccaatgtgataatgaggaaaatgtattctggcccctatgaagtttagtgaagcccgaatgaagtggaggaggccacggagatgcacgaggaagagcatt

SEQ ID NO: 957237 - DNA, 120 bp, Artificial Sequence
  ENSG00000236819_2 (sequence is synthesized)
ccaggcagagggaacagcgaggacaaaagcccccgggcaggaatgggtgtgcaagcctgagatccaacatggcggagagcaagccggaagtgctgcgcggggatcctaagggagcactga

SEQ ID NO: 957238 - DNA, 120 bp, Artificial Sequence
  ENSG00000236819_3 (sequence is synthesized)
ctccacaatcagctattttacataaggaaagtgggtggtgattaacctcagagtctccagggacagactatccaggactgtgcctgaaatagaagaggaattaacatcatacagaactga

SEQ ID NO: 957239 - DNA, 120 bp, Artificial Sequence
  ENSG00000236819_4 (sequence is synthesized)
atacggtgactgaggggagtttgtgtctccccttttaggaaagaagatgagaataagtatgaaggagagtcatgtactgtacattaagcaaaagcatgatgctgttatttgaaatgttaa

SEQ ID NO: 957240 - DNA, 120 bp, Artificial Sequence
  ENSG00000236819_5 (sequence is synthesized)
ttagaggtgcccactaaaaactgctcagcaattttcttggagacctcagtgctcatgttattctttcctctatcttatgttttcctctctcctgcccttttcagaaacagtctacagcag

SEQ ID NO: 957241 - DNA, 120 bp, Artificial Sequence
  ENSG00000236819_6 (sequence is synthesized)
ctcggcctcccaaagtgctggtattacgggcatgagccaccgaacccagcctcatgttatgactttccaaccataatttagtgttaacaaagtaatcacaaaagtaatatattagtttga

SEQ ID NO: 957242 - DNA, 120 bp, Artificial Sequence
  ENSG00000236819_7 (sequence is synthesized)
aaattagtaatgcccaccagattcaatcactaaaaaatgtgatatcattaaaaaccatttttctacatgttaacaagagccaacttctgtcccaagcaggttgaattatcacaatttcct

SEQ ID NO: 957243 - DNA, 120 bp, Artificial Sequence
  ENSG00000236819_8 (sequence is synthesized)
gataagcagagtccagcttcctaattcaaactctcaaactcattgttaaataagcccagaggagttggacattttccatcacgcatgtgggaagaaagaaggccaacgatgctcttcaga

SEQ ID NO: 957244 - DNA, 120 bp, Artificial Sequence
  ENSG00000236819_9 (sequence is synthesized)
tttaacaagtaaaccttaaaagtatctgttaagaatacagagatgcccatgacaacactatcaccagagcaacaactatcaactaaggtaaccatgtagaaataatgtcctttttgtagg

SEQ ID NO: 957245 - DNA, 120 bp, Artificial Sequence
  ENSG00000236819_10 (sequence is synthesized)
tttctttttcttcttttcctttttttttggtgcaagacatggcaacaatttctaaagtctatgtttacattatacttgcaagaaaaggcttattttaatcacagcacaagtgggtaactg

SEQ ID NO: 957246 - DNA, 120 bp, Artificial Sequence
  ENSG00000236819_11 (sequence is synthesized)
cacaagtgggtaactgttacagatattcacatgactctgcacttcccatttgacagcagagggcaggattgtggtggccgctctcaagttaccatcatcacaaatcagcttatttaaaac

SEQ ID NO: 957247 - DNA, 120 bp, Artificial Sequence
  ENSG00000236819_12 (sequence is synthesized)
agtttattatgattataaataatctaaaatattttatttaaaatagattatttagaataaattattttaaatactttgtgatgtagaacattctctctggccgggtgtggtggttcatgc

SEQ ID NO: 957248 - DNA, 90 bp, Artificial Sequence
  ENSG00000236819_13 (sequence is synthesized)
aacaacatagcgagactccgtctctactaaaaatacataaatgagctgggtgtagtagcttgcatctgtagccccagctactcaggaggc

SEQ ID NO: 957249 - DNA, 75 bp, Artificial Sequence
  ENSG00000236819_14 (sequence is synthesized)
tgggtgtagtagcttgcaaagcccaggaggttgaggctgcagggctgtgatcgcaccactgcattccagcctggg

SEQ ID NO: 957250 - DNA, 120 bp, Artificial Sequence
  ENSG00000236819_15 (sequence is synthesized)
tccagcctgagtgacagagcaagactccctctcaaaaaagaaaaagaaaaacaaatcttttttgttggaagtagaatctgggttagaatttttttcttttggcacttcaaagatgtttca

SEQ ID NO: 957251 - DNA, 120 bp, Artificial Sequence
  ENSG00000236819_16 (sequence is synthesized)
ttggcacttcaaagatgtttcagtgtcttccagccccctcgtttctgatgagaagttagcagccattccaggcttttccttctgttgtctggcactggtgggttcttggtctcattgact

SEQ ID NO: 957252 - DNA, 120 bp, Artificial Sequence
  ENSG00000236819_17 (sequence is synthesized)
gggagcaagtgtgtgctaaaaagggttacctcggtggaactaggttgctcaaatcctgaacattccgaaggaaggactggcccctgaccagctctggggagctaacttctgggtctttgg

SEQ ID NO: 957253 - DNA, 120 bp, Artificial Sequence
  ENSG00000236819_18 (sequence is synthesized)
aatatgcctgaggagagcacctttgtgacctgagacttcagccctgcctacaccttatgctaacagtgtggtttatggggaagacctgtttttatttgctgggagccctgggccatgctg

SEQ ID NO: 957254 - DNA, 120 bp, Artificial Sequence
  ENSG00000236819_19 (sequence is synthesized)
tatctctttgacttctggatgggtggggaactgaggaataaattgctaaggccagtcatgtagatgctccatgcctatatgactgacctccaataaaaatcctggcaccaagacttgggt

SEQ ID NO: 957255 - DNA, 120 bp, Artificial Sequence
  ENSG00000236819_20 (sequence is synthesized)
aagctttcctcattgacagtaattggtgtgtattattgtcacacgttgttgctgggaggactaagtgttgtccatgtgactccgcagagaactcctggaagttcaccccggtttctcctg

SEQ ID NO: 957256 - DNA, 120 bp, Artificial Sequence
  ENSG00000236819_21 (sequence is synthesized)
aactctgccctattgtccctttttcctatgctgattttaatctgtattctttttatccccaagttctggcaagtctttgatgtattcttttcccataataaactgtaactgtgagcataa

SEQ ID NO: 957257 - DNA, 120 bp, Artificial Sequence
  ENSG00000236819_22 (sequence is synthesized)
actaagagttgaaggggagaatggatatgggctacagctagccttttctgccacaattccacttgtcacagacatgttagttcccatttgaaatttttctgcaccatacaaaatttaatc

SEQ ID NO: 957258 - DNA, 120 bp, Artificial Sequence
  ENSG00000236819_23 (sequence is synthesized)
ctgaagtgaactactcagcattacttgcaaaggacagacctgcaaagtgacgttttgctggcagaaatggagaaggagctgagtacagatttcatgtaataaaagtgaaatgaaaatgaa

SEQ ID NO: 957259 - DNA, 120 bp, Artificial Sequence
  ENSG00000228133_0 (sequence is synthesized)
ctatggtaccaactcttttgctgtgccagcacagaggtctccagagcgactctcctgaatcagatagcaggggctgtttgcagtttcgtttccacgcttcgctgactggttagacagtga

SEQ ID NO: 957260 - DNA, 120 bp, Artificial Sequence
  ENSG00000228133_1 (sequence is synthesized)
tcacaggttcggaagcacgagcctcaccacagcggaggaggcctccactctgaagcgggattccacgctcctgcaccctaagatcagctagactctctgccttgtttcatcttctttctt

SEQ ID NO: 957261 - DNA, 120 bp, Artificial Sequence
  ENSG00000228133_2 (sequence is synthesized)
acaggagaagccctttctggaggacagctgagccctgcagctgccatcctgcctggcaggctagggctgggctgcgggaaggccccccaggaggcttggctgggcatgctctgtgaagcc

SEQ ID NO: 957262 - DNA, 120 bp, Artificial Sequence
  ENSG00000228133_3 (sequence is synthesized)
cgaggtggctgggactcattctagtgatggacaccaagtcagcgggctcctctctccagttcctcgacatccctggaggcccctctgctcctgcagccctagccttggagctgatggttc

SEQ ID NO: 957263 - DNA, 120 bp, Artificial Sequence
  ENSG00000228133_4 (sequence is synthesized)
ctggaggctccgttcccgtttcgccagctattttgctgcctcggccatctgttccctccctgtcatctcctctctgctttaaccttaaccactacttcactgcagatggtaccaggcagt

SEQ ID NO: 957264 - DNA, 120 bp, Artificial Sequence
  ENSG00000228133_5 (sequence is synthesized)
tctgctctcgacatccttcacgacgcctggccctccttctcatctccagcaagtgaaccgctctgtcctttttaaagcctcatcccaaagacacggccagagcttggagttggattcgcc

SEQ ID NO: 957265 - DNA, 120 bp, Artificial Sequence
  ENSG00000228133_6 (sequence is synthesized)
ccacacaactccccctctttgatgccatctgctttcaactccaccactggccaggggcaaacacctaccccttcccctgccttttcctcctgagacttcttctcaaactcggccaagaag

SEQ ID NO: 957266 - DNA, 120 bp, Artificial Sequence
  ENSG00000228133_7 (sequence is synthesized)
ctctcctggcatggacagcgtgtctgctccgggtctctacctggtctccatcaacagagccatgtaaccgcccagagggctccaggtccgcaagctgaggcggaggccagaaactctgaa

SEQ ID NO: 957267 - DNA, 120 bp, Artificial Sequence
  ENSG00000228133_8 (sequence is synthesized)
tgcagtaaggaattgtttcccatgctggcatggtgggaaccgaaccaaaacacattttctatgttgtctgagctcacagggaacatccctctgctgtccttgctgttattctggcatgct

SEQ ID NO: 957268 - DNA, 120 bp, Artificial Sequence
  ENSG00000228133_9 (sequence is synthesized)
ggtgagaaaatgcatgcatgggctttacttagcaactcgctctgcctctcctctctgtcagggcgctcccctaaaatctctcctcttgacgtcttttttctggcataaggacccggagct

SEQ ID NO: 957269 - DNA, 120 bp, Artificial Sequence
  ENSG00000228133_10 (sequence is synthesized)
ttgaggagcgcagcagcccagaagctcctaaggagagaagctgttttggtgagattggttccaccaggctacatgccttgactgggacagaaatgggctgggaaggccgaaatttgactt

SEQ ID NO: 957270 - DNA, 120 bp, Artificial Sequence
  ENSG00000228133_11 (sequence is synthesized)
ctgcacctggatttgggctaaaaagtctcacagctcagcctccttgataagggttcttctatctcccctctatacttcctctgcagcagaaaagagtatcttggccgtgcagggaacgct

SEQ ID NO: 957271 - DNA, 120 bp, Artificial Sequence
  ENSG00000228133_12 (sequence is synthesized)
cttctctcactctcgccactggggttaagggcagctacattactatagctccaagtcttggttgcccccagagagaggcagagatgtagcctgcccacatctggacacttgaagactctc

SEQ ID NO: 957272 - DNA, 120 bp, Artificial Sequence
  ENSG00000228133_13 (sequence is synthesized)
caaacacctagaggagctgtggattcaagtgaagcaaccatctgatgccaccacggtccctccttccctttgccttcccttcttcccacaaaagagaagcccaaatccgccaccagacca

SEQ ID NO: 957273 - DNA, 120 bp, Artificial Sequence
  ENSG00000228133_14 (sequence is synthesized)
gcccatctgcccgtggaaaccaagggaaccaaatgcatcgtactgggttgcaggccttaatctagctctcgctgaattattcagggatggcattaacttataaatgagtgtgtttgactg

SEQ ID NO: 957274 - DNA, 120 bp, Artificial Sequence
  ENSG00000250846_0 (sequence is synthesized)
cacacacccacggagggaagtaatctggaggctgccttgcaagtctcaaggtgacaatagtcctcaggcagacaagaaggaataagggtttgagatgaatggctacagctgagagtatgc

SEQ ID NO: 957275 - DNA, 120 bp, Artificial Sequence
  ENSG00000250846_1 (sequence is synthesized)
cctcccaccctccttccctcctcctcttcccagctcccccgccctctgctgctcgcagcctcgccagtgagaatctactgtaagtgtgagttgcttcgacgaagtcacacacccacggag

SEQ ID NO: 957276 - DNA, 120 bp, Artificial Sequence
  ENSG00000250846_2 (sequence is synthesized)
gtttattgaatctgaagtgatttgctcctctttctggactacacaataaacaccctccaacgtccccagccatgctcttcccatcatttggctgaaaggggaggaattcaaggccttaga

SEQ ID NO: 957277 - DNA, 120 bp, Artificial Sequence
  ENSG00000250846_3 (sequence is synthesized)
gtggggaagctacaatttggaagaatcctggaagcacagattaccctgtgaagcagcatccccatgagggtctctttcttctgtgatataagcaagaaataaatgaattgtgcaaatcca

SEQ ID NO: 957278 - DNA, 120 bp, Artificial Sequence
  ENSG00000250846_4 (sequence is synthesized)
atgaaatattagttctggttgctagtgcagatctggactcggatcaagggtgtcgagagggtcctgggtcctgttcctttgcctttcaaaaagactttttacggattgagaatttttaaa

SEQ ID NO: 957279 - DNA, 120 bp, Artificial Sequence
  ENSG00000250846_5 (sequence is synthesized)
taccactaggggaaaggtgaaggttctttgcagccttcagtgttgaaatggacgaaggtaaggaaggcaaatcattttaagacgaaatctccgattttttaaaaaaggaggaaaaaagca

SEQ ID NO: 957280 - DNA, 120 bp, Artificial Sequence
  ENSG00000250846_6 (sequence is synthesized)
gggtggctaaggataaagaaagaggacttgagaaaatgtggagaatgaaaaacaggagagcagcgagcaaaagcaaagatccagagttcaaagagactggcagaaggaaatagctgcggg

SEQ ID NO: 957281 - DNA, 120 bp, Artificial Sequence
  ENSG00000250846_7 (sequence is synthesized)
ctgagtgctgaagaggggagggactgacggctgccggccggtaggagcgcggagctgcgctgcggcggcccaggagctgctgcggttcccgctgctcggggagcaggcggtgtgtgcgcg

SEQ ID NO: 957282 - DNA, 120 bp, Artificial Sequence
  ENSG00000250846_8 (sequence is synthesized)
tctggaggctgccttgaagtctgaaagcaggttctttttattataatgtgctccgaatggatgaagcaaatttagaggaagagcagtgaatcagtttctcagtttggcaaaaagcctcac

SEQ ID NO: 957283 - DNA, 120 bp, Artificial Sequence
  ENSG00000250846_9 (sequence is synthesized)
gggcatgtacaggaagccttcctgcagacatccacagtgaacaagtctaaggacaatagctttcgttggcccccaatagaaggcatttttagtgatgtgtggcctcaccacttaaatcca

SEQ ID NO: 957284 - DNA, 120 bp, Artificial Sequence
  ENSG00000234418_0 (sequence is synthesized)
gtgaagaaaggaacaaggtgttcagctaataacgtggtttgggaagggagtttgaaaagagaagataaagaaatactcatctaggagagtaggagtgtggatggactagaaaaaagaaaa

SEQ ID NO: 957285 - DNA, 120 bp, Artificial Sequence
  ENSG00000234418_1 (sequence is synthesized)
agaaacttggattgctggattcaggtacaagtatttttaaagctccctaagtgattataatgtatagccaaagttgagaactactgctttggagccactggtctaatggaacaaattgca

SEQ ID NO: 957286 - DNA, 120 bp, Artificial Sequence
  ENSG00000234418_2 (sequence is synthesized)
tgcattgatttacttcccttaatattactatgtataactaactaaataagatgtattattttatgtttcttcttaatattggcataaaccaataaattagtgtatgtatgtttcattgtt

SEQ ID NO: 957287 - DNA, 120 bp, Artificial Sequence
  ENSG00000234418_3 (sequence is synthesized)
aagatccttctgtctctgatctctgatctctgacctgcgttcttagctgggacgtcgagttctcccaggataattatcgaccagctgccatgtaagacgtgcctttcagcttccaccatg

SEQ ID NO: 957288 - DNA, 120 bp, Artificial Sequence
  ENSG00000234418_4 (sequence is synthesized)
cctcctctgcccatttgcctcatatggttttaaggatggtaagtgcagataaagctgtgaatgagaagaggaacagagcagtcatcatggaacatgagagagaagctatgtattcaaggc

SEQ ID NO: 957289 - DNA, 120 bp, Artificial Sequence
  ENSG00000234418_5 (sequence is synthesized)
cccagaaccacaagtagaaggagcctggatcccagataattttgtgggtcccatagtcctgaattgcctgcccaggctttaacatgaaagagaacaatttctctatttcatttaaaccac

SEQ ID NO: 957290 - DNA, 120 bp, Artificial Sequence
  ENSG00000234418_6 (sequence is synthesized)
agttattacagggtctctttcaacagccaaacctattacctaactaacacaagtcatgaccaggtagtcttgctaacagaatatctcatattcaattaagtgttttaaatatataccatt

SEQ ID NO: 957291 - DNA, 120 bp, Artificial Sequence
  ENSG00000234418_7 (sequence is synthesized)
gttactgcacctgaacaaccgaaaacttctgtgagaagaccaaaaatctatacttagtagaaattttccttcttaattttagcatctacagaaatgtgccccatattttgtcctgtgaat

SEQ ID NO: 957292 - DNA, 120 bp, Artificial Sequence
  ENSG00000234418_8 (sequence is synthesized)
gactttcaaaagttcagacttgtgtaatgccctataagttgaaccaaatattaatttctttgcaatatataaagattttatttaacatagtgtaatataaagataatatatgtctaatgt

SEQ ID NO: 957293 - DNA, 120 bp, Artificial Sequence
  ENSG00000234418_9 (sequence is synthesized)
agtagatgtcaagtacagtatgtgtttggtatttagaccttataaaaaaaatttttctagctcttgtctaccatgtaggtaacatattcccattttataaataaagcaattccagaacat

SEQ ID NO: 957294 - DNA, 120 bp, Artificial Sequence
  ENSG00000234418_10 (sequence is synthesized)
tctgcacactgtactacaggatttctttaaaatacttcttaaagaacccatccaattttatgcaagtattcaaaagtctctaatgggattcattttaattattgtaacagaaaaagaaat

SEQ ID NO: 957295 - DNA, 120 bp, Artificial Sequence
  ENSG00000234418_11 (sequence is synthesized)
tctctgatctctgatctctgacctgcgttcttagctgggacgtcgagttctcccaggataattatcgaccagcagaaccagcctgaaaccaccactgaaacacaatttatgccttgctat

SEQ ID NO: 957296 - DNA, 120 bp, Artificial Sequence
  ENSG00000234418_12 (sequence is synthesized)
acaaaagtctgacaataaacggttaccttgattttcacattttcaaagaaaaatccctcaatggcaactagaccagaagtctcaacactgaatatgcaataatggctacaagttacagga

SEQ ID NO: 957297 - DNA, 120 bp, Artificial Sequence
  ENSG00000234418_13 (sequence is synthesized)
gctgcagaccaaattgcatcttagatccattaaatcagaaacttggattgctggattcagatattccatcaggagcagaaacgttcacagaaaaggggcacaaattttaggggcagagta

SEQ ID NO: 957298 - DNA, 120 bp, Artificial Sequence
  ENSG00000228139_0 (sequence is synthesized)
agccttggatcaaatgctgcatgagagacatgtaagagttttaatcatggagtgcagtagactagctgggacgtctgtgacagcttgatttcttccacatctcagatttccacagtgtac

SEQ ID NO: 957299 - DNA, 120 bp, Artificial Sequence
  ENSG00000228139_1 (sequence is synthesized)
aggtgaggaagctgagaaccagatagattcatccagtgtcctaggacacacaggatagaacgcaaggatctcacttagcccagtggatggcagtcaattaatggagcgagtggcttagtc

SEQ ID NO: 957300 - DNA, 120 bp, Artificial Sequence
  ENSG00000287866_0 (sequence is synthesized)
ctacctccctagagtgggatccgcctctgttcatgcttcagaaagcagtgagaaaggccttctctctccagggttggacagccccaggaaggctagctaacccagcgctgagggcttcat

SEQ ID NO: 957301 - DNA, 120 bp, Artificial Sequence
  ENSG00000287866_1 (sequence is synthesized)
ctggagagtgaaggcaatgaacatgtagagactgatggcagcccagccttgagcatccactcaactctgcacgccacggaagagaaggcaggccaggccagatgaaggctaggtgctggc

SEQ ID NO: 957302 - DNA, 120 bp, Artificial Sequence
  ENSG00000287866_2 (sequence is synthesized)
tggggcctctgcaggggccaatgtgctggagccctggaggctgagtgcctgctccaggctgagccaccgctgtgggaacacatgaatggaagcacgcatggcaaacgctgtggagggatc

SEQ ID NO: 957303 - DNA, 120 bp, Artificial Sequence
  ENSG00000287866_3 (sequence is synthesized)
aggaaggcatggaaagaagcatattctgcatctttcatcctttcttccctggacacatctgttcaggccatgcatatccctagtaccaagccagcacttgacccagaagcacacacccat

SEQ ID NO: 957304 - DNA, 120 bp, Artificial Sequence
  ENSG00000287866_4 (sequence is synthesized)
aaggaaagccactgatgctgccatcctgggccaaagtaccagtagccgggtctcaggctccttgtggcagggcttagatggtggatgccttccctcaaaccaggagcttgcggcccgatc

SEQ ID NO: 957305 - DNA, 120 bp, Artificial Sequence
  ENSG00000287866_5 (sequence is synthesized)
cagccttggatcagggagctgtgctgatgctgcactgagccctggagagctagaatttcagagctgggagaagccctggaaaccaaggcgtttaccttctcattctggggctggcatctc

SEQ ID NO: 957306 - DNA, 120 bp, Artificial Sequence
  ENSG00000287866_6 (sequence is synthesized)
tgcccaagaccgggagcctcttgatctttgcatctttgtacccacctctgccatcttgtgcacttccccaggaagtaagcatttaaacctggacccccaccagatggaaaatgcccattg

SEQ ID NO: 957307 - DNA, 120 bp, Artificial Sequence
  ENSG00000287866_7 (sequence is synthesized)
cagtcaagtagacctcagaagagtggtaactaaggacagaacactgatcgccggtctttcttctcaatttcttcctgaggggcctggagagactcatacctacaggccagaccttaacat

SEQ ID NO: 957308 - DNA, 120 bp, Artificial Sequence
  ENSG00000258576_0 (sequence is synthesized)
cccaccccacccgcccctcccccgcctccccagccatctgtggcgttggcagcagcagtgccagggcgggcgggttcacgctgcacctttaccagggtaggactggccagcctgggctct

SEQ ID NO: 957309 - DNA, 120 bp, Artificial Sequence
  ENSG00000258576_1 (sequence is synthesized)
agccctggaagccaccgactgggggctcgggcagagcaagggcagggtaaggggcagcttggccaggaggcacccttgggagccagggtttcctcatctgtaaaatgtgactctgcgagg

SEQ ID NO: 957310 - DNA, 120 bp, Artificial Sequence
  ENSG00000258576_2 (sequence is synthesized)
gcaggagcttggtttcactcgctactgtaccccctggggcctacagcagggctggttggtacacactaggtgtctaataaatgttgagggattgaatggatggaccgatgaaaaggttgg

SEQ ID NO: 957311 - DNA, 120 bp, Artificial Sequence
  ENSG00000250597_0 (sequence is synthesized)
tttcaacttatggcccaagaaaatagaagtcagaatcaaaatccagcatgcagaacttgttgtaaaacatggcagtacagacagtatatctctccacattgtgtctgaatttggaggagg

SEQ ID NO: 957312 - DNA, 120 bp, Artificial Sequence
  ENSG00000250597_1 (sequence is synthesized)
gagtaagacgtgcctttcaccttcttccacgattatgaggactgccagccacttggaactactctcaaaaagtaccagaagtaactcatgagtaagttactcaaccaggaaaagcacata

SEQ ID NO: 957313 - DNA, 120 bp, Artificial Sequence
  ENSG00000250597_2 (sequence is synthesized)
tttcaacttatggcccaagaaaatagaagtcagaatcaaaatccagcatgcagaacttgttgtaaaacatggcagtacaggacttgctacattggtctttgctagcttcaatgcctggaa

SEQ ID NO: 957314 - DNA, 120 bp, Artificial Sequence
  ENSG00000250597_3 (sequence is synthesized)
atgcggctctgttgactcagttgtttaaatacatattgtcaaacaaaatatttgcagcactgatgccaagttcctcctgacattcacaataatattgaatttgactcaaccaaacaagtg

SEQ ID NO: 957315 - DNA, 120 bp, Artificial Sequence
  ENSG00000250597_4 (sequence is synthesized)
aagaagctactgctgctgccattctgcattgggaagctcatcaaacacatcatgggtattataggacttgctacattggtctttgctagcttcaatgcctggaatgcaaacttcgggtcc

SEQ ID NO: 957316 - DNA, 120 bp, Artificial Sequence
  ENSG00000267234_0 (sequence is synthesized)
atccacctgcctcggcctcccaaagtgagaggattgcttgaggccaagaatttgaaaccagccgggtcgacatggtaagaccccatctctataaaaaagaaaaaattagcccagcctggt

SEQ ID NO: 957317 - DNA, 85 bp, Artificial Sequence
  ENSG00000267234_1 (sequence is synthesized)
cctgtagccccagctactcaggaggctggggcagaaggatcactcaagcccaggagtttgtagcctaggtgacagagtgcaaccc

SEQ ID NO: 957318 - DNA, 120 bp, Artificial Sequence
  ENSG00000267234_2 (sequence is synthesized)
tgacagagtgcaaccctgtctcaaaacaacaacaataacaaaaaacttccaaattcattttaaactttattgtctttcatagaccaaaccccactaataatagctaggcctccttctacc

SEQ ID NO: 957319 - DNA, 120 bp, Artificial Sequence
  ENSG00000239767_0 (sequence is synthesized)
acacaagaaaaagtcttgggttgatggtgctgttctgtatttttattatggttgtgattacataacactatgtacttatcagaatttataaaactacacaaaatcggtaaattttacagt

SEQ ID NO: 957320 - DNA, 120 bp, Artificial Sequence
  ENSG00000239767_1 (sequence is synthesized)
aggtaaaattttaaaattgcatcttcttagcagtacctgctctttcataagttttctagctccatcttcttttccatttattcactgaaaaagtaattattagtggctacaagttgccat

SEQ ID NO: 957321 - DNA, 120 bp, Artificial Sequence
  ENSG00000239767_2 (sequence is synthesized)
taatgtcgtctgatgatacagggatattataaccaattaatggaaagaaacatttaagacaacaccttcctctatgtttacatcaggatgcatttttgtaattgagtatgtatattaatt

SEQ ID NO: 957322 - DNA, 120 bp, Artificial Sequence
  ENSG00000239767_3 (sequence is synthesized)
atattacaacagacaacaagtataccacaaataattcaacaagttgaatttttacatcccattactgtaaactcacattcttaagaggatataaacgtcatgttatgaacatacaccaat

SEQ ID NO: 957323 - DNA, 120 bp, Artificial Sequence
  ENSG00000239767_4 (sequence is synthesized)
taaattttccctacatatatccaacatctttttaatgtcacttgctttattacaatctacactcacttgttattgtggccattactttgctgctgcttaataaaggtcttgttcttatta

SEQ ID NO: 957324 - DNA, 120 bp, Artificial Sequence
  ENSG00000239767_5 (sequence is synthesized)
tctgtactagtactggtacttgtatgttttaacaaacttgaatcctttaccgaaaatattgtatagtaatatcagaaatcttataagtgataatataatttttactatactaacagaaaa

SEQ ID NO: 957325 - DNA, 120 bp, Artificial Sequence
  ENSG00000239767_6 (sequence is synthesized)
gagacctgaattttgtatacagagctcagtttaaatcccattttaattattaattacctataacagtaggtaagtcatactctggctgagctccttcatctgtaaaattagtgtttggag

SEQ ID NO: 957326 - DNA, 120 bp, Artificial Sequence
  ENSG00000239767_7 (sequence is synthesized)
agggaaaaagatagattacttaaaatgagtttgaagatgactacctaattatttgtgagaaaataaacatggataccaaatgccttaaaccaaaataaatcccttgtgtttaaagattta

SEQ ID NO: 957327 - DNA, 120 bp, Artificial Sequence
  ENSG00000239767_8 (sequence is synthesized)
aatctaaatacaaaaccataaagtaactaaaattattttactttggttattatatatgtatattttagagttgaggaaatcctttatacccatgatgagaacccaaaagctacatagaaa

SEQ ID NO: 957328 - DNA, 120 bp, Artificial Sequence
  ENSG00000239767_9 (sequence is synthesized)
acccaaaagctacatagaaaagaatgtatttgataaatgtgaccacacaacttgtaaaaaatcctttaacaaaatatatacaattttaaaggacaaaaaataaattaaattaaatataca

SEQ ID NO: 957329 - DNA, 120 bp, Artificial Sequence
  ENSG00000239767_10 (sequence is synthesized)
tactaatggagaatgaagacgaaaagataactgtaagaaatataatacgttaaacagaaaaaaattcttcaggataatgtttatctgaagtggggaaaagaaaggagaaaatatagggtc

SEQ ID NO: 957330 - DNA, 85 bp, Artificial Sequence
  ENSG00000239767_11 (sequence is synthesized)
ttatctgaagtggggaaaagaaaggagaaaatatagggtcagaattaaactgtatatggaaattctattttccaaaggacctgag

SEQ ID NO: 957331 - DNA, 120 bp, Artificial Sequence
  ENSG00000267231_0 (sequence is synthesized)
cccggcctagagagacgcgatcgggcgcggagaggacgcaacaacactaattaattggttactaacggcgaggaacagagttgcccgaggctcgcagtgagtcaggcgtctgtgactccc

SEQ ID NO: 957332 - DNA, 120 bp, Artificial Sequence
  ENSG00000267231_1 (sequence is synthesized)
cgcgcgaccctccccgtccaaccaacgtcctcccacaaacgggtcaccggactgagggtttcaagttcctccagggggtgtgtgcggttccccctaactcaggccctactccttccagca

SEQ ID NO: 957333 - DNA, 120 bp, Artificial Sequence
  ENSG00000267231_2 (sequence is synthesized)
tgtgcggttccccctaactcaggccctactccttccagcagcattttctcttctttcctctttttatttatttcagaaacagggtcttgagacgggcgcggtgactcacgcctgtaatcc

SEQ ID NO: 957334 - DNA, 120 bp, Artificial Sequence
  ENSG00000267232_0 (sequence is synthesized)
aagctacagtgaaatactatctcacgcctaccaggtctgcaaaatccagcttgggcaagggtgtcgccggccccctcttatgctggtgggggagggcgatttggtaccacccctttaggg

SEQ ID NO: 957335 - DNA, 120 bp, Artificial Sequence
  ENSG00000267232_1 (sequence is synthesized)
gcctaaatacagccctcgcacttctgcaccaaggaatttaacctaagaaaatagtccgacttgggcaaaaaacgttgctttgcactggaggcaatgaagacacggcggagtcccagctcg

SEQ ID NO: 957336 - DNA, 120 bp, Artificial Sequence
  ENSG00000267232_2 (sequence is synthesized)
ggaggctcttcgggaggcatgaaaggcagacgtgttccgaaacgtgagccgcgctgaggggcacggcgcacgaccggggacagaaggaagacactgcggtcgcaaagccctggccgtgca

SEQ ID NO: 957337 - DNA, 120 bp, Artificial Sequence
  ENSG00000267232_3 (sequence is synthesized)
aaggccccgtggtcagccaggagcccaggcgtcccctgctctagcgaggtttccttccgaacgtcccgtagcaccgcttaccatggaacggcgggcgctgcctcgcagccccgaccccgc

SEQ ID NO: 957338 - DNA, 120 bp, Artificial Sequence
  ENSG00000267238_0 (sequence is synthesized)
gtttcagacagtcctcagtttgttctggcgtcctagtcccgcttctggagtcaggttgcacctcctgcctcagaaggatcaagttccagttgcccacattggatctgtttcttagagaat

SEQ ID NO: 957339 - DNA, 120 bp, Artificial Sequence
  ENSG00000267238_1 (sequence is synthesized)
gagagagaaaaatggcatcaggagtcatggagcctccaggctgggtcttgctctggtgagaaagcacaggaccggggtggatttctgaaatccaggcagtgctccgcaccaggcgcgtaa

SEQ ID NO: 957340 - DNA, 120 bp, Artificial Sequence
  ENSG00000267238_2 (sequence is synthesized)
ccccttatggaatttgctttatgagacgggaagatctttgctctgaaggagtgaaccgtgtgactccagtcaccttgctgaggggatgtactcctcacgatttatgggacctgatctgtt

SEQ ID NO: 957341 - DNA, 120 bp, Artificial Sequence
  ENSG00000267238_3 (sequence is synthesized)
tttcatggcatcagggcagaggagccataaggggaagtcctgtgtgctgacagaccaagcacacccactggtgaggctcagccaagtgcttaactttaaccactgattaaatttccttct

SEQ ID NO: 957342 - DNA, 120 bp, Artificial Sequence
  ENSG00000267239_0 (sequence is synthesized)
tacatccctaactagctgcatagaaagctgggagctgaaccagcatgccatactgccacctacctacagcagcgctgacagttcttcagctcagcccgcaaaccagccagcatctgccct

SEQ ID NO: 957343 - DNA, 120 bp, Artificial Sequence
  ENSG00000267239_1 (sequence is synthesized)
gcctgggttgaaaatcacacaggatggaaagagaagtgttctgcaggcaacttctgctctcagcctggctgcagagctctctccttgggcaaaagccacagcacctgctctctccttagg

SEQ ID NO: 957344 - DNA, 120 bp, Artificial Sequence
  ENSG00000267239_2 (sequence is synthesized)
ggccagggagtgaagacaaagggaaaacacagcaagaaagaaagaaatgtgtgacctcaaagacaatccatccagacatatttgtgtgtggtatctacacattacatcgctgaaaaatga

SEQ ID NO: 957345 - DNA, 120 bp, Artificial Sequence
  ENSG00000267239_3 (sequence is synthesized)
gaacctggctgcctggaaacttggaagcaacccagatgtcttcagtaggtgaatggataaataaactgtggtgcatcccaatattggaatatgattcagcactaaaaagaaatgagctat

SEQ ID NO: 957346 - DNA, 120 bp, Artificial Sequence
  ENSG00000267239_4 (sequence is synthesized)
caagccatgaaaagatatggaggaaatttaaatgcacattatttaagttaaggaagacaatctgaaaaggctacaccctgtatgagtccaactctatgacaccctggaaaaggcaaaact

SEQ ID NO: 957347 - DNA, 120 bp, Artificial Sequence
  ENSG00000267239_5 (sequence is synthesized)
acggagacaataaaaagatcaggggttgccaagggttggatgttggggagggatgaatagatagaacatagaggattcttcagacagtgaaactactctgtctgatactataatggtgga

SEQ ID NO: 957348 - DNA, 120 bp, Artificial Sequence
  ENSG00000267239_6 (sequence is synthesized)
cagacagtgaaactactctgtctgatactataatggtggatacacagtattatacaatcatccaaacccgtagaatgtacaacaccaagactgaacctccaactcctgggctcaagtgat

SEQ ID NO: 957349 - DNA, 120 bp, Artificial Sequence
  ENSG00000267239_7 (sequence is synthesized)
ctgaaactattggtgcacacgaccacatctggccaatttttaaaaaattactatagaggcaggatctcactatgttgcccaggatagtctcaaactcctggcctcaagccatcctcctgc

SEQ ID NO: 957350 - DNA, 120 bp, Artificial Sequence
  ENSG00000267239_8 (sequence is synthesized)
tatcactcttggctcatcagttgcaacatcagcatatcacagtaatgcaagaggtttacagtgcaggacatagggacttggtgaggggacatgagaatcctctgcacattctgttcaatt

SEQ ID NO: 957351 - DNA, 120 bp, Artificial Sequence
  ENSG00000267239_9 (sequence is synthesized)
tgtctcaaaataaaatatattcattaaaataaaactactaatttcttatcaactcatctcataaaatggactgatgggagactaagtcagtatcctattagcagacacaaccagaaatta

SEQ ID NO: 957352 - DNA, 120 bp, Artificial Sequence
  ENSG00000267239_10 (sequence is synthesized)
agagtggtcccatgtcaaagaggtttgcccaagcattgcagatacaggactgaacagactgccatcctggccgtctcgaatgtcaatgttagtaatagttattttattatgatgttgaac

SEQ ID NO: 957353 - DNA, 120 bp, Artificial Sequence
  ENSG00000267239_11 (sequence is synthesized)
tcatcatttataatgccatatttgttgcttcagttatcacatttaacctgtcacaagcttaaaaatacatattctttaaaaagatagtttgtggatcaagaactcccagttaagcctact

SEQ ID NO: 957354 - DNA, 120 bp, Artificial Sequence
  ENSG00000267239_12 (sequence is synthesized)
agatgagctgtgtgtgtttgttgctctcccttcaaaaaaactgctaaaataataattgaaaagatacaaacccacttgtcgaagggagaagagaccaacggcagacataagattccagac

SEQ ID NO: 957355 - DNA, 90 bp, Artificial Sequence
  ENSG00000267239_13 (sequence is synthesized)
gaagggagaagagaccaacggcagacataagattccagacgatttttggagagtggaaagagcacgcagttgacttagaaaagcatcccg

SEQ ID NO: 957356 - DNA, 120 bp, Artificial Sequence
  ENSG00000263924_0 (sequence is synthesized)
tggggtgctggttaggttctagttcttgatctgggtcctggtttggagtgttcctcagtttgtgaaaatcaaataagctatttacttttctgtacttatgttacacttcagtaaaaagtt

SEQ ID NO: 957357 - DNA, 120 bp, Artificial Sequence
  ENSG00000263923_0 (sequence is synthesized)
gaaagtgtgcgctacacgccgcctcggccatcctccgggacgtccccacttgtccgcgggaggttgacataatctggtgtcaagaagtgggaccaaagtgagctcaccttgatggatcgg

SEQ ID NO: 957358 - DNA, 120 bp, Artificial Sequence
  ENSG00000263923_1 (sequence is synthesized)
tgactcctggaatcacatgaagttcccacattgagcccctttgagctctccaatcctacagctcaccttttctgtcatggtgaatctcctctcaggttcttgaactccctcattttgggc

SEQ ID NO: 957359 - DNA, 120 bp, Artificial Sequence
  ENSG00000263923_2 (sequence is synthesized)
aggtggaataagagcaaaacctcaagtggggccatttttgcttcagaatgaaatagaaaaaggccacagctgaactacattttctagcaatcctcagaataagatgtggtcattgactga

SEQ ID NO: 957360 - DNA, 120 bp, Artificial Sequence
  ENSG00000263923_3 (sequence is synthesized)
attctggacaatggaatggagtagagtgaaatacatcactcctagtgacaaggaggcactcaagcatgagttacaacacaaccgacctggaatacagctgaaaagattgaagcaacaggt

SEQ ID NO: 957361 - DNA, 120 bp, Artificial Sequence
  ENSG00000263923_4 (sequence is synthesized)
tcgcaggggaaggcctttacagcttctttcgactctgacatttcaggatcagcacaattctcccctatttactgctgaagcaatcaactgggattatacaaaaaaattatttgtattgaa

SEQ ID NO: 957362 - DNA, 120 bp, Artificial Sequence; identical to SEQ ID NO: 842814
  ENSG00000261695_0 (sequence is synthesized)

SEQ ID NO: 957363 - DNA, 120 bp, Artificial Sequence; identical to SEQ ID NO: 842815
  ENSG00000261695_1 (sequence is synthesized)

SEQ ID NO: 957364 - DNA, 120 bp, Artificial Sequence; identical to SEQ ID NO: 842816
  ENSG00000261695_2 (sequence is synthesized)

SEQ ID NO: 957365 - DNA, 120 bp, Artificial Sequence
  ENSG00000261696_0 (sequence is synthesized)
gcacaaagctgcctttgctgttacaaacagccgacagagggcgccggaccagcggtaacggacccaccagcgaccctaacccgcggtcgccccttcctcaaggagacccgcgcttggggt

SEQ ID NO: 957366 - DNA, 120 bp, Artificial Sequence
  ENSG00000261696_1 (sequence is synthesized)
ccgcagagtggaggcccgggcgcttggggattagggtccgcaggcctcgtgagcagcgagtaaacgccgcctttcacggctctgactacagagggagagctctaccgccgcctcccccga

SEQ ID NO: 957367 - DNA, 120 bp, Artificial Sequence
  ENSG00000261696_2 (sequence is synthesized)
gacatttttctcatggaacattttagcgagaccgttttaccaatgtgccagtgtattgaggggactgacggctcaaaatcagatcgtgccgtagtcagtgttagagattcagggccattt

SEQ ID NO: 957368 - DNA, 120 bp, Artificial Sequence
  ENSG00000261696_3 (sequence is synthesized)
ctgcggagaaagacccgaattcggagaaaggggaaaatcatgaacaatcaggaagcgagcttacaaagtgctgtccacctttcagtggacagggcaccccgggggaaaaggaaaatgtgt

SEQ ID NO: 957369 - DNA, 120 bp, Artificial Sequence
  ENSG00000261696_4 (sequence is synthesized)
gccccaatgtaggtgattttattaagttttaatggttattttttcctacaacaaagtagttgaaaaaactgaaaactattaaaacacattattttaagtttaaatatgccaagaccagac

SEQ ID NO: 957370 - DNA, 120 bp, Artificial Sequence
  ENSG00000261696_5 (sequence is synthesized)
ttttttttttttttttgtaagtttctgattttaatgtaggcaaacatcagaatattttcaaaattacttttctgcttactcattttcaattaagaacattaccatgtttggcaatatctc

SEQ ID NO: 957371 - DNA, 120 bp, Artificial Sequence
  ENSG00000261696_6 (sequence is synthesized)
ccttaatttccacttataggaacttttaaatcctagttgttttaagcaagggctttctatgaagcattcagctttatatgctgtatagtcatggttttcattggagaattttattaacat

SEQ ID NO: 957372 - DNA, 120 bp, Artificial Sequence
  ENSG00000261696_7 (sequence is synthesized)
tttccacttggttcaaaatgtcatcccacatagataagttgcataaaaatgtgtaatctctttgcattaagatgctttccatttcagcataatgcaggtttgcatttggtatcatttact

SEQ ID NO: 957373 - DNA, 120 bp, Artificial Sequence
  ENSG00000261696_8 (sequence is synthesized)
gcttaatacatatcttaagtgccaatacatcgatttttatttttatgccctagatatccttaagtgtttttaatgtagtggttaatacagacatgataatttcccatctgctagttgaat

SEQ ID NO: 957374 - DNA, 120 bp, Artificial Sequence
  ENSG00000261696_9 (sequence is synthesized)
tcaaaaatgtagatataccctttgtacaatacttttaaaaagttatcttaattcacaaatgcagatttttacataagattatgagctgagtaaggcacaaatgtgacataatcattttgg

SEQ ID NO: 957375 - DNA, 120 bp, Artificial Sequence
  ENSG00000261696_10 (sequence is synthesized)
gtgggaaataatggcttttatgcctttgtgtacacctgccaccattgcctcattatcatatacttggctaatgtcatttttatgtccatatcattttctagtttattaacaatttcatga

SEQ ID NO: 957376 - DNA, 120 bp, Artificial Sequence
  ENSG00000261696_11 (sequence is synthesized)
tccatatcattttctagtttattaacaatttcatgaactagatatattgaagtttttcattttaaaaatgtcaaaacaattgttaacatcattctaaatgtgaacataatggactatata

SEQ ID NO: 957377 - DNA, 120 bp, Artificial Sequence
  ENSG00000261697_0 (sequence is synthesized)
ccagctgctacatcaccatcagccttgtgaccatgccacatggtgttccacagacatcctacatgcatgacattgattcactcttacatttgacaggattgcaggagctcctcagacaag

SEQ ID NO: 957378 - DNA, 120 bp, Artificial Sequence
  ENSG00000261697_1 (sequence is synthesized)
atctgtggcaacagtaacaataaaagcatcccatgcggaccaaactcctgctgcagaacctggccgtccactccacccacgtgccttagcaaagtgcccttggtgaggctgagggactag

SEQ ID NO: 957379 - DNA, 120 bp, Artificial Sequence
  ENSG00000261697_2 (sequence is synthesized)
agtgctgctctaggactgccctaaaactggatttgaacaaaagaccacatgccgtatgactccattggaatgaaacatccagaacaggcaaagccacagaggcaggaagcagcatccccc

SEQ ID NO: 957380 - DNA, 120 bp, Artificial Sequence
  ENSG00000261697_3 (sequence is synthesized)
caggtcagcaacacctctggagctgaggctggcagaatgtggcgggggctcctctgagagcatggcagcttctaatggacccacgtggttagtttgagagaaacagtcaccagaagacag

SEQ ID NO: 957381 - DNA, 120 bp, Artificial Sequence
  ENSG00000261697_4 (sequence is synthesized)
ccatatgtgtccgggctgggagacctaacatttcagagccaccaaccctgcatcactggctgacaggtggctggacatcgtgtcaccactgtcttctgggaataaacatttctcagcttt

SEQ ID NO: 957382 - DNA, 120 bp, Artificial Sequence
  ENSG00000261697_5 (sequence is synthesized)
tactgacaggctcagaaatgttaagaagatgcttaaaagaaatgggctcatgagccttctttgctgaagtattaattactagatctgaatgttttgcttttctgtgatggaaaacgtgaa

SEQ ID NO: 957383 - DNA, 120 bp, Artificial Sequence
  ENSG00000261697_6 (sequence is synthesized)
gtgattcagtcatagctcacggcagcctcaaactcctggactcaagcaaatgactgatattttttgagcaccagcagtaacgatagttactattcactgttttctccctgccaggtgttc

SEQ ID NO: 957384 - DNA, 120 bp, Artificial Sequence
  ENSG00000261697_7 (sequence is synthesized)
tttctcttggaccctttgctctggggaaaccagctgctacatcaccatcagccttgtgaccatgccacatggtaaggagctgaaatctcagcagccacatgagtgagctcggcagcggat

SEQ ID NO: 957385 - DNA, 120 bp, Artificial Sequence
  ENSG00000261697_8 (sequence is synthesized)
cctttaggccccgtcatgcaatcctggattgcagccctggacatccacttaactagcaagactgagccagaaccacccagatgagctgctcctggattcccaactctcaaaaactgtgag

SEQ ID NO: 957386 - DNA, 120 bp, Artificial Sequence
  ENSG00000261697_9 (sequence is synthesized)
agatgttcaacggtggttgtttgaaactgctgagtctcagtataatttgttacacagcactagctaactcatacacgtcacgtttctgcagcagaataccttggacctggggagagctgg

SEQ ID NO: 957387 - DNA, 120 bp, Artificial Sequence
  ENSG00000261697_10 (sequence is synthesized)
catgcatgacattgattcactcttacatttgacaggaatcacttaattctgaaagtcttctgagaagacatagcaagaagtggagtcaagcacacatcatgatggcagagaaaggaaggt

SEQ ID NO: 957388 - DNA, 120 bp, Artificial Sequence
  ENSG00000261697_11 (sequence is synthesized)
tcctacgaagctttactctctacactcatagtcagtgaatgacaagtggtatatctggttcattcctgggcatgaatgaaaagagaacaaacaaatccattttctgggtaagaacagtaa

SEQ ID NO: 957389 - DNA, 120 bp, Artificial Sequence
  ENSG00000261697_12 (sequence is synthesized)
cagctcccatttgaatgttgtcttaacagtttataaaacatcttcaagtacaagctctcactgaatcttcactgcaaacctgtgaagtgggtaaggatatttctgtcatcgaacagataa

SEQ ID NO: 957390 - DNA, 120 bp, Artificial Sequence
  ENSG00000261697_13 (sequence is synthesized)
ggaaatagaggctcagagaagtcaagaaactggcccagggttacacagctcagaagtggagagcgaagtcttgaattggggttttgtggtgcttcatctatgagctttcaatttcagcca

SEQ ID NO: 957391 - DNA, 120 bp, Artificial Sequence
  ENSG00000261697_14 (sequence is synthesized)
tcatgggttgtagcttctctgctccgtgtttgatctttgctccacgtgggtatctctggctgttgccatgggtctgaagaacatgcgcatggtcacgtaggacaaccacagtcttcaaca

SEQ ID NO: 957392 - DNA, 120 bp, Artificial Sequence
  ENSG00000261697_15 (sequence is synthesized)
gaaagcgccatctctctgcttcatgcccgtggttgattttatacctgtagcaaggacactttcctattctagggctgctgagccatggcaaccttgaaaggttataataccacagtacga

SEQ ID NO: 957393 - DNA, 120 bp, Artificial Sequence
  ENSG00000261697_16 (sequence is synthesized)
acgatttccaaatgtcccttgtcaacgcccagcacagccctaatacctggagaagtgaagaaggttccagaggaggaaagaaagcctttgaatcattttgtcaggcacatgtcactccac

SEQ ID NO: 957394 - DNA, 120 bp, Artificial Sequence
  ENSG00000261697_17 (sequence is synthesized)
ttgaattatttttcatgaaggtgaatgcttttcaatcgtccaaggcaggggtccatcactttcaagcgcacttgatgtgttgctgttttaaaaattaaatacgcagagtttgcagaatgg

SEQ ID NO: 957395 - DNA, 120 bp, Artificial Sequence
  ENSG00000261697_18 (sequence is synthesized)
ctctctggagtgtgtacatcatgtcatgtctgtgtgaaatcagctgggctggtggcattcacaccacagcaattggcaaatgctgcgaatcagggttccctgacttaaaagccggctgtt

SEQ ID NO: 957396 - DNA, 120 bp, Artificial Sequence
  ENSG00000261691_0 (sequence is synthesized)
ccgcaggagaccctgagcccacagggaggggcagcctggcctcggcccccgtcgggtgttggggctggcaggtgagcggggctggttcacagcccgcctggttcgaggtattctgcgtgg

SEQ ID NO: 957397 - DNA, 120 bp, Artificial Sequence
  ENSG00000261691_1 (sequence is synthesized)
tctggctcaagcgtcctctgtcggggtctccctcataaagtgcgtgtgggggagggatccgtggcagcgagagcctgcgtgggcccccgcagacggagcaggagctggccacgggcgtgt

SEQ ID NO: 957398 - DNA, 120 bp, Artificial Sequence
  ENSG00000261691_2 (sequence is synthesized)
tgtgcagcgtgcaacgcggacacgcccagccccctctgggctccgccgctccctcctcctcctcctgctcctccttctcctcctcgtccttgtcctcgcactgccccctggcgggctccg

SEQ ID NO: 957399 - DNA, 120 bp, Artificial Sequence
  ENSG00000261692_0 (sequence is synthesized)
tcctcccacctcggcctcttaaagttctgggattataggtttggcctagagctctttcttcttagcggacatcgtctggagacatttttggttgccaggatttgctgggtggccttactg

SEQ ID NO: 957400 - DNA, 120 bp, Artificial Sequence
  ENSG00000261692_1 (sequence is synthesized)
gtggcagtgagcttgcaaatcgttggactcatgatgctttgagtgctctcaggactctggaggtcgatgctggggttcctcgctggcttcctgctgctgatgctcttcccctctctgagc

SEQ ID NO: 957401 - DNA, 120 bp, Artificial Sequence
  ENSG00000261692_2 (sequence is synthesized)
tcttttacggaaagcttcgtggcacacttgctgcttttcactgaaaccaggctgtgtggtgactagaagctgcgtattcacatttatttttattgattgatggattgaggctgctgtgca

SEQ ID NO: 957402 - DNA, 120 bp, Artificial Sequence
  ENSG00000254106_0 (sequence is synthesized)
agtaacctggaccagagaaaaaacaagactaccatgtccagccagcagaatgctataatatgctatgatgactggaatccttgttaaccaattccagcaacctcctatcgcctccccgtt

SEQ ID NO: 957403 - DNA, 120 bp, Artificial Sequence
  ENSG00000254106_1 (sequence is synthesized)
gagaccagcatgaaggtcgaagctcacaccacctctgcagactcatttcacccctcacctgcctacggtcacctgtgtggttgcccgggccagaaacaaatacccaaacgcagcatttga

SEQ ID NO: 957404 - DNA, 120 bp, Artificial Sequence
  ENSG00000254106_2 (sequence is synthesized)
cgtaactgcaatgcagcctgtacaggaggacggagggaaggaaaagccagagccaggtcttgagctgaggagggcagagtcttgcggagggccctcaggactgggtgatgctgtgaggga

SEQ ID NO: 957405 - DNA, 120 bp, Artificial Sequence
  ENSG00000254106_3 (sequence is synthesized)
gcatgaaccccgtgtccctgagggtcctgagcgccactcggccattgggtcggatcaccaggtgggtgatgctgccattgttgagggagcaatggagccagccttcgggaggaaactgca

SEQ ID NO: 957406 - DNA, 120 bp, Artificial Sequence
  ENSG00000275927_0 (sequence is synthesized)
aaggttattgtgaagagtcaataagtgagcatttaaagatgaagtacataaatacatctatatatctgtgagactgctgttgtctcacttagtcatctttatttatgtatgtatttattt

SEQ ID NO: 957407 - DNA, 120 bp, Artificial Sequence
  ENSG00000275927_1 (sequence is synthesized)
ttgaaactgtggagcatggcttgatgagcagctcacagaggctggatttctccctcagctggacacctttgtgcagtgcccagcctgcacaactgggcttggcagccctttataggatgt

SEQ ID NO: 957408 - DNA, 120 bp, Artificial Sequence
  ENSG00000275927_2 (sequence is synthesized)
agatctctcatatctataggtgctcacccaagtctactgtttgaccgaccaccgtggcccgagcctgagtttccagctgggagttggaatagactcttgagcatccctcgagaggcaggg

SEQ ID NO: 957409 - DNA, 120 bp, Artificial Sequence
  ENSG00000275927_3 (sequence is synthesized)
tgcaacacatcaccacaaggcctggtgcctcctgaagagcggtctccctgctagtgtccaaactttgtaagagttccccctctttatcccattaaaaataaacaccgttttcttcactca

SEQ ID NO: 957410 - DNA, 120 bp, Artificial Sequence
  ENSG00000275923_0 (sequence is synthesized)
gacaacacacagctacaaagccaatttttttcttccacaaaatctatacagacttcaccatagaaggatgtatggtcttgttaaggactcaagcctcccacctaagaaacaaggacagtc

SEQ ID NO: 957411 - DNA, 120 bp, Artificial Sequence
  ENSG00000275923_1 (sequence is synthesized)
ttgagcaatacagtatgatatggaaaaaaccattttatctcacacaacctcattcatcattgttgactgtttacaaattattgtgaaatgctttacataaataaaattgttttgcctgtc

SEQ ID NO: 957412 - DNA, 120 bp, Artificial Sequence
  ENSG00000262343_0 (sequence is synthesized)
gcctgggaggactctggttgctggaatgagctggtctgttgggggagggggcactggaagccaaaggacccagagggaagcagaaacgagacaggagccaaatcacagccacggaaagcc

SEQ ID NO: 957413 - DNA, 120 bp, Artificial Sequence
  ENSG00000262343_1 (sequence is synthesized)
tggccccagggcaatcaactccctgacacaggccagatggacatccgggagaaatccatagtactggagctggttcagagccccacggaattaactcggaataaaaccacgagagaaagg

SEQ ID NO: 957414 - DNA, 120 bp, Artificial Sequence
  ENSG00000263698_0 (sequence is synthesized)
acatccacatctatgataatccaacaggtaaaagatgttgaattccaggtatatgaggagtaaaacttttgggaaattctgatttataactagcatttaacttccatgtaatatgacctc

SEQ ID NO: 957415 - DNA, 120 bp, Artificial Sequence
  ENSG00000263698_1 (sequence is synthesized)
aaagacagtggaacttacttcgccaagccgaggttgggtgaaactctgccagtccgtgtacgcatatctgccagtatctccctgccccactcccttgacggactccaaggtctgatgtcc

SEQ ID NO: 957416 - DNA, 120 bp, Artificial Sequence
  ENSG00000263698_2 (sequence is synthesized)
acctcctttgttggaatccaaagtgtagcctcctttgaccatctcaaaactttgctgtgttttgattccctggccaccaacagtaccaacagacatgcttgtgtcacaaatgttggatgt

SEQ ID NO: 957417 - DNA, 120 bp, Artificial Sequence
  ENSG00000263698_3 (sequence is synthesized)
ctgcatggggagtctaatatttgcttcctaaaagtaaagtgagagtgataaagtgaatttgaaaaatggaaactaacaattcattttcattttttttcaccataggcaaatcacttgcct

SEQ ID NO: 957418 - DNA, 120 bp, Artificial Sequence
  ENSG00000263698_4 (sequence is synthesized)
aattcatatgccctaaccctcagtaactcagaatgtgaacttatttggaaatagggtcattgtagatgtaattagctaagatgaggttatatgggattagagtgggtccctaagcgaata

SEQ ID NO: 957419 - DNA, 120 bp, Artificial Sequence
  ENSG00000263698_5 (sequence is synthesized)
taatcagtatccttataaaaaggggaaatttggacacagacatgcacacatggagaatcgccatatgaagatttgatttccactgccataagccagggaattggcagaagctaggagaga

SEQ ID NO: 957420 - DNA, 120 bp, Artificial Sequence
  ENSG00000263698_6 (sequence is synthesized)
gtcctggaacagatccctccccagttccttcagagggagcacggacctgccaacaccttgatctctgatttctagtctccagatctgtgaaacaatacttgtctgttgtttaagtcactc

SEQ ID NO: 957421 - DNA, 120 bp, Artificial Sequence
  ENSG00000263698_7 (sequence is synthesized)
agtttgttgtgacagccctagccctgtagaattgggaggtttaaatgatttaaaacactgagggcacttgaaactctgcttagcatagtaagtgctcaataaacattagtgatattatca

SEQ ID NO: 957422 - DNA, 86 bp, Artificial Sequence
  ENSG00000225718_0 (sequence is synthesized)
agggaaggatgaaactggttccagacgtgagagttttattccaatatggcttccaggatcccagaggactcgacttgtagagagca

SEQ ID NO: 957423 - DNA, 120 bp, Artificial Sequence
  ENSG00000225718_1 (sequence is synthesized)
tggcttccaggatcccagaggactcgacttgtagagagcatcactggagtcagaagggccgaggtccaggggccaagaacacaccttggtgccagaagaagttcataagtcttgaaatgc

SEQ ID NO: 957424 - DNA, 75 bp, Artificial Sequence
  ENSG00000225718_2 (sequence is synthesized)
tgggcagaactcatgataacagagccttcaagatgcggagtgaggacaggtgtttggatcacctaaggtcaggag

SEQ ID NO: 957425 - DNA, 61 bp, Artificial Sequence
  ENSG00000225718_3 (sequence is synthesized)
ctggccaacatggtgaaatcccgtttttactaaaaatacgaagaattagctggatgtggtg

SEQ ID NO: 957426 - DNA, 120 bp, Artificial Sequence
  ENSG00000225718_4 (sequence is synthesized)
attgctgataggattatcaattagtacaagatttctgaagggaatctggcaatgtgtatcaagaaacaacaacaaaaaattataccctttgaaccatccagaattggctagttggatgaa

SEQ ID NO: 957427 - DNA, 120 bp, Artificial Sequence
  ENSG00000225718_5 (sequence is synthesized)
gcatgcctgagctgaggcttgaatgcttttgaaaatcagcaaacacaactacagtctccatgatgtaaaccaatctgctggactacttccaatttcagctccgacacatgaagagcttgg

SEQ ID NO: 957428 - DNA, 120 bp, Artificial Sequence
  ENSG00000225718_6 (sequence is synthesized)
aagtcatcattcccatccttcacaaaaagtaaaaaccaaacaaactgaaaatttgtgacttttcttgggtccctcagagaataaaggtttcaggcaaactgccagcttgacatctggaga

SEQ ID NO: 957429 - DNA, 120 bp, Artificial Sequence
  ENSG00000225718_7 (sequence is synthesized)
gagaggaaaatccaaagagacatagccaagatctgtttacctgaacctgatgacaacagaatgatcaactagtagaaaaacttaaataataattttgatgacttgctggaggcagagtgt

SEQ ID NO: 957430 - DNA, 120 bp, Artificial Sequence
  ENSG00000225718_8 (sequence is synthesized)
tctaagattccagttctatgattcataatggaaaaaaggcggaaaccacccaaatgttcatcagctgaagaatggatacataaaatgcagttaaattcatacagtggaatagtattcagc

SEQ ID NO: 957431 - DNA, 120 bp, Artificial Sequence
  ENSG00000225718_9 (sequence is synthesized)
aatgaaaaggaatgacgcactggtacctattacgacatgaatgactcatacaaacgctatgccgagtgaaagaagccaatcaaaaaagaccacatgctatatgactccattcatattatg

SEQ ID NO: 957432 - DNA, 120 bp, Artificial Sequence
  ENSG00000225718_10 (sequence is synthesized)
ttcataacaaggaaatctatggataaagtaaattagtggttgcttaaagctgggaaggatgtgggaatagaaaggtgatagtgaaagagcatagggtttcttttaaaggtgatgaaatag

SEQ ID NO: 957433 - DNA, 120 bp, Artificial Sequence
  ENSG00000225718_11 (sequence is synthesized)
ttctaaaattgtggctatggttgcacagatctgtgaatatactaaacaccattgaaatgtacaatttcaatggatgaattgtatggtatgtgaattatatataaataaagctattaaaaa

SEQ ID NO: 957434 - DNA, 120 bp, Artificial Sequence
  ENSG00000225718_12 (sequence is synthesized)
gtcatcccggatttgacaggatactgtcaagtattcagcgccttccaccctccctcgttctctcttcaactcagcaccactccctccacctccacctcctccggaccactacatttgatg

SEQ ID NO: 957435 - DNA, 120 bp, Artificial Sequence
  ENSG00000225718_13 (sequence is synthesized)
cttccattgcttcaagaacagagtcagagaaaaaagacttcaaatgtttggcttttaaggtgcattcctggtataaatcagagagattttggagaatacatattgtatcagcatttgtta

SEQ ID NO: 957436 - DNA, 120 bp, Artificial Sequence
  ENSG00000225718_14 (sequence is synthesized)
agtacatgcatgcatgcgggtgttgagagtaaaaatcctttgatgccgagaagccacacaggcgtggacctgcttcgccaagcagaaagcgggagagtgacgtgatgtcacgcagagctt

SEQ ID NO: 957437 - DNA, 120 bp, Artificial Sequence
  ENSG00000225718_15 (sequence is synthesized)
gcatacagggctctgtctgggtgctatcattgtccactgttgtgcaaagcccagactgcatcctctaggataagcacctaagtgaggaggaaccctgggcccctaggtgatgaccatgcc

SEQ ID NO: 957438 - DNA, 120 bp, Artificial Sequence
  ENSG00000225718_16 (sequence is synthesized)
gccacacaggcgtggacctgcttcgccaagcagaaagcgggagagtgacgtgatgtcacgcagagcttggtcctgctggagatttggggaagtctcaaggaaagaaactggttccagacg

SEQ ID NO: 957439 - DNA, 120 bp, Artificial Sequence
  ENSG00000225718_17 (sequence is synthesized)
caggctggtcttgaattcatgggctcaagtgatcttctagcctcagcctcccaaagctctgggattacgtgtgtgagtcaccctgcccagcctgataaattctggaggaaaaaattagaa

SEQ ID NO: 957440 - DNA, 120 bp, Artificial Sequence
  ENSG00000225718_18 (sequence is synthesized)
gagaagatggtatttcatttgtggctaagaatctttgacaactttcttctgtttcctcactgcagaggaatcatctctcaaagccactcaactcatgcttgtctcctctgaaacatcatt

SEQ ID NO: 957441 - DNA, 120 bp, Artificial Sequence
  ENSG00000225718_19 (sequence is synthesized)
ggtaggtggagtggaaagactgcaaatttcagagtcatctgggcttcaacttccagcccacccacaccctgaccccatgaccctggttatgttaacatttccaagcctcgttttctttac

SEQ ID NO: 957442 - DNA, 120 bp, Artificial Sequence
  ENSG00000229660_0 (sequence is synthesized)
gtattagcctccttgttcattcaacaaacatttattgctgctgggtgaggccctgacgtgcagagtgggtgagactcgggccctgccttccagggggacacgcaggtggggctgacaggt

SEQ ID NO: 957443 - DNA, 120 bp, Artificial Sequence
  ENSG00000229660_1 (sequence is synthesized)
gggtaccgacagccgagtggaaggggtcaggcgggttatccgccatggcccacgcagcccggggaacgcaccgaggaaatcagccttaaagacagggagggggttccctgagtgtggggt

SEQ ID NO: 957444 - DNA, 120 bp, Artificial Sequence
  ENSG00000229660_2 (sequence is synthesized)
ggccacctccctgtgggccgcgtccaggcagcaccgcagaagctgcagaaaatattgagacagttccattaggtcacagagcctgaggcccaggccgggctgcagccctgattcaccagg

SEQ ID NO: 957445 - DNA, 120 bp, Artificial Sequence
  ENSG00000229660_3 (sequence is synthesized)
ggcaggtgccaggaggaaccttcaggatgagcagccgccagtcccctggcccagccctagccctagccctgcaaatgccaggcggccagcctctccaggcacaccacactcaggacccgg

SEQ ID NO: 957446 - DNA, 120 bp, Artificial Sequence
  ENSG00000286509_0 (sequence is synthesized)
gggcagctccagatgcattagatcagcagctgatgccatcatgcgaatgtctaacacttactttagcagtagaagactttcttcatttaaaatcttacaggaaatccctgtgttcaaaag

SEQ ID NO: 957447 - DNA, 120 bp, Artificial Sequence
  ENSG00000286509_1 (sequence is synthesized)
gaaaaaaaaaatcagtaggggatctggagcccagccagcactgtcctctttctcccaagaggggaaaactgatccaaaccgaggtccgaactggatggactcctcgagaatcagaacttc

SEQ ID NO: 957448 - DNA, 120 bp, Artificial Sequence
  ENSG00000286509_2 (sequence is synthesized)
aataccagtgacgtaattggaacccagtctgtccaaaattaggatgtttggtgttatggaggttcacctgggaaaaatcaggaggccgccgagtgtaactgtgggatggcatcacagtaa

SEQ ID NO: 957449 - DNA, 120 bp, Artificial Sequence
  ENSG00000286509_3 (sequence is synthesized)
gcaagaagcttaaaatctaatccattaccagggaattgaatccagggaacatggcttcattaaagactacgactttataaataactacacataaatagaccgctttgccttagagaataa

SEQ ID NO: 957450 - DNA, 120 bp, Artificial Sequence
  ENSG00000286509_4 (sequence is synthesized)
cagtacattagaaatggaatgattataaatatcagaaacaaaagccacttcattacagtatgaacatatgctaacataccacatactgcttttgaatttaataataatatagtttatctt

SEQ ID NO: 957451 - DNA, 120 bp, Artificial Sequence
  ENSG00000286509_5 (sequence is synthesized)
tttttaactgacataagggttttgataatagctaatataaatatatgaaatgtcaaatttagaagatagtgcttaaacatttgtctcttagagagtattgttaaacttaacttttattaa

SEQ ID NO: 957452 - DNA, 120 bp, Artificial Sequence
  ENSG00000286509_6 (sequence is synthesized)
ctctgagaatcaaagagaaatatggtgatgctagtgaacgtttgaaaatcttttattttatcacttttaatgcatgtttaatatttaacattcatcttattacagtcaggaattgtgaaa

SEQ ID NO: 957453 - DNA, 120 bp, Artificial Sequence
  ENSG00000286509_7 (sequence is synthesized)
tgcttgtgctgtttctaaacagttttaaagttcaatgcacagtcacaattcagaggggagatttcacacatttatggaaaataagccatttttgcagtaaagttgcaaagtgtgaaagaa

SEQ ID NO: 957454 - DNA, 120 bp, Artificial Sequence
  ENSG00000286508_0 (sequence is synthesized)
ctggaggctccgctctgcccgctccgggaccccttcctccgccgcacccgccccggtggtccgcggatgcccgcccttgccgctcagccactccccccgcaccgaggcctaggactcccc

SEQ ID NO: 957455 - DNA, 120 bp, Artificial Sequence
  ENSG00000229664_0 (sequence is synthesized)
ctttgaatgtggcgtgtgggatctctggcgggtcatcgtcacagagctctgcaaagcaaaagaagcctattaggaactcaagaggccccaggagttctgtatgcagctgaagggtaacat

SEQ ID NO: 957456 - DNA, 120 bp, Artificial Sequence
  ENSG00000229664_1 (sequence is synthesized)
cccttgggagcttttgccttgtctggctgacgccttggcaatcgcaagtgacagtgacggagagccacctcctctggaatgcatcatggaacaggtctgggagaacagagggtgcagaaa

SEQ ID NO: 957457 - DNA, 120 bp, Artificial Sequence
  ENSG00000229664_2 (sequence is synthesized)
gggaaaagccaggcatttgtagtcctcctgccacagatgaccagaatgacctcacccaggacaaacggcgacagatttaggaattcaagccagcttttctgactcccaggcacctgctct

SEQ ID NO: 957458 - DNA, 120 bp, Artificial Sequence
  ENSG00000229664_3 (sequence is synthesized)
ctcctttcgagtgttcgactccactctcagtcactcgtcactcttcccagaaggacaaatgtgcagcttctatgtcttggatttcaaataaaagacgaggaacttggtgaaatgaggtgg

SEQ ID NO: 957459 - DNA, 120 bp, Artificial Sequence
  ENSG00000229666_0 (sequence is synthesized)
gccacactcaccgaaaacctcagtaaactaaatttatgagtttacatctgttccatcaatgaccacggtgcacacctgtttggcttcatggccggcaactacagatctaggtatccaaga

SEQ ID NO: 957460 - DNA, 120 bp, Artificial Sequence
  ENSG00000229666_1 (sequence is synthesized)
tcaagagggacaattacatattataagccgcacagagaagagtaatcaaggtggacatgaacttgtgctatataagttatgggttgaagaactctgtggaaagtagagaagaaaaaattt

SEQ ID NO: 957461 - DNA, 120 bp, Artificial Sequence
  ENSG00000229666_2 (sequence is synthesized)
agggaacaagcagtagttgaatacagctatgtgaaactatgagaactatgtgaaagagtgtttggatccaaagatgaaagagctgacacaagagtggattttctgagagctgtttgagca

SEQ ID NO: 957462 - DNA, 120 bp, Artificial Sequence
  ENSG00000229666_3 (sequence is synthesized)
ctgaggactccaatacctcccaactctcatattctctatagtttttctagaaaagcccatgtattggggcataacctataaagatgatagcaactaaaatggataaatcaatgacataaa

SEQ ID NO: 957463 - DNA, 120 bp, Artificial Sequence
  ENSG00000229666_4 (sequence is synthesized)
atgtttatttcttctcttgattaaatgacagataccccaatctgcaggcatcatatgttatgactgcctccactctctgcattttgagaaagcctctacagaaattctcaaaggaatggg

SEQ ID NO: 957464 - DNA, 120 bp, Artificial Sequence
  ENSG00000229666_5 (sequence is synthesized)
taaagacatgagtatttttaactacatatactttaaatttattttttttttttgcatttaaaaggcttgagaggatttgggttgtatccaaactgaaaaaataaaaataggttaagtaca

SEQ ID NO: 957465 - DNA, 120 bp, Artificial Sequence
  ENSG00000286503_0 (sequence is synthesized)
ggcgcgctcgtggcggggacgccggcacccggctgctcacccgggacggccgtcacaccggcactacgggaagaagccggccggctagggcacggagctctgggcttgcggggtgcggcg

SEQ ID NO: 957466 - DNA, 120 bp, Artificial Sequence
  ENSG00000286503_1 (sequence is synthesized)
cacgcccctccctcccaccgcctaaggtttttccgaagctgctgggcgtgcgccgcgtttctgaggcgggaggagacacttccgagccagctgtgtgacatccgtttacacagccgcgct

SEQ ID NO: 957467 - DNA, 120 bp, Artificial Sequence
  ENSG00000286503_2 (sequence is synthesized)
gcaaggatgatacgacagctaatgcttaaattctgacctctccagtggcttgcagattcttgcaggtggctggttccagatggagtccatgaccagaatgagaacttcatgcctgctctt

SEQ ID NO: 957468 - DNA, 120 bp, Artificial Sequence
  ENSG00000286503_3 (sequence is synthesized)
tcccaattggttatttctgaataatgcttttaaatcaatcaaatgttgcctttttcaaggctacctacagcccacacctccccagttctgagcctataaaaacctcacactcagccacat

SEQ ID NO: 957469 - DNA, 120 bp, Artificial Sequence
  ENSG00000286503_4 (sequence is synthesized)
ggggatactacctgcctttgggtggggacaatccaccttcaggttggggactacccacttctggtccatctctgctgagagctattctgtcactcaataaaacttctccacctttctcac

SEQ ID NO: 957470 - DNA, 120 bp, Artificial Sequence
  ENSG00000286502_0 (sequence is synthesized)
agaggaagaggagagctggtccgcgtgcgcctaggggtatgtctgtctacacagaacgtgccgtgtccagagagcagcacaactcgagattgcattacccagctcagagcaaacacagtt

SEQ ID NO: 957471 - DNA, 120 bp, Artificial Sequence
  ENSG00000286502_1 (sequence is synthesized)
agctgggctgtgacagaggggacctgtgtctgggatattgctctggagctgtgcgccccatgtaacgaggttgtcagagcccgtcatggcagaaacacgaatgattgtgaataaatggac

SEQ ID NO: 957472 - DNA, 120 bp, Artificial Sequence
  ENSG00000286502_2 (sequence is synthesized)
agctcccatgaactccgccttgcgacagcgctggcccacccagatgctatcggtggagacagactctgtttctcactcggaatgtgcaaatggctgggaagaaatgtttccgagcttccc

SEQ ID NO: 957473 - DNA, 120 bp, Artificial Sequence
  ENSG00000286502_3 (sequence is synthesized)
caggaaagaggccaggctcttggcttcagccgggatctgctgtctgcgaggagagtgacagaagcctgacaaatggcaacaattaaagaggcaagaagcaaaaggacgtgtcccgtcctg

SEQ ID NO: 957474 - DNA, 120 bp, Artificial Sequence
  ENSG00000286502_4 (sequence is synthesized)
acagatggccgccagcgcgcccctggcgtcgtcaccagactgcagactgtcctgtgctccatatcagccctcctgactctagctggtcacaccctcacctgctcaggcccgctgtcctga

SEQ ID NO: 957475 - DNA, 120 bp, Artificial Sequence
  ENSG00000286502_5 (sequence is synthesized)
gacctagcgtccacacaagtgactgggaggactgggctactccagactgaatagcagggacattaaaccacagagaattccctaaaaccagccacgccaaggcccacagtcccaaccctg

SEQ ID NO: 957476 - DNA, 120 bp, Artificial Sequence
  ENSG00000286502_6 (sequence is synthesized)
acctccaggacgacctggagtggcgtgagtctctctcaccttgactcctcgaggacctgggtagccaatcggaccctgggggccaggtggaccctaaaaccaaacagaaaaagaccgtta

SEQ ID NO: 957477 - DNA, 120 bp, Artificial Sequence
  ENSG00000286502_7 (sequence is synthesized)
gccccatgccagtgtggaggtgcctggggaacatcaggaaactccagagttcggcatacccctcctgctgagagcagggcgaacatcccagctcagagcctccagagaggccccccgtgg

SEQ ID NO: 957478 - DNA, 120 bp, Artificial Sequence
  ENSG00000286502_8 (sequence is synthesized)
gagactcgcacaggtgttcacagcctgcactgacagtggaggtgtggctgtgtctcatgctgagcgggacacagaggtgaagcaaacgctggccccaccccggcagtcagggaaataagg

SEQ ID NO: 957479 - DNA, 120 bp, Artificial Sequence
  ENSG00000286502_9 (sequence is synthesized)
gataggctgggggaacagtgagacggtgaaaggtcagcgttggagctctgcaaggagtgttgtccctaaagaaatgcattcccagcctaaggtccttggaataaatcaggagagcttccg

SEQ ID NO: 957480 - DNA, 120 bp, Artificial Sequence
  ENSG00000286502_10 (sequence is synthesized)
gctgggagaagggacaaggctgctagacagggaagagacatcctccagcagccaagggcctcgccgatgctcaactagagctcatgggggtgggcatccagcccccatgcccccagccca

SEQ ID NO: 957481 - DNA, 120 bp, Artificial Sequence
  ENSG00000286502_11 (sequence is synthesized)
agactccagcatgatgaacggctcccaccgcctccctcccagccccctttccacatggtgtcacggcagcggctggagctcccaggcaggatgggcttggtggcctcctctgcaaggctg

SEQ ID NO: 957482 - DNA, 120 bp, Artificial Sequence
  ENSG00000286502_12 (sequence is synthesized)
cagctctgaggcccgggcccggtctgccttgctccctgctgtatcccatcgctaacaggatgcctggcacatagaggaactcaggaagtcccagggagtaagtgaatgcctctcgttcca

SEQ ID NO: 957483 - DNA, 120 bp, Artificial Sequence
  ENSG00000286502_13 (sequence is synthesized)
gttgaaaagccagctctcagaacagtgggcctgtgctgtgggctccaagtgccaaccacctgtcagcaccagttccgggcactgtgcgagctctggtggccccaggtgctgcctccacct

SEQ ID NO: 957484 - DNA, 120 bp, Artificial Sequence
  ENSG00000286502_14 (sequence is synthesized)
ctgatgataagaggctgtgcccagggaggagggctggtaaactccccactggaggcagcgggaactgggtctcccatggtgaacggaagccaagggccgaggggagggttcaccccagtg

SEQ ID NO: 957485 - DNA, 120 bp, Artificial Sequence
  ENSG00000286502_15 (sequence is synthesized)
gctgctgcgaccttcaagagagggaacggggcagaagtggcgaatctcagaccgctctgggtctcagaggcagcacgttggagaagtgccactgcccagcaggcctggcactggaaattg

SEQ ID NO: 957486 - DNA, 120 bp, Artificial Sequence
  ENSG00000286502_16 (sequence is synthesized)
aactccctgtgaggactggcgctagctctgctgccctggagggtcagtcctggcctaccacacccttggcaaggggagctgggaccaggccccagaccccatcttgcctgcacaggccct

SEQ ID NO: 957487 - DNA, 120 bp, Artificial Sequence
  ENSG00000286502_17 (sequence is synthesized)
gcttcaagagataaatgttaatcaggcccgattccagagcctgtgacaactggggcctctggaaccctggagcaggtgggcctctgccctcagccccaggctcccgacgaccatgagctc

SEQ ID NO: 957488 - DNA, 120 bp, Artificial Sequence
  ENSG00000286502_18 (sequence is synthesized)
tgaacgaaggttggcgcacaccaggacagcaagagcagtccccactggctactcctcccgtctggaggctcttcccacagaggtgcttgcagcccagcagctttgtcatgaatcgcagtg

SEQ ID NO: 957489 - DNA, 120 bp, Artificial Sequence
  ENSG00000286502_19 (sequence is synthesized)
gagagaaggcgctggtggacgtgctgcatgggaccctcgcagcccagcaggccccgcaggaggaaccacaagccgctcacagtgtcggacacagtcatccatagaaagactccatccctg

SEQ ID NO: 957490 - DNA, 120 bp, Artificial Sequence
  ENSG00000286502_20 (sequence is synthesized)
gcaccggcgtgacctggaaaactgagagcaccagaagtcgaaggcagctggccaggcagccaagcacagcccggcctccccgagccgccaggccctgaacctcggctgctccatctgcaa

SEQ ID NO: 957491 - DNA, 120 bp, Artificial Sequence
  ENSG00000286502_21 (sequence is synthesized)
aatgggaacaataagcctgaccctggcccaaccccggccaaggccagagacttgcggggagtatgcagcaacccccaagtgcacaggtgacctgcacggtggctcctgacccggccagag

SEQ ID NO: 957492 - DNA, 120 bp, Artificial Sequence
  ENSG00000286502_22 (sequence is synthesized)
ccagcccgccctccagtgcaggtccacagaccagtgacccacgagtggggacagggccaacaagggcctcttccccaggtcacctgacaagatgaatctgcacaataatgagctgggacc

SEQ ID NO: 957493 - DNA, 120 bp, Artificial Sequence
  ENSG00000286502_23 (sequence is synthesized)
aggttcctggcatccctgcttcccggactagcaattgctgagctgtctgcaaaccttggaatctctgattgttggggaaccaaaagcaaagcaaggttggtgcggggtggagggctaagg

SEQ ID NO: 957494 - DNA, 120 bp, Artificial Sequence
  ENSG00000286502_24 (sequence is synthesized)
cgtgttacttgactgaggggtcccagcacatccgtgagtcttcaaacagctgcctcgtttgagacccacaccctcgggtctccacctggcctcggggatggaggggagctgagcgaaggt

SEQ ID NO: 957495 - DNA, 120 bp, Artificial Sequence
  ENSG00000286502_25 (sequence is synthesized)
gaggacctatgccccatgtgacaggtacccagccgaggctctaggaaggacctgtgtctcctgcctgcctgggcctgtactaattccattcctaggaatgcaggtttctctgactttcca

SEQ ID NO: 957496 - DNA, 120 bp, Artificial Sequence
  ENSG00000286502_26 (sequence is synthesized)
acccaggcgggtcactcggtttaatgcctgtgagctcaggatcggtgagccaaacttccaggataaaagcagaaagatcatcaatgttcactgtgcagaaatgcagttccaccaacgagg

SEQ ID NO: 957497 - DNA, 120 bp, Artificial Sequence
  ENSG00000286502_27 (sequence is synthesized)
attccaggaaagaggctgggcagggtgatgagaaggctggcagggtgggttctactcctggacacactcaacctgctgtgtgagcttgggcaggtcacttgccctctctgggcctcccgc

SEQ ID NO: 957498 - DNA, 120 bp, Artificial Sequence
  ENSG00000286502_28 (sequence is synthesized)
ttcctcaggtataacacgagagggtggcaagatgctcttctaccttgagtggcctaacgttgatctgagactctttctagacacagtagcattaagaagacccaagtctcgttgcctcaa

SEQ ID NO: 957499 - DNA, 120 bp, Artificial Sequence
  ENSG00000286502_29 (sequence is synthesized)
ttaaatggttcgtgtgtgacttttaagtttttattagctgtccaattgggtttgatgcctttgcagacagcctatcctagcagacagcctatcctagcagcaagtgagtgggagggcgca

SEQ ID NO: 957500 - DNA, 120 bp, Artificial Sequence
  ENSG00000286502_30 (sequence is synthesized)
aagttccccttgagggaggctttgaggaagtccaggcacctgcgggacctcacccgctgctccagctgggaggggacgtgcttggccaccacgccgccttccggaaacaaggctcatggc

SEQ ID NO: 957501 - DNA, 120 bp, Artificial Sequence
  ENSG00000286502_31 (sequence is synthesized)
gccagcacctcagagtggccgggctggacctgaacagagccaactagagggtgtcctggtccagggtggccaggaggggttctttgtggccctttattacactttctatcagccacagac

SEQ ID NO: 957502 - DNA, 120 bp, Artificial Sequence
  ENSG00000286502_32 (sequence is synthesized)
acctttctgtgaaggacctagtgggtggatctgcaggggggccgagagcccggctctggaccgggcagacccagccccggctgctcgaggaagcccccaggcctctccacgtggtcattt

SEQ ID NO: 957503 - DNA, 120 bp, Artificial Sequence
  ENSG00000286502_33 (sequence is synthesized)
cctcagttccaggctggagataacagcacatctgcacacagcgccgctgcggagacgcacagagcgtttgcaaggggctcagaactgcgcccacccagggagcaccaagcagagttagcg

SEQ ID NO: 957504 - DNA, 120 bp, Artificial Sequence
  ENSG00000286502_34 (sequence is synthesized)
gccggcatcacggcggcctccattcccatccaggccaaattcctttaggtatattttcagttacagatagagaatgagagtaaagcagtggggggaagcacaaagctcccttactaaaaa

SEQ ID NO: 957505 - DNA, 120 bp, Artificial Sequence
  ENSG00000286502_35 (sequence is synthesized)
atgtttgaacaggaaaaggcagaaaggaaacgtaacaagataaccacgactgattttcctgcaaagccgggcagggccgctttcccctttctttctacttgtgtgtgtttcccaatattc

SEQ ID NO: 957506 - DNA, 120 bp, Artificial Sequence
  ENSG00000286502_36 (sequence is synthesized)
tataatgagcagtgcttctgtaatgggaaaataataaagcttacattatttgtatttgatattttctgattaaaaaagtaacgtatgttcatcatagacaattaggcaactggaagagga

SEQ ID NO: 957507 - DNA, 120 bp, Artificial Sequence
  ENSG00000286500_0 (sequence is synthesized)
agagagacatcatcagagagagggacagaatgaatggttacggttgagttcccagtcaaaataaagctagcagtacacgtgaaaaaagtcctgtgttctccagcaaggtcactggtttct

SEQ ID NO: 957508 - DNA, 120 bp, Artificial Sequence
  ENSG00000286500_1 (sequence is synthesized)
tcaagacagtcactaatgtcttcagcagactgtcctgtgggcattgacggagggaagcaggaaatgaaagaagctagaagttccagaaatgcatgtaaaattaaaagccctggatctgat

SEQ ID NO: 957509 - DNA, 120 bp, Artificial Sequence
  ENSG00000286500_2 (sequence is synthesized)
acaaatgtattaagccaagaagcacccagccttcataagcaaacaggaaaaaaagaacaatcattgctcctcttggtaactcctttcctccttcaagatcatacttggtgttgtaaagat

SEQ ID NO: 957510 - DNA, 120 bp, Artificial Sequence
  ENSG00000286500_3 (sequence is synthesized)
tggaagaaggtcgtcaaggaaagaatataatgacaacaacaacgacagtaagagtagtagctaacacttacttagttcttcctatgtgccaggtgttgttctactaatactttacatgca

SEQ ID NO: 957511 - DNA, 120 bp, Artificial Sequence
  ENSG00000286500_4 (sequence is synthesized)
taagctcatataaacctcccgcaaccttgtgaggcaggtgctacgagcatcattccatttcaaagaagaggaaacaagagcacaggaggttgtgtaacctgatgattgtcacagagttgt

SEQ ID NO: 957512 - DNA, 120 bp, Artificial Sequence
  ENSG00000286500_5 (sequence is synthesized)
gagtcactcaggcagttcttgcccccaagcctgtatcttaacttcactactccatctctcaaacaaaagagccagcttgaaaaggaatccccacatctcacattttagtgaatgcctagc

SEQ ID NO: 957513 - DNA, 120 bp, Artificial Sequence
  ENSG00000286500_6 (sequence is synthesized)
aacactcaaagactgaactagttaaaatattgatcaattaaatgattacctgcttgttaagggacacttatcaagagaaaaaaataagatattcgttccagctttctgggattttttgtt

SEQ ID NO: 957514 - DNA, 120 bp, Artificial Sequence
  ENSG00000286500_7 (sequence is synthesized)
ttttgttggattatccaaatcagctttcaaaaatcattttaatgctaaaaaggtgagcagcatcctctttactgacatctaaccagtgtttatcagagcagatatattgaatttagatag

SEQ ID NO: 957515 - DNA, 120 bp, Artificial Sequence
  ENSG00000286500_8 (sequence is synthesized)
gtaaaagtaagatagaggacagtgatattcgaacatgggtgtgacagtgatacttgatagtttatgggaacccattgaataatataggagtatgctccatttatgttattttatagtgct

SEQ ID NO: 957516 - DNA, 120 bp, Artificial Sequence
  ENSG00000286500_9 (sequence is synthesized)
ctttagaagactgtattgtgacgtggtgaaaattgcaccaggaaccaaaagtgtgggtgtacaatagacaaaccagtgctctccaggcctccttctgaactgacagaactcaaaactgga

SEQ ID NO: 957517 - DNA, 120 bp, Artificial Sequence
  ENSG00000286500_10 (sequence is synthesized)
ttgtatacaatggttcgttcaaagtccaacatttcccagttctcatgcccggcctggggatctgtgtttctctccaggacctcaggatcaaccagctttgagagctgcgagattatagat

SEQ ID NO: 957518 - DNA, 120 bp, Artificial Sequence
  ENSG00000286500_11 (sequence is synthesized)
cttctggacttggctcttgctttatgtgacttgaaacaaatttccatattttaaatgaatgtagattttcattaatgttgtatctttgccttttcaccagattgttattcattccaatga

SEQ ID NO: 957519 - DNA, 120 bp, Artificial Sequence
  ENSG00000286500_12 (sequence is synthesized)
tttatttgatacggaattctggaacaggtgcgcagcccccaattacaacattgtttctatggggaaatatgatctactttatgacaacatgatttatgatacagttaccagaacacattg

SEQ ID NO: 957520 - DNA, 120 bp, Artificial Sequence
  ENSG00000286500_13 (sequence is synthesized)
tgtcaaaaggcagtctctgtttatgccaaatgtttactaataaatcccttttcgtcagacagaaaaacatactccaaaaagagggaaatgacttttccagatctatctttagctgggagc

SEQ ID NO: 957521 - DNA, 120 bp, Artificial Sequence
  ENSG00000286500_14 (sequence is synthesized)
ctcagcttttcacatttctcctcgtagcagaacttgcataaagatctgtttactgtgtatatttttcaataacaggccctaatttcttgctttgcttctgtcattttaatcgtgtggctt

SEQ ID NO: 957522 - DNA, 120 bp, Artificial Sequence
  ENSG00000286507_0 (sequence is synthesized)
agatgctgcagtgccgccaccacccaacggccggagcccccagcaaaggtggaacccacccacgctgtttgcaacagtatatgggaccttcccatagttttccacaaaatgggagaaaag

SEQ ID NO: 957523 - DNA, 120 bp, Artificial Sequence
  ENSG00000286507_1 (sequence is synthesized)
tataagaagctcttcctgctatggagccccaatacaatgcttcgtacctagaaggctctcagaaacagaaatctggtgaattagttaaattatatgcttctctgccctctgccctccata

SEQ ID NO: 957524 - DNA, 120 bp, Artificial Sequence
  ENSG00000286507_2 (sequence is synthesized)
agacctataaaaggcattctgaacactggagtttggctcctgtttaccatgtacatctagagaagtgtacaattcgtgcttgtatgaaataatgaatgttcacaaagtgagtatacttct

SEQ ID NO: 957525 - DNA, 120 bp, Artificial Sequence
  ENSG00000286507_3 (sequence is synthesized)
gtaagcactgcctaaatcaaaagcagcaatgtgaccagccccccggccacccttggtgctctcccaagcactcctccaccatcctctccaactgcaaccgctatcctgatttctaacacc

SEQ ID NO: 957526 - DNA, 120 bp, Artificial Sequence
  ENSG00000286507_4 (sequence is synthesized)
ctaggggagttttgcctagttttaaattttacatgaatggagtctcatcatatgtattacttttacactcataatattttcaagataaggataaaaagcaaaattttggtcttatcacaa

SEQ ID NO: 957527 - DNA, 120 bp, Artificial Sequence
  ENSG00000286505_0 (sequence is synthesized)
gtgtcaggggcatcagagaactctggaacgaccaatgctgcaggttgtatctggacttgctctgctgtcatctgtcaccaacttccctgtggtggggaagtcacccgacagagaacacca

SEQ ID NO: 957528 - DNA, 120 bp, Artificial Sequence
  ENSG00000286505_1 (sequence is synthesized)
gaactgtgccccgtgactcctcctcccgcctggggctagaaacacctccagcacgggtaggatgacatcatcccacactcctgggactgagatgcagagagagtcacgtactgtctagac

SEQ ID NO: 957529 - DNA, 120 bp, Artificial Sequence
  ENSG00000286505_2 (sequence is synthesized)
tgcttgtccagtggatcctgagagggactgcagggcagctagcaggcctgcagggatgggcccacgccaggaaggagagtgcccggggcatcaggaccccactgcagcattgggactttc

SEQ ID NO: 957530 - DNA, 120 bp, Artificial Sequence
  ENSG00000286505_3 (sequence is synthesized)
tcctgccagcaatcaaaagattttctatctgtgagacggagaatggtagaagagaagctatgttttggattaagtggggcctgtctagggaggggaggggaatgaaagagaaaagaggtg

SEQ ID NO: 957531 - DNA, 120 bp, Artificial Sequence
  ENSG00000286505_4 (sequence is synthesized)
gccccaattttctaaggtaggatagaatattaaataaggtccctgtggccaatatcatcttacagcccaggaaacacctctggggcctgcaggatgtgaggtggcagaacagggcagcag

SEQ ID NO: 957532 - DNA, 120 bp, Artificial Sequence
  ENSG00000286505_5 (sequence is synthesized)
ctcgaggcagtgctgctgtggaaaggggaggcaagtgccattaaattccactgtgtgccaaccacgagggcttgtcctgggccaggtccctaatatgtggggactcatgaatcctcatag

SEQ ID NO: 957533 - DNA, 120 bp, Artificial Sequence
  ENSG00000286505_6 (sequence is synthesized)
catctgtggtggatgtaactgtcgccacttcacaaatgggcacacggaggctgtgagatcttggctacccacccgaggtcacacacctgcaaagaggcagatgcatttcccagccaccat

SEQ ID NO: 957534 - DNA, 120 bp, Artificial Sequence
  ENSG00000286505_7 (sequence is synthesized)
gcagattgccaaggtcctgccatgccccttgggaggtttgccctgggaacagtcctggaggcttgtttctctgccttcaggggcagcatgcatccctgctggaaactgaatgtctgtgtc

SEQ ID NO: 957535 - DNA, 120 bp, Artificial Sequence
  ENSG00000286505_8 (sequence is synthesized)
cccctaaattcatatattgaaaccaaattccctaggtgatggtattaggaggtggagcctttgggggtgattaggttatgagggtggagccctcatgaatgggattagtgccgttgtaaa

SEQ ID NO: 957536 - DNA, 120 bp, Artificial Sequence
  ENSG00000286505_9 (sequence is synthesized)
aatcccagcattttgggaggctgaggccagaggatcccttgagttcaggagttcaagaccagcctcggcaatatagtgagaccctgtatctaccaaaattcaaaaaaattagctgggcat

SEQ ID NO: 957537 - DNA, 63 bp, Artificial Sequence
  ENSG00000286505_10 (sequence is synthesized)
gaggctgaggcaggaggatcacttgagccaaggagatggaggctgcagtgagcagtaaaaata

SEQ ID NO: 957538 - DNA, 120 bp, Artificial Sequence
  ENSG00000286505_11 (sequence is synthesized)
gagtgagatcctgtctcaaaaaaataaaaataaaaaataaaagaggctccagagagctccctcacctcttttaccatgtgaggacacagacgaccaagtaggcagagagcaaagtgggcc

SEQ ID NO: 957539 - DNA, 120 bp, Artificial Sequence
  ENSG00000286505_12 (sequence is synthesized)
tcaacagaattcaaccttgcagggacactgatctcagacttccagcctctagaagtgtgagaaataaatttctgttgcttgtaaccacccagtttatggcctcctggatggactaaggca

SEQ ID NO: 957540 - DNA, 120 bp, Artificial Sequence
  ENSG00000286505_13 (sequence is synthesized)
gtccccttcaaggaagagccaagtaagtcctgaccactgccttgtagaaatggctttggaggctggtcctgctagtaccataactcaaggaagaaggaaattctagctcttctaggccag

SEQ ID NO: 957541 - DNA, 120 bp, Artificial Sequence
  ENSG00000286505_14 (sequence is synthesized)
tggttctcagcacgtggaccagcagcatcctttgagaatttgctaaaaatattttggatttaataggtctacagtggggcctgatgtttggcctttccagatgctgctggtgcagctgac

SEQ ID NO: 957542 - DNA, 120 bp, Artificial Sequence
  ENSG00000286505_15 (sequence is synthesized)
ctggacaccacactctgacaaccacagccctggagactagattagacgctctgagcaaacttcatcacctgggccaagaaacaggctttgaaggccagataaaccccactaaggacatgg

SEQ ID NO: 957543 - DNA, 120 bp, Artificial Sequence
  ENSG00000286505_16 (sequence is synthesized)
cctgccccctcctctccctggaggaagctgagccagggctcctgctgactttctaaggctgtctgggcaaaccctcatgtctccagaccccaaggcttgagcactgtcgacagtgccctg

SEQ ID NO: 957544 - DNA, 120 bp, Artificial Sequence
  ENSG00000286505_17 (sequence is synthesized)
tcaccagccccaggccacagtgagccactaaaacccaaagctggaagatgctcggggcagcagctgtggtgcacactgtaccagtaccaccgccagaaagtggaagggactcatctccaa

SEQ ID NO: 957545 - DNA, 120 bp, Artificial Sequence
  ENSG00000286504_0 (sequence is synthesized)
ggagagagatgtgcaagatatgcggtggtaactctggacactgttgctgaagccagatcgtttccccagggcacttcagctcagaaagctgaactcattgctttaattcgggccttagaa

SEQ ID NO: 957546 - DNA, 120 bp, Artificial Sequence
  ENSG00000286504_1 (sequence is synthesized)
cgggccttagaacccagtgaagctaagaatgtcaacatttacactgactctcaatatgccttttcaacccttcaagtgcgtggagcattatataaagaaaagggcctattgaactctggg

SEQ ID NO: 957547 - DNA, 71 bp, Artificial Sequence
  ENSG00000286504_2 (sequence is synthesized)
cctattgaactctgggggaaaagacataaaatatcagcaagaaatcttgcaattattaaaagccgtatgga

SEQ ID NO: 957548 - DNA, 120 bp, Artificial Sequence
  ENSG00000286504_3 (sequence is synthesized)
gctgacttggaggctcgaaaagcagcatctgcccccttccgggcatcagtcacagcccccatgctccctcaagcacctgatcttgtacccacttattctaaagaagaaaaggactttctc

SEQ ID NO: 957549 - DNA, 120 bp, Artificial Sequence
  ENSG00000286504_4 (sequence is synthesized)
ccacttattctaaagaagaaaaggactttctccaggcagagaacaagtgatggaggaaggatgaattcggttaccggatgggagagaagctatgccacagctgctaggagctgcagttgt

SEQ ID NO: 957550 - DNA, 120 bp, Artificial Sequence
  ENSG00000286504_5 (sequence is synthesized)
aggagtcacttggaaagttgttaggctggtatttctacatctcgcatttgtcagctcttgccaaaacggtgaggcaggggtgtgttacctgccgacagcatgatgcgaggcaaggtccag

SEQ ID NO: 957551 - DNA, 120 bp, Artificial Sequence
  ENSG00000286504_6 (sequence is synthesized)
agcagccccctttgaagatctccaggtggacttcacagagatgtcaaagtgtagagatgatcgagtgtggatcaagaactggaacggagcctctttgtgtccactgtggaaaggatccca

SEQ ID NO: 957552 - DNA, 120 bp, Artificial Sequence
  ENSG00000286504_7 (sequence is synthesized)
ctttgtgtccactgtggaaaggatcccagactgtcgtcctgagcactcccaccgctgtgaaggtagaaggaatcccagcttggatccaccacagccatgtaaaacctgcagtgcctgaaa

SEQ ID NO: 957553 - DNA, 120 bp, Artificial Sequence
  ENSG00000286504_8 (sequence is synthesized)
ccacagccatgtaaaacctgcagtgcctgaaacctgggaggcaagaccaagcccagacaacccttgcagagcgaccctgaagaagacgacacgccctgctccagtcacacccggaagctg

SEQ ID NO: 957554 - DNA, 120 bp, Artificial Sequence
  ENSG00000286504_9 (sequence is synthesized)
gacttatacagtaagggcttcaactgaccttactcaaactggggactgttcccagtgtattcaacaggtcactgaagtaggacagcaaattaaagcaatctttctgttctatagttatta

SEQ ID NO: 957555 - DNA, 120 bp, Artificial Sequence
  ENSG00000286504_10 (sequence is synthesized)
attaaagcaatctttctgttctatagttattatgaatgtatggaaacaataaaagaaacttgtttgtataatgccactcagtgcaaggtatgtaccccgagaaatgaccgacctgatgcg

SEQ ID NO: 957556 - DNA, 120 bp, Artificial Sequence
  ENSG00000286504_11 (sequence is synthesized)
tgttataacccatctgagcccgctgcaaccaccgtttttgaaataagaagaagaactggccttttcctaggtgatacaagtaaaataataactagaacagaagaaaaggaaatccccaag

SEQ ID NO: 957557 - DNA, 120 bp, Artificial Sequence
  ENSG00000286504_12 (sequence is synthesized)
caaacaactttaagatttgatgcttgtgcagccattaatagtaaaaagctagaaataggatgtggttctcttaactgagaaaggagctaaagagtagaaaataaatatgtttgtcatgag

SEQ ID NO: 957558 - DNA, 120 bp, Artificial Sequence
  ENSG00000286504_13 (sequence is synthesized)
cctattggacatgtgttatttaggctacttaaaaaaagaacaaaaaggacccggtttatcttcggaagggggaagtcaacccctcctgtgctgccggtcactgtaacccactagaactaa

SEQ ID NO: 957559 - DNA, 120 bp, Artificial Sequence
  ENSG00000286504_14 (sequence is synthesized)
taccaatcccctagatccccattggaaaaagggagaacgtgtaaccctggggatcaataggacagggttaaaccctcaagttgccattttaattagaggggaggtccacaagtgctctcc

SEQ ID NO: 957560 - DNA, 120 bp, Artificial Sequence
  ENSG00000286504_15 (sequence is synthesized)
cattttaattagaggggaggtccacaagtgctctcccaaaccagtatttcaaaccttttatgaggagctgaatctgccagcaccataacttctgaaaaagacaaaaaatttgtttctcca

SEQ ID NO: 957561 - DNA, 120 bp, Artificial Sequence
  ENSG00000286504_16 (sequence is synthesized)
ttcttgttatgtacgcggaggaaccactatcggagacagatggccttgggaagcccgagagttggtgtctactgatccagctcctgatataattccagttagaaggcagaatctagcaac

SEQ ID NO: 957562 - DNA, 120 bp, Artificial Sequence
  ENSG00000286504_17 (sequence is synthesized)
ttctaggtcctaaaaacctcaattattagacaatactgtatagctagagaagggaaagactttatcatccctttaggaaagcttaattgtgtaggacagaagttgtataacagcacaaca

SEQ ID NO: 957563 - DNA, 120 bp, Artificial Sequence
  ENSG00000286504_18 (sequence is synthesized)
aagacaattacttagtagggactaaaccacactgaaaagaatccatttagtaaattttctaaattaaaaactgcttaggctcatccagaatctcatcaggactggactgttccctctgga

SEQ ID NO: 957564 - DNA, 120 bp, Artificial Sequence
  ENSG00000286504_19 (sequence is synthesized)
ctatactagatatgtaggcacagagcctacattcggttacctaataaatgggcaggcagttgtgttattggcactattaagccatcctttttcttattacccataaaaatgggtgagctc

SEQ ID NO: 957565 - DNA, 120 bp, Artificial Sequence
  ENSG00000286504_20 (sequence is synthesized)
ctaggttttcctgtctacgcctcccgagaaaagaaaggcatagttataggaaactggaaagataatgagtggccccctgaaaggatcattcagtattatgggcctgccacatgggcacaa

SEQ ID NO: 957566 - DNA, 120 bp, Artificial Sequence
  ENSG00000286504_21 (sequence is synthesized)
gacggctcatggggataccgaaaccccatctacatgctcaattggatcatacggttgcaggccatcttagaaataattactaatgaaactggcagagctttgactgttttagcttggcaa

SEQ ID NO: 957567 - DNA, 120 bp, Artificial Sequence
  ENSG00000286504_22 (sequence is synthesized)
gaaacccaaatgaggaatgctatctatcagaatagactggccttagactacttgctagtagctgaaggaggagtttgtggaaaatttaacttaaccaattgctgcctacaaataaatgat

SEQ ID NO: 957568 - DNA, 120 bp, Artificial Sequence
  ENSG00000286504_23 (sequence is synthesized)
caaggacaggtggttaaaaacacagtcagggacatgacaaaggtggcacatgtgcctgtacaggtttggcacgagtttaatcctgagtcttaatttgaaaaatggtttccagctatagga

SEQ ID NO: 957569 - DNA, 120 bp, Artificial Sequence
  ENSG00000286504_24 (sequence is synthesized)
ggattgaaaaccctcattgtaggtgtattgctagtgataggaacctgcttgctgctcccctgtgtattacccttgctttttcaaatgataaaaggttttgtagctactttggttcatcag

SEQ ID NO: 957570 - DNA, 120 bp, Artificial Sequence
  ENSG00000286504_25 (sequence is synthesized)
aaaaacttcagcacacgtgtgttatataaatcactatcgctctatctcacaaatagactcaaaaagtaaaaatgagagtgagaactcccactaaaaggtgaaaatgctcaaaggagggaa

SEQ ID NO: 957571 - DNA, 90 bp, Artificial Sequence
  ENSG00000222005_0 (sequence is synthesized)
acgccagcaggtgaggaggctggggccagatgacagctagtgagggagcagagacaagacaaggcgagcctgtgaacaagacatgtgagc

SEQ ID NO: 957572 - DNA, 120 bp, Artificial Sequence
  ENSG00000222005_1 (sequence is synthesized)
ttggactccagtgtggaatcccatgtccgctcagtgcacctttctgccgctgaaagtacaagaggagaggggaaacccacaggtggagctgaccatgaggactgtcacagctttgagagg

SEQ ID NO: 957573 - DNA, 120 bp, Artificial Sequence
  ENSG00000222005_2 (sequence is synthesized)
caaatccagaaatcagccctccagcttcctctaccaagaagactggcggttacaaccctggctctgtggggcttctcttgccctctcttctgactgccctacttggctccaggtgagggt

SEQ ID NO: 957574 - DNA, 120 bp, Artificial Sequence
  ENSG00000222005_3 (sequence is synthesized)
gagaggaagctggagatggaagatgcagctgggggaactcaccaggcaggtctcagggaactctttgaataagaggacaccagatcatgcctgcagttccagcccaggagcaactagcac

SEQ ID NO: 957575 - DNA, 120 bp, Artificial Sequence
  ENSG00000222005_4 (sequence is synthesized)
agctccctgatgaggaggggtgattctaaaacgaagggcggaaattatctggggaatttccttcccgtgaagcctcaggaacatgccagtcccccacttcggtctgtcctggggggtctc

SEQ ID NO: 957576 - DNA, 120 bp, Artificial Sequence
  ENSG00000222005_5 (sequence is synthesized)
acgcccctgtcctcctagagaaatctagatcctccaaactctgcctgggttcttcctggggagtcttgacccctgccttgtggttgatgtgggataggggacccgggaacagggctgcct

SEQ ID NO: 957577 - DNA, 120 bp, Artificial Sequence
  ENSG00000222005_6 (sequence is synthesized)
tcctctggccaaggcctggcaagcaagtgtgggatgggtgctgtcttcctgagagggacaatagaagtgacagagccccctaattcaagaccctgcagaggtggtgtgagatcttataat

SEQ ID NO: 957578 - DNA, 120 bp, Artificial Sequence
  ENSG00000222005_7 (sequence is synthesized)
atcagtctctaagccagtgcctctcaagctctctttggtgaagaatcaatttttaaaatatataatcagtcacagatcaatgcttttgtaaaatgcaataaaagttaatttccaaaaaaa

SEQ ID NO: 957579 - DNA, 120 bp, Artificial Sequence
  ENSG00000222005_8 (sequence is synthesized)
cacaggtgagggtgagaggaagctggagatggaagatgcagctgggggaactcaccaggcaggtctcagggaactctttgaataagaggacaccagatcatgcctgcagttccagcccag

SEQ ID NO: 957580 - DNA, 120 bp, Artificial Sequence
  ENSG00000222005_9 (sequence is synthesized)
ggtgaggttgaaacacttatgcttcctatttaaagccacatctcattcatcatttcagcaccaatcaacaattaaacctgattcaatggagccctgacagctaatttaaaccgagcctca

SEQ ID NO: 957581 - DNA, 120 bp, Artificial Sequence
  ENSG00000222005_10 (sequence is synthesized)
caatcggcctgacactggctatttaaaactctgtcctggcctctggggcctttcggaaccaggactgtttgtcctgccaagagcaaagccccacccgctgtggcctggatccccatgtat

SEQ ID NO: 957582 - DNA, 120 bp, Artificial Sequence
  ENSG00000222005_11 (sequence is synthesized)
gtagtgtgcagggtctgttccagccatcactgtctctgcctggctccctgtagggctgtgggagggttctgggagaggtcgggaatgccaggaggaggaattggtgaagcaaagaaaagg

SEQ ID NO: 957583 - DNA, 120 bp, Artificial Sequence
  ENSG00000222005_12 (sequence is synthesized)
cccaggtgcacacacttgtgttgtgtgtggctttcttcaggccctgggcaaatgtggcagcctggggtgtattgggagcatcagaacccaggtcaagtcctgactctgcaatccataaac

SEQ ID NO: 957584 - DNA, 120 bp, Artificial Sequence
  ENSG00000222005_13 (sequence is synthesized)
cagttccgtgaccttgcccaggtccttccttagtttcctcaccagtgtggtgagaataacaaagatctcttctcaaaccgtctccctgggagttaagagattcccccatatctggtgatc

SEQ ID NO: 957585 - DNA, 120 bp, Artificial Sequence
  ENSG00000222005_14 (sequence is synthesized)
ccaggtaaagcacatggaaaaccaccaagtcctaaagcagagaagttctgagcagagcaggcctgagcttgtatggggcctggtgctgtggggcaccatggcagattccagcctgtggtc

SEQ ID NO: 957586 - DNA, 120 bp, Artificial Sequence
  ENSG00000222005_15 (sequence is synthesized)
attattgggttgcctggtgtccccatggctctctagcgctgatggaaaacagccttatatcactaagtgtggacaataaccccttcaggctgagaacttggttcagacttgtgtagtcag

SEQ ID NO: 957587 - DNA, 120 bp, Artificial Sequence
  ENSG00000222005_16 (sequence is synthesized)
agacatcttcctggaggcagtggacttgagccaagctttggaggctgcaataattgagtaagtcggccaggctcacacctataatcctagcactgtgggaggccaaggcaagtggatcac

SEQ ID NO: 957588 - DNA, 120 bp, Artificial Sequence
  ENSG00000222005_17 (sequence is synthesized)
ggtgaaaccccatctttactaaaaataaaaataaaaaaaattaactgggcatggtggtgggcgcctataagcccagctactcgggagacttaggcaggagaatcgcttgaacccaggggg

SEQ ID NO: 957589 - DNA, 74 bp, Artificial Sequence
  ENSG00000222005_18 (sequence is synthesized)
ctgggcatggtggtgggcgcctataagcccagctactcgggagacttaggcaggagaatcgcttgaacccaggg

SEQ ID NO: 957590 - DNA, 120 bp, Artificial Sequence
  ENSG00000222005_19 (sequence is synthesized)
agactccaaaatggcagccgcgcagagcgcgcacccaagcggccggacctccccgactcccgggccgcccccgtctcgcgccctgcctccctccttcggccttcacctacccgcctccgg

SEQ ID NO: 957591 - DNA, 120 bp, Artificial Sequence
  ENSG00000222005_20 (sequence is synthesized)
attggccgctaggaatcccgcccctctaaagccctgcctgctattggtcacggaaatgctcactttcaaccatgagaggaataacaaggagaggtcaacagatgagacacctggctctgc

SEQ ID NO: 957592 - DNA, 120 bp, Artificial Sequence
  ENSG00000222005_21 (sequence is synthesized)
ctttcaacttcctgggtgaccaaaagcatgtcactcagcatccctgggctctcttacccatctgtgcgtaattgcttctctccactgcagctgtgactctgtgaacaactctgaaagtct

SEQ ID NO: 957593 - DNA, 84 bp, Artificial Sequence
  ENSG00000222005_22 (sequence is synthesized)
tccactgcagctgtgactctgtgaacaactctgaaagtcttgctctgtcacccaggtatgacctctgctcactgcagcctccac

SEQ ID NO: 957594 - DNA, 120 bp, Artificial Sequence
  ENSG00000222005_23 (sequence is synthesized)
ggtgttgcaagcatacaatggcacaaagttttggatgagcttgttaaatgctgaatacatgaaggagattattattctaagtggcacacgaagaatttattcaacaaagctgtattgatg

SEQ ID NO: 957595 - DNA, 120 bp, Artificial Sequence
  ENSG00000222005_24 (sequence is synthesized)
atttactctctgcatcagctcctgggactgcaagtataaaagtgattcagaccttgcccttgggaagccggggagagactcaaatagctaacagcagggtaaatagtgttcctggagttg

SEQ ID NO: 957596 - DNA, 120 bp, Artificial Sequence
  ENSG00000222005_25 (sequence is synthesized)
tgcagtgggcaagttctgagcccacctttgctggggaggctctgcagcgccaggcacagcgatggacccaggatgtgagattctttcctggaacaatcccaccaagcctgcaaggtgagg

SEQ ID NO: 957597 - DNA, 120 bp, Artificial Sequence
  ENSG00000222005_26 (sequence is synthesized)
aaggaaattgaacacgcccctcctgagctcctcaggtgcacctcgtgctgctgtcctggggccatctcccaactcctcccaacccctcatagccctgctctggagcaggtaaatattcct

SEQ ID NO: 957598 - DNA, 120 bp, Artificial Sequence
  ENSG00000222005_27 (sequence is synthesized)
atgtaaaattgctgtaaaattgttctaagtgcttactctcaatgtctgtgctcagcttatcagcaaccagtaacagtttgtaccactggtttgtaccacgacaaccatgctacacttgga

SEQ ID NO: 957599 - DNA, 120 bp, Artificial Sequence
  ENSG00000251248_0 (sequence is synthesized)
ccataaatgtttaccataaatttactatgatccttgacatttcaaatttatattgctgttattattttttgtgataatttgtagagctgaagtttgtcaagtttgtataatgcatttagc

SEQ ID NO: 957600 - DNA, 120 bp, Artificial Sequence
  ENSG00000251248_1 (sequence is synthesized)
gtggaatggcccacatgatgagaaactgagagccagcgtcaactgcccatcacataattaagcaagcttggtagcagaccttcttgctccggtcaagccttcagatgactggaaccccag

SEQ ID NO: 957601 - DNA, 120 bp, Artificial Sequence
  ENSG00000251248_2 (sequence is synthesized)
ctgacaactccactgtaaccctatgagagctgccaagctagaatcactcagccaagccactcctgaattctggatccccagagtctgtgtgagataataaatgttcattgttataagcca

SEQ ID NO: 957602 - DNA, 120 bp, Artificial Sequence
  ENSG00000280832_0 (sequence is synthesized)
cggggtggaggagggggaagggcgggggtgatgccgcgcggtcgcaggcttgggatggtgttcgcgcctccgagacccggacagaggcaagcaggggcgccgtgggtgccagagaggcgg

SEQ ID NO: 957603 - DNA, 120 bp, Artificial Sequence
  ENSG00000280832_1 (sequence is synthesized)
aagaggaggcctgatggggataccttcctgctgtccttcctgagcacaacctggctgaaaacctggaggtcacaacagtacaaagaatcaaagtcaagatcttgtgccagagagcaaatg

SEQ ID NO: 957604 - DNA, 120 bp, Artificial Sequence
  ENSG00000280832_2 (sequence is synthesized)
aactcttcctcttgctgagaaaacccaccctgctcacctaaaccctggccttgcctggtaattccatccatgcgcctggaaggccccagacatcaaggctctgaggggccaggcacgggg

SEQ ID NO: 957605 - DNA, 120 bp, Artificial Sequence
  ENSG00000280832_3 (sequence is synthesized)
agaacccagcagtgccctgccctgcagtctgagctaccagattccttgtgaagataatttgaggaccatgactcacccaaccacatttcctggggcctcaaattgaaaattcaggatggg

SEQ ID NO: 957606 - DNA, 120 bp, Artificial Sequence
  ENSG00000280832_4 (sequence is synthesized)
cttttctatatgactggctgatatccaactatgccatggtctttacatgccatgaacattctttcctgccagagttctaagaatctgtgttctctgccttagaccttctgcagatgagcc

SEQ ID NO: 957607 - DNA, 120 bp, Artificial Sequence
  ENSG00000280832_5 (sequence is synthesized)
cacaggaagctccacgtgtagctgagctacatgcaccaggcctcagtttgccccaagtcccctgtgtactctctcatggcctgtggccaagaaatgtattctctcactttggacttagga

SEQ ID NO: 957608 - DNA, 120 bp, Artificial Sequence
  ENSG00000280832_6 (sequence is synthesized)
gcccagaaacaaaattgcttgaacttgaatttgtgtgcgtgcgcacgtgtgcacgtggtggtgaaggtgtatgttttcggctgttctatgcgtcactgtcaccaaactcccaaataatag

SEQ ID NO: 957609 - DNA, 120 bp, Artificial Sequence
  ENSG00000280832_7 (sequence is synthesized)
taacatttgtttagatgatgtctgctgacaaatcacaaacacgacgctaactcgcaactctctgctccactggcacagaatagggcatggagcctggtgctgggtgtcagcccatggtgt

SEQ ID NO: 957610 - DNA, 120 bp, Artificial Sequence
  ENSG00000280832_8 (sequence is synthesized)
tgggtgtcagttcacaggctgggtaagggagggaaaataatccattctttgatattagacatgacccaaaatttcctgctggcagccaaaggcctcctcgctcagagaagtcatctgaaa

SEQ ID NO: 957611 - DNA, 120 bp, Artificial Sequence
  ENSG00000280832_9 (sequence is synthesized)
aaagctagcccaggggcaggaaagggcctcaggctggcgccccagaaggtggcccatcagtcactctgggaagacagatagacatcgtcagtctctttttacaagtcaagacagtaaaat

SEQ ID NO: 957612 - DNA, 120 bp, Artificial Sequence
  ENSG00000280832_10 (sequence is synthesized)
caaagtaatagtttcctggcaggaagaaagagaattgctggagcgttggagagccatctcttaacctctggggtgactcaaaggaagagttgcctggtctgagaactttagaccaaagaa

SEQ ID NO: 957613 - DNA, 120 bp, Artificial Sequence
  ENSG00000280832_11 (sequence is synthesized)
tttaaatcatgtgaactgaaaatgcatgtgtatccatatatacatgtacatatatgtttatatacccaatatagaaaggttaccagagacaaagaaatagcaacaatagttgttttgggg

SEQ ID NO: 957614 - DNA, 120 bp, Artificial Sequence
  ENSG00000280832_12 (sequence is synthesized)
aagggaaaggaagggctgtggggtgaggaagcatactttcactgaatatcctctgtactgtgtgcatttttgccacatgcatgaactaaacctacaagaaaataaacaaataaaaaaaaa

SEQ ID NO: 957615 - DNA, 120 bp, Artificial Sequence
  ENSG00000280832_13 (sequence is synthesized)
caggaagcttaccatccagcggcacagagaaggctcaccatggactccattcaagaacgaggcaggataggatgtgaataagtgcaaggtgtgagtgactgacagtaagtgcaagggggt

SEQ ID NO: 957616 - DNA, 120 bp, Artificial Sequence
  ENSG00000280832_14 (sequence is synthesized)
tcagagaagtggcagctccaagcctgcttctgctgaagctggagggcttatctgtcaagaacccccaactcaggaagctctgctccaagtgagctgagtaaggagagtctgcctccaagt

SEQ ID NO: 957617 - DNA, 120 bp, Artificial Sequence
  ENSG00000280832_15 (sequence is synthesized)
tgttcctctgcaggtgactgtgctccatgctaaatcattccttgcacgggcagaagctgtttggcattgcaccagtgtctgattttgtttgaatatggtgcctttggcttaatcagtcag

SEQ ID NO: 957618 - DNA, 120 bp, Artificial Sequence
  ENSG00000280832_16 (sequence is synthesized)
gcctggcaacagagtgagactgtctcaaaaagtaaataaatagaaactcttggttccatgcgtagtctagcattttgtagcacttctaatcacgaagttatttttaatatttgtttggtc

SEQ ID NO: 957619 - DNA, 120 bp, Artificial Sequence
  ENSG00000280832_17 (sequence is synthesized)
ggtctgttatacaaaatgtagactggatggcttataaactacagaaatctctcacagttctgtaggctagaaagtctaagatgaagatgccagcagcctgcttcctggttcatacaaggt

SEQ ID NO: 957620 - DNA, 120 bp, Artificial Sequence
  ENSG00000280832_18 (sequence is synthesized)
catcttctcactgtaacctcacagtgagaggaagggcctaggggtgactctgggatctcttttatgaggcactaatcccattaatgggggccccccaccctcatggcctaatcacctccc

SEQ ID NO: 957621 - DNA, 120 bp, Artificial Sequence
  ENSG00000280832_19 (sequence is synthesized)
acgattgccttgggtgttaggatttccacatatgaattttaggggaacacagacgttcaggccatagcaaatatcttgcccaaatatctctagttccatccttttggtcactctcagacc

SEQ ID NO: 957622 - DNA, 120 bp, Artificial Sequence
  ENSG00000280832_20 (sequence is synthesized)
agaacatttactgagtgattactatgtcccacaaaattcttatttaaccctcagaaaaaccgtctgggggaagcattgttatcactcctatttcatgagcagttatgtaacttgccccag

SEQ ID NO: 957623 - DNA, 120 bp, Artificial Sequence
  ENSG00000280832_21 (sequence is synthesized)
ataagacttggttatggcacagattctgtgttggagccttcagaccactctacttcccaagcaggggaggaacagaacattaaagattttcttggccttggctttcatttcttcatcgtg

SEQ ID NO: 957624 - DNA, 120 bp, Artificial Sequence
  ENSG00000280832_22 (sequence is synthesized)
gttctgaaaggaaaattggctacagtcttaaatgtatgtgtgggcccacgctagaagctcagctctcagtgccagccacactgagccctggtctccctaacttccgggcctttactctgc

SEQ ID NO: 957625 - DNA, 120 bp, Artificial Sequence
  ENSG00000280832_23 (sequence is synthesized)
ttgtcattgggctgataaccaagatccagcctagagcacaagaagacaaacgctgcgtgatctcgtgtgtagaacctaacaaagtggaactcacagaagcagagagtagaatggtggttg

SEQ ID NO: 957626 - DNA, 120 bp, Artificial Sequence
  ENSG00000280832_24 (sequence is synthesized)
cctgttggaatggggagatggtcagagaatgcaaactttcagttggatgggaggaagaagttccagagatctattgtgccacatggtgacaatagttaataacaatgtactgggcggggg

SEQ ID NO: 957627 - DNA, 76 bp, Artificial Sequence
  ENSG00000280832_25 (sequence is synthesized)
agctacttgggaggcctgcgccactgccctccagcctgggtgacacagtgagactctgtttcaaaaaaacaaaaaa

SEQ ID NO: 957628 - DNA, 120 bp, Artificial Sequence
  ENSG00000280832_26 (sequence is synthesized)
tgggtgacacagtgagactctgtttcaaaaaaacaaaaaaagcaatgtactgtatacttgaaaattgctcacagagattttaaatgttctcaccattacaaaatgataaatatgtgacat

SEQ ID NO: 957629 - DNA, 120 bp, Artificial Sequence
  ENSG00000280832_27 (sequence is synthesized)
aatgcatatgttaattagcccgatttagtgattccacagtgtatacatataacaaaacatgttgtacaccataaatgtatactatttttatttgccaattaaatatatttttttaaagtt

SEQ ID NO: 957630 - DNA, 120 bp, Artificial Sequence
  ENSG00000251076_0 (sequence is synthesized)
tgaaacactggaagatacatcaacactaggtccactccgctgcacagaaacaactggcttggtccaagcggcatcctgagtttccacctggctaatgaatttagggagaattttcaccac

SEQ ID NO: 957631 - DNA, 120 bp, Artificial Sequence
  ENSG00000251076_1 (sequence is synthesized)
ttctgaataagtggcccatgtgtttcaattatggacaaaatcaacaaaacacaccagtaagtgaagcaaaggaaaagccatgggcctgaaaacctgggcttctcttcctgccataacaca

SEQ ID NO: 957632 - DNA, 120 bp, Artificial Sequence
  ENSG00000251076_2 (sequence is synthesized)
cttatttggaagtttaatgcatgaaagcatctctgaatttggcctaaatgcaatgaccatactaagtctttctgaccagaccagcaaaccagcagaataagcatttcaaccattcttcat

SEQ ID NO: 957633 - DNA, 120 bp, Artificial Sequence
  ENSG00000251076_3 (sequence is synthesized)
gctgaatgtgattactgttccaagtgatgggttttaaggggcttttaaattcaatttgtgagtacagttaggcctccataataatcaacctaattcaaccattatgtaaatcactgcctc

SEQ ID NO: 957634 - DNA, 120 bp, Artificial Sequence
  ENSG00000251076_4 (sequence is synthesized)
acagagaggtaccctggtggagaaagagaaaagaccacaagcaagaatacttaggaaacagaatgctttgactaaatgaatgtgatacttaacagcaataaaaaaaaacctttaattcaa

SEQ ID NO: 957635 - DNA, 120 bp, Artificial Sequence
  ENSG00000251075_0 (sequence is synthesized)
gcaaggccgctgacagcgcagcgccccacccgggcgaaggcgcggggctcaacggagaggggacggggcgtggtgagactgtaatggggtgaggcgaagctgtgtgtgaagtgtcgcggc

SEQ ID NO: 957636 - DNA, 120 bp, Artificial Sequence
  ENSG00000251075_1 (sequence is synthesized)
gaggcgggacgaggaagggacggggcgggactgcatgcagcccctctcttcacctccaagccggagcgtggcctcatccctcccaggtgactctcttcccagaaatggtgctgtctcaag

SEQ ID NO: 957637 - DNA, 120 bp, Artificial Sequence
  ENSG00000251075_2 (sequence is synthesized)
aagccccctctctccaagcatctgccaggccgtttgagctgccaggagtctttgtcctgccccaccagctctgtctcatctagatggggccttctgtccagtgctactgaacagaatgtt

SEQ ID NO: 957638 - DNA, 120 bp, Artificial Sequence
  ENSG00000251075_3 (sequence is synthesized)
ctgcatgcctggccagtgcagagacctccttgcacccctgctccaaggctggctctgccactgacagatagactgacatttgcactgttctgagcccctgggggtgcagtatgcagagct

SEQ ID NO: 957639 - DNA, 120 bp, Artificial Sequence
  ENSG00000251075_4 (sequence is synthesized)
aggccatctctgtcgtcctacaagaaccaggcagccctgagcaaggcttttaacatgcaaggtgtactccactagtcttaagatatcttgagccactgtcttgctgctcccaactcccaa

SEQ ID NO: 957640 - DNA, 120 bp, Artificial Sequence
  ENSG00000251075_5 (sequence is synthesized)
gccacgctgactttctttccctcgggactgaaacacctctgctgatccctgatccatatccctccccatgaaagaaatataatacataaaagagagccctctccactgagcacctccctt

SEQ ID NO: 957641 - DNA, 120 bp, Artificial Sequence
  ENSG00000251075_6 (sequence is synthesized)
cctttgtagcacttacttcaactgacccttacagggatcgtgtaactagactatgaatgtcatgaaggctacgtcgtgtctccgaccccctactaaaggctccaaccccagggaggaccc

SEQ ID NO: 957642 - DNA, 120 bp, Artificial Sequence
  ENSG00000251075_7 (sequence is synthesized)
ctcccctggcctggggaggaggatcaggaagatctctttagtaaaaggtccggttggactgggacataggtctttcctgagcaagaactctaaagcccacttgtttccttactagaagat

SEQ ID NO: 957643 - DNA, 120 bp, Artificial Sequence
  ENSG00000251075_8 (sequence is synthesized)
cttgcaatgctgcttggccctcaagtcaagcagaagcacagcccacataccacacaacacaggatttcctcacggctcatcttccaagtgagaagtgaaaggaatgtcgtgggaaaccgc

SEQ ID NO: 957644 - DNA, 120 bp, Artificial Sequence
  ENSG00000251075_9 (sequence is synthesized)
aagagtctgttctaatgataaagcagaggtccagagaaccgcacttaccctcagcagtgcacagtggtgatgaacaacacgccaagcagaagagaaaggggccaggaccttggacggggg

SEQ ID NO: 957645 - DNA, 120 bp, Artificial Sequence
  ENSG00000251075_10 (sequence is synthesized)
ctgaattcagaatcagcgcacaggagaagtgaagtttgagacttcgagaatgagccgaagggagacctttctcactgtcaaggcggtgaagcacaggccgcagaggggaggtgtttgacc

SEQ ID NO: 957646 - DNA, 120 bp, Artificial Sequence
  ENSG00000251075_11 (sequence is synthesized)
tgggggcgctcatcacatgctgtgcctagaatcgaagtccgggctcacaccagacctccaaggccagaacccgaagactggatcttctgagaacatcagagaaagactgtccttgccatc

SEQ ID NO: 957647 - DNA, 120 bp, Artificial Sequence
  ENSG00000251075_12 (sequence is synthesized)
cgcactgcaacaaaacttagggatcttgaaacttgggttcataatctcacaactgagaagggtccatccacactcctggaactgtacacccattggaacctttaaggtaaagccaaggaa

SEQ ID NO: 957648 - DNA, 120 bp, Artificial Sequence
  ENSG00000251075_13 (sequence is synthesized)
gtctctccccagaagatggcatccttgatgtgaacggcttttgctaagatcgtggatcaagacttctactgtcatgagactctcttttttttttcttttttggagatggagtcttgctct

SEQ ID NO: 957649 - DNA, 65 bp, Artificial Sequence
  ENSG00000251075_14 (sequence is synthesized)
tggtattacaggtgagttggccaggctggttttgaacttctaacctcaggtgatccgcccacctc

SEQ ID NO: 957650 - DNA, 120 bp, Artificial Sequence
  ENSG00000251075_15 (sequence is synthesized)
gcccccgcaggttctgcctcacacagcaaggccgctgacagcgcagcgccccacccgggcgaaggcgcggggctcaacggagaggggacggggcgtggtgagactgtaatgggcagcccc

SEQ ID NO: 957651 - DNA, 120 bp, Artificial Sequence
  ENSG00000251075_16 (sequence is synthesized)
ggggctcaacggagaggggacggggcgtggtgagactgtaatggggtgaggcgaagctgtgtgtgaagtgtcgcggcgaggcgggacgaggaagggacggggcgggactgcatgcccctc

SEQ ID NO: 957652 - DNA, 120 bp, Artificial Sequence
  ENSG00000251075_17 (sequence is synthesized)
agcaaggccgctgacagcgcagcgccccacccgggcgaaggcgcggggctcaacggagaggggacggggcgtggtgagactgtaatgggcaatgaacatgaactattcaggggaagattg

SEQ ID NO: 957653 - DNA, 120 bp, Artificial Sequence
  ENSG00000251075_18 (sequence is synthesized)
ttaaatgaaagaatctcactgggcggggagctaagcatgacacctggccacctgcctgtgcctgtcctgccgagaagagagaagaggccttgaaagcagccagagggggtgcacaccagc

SEQ ID NO: 957654 - DNA, 120 bp, Artificial Sequence
  ENSG00000251072_0 (sequence is synthesized)
tatcaggcaacttctttccatgaaagtgagatctgtgcgtcttgaagccgatagattatcacagaaaaaccagcaaccctgattttaaatcatttgccaacagtgttaatgggcggttcc

SEQ ID NO: 957655 - DNA, 120 bp, Artificial Sequence
  ENSG00000251072_1 (sequence is synthesized)
taatccgtttcttaatttaagggtttgtaaaatcaaaaaacagctcagaaatgatacgattaacatatgacgatttaagttgggttgatctcaaagtgaaggatggagaaatgaattctc

SEQ ID NO: 957656 - DNA, 120 bp, Artificial Sequence
  ENSG00000251072_2 (sequence is synthesized)
tattgtcataaggaaaagggaagtcatgaagttagaaggggcttgtatctgaaggcctctggccaatgtgcctgctgccatttcctctgtccctgaggtctccagaagagaaaggagctc

SEQ ID NO: 957657 - DNA, 120 bp, Artificial Sequence
  ENSG00000251072_3 (sequence is synthesized)
aggctgtggctgtcagctcagaattccatcatcacttgggagatttctgcgaatcatcactaaagccattcactttctcataactaaacaagaatcttcttctggagttaagtatcagat

SEQ ID NO: 957658 - DNA, 120 bp, Artificial Sequence
  ENSG00000251072_4 (sequence is synthesized)
atgaatgttctcactgacctcaggaagcaaaagtcctaaatcattatatggcagtgaaggtacaaaaaaaaaaaaaaatcagcaggaaataaagcggaactgctgccaacacatacaagc

SEQ ID NO: 957659 - DNA, 120 bp, Artificial Sequence
  ENSG00000251072_5 (sequence is synthesized)
tgcagtagcacccacaaaatgtgtagtatctattctaacacattcattggactgattacattggctcatagacttggttaactctggaagaacataataggtgtttattgtttactatgg

SEQ ID NO: 957660 - DNA, 120 bp, Artificial Sequence
  ENSG00000251072_6 (sequence is synthesized)
ggatgggaaacataattaagtctatagtctccaattcttctcaagttcaaatgaaaccaacacttttggttttgtcttaacattcaggatgtgtttctaattaaactgaaatcacagtaa

SEQ ID NO: 957661 - DNA, 120 bp, Artificial Sequence
  ENSG00000259245_0 (sequence is synthesized)
agttccatcatgaagcgcagttatcagtgtctcatttcttcatacccttcccaagcccattgataattttcaggaacataacatgttactataggagagcttgggatccagctgactgaa

SEQ ID NO: 957662 - DNA, 120 bp, Artificial Sequence
  ENSG00000259245_1 (sequence is synthesized)
tgtttacagatgacttgatgagacccaagaatgtggcccttatgcccgtggaagcttttaattgcctcttttggaaactagttttgattcttcataatcacgtctgtttgaggacacaga

SEQ ID NO: 957663 - DNA, 120 bp, Artificial Sequence
  ENSG00000259245_2 (sequence is synthesized)
cgatcaatcttcgatcttcctcatctttctcaccttcctcactgaacacctaagatcattcagaatcaaagataagcacaatatatttatggccttggtgtttaaagtggagctgaagat

SEQ ID NO: 957664 - DNA, 120 bp, Artificial Sequence
  ENSG00000259245_3 (sequence is synthesized)
tccagaatactggatgtaaaaggagatcttcacgggttaaaaaaatgcctttccagtaaagctaacaaaaaacaaaacaaaataaaaccatatccaaaatactaaacagctgtctccaag

SEQ ID NO: 957665 - DNA, 120 bp, Artificial Sequence
  ENSG00000259245_4 (sequence is synthesized)
atcagaaggcatcagaaaagaccctcaagagttgtctaatcccagaggaagatcttaagtggggatgtgctcacagcagaaaccttggaaatttcagggagtgaaattttattgtcagaa

SEQ ID NO: 957666 - DNA, 120 bp, Artificial Sequence
  ENSG00000259245_5 (sequence is synthesized)
ctttcaataaaagtgtagccacagatcctgggagcattaaataaaaattaccaacaagctgtcttacctgtgtgcactccactgaaaggaagggcaaacatgagcaaggagctcttgtac

SEQ ID NO: 957667 - DNA, 120 bp, Artificial Sequence
  ENSG00000259245_6 (sequence is synthesized)
atcagtcaaaattctgacagctaccctgtgaagtttgacgggctgccatgtgctagactacctaagatactcttaactgaaccataaaaagacaaataaattagtaattgtatccctcct

SEQ ID NO: 957668 - DNA, 120 bp, Artificial Sequence
  ENSG00000259245_7 (sequence is synthesized)
aaaggattgaaaagaagttcacaacaaaaaagtttgaacacaagcaaacctgaaacagatgcagggtagtagatcttaagggtgcgttgctcactccagggcctgctgccacccagatgg

SEQ ID NO: 957669 - DNA, 120 bp, Artificial Sequence
  ENSG00000259245_8 (sequence is synthesized)
ctggcaaacaccaggactccgaacacaacaggattcagggattcagacaggagtcttgctctaccaattattataggatcttagatgcctttccagtaaagctaacaaaaaacaaaacaa

SEQ ID NO: 957670 - DNA, 120 bp, Artificial Sequence
  ENSG00000259240_0 (sequence is synthesized)
tcctattcggccatcttggctcctcctgcttctttccttgatatgatgttcaaaccaggaaaatgtgcaaatatcaaggttacctgggtctgctggtcacttctagtttttggactcttg

SEQ ID NO: 957671 - DNA, 82 bp, Artificial Sequence
  ENSG00000259240_1 (sequence is synthesized)
gagtgatccgccagccttggcctcactgctcaatggtgcccaggctggggtgcagtggcgtaatctcggctggctacaacct

SEQ ID NO: 957672 - DNA, 120 bp, Artificial Sequence
  ENSG00000259241_0 (sequence is synthesized)
tttcaaagacgaggtctcactgtgtggcccaggctggaatgcagtggctattctccggtctgatcatggctcactacagtctcagactaatctcctgcactcaagagatccttccatgaa

SEQ ID NO: 957673 - DNA, 120 bp, Artificial Sequence
  ENSG00000259241_1 (sequence is synthesized)
gttggaactataggacacatccgtagaagtatttggcatcacgctgctgctcttcactgatgagaagtgactcaccaggatgacagaggttctgagtagggcatctgccaaccaatgggg

SEQ ID NO: 957674 - DNA, 120 bp, Artificial Sequence
  ENSG00000259241_2 (sequence is synthesized)
caagatggctcagaatggaccctcaagatgtacaagccctgcagagccagcagagtggccggtgccatctggccaatgtctggaattgaagcacaaaggatgttctccagaaatgaaagc

SEQ ID NO: 957675 - DNA, 120 bp, Artificial Sequence
  ENSG00000259241_3 (sequence is synthesized)
ttcttgggagaaatagattacaattatagaagtctttatataaatgttcaatctggggctgaatccttgaacagggaaagaaaaagccatgaaggcagtccagagcatctgtttgaacaa

SEQ ID NO: 957676 - DNA, 120 bp, Artificial Sequence
  ENSG00000259241_4 (sequence is synthesized)
taacaacagaaacattgcacattattatcctccttgcagattaaccaaaataaacatggactgaatcctcagttaactcactgcacatatgagcaaagagatcaggatgcatgaaatact

SEQ ID NO: 957677 - DNA, 120 bp, Artificial Sequence
  ENSG00000259241_5 (sequence is synthesized)
tagctttaaaaaaacaaaaacaaaaacaaataatttcccaagtgtgtttgaggttcccagattccttcagtctaatgttctccattttaactctgaagttaaaatgttcataaaggctga

SEQ ID NO: 957678 - DNA, 120 bp, Artificial Sequence
  ENSG00000259241_6 (sequence is synthesized)
aactgaaactgttcataaagatctcttgaataatataaaaaggatgaattaggtttcatacactgtttccattaaggaaagtgagtagagccttttaaagaaagatttgttacaaatgga

SEQ ID NO: 957679 - DNA, 120 bp, Artificial Sequence
  ENSG00000259242_0 (sequence is synthesized)
aaagcagggacctttgtgcttcaactgcaggaagtgaattcttccatcaaccatgcgacactgggagagaaccccatgctctggataggaacatagcccagccaacaccttgactgcagc

SEQ ID NO: 957680 - DNA, 120 bp, Artificial Sequence
  ENSG00000259242_1 (sequence is synthesized)
cctgtgagaccctaagcagaggacctagctaagctgtgcccagaatcctgacccaaggaaactgtgagataataaatatctgctgttttaagctgctaggcttgcggtgatttcttataa

SEQ ID NO: 957681 - DNA, 120 bp, Artificial Sequence
  ENSG00000259242_2 (sequence is synthesized)
agcaatagagagttgataatgagatagactggaagccagagaatggggaccgttgggagaaaaatggggttggtgctggtatgtctaacaagtatatgacacgttatggctgggtgccgt

SEQ ID NO: 957682 - DNA, 88 bp, Artificial Sequence
  ENSG00000259242_3 (sequence is synthesized)
tcaggagattgaggccagcctgaccaatatggtgaaacctcgtctctaccaaaaatgcaaaaatgagccaggctgtggtgacctgaca

SEQ ID NO: 957683 - DNA, 70 bp, Artificial Sequence
  ENSG00000259242_4 (sequence is synthesized)
gagaccctgtctcaaaaaaaaaaaaaaggaaagaaaactgaactcccagaacaaaacaaaccaggacaaa

SEQ ID NO: 957684 - DNA, 120 bp, Artificial Sequence
  ENSG00000259242_5 (sequence is synthesized)
aacaaaacaaaacagaacaaaacaaaccaggacaaataccttagaaaggtcagaatactttgcaaagtacttacactgtacaagtctggaacaaaccgcgtgctcactccttacctggca

SEQ ID NO: 957685 - DNA, 120 bp, Artificial Sequence
  ENSG00000259242_6 (sequence is synthesized)
aggagttcaaggccatgcttggtcggacagcagctgaggcaggcagtcacccccgagtctcccttccaaggtcacgcccaccactcatgcccgatgggaccacaatgcatgccttcatgc

SEQ ID NO: 957686 - DNA, 120 bp, Artificial Sequence
  ENSG00000259248_0 (sequence is synthesized)
caggcgcagtgcgcgcaggcgtgggcagcagcgcagcaggcgcgccaggcagtcgtcggtaacgtggccgcagcccgagagcgtgacggacgccaggttggggcacctgtgaggagagtg

SEQ ID NO: 957687 - DNA, 120 bp, Artificial Sequence
  ENSG00000259248_1 (sequence is synthesized)
cggtgacccggggctcactggcttgttaaagctacccaaccgccccatgggaccgagtggactcatttaccgaggaggactcgggccctgcgaggtcacttcatcctggcccaggtactg

SEQ ID NO: 957688 - DNA, 120 bp, Artificial Sequence
  ENSG00000259248_2 (sequence is synthesized)
cagctccaaatcgtggggattctgtaagagcttgctacctgttgactgaggaggcccacgagttgagaagaactagcaagagtggtacaaaactgcaggtcattgggctggccaccaggt

SEQ ID NO: 957689 - DNA, 120 bp, Artificial Sequence
  ENSG00000259248_3 (sequence is synthesized)
attcccacccaccagaagctggctgttgtactcacccggaaccatggtgcaccaccacagcggcgaggtcatacaggcagctctccgggccactgttctcaggctacagaacaaggaaga

SEQ ID NO: 957690 - DNA, 120 bp, Artificial Sequence
  ENSG00000259248_4 (sequence is synthesized)
aggagcagtggtcaatgacatcagtatctcgatgacctctaccctctccatgtgatgacaatcttactgaagagccattttttcaccatgctaaaaaggtaaccaccttacctctagtaa

SEQ ID NO: 957691 - DNA, 120 bp, Artificial Sequence
  ENSG00000259248_5 (sequence is synthesized)
gtagcatttcatgtctaggcctctcagtggaaattctacgtatgtatcaactttatttcttaaatatgctgtccaatgaaatcttttcaaatgtaagcatagcacctggaggacagagat

SEQ ID NO: 957692 - DNA, 120 bp, Artificial Sequence
  ENSG00000259248_6 (sequence is synthesized)
gcggtcaaagattgtgaacacctaatttacctttcagtcaaagtttgatactactatcagttcagtaaataacattttagctgccctatcaatcattcttccatgcataccttatgcatt

SEQ ID NO: 957693 - DNA, 120 bp, Artificial Sequence
  ENSG00000259248_7 (sequence is synthesized)
cattctgtaaggggtttagcttttactgaaaatcctagagaaaaatacagaacagttcacatagtgtaaagttatagacatggtcttagcagtcaagcactttcccattgaaattgcttc

SEQ ID NO: 957694 - DNA, 120 bp, Artificial Sequence
  ENSG00000259248_8 (sequence is synthesized)
ataactcaaaattcaacactcaccttgggtagtttttgaatccaaaacttttttgtggacttttgtttctttttgcatttatggcacatatataactctgtctcatcaagttcttctaag

SEQ ID NO: 957695 - DNA, 120 bp, Artificial Sequence
  ENSG00000259248_9 (sequence is synthesized)
tattagctatacgaccttagaaaagttaacctttctcaattgcaaactggagacaaaaaataatacctactttgaagaactattataaggaagagaaataatgtgtagagcacctggcat

SEQ ID NO: 957696 - DNA, 120 bp, Artificial Sequence
  ENSG00000259248_10 (sequence is synthesized)
catgcctgacatctggtgatgatcaattgtgttggttttactattaatgataattcatctggataattctgataaaatggtttcctgatgaatttaaagtttcaattgtagttttctgtc

SEQ ID NO: 957697 - DNA, 120 bp, Artificial Sequence
  ENSG00000259248_11 (sequence is synthesized)
aatatgttacattatacaggacaaagctccaaactcataaaaaaaagtcaaatttagataatttaaaaataaacatagatcacagaaggctacactatcaaccttctctgtccagacgct

SEQ ID NO: 957698 - DNA, 120 bp, Artificial Sequence
  ENSG00000259248_12 (sequence is synthesized)
gtactctcagttcctagataaatcacagctacattttttttcatttaaagatgtaattgtgtaacctggggtttagtaaactacagtcctaaaacatccagccagccacctggttttgta

SEQ ID NO: 957699 - DNA, 120 bp, Artificial Sequence
  ENSG00000259248_13 (sequence is synthesized)
aataaagtttcattggaacagagccatgcccacttgtttacattattgtctggctgcttttacactacaccaaactgagtcactggggcagagaccttatgtggtgcaaagcctaaaaca

SEQ ID NO: 957700 - DNA, 120 bp, Artificial Sequence
  ENSG00000259248_14 (sequence is synthesized)
ctgtaaatcttcacttaatatcatgacaggttcttgaaaattgtgaccttatgtgaagcaacgataaaccacttttttctcatcaatgttataactaaacgttaaaggaaactattattg

SEQ ID NO: 957701 - DNA, 120 bp, Artificial Sequence
  ENSG00000259248_15 (sequence is synthesized)
gaggacctgctgtatgtcattttgctttaaacttgcagtttccaagaacctactgatgacattaaatgaagacttactgtatttactctttggcccctgtgccaattcctgatgcaatca

SEQ ID NO: 957702 - DNA, 120 bp, Artificial Sequence
  ENSG00000259248_16 (sequence is synthesized)
gatattcataaatctatataaaatacacgttattctgtagaaaaaatatgaatgcctatggaccccacacttggattttctcgagtactcaaggagccagggtctctgtgcacggcctct

SEQ ID NO: 957703 - DNA, 120 bp, Artificial Sequence
  ENSG00000259248_17 (sequence is synthesized)
cctagagttgtgcagtggacaacctgtgtggccatgtgcttcttaccaaagataattccccttcctctgcccagaagtagccattatcctgacttttatgtcatttgtctttatagaaca

SEQ ID NO: 957704 - DNA, 120 bp, Artificial Sequence
  ENSG00000259248_18 (sequence is synthesized)
atgacactgcagggttccaagtcggctttctggccggcccattttccctcctctttctgcccctgcaccccaccgtaccttcatctgcgtgggttcttggctcgtagccttgggagcccc

SEQ ID NO: 957705 - DNA, 120 bp, Artificial Sequence
  ENSG00000259248_19 (sequence is synthesized)
tagtgggaagccccgaccccggcccagcagagtcctggggcggctgtggacagagggaatgccggttccaggagccacaacccttgactctttgtttcgctctggatgtgctgccttgca

SEQ ID NO: 957706 - DNA, 120 bp, Artificial Sequence
  ENSG00000259248_20 (sequence is synthesized)
tgaaattttgtgggccacaagtattgtgcacacatgatccttgatttagagtcaacctgatgtccattatagctgtggaaaggcagcaggcagttgtgtcgctcttcacaataaggaaca

SEQ ID NO: 957707 - DNA, 120 bp, Artificial Sequence
  ENSG00000259248_21 (sequence is synthesized)
catgctaaaaaggccagttgggtccagcagctttgcctctctacccttttatcaccaaagtatactgctgagaaagaatcaaatgaaaagaaaaaagactcaacaagacctcactcatat

SEQ ID NO: 957708 - DNA, 120 bp, Artificial Sequence
  ENSG00000259248_22 (sequence is synthesized)
taactggactctacaagcagtgagcatccagacctgcatttggttacaaaagaagccttcaagctattttcatcagcttcctaatcaagttaaaaaataaaccacaaaactgagtatcca

SEQ ID NO: 957709 - DNA, 120 bp, Artificial Sequence
  ENSG00000259248_23 (sequence is synthesized)
cgacctgagctgagtgccagaagaaccagattcagtagacgttcatcagtacctactatgtgccaggtcacttcatcctggcccaggtactgcagctccaaatcgtggggattctgtaag

SEQ ID NO: 957710 - DNA, 120 bp, Artificial Sequence
  ENSG00000259248_24 (sequence is synthesized)
ttgggtgcagccaggtgtcacaccgagcccgggcctccttcaggtttgtgtgccctcattagtcaccccgtcaacctctgcacccccagttttgtacatgaagaaactggctccggcagc

SEQ ID NO: 957711 - DNA, 120 bp, Artificial Sequence
  ENSG00000259248_25 (sequence is synthesized)
tcaggtgactggctggtgacttatttgctgtcagacccaggacagatgtctgaaccttgctgggcgtcacttcctcatttgtcaagtgggaggaattgttaccttcaaggtggttataag

SEQ ID NO: 957712 - DNA, 120 bp, Artificial Sequence
  ENSG00000259248_26 (sequence is synthesized)
gattaggtgtttaagcctcaaaggtgttgggtgatcttttcttctaagaatctttggaataattctgatacagggaaaaaacaaagagcggactgtccccctgcccagccatcctcagcc

SEQ ID NO: 957713 - DNA, 120 bp, Artificial Sequence
  ENSG00000259248_27 (sequence is synthesized)
aacaaaagcattgatgtaaatgtgcctcaaagtgagaactgaaaacattaacataaaataaaaaagtcaaataagactaagttcttacaactacctataaaaattgaattattacaacta

SEQ ID NO: 957714 - DNA, 120 bp, Artificial Sequence
  ENSG00000259248_28 (sequence is synthesized)
aagcagcaaatcaaaacatctgctgaggttttctggtagaacaacaacaaaattagttggtgcccatgttcagtaagtcactaccattgacaaaactaaatccaaaataggaaattgaaa

SEQ ID NO: 957715 - DNA, 120 bp, Artificial Sequence
  ENSG00000259248_29 (sequence is synthesized)
ggaagaaggtgctgacagatggactcactggggtcacggcaacaatcgacagtacaggtggcaaacattgtgtaaaatactccaaatccaagacacacatttataaaagtctgtaacagg

SEQ ID NO: 957716 - DNA, 120 bp, Artificial Sequence
  ENSG00000259248_30 (sequence is synthesized)
tgaaagaataaactccagctgccctcaacacctagggcatggagacctccctgactgcttcgtcaggcctactggggcccacacgtatttgaagttaaccgaggagctctacttccttgg

SEQ ID NO: 957717 - DNA, 120 bp, Artificial Sequence
  ENSG00000259248_31 (sequence is synthesized)
aaatccccattgctcctccagcagaggtgggctggacactgctcctggcaaagctggccgggaagatgcagcccgtgggacactccccaccaccactctcacagtctgactgactgcgaa

SEQ ID NO: 957718 - DNA, 120 bp, Artificial Sequence
  ENSG00000259248_32 (sequence is synthesized)
gcttcacagaccagaaggttcattcctcacaagaaaaggaaaaccctggtctgatactactgttctgaaatttaacagtaagtctccatatgctatttctttcttaatttcaataaagat

SEQ ID NO: 957719 - DNA, 120 bp, Artificial Sequence
  ENSG00000259248_33 (sequence is synthesized)
gccatgttttgctcatttgtcttaatagatgatgatatgatctgagtttgaggaatgataaataagttacaggaatacaggcacatgtacattcattagatgcagctacgctccaaagga

SEQ ID NO: 957720 - DNA, 120 bp, Artificial Sequence
  ENSG00000259248_34 (sequence is synthesized)
cattctaaaacacatccttattagtgaggaaattctgaattaaaatcactcaaaatttttcttgatgtaagaaatattttgcttaaaatttatcagaaagttatttctattttcaaaagg

SEQ ID NO: 957721 - DNA, 120 bp, Artificial Sequence
  ENSG00000259248_35 (sequence is synthesized)
tcactttaaaattttatgtctcaggcaaattaatctaaaggaagtaaaaattatggttaaacaacacagacttttaaggccgccaattctctcccaccttctaaaagtacccagttcatc

SEQ ID NO: 957722 - DNA, 120 bp, Artificial Sequence
  ENSG00000259248_36 (sequence is synthesized)
caaagtaaataattatttttttcttacagaatttccacatgaattatgtctttgaaacatcagaactagtgacagttgcttcaaacctcaaaatgttcttcagaactgtgtgtctctctc

SEQ ID NO: 957723 - DNA, 120 bp, Artificial Sequence
  ENSG00000259248_37 (sequence is synthesized)
ttacagtactggtagccacaagatgaagagaccaattccatactctatagtgttcaactattccttcacaaattctgtgaagtggggaaggtaaaccacaagcatagtatatatgctctt

SEQ ID NO: 957724 - DNA, 120 bp, Artificial Sequence
  ENSG00000259248_38 (sequence is synthesized)
tatgacaatgcctaagagttcattttcagttgtaacctatataaataaggcatttcaccttttaaaaatgtaagttactaaattttatcctcagtgactctcaaaatgcagaatcttcta

SEQ ID NO: 957725 - DNA, 120 bp, Artificial Sequence
  ENSG00000259248_39 (sequence is synthesized)
gatccatgctatctaatatagtagccactcactccatgtggctatttaaattaattaaacttgaagtttaaaattcagtgtctcagttgcactagccacttttcaagtatggctagtgtt

SEQ ID NO: 957726 - DNA, 120 bp, Artificial Sequence
  ENSG00000259248_40 (sequence is synthesized)
accatattagagtggatggagaacatttctgtcactgcagaaagttctgctggacagtgctgctccacggggcatgcggaatagtcgaaagttaagtaaaacacaaatatgatcgtagtt

SEQ ID NO: 957727 - DNA, 120 bp, Artificial Sequence
  ENSG00000259248_41 (sequence is synthesized)
tctaaattccactacagattaaaccaatgtttgcaaaacacaaaaatgaatctaggtaatgtttttcaacataggaaatgggctgtaaggtagatttttcatggagccaagcagacatgt

SEQ ID NO: 957728 - DNA, 120 bp, Artificial Sequence
  ENSG00000259248_42 (sequence is synthesized)
tcttttccctttgacttagttctgattatttcagactgagagggtgaaggacatcaccacaccaaagagtgatactacatacattccttcaggaatctcagacttcatgtttattgtgaa

SEQ ID NO: 957729 - DNA, 120 bp, Artificial Sequence
  ENSG00000259248_43 (sequence is synthesized)
cagtttcagagaaaattaaatattttggatctgtgtgtatctgtctctaatcctagataggactcatcaaattagaagagaagtactctgaaaaagagccaaaagatgacaaaccaagaa

SEQ ID NO: 957730 - DNA, 120 bp, Artificial Sequence
  ENSG00000259248_44 (sequence is synthesized)
gtacttaaacctgaagtactttaattggtttagatttaaagaaatcattattcttccagtattggctttatcatctagttagtcaatgagacatacataatgtctgtggttttaacaaac

SEQ ID NO: 957731 - DNA, 120 bp, Artificial Sequence
  ENSG00000259248_45 (sequence is synthesized)
actacacagtactgccctcaaagaagttaggttatttcttttcagtatgcaattttcaaacattctatgggctttacacttaagtttgctaagggactcctgctttgtggatgttttcac

SEQ ID NO: 957732 - DNA, 120 bp, Artificial Sequence
  ENSG00000259248_46 (sequence is synthesized)
aataccttctacacatcaactgccaaaataaattagatggcgcttaatgatttggtgtgatgtacagagatttcacttgagtcagcagtcattccagagccatgcttctatccactgtag

SEQ ID NO: 957733 - DNA, 120 bp, Artificial Sequence
  ENSG00000259248_47 (sequence is synthesized)
cttcaaaggcatggctagctgggtttctgtttattgcttcaatttcgggtccagtgagttttatctaactatttgactataccaataaaagtctgttcacatataaatagtttcatttct

SEQ ID NO: 957734 - DNA, 120 bp, Artificial Sequence
  ENSG00000259248_48 (sequence is synthesized)
ttatgatgacaaagtattcatagctccttgtaatgtcaactgatatttaactgcccctaacaagcaaggaagaaactaggatcctgtgccactgtatagatgcaaagtggacaatatgtt

SEQ ID NO: 957735 - DNA, 120 bp, Artificial Sequence
  ENSG00000259248_49 (sequence is synthesized)
cattaaacctaatttcccttaaaaatgatgcataaatcatagtgcttcctagtagacctcataatacatttgacaggggttttctattatcaaaagtaactctatgatgatttcacacct

SEQ ID NO: 957736 - DNA, 120 bp, Artificial Sequence
  ENSG00000259248_50 (sequence is synthesized)
ttttctgcccttttcttgtaccctcaaaataaattgagtagcttataaattgttgggtaatattttttaaagaggctcttgggaccttggatatggtttatgacaaatattaaataaaat

SEQ ID NO: 957737 - DNA, 120 bp, Artificial Sequence
  ENSG00000259248_51 (sequence is synthesized)
aaatgcacagctatgaccattaactatgggccaagttttagctatccaaagccaaggtttattttattaacatttcaatcatattataaacatgaagttattaaactcatcaacaaaaac

SEQ ID NO: 957738 - DNA, 120 bp, Artificial Sequence
  ENSG00000259248_52 (sequence is synthesized)
cccactcaaaaattctaaaagactcctcaaccccattcttaggcccttctttttccaaaggcctattacttacttttccaagttctgtaagtgttctctgactttctgtaccagtcccag

SEQ ID NO: 957739 - DNA, 120 bp, Artificial Sequence
  ENSG00000259248_53 (sequence is synthesized)
cttggtgtcattaaccacaaaatcatcacagcgataactgcaaggaaaatattaatcaatgtgtgtaaagagcttgaggaaaccacagtaatgaaatcactaaaaggtctggctgttgcc

SEQ ID NO: 957740 - DNA, 120 bp, Artificial Sequence
  ENSG00000259248_54 (sequence is synthesized)
aagatgatcacatggctctgcaggcagttactgctggtggtaagtttaaagaggacctggaattcacaatggaatgtttttcaagagtcttttttaaaagccacgtaggcaatgaacatg

SEQ ID NO: 957741 - DNA, 120 bp, Artificial Sequence
  ENSG00000259248_55 (sequence is synthesized)
agcttcttttcacgttttttactcaaaagctcttcaattcctcctttgaaaatgaaataagctgctacatgtgttacattctttttagtggtgcctaatacatggaaaatgaaataaaaa

SEQ ID NO: 957742 - DNA, 120 bp, Artificial Sequence
  ENSG00000259248_56 (sequence is synthesized)
gcaccgagtcttttcatgtagcattaagcctaaagctttaagttgacacttcccaacccaaattaatggggaattgggggaaggagagatttaagtgaaaagcagggaagaggtaattaa

SEQ ID NO: 957743 - DNA, 120 bp, Artificial Sequence
  ENSG00000259248_57 (sequence is synthesized)
cctgtagggatatctgaatagaaaaactaaagttaaagctgcacattttaaacataatttaattaaaatagcttgaattcagatgagctgagaagaatgctctttcactctgaggcacta

SEQ ID NO: 957744 - DNA, 120 bp, Artificial Sequence
  ENSG00000259248_58 (sequence is synthesized)
caaaacaaaagtataaaatagtggctatatcattcaggcaactgataagtgctttgaagaaaaatatttaagctatatttaaaaaccgatactctgtgtgttttataagtcaaaaagcaa

SEQ ID NO: 957745 - DNA, 120 bp, Artificial Sequence
  ENSG00000259248_59 (sequence is synthesized)
ataatgtaagaaatcacacataatataaactttaacttgttcacattagcatttaattttttcctgggataaggccaattttaacaaaaacaatttacaagctggcactaagatattatt

SEQ ID NO: 957746 - DNA, 120 bp, Artificial Sequence
  ENSG00000259248_60 (sequence is synthesized)
gtgcgcccctgcttcccctcctcctgcttcaccgagatcaccaccggggctcctggaggtggcggtccccaggacactccgggagccggcggggtctcgctgggtcgctccgcccggagg

SEQ ID NO: 957747 - DNA, 120 bp, Artificial Sequence
  ENSG00000259248_61 (sequence is synthesized)
ctccccagacccctgcgcgcggcagccctggcccccgtcacccccgagcgcaagtcggcgaactccgagtggtcaggtcctccccaccgaggtgatttcggtccaacggcgatcggagtc

SEQ ID NO: 957748 - DNA, 120 bp, Artificial Sequence
  ENSG00000259248_62 (sequence is synthesized)
tgactgaggaggcccacgagttgagagccatgtgactcagcgcgaggccctgcctcagcagaagctctgagccagaagccacatatattgctggagacaacatggcacaagggaaaagcc

SEQ ID NO: 957749 - DNA, 120 bp, Artificial Sequence
  ENSG00000259248_63 (sequence is synthesized)
ctagcttcaagctgaggcccctgaatgtcccggcgggacgtgagtgggaagagggatttgtttccttggaggtggcctagtgacaggcccatcccaaccctcaaggcggtgggggcacgc

SEQ ID NO: 957750 - DNA, 120 bp, Artificial Sequence
  ENSG00000259248_64 (sequence is synthesized)
gttagcattgagtccgggttcagcttagtagactagagctgttcctgcatcccctgggccaccagcctggaaaagggtagggttcggaggcagctagaggcaagccctgagcaggtacag

SEQ ID NO: 957751 - DNA, 120 bp, Artificial Sequence
  ENSG00000259248_65 (sequence is synthesized)
tcacggacacccacccaggtcgcttggccagaaagcttgggggaccctctgctgcagcctcaccagcccctcccagcaaagaaaagatcttgagccaagttagacttggtttatcgccgt

SEQ ID NO: 957752 - DNA, 120 bp, Artificial Sequence
  ENSG00000259248_66 (sequence is synthesized)
gtcagtcactcacggagccttcatttcctctgcgtggggggaataatgtctaccactggggttgtgaggagcctgcaacggggccttccacaggcagtcctaacccgctttccctggaaa

SEQ ID NO: 957753 - DNA, 120 bp, Artificial Sequence
  ENSG00000259248_67 (sequence is synthesized)
caaacgggaccagcctgcttccagtccagaaggaccgactaatgggccggggccttggctccccgcagccagagggagctagagtctgggctggggaagcgtttccctttccctgccagc

SEQ ID NO: 957754 - DNA, 120 bp, Artificial Sequence
  ENSG00000259248_68 (sequence is synthesized)
tttaattacttacatttacttttaataacttgctgtttagtgttgagttttccaaaagttttcttttcttatgcctgtcagctgtgaaagctgagctattaaaacacaaacagatagtga

SEQ ID NO: 957755 - DNA, 120 bp, Artificial Sequence
  ENSG00000258593_0 (sequence is synthesized)
atggagggtggagatggtgggtggtgatggagggtggggataaatggtggtaatggacagtagagatggacggtggaaatggaggatggtgatggttgtacaacaatgtgaatgcacttg

SEQ ID NO: 957756 - DNA, 120 bp, Artificial Sequence
  ENSG00000258593_1 (sequence is synthesized)
atgtcactcaactgttcacttaaaaatggcaaacatagtagtttttatgttacatatattttactacaataaaaaaagaatgaaaagcctataaaattctgaaaaataaaaaagggggct

SEQ ID NO: 957757 - DNA, 120 bp, Artificial Sequence
  ENSG00000258593_2 (sequence is synthesized)
ttagccctgccagagagtagaatccatcatagaacatcttgctatgggcagttgactggacacacacatcagagcaggtctgtgtgatcatttagcatatgattaatggggcatttaaaa

SEQ ID NO: 957758 - DNA, 120 bp, Artificial Sequence
  ENSG00000258593_3 (sequence is synthesized)
gcagtgagccaagatcgtgccacttctctccagcctgagcaacaaagcgagactctgtctcaaaaaataaattaattaataaataaataaatccatgagggaaaggatgtcatttaaaaa

SEQ ID NO: 957759 - DNA, 120 bp, Artificial Sequence
  ENSG00000258593_4 (sequence is synthesized)
aaataaattaattaataaataaataaatccatgagggaaaggatgtcatttaaaaaagggtgtggccaggcacggtggctcatgcctataaccagcactttggaggccgaggcaggtgga

SEQ ID NO: 957760 - DNA, 86 bp, Artificial Sequence
  ENSG00000258593_5 (sequence is synthesized)
cctgggaggcagagattgcagtgagcctagattacgccattgtacttcagttaaaaataataataaaataataataaagggtggtg

SEQ ID NO: 957761 - DNA, 65 bp, Artificial Sequence
  ENSG00000258592_0 (sequence is synthesized)
ggaactccctgaccccttgcgcttctcgagtgaggcagtgcctcgccctgcttcggctcccgcac

SEQ ID NO: 957762 - DNA, 120 bp, Artificial Sequence
  ENSG00000258592_1 (sequence is synthesized)
tattcggccatcttggctcctcctcctatatttactcttttaatagcattgcttccctgtgatctctaacccaccacaattgaaatgacaagcgttgaaatgggggcctcacggtggcgc

SEQ ID NO: 957763 - DNA, 120 bp, Artificial Sequence
  ENSG00000258592_2 (sequence is synthesized)
tgaaatgacaagcgttgaaatgggggcctcacggtggcgccctctgcctttgccggccctttctgcagcacggaacggttcacgccgcagagcaccggttctcaaacttgaataatgcct

SEQ ID NO: 957764 - DNA, 120 bp, Artificial Sequence
  ENSG00000258592_3 (sequence is synthesized)
aaactcggtcaaaatttcctgtgtctgggatgcctgtaaattttgacaatttgacaaattattttgttgcagtgatgatggtttggaaaacctgacatgtaagaatttagttctttgatc

SEQ ID NO: 957765 - DNA, 120 bp, Artificial Sequence
  ENSG00000258592_4 (sequence is synthesized)
ttcgcttctttacactggccctagagagcattatatcattgcaacaaaaggaaaaatgccatcctgtcttggaggtgtttaacagatagcattgcttccctgtgatctctaacccaccac

SEQ ID NO: 957766 - DNA, 120 bp, Artificial Sequence
  ENSG00000258592_5 (sequence is synthesized)
tctttagaactgctaaaaggttgagtttttacatctttactctgctattgaaacaaaactattaaaattatcttaaatatcctgaaagtctcagactcctgaaaacgtgtccacagatcc

SEQ ID NO: 957767 - DNA, 120 bp, Artificial Sequence
  ENSG00000258592_6 (sequence is synthesized)
ctgcttgaaaaacctgccggagtacctgcttttccttgcatttgttggcagaagatgagcgtttgaccttttacaaactgctctgtaaatatcatcattgcttagtttgtgaaagactaa

SEQ ID NO: 957768 - DNA, 120 bp, Artificial Sequence
  ENSG00000258592_7 (sequence is synthesized)
tgtgtttccactaacaaaactgtctttccagggttgctgctttctagaataatgcttgttttcctactgggttttctgttgctggtgttttttttaaaggcaaccaaatttgtctaaggg

SEQ ID NO: 957769 - DNA, 120 bp, Artificial Sequence
  ENSG00000258592_8 (sequence is synthesized)
attgcactttaaggcaatccagggacttttaatgaagaactgatgagaaagccaaagtctctggttgaaaaaaaaaaaaatgtgacaaagtagcagatctcaaaaatattaaccaagtag

SEQ ID NO: 957770 - DNA, 120 bp, Artificial Sequence
  ENSG00000258592_9 (sequence is synthesized)
attctctaatatttgatactttaaacgcaaactgttttctaaacaatgtttgtaagcaaatgttaaaagtatttttttccgggattactgcttctatattaaacagatagtatgaacaaa

SEQ ID NO: 957771 - DNA, 120 bp, Artificial Sequence
  ENSG00000258594_0 (sequence is synthesized)
ctagaatgggaatgtctctctgtggtatgcaagcaatgcctccactaactgactgcccaggctatgaagtcgagaccatgaagatcaccattctacactccgtgtcccctgctttctctg

SEQ ID NO: 957772 - DNA, 120 bp, Artificial Sequence
  ENSG00000258594_1 (sequence is synthesized)
ataagagtacaaccaactcttgcagaaaacacagttttttcatgtgtacgtggagcattaaccaaaaccaacctttgtcaaggcataaaatatatcacaataaacaccaaataaatgaaa

SEQ ID NO: 957773 - DNA, 120 bp, Artificial Sequence
  ENSG00000258598_0 (sequence is synthesized)
aaaatatcagaactcagagcacatggagccccagagaagagcggaaaatccagcgtgcttcacaagcactgaaaccagaaataaccaaagtgtccacggatgggcggctggatacaaagc

SEQ ID NO: 957774 - DNA, 120 bp, Artificial Sequence
  ENSG00000258598_1 (sequence is synthesized)
cggcgtgtagtcataaagggatgcagcgaacgacgaatgtgaataaacatttgctgtatgaacaggatgactgacgctcacagctcaacgtggagtgaaggaagccagacctggggaagc

SEQ ID NO: 957775 - DNA, 120 bp, Artificial Sequence
  ENSG00000258598_2 (sequence is synthesized)
gagaaaacttgtctgcagtgtaggaagttgaaacagcggatgcctctgaggttggggtatgggggctttggggggcaaagggaaatctgacctccacgagggtggataaagctctgccaa

SEQ ID NO: 957776 - DNA, 120 bp, Artificial Sequence
  ENSG00000258598_3 (sequence is synthesized)
gctcgccaactgaagccaagaaaaaacgctaaggaaggaagcacctcgaaacacagcggctggagaggcagcgggagcctcctgggccggtgctccacggggtgccagagctgggtgact

SEQ ID NO: 957777 - DNA, 120 bp, Artificial Sequence
  ENSG00000260279_0 (sequence is synthesized)
catgaaatacagcacttctggccaagaagtctaaatcacagccgatctacacgaggcggatggtccacaacgccaagttcctacccgggcactgagctcaacgctcgcacaactccaaac

SEQ ID NO: 957778 - DNA, 120 bp, Artificial Sequence
  ENSG00000260279_1 (sequence is synthesized)
gctccgaacagcctgtcctgggccaacaagagaagctggcgggcgcccgctgagcactgtgagccatcttgtgcatccagcggtcaccatggtgaacaagaagccaggaaggaaggaagc

SEQ ID NO: 957779 - DNA, 120 bp, Artificial Sequence
  ENSG00000260279_2 (sequence is synthesized)
aatgtcggcaaaagggctcagatgacaaccaaacagaacggtttcccaccctgggcctcctttccacacacacagcatcgtgggtattttaaaataaacaagatcaacgtccaaacctgc

SEQ ID NO: 957780 - DNA, 120 bp, Artificial Sequence
  ENSG00000260279_3 (sequence is synthesized)
ctcattggtgacctctcaaagcccctcatccctcctcagcacctgtccctcttagctggggggacagtgtctaccctgatagcccagtgtccaggaagtgtggccctctcgaggggacaa

SEQ ID NO: 957781 - DNA, 120 bp, Artificial Sequence
  ENSG00000260279_4 (sequence is synthesized)
gctttccgtggggtctgggcccaaagccccttcctctacctccctgggaggtctgaagctgggctccaaggcagagaccctgaggttgggccccagggacgtggaggtgtgtggcctcag

SEQ ID NO: 957782 - DNA, 120 bp, Artificial Sequence
  ENSG00000260279_5 (sequence is synthesized)
ctgctcatctgaacaaatgccttttgtatcaatcatttagcacctctaatttctaggcttttctagcaagagtcttttaggagacacaggccacgatactgtcaacataggaaaatgtgc

SEQ ID NO: 957783 - DNA, 120 bp, Artificial Sequence
  ENSG00000260279_6 (sequence is synthesized)
aactcctgcgtcccaccgtaaaactcgaagacgtcaaaatacattcttgattctgctccacaaagggatgtttccatggcgatattttcaaacaacagaaagttcacggccgatggcggt

SEQ ID NO: 957784 - DNA, 120 bp, Artificial Sequence
  ENSG00000260279_7 (sequence is synthesized)
tacagctcatggaactgatgggcagggccgggtgcagctttgtagcacggctgctgctcacagattctcttccatttgactaaaaaccatgctgtccacaccaaacatctggcctcatcc

SEQ ID NO: 957785 - DNA, 120 bp, Artificial Sequence
  ENSG00000260279_8 (sequence is synthesized)
tcttgtggtgagactggcttctccttccaatctccaggtttctctctctttctgccttctttctgtcagttaccgtcattgatcacttaaagaaagacagggcctacccctgtctgctgc

SEQ ID NO: 957786 - DNA, 120 bp, Artificial Sequence
  ENSG00000260279_9 (sequence is synthesized)
gtgacctcagccctcccgcctgccgatgggagctgggtcatctcttacgcctttcagctttggcttcttccgcagtgtatgtgaaggggtcacacagagcatccagcggtcaccatggtg

SEQ ID NO: 957787 - DNA, 120 bp, Artificial Sequence
  ENSG00000260279_10 (sequence is synthesized)
acaggtgggtgtgcctctggctgcttttaacatcctccctttgctgttctgaaaacttcacgtcagagtcatatttaaatgtgtaattactgctctttctcctgcttataattcattata

SEQ ID NO: 957788 - DNA, 120 bp, Artificial Sequence
  ENSG00000260279_11 (sequence is synthesized)
ctttttgaatttgaggcttgtgtttttatgaaccttgaaaagccctctgctgccggcctctggagccaccgtctccctgccctgctctctcctctgccgaggtgcctgttaagctgcatt

SEQ ID NO: 957789 - DNA, 120 bp, Artificial Sequence
  ENSG00000260279_12 (sequence is synthesized)
ctctcctccacagctccccgcttcctgcaggcttcctgtctcactttctttctgtgctccagagtctaggcaatctcttttgttagaacttccaattcaccaatactttcttatgttgtg

SEQ ID NO: 957790 - DNA, 120 bp, Artificial Sequence
  ENSG00000260279_13 (sequence is synthesized)
tctaataagctacatcatctgctcactgggttttttatttcagtgattatagttttcatttccagatattccatatgccttaaaaacatctgcatgatactccatggttttaactcccct

SEQ ID NO: 957791 - DNA, 120 bp, Artificial Sequence
  ENSG00000260279_14 (sequence is synthesized)
gatgaatactgtgcatttaaccatcccagcacgtgaggtccctggggctgacccctgctgaccctctcagaacagctttcttcctcaacgtcttgtaattccaaccaggctcttcgtctg

SEQ ID NO: 957792 - DNA, 120 bp, Artificial Sequence
  ENSG00000260278_0 (sequence is synthesized)
gacggttccggctcttgtcacgtggagggggaccaagggaggtgattgtgggggttggggactagggcaaagtcgggggtcccgggtccggggttgcgccgggagggtactggccaggcc

SEQ ID NO: 957793 - DNA, 120 bp, Artificial Sequence
  ENSG00000260278_1 (sequence is synthesized)
cgacttcaagcagggaggtggcccgggactggctcccgcgctggtcacgcaccggggtccgtcatctcgaccgggagtcgctgtgccactctaggggcttaaaaatgccgccaacaactt

SEQ ID NO: 957794 - DNA, 120 bp, Artificial Sequence
  ENSG00000260278_2 (sequence is synthesized)
tacccctgctgaggaacttctcgcttcgtttcttagccagttttccaggccttctcccttgagagtctccttccgctcgcccaccctgagcgtaggaggtgggagcaggacggaactgga

SEQ ID NO: 957795 - DNA, 120 bp, Artificial Sequence
  ENSG00000260278_3 (sequence is synthesized)
gtggattccagtaactggacttctaaaccggctcggtgtcgtcgcgctctgtagcggacgcttgtgctgggaagcgttttgcagtttataaattacttaggagtactttaaacatctcac

SEQ ID NO: 957796 - DNA, 120 bp, Artificial Sequence
  ENSG00000260278_4 (sequence is synthesized)
gcctgctgtaccacagccatgtgggggtattcagaacaggtattaaggtcgttttgcagaccattcatcactcttggctaaaagaacttaacggagtcgcccaaggtcacacagctggct

SEQ ID NO: 957797 - DNA, 120 bp, Artificial Sequence
  ENSG00000260278_5 (sequence is synthesized)
cgtggtaattggggaccattctttgattcataattttgtgcttttggccaccctgaaaaagtaaggtcagatcgttgaaaaacgggcagatttaaggctgtttggaagcaaaagcgacca

SEQ ID NO: 957798 - DNA, 120 bp, Artificial Sequence
  ENSG00000260278_6 (sequence is synthesized)
ctgcgttcccctcaaatcaaagagatttgcaccccctaccaaaaaaaaaaaaaaaaaaaaaagccctgttgtatcaatttcataaactgcaggagtctcccgactgcagggtgaagcaac

SEQ ID NO: 957799 - DNA, 120 bp, Artificial Sequence
  ENSG00000260278_7 (sequence is synthesized)
aaaataaatatgggtgtaaaacattcaggagtggtagggaatggcaaactgtagagcctgtgtaaagagagcagccaattctcagctccagcctacttttccacaaaagaagataggcac

SEQ ID NO: 957800 - DNA, 120 bp, Artificial Sequence
  ENSG00000260278_8 (sequence is synthesized)
acacactgtgcccagaggttccagtttcttaagagaaccaaaaacctggaactgttttctaatgtggcatttccctaatttttaaaatatagatcaaataaattgtatctgcaggactcc

SEQ ID NO: 957801 - DNA, 120 bp, Artificial Sequence
  ENSG00000260278_9 (sequence is synthesized)
ccccacccctatttctttattctttttaatgagataacgggtagaaacattagaaaatgtgcttagacaaaaactttgaacttaaaatccttgttctttcttccctgctatttgaagaga

SEQ ID NO: 957802 - DNA, 120 bp, Artificial Sequence
  ENSG00000260278_10 (sequence is synthesized)
agctatttctgccaacactaaaatagtgctctggatttaggcatttctgctacataacccactaaactaaaattcttcatccagagacctgacgtttaaagtagattccagcttagtgga

SEQ ID NO: 957803 - DNA, 120 bp, Artificial Sequence
  ENSG00000260278_11 (sequence is synthesized)
agtgagattatatgtcagatgattgatgtggtgtggcagttggggatttccatttagaaacaagctgaccactttcgttgctgtggggcttcattgtggagtctcattcctaaatttgaa

SEQ ID NO: 957804 - DNA, 120 bp, Artificial Sequence
  ENSG00000260278_12 (sequence is synthesized)
ttgttttttaagcagaataatggaaagattaagtcatttcatgcaattcaaaactggagtcagacaaacatacaaagtttgggcctgatataacttcacctgatcacaacaagcctgcta

SEQ ID NO: 957805 - DNA, 86 bp, Artificial Sequence
  ENSG00000260278_13 (sequence is synthesized)
gggcctgatataacttcacctgatcacaacaagcctgctataataagtttcaaagttagtttacatggtcaacataacaagacctc

SEQ ID NO: 957806 - DNA, 120 bp, Artificial Sequence
  ENSG00000260278_14 (sequence is synthesized)
gaggctgaggcaggaggatcgcttgaaccaaggagttcaaggctgcagtgcgctatgatggcactggtgcactccaggctgggtgtctcttaaaaacaaacaaaagtttgaccagtcaaa

SEQ ID NO: 957807 - DNA, 88 bp, Artificial Sequence
  ENSG00000260278_15 (sequence is synthesized)
ggctgcagtgcgctatgatggcactggtgcactccaggctgggtgtctcttaaaaacaaacaaaagtttgaccagtcaaagtggcttg

SEQ ID NO: 957808 - DNA, 120 bp, Artificial Sequence
  ENSG00000260278_16 (sequence is synthesized)
aaaatacaaaaattagctgggcttggtggggtggcgcaggcctgtggtccctgctacttgggaagctgaggtgcgtggatcactggagccaaggaagtcgaggctgcagtgagccatgat

SEQ ID NO: 957809 - DNA, 120 bp, Artificial Sequence
  ENSG00000260278_17 (sequence is synthesized)
ccaaggaagtcgaggctgcagtgagccatgatagcatcagctgcactccagcctggacaacagaggaagacactgtctctaagtaaataaataagtcaatttacaattaatgtggtaaag

SEQ ID NO: 957810 - DNA, 120 bp, Artificial Sequence
  ENSG00000260278_18 (sequence is synthesized)
attacttgtatgtaccaatgtaacttgacttttgatattgaaatgtataattataataaatgtataattaaatgtgtaataatgtatagaccccctctgaaagacgagggtaacaccaag

SEQ ID NO: 957811 - DNA, 120 bp, Artificial Sequence
  ENSG00000260274_0 (sequence is synthesized)
ggaagctggagagcacagccacagggcagctggccccaaaaagcctgcgtgggacgggccggtgggcacatgctggaggccgccccgtttccgcctgggggccagctggccggtggggcc

SEQ ID NO: 957812 - DNA, 120 bp, Artificial Sequence
  ENSG00000260274_1 (sequence is synthesized)
gcactttccctggatcctccgccaagagggctgcctggccgctccgcggcacagtccattccctaccccctcctccccggcccctgccctgcccgcggcgggcactttgtcccgcggccc

SEQ ID NO: 957813 - DNA, 120 bp, Artificial Sequence
  ENSG00000260274_2 (sequence is synthesized)
gggtggctgcagcttaggtttctccccggaaggaaagcttgaggcgcacggttgcggtcggccggctgcgggggaccaggggccacacctgccgcggaggttacagtcggtaaagtagag

SEQ ID NO: 957814 - DNA, 120 bp, Artificial Sequence
  ENSG00000260274_3 (sequence is synthesized)
cggcgacacgaacttctccacccgctccagcgtggtgcgccagtgcttcaaggccggcgcagccgccatcgccgggctctcgctcctctttccggaaggcccctggcgctaccgttccgc

SEQ ID NO: 957815 - DNA, 120 bp, Artificial Sequence
  ENSG00000260274_4 (sequence is synthesized)
tccacggcaggaaaccaaaggttccggcgtccagagggcgcctcccagtcccgggcagcttttcttggaacaccggcggctctcggaagcccagctgctgtctgaactttgagccgagtt

SEQ ID NO: 957816 - DNA, 120 bp, Artificial Sequence
  ENSG00000260274_5 (sequence is synthesized)
caagacagagacttaggccattcggcaagacaggcgggagcctcagctgctgcagacccagcctcagaagcagcaaccgggagacctctggctctagctgtcggtgaacacggaaagtgg

SEQ ID NO: 957817 - DNA, 120 bp, Artificial Sequence
  ENSG00000260274_6 (sequence is synthesized)
tgtttgcttaacgtggagccagactacccggaataggtgttttcataccggacggagatcagggtgttagtgagcagggtggtagagctttacgcccaagttactacgacttactcgatt

SEQ ID NO: 957818 - DNA, 120 bp, Artificial Sequence
  ENSG00000260274_7 (sequence is synthesized)
acacgctttactgaatgtatattgctaactcttgcacatcaccagaaactctggagtttgaggtggcagaacagtcatggcattgacgatcccaatggaaaaatgtatttcaccatacag

SEQ ID NO: 957819 - DNA, 120 bp, Artificial Sequence
  ENSG00000260274_8 (sequence is synthesized)
gactgtagagtcccgggaagccataataccagaaacagacctccagtttcattctcatccctagtactccactgacagctttattttttttctcctggggttgccaagagtctttgtcta

SEQ ID NO: 957820 - DNA, 120 bp, Artificial Sequence
  ENSG00000260274_9 (sequence is synthesized)
taaaatcattaggaacaaaaaaaaatacacaagattagccctgatattttaatggaaatactgaccaagtttacaacatttcaaatgcagatcacacggaaaggtgactaagtacagaat

SEQ ID NO: 957821 - DNA, 120 bp, Artificial Sequence
  ENSG00000260274_10 (sequence is synthesized)
aacaaatgtgatttaaaacaaagataacctgctgctgcatataatacaggttgggtttagagcttggagctcagatgtcagacagcaggaggaataaaaatgctacttgtgaaaacccag

SEQ ID NO: 957822 - DNA, 120 bp, Artificial Sequence
  ENSG00000260277_0 (sequence is synthesized)
tacagcccttatcttggcagaattgatttggatggatcagagtgaatggagaccagttgaaggaagactggttcaatggctagagaatatgaatgttggtcttaagtccaaggcccacat

SEQ ID NO: 957823 - DNA, 120 bp, Artificial Sequence
  ENSG00000260277_1 (sequence is synthesized)
aaagtctgaggcctcgatttcctcacctggaaagtgaaaacactggacatgctctttgacatttcatccagcactgaaattttatagtcttgtgaaaaatctcttcttgaaatgttatct

SEQ ID NO: 957824 - DNA, 120 bp, Artificial Sequence
  ENSG00000260277_2 (sequence is synthesized)
tgggtggtcttagattgtgtgtgactggaactggggctgatttgtaaaacccttgaatgtgcttgaaaataccaacccacagtgttttcttctcctgggaaaagaaccaaaactcttaaa

SEQ ID NO: 957825 - DNA, 120 bp, Artificial Sequence
  ENSG00000260277_3 (sequence is synthesized)
actctattccagcaaagtcccaggctagtcacatgccatgctaatttctgaatctgtcaccatgactctgtccaagtctggcttctgtcgagctctgaagccagaacgtgaaattggccc

SEQ ID NO: 957826 - DNA, 120 bp, Artificial Sequence
  ENSG00000260277_4 (sequence is synthesized)
ttatagaaatctatatgaatgaatccatttcaatgtctggtctgcaagagtacgaagacttgacttcacatactacttgatgggatggtttaatcctgggttagagtgctgactggctag

SEQ ID NO: 957827 - DNA, 120 bp, Artificial Sequence
  ENSG00000260277_5 (sequence is synthesized)
agggagttttcccccatcagccctgtatgcactggacctccaagacaacaatgaaattaaagacaatttaatggtttgggtaatagatacaaataaaaccttaaattttgtaatcttaaa

SEQ ID NO: 957828 - DNA, 120 bp, Artificial Sequence
  ENSG00000260277_6 (sequence is synthesized)
gcaccactgcagctcggggcagggaaagggaaaaccttcctcaccccagggaagaagtcaccagctgtgttgttgataaccacttctcccaggtcactctgcttttctccacctcacaaa

SEQ ID NO: 957829 - DNA, 120 bp, Artificial Sequence
  ENSG00000260277_7 (sequence is synthesized)
aacctggaagcaggatttagacctcttttctaatttcagaacctctcagtcagcacagaactatggtttaggccagtacagccctggtgcgtgcctgtggccttcctgtggtaggaacag

SEQ ID NO: 957830 - DNA, 120 bp, Artificial Sequence
  ENSG00000260277_8 (sequence is synthesized)
aggagaggttccagagaactctgccacatgtgtcaaagcttcctttcttctaggatggcttgatcaggaggctcttcaggtgtggctgccagcagtaccaaacttttccttacaacttag

SEQ ID NO: 957831 - DNA, 120 bp, Artificial Sequence
  ENSG00000260277_9 (sequence is synthesized)
ggatggatggcttcaagacagcagagaacccacaagcttgaagaggcctccggagagttcactcaggataaacggggtgctggcatcgtcctggtcctctctgtacagtaacagtgttac

SEQ ID NO: 957832 - DNA, 120 bp, Artificial Sequence
  ENSG00000260277_10 (sequence is synthesized)
agccctgtgagttcagtagtaaaggatctggagtccatggggaaattctaaggagatcaatggaactgatatattatatagccaaatacttattaataaagtaaccatccttataaaggc

SEQ ID NO: 957833 - DNA, 120 bp, Artificial Sequence
  ENSG00000260276_0 (sequence is synthesized)
caatcatgtagttttggcggaaatttccccatcattctaggatgatacagaaagaaaaactgtgcctggaccctccctcttggtgggtctgtggaaacataagcggtttttttaatgggc

SEQ ID NO: 957834 - DNA, 120 bp, Artificial Sequence
  ENSG00000260276_1 (sequence is synthesized)
ccctgcatcaataccaaacatgggggtttggtaatgagaaaccaggacaggccatctgcagtgacccagcccaggacgaagtttacaaacacctcctggaacgaagctcccgcctgcatg

SEQ ID NO: 957835 - DNA, 120 bp, Artificial Sequence
  ENSG00000260276_2 (sequence is synthesized)
tcaccttgatgggggctgtgagtggggcagtgtgatacccagtgactagacgcactctgcgttttcccgtgtttggggctgaggcctgctggacagatggctggccaagtgggagcagac

SEQ ID NO: 957836 - DNA, 120 bp, Artificial Sequence
  ENSG00000260276_3 (sequence is synthesized)
cctagggagtttgcacctcggctgggccggattcggaccggctctgtgttcactacactcagaatagcctggctgcttctctgtctccgagaccggaggtagtgggaaccaacagctggg

SEQ ID NO: 957837 - DNA, 120 bp, Artificial Sequence
  ENSG00000260276_4 (sequence is synthesized)
ctggagagttggtgctggcaaaacagtccttgccctggggccggttcttacccaggtccagagaaaccaacgcgggatgtcagacttcaccaaaaggactttctggttgcccctggctgg

SEQ ID NO: 957838 - DNA, 120 bp, Artificial Sequence
  ENSG00000260276_5 (sequence is synthesized)
cttcctggaggcgttcgcctctagtttctcagggatggagcgagagcccagccagagaacagtaagaggagctgctctcctatctgcactcacccaggccttcacccagactttaccacg

SEQ ID NO: 957839 - DNA, 120 bp, Artificial Sequence
  ENSG00000260276_6 (sequence is synthesized)
gaggcggctgagtgcagctacagctaggtccgcgtccctcactcttttcatcttctgcacgttcttcgtgaaactggaaggatcccgggtctcagctagaacacggtggaagagaacttt

SEQ ID NO: 957840 - DNA, 120 bp, Artificial Sequence
  ENSG00000260276_7 (sequence is synthesized)
cctaggaaacggttcatgtgtcacttttcaggatgtggaaacactgagccatacaccctccattgcttggtgctggggttgtgtggcctccactgggcacttgccgacctgagtctgggg

SEQ ID NO: 957841 - DNA, 120 bp, Artificial Sequence
  ENSG00000260276_8 (sequence is synthesized)
ccaggggagcccaggctgccctgcactcctgcctcccagcccacagccaggtgctttcatcacagctaaacctggttccctccaaacctcccagccactcgggcttgtaactgtctgagc

SEQ ID NO: 957842 - DNA, 120 bp, Artificial Sequence
  ENSG00000260276_9 (sequence is synthesized)
cggtggggtgaaagcagccagctcatcccagtgactcacaggacacagccatccagcggcatctttccttgtcgaatgatactgtaatgaccttccaaagtgaagagtagcacattaaag

SEQ ID NO: 957843 - DNA, 120 bp, Artificial Sequence
  ENSG00000260276_10 (sequence is synthesized)
tgattttattgtttcctgtttctcattccgatttctttttcctcctatgttcccagattctggaatggaaccccagcccttccaggtctgagagccactctttctttactctggatttct

SEQ ID NO: 957844 - DNA, 120 bp, Artificial Sequence
  ENSG00000260276_11 (sequence is synthesized)
gtcacatcgggggcccctccctctgcggagttgcatgttgctgttcctgatgcacagactcctcccccgctgcttttctgcccactgggtcaggatctgccattctttacaagtttcctt

SEQ ID NO: 957845 - DNA, 120 bp, Artificial Sequence
  ENSG00000260276_12 (sequence is synthesized)
aacgtattgcgtcaaagcgagacaaccgagtcttactcaaacttgttttaaccggagatggagggttgctgctgtgtcaccgcctgcacagggctgccctcaggccagcttcctggggct

SEQ ID NO: 957846 - DNA, 120 bp, Artificial Sequence
  ENSG00000260276_13 (sequence is synthesized)
tactccaagggcatcggcttgccccgcactgtggtgggatgtaaagtgataacagctaaacgacgcatgcacaacatgtcctggtgccttctgcgtgaccccagagcagcaggttctgca

SEQ ID NO: 957847 - DNA, 68 bp, Artificial Sequence
  ENSG00000260276_14 (sequence is synthesized)
ctggtgccttctgcgtgaccccagagcagcaggttctgcacatggcagcctggagtgcaaactgcctc

SEQ ID NO: 957848 - DNA, 120 bp, Artificial Sequence
  ENSG00000260276_15 (sequence is synthesized)
gcccaggagatacttgagagggaccatgcccggctgaagccccgtctcgtgtggaagaatgtcatctccagtgtctgctgcctcctccctgcaaagtctcccacaagcacaggacaaggg

SEQ ID NO: 957849 - DNA, 120 bp, Artificial Sequence
  ENSG00000260276_16 (sequence is synthesized)
gtgcttccaccatctcctaggagctgatgacatgtccagaccaggtctcatgcttggtgcctggtgccagggaactgtggaacacgtcgcagagagctcaagcgccacgtttggatccct

SEQ ID NO: 957850 - DNA, 120 bp, Artificial Sequence
  ENSG00000260276_17 (sequence is synthesized)
gagcagctgtcacaagcctgcacccaggactggggggcctgctgcgagagcccaaagggaaagggagaatttccaaggctgcatccagctccatcaggcccagtgaatttccacacagcc

SEQ ID NO: 957851 - DNA, 120 bp, Artificial Sequence
  ENSG00000260276_18 (sequence is synthesized)
cgggtcaccacgctgttatgaaatcaaattccttctgtgacccctagtatgtaccggtaaatccagctggagggcgggaattccctagctgctgctgtgcttttgacaatttttcaagag

SEQ ID NO: 957852 - DNA, 120 bp, Artificial Sequence
  ENSG00000260276_19 (sequence is synthesized)
agcaagactctgtctcaaaaaagaaaacccaaagccagggagattttaatgccaaccacctagatccaaactcagccactccacggaccctccctgacgctgctgggagccagacaccac

SEQ ID NO: 957853 - DNA, 120 bp, Artificial Sequence
  ENSG00000260271_0 (sequence is synthesized)
agccatgagcctttttgaaataataatattgtcgacccccagttgtatgtgcccaaggagatggcaaacttgagaaacaagaataatcctttcagctggtttaaagctgagccctcactc

SEQ ID NO: 957854 - DNA, 120 bp, Artificial Sequence
  ENSG00000260271_1 (sequence is synthesized)
ttggaattaagaaactgacaaaggatgcaagttcttggtttaaggagccaatggtgtggttcccagggaccctcccaaatacacttccaatctgtttctggaggacctgacctgtaactc

SEQ ID NO: 957855 - DNA, 120 bp, Artificial Sequence
  ENSG00000260271_2 (sequence is synthesized)
ctgacaatatgttctgaatgctgaaggatggagatacactttggagtaagattcatatgaactttcataaattcttgggccaatggactcaagcccctcattcaaagaaaacaccagaag

SEQ ID NO: 957856 - DNA, 120 bp, Artificial Sequence
  ENSG00000260271_3 (sequence is synthesized)
agacttggtgttttgtgaaatggcacattccaaaatctctgtcactgagaaaaggatgtaagctcaggatcaaagcatcgtcttcaaagaagggagacaagggaggaatgtgttttgctg

SEQ ID NO: 957857 - DNA, 120 bp, Artificial Sequence
  ENSG00000260271_4 (sequence is synthesized)
ttttggatttcaagaaatgaaacagaaacaagagctggtttcttgataactttgttcttctacgctatggtctgtagaatgatacagtttctagtttaattggtctgtgacctgcagacc

SEQ ID NO: 957858 - DNA, 120 bp, Artificial Sequence
  ENSG00000260271_5 (sequence is synthesized)
catattggctcatcagaagagctaacacgaaattctggagagcattcttggcagctgggaaagaagctaccatatgcacatgttaagaggctcaaacttggccaggcacagtggctcacg

SEQ ID NO: 957859 - DNA, 120 bp, Artificial Sequence
  ENSG00000260271_6 (sequence is synthesized)
aataaaaaaaaagaaagaggctcaaacttgtcttttaaaaagtgaagtgccttgccttgtcctacaccgtggcctctccttggacacaaacaggcagggagtgtttaagataacagcatt

SEQ ID NO: 957860 - DNA, 120 bp, Artificial Sequence
  ENSG00000260271_7 (sequence is synthesized)
gcagagtgcaaacggcccccaaagtggagccagaggaacctatgagatcatttggaaaagcttgtgaattcactgccatttgcctacttggcttcggatgaaaagcaaatcttaaagctg

SEQ ID NO: 957861 - DNA, 120 bp, Artificial Sequence
  ENSG00000260271_8 (sequence is synthesized)
ctcaaaatgtgtctgattcatctgtaactgagaatgagaccaatcagggataagaagtgagtaaaatccttgtgatcacagagccaagagagcctattttaaagcacttaatgtattttt

SEQ ID NO: 957862 - DNA, 120 bp, Artificial Sequence
  ENSG00000260271_9 (sequence is synthesized)
actcttccagctttgaacataccaaagaaaattttaaaagaagaggggagaaaaaaggagaaaagtctgcatattggggagggtgtgcctgaattttaagataatcccacaaagccaaac

SEQ ID NO: 957863 - DNA, 120 bp, Artificial Sequence
  ENSG00000260271_10 (sequence is synthesized)
gagggagggagtcgacttgccaagtggatttttctaagcgttctcagccctaattaaaagtcctttgtgcaaggccaaccagcaatcagattcctaattagagttgagcaaactgccttg

SEQ ID NO: 957864 - DNA, 120 bp, Artificial Sequence
  ENSG00000260271_11 (sequence is synthesized)
gtgaactgtgggtttctctgaacccgggaatctgaggaaaaagtctgtctgtctcaaaggtgccattttctgaagcacaaacacacccaaatcctaaaaggcatgtctcacaagggcaat

SEQ ID NO: 957865 - DNA, 120 bp, Artificial Sequence
  ENSG00000260271_12 (sequence is synthesized)
gtcacaaccttaatactgttggtcgattactgtttttgccttgaaacggctccgcagcatcctatatattgcgttgttacgtctgttttgctgtttgttacggtattatgatgaaatggc

SEQ ID NO: 957866 - DNA, 120 bp, Artificial Sequence
  ENSG00000260271_13 (sequence is synthesized)
gccttattaaaaacctgtcttcaggatctggaattctgggacttgagatttaagtgtattaaatgccaggaattcatggtttatgtccagaaaaagaagaccattctgccattaactgga

SEQ ID NO: 957867 - DNA, 120 bp, Artificial Sequence
  ENSG00000260271_14 (sequence is synthesized)
tttcccctggagtcttgggaatcataatagtgtgtacacaagtgcttaccacatgcgaacacagctctaagaactctataaatacgaatgcattcacctctcacgaggatgccatgaggc

SEQ ID NO: 957868 - DNA, 120 bp, Artificial Sequence
  ENSG00000260271_15 (sequence is synthesized)
aggctctattatctcccctgtttcacagggaggaaactgaggcaaagagaagttaaggcggtatctcaaagtcacattagaaagtgataaagccaagattgacctgcagtcagtcacatt

SEQ ID NO: 957869 - DNA, 120 bp, Artificial Sequence
  ENSG00000260271_16 (sequence is synthesized)
ccagagcctctgctcttacctcccagcactggagccatggcgttggacccccggtccccgggcctcatgccccggtccccaagcctcatgccccgggtcagagcatccacacagcagtgc

SEQ ID NO: 957870 - DNA, 120 bp, Artificial Sequence
  ENSG00000260271_17 (sequence is synthesized)
agctgggagcatggctccatctcctatgtagcccctggatttcttcctgattactaggtagggttttccaagatccacatttcaaattgagaacttctgaaatgtaggccttcaataaag

SEQ ID NO: 957871 - DNA, 120 bp, Artificial Sequence
  ENSG00000260271_18 (sequence is synthesized)
gagtgagggaagatgactctaactccccttggcctcttagagcagagacatcagaaaaggccaccagtgaaaagaatgtaaggtcacatagcctgtaccatttcagggaggcattgtcta

SEQ ID NO: 957872 - DNA, 120 bp, Artificial Sequence
  ENSG00000260271_19 (sequence is synthesized)
acctggagattgactggggcagccctgaagaaacagttcaggattagagaaggttcaggtgcttagaatattcctgaaagtctgtcccagagcagcctgatacaggcacatgattgattc

SEQ ID NO: 957873 - DNA, 120 bp, Artificial Sequence
  ENSG00000260271_20 (sequence is synthesized)
atctccgggtagctgctctgtgttgtatgccacaaagaaatacagatgaaaatcctagcagatggacaaagaagaattgagcattcaggaaaagcttaaatggtgatcctcttgggatat

SEQ ID NO: 957874 - DNA, 120 bp, Artificial Sequence
  ENSG00000260271_21 (sequence is synthesized)
aagaagctggacacattgcgcattatagataggtgtgataaaaatcacagcatacacctgtgaactttgaattaaccaggaagctaatacacgttcttgcactgataaatttctgagcta

SEQ ID NO: 957875 - DNA, 120 bp, Artificial Sequence
  ENSG00000260271_22 (sequence is synthesized)
acccgctccccattcacaataactttacgggagccgggcagcgcacctccccggccgctggggcgcggtacgcccggcgactagcgccaccagtgaaaagaatgtaaggtcacatagcct

SEQ ID NO: 957876 - DNA, 120 bp, Artificial Sequence
  ENSG00000260271_23 (sequence is synthesized)
gacagtgaaggcaaacttccatcatgcttcttcctcatctttcaaagagtccaagacagggactcatatgcctgcactgttattctgagttagcctcttgctctcattgctggttaagct

SEQ ID NO: 957877 - DNA, 120 bp, Artificial Sequence
  ENSG00000260271_24 (sequence is synthesized)
ggagtccttagttctggctttgatagtgagctcatccttcatattcaacacattaccaagttcaaccatcaacatttacttccaccacagttcacttctgcccttctctatttccatacc

SEQ ID NO: 957878 - DNA, 120 bp, Artificial Sequence
  ENSG00000260271_25 (sequence is synthesized)
cctagtccagaagttctcaagctttagggtacatgataatcaactggaggagttgttaatatacctatctctggctctcatcctcagagtttctttcttaaaacttatttttagagacaa

SEQ ID NO: 957879 - DNA, 120 bp, Artificial Sequence
  ENSG00000260271_26 (sequence is synthesized)
ttttagagacaaggtctggctctgtctctaaaaataaggctagagtgcatttgcaagatcacggatcactgccaccttgacctcccagagtaaagcaatcctcctgtctcagcctcctga

SEQ ID NO: 957880 - DNA, 120 bp, Artificial Sequence
  ENSG00000260271_27 (sequence is synthesized)
tacaggtgccagccattgtgcctggtctctctcagagtttctgattcagtgggtctggggtagggcctgagaatttgcgtttataataagttgctggatgctgctgctgctggtccaggg

SEQ ID NO: 957881 - DNA, 120 bp, Artificial Sequence
  ENSG00000260271_28 (sequence is synthesized)
gccccactttgagaaccactttcttggtctgagccatcatcatcacttatttggactatcactttggcttcctaactaatctacttccacttttacctgcattctccttacagcagccag

SEQ ID NO: 957882 - DNA, 120 bp, Artificial Sequence
  ENSG00000260271_29 (sequence is synthesized)
aatgatctttcagaagtgtaaatcatatcatgtctttccctgattaaaacttttcagcggcttctgatcccctccttaacatggtctgtgaggccctgcaagacttagcttctgccagct

SEQ ID NO: 957883 - DNA, 120 bp, Artificial Sequence
  ENSG00000260271_30 (sequence is synthesized)
ccacaaacccacctcaccagcttcagctactctgccttctgttctcccacctctggaatgcttgaccttctaggggagactggctggccctttctcatccttgaagattaagctcagata

SEQ ID NO: 957884 - DNA, 120 bp, Artificial Sequence
  ENSG00000260271_31 (sequence is synthesized)
ttaccctcttctaaggcaatccttgaacacccagtctgaagtggcctcacccttgttttttcccttcattgtagttatcacaatattaattatcttatgtatttgttattctatttattg

SEQ ID NO: 957885 - DNA, 120 bp, Artificial Sequence
  ENSG00000260271_32 (sequence is synthesized)
ctgtctcttccactaagattgtaagttccttgagggcagggtccttgtcttctcagtcttcctagcaccttctatagtgtctggcacagcagtaagaactcaataaatatttggggaata

SEQ ID NO: 957886 - DNA, 120 bp, Artificial Sequence
  ENSG00000260271_33 (sequence is synthesized)
aatgtatctgtatttgcttgaaatggacaagtgatatggtttggctctgtgtctccaaccaaatgtcatgttgaattgtgattcccagtgttggaagagggacctgctgggaggtgattg

SEQ ID NO: 957887 - DNA, 120 bp, Artificial Sequence
  ENSG00000260271_34 (sequence is synthesized)
gatagtgagtgagttctcatgagatctgttggtttaaacacgtgtggcacttccctctttgtgctctctctctcactctctctctcttcctccctccctccctctcctctgccaccagat

SEQ ID NO: 957888 - DNA, 120 bp, Artificial Sequence
  ENSG00000260271_35 (sequence is synthesized)
tcttcctccctccctccctctcctctgccaccagatgacgacatacttgcttcctcttcacccttctgccgtaattgtaagttttttgaggcctcccaaccatgctttatgctttctgta

SEQ ID NO: 957889 - DNA, 77 bp, Artificial Sequence
  ENSG00000260271_36 (sequence is synthesized)
ataaattacccaacaaggttcacgtatttttcctgtaaggcccccaaagttctgcatacatcagtggatgcaaatag

SEQ ID NO: 957890 - DNA, 120 bp, Artificial Sequence
  ENSG00000260271_37 (sequence is synthesized)
aggcccccaaagttctgcatacatcagtggatgcaaatagatgctttgaggaggaatatcaccatctccagctgtcaggctgatcgagtctgattggcacccactaggatttcccttaca

SEQ ID NO: 957891 - DNA, 120 bp, Artificial Sequence
  ENSG00000260271_38 (sequence is synthesized)
catgtaacatgtgggctgctggaggcaaaggtaatgtttagtagacctcattcctcatatcagatccaaccttccttgtcatctcttctgactgtctttctgtttctgctggtttgctca

SEQ ID NO: 957892 - DNA, 120 bp, Artificial Sequence
  ENSG00000260271_39 (sequence is synthesized)
gagcctgtcactgcagcacctaatcaggccgatctctttagcactgacctagtctggtgttggacttctctccttgttatcaaaacatacctccctctttcctcagttcatgaagttgga

SEQ ID NO: 957893 - DNA, 120 bp, Artificial Sequence
  ENSG00000260271_40 (sequence is synthesized)
agacacttctctgctactgtgtggtgatgggggcgttagtggggtaaacagtttaactgttttaacttcattcgtggttaagaggtaccaggggccctctgataataaaacacagctaag

SEQ ID NO: 957894 - DNA, 120 bp, Artificial Sequence
  ENSG00000260271_41 (sequence is synthesized)
aaattttaaaatattatttgaatagtaaggttgtgaaatcatacaaagtgaaatttaaaagatcctgaaaaacaagttggaaaatagctttatattgatcagccgagagtttgacatttg

SEQ ID NO: 957895 - DNA, 120 bp, Artificial Sequence
  ENSG00000260271_42 (sequence is synthesized)
cctctttgacatggcatatactgatgcaataggaaacattgcattaccacacaaaaaaagtttatttacagacctcagagttgcattcagtaacattcttggccaagatcaaaacgtgga

SEQ ID NO: 957896 - DNA, 120 bp, Artificial Sequence
  ENSG00000260271_43 (sequence is synthesized)
acgttttttccattcagaaaagcagaatcacttagcctgagtcatgactgcccactttttcccatatggttgaaatactgtctgttggctgaggttgacaatttaaagactttgtggctg

SEQ ID NO: 957897 - DNA, 120 bp, Artificial Sequence
  ENSG00000260271_44 (sequence is synthesized)
attagttctaactatggtagcaattgagaaaggtaacgttaggtactattaagaaggagatatctggcttgttgaaaaatacaaatcaaacactgtagcaaatatttggtaagggagaaa

SEQ ID NO: 957898 - DNA, 120 bp, Artificial Sequence
  ENSG00000260271_45 (sequence is synthesized)
aaagctgaaataatgaaaactggctggcatccccagtacctctctccccatccaataatcacaaatccccctgattctttctttgtctggctcttagagttaacacattctatctgtttt

SEQ ID NO: 957899 - DNA, 120 bp, Artificial Sequence
  ENSG00000260271_46 (sequence is synthesized)
aaaagttcacaccctagtctggtgcctggcattgattcaagcttctctgcctcatggctattgatcagtcttcttagagcaacatttttatagccctcccttctgatcaagatttgtctc

SEQ ID NO: 957900 - DNA, 120 bp, Artificial Sequence
  ENSG00000260271_47 (sequence is synthesized)
tggggatagtaggcaaactcccactccctggtatggcatcaataaccctacatcacatgtggtttttaaaattgtagtaaaacatacataacagaaaagttaacattttaacaatttcta

SEQ ID NO: 957901 - DNA, 120 bp, Artificial Sequence
  ENSG00000260271_48 (sequence is synthesized)
agtctataattcagtggcattaagtacattcacaatattgtggaaccatcaccactattcatttccagaactttttcatcatgccaaacagaaactctgcactcattaaacaataactcc

SEQ ID NO: 957902 - DNA, 120 bp, Artificial Sequence
  ENSG00000260271_49 (sequence is synthesized)
ccattcctcctcctctatcccctggtaacctctattctttctgtgtctatggatttgcctatctaggtacctcatataaatgaaatcatacaatatttgtcattttgtgtctggcttatt

SEQ ID NO: 957903 - DNA, 87 bp, Artificial Sequence
  ENSG00000260271_50 (sequence is synthesized)
tgaaatcatacaatatttgtcattttgtgtctggcttattttaacttacgtactgtttttaaggttcattcatgtagcacatatcag

SEQ ID NO: 957904 - DNA, 89 bp, Artificial Sequence
  ENSG00000260271_51 (sequence is synthesized)
tcccacctcagccttccgagtagctgggaccacagggacaaccacgtacagatgaggtttcaccatgatgcccaggcagatcttgaact

SEQ ID NO: 957905 - DNA, 83 bp, Artificial Sequence
  ENSG00000260271_52 (sequence is synthesized)
taatttttgtatttttttttttttttacagatgaggtttcaccatgatgcccaggcagatcttgaacttctgggaggattaca

SEQ ID NO: 957906 - DNA, 120 bp, Artificial Sequence
  ENSG00000260271_53 (sequence is synthesized)
atttcattacttgtttaaagctgaataatataatattatattaataatattccattgtatataccacattttgattatccattaatctgtcaatgaacatctgggttgtttccacctttt

SEQ ID NO: 957907 - DNA, 120 bp, Artificial Sequence
  ENSG00000260271_54 (sequence is synthesized)
ggctgttgtgaatagtggtgctatgaacgttggtgtgcaagtatctgtttgaatctatcctttcaaatctttttgaaggggaattgctggatcatacagtaattttaacttttggagagg

SEQ ID NO: 957908 - DNA, 120 bp, Artificial Sequence
  ENSG00000260271_55 (sequence is synthesized)
cctgtcacatggttttgacatacctccacctttgttctcacttttcttttttgacgcctcttctcaaggtaggcagtttcctagcacagtccctgtgtggacccaagctgtatctccctg

SEQ ID NO: 957909 - DNA, 120 bp, Artificial Sequence
  ENSG00000260271_56 (sequence is synthesized)
caagctgaacacaaaatgcttctcctcttccccaccaccatgcccttctctaagtatcaactcaagctcttccccctactgataataaatcccagcacctgcaatctggaagtgaaaaag

SEQ ID NO: 957910 - DNA, 120 bp, Artificial Sequence
  ENSG00000260271_57 (sequence is synthesized)
taattacaacgatgtgcctcaagtctttgcttttttctcttaacaaagcaaatgacatcacattctaaaaacgctctttccttatcactctcagcttcttccatatggatggcaccagct

SEQ ID NO: 957911 - DNA, 120 bp, Artificial Sequence
  ENSG00000260271_58 (sequence is synthesized)
ccctaagaatcaatctttctctcttttcttgttaaattccaacctcttcagcctcaacactcagactttctgtctctctgccttgtccaccaggtaaatccttctttatatgatcaactt

SEQ ID NO: 957912 - DNA, 120 bp, Artificial Sequence
  ENSG00000260271_59 (sequence is synthesized)
accctcttaggttttcaaagtttttgcattgtttccccactatataaactgtgcacaattgaggacatctggctgctgacacaaaggaaagtcactctaaaagctagggacaggggctaa

SEQ ID NO: 957913 - DNA, 120 bp, Artificial Sequence
  ENSG00000260271_60 (sequence is synthesized)
attgtgaatgcttatgtattaataatttccccacttctatattcaccttggaaaagatcacgacttctttacattgtaagaatattttcaccagataaatctaagctatttgagggtaga

SEQ ID NO: 957914 - DNA, 120 bp, Artificial Sequence
  ENSG00000260271_61 (sequence is synthesized)
tttggggtctcttactgctttgcttagaacatctcattgtcaatagcacaaattccttgccctggcattccagactcctcatgcattcatctcgatcttcctttccagtattattccccc

SEQ ID NO: 957915 - DNA, 120 bp, Artificial Sequence
  ENSG00000260271_62 (sequence is synthesized)
taccatctctcatgccctttgtgccccaatgaataggaacaccaactatttccccaactgtccccgagttttcctgtcatcatttgctccttcttccatttatcctgtttaccctcttct

SEQ ID NO: 957916 - DNA, 120 bp, Artificial Sequence
  ENSG00000260271_63 (sequence is synthesized)
tgcacctgtccagtttctgcccatctctcaagttcaaagtcaaatgctgttgtttccataaaaatagttgttgtgaagattaaacaatgtgtgcaaaaagttagcatagtgactagtatt

SEQ ID NO: 957917 - DNA, 120 bp, Artificial Sequence
  ENSG00000260271_64 (sequence is synthesized)
tcctttctgcggctcttaggatgttgttgctgcccttaaaggccgtcgtgtgagtgccctgtcagaagaaagcttggtggtggttaggattttacagaaggccaccagtgaaaagaatgt

SEQ ID NO: 957918 - DNA, 120 bp, Artificial Sequence
  ENSG00000260271_65 (sequence is synthesized)
gattataccaagatgtaaaaataaagaacattgctattcttcattcccagaactgtggtgaaagcaacaatggcattcttgtctcacccagtgagagacaaagcaccccaaagccacagc

SEQ ID NO: 957919 - DNA, 120 bp, Artificial Sequence
  ENSG00000260271_66 (sequence is synthesized)
atccaacggagatgccacaaaaaaggatgcccacccttggcttagctcatctcatacataactcttcatttctcgatttttccagaaatgtacacatcctgagacagggaggaagtgctc

SEQ ID NO: 957920 - DNA, 120 bp, Artificial Sequence
  ENSG00000260273_0 (sequence is synthesized)
agcgccccgccaggctgtaattccgcgggcccacgtgacctccggggccgcgccttccggacgcaactccactggggcggaagttggttttgtgcggctctcaagaactaagtttgtgct

SEQ ID NO: 957921 - DNA, 120 bp, Artificial Sequence
  ENSG00000260273_1 (sequence is synthesized)
gtgctgcgggatccccagggagcttccttatatcttcggcaggaccccttctttttttcttgaagattgattttgctagaagttatcctgtgatgggactccctaggggaatggaggcac

SEQ ID NO: 957922 - DNA, 120 bp, Artificial Sequence
  ENSG00000260273_2 (sequence is synthesized)
cacgtggttaaggagtttgtgcgttgccgcccacatagtgtgggcagctgaggcgccgcccggatcagagccgcagggcgtctactctgtcactttcccaacctgacttttccggattgc

SEQ ID NO: 957923 - DNA, 120 bp, Artificial Sequence
  ENSG00000260273_3 (sequence is synthesized)
tctcaactccaccactgtagtcagagaatcaaaagcggtctgagttgcgaggtcattggggaggcccccacccccacattaccagtgaggaaactgagacttaaaaaagtgacctgacct

SEQ ID NO: 957924 - DNA, 120 bp, Artificial Sequence
  ENSG00000260273_4 (sequence is synthesized)
ggacacgggattgcctgacatcagagctggattcttaagttcctgttagtgttaaggcgctgctcagacttttagtaaaggtgagcgccatctactgccaagtctcacaaaatattcgca

SEQ ID NO: 957925 - DNA, 120 bp, Artificial Sequence
  ENSG00000260273_5 (sequence is synthesized)
aaatttgatacggttatcacatggtaaaaattagactttaaaagttgtatttaatgctgtgttttcagctgttgtacacttatgtaattttaattatgcaaagttatcctaataatatag

SEQ ID NO: 957926 - DNA, 120 bp, Artificial Sequence
  ENSG00000260273_6 (sequence is synthesized)
gaatattaattgctttcgtgaggtctgtcttgatgtgccacgatgacttttttgatgtgccaaaaaagatgactacatagtgcttttacctttttgctcaaatagaaagattttatttcc

SEQ ID NO: 957927 - DNA, 120 bp, Artificial Sequence
  ENSG00000227719_0 (sequence is synthesized)
tgaggcagccttagcaggttctggggagagaagaggaaacatgagcaaacgcaccttccaaatgtccacctctgccatgcgggatgcaggcaggtccaggtgggagtgtcagaaacatga

SEQ ID NO: 957928 - DNA, 120 bp, Artificial Sequence
  ENSG00000227719_1 (sequence is synthesized)
agaaaacgtctctgatgggtgatccttctagctgagagcagctaggaatgtgcttgccatctggctgaaaagagtctcaggaagtgttgggctgttgtcatttggactgcttgtctttgg

SEQ ID NO: 957929 - DNA, 120 bp, Artificial Sequence
  ENSG00000227719_2 (sequence is synthesized)
agtctaatattcaaaaccagagcatatcagatctagtgaagaagtcacatggacccaccagttgatggccacatccgtggttgcctccgaataaaaataagacatttctcccatgttcct

SEQ ID NO: 957930 - DNA, 120 bp, Artificial Sequence
  ENSG00000227719_3 (sequence is synthesized)
catactggaatacatttgaggagataggagatatgcatcatcgaacccaatccaaaaatatgaaaaatgaaggaaaaggttagattctgaaaagcaaataaactattgctatggataagg

SEQ ID NO: 957931 - DNA, 120 bp, Artificial Sequence
  ENSG00000227718_0 (sequence is synthesized)
agacctgattgaaaattcttgatctggccacataccctgtttacattgatgcagattcaactgggtgaaataactgtgaactgggcatgtgaagagaaagctgaaagccatgatctcaag

SEQ ID NO: 957932 - DNA, 120 bp, Artificial Sequence
  ENSG00000227718_1 (sequence is synthesized)
atggaaacttcagtatccagcaaagaaatggtgaaggcgttcgttatgtgggatatgctgttaccactgaacttgaagttatcaaagaagttctattcttaacccttaatctgctcagga

SEQ ID NO: 957933 - DNA, 120 bp, Artificial Sequence
  ENSG00000227718_2 (sequence is synthesized)
tgctgtaacaacaccataaactttcaaacaactctatttcctacggttctggaggctggaagtccacaatcaaagtgtcatgttgtcaggttgtggtgagggccctcttttgggtgtaga

SEQ ID NO: 957934 - DNA, 120 bp, Artificial Sequence
  ENSG00000227718_3 (sequence is synthesized)
ttgtctcccaaagactctacctccaaatattatcaatcacattaggggatagattttaacacatgattttggggggaacacattcagtccataacatttcttgagtcttcttctaggacc

SEQ ID NO: 957935 - DNA, 120 bp, Artificial Sequence
  ENSG00000227718_4 (sequence is synthesized)
cataggttattttaaaagtggcttgttcagttccaagtgtttgaagattttttttttctgttatctttaacttactgatttctagatagaccccattgtgctcagagaacactccttatg

SEQ ID NO: 957936 - DNA, 120 bp, Artificial Sequence
  ENSG00000227718_5 (sequence is synthesized)
tgatttcaattattttaaatttgttgagattttatgacttagtatgtcatctgtcttggtgtgtattctgtgggggggatggggggtgcttgaaaaacgggtattctgctattatagaat

SEQ ID NO: 957937 - DNA, 120 bp, Artificial Sequence
  ENSG00000227713_0 (sequence is synthesized)
gaccaccctaacatcttgcactgtctgggggctccccgggctcagcaacacccacctctgtggctgggagctgggctcagccacatccctgcaacttctccgggacaccgccatccagct

SEQ ID NO: 957938 - DNA, 120 bp, Artificial Sequence
  ENSG00000227713_1 (sequence is synthesized)
acgccaaggcctgacggcggctccatgtttcctgccaatggcggtgctattaatttgctgcatattcaatgagagtacagtgtttacttttgtaaacagagttcctggcccagaacaggt

SEQ ID NO: 957939 - DNA, 120 bp, Artificial Sequence
  ENSG00000227713_2 (sequence is synthesized)
tcaaaagaaagcaagagccaggcctcactcactaagctaaaaggaaatgtataaaacaaaccagaataaagtggaaggaatcactctacccaatttcaaaacattatattgctgcagcag

SEQ ID NO: 957940 - DNA, 120 bp, Artificial Sequence
  ENSG00000227713_3 (sequence is synthesized)
cccaatttcaaaacattatattgctgcagcagaaatcaaaattctgcagtacttgtggcaggatggacacataggtcaattggacatctataggtgaaaaaaaaaagaaagaaaaaaaag

SEQ ID NO: 957941 - DNA, 120 bp, Artificial Sequence
  ENSG00000227713_4 (sequence is synthesized)
acgccaaggcctgacggcggctccatgtttcctgccaatggcggtgctattaatttatacagaaagctcacatttgccatcactcccctttacgaatcgcttcaccctctgaccagatcc

SEQ ID NO: 957942 - DNA, 120 bp, Artificial Sequence
  ENSG00000227713_5 (sequence is synthesized)
cctcacagtcactttctagaactcattctggtgccagctatctttatggacagaaaactacattttgaaatcaaatcaagtgtgttctattttccatccaaataaatctggagcactttc

SEQ ID NO: 957943 - DNA, 120 bp, Artificial Sequence
  ENSG00000227713_6 (sequence is synthesized)
ttaatgaactggatctcctcaaaattaaacattttgctctgcaaaagcccatataaagaggattaaaagacaggatacagactgggggaaaatatatttgcaaagaacaaaaaaggagca

SEQ ID NO: 957944 - DNA, 120 bp, Artificial Sequence
  ENSG00000227713_7 (sequence is synthesized)
gaactttaacatagaaagaattctcacaactcagcagtttagaaaaatgcaatcagaaactgggaaaaaaagcattaacagacatttcactgaggaggatacacagatgccaaggagggt

SEQ ID NO: 957945 - DNA, 120 bp, Artificial Sequence
  ENSG00000227713_8 (sequence is synthesized)
gtggaaagatgccccaatcctcagcctgtaggagaatacagatcaaacgggcaataagctgtggccacacatctatcagagtggctaaaattaaaaacataaaatagtgacaacatagaa

SEQ ID NO: 957946 - DNA, 120 bp, Artificial Sequence
  ENSG00000227713_9 (sequence is synthesized)
cgctggtgaggatgcagagacactggagcactcagcaggtcgggggaggtgaagttgcagaaccacgctggaaagcatgaaataatgatacagcccagctagtgcatttgggagcatttg

SEQ ID NO: 957947 - DNA, 120 bp, Artificial Sequence
  ENSG00000227713_10 (sequence is synthesized)
ttctgaagaaatgaagactcaaatttccaaaaaagcctgtagaatctctgggaaaatgtcctaaggggcagaaaatgtacaatgtctttatctttgtatcatcaatacagagaccaatgc

SEQ ID NO: 957948 - DNA, 120 bp, Artificial Sequence
  ENSG00000227712_0 (sequence is synthesized)
ccacgatcgacctctttcgctgaagtcaggagtgacagcaattaactcctccgctgcaccgtccccagggccagatgccacgtgagagaccccaggctggagcgagaacctactttggga

SEQ ID NO: 957949 - DNA, 120 bp, Artificial Sequence
  ENSG00000227712_1 (sequence is synthesized)
ggattgaaagctacaaaggacgtttgggtgacctccccacaacacaaggtggggtggggggtttcaacccacactgccccatcttgaatcgccatggatgaccaagtagttgaaacacga

SEQ ID NO: 957950 - DNA, 120 bp, Artificial Sequence
  ENSG00000227712_2 (sequence is synthesized)
cgggggacttaggtgccagtccttctaggcagaagggccctcttgggagaagaaagtgttatttcctttttgtattttcacttgaaaaaaaactgagaagagtgtgactagtcgatgata

SEQ ID NO: 957951 - DNA, 120 bp, Artificial Sequence
  ENSG00000227712_3 (sequence is synthesized)
gcacttctgaggaagaggaacatggaagagacatttgttgagtacctattacatgccaggcaattcccatacatattttacttaatcttcacaaccgcccagagaaagagatctctttta

SEQ ID NO: 957952 - DNA, 120 bp, Artificial Sequence
  ENSG00000227712_4 (sequence is synthesized)
tccttattttatggacatgacaaaactgaatagaaggccctagtttacaaactccaggggctccgctccatttgctatcagctaagcagacttggagcgtggacccctatttctgcttct

SEQ ID NO: 957953 - DNA, 120 bp, Artificial Sequence
  ENSG00000227712_5 (sequence is synthesized)
cccgggacactgtaaatctctccatttgccatcagtctggagctgtgagcatgcagatgaaaggcgttgtggatctgtgaactaccgtagctctaccttcggaggaactgactttcagct

SEQ ID NO: 957954 - DNA, 120 bp, Artificial Sequence
  ENSG00000227712_6 (sequence is synthesized)
ttcagccacatgcatgagaggggctgattccatctgtcgacctgtcaggctgcctctcttttgggcttctttcttcccttcttggagtttctttaataaaacatttcactcccttgaaaa

SEQ ID NO: 957955 - DNA, 120 bp, Artificial Sequence
  ENSG00000227712_7 (sequence is synthesized)
cctccccctactgcttgtgcttcctttcgctttgaagttctgtggctccgcactggagttggggaggcaagtcctccagcctcgggcttttaatattcacatcacgtcctctttgcagct

SEQ ID NO: 957956 - DNA, 120 bp, Artificial Sequence
  ENSG00000227712_8 (sequence is synthesized)
gggctcccgcctgggaacagggaactgcaagagggcctgttcagtgctttggcctaactcgaagtggtgccgctaagagcagcagttcaaatcacagtcaaactctaaacttcactcgat

SEQ ID NO: 957957 - DNA, 120 bp, Artificial Sequence
  ENSG00000227712_9 (sequence is synthesized)
ggcttggcatctgtcccatatgagagcagctcaaaggtgactggtgtcctggtttccaccggtcatggtttgatgagcatttcttcgaagatgtgaactgcctaccccaacggcccagct

SEQ ID NO: 957958 - DNA, 120 bp, Artificial Sequence
  ENSG00000227712_10 (sequence is synthesized)
cttggcccaacagtctacaccacgctcaagattgtcaagaggtcattgtgcttgttggatggctagttaactctttactcaccacttcttccctgaccctcttcttgtaaatttctaaaa

SEQ ID NO: 957959 - DNA, 120 bp, Artificial Sequence
  ENSG00000227712_11 (sequence is synthesized)
ctagcaatacaagattcaaatctaaatcatcatacagaactgcatgttgggcagaataatggcctccaaagtatccatgtcctaatctccagaacctgtaaacatgttacctttcttggc

SEQ ID NO: 957960 - DNA, 120 bp, Artificial Sequence
  ENSG00000227712_12 (sequence is synthesized)
cctgaccttaaagtagagaaaccagcctggattatctaggtgggcccaatgtaattacaagtctcctttaaaggggaagagggaagcagtaaagatggtcagaggatgagatgtaagagg

SEQ ID NO: 957961 - DNA, 120 bp, Artificial Sequence
  ENSG00000227712_13 (sequence is synthesized)
gactcgacctgcccttgctgaaggaagggggccatgagccacagtagtgtcctctagaagctctaaaagtcaagaagagaattctcccctaaagccttctgaaaggaactctgccctgct

SEQ ID NO: 957962 - DNA, 120 bp, Artificial Sequence
  ENSG00000227712_14 (sequence is synthesized)
gatgcgtcagtcttagcccggtgagatgcatggtagactactaatggaactgtaaggtaatacatgtgtatcaatttatgataactgcttataataatttgttatagccacagtagaaaa

SEQ ID NO: 957963 - DNA, 120 bp, Artificial Sequence
  ENSG00000227712_15 (sequence is synthesized)
caaatatacacctagataggttgaacactccttggcctcaacactctgcttaatgtaagaagtactccttcccttagcacaatgtaacctagtggaatgcattcttcctcagggctgcta

SEQ ID NO: 957964 - DNA, 120 bp, Artificial Sequence
  ENSG00000227712_16 (sequence is synthesized)
gaggctggagcacacacatggctttctacaaaatttaggaaagtgagcaacgatggaaccctaattggagaaaatatgtaatcactcatcaagtcctcttggtactatctgagtagagag

SEQ ID NO: 957965 - DNA, 120 bp, Artificial Sequence
  ENSG00000227712_17 (sequence is synthesized)
aaagcacatgggctttggcatctagcagacattggttcaaatcctggctctgacatttaatgcctgtgtgatcttgagtgagttagcctcccagatgttcaatttcttaagggacacatc

SEQ ID NO: 957966 - DNA, 120 bp, Artificial Sequence
  ENSG00000227712_18 (sequence is synthesized)
acacctacctcatggggttgttgttgtaaagagtaaaagagtaaataaaataaggtgtataaagtacctatctcagagcctggggggcaagatagaaatccaataaatcatgttatcttc

SEQ ID NO: 957967 - DNA, 120 bp, Artificial Sequence
  ENSG00000227712_19 (sequence is synthesized)
aagggccctcttggagcttcttggatagcagtggcttcaatcaagtctgaattcaccggcatctttgggccccggacattgggcaatacggtaactttccagaagatgaactgagccaga

SEQ ID NO: 957968 - DNA, 120 bp, Artificial Sequence
  ENSG00000227712_20 (sequence is synthesized)
taattccaccccctactatatacctccagctcctacaacagaatctctgcttagcttggtaccatttcctctgagactcgactttctagagctttcctcatcgaaagcagggctcaaaaa

SEQ ID NO: 957969 - DNA, 120 bp, Artificial Sequence
  ENSG00000227712_21 (sequence is synthesized)
taaatttaaggatgggagaacataccaactttcatacaacaccaagtttagagtcttttaacttgagttccgggagctgccactggctcatcaaaacagggtaccggccaggtacagtgg

SEQ ID NO: 957970 - DNA, 83 bp, Artificial Sequence
  ENSG00000227716_0 (sequence is synthesized)
tacaactttctcatgtgctggatccttcctgccctggaatattggactccaagttcttcagttttgggactcacactggctct

SEQ ID NO: 957971 - DNA, 120 bp, Artificial Sequence
  ENSG00000227716_1 (sequence is synthesized)
cttgtgatcgtgtttcgtgcaacggatacaagcaatgaaatttcaacagaaatttcctggggtaggatgcagagttcttaggaaatcttctgttttcttataaaagtaagagcctgaagt

SEQ ID NO: 957972 - DNA, 120 bp, Artificial Sequence
  ENSG00000227716_2 (sequence is synthesized)
aggtgatgattcttatcacattttactgctttgaaatagaaaataaagcctgaagattcagtgggaaatttttcaaccatgaaatgatagacaatctgctaagtaaaatgatcacaaaag

SEQ ID NO: 957973 - DNA, 120 bp, Artificial Sequence
  ENSG00000227716_3 (sequence is synthesized)
aaaccattgaagtcctgggctgctatctcttgatttcttggtgtttgaggaaataaatacctctgttaaattcagtttatgtttactttttgtgtatgtttttgccttcaaacacatttt

SEQ ID NO: 957974 - DNA, 120 bp, Artificial Sequence
  ENSG00000227716_4 (sequence is synthesized)
taaagtattcaagagtgtatgagggctaaagctctatgaatcatcctgaaatcttaaggtttgcattcatgaatattatctgaggatgtgtggtatggtttggatttgtgttcccgctca

SEQ ID NO: 957975 - DNA, 77 bp, Artificial Sequence
  ENSG00000227716_5 (sequence is synthesized)
tgaggatgtgtggtatggtttggatttgtgttcccgctcaaatctcatgttaaattgtaatcccccaacttcccctt

SEQ ID NO: 957976 - DNA, 120 bp, Artificial Sequence
  ENSG00000238184_0 (sequence is synthesized)
ggaatccgcggccagggacccgcgcaggcccctccttagctgaggggcggccgggtactcgggtcccgacccgcgaccaccgcacccatcaccaccacagcgggaactgcccggcggccc

SEQ ID NO: 957977 - DNA, 120 bp, Artificial Sequence
  ENSG00000238184_1 (sequence is synthesized)
gcagaggtgggcccccgagcacagaggccccgaaactcggctcgcagccctcagccccaatgtcggggggcgcggtggccccgggcgaccccccaccccgctcctggagcccacaggtgg

SEQ ID NO: 957978 - DNA, 120 bp, Artificial Sequence
  ENSG00000238184_2 (sequence is synthesized)
ccaccccgctcctggagcccacaggtggccccacaacttcgcggcccgcgctgcgcccgcggggcctagcacgctgccgcgggacctgcccaacgtggagtgtgtgcctgccccctcccg

SEQ ID NO: 957979 - DNA, 120 bp, Artificial Sequence
  ENSG00000238184_3 (sequence is synthesized)
cccggcgcagcccttacccagaagacgaaattgaagacgaagagcaggaatatattcaagcaattatgagaacttatacaaaaaaagctataaactctactgagagacatgagaaaaaac

SEQ ID NO: 957980 - DNA, 120 bp, Artificial Sequence
  ENSG00000238184_4 (sequence is synthesized)
atgaatcagcggagagagaagctattttccttcatggaggaagaaacagtgtggtgaacacatggtatcgtctgttccgccatccacccctctgttgacctgccaaagtccacccagtca

SEQ ID NO: 957981 - DNA, 120 bp, Artificial Sequence
  ENSG00000238184_5 (sequence is synthesized)
ctacaccctctccagacccagcatctccgatggatgagcacatcaggtttggatatgccctctcttggtccagcaccctatgaatttaaacattgagttatctgtccccctatgctagat

SEQ ID NO: 957982 - DNA, 120 bp, Artificial Sequence
  ENSG00000238184_6 (sequence is synthesized)
ctcgccctttcctgtgcccgaggccagccacgacttgctgtcttgggaatgcacccagccaagatcagtcaagcagagcccagacacataagcaggaaaagctgactgttgtgcaccacg

SEQ ID NO: 957983 - DNA, 120 bp, Artificial Sequence
  ENSG00000238184_7 (sequence is synthesized)
gagactgtgtagatacgtgttaatttgcgtttcttcttatggcagcaccctccttcacagagcctgcttctgtattagtcaggacaggccaggctgtattgtggtagcagtcggaacccc

SEQ ID NO: 957984 - DNA, 120 bp, Artificial Sequence
  ENSG00000238184_8 (sequence is synthesized)
caaacccagctgctgccaagagagcaggcaccgggggcccgagtgatggggacttggtggagctggagcagcaaacttgctaaaatcactcctggtgacctggcaggctgaatacaagaa

SEQ ID NO: 957985 - DNA, 120 bp, Artificial Sequence
  ENSG00000238184_9 (sequence is synthesized)
ggctcagccaggagcataaggggcgaagtgggaaaacaccacattgcgagttttgtgttaggtcccgcaacacgagacggagaccagcttgagaaagaaggcccagcttacaagcagaga

SEQ ID NO: 957986 - DNA, 120 bp, Artificial Sequence
  ENSG00000238184_10 (sequence is synthesized)
tgaaagtgaacagagagatggatccagaaattcagagcaccgcaagggcagaaaaaccaactgctccaagagttaggattttaacaagctttgggagacaaaggcccaataaaatgcctg

SEQ ID NO: 957987 - DNA, 120 bp, Artificial Sequence
  ENSG00000238184_11 (sequence is synthesized)
acttggaccgatcaacagaagacaaagatgggattaaggcccattcaagtctgagagccttctgacagctgccattgagttgatggagaggaatgagagcaaatacatcctgaaacttca

SEQ ID NO: 957988 - DNA, 120 bp, Artificial Sequence
  ENSG00000238184_12 (sequence is synthesized)
ggcgcagcccttacccagaagacgaaattgaagacgaagagcaggtcagaactcggtcacatgaccctcatgcaaccacactaaccatagaggtgactgggaaatgcagtctttccattt

SEQ ID NO: 957989 - DNA, 120 bp, Artificial Sequence
  ENSG00000225785_0 (sequence is synthesized)
agcagatgcaggatccaagcgtcttgtacagtctgcagaattgtcccactgcaattcagttgaataagaaagaaggagaagctgtgaactgtaggtctaaggacttctcaaactttttca

SEQ ID NO: 957990 - DNA, 120 bp, Artificial Sequence
  ENSG00000225785_1 (sequence is synthesized)
gctgctggttccaaactacgctggattaaaaagaggcaaagaagcagaagataagcacagggttgcctgggatgaagtttgctcagccattaaaaggtgggaaagtctcctgctgctgtg

SEQ ID NO: 957991 - DNA, 120 bp, Artificial Sequence
  ENSG00000225785_2 (sequence is synthesized)
tatatgagagaaagccactgttaacgtcatgtgtcagctacccatcaattgaggcagaggaagcaattggttcatcaatgggttggtaagaagccctccaaaccttaattatctgagtgc

SEQ ID NO: 957992 - DNA, 120 bp, Artificial Sequence
  ENSG00000267535_0 (sequence is synthesized)
tcaggagcttataatttagtagacacataagccacaaacagaagccagctctgtgtcaggccccatgagaagtccgcaggtgcgatcttcaatttggaggaaaagctgactaacattgaa

SEQ ID NO: 957993 - DNA, 120 bp, Artificial Sequence
  ENSG00000267535_1 (sequence is synthesized)
actaacattgaacatcaacacagacttcatctgataagaaacattcatgatctactctctatgaagcctgctacctggagactacaggaaggatggctggggaggcctcaggaaacttac

SEQ ID NO: 957994 - DNA, 120 bp, Artificial Sequence
  ENSG00000267535_2 (sequence is synthesized)
actatcacgagaacagcaagggggaattctgcgccctgatccagtcacctcccaccaggctcctcctccaacagtggggattacaattcgacatgagatttgagtggggacacagatcca

SEQ ID NO: 957995 - DNA, 120 bp, Artificial Sequence
  ENSG00000267535_3 (sequence is synthesized)
cgacatgagatttgagtggggacacagatccaaaccatatcagtgtcattaaaaaaatagttgccctgctaacttttttaatcccctgtaactctaaataaaataatgatgtgaacataa

SEQ ID NO: 957996 - DNA, 120 bp, Artificial Sequence
  ENSG00000267535_4 (sequence is synthesized)
cgtgatctcagctcactgcaacctccccgctatgctggggagtcttagggttagctcagggctatggctgaaatgtttgccttctgcccctgccaagttcatatgttgaaacctcaactg

SEQ ID NO: 957997 - DNA, 120 bp, Artificial Sequence
  ENSG00000267535_5 (sequence is synthesized)
aaacctcaactggtgtgacggtatttgaatatggggccttggggaggtaattaggtcaaaagggtggagcccgtgtagatggatgaaagcccctataaaaagacaagagagagcttgctt

SEQ ID NO: 957998 - DNA, 120 bp, Artificial Sequence
  ENSG00000267535_6 (sequence is synthesized)
ccgctccgctctccaccagtaaggatacaacaaggagaggccgcctacaagccaggaagacaatcgttcagtagccttcagatccgccaacaccttgatcctgggcttgcggctgccaga

SEQ ID NO: 957999 - DNA, 120 bp, Artificial Sequence
  ENSG00000267535_7 (sequence is synthesized)
cctgtgagaaagcgatgcccattgtttaagcccctggtctttgatctgttaccgcagcgcgagctgaccacgcactcagtgtgaggcgatgacctttttctcaaccatgcgcaagtggta

SEQ ID NO: 958000 - DNA, 120 bp, Artificial Sequence
  ENSG00000267535_8 (sequence is synthesized)
ggaaaccaaggaggggccttttggaagagaatgatgctgagcatccgggtccctggacagccagcagccctgaggcagacagaagtttggacaactcaggacagggagcttggagggcag

SEQ ID NO: 958001 - DNA, 120 bp, Artificial Sequence
  ENSG00000267535_9 (sequence is synthesized)
cccctacatgtcggagtggtccctacctgtgttgcctcaactcttccttcaaggcaagagccgctaaggacagtcaggacatcctaccgcccaaggctgttgagctcggccggccaagga

SEQ ID NO: 958002 - DNA, 120 bp, Artificial Sequence
  ENSG00000267535_10 (sequence is synthesized)
ggagcttataatttagtagacacataagccacaaacagaagccagctctgtgtcaggccccatgagaagtccgcaggtgcgatcttcaatttggagactacaggaaggatggctggggag

SEQ ID NO: 958003 - DNA, 120 bp, Artificial Sequence
  ENSG00000242861_0 (sequence is synthesized)
agtccctccccagcccagcagtccctccaggctacatccaggagacttaaacaggcacaatcaaaaccatctcagtcagaagtcagagcgtggtacctgggagagaaccccgaggggcat

SEQ ID NO: 958004 - DNA, 120 bp, Artificial Sequence
  ENSG00000242861_1 (sequence is synthesized)
gaggttatatgagattgtctttaatgttttgtactttttgcatttttaagctttttgacaacatgtattttataatcagagaaaaatgctgacttttataaagtgccattattatgatta

SEQ ID NO: 958005 - DNA, 120 bp, Artificial Sequence
  ENSG00000282996_0 (sequence is synthesized)
ctgcccgcccggttcgctcgcccttggttcccactcccaggtggctgcagactggagtgtgtttcatggacgagcaacctccctgaggagaaccccggatacgcaggttcattcgccaga

SEQ ID NO: 958006 - DNA, 120 bp, Artificial Sequence
  ENSG00000282996_1 (sequence is synthesized)
tgcgagttttcttaagccgctgcgattctctgatttcagtatgaacttgagtcaccagtaaaatgagcattcattcattaagccaatcatcaggaatggatctaggaagaacctactgtt

SEQ ID NO: 958007 - DNA, 120 bp, Artificial Sequence
  ENSG00000282996_2 (sequence is synthesized)
tactagaaataggttagatctgtggatataacaatgaataagacaagactggtggatctatagagaaactattactgcacaggtgatggggaaatcaagagtactatggggccaaggaga

SEQ ID NO: 958008 - DNA, 120 bp, Artificial Sequence
  ENSG00000282996_3 (sequence is synthesized)
tcctgcagcaaatgaggaataagctgaaacatcagtaggagccatcccagagaaaagggacagggttctagatccagagaacaacagaagagcattcagcgcctgcaagggagcagggga

SEQ ID NO: 958009 - DNA, 120 bp, Artificial Sequence
  ENSG00000282996_4 (sequence is synthesized)
tctaatgcaaagccattgcataaccagtcaactttccccacatcacaagattgcctagcctggatggccccagaatgttgaaacaaatgtctaattagtaacgacattctgaatgcttgg

SEQ ID NO: 958010 - DNA, 120 bp, Artificial Sequence
  ENSG00000282996_5 (sequence is synthesized)
gagctgagcaaaatatgaggagaagcaacctgatttttgtttcatattatcatctcctttattccagcaacaaaagacactgaaaatagtaaatgcccactttcaaccatgacagccctt

SEQ ID NO: 958011 - DNA, 120 bp, Artificial Sequence
  ENSG00000282996_6 (sequence is synthesized)
ttaggatagtaacggcattccgtatgaggacatctgtccccacccctggatgaaaacttgggtgatcccgaaatttttctgattgctcacaggtaataaaaatcatttggtcagtttaaa

SEQ ID NO: 958012 - DNA, 120 bp, Artificial Sequence
  ENSG00000282997_0 (sequence is synthesized)
ttaattaaacttcgagcacagtcttttaatcatatcaattcacctaatgatctatcatcaagcctacattgtcttatctattccaaaaaatacagtgagttgctttgtcttgcctaaatt

SEQ ID NO: 958013 - DNA, 120 bp, Artificial Sequence
  ENSG00000282997_1 (sequence is synthesized)
ctgatgcatagggccctgcctgtaggattttactgagatcaccagagcaacagaacagggtacttagcctacttcagctcactactttcattgttaattacacaaaagtcctttgttaca

SEQ ID NO: 958014 - DNA, 120 bp, Artificial Sequence
  ENSG00000282997_2 (sequence is synthesized)
atctgttatagaattttgtctggcatcaaccctgatccccattttagcaactatcttccttataattaaaacaacgacaacaacaaaaatgaggctactatgttctgaaatttatttaat

SEQ ID NO: 958015 - DNA, 120 bp, Artificial Sequence
  ENSG00000282997_3 (sequence is synthesized)
aatttatttaattccagtggaacttcagatttatgcatttatttacttgtttgcttgtttgtttagttgacaatgtttttacctgcaaacttacctttttttattttttattttttattt

SEQ ID NO: 958016 - DNA, 120 bp, Artificial Sequence
  ENSG00000282997_4 (sequence is synthesized)
acaggagtgagccaccatgcccggcctgaaacttatcttcttttaaatgacttgactgactttgcaatttccttatccatttcgaattttgtaaaattattttttattattgactggcta

SEQ ID NO: 958017 - DNA, 120 bp, Artificial Sequence
  ENSG00000282997_5 (sequence is synthesized)
actggctatcttctgaagtctggagattgttcttctagaccaaactagaaaaggtaaaaaagtaagagttaactttggggctgagattgaaatatgcttctaacacttacaggcagcaag

SEQ ID NO: 958018 - DNA, 120 bp, Artificial Sequence
  ENSG00000282997_6 (sequence is synthesized)
actgtggtaaaatttaaatttgattcttgtaaagcactcaaaataatgcctcgaatatagtaaacattcaaaactattagataatttttttagtaacaacattagatactaaactcatgt

SEQ ID NO: 958019 - DNA, 120 bp, Artificial Sequence
  ENSG00000282997_7 (sequence is synthesized)
tgtttctctaaacaacttaaaatcaattttattggtattatcatttttatacaagttagctcatttgaaattataaatcagtcagtaagatcatatacatctgggccactggtatatatt

SEQ ID NO: 958020 - DNA, 120 bp, Artificial Sequence
  ENSG00000282997_8 (sequence is synthesized)
taagttttatcatgcataaaattctcaacttcttctacagtttctggtgcaataaggcattttaggtctctggttgcaagacagacactgacctttgtggtgaagaacctaggttccatg

SEQ ID NO: 958021 - DNA, 120 bp, Artificial Sequence
  ENSG00000282997_9 (sequence is synthesized)
tgagactgatgggctctaccacctgctagaggcttgctcttagacaagtgcattactattcagatggaattatgggcagttccctctttgggttgtggcacttgaagcctttttaatccc

SEQ ID NO: 958022 - DNA, 120 bp, Artificial Sequence
  ENSG00000282997_10 (sequence is synthesized)
aaatgttttattacatttacagactcaggggcaaaaggtaagaattccatttattctcctttagatctttcattgtttttttgaggacaaggaagaaaatcttcacatccctgagctcta

SEQ ID NO: 958023 - DNA, 120 bp, Artificial Sequence
  ENSG00000282997_11 (sequence is synthesized)
gatattgatgtggtttatgtgtctgtgtagtctaatgcttgctggtctatttggaggctgctctccacgttctcacttttccctgcaggaaagtgttagatcagttatctccactaggac

SEQ ID NO: 958024 - DNA, 120 bp, Artificial Sequence
  ENSG00000282997_12 (sequence is synthesized)
tccaacagggttcaaggtctggttgcaaacatcttctctctagcccaggctatagctaagacttaagggcaaggtggccatattctagttgctacaatgcaagagaatctatttgtgcag

SEQ ID NO: 958025 - DNA, 120 bp, Artificial Sequence
  ENSG00000282997_13 (sequence is synthesized)
aacagaacatactcataaggcacaaagaaacctattacattatagtcatcagatatagtagaatgagacttttataaatatttatttctgcaaatcctacagaagtaagtttttaaaagc

SEQ ID NO: 958026 - DNA, 120 bp, Artificial Sequence
  ENSG00000282998_0 (sequence is synthesized)
atatgaattatgttttttacagagtcatgcacacctcttgaatttcttctcagctttcctgccatccgtgtgattttgaacgaggactcttaagaatacgagggaatacaggcctgaaaa

SEQ ID NO: 958027 - DNA, 120 bp, Artificial Sequence
  ENSG00000282998_1 (sequence is synthesized)
tggatctgagaatggagatgaggggcagaggaggtgctgcggtgaggtgggactggaactgctgcaactgtcctgctgccagcctgaggatgaatatcacatagagtagagcgtctcagg

SEQ ID NO: 958028 - DNA, 120 bp, Artificial Sequence
  ENSG00000282998_2 (sequence is synthesized)
ggatggagacagagccactggattgccttccaagacctgtttgattagactgggcctccctgaagacaccaagccattctcctatgttcatctagatgctttatgcctttgcctttcaca

SEQ ID NO: 958029 - DNA, 120 bp, Artificial Sequence
  ENSG00000282998_3 (sequence is synthesized)
taatcctaaattactcttcatatggtatgaggtagaggtcaagttatatttatttcacatatgagtaaccatgtaactaagcaccatttacggaaaagaccattctttcttccctgaatt

SEQ ID NO: 958030 - DNA, 120 bp, Artificial Sequence
  ENSG00000282998_4 (sequence is synthesized)
gtaatggcatatttgctatgtatcagatgactgtggacatgtgagtatatctttgaactctttattctgttcctttggtctatttgtctaacctcttgccaatatcacatcaactctagg

SEQ ID NO: 958031 - DNA, 120 bp, Artificial Sequence
  ENSG00000282998_5 (sequence is synthesized)
accaaagatggaataactgtacagtgatttctgaccataatactttccttggttacaagaactaacatgtttcatgctaagcattataattagtctaacccatgtgaaagtgatcttata

SEQ ID NO: 958032 - DNA, 120 bp, Artificial Sequence
  ENSG00000282998_6 (sequence is synthesized)
catcaatatttacattccaagtttcttgagaaaagcatttcttctgcctgttttgtagtaggccatcccatacctaatagatattcaatgatcgattacctcaaactaggaagtttccca

SEQ ID NO: 958033 - DNA, 83 bp, Artificial Sequence
  ENSG00000282998_7 (sequence is synthesized)
ataacttctttcttttagcaaagagtcatgcacacctcttgaatttcttctcagctttcctgccatccgtgtgattttgaacg

SEQ ID NO: 958034 - DNA, 120 bp, Artificial Sequence
  ENSG00000282998_8 (sequence is synthesized)
tttcttctcagctttcctgccatccgtgtgattttgaacgaggactcttaagaatacgaggtgggactggaactgctgcaactgtcctgctgccagcctgaggatgaatatcacatagag

SEQ ID NO: 958035 - DNA, 120 bp, Artificial Sequence
  ENSG00000282998_9 (sequence is synthesized)
tagagcgtctcaggggatggagacagagccactggattgccttccaaatgtagtttggtctgacatttgcaggaaggagaggaggcacagaagcaaatgttgcccttcaccattccctga

SEQ ID NO: 958036 - DNA, 120 bp, Artificial Sequence
  ENSG00000282998_10 (sequence is synthesized)
gccatctatgccaaatggcctagagcacgcaagacagaaaatctaagacaaccaaacaaaccattttccttcagaaagggaagtggatccaaatagtgtcttctgccctctaatgaccta

SEQ ID NO: 958037 - DNA, 120 bp, Artificial Sequence
  ENSG00000282998_11 (sequence is synthesized)
ccaatgaggaagtgaggcactcagtccaatagctcataagtaactgaatcctgccagcaactacagccccagccaataccttgattgcagccttgaaagaaacccagagaaagaatggac

SEQ ID NO: 958038 - DNA, 120 bp, Artificial Sequence
  ENSG00000282998_12 (sequence is synthesized)
ccaactagaccatgctgtacttctgacccacagaaactgttttctagccatgaagaaataaagatagtagcaatatttgtggtagccagaatggtactccaaagaagtccatggccaact

SEQ ID NO: 958039 - DNA, 120 bp, Artificial Sequence
  ENSG00000282998_13 (sequence is synthesized)
cctggaattggaatatgtaagtttacagatataattaaggttactaaccttaaaatagagagattttcctgtattatctggacggccaaatctaatcacaggagtccttaaaagcagaga

SEQ ID NO: 958040 - DNA, 120 bp, Artificial Sequence
  ENSG00000282998_14 (sequence is synthesized)
atgccctccagctggaggcaagaggaaggtggaataagaagtcacagaggttcgaatcaggagagagactcaacctgccatgtttagaactccttggaaagcatgaaaagaatgcaggtg

SEQ ID NO: 958041 - DNA, 120 bp, Artificial Sequence
  ENSG00000282998_15 (sequence is synthesized)
gcttctaggagcaaataccagtccttggctgacaaccagtaaggtaacaaagacctgagttctacaactgcaagaaactgaattcaagaattaaactgaatgagcttggaagcagatttc

SEQ ID NO: 958042 - DNA, 120 bp, Artificial Sequence
  ENSG00000282998_16 (sequence is synthesized)
tcctcagaggtgccaataaggaatactgctctgccaacacctggagttaggctttgttaaactttagcaaaagatccagtcatgcccactcaggcatctgaccaacagaaattgtggtac

SEQ ID NO: 958043 - DNA, 120 bp, Artificial Sequence
  ENSG00000279685_0 (sequence is synthesized)
gaggtgccatcttttttcggcgtgtcacgtctttacggtgccatgccaaaccgggtggccgggcttcataggacagggcggggcctggcattaaagggagggggacaatcagcgctgaaa

SEQ ID NO: 958044 - DNA, 120 bp, Artificial Sequence
  ENSG00000279685_1 (sequence is synthesized)
tcttggcgttttgctgctgcgggcgtgagcactgggggcgttcgcccagcaccttcttcgggggctctttgctttgtctgtagaggttacgtgatctgcgctcccagccctggtttctgg

SEQ ID NO: 958045 - DNA, 120 bp, Artificial Sequence
  ENSG00000279685_2 (sequence is synthesized)
cttttattctgagggtgttcagtcaacctcccccctacgcccatgcgcctctctttcctttttcgctcctcatttccgagcccattgttggatctcgaggcttgctgggttcgatgaact

SEQ ID NO: 958046 - DNA, 120 bp, Artificial Sequence
  ENSG00000279685_3 (sequence is synthesized)
cgagtcaaccccccgacccccggcacgcatggaacgggcgtgaccgcgcgcagcctcgtctcggagtctgccggcgccgggaagcttctgaagggatgggattcgagtctccgtgcgcgc

SEQ ID NO: 958047 - DNA, 120 bp, Artificial Sequence
  ENSG00000279685_4 (sequence is synthesized)
tgcgggcggcggcagagggatctcgcccctccctacaccccaagtgtcctgagggccacgccacaccaggttgcccagcgagggacgctggctacccatccggggatgggtggggagccc

SEQ ID NO: 958048 - DNA, 120 bp, Artificial Sequence
  ENSG00000279685_5 (sequence is synthesized)
tggcggggcctctccggctttacgccctgttgcttcgcctggccggagaatgtgaggaaggggcataaggttactggtgcttcggccacacccatctttctgagcccactggactgggcg

SEQ ID NO: 958049 - DNA, 120 bp, Artificial Sequence
  ENSG00000279685_6 (sequence is synthesized)
cagaggggggattgccatggaaaccacaggtgtccggagaggggatcttggggctggcctcaccccttccctgcggagattggggaccctggggtagggggagccgcgcccagtcggcct

SEQ ID NO: 958050 - DNA, 120 bp, Artificial Sequence
  ENSG00000279685_7 (sequence is synthesized)
cctggaggacacgggaggaagccccgaacccccgcgcctgaggctgtttctgattggcccctggaggccgcagacacgcagataggcggccctgggtgtatttttattaatattatgtcc

SEQ ID NO: 958051 - DNA, 120 bp, Artificial Sequence
  ENSG00000279685_8 (sequence is synthesized)
gtactgattaatattatttatcttaaataaatttcacccgtgtccaagttcaccgcgcccccaaaaccgagtctggggcggcagggggaactcctggccaacgaatccatgcctcgccct

SEQ ID NO: 958052 - DNA, 120 bp, Artificial Sequence
  ENSG00000279685_9 (sequence is synthesized)
cctgtgatgaacctggtacgcacggttttctggttaattctatcgctgaaaactggtgcggggggcgcacttctgagacggaagagcatctaggagctgaatcctccacgcgggtcgccc

SEQ ID NO: 958053 - DNA, 120 bp, Artificial Sequence
  ENSG00000279685_10 (sequence is synthesized)
aggttgatctgaatttctggggaatggcttggctgcccgcccgggaccaggccgaccctccttgacggtggcgtagagggctggagcctgggtactgcgaggctcctcgcatggctgggc

SEQ ID NO: 958054 - DNA, 120 bp, Artificial Sequence
  ENSG00000279685_11 (sequence is synthesized)
ccgccgcgaggggttgcagagcggctcagggatcgattcaagcatcgtctctcctccctcgcccccagacagagctgggcgcggggttccccttccagatggagcgagggtctcggggtg

SEQ ID NO: 958055 - DNA, 120 bp, Artificial Sequence
  ENSG00000279685_12 (sequence is synthesized)
gcccgcggccacggctacgtattgccatctcgcgagcagagatgtcacctcctgcctttggaggaaagggagcccggtggggatgagcgcatttagcccaatgctgggaacaaagcgcac

SEQ ID NO: 958056 - DNA, 120 bp, Artificial Sequence
  ENSG00000279685_13 (sequence is synthesized)
tccgcgcttctgcgatttcgctccattttgaaatgtgttggcgctttggtggggccgctgcggtgggcaaggccgggggcgctgttaatggaggaacctcagggggacggtccttcgtag

SEQ ID NO: 958057 - DNA, 120 bp, Artificial Sequence
  ENSG00000279685_14 (sequence is synthesized)
gaaactctatcctggctctgcgcgcgctttaaggaaatggcttccctccaggacctcgagggatgcagcttttgcgcggatgacggtggggtgctgaaccagccggtgcgcctctggaaa

SEQ ID NO: 958058 - DNA, 120 bp, Artificial Sequence
  ENSG00000279685_15 (sequence is synthesized)
tgtctgggcacggatcctggggccatcgacgactcctccccattcccagcaggcgggagctcttacattccgagcgagtgacccctctcaccctctggcgctcacacacctgtaactcca

SEQ ID NO: 958059 - DNA, 120 bp, Artificial Sequence
  ENSG00000279685_16 (sequence is synthesized)
aacctccgtctcagaatggtccaggctggaagggatgatgggggctccgacagcgactgcctagctcacccctctgcgtgctcaggctccaggctcagcaggaccaatttgagttctatc

SEQ ID NO: 958060 - DNA, 120 bp, Artificial Sequence
  ENSG00000279685_17 (sequence is synthesized)
tgatccccctcggccccttaactgacccatcctacaggagacagggaaatgtctttcctaccgcggttgattctggggtgtcattttgtgttttgtgatggctgcttatatttactgtat

SEQ ID NO: 958061 - DNA, 120 bp, Artificial Sequence
  ENSG00000279685_18 (sequence is synthesized)
aagcattgtatttactgtataagcattgtattataattactgtataagctgcttatatttactgtataagcatctccaaatcctccctctacgtaaacaaattaatggataaacagataa

SEQ ID NO: 958062 - DNA, 120 bp, Artificial Sequence
  ENSG00000279685_19 (sequence is synthesized)
gtgtatcccctgcccccacccctgctacgcaggtccggagtgactcttgaagctcatacattccttggccaagtttgcttctctaacagatgtttatatagcaataacctggcttggctc

SEQ ID NO: 958063 - DNA, 120 bp, Artificial Sequence
  ENSG00000279685_20 (sequence is synthesized)
ttgggttcacctttggacgatttggggaaggggcttgttggctttgctgggttttggatgagtgacagtccatgactgttcctgctggaagggcgtgacttttaagtggtttctaatatc

SEQ ID NO: 958064 - DNA, 120 bp, Artificial Sequence
  ENSG00000279685_21 (sequence is synthesized)
aggcattgctcctccgacaggaacaaaagaaatggatactgcccataaattgttagaaaacttagaatcgctttgattgaggaaaggttagatttattccggttggaaaaagtggccttt

SEQ ID NO: 958065 - DNA, 120 bp, Artificial Sequence
  ENSG00000279685_22 (sequence is synthesized)
ctattaaacgtgccctttgaccctcatgcccttggaggtcggtgccagcctggagatgggataagattgtggttttccttctgcctttttaacatctgttgttacagtccatttgttgaa

SEQ ID NO: 958066 - DNA, 120 bp, Artificial Sequence
  ENSG00000279685_23 (sequence is synthesized)
aatttaaagaaactgttttattccactttccctcagcatttatgtgtgtggtttcagtagctctgtggctatatgtacgaacacgtgttatttttccaattggacatgtgataattttcc

SEQ ID NO: 958067 - DNA, 120 bp, Artificial Sequence
  ENSG00000279685_24 (sequence is synthesized)
aactggaccttgccttctattgatgtatttatttagcatcttccttactccctccttgaaaaagaatcactcaaaaacaaataaaaacagccgtaggggcctaatacagtgctagacata

SEQ ID NO: 958068 - DNA, 120 bp, Artificial Sequence
  ENSG00000245482_0 (sequence is synthesized)
tttttgcgaagggcagtagtcagaaaagaaaggaactgatcttggacttgaagaaacagccccagaggtgaaagagatagtcgttaacctgcacagcctctttccagcctcttcacagat

SEQ ID NO: 958069 - DNA, 120 bp, Artificial Sequence
  ENSG00000245482_1 (sequence is synthesized)
aacaagggctttcggaacaagaaacttgtatattctgtgcagctcaaataaaattaagaagctgaacatcagttgacaaagagtaaaaaataactgggagttgacgggaaaataaactgt

SEQ ID NO: 958070 - DNA, 120 bp, Artificial Sequence
  ENSG00000245482_2 (sequence is synthesized)
cgtttatgaaaatgtagcttattccagaacaccagatttcaaaagatacagaatcctgttgctccacaattcaatttgtcctacaaaaagcaaatatagtaaatagaagttgccaacact

SEQ ID NO: 958071 - DNA, 120 bp, Artificial Sequence
  ENSG00000245482_3 (sequence is synthesized)
gaagagaagattaacaaatctgagcatcccaatggagcagacaacatgttcagaccatccaaagatccaaatggcaggtttgatcactccaattgacaccaggtacaagccaggtaatgt

SEQ ID NO: 958072 - DNA, 120 bp, Artificial Sequence
  ENSG00000245482_4 (sequence is synthesized)
agtaatcatgggatcccactttaaaatgaaagaaaatgaagtaaaagcaagaggtaataggaacaagacaggcacaaatatgtcaagcccaagtctcatctccagcaacaatcagaaatt

SEQ ID NO: 958073 - DNA, 120 bp, Artificial Sequence
  ENSG00000245482_5 (sequence is synthesized)
ttgagaagttattctatgacaagattaagtaagtccttggcagaacaggattcgtttttcttattttttgcccccggaccagcttagtgatggttcaggtagcagcaaccaataaacaac

SEQ ID NO: 958074 - DNA, 120 bp, Artificial Sequence
  ENSG00000245482_6 (sequence is synthesized)
aacaacttaaaatctatttctattttccaagaaatgttctttaaaagcctttattttgataaataaactgcaaatgttccagtttttaaaagcatggaaacattgtttgggactcttaag

SEQ ID NO: 958075 - DNA, 120 bp, Artificial Sequence
  ENSG00000245482_7 (sequence is synthesized)
tttaggaaaacatttggaccacaggctccatgatgacagctaacataaactgagacagaaattgttgccaaaccctctgtattaacgttacaatatgccctatagtaaagattattgtca

SEQ ID NO: 958076 - DNA, 120 bp, Artificial Sequence
  ENSG00000245482_8 (sequence is synthesized)
ttttgcagatgagtaacctgaatttctgaaactcagaacatctccaagatcacaaaactagtaaatcacagcaccaagatttaagatcagatctttctctaaaacagactttatatttct

SEQ ID NO: 958077 - DNA, 120 bp, Artificial Sequence
  ENSG00000245482_9 (sequence is synthesized)
gtcaccagagaagcaggggatgcttattttgatatttatatgtacatacttgcacagtcaaatatatactcaaaaatgatgtgacttgactggttgccagtttatccagttaacagttca

SEQ ID NO: 958078 - DNA, 120 bp, Artificial Sequence
  ENSG00000245482_10 (sequence is synthesized)
ctaaaaatacccagggaaggaatttgtgattataaattgtcactttttggtagctgaagatccctccagtccaccctatcccacccctaaaatgcacagtgaggtgcttgacaggtgagc

SEQ ID NO: 958079 - DNA, 120 bp, Artificial Sequence
  ENSG00000245482_11 (sequence is synthesized)
taaaggaaagttttctggtatttccaaggagcacccgaatgcctttaatcctaaaacaaggaaagacaaagtgggatcgatatcgtcagctgccaagaggagggctcagttccccgttga

SEQ ID NO: 958080 - DNA, 120 bp, Artificial Sequence
  ENSG00000245482_12 (sequence is synthesized)
gtattctcccagatcactccttcctggaggacagatctgctgtttattcattcatttaataaatatttcacagatctcagagacaggaacaaaagactatacccagtttctttcatgttc

SEQ ID NO: 958081 - DNA, 120 bp, Artificial Sequence
  ENSG00000245482_13 (sequence is synthesized)
tgaggcttgagggggtggaacaggacgagtgaagtctaaggatgggaggacgtggggacgctgggacctctcaggcctctcctggggtggggacaggttggggaccccacctgggaaagg

SEQ ID NO: 958082 - DNA, 120 bp, Artificial Sequence
  ENSG00000245482_14 (sequence is synthesized)
gagaaatggccctcacagtagcgctgcgcctgaggcaggtggaagatctcgtccatgtagggctctcgcaacgcccggctgaaggcggagaagaggaggcaggatactaaaaaggtacag

SEQ ID NO: 958083 - DNA, 120 bp, Artificial Sequence
  ENSG00000245482_15 (sequence is synthesized)
ctcaaggcggccgagaaatagtaaccttccagctgcgccattccagctcccacagccactgcccaagaacctactcctggaaaattctgagcctggaaacccgagctggaaacttgggct

SEQ ID NO: 958084 - DNA, 120 bp, Artificial Sequence
  ENSG00000245482_16 (sequence is synthesized)
cgaaatgggcgcgctaggcgggactagccagacggggccacataccggaaggcaaaggatgctgggagagcgcggatccggaaagatcgggtcgctgtttcccggagtgacgggtttaga

SEQ ID NO: 958085 - DNA, 120 bp, Artificial Sequence
  ENSG00000245482_17 (sequence is synthesized)
taacggaccggatgattaccctctcaatcgcattgcccggggcgcacaaagtgtcaaaacttccggaaggggcgggtctcggatttcgccagcgcgggaggtgcgtggcttgctgcttag

SEQ ID NO: 958086 - DNA, 120 bp, Artificial Sequence
  ENSG00000283025_0 (sequence is synthesized)
ggaagagaatggagtacggccatctaaattctttgggaaaatgatttccggcagagaattctgcactgtgccaaacaatcgatcaagtatggagtattgaatttccaggcatgcaaggag

SEQ ID NO: 958087 - DNA, 120 bp, Artificial Sequence
  ENSG00000283025_1 (sequence is synthesized)
taaaataatttatctctcattggatcctttcttaggaagctgctgaaggatgtactcccagaaaaggacttcagcaccatgaccaagcaacttaccaatatgaccagccatagtcccagg

SEQ ID NO: 958088 - DNA, 120 bp, Artificial Sequence
  ENSG00000283025_2 (sequence is synthesized)
tctgaggcttccaatcttctggtccaaggttcacagtgatttgaaaaatggttgtgtacatcatgtgggccaccatgcctagaagccctgcgcaaggaaagctctgtgagtcacagctaa

SEQ ID NO: 958089 - DNA, 120 bp, Artificial Sequence
  ENSG00000283025_3 (sequence is synthesized)
gaagacacatgatggaagaactctacgcggtgtgagttggctgtaaggagctctctagcattcataaagtccttttgatgtatctgcatgtattcatccttaaacattccgctggacatc

SEQ ID NO: 958090 - DNA, 120 bp, Artificial Sequence
  ENSG00000283025_4 (sequence is synthesized)
tctttcccacaattgaaactgaagagacatccggaaagacacaatcggggaggacctgtcagaacctgggtaggagtctccatggcctggttccttcctaagaagatcagaaattggatt

SEQ ID NO: 958091 - DNA, 120 bp, Artificial Sequence
  ENSG00000283025_5 (sequence is synthesized)
ttatcatcccattcgctgaggataagacttgagggagcctgttccaaggatgctgttggaaagtacctgccagcaccatgaagatggctaccaaggcatccaccctgagccagtggaacc

SEQ ID NO: 958092 - DNA, 120 bp, Artificial Sequence
  ENSG00000283025_6 (sequence is synthesized)
cagggctgcgacaactcactctggagcccaggaggatggcgcttgtcagtatcagaacgatatccaggacctcgcccccgatggacagccacaaaacacctgccaaagaacgggatgttg

SEQ ID NO: 958093 - DNA, 120 bp, Artificial Sequence
  ENSG00000283025_7 (sequence is synthesized)
gaaacgctggacacttctaattcagaaatactaaaatgttcaatcctttgatttagttcacttctaaacaaaacatgaaaaacagacacgctggagtgaaaatcacagatgcctctgctg

SEQ ID NO: 958094 - DNA, 120 bp, Artificial Sequence
  ENSG00000283025_8 (sequence is synthesized)
aatcttagctggcaatggaaaggcactcctcagggctgaaagagacggttgtagggattgcccgtagctgaacgggcggtggggtgggggcggggaaactaagcaaaaccctgctgtgag

SEQ ID NO: 958095 - DNA, 120 bp, Artificial Sequence
  ENSG00000283025_9 (sequence is synthesized)
gatatgagtggtgctgggggtctccatgccctagctcaaaaactaccattgtgtctggagttggttcctgccggtgggttcatggtctggctgacttcaagaacgaagccacagaccttc

SEQ ID NO: 958096 - DNA, 120 bp, Artificial Sequence
  ENSG00000283025_10 (sequence is synthesized)
taaaggtggcacagacccaaagagtgagcggtagcaaggtttattgtgaagagtgaaaggacgaacactccaaaccatagaagggtacctgagagggtggctgtggcgggctggggtggc

SEQ ID NO: 958097 - DNA, 120 bp, Artificial Sequence
  ENSG00000283025_11 (sequence is synthesized)
ctgtggcgggctggggtggccagcttttatccccttattggcccctcccatgttctgtttctgtcctatcagagtgccctttttccagtcctccccgctattggctacttttagaattct

SEQ ID NO: 958098 - DNA, 120 bp, Artificial Sequence
  ENSG00000283025_12 (sequence is synthesized)
attttacagagtgctgattggtgcgttttacagagcgctgattggtgcgctttacagagtgctgattggtatgttttacaaacctctttaagacagaaaagttcctgattggtgcgtttt

SEQ ID NO: 958099 - DNA, 120 bp, Artificial Sequence
  ENSG00000283025_13 (sequence is synthesized)
acaaacctcttgtaagacagaaaagttccccaactccccacttgacccaggaagtctggctagcctcacctctcaccatgatgttttgattttaccagaagatatcatctttgccttttg

SEQ ID NO: 958100 - DNA, 120 bp, Artificial Sequence
  ENSG00000283025_14 (sequence is synthesized)
gccttttgcaagaaaaagttacacaaacatgggggtggagggtctgtgagttggagagtcctgtctgcaggtaccaaaacctcatttgtttctgtggaagccacttgtttacttcctgga

SEQ ID NO: 958101 - DNA, 120 bp, Artificial Sequence
  ENSG00000283025_15 (sequence is synthesized)
gaggatcccacctgtggcttcaaggaactctgttgccagtggagagcaatggagaaaagggacagaaaaggaaattcatctttgcgaaaggactcctctaaggcaagttaggtaacggag

SEQ ID NO: 958102 - DNA, 120 bp, Artificial Sequence
  ENSG00000283025_16 (sequence is synthesized)
acacagcaatgaatagacgtgatccatgccttcacaaaacctctactccagctgggagaacagacactaagaaagtaattacaaagatactgagtgttagggagctttagagagaagaaa

SEQ ID NO: 958103 - DNA, 120 bp, Artificial Sequence
  ENSG00000283025_17 (sequence is synthesized)
aaactgctctaggcagtggtgtgctgaagcttatctcagagctctgtgttcatcttgcaactgagagctgcattcatcttgcaattgaaattggctatggtgggaatatttacaccatgg

SEQ ID NO: 958104 - DNA, 120 bp, Artificial Sequence
  ENSG00000283025_18 (sequence is synthesized)
aacacggccagtgctgccaatcagggcttcccatccaccctacaaagttggctgttaaacatttgccagcacaccactggctatagggcacaggaagagagcctgtggttctagcttttg

SEQ ID NO: 958105 - DNA, 120 bp, Artificial Sequence
  ENSG00000283025_19 (sequence is synthesized)
ggctggacttcatggaaaaatcatcaatgactccctcatcatttcccctattcccaataaaactataaaaatagtccaagctatgaggagtgctagtgggcagagtgtgagtaaggtatt

SEQ ID NO: 958106 - DNA, 120 bp, Artificial Sequence
  ENSG00000283025_20 (sequence is synthesized)
taccttgttcttcagctggcactacactccggaaactcctacacttttcatctgaaagataaagagaatgcatccagaagtgggttacacttcacaaccagggggcaaatggtgaatttc

SEQ ID NO: 958107 - DNA, 120 bp, Artificial Sequence
  ENSG00000283025_21 (sequence is synthesized)
tagccccttaactggatgaggaatggggagtgtgcagactgctttactgctcagggacatgagctgctcctctgtgtgggagcctgatataatccaccctattggactctggcttggcca

SEQ ID NO: 958108 - DNA, 120 bp, Artificial Sequence
  ENSG00000283025_22 (sequence is synthesized)
cgtaacactctttgaccaatgaactgggagcaaaaatgaggtggatctgagcagctttaagagccagtgtcttttcccttggttcctgttcccttgctctgtaatcccagaggcccatat

SEQ ID NO: 958109 - DNA, 120 bp, Artificial Sequence
  ENSG00000283025_23 (sequence is synthesized)
caagaggaagtctccatcagcctgggtccctgaatagctacaatgaggacagaccccttgccaacctgaaaagtctatacagaatgagctaaaaataaatgtgttggtttaaagcactgg

SEQ ID NO: 958110 - DNA, 120 bp, Artificial Sequence
  ENSG00000196096_0 (sequence is synthesized)
attgcaccttcctacccaagcagcttggttttctttcgctttgaccctgtaatttctttcccacttcgttgtcgtctctgaattacctttctcttgattcttgcccattagcatcctcca

SEQ ID NO: 958111 - DNA, 120 bp, Artificial Sequence
  ENSG00000196096_1 (sequence is synthesized)
ccattagcatcctccaatttcagatgtttgtagatccccaagtgttcccagggaaaactactagaaaaggtcaagctgatgcaagagatggtttcccatggtcttgggcagctccacccc

SEQ ID NO: 958112 - DNA, 86 bp, Artificial Sequence
  ENSG00000196096_2 (sequence is synthesized)
atcggtggatctacctttctggggcctgtgatgagaagggctgccgtgaagacctctcacatgccctggaggcatttttcctattg

SEQ ID NO: 958113 - DNA, 120 bp, Artificial Sequence
  ENSG00000196096_3 (sequence is synthesized)
tgaagacctctcacatgccctggaggcatttttcctattgtcttggggattaacattcggttacttgttacttacgcaaatttctgcaactggcttgaatttctcgtcagaaaatgggat

SEQ ID NO: 958114 - DNA, 89 bp, Artificial Sequence
  ENSG00000196096_4 (sequence is synthesized)
ttcaaagttcgtaatctctttattaaaacataacaagagccacctttgctccagttcccaacaaggtcctcatctccatctgagattac

SEQ ID NO: 958115 - DNA, 120 bp, Artificial Sequence
  ENSG00000196096_5 (sequence is synthesized)
actaatctctttattaaaacataacaagagccacctttgctccagttcccaacaaggtcctcatctccatctgagattacctcagcctggatttcattgtccatattgctatcagcattt

SEQ ID NO: 958116 - DNA, 120 bp, Artificial Sequence
  ENSG00000196096_6 (sequence is synthesized)
cctccaagctgttccaacctctgcctattacaaagttccaaagttgctttcacatttttggctgtcttttcagcaacaccccactcctggaaccaatttactgtattagtctgttttcat

SEQ ID NO: 958117 - DNA, 120 bp, Artificial Sequence
  ENSG00000196096_7 (sequence is synthesized)
aaggaggagcaagtcacatcttatatcaatgtcagcaggcaaagagagcttgtgcagggaactcctgttttgaaaaccatcagatcttgtgtgacttattcactaccacaagaacagtat

SEQ ID NO: 958118 - DNA, 120 bp, Artificial Sequence
  ENSG00000196096_8 (sequence is synthesized)
aattatgggagtacaattcaagatgatatttgggtgggacacagccaaaccatatcaatcatcaaacaagaaaagagggaaactttcacaaccaagagatccctaaagaggtatgctgac

SEQ ID NO: 958119 - DNA, 120 bp, Artificial Sequence
  ENSG00000196096_9 (sequence is synthesized)
caagagatccctaaagaggtatgctgactgaatgtaatgtgggatcctagggcaaaaagaatattatgtaaaaacgaaggatatctgaataaagtatggactttatttagttaataataa

SEQ ID NO: 958120 - DNA, 120 bp, Artificial Sequence
  ENSG00000196096_10 (sequence is synthesized)
tgtgtcaataatggttcattagatgtaacaaatgcaccatattgatgtaagatgttcaaagtagggaaaactgaatatgagtatatgggaactttctttatctttgcaacttcttggtac

SEQ ID NO: 958121 - DNA, 120 bp, Artificial Sequence
  ENSG00000196096_11 (sequence is synthesized)
atctaaaactattctgaaataaaaaaatttttaaagagttgcttgaacctttattctaacatttccttaaacaagcctcaccattgacctttcttttaaaacaataaattccttttgctt

SEQ ID NO: 958122 - DNA, 62 bp, Artificial Sequence
  ENSG00000257027_0 (sequence is synthesized)
ggtttggcttgaaatgtcatatttcagaatgtgcatagaggccaggggtggtggatcacacc

SEQ ID NO: 958123 - DNA, 120 bp, Artificial Sequence
  ENSG00000257027_1 (sequence is synthesized)
cctggcctgctcagtgacttctaacattgctgctgtacctgggtaaatacttccagtcatatttaagcgggcttggagttggcaaaatctctgagagagacatcttcggaaagcctccat

SEQ ID NO: 958124 - DNA, 120 bp, Artificial Sequence
  ENSG00000257027_2 (sequence is synthesized)
gctggacttagtggataaagtttccaatgtccagatattttcagctggtttctccttggtataggatttcttctgcattctaccctgcacatcttaatgataaccctcatattttggcta

SEQ ID NO: 958125 - DNA, 120 bp, Artificial Sequence
  ENSG00000257027_3 (sequence is synthesized)
agcatttgactcccctttagaattgttctaacttgtttttaacagatgtctacaagagattcccaccaggatcctgcccatgcaatctttgagactttaaactcactccagctggaaata

SEQ ID NO: 958126 - DNA, 120 bp, Artificial Sequence
  ENSG00000257027_4 (sequence is synthesized)
ggaaccaacttaacccaagagactttggttcacatttaaccagtactttcctgaatgcctctcctaagtaaatggctctagtttctctattggccactgcactgccactaggattcctgc

SEQ ID NO: 958127 - DNA, 120 bp, Artificial Sequence
  ENSG00000257027_5 (sequence is synthesized)
aagggatccgatgggcccagagcaggtagccaaccacttctctgttggatggaatgcaatgctgtttgccagcatgtttgagccagtccttcaagatggattctgagtgactaactggac

SEQ ID NO: 958128 - DNA, 120 bp, Artificial Sequence
  ENSG00000257027_6 (sequence is synthesized)
ctaaatttaaatagcacaaagcagccatttgctaactagatttcatacaaatgctctgagttcctggaaaacccacactccttaactttgggactttcaagactcacctaaatcaatcaa

SEQ ID NO: 958129 - DNA, 120 bp, Artificial Sequence
  ENSG00000257027_7 (sequence is synthesized)
ttaaagctcacttgtgtcagctaatcagggatcagctgtattgactaatgaaaactaagcgagtttcaaattttaaccatttatttgtgtagaagacttgattgggagcctgggtatgaa

SEQ ID NO: 958130 - DNA, 120 bp, Artificial Sequence
  ENSG00000257027_8 (sequence is synthesized)
tacttgctataaaatctgagcattccctttgttctctggagcaaacaatgttaagttgttaactctctgtacctttctctagaactggatggaaacaactccatctgaaatgcagcccta

SEQ ID NO: 958131 - DNA, 120 bp, Artificial Sequence
  ENSG00000257027_9 (sequence is synthesized)
ataccagggaactcctacagtaaagcgctaaacaactttattactctaaccaacgtttatgtccctaatcagcaagaagtagttagaatggtcatcatccctttccctcaagattgagga

SEQ ID NO: 958132 - DNA, 120 bp, Artificial Sequence
  ENSG00000257027_10 (sequence is synthesized)
gaattcaaggagagtcacagagtgtagagagaatagacagtttattgaaagctactcagttacagagtagggcatcctccaaaagcaggaggaggaatgtgctgtctttgttttaaactc

SEQ ID NO: 958133 - DNA, 120 bp, Artificial Sequence
  ENSG00000257027_11 (sequence is synthesized)
ttcttttataggggtttaatctatgtaaaacctaagctatgtctacatgtgggtaggctgtcagtgtgacaaaatttagtattttgttgatataaagaaacttatccttgtcatcttagt

SEQ ID NO: 958134 - DNA, 120 bp, Artificial Sequence
  ENSG00000257027_12 (sequence is synthesized)
gcataagtacatcaaagtatgactttagctaccttaaaagcatgtattgttatgtgatattgggacatctggacattctgctgtcgtaggagtttgtccttgcagcattactaaatcgct

SEQ ID NO: 958135 - DNA, 120 bp, Artificial Sequence
  ENSG00000257027_13 (sequence is synthesized)
tccttagctgtaaacatcttataatcgtaggtcataactgtcaaggaagtgccttgctagtttttagatggagttgattttaaaatagtgtcactctggctttcctatgctcctgctttc

SEQ ID NO: 958136 - DNA, 120 bp, Artificial Sequence
  ENSG00000257027_14 (sequence is synthesized)
ctaacaaatctggttcaactttttttttttttattcaacataatcttttttttccatgctacctcatttacagagtgcttcctatagatatggttggtctgtatgtttcatttttcagct

SEQ ID NO: 958137 - DNA, 120 bp, Artificial Sequence
  ENSG00000257027_15 (sequence is synthesized)
ttgattcttatttttttgaatcacacatgctttatgggggcttccactaccatgagccatattttctgtattaccagcaagatgtttgggtttgttttttgttttctttatatttcaaat

SEQ ID NO: 958138 - DNA, 120 bp, Artificial Sequence
  ENSG00000257027_16 (sequence is synthesized)
tttattttagatttaggaagtacgtgtgcaggtttgttaacatgggtgtattgcatgacgctgatcttacaataccaatgatcccatcactcaggtagtgagcataatatccaataggta

SEQ ID NO: 958139 - DNA, 120 bp, Artificial Sequence
  ENSG00000257027_17 (sequence is synthesized)
gtttttcagaacttgccttatcttccctctctccctgctctcttaattcgaagcctatttttcctatctttatgtccacatgtttccagcatttagctcccacttatacgtgagagtatg

SEQ ID NO: 958140 - DNA, 120 bp, Artificial Sequence
  ENSG00000257027_18 (sequence is synthesized)
tggtatttgtttttctgtgtctgcattaatttacttaggatgatggcttccagctgcatcttttgttgcaaaggacatgactttgttcttttttatgactgtgtagtattccatggtgta

SEQ ID NO: 958141 - DNA, 120 bp, Artificial Sequence
  ENSG00000257027_19 (sequence is synthesized)
tatgtaccacattttctttatccagaacactgttgataggcatctacattgattccatgtcttggctattgtgaatagtgcagcaataaacatgcatggttcaacttttatggtaacaaa

SEQ ID NO: 958142 - DNA, 120 bp, Artificial Sequence
  ENSG00000257025_0 (sequence is synthesized)
cacgaaggctgaactatctactgcctgggcctttacggaaaatagtatgctgactccttctttatatgacttgcaaagcagagttaccacagtttggatcaagaaaggtgtgtcctctta

SEQ ID NO: 958143 - DNA, 120 bp, Artificial Sequence
  ENSG00000257025_1 (sequence is synthesized)
gaagcttttggctgatagtgagagaaaaccctcgcgcactgaggaagtccactggctcacatggctggaagggcagcggcaaggtcctacccatcctttatgtcccagcttagagaacat

SEQ ID NO: 958144 - DNA, 120 bp, Artificial Sequence
  ENSG00000257025_2 (sequence is synthesized)
cattctcccagtgttatcctgtctgggcactgagtgacgtggccttgccatattccattcaacctcctcaggccctaaccatcctttatgtcccagcccagagaacatcagctctaaaga

SEQ ID NO: 958145 - DNA, 120 bp, Artificial Sequence
  ENSG00000257025_3 (sequence is synthesized)
atccatccctggtcaacacgtctgaaagtgagcattgcgatgaaagcagtgcatcgtgttagtggaaaggctcgttctcccagtgttatcctgtctgggcactgagtgacgtggccatct

SEQ ID NO: 958146 - DNA, 120 bp, Artificial Sequence
  ENSG00000257022_0 (sequence is synthesized)
tcttaaggctctaatatcttgtcttctggctatgagaacagagcatatggtttgcttgaagattcttgttcaacacttatccattaatctgacagcaggaagtgctaaagagcagaaaca

SEQ ID NO: 958147 - DNA, 120 bp, Artificial Sequence
  ENSG00000257022_1 (sequence is synthesized)
ggagtcggtcagactctcacctcaagtccaaggcaaatatgcttgcccctaaaagacatacttgatcttcaagttcaggaaaaccagatacaaagtctcactctgttgcccaggatggag

SEQ ID NO: 958148 - DNA, 120 bp, Artificial Sequence
  ENSG00000257022_2 (sequence is synthesized)
gcctccccagtagctgggactacaggtagcctcagcttgcacctgcatcagtcagtatttaccagccattctagacccttttaggatcctcaaacacacctcacaggactcaaaaggaag

SEQ ID NO: 958149 - DNA, 120 bp, Artificial Sequence
  ENSG00000257022_3 (sequence is synthesized)
cacctcacaggactcaaaaggaagcgaactttcaccagttcgccaactgtcgtcaccaatctcatcactcaagagaaactcattcagcttttgaacactgcaaaaaacaataaacacaga

SEQ ID NO: 958150 - DNA, 120 bp, Artificial Sequence
  ENSG00000267599_0 (sequence is synthesized)
agacaggtactgcgcccagggctgaaaagggagctgtctgcgttcttccctgctttttcaggagctcacggaagaggccatgctacccaccaggggcaaacaccaaagaagagaaagggg

SEQ ID NO: 958151 - DNA, 120 bp, Artificial Sequence
  ENSG00000267599_1 (sequence is synthesized)
tgaggctcagtttcctcttctgtaaactgcagacaatcctcatagcatccctgtgaaaatggaaaagctaagatgtccagtgtgcttggcacagttgctaacatgtcataaacaccccaa

SEQ ID NO: 958152 - DNA, 120 bp, Artificial Sequence
  ENSG00000267598_0 (sequence is synthesized)
cacaacacccaagcctcccttctcccagtccagaaggagagcgaaaggttcacgtcccagtccactaagacagcacctgtgggcgcaggtctctgcggaaggcgcccgcgcccccggctc

SEQ ID NO: 958153 - DNA, 120 bp, Artificial Sequence
  ENSG00000267598_1 (sequence is synthesized)
agactcctcggtgccgtccctgcacactgaaggcgatggctccccggggacagagtccctctccgggcctctcagcagcccgggcggcggcttctctccacggttttcgcgggcgcttcc

SEQ ID NO: 958154 - DNA, 120 bp, Artificial Sequence
  ENSG00000267598_2 (sequence is synthesized)
cccaggatggaggggggtggcctcgcctcaggtctgcgccctcgggccgacggttcgacgcgcgctctgggctccggcagcgccgctcggggtcctcagaaggccaccacggcccgcacg

SEQ ID NO: 958155 - DNA, 120 bp, Artificial Sequence
  ENSG00000267598_3 (sequence is synthesized)
ggctttgcctcgcacgcgggcggcgccgtcggaggggccgcggggctgcagttcaggaggccggagaagcgcctctgcaggacgcgggccaggttgggaaaggcgccctccgcttgcgcc

SEQ ID NO: 958156 - DNA, 120 bp, Artificial Sequence
  ENSG00000267598_4 (sequence is synthesized)
ggagggggctgcaggcgatcggcgacttcggatgacgctccctcctcttcttccttttcttccagacgggctttcttgctcgggaccagtccagcgtccccgccgtcgctcagggtcatg

SEQ ID NO: 958157 - DNA, 120 bp, Artificial Sequence
  ENSG00000267598_5 (sequence is synthesized)
atgcgctgtgcctctttctgcacttccatggcgactcgacggcgacagcggcgggggctcccgggagggacagaacaggcagcaggtgcactccggacaacgggctcgctcacgcctctc

SEQ ID NO: 958158 - DNA, 120 bp, Artificial Sequence
  ENSG00000250032_0 (sequence is synthesized)
caaaaataattaagaaatggaatgttctgattgaaaattaccaagcatatgatgtatggatgatcaacttttgaagaatttgaaacaattagaaattagaaaacagaagcccacatcctt

SEQ ID NO: 958159 - DNA, 120 bp, Artificial Sequence
  ENSG00000250032_1 (sequence is synthesized)
gagatggcatctgaaaaagactccgtcagcctttgctggctttgaagatgaaaaggagccatgagccaaggaattcaggcagcctctagaagccagcaaatgcgaggaaatggattctcc

SEQ ID NO: 958160 - DNA, 120 bp, Artificial Sequence
  ENSG00000250032_2 (sequence is synthesized)
cctagagcctccagaaaggaattctgttcagccaacaccttgattttagcccagtgagacccattttggacttctgccctcctctggaactgtaaaataataaatttgtgttgttttaaa

SEQ ID NO: 958161 - DNA, 120 bp, Artificial Sequence
  ENSG00000250034_0 (sequence is synthesized)
ctgaaatccagatcgggaacaccgagcaacacttagtgcataaatatgaatacacatggttcaaggaaaaataaaacttcatcatgttggaagtacacttggaaagctggttgttaaata

SEQ ID NO: 958162 - DNA, 120 bp, Artificial Sequence
  ENSG00000250034_1 (sequence is synthesized)
tggcaggtcaaaaagataattaagaagaacctcagtagctggaagaacacacagaactttctagtcgtccttacctgaacaactatgggagaaataaactcctagactatttggatcaaa

SEQ ID NO: 958163 - DNA, 120 bp, Artificial Sequence
  ENSG00000250038_0 (sequence is synthesized)
tcattctccaagcccacatgtgatccgattcatccagtacaccaagtgtccagggacatctagatgatagaagttccttcagatgggtccctggtgtgagggtgtcctgtatcagactgc

SEQ ID NO: 958164 - DNA, 120 bp, Artificial Sequence
  ENSG00000250038_1 (sequence is synthesized)
gggtccctggtgtgagggtgtcctgtatcagactgcctattgaagttcaacctgtggttcaagacaggatctcattcagaatactactttcattcaggctggagtgcagtggcatgatct

SEQ ID NO: 958165 - DNA, 120 bp, Artificial Sequence
  ENSG00000250038_2 (sequence is synthesized)
agcgattctcctgtctcaggctccggagtagctgggactacaggcatgcgccacaacaccagggaaaaaaacaaaccaaccaacaaactgagcctgaaactgataacacagatacgtaca

SEQ ID NO: 958166 - DNA, 120 bp, Artificial Sequence
  ENSG00000250038_3 (sequence is synthesized)
tatttaagtaaccaatcggaattattgcagtggagatgttttattggtgggaaatacggtatcacaccatttcagacatcaggagataattatccctgtcttctcggaaccagcttcttc

SEQ ID NO: 958167 - DNA, 120 bp, Artificial Sequence
  ENSG00000250038_4 (sequence is synthesized)
aaaggagtcaggaattatttatgatagaaactactgaaacaatactaaggagttcataggttgctgagaaggtagcttcctgccctctgcttgaggaacacggatggaagaaaggagaag

SEQ ID NO: 958168 - DNA, 120 bp, Artificial Sequence
  ENSG00000250038_5 (sequence is synthesized)
atctggtcaacacagctcctgaaatgctgattaagcattatgggatttaaggtttcctggccaagtctgagctaaaatgttaacactcctgaagaacaccataaagaaagaaaaacaaaa

SEQ ID NO: 958169 - DNA, 120 bp, Artificial Sequence
  ENSG00000250038_6 (sequence is synthesized)
cgtcatgaggaacacatcagcggaagaagacaaaagcagctggtcttggagaatccgccaggggaagagcacactggcaggcaccgcaggccatcgatcgtcagaaagacacggagtttg

SEQ ID NO: 958170 - DNA, 120 bp, Artificial Sequence
  ENSG00000250038_7 (sequence is synthesized)
atgggaggcctctaaagccagaaaaggcaagagtacaaataatcctttacagccttcagatagaatgcagccctgatggcagcttgattttagctcttgtcagaattctgacctgctaaa

SEQ ID NO: 958171 - DNA, 120 bp, Artificial Sequence
  ENSG00000250038_8 (sequence is synthesized)
atgaaaaaacttctaggggaattggatgtgaaaagtgtccctggtcctatgatcacaaagatttgcagcaaggtcaagacacagaagtaacaaatgcttccagcttcagcaaatggtgcc

SEQ ID NO: 958172 - DNA, 120 bp, Artificial Sequence
  ENSG00000250038_9 (sequence is synthesized)
ccatcttctgcatgggaatacccattattccaagcctgttttcggggaaagtgatagacaatggtggtgcccagggtgcagggaacaaagggaactggacagatggaaaatacgcattgg

SEQ ID NO: 958173 - DNA, 120 bp, Artificial Sequence
  ENSG00000250038_10 (sequence is synthesized)
ttctgcagaggtccttttcctcagacacaacctagaaaatggcaatgaaaaagataaggaaaattaaagagatgaaatccaagatcattagaaagctgtacatactgatacagacaccca

SEQ ID NO: 958174 - DNA, 120 bp, Artificial Sequence
  ENSG00000250038_11 (sequence is synthesized)
ggaacctcaaaatcacaggatacaaagggagaaaagcagtaatcgaccagctaggactcagctaagcaggacagcagagtaaaatgaggctcaagtgctaacttctggcaggtagatcag

SEQ ID NO: 958175 - DNA, 120 bp, Artificial Sequence
  ENSG00000250038_12 (sequence is synthesized)
ataatctgaattattggtatggtgtatgtggtatagggtggattgtgtgattgatcgattgttacctgtataattctccttttggtaattacattgagtttttttttttaagtttttttt

SEQ ID NO: 958176 - DNA, 120 bp, Artificial Sequence
  ENSG00000250038_13 (sequence is synthesized)
ttctcaataccacctcttaaggttttaaaaactgtttcatatctgattaagtaaaaattttcaataactgcattggtaaattgctaataaaaattaaatgtaactttaaacagtcaataa

SEQ ID NO: 958177 - DNA, 120 bp, Artificial Sequence
  ENSG00000250039_0 (sequence is synthesized)
gcgtggcaccaggcgttcaagcagatctgccttggctgtttgtggcgattgctcaacagggtgaattaaacaagcacctttgcatgatcatttctgcctttcagcatcatgctctgcaga

SEQ ID NO: 958178 - DNA, 120 bp, Artificial Sequence
  ENSG00000250039_1 (sequence is synthesized)
gctactctccagaatgaccaactctataggattttataaagagaagatttaaaagaaagaataaaagggaaaggattcttgacgtcccagtttaggaaactctctaaaaagagcagtatg

SEQ ID NO: 958179 - DNA, 120 bp, Artificial Sequence
  ENSG00000250039_2 (sequence is synthesized)
agtactatgagaaatgagccaattctaatcttccctacatgcagaaggcactgtcacagatggtgagcacacagccacataaggctatgacccttctctactcatcccctctttgtgtgg

SEQ ID NO: 958180 - DNA, 120 bp, Artificial Sequence
  ENSG00000250039_3 (sequence is synthesized)
ttgtaccttgaggaatcagaagctcagctgctgagcacaaaacaagataatcaaagatggtggaagaagtcaattggatgtctcctccctaatggggtttccagatctgaagcagtgtca

SEQ ID NO: 958181 - DNA, 120 bp, Artificial Sequence
  ENSG00000250039_4 (sequence is synthesized)
ttgtgaccaagaagaagaaaatcaaatgctaaagatggtagagcaaaaagagagaagatatttgggtcagccctggaatacctatcatattctccttgctagatgggaaaagtcagtcct

SEQ ID NO: 958182 - DNA, 120 bp, Artificial Sequence
  ENSG00000250039_5 (sequence is synthesized)
ttataattttcatgtacaggtatacaagctcctctgactccagcaggtgttgaattgaaatcaatcacatgttgttgctactgaaatgagacttaaatatcaagtcattaagtttgtcac

SEQ ID NO: 958183 - DNA, 120 bp, Artificial Sequence
  ENSG00000250039_6 (sequence is synthesized)
gatgcagttggtgaaacaggcccagaaaaagttaagtgagttttctaacaggaaacaacccagagagtcaaagctggaatccaaacctcttgattctcagttcagcactatttccactgt

SEQ ID NO: 958184 - DNA, 120 bp, Artificial Sequence
  ENSG00000250039_7 (sequence is synthesized)
tcctgctgccacactaagtaaaggaataaaatgcttattggtggcctactctgtgttaggtaccgtactggatgatatcagagggcagaactgtataagaccacactcctttctcataaa

SEQ ID NO: 958185 - DNA, 120 bp, Artificial Sequence
  ENSG00000250039_8 (sequence is synthesized)
gggcatacaatctagatcaagagataaaactccatcagactataaaatatacaaatagttttaaaatacagcttgagaaattagtcccattacattttgtaccacaatagtataagccca

SEQ ID NO: 958186 - DNA, 120 bp, Artificial Sequence
  ENSG00000250039_9 (sequence is synthesized)
gcggggggcggggtgcggggagaggaaagcgccgcgggtggcacggtgcctctggcgacagagtagatggacccgaaagagacccgaggtgacttcgggctgggcaggacacccccggga

SEQ ID NO: 958187 - DNA, 120 bp, Artificial Sequence
  ENSG00000250039_10 (sequence is synthesized)
gttgccagcggctctcagcgggcgcctctaggaccccttgtcactgcgagcagcgcctgctctggggaggggctcgaaggcgccgcgccttctcaacgcgccgctgcgtcccccaggggc

SEQ ID NO: 958188 - DNA, 120 bp, Artificial Sequence
  ENSG00000250039_11 (sequence is synthesized)
tccaacttggacagctagactggaaatactgctgcacaaagttaggctgagttcgaaggacaccagagaggaagcgcaaggagatgcccttctccggagccgggcagagcgccagaactc

SEQ ID NO: 958189 - DNA, 120 bp, Artificial Sequence
  ENSG00000250039_12 (sequence is synthesized)
agacaagggaggatgatgttgacaacagatgttgaccatgtggatgtaacaggtcagcgctttgccctggaaagcacttgttaacagcagctcaagagagaatacccaatgaagcaatta

SEQ ID NO: 958190 - DNA, 120 bp, Artificial Sequence
  ENSG00000250039_13 (sequence is synthesized)
ttgagatatgaatgatcacgtcattcagatagtgagtatagtacccaacaggtagtttttcaatccttgccccaccccaacactcccttatctagtagccaccagtgtctattgttccca

SEQ ID NO: 958191 - DNA, 120 bp, Artificial Sequence
  ENSG00000250039_14 (sequence is synthesized)
tatgtccatgtgtactcaatgtttagttcccatttataaatgagaacatgcattatttggttttctgttccttcattcatttgcttaggataatgtcctccagctgcatccatgttgctg

SEQ ID NO: 958192 - DNA, 120 bp, Artificial Sequence
  ENSG00000250039_15 (sequence is synthesized)
gctgcaaaagacgtgatttccttctttttcatggctgtgtagtattccatgctatatatgcaccacattttctttatccagtcccaatctgtattttaaataatccctgtgggaattctg

SEQ ID NO: 958193 - DNA, 120 bp, Artificial Sequence
  ENSG00000250039_16 (sequence is synthesized)
atgcagatggttagcccctcatacttcagaaaatacagatcagaggcacatgaagtcagagaaatgtgtggctgtttttgacatgcatgctttgctcagatagcgcttggaaagaaggcc

SEQ ID NO: 958194 - DNA, 120 bp, Artificial Sequence
  ENSG00000250039_17 (sequence is synthesized)
acttacctggttttgttcactctacgggccaacaattggctgcatggtcaacatgtgatttaaaaattaagatacttccttaaaccactgctgaaggagtcagtgacttgaggtttcaaa

SEQ ID NO: 958195 - DNA, 120 bp, Artificial Sequence
  ENSG00000250039_18 (sequence is synthesized)
aaacaacacaaaaactagttgaaaaggactcaacctggaatgtagaataaaatatttattatttactcaacagttaatgtaaacaaacatgtatacagcaaactcttaggagctgttaat

SEQ ID NO: 958196 - DNA, 120 bp, Artificial Sequence
  ENSG00000250039_19 (sequence is synthesized)
ttctcattcctcttcacagaatgactaaagaagctttagcgtagatgaggtgggggtaatgtttttgtcctcttattgcacgactcctcatttatttgacttggcttaatgggatctact

SEQ ID NO: 958197 - DNA, 120 bp, Artificial Sequence
  ENSG00000250039_20 (sequence is synthesized)
gattcttatcttgcctcacaaatgtgaatgtcaattccggcatgtggtacactgtgctaattttaatatttttagactatttgtaattgttcataaagatcttcatcaattatacctcta

SEQ ID NO: 958198 - DNA, 120 bp, Artificial Sequence
  ENSG00000250039_21 (sequence is synthesized)
atgtatcaggtgacaatagttgcaaggaagaaacaataatctatgcaaggaagaaacaataatctatgcaaggaaagagactaagggaagacactgcttcactggggatgactgaggaga

SEQ ID NO: 958199 - DNA, 120 bp, Artificial Sequence
  ENSG00000250039_22 (sequence is synthesized)
tgacatttgaacagactgaagtgagaaagccacatggatatctgaggaaaaagctttcttgacagagagaatagcaagtgcaaaggccctgaggcaacagtgtttttattggacatgagc

SEQ ID NO: 958200 - DNA, 120 bp, Artificial Sequence
  ENSG00000250039_23 (sequence is synthesized)
accatggctgtcagataaaaacaaagatattttagattttagtaacagaacagtaaggaatgaatattactgtatactctttactgatcaaatttccatgagcatattgtgttcaattca

SEQ ID NO: 958201 - DNA, 120 bp, Artificial Sequence
  ENSG00000250039_24 (sequence is synthesized)
gtttttggtatcacagtttaaagaacactgatgaatccgagcgagtcaagaaaaaagtactcaggataatgagggggtctggaaatggtgtaactggaataacggcaggaaatctagttg

SEQ ID NO: 958202 - DNA, 120 bp, Artificial Sequence
  ENSG00000250039_25 (sequence is synthesized)
gacctgacatggacacaagaaggtggtcatgttgtcatgataaactcatttggtttggcttcagaaaacaaaactagaatgaaaattatagagcagagcttagccaagtataagaaagaa

SEQ ID NO: 958203 - DNA, 120 bp, Artificial Sequence
  ENSG00000250039_26 (sequence is synthesized)
aattctaacaactacaccttttctaaagatgaacattagtagtgaatcctagtcctggagttagtctggggttgagcactccttgtcacaggatcctgtgaggttagtcccttccatcag

SEQ ID NO: 958204 - DNA, 120 bp, Artificial Sequence
  ENSG00000250039_27 (sequence is synthesized)
gaggagccagattgccactattattttgcagatgacacgtcagttagcccgggatgatgaaaacttacttccaatgggtaccactggaattgcccccagtggggtagcattctggtgagt

SEQ ID NO: 958205 - DNA, 61 bp, Artificial Sequence
  ENSG00000250039_28 (sequence is synthesized)
ccactggaattgcccccagtggggtagcattctggtgagtgtcattactggacccacagtg

SEQ ID NO: 958206 - DNA, 75 bp, Artificial Sequence
  ENSG00000250039_29 (sequence is synthesized)
ctggaccttttacttgtggggttcatggaacaatacagctgaaataccactggtcactctggagaaaagaactaa

SEQ ID NO: 958207 - DNA, 120 bp, Artificial Sequence
  ENSG00000250039_30 (sequence is synthesized)
cagctgaaataccactggtcactctggagaaaagaactaaatttacagaatcctagaacctcaagttggagcaggcctgagacatccttcagacaaagaccattcacggctagagcttga

SEQ ID NO: 958208 - DNA, 120 bp, Artificial Sequence
  ENSG00000250039_31 (sequence is synthesized)
agagggaggtggcaactgtcctctcagcacgtgtggaatgtggagatagaggcatctggcctctaattcagtagcagattgtgttgtttaacaaatgcttatctgagcagatgatggttc

SEQ ID NO: 958209 - DNA, 120 bp, Artificial Sequence
  ENSG00000250039_32 (sequence is synthesized)
tattatgataggtgttaatcaaagctattgtcacagaagtacagtcttttgttacaatctgttctttgataaatgtgcaaaatatatcatggggacttttcctagaattaacattgcctg

SEQ ID NO: 958210 - DNA, 120 bp, Artificial Sequence
  ENSG00000267593_0 (sequence is synthesized)
catcacagtcccaagaataacacaagaaattctccaagtttccaagaagggaagatggagtggagggcgcccaccctatctccagtggacatcccctgggctactcctctcctgatgaga

SEQ ID NO: 958211 - DNA, 120 bp, Artificial Sequence
  ENSG00000267593_1 (sequence is synthesized)
gcccaagcatgcatcagcctctcagtagctgtgattacaggcattgagtcaccactcctgagaaataacaggactttggtgctattctccaagctgaaagccatcctcttcggccctgag

SEQ ID NO: 958212 - DNA, 120 bp, Artificial Sequence
  ENSG00000267593_2 (sequence is synthesized)
gacacagctttttctgccataactcactgtctccactggctcaattagccaattagtggcattgtagagggctgagatgttactttttagtttccaataaaattctcaagttggtttcaa

SEQ ID NO: 958213 - DNA, 72 bp, Artificial Sequence
  ENSG00000267593_3 (sequence is synthesized)
actcgcccacctcctgagatcttatccggaagctgctgatcaccagctttagagtctcgctctatgccttct

SEQ ID NO: 958214 - DNA, 120 bp, Artificial Sequence
  ENSG00000258620_0 (sequence is synthesized)
ttgctaccaagtggcagagctggaatcagcgctactcagcctcacacattttgctccctgtgcctcttcagaacttcggcctgtcacatgtgtgcagctgtgggagcccagattgtgagt

SEQ ID NO: 958215 - DNA, 120 bp, Artificial Sequence
  ENSG00000258620_1 (sequence is synthesized)
tgatcaaggtcagggccacaccctgcacttcctgcctgacacagaaattgctctctgggcagagggctgcggagcaggagcgaggctgcaggtgtgagaaggaccccgccgtgccagggc

SEQ ID NO: 958216 - DNA, 120 bp, Artificial Sequence
  ENSG00000258620_2 (sequence is synthesized)
agcctcaaggagctgttgagcgagttgagcccagaagacaaaggtcgctgaagtccttccaggagaagaagatcaatgcctgggctgagcctgcggttaacatcttaatagtaaccggag

SEQ ID NO: 958217 - DNA, 120 bp, Artificial Sequence
  ENSG00000258620_3 (sequence is synthesized)
agtttctgagagattaggctcacatacctctcagagtccaggaggcagtgagggaaagcttttaattcaaagccctatccatcttcccaactcaggtgagatggggactagaaagtcggt

SEQ ID NO: 958218 - DNA, 120 bp, Artificial Sequence
  ENSG00000258620_4 (sequence is synthesized)
ctggctgaagctaagtgaggccagccttctgggtgttgggtatcaggttctggacggggctggcagttgtgtgtggggctcatggatggttttaggcccttctgccccctttgtcagtgt

SEQ ID NO: 958219 - DNA, 120 bp, Artificial Sequence
  ENSG00000258620_5 (sequence is synthesized)
gcccttgtgggaagccggtgcgtttccaggggagctgctggaggcttcttatggcatgcagatcaaggaagacctgtagactacatgcaccctggcgctctgggaacggggagccatgga

SEQ ID NO: 958220 - DNA, 120 bp, Artificial Sequence
  ENSG00000258620_6 (sequence is synthesized)
gtgataatctaggcctcaggacaggcagactgggatgcttgtgttacccctaactttagattactctcccactgctcccctccttcactgtagattcccacaatttcagtatcaatgtaa

SEQ ID NO: 958221 - DNA, 120 bp, Artificial Sequence
  ENSG00000258620_7 (sequence is synthesized)
ttacaatttaggggcttagaaactcctgtatttattgagaacccacttaatttacatatattgagtttcaatattgcacaactctgtgtggaggggttagggtggaggagacctgagatg

SEQ ID NO: 958222 - DNA, 120 bp, Artificial Sequence
  ENSG00000258620_8 (sequence is synthesized)
acagaaggccatgttctctagggatggtctgcagccctcagtgctgtctcttttccctccagcgccccctctgtgcccccctccaatccctgctccccccagtctctatagctgaaggct

SEQ ID NO: 958223 - DNA, 120 bp, Artificial Sequence
  ENSG00000258620_9 (sequence is synthesized)
aggacgaactgtggggttgtgaatatttacgcaggcaggcataggactcagtgacgcagctgagagccacgcaagtgtttggtgactcatcagaccttctccaaagacttgtgatatttt

SEQ ID NO: 958224 - DNA, 120 bp, Artificial Sequence
  ENSG00000258620_10 (sequence is synthesized)
tctcctctgaagggccgaaagcaatttgcagttaatgatagtatatgacgccagaagagtacgcagaccttccggctcatcttttctgtgccttgggtgttttgtttttgaaaaaaccta

SEQ ID NO: 958225 - DNA, 120 bp, Artificial Sequence
  ENSG00000258620_11 (sequence is synthesized)
aaaacctatgtgaattattttccctttagtaatgtttattttattctgattattaaaataatgtatgctcattgtagaaaatacataaatgcattaaataggaaataaaatgcatgaatt

SEQ ID NO: 958226 - DNA, 120 bp, Artificial Sequence
  ENSG00000258623_0 (sequence is synthesized)
ggggtggacatctccagagacctcactcacctgtgatttgggggataatagcatcactcatgtgttcacgtgccaggcctgtcaccccggaacattagtcaaagggctgtgttgacagtg

SEQ ID NO: 958227 - DNA, 120 bp, Artificial Sequence
  ENSG00000258623_1 (sequence is synthesized)
gcacaagtccttgttgtccagtctgtggcccaaacacccacagggcatggtggaggcctgagacagtgctggttttgctggggccatcagaaaagcttacgaagcaggctcggccattgg

SEQ ID NO: 958228 - DNA, 120 bp, Artificial Sequence
  ENSG00000258623_2 (sequence is synthesized)
ctggaagtcactagcccctgctgggctcatgcaatactcatggaactggtgtgggctcctgcgggttccctatgagcaatgcctcacccatttaaagctcgtcaaaggacttgttcaata

SEQ ID NO: 958229 - DNA, 120 bp, Artificial Sequence
  ENSG00000230506_0 (sequence is synthesized)
atttccgcgggagccctcggggcgctgtgctgtggctgcattgtcactgtttgtttatttctacatctgctctgttagaagataggctcgcttaggacagagccttctaatccaccccct

SEQ ID NO: 958230 - DNA, 120 bp, Artificial Sequence
  ENSG00000230506_1 (sequence is synthesized)
gatgaattcgggccctcgcctttggcacaatgcctggcgtcatcacaacgcgggtgatcagtaaacggcagcgaaggaagcggggtcaggactggagaggagagggggaggaagacagac

SEQ ID NO: 958231 - DNA, 120 bp, Artificial Sequence
  ENSG00000230506_2 (sequence is synthesized)
gaccggagaggaacaaaaatggaagtctccagttggcttcttgtgattggccagaacttttcctcactggagagatgaggagaatccagtcctccaaccagctgagagaaaacactgcag

SEQ ID NO: 958232 - DNA, 120 bp, Artificial Sequence
  ENSG00000230506_3 (sequence is synthesized)
gactcccaagggtctatacatttaaccctggaggaagtggcctctgaccaggcagtgtttcaagaacccagctccattcatcctatgatgccaccatcctcagcatttgacttccatggc

SEQ ID NO: 958233 - DNA, 120 bp, Artificial Sequence
  ENSG00000230506_4 (sequence is synthesized)
tcctatatgctgccaagagaatttttttctttaagaacaaataaactaaagaaattaacatccagcttgctgagtcacttgctttccacttgaattttaactacaaggatctgaagacag

SEQ ID NO: 958234 - DNA, 120 bp, Artificial Sequence
  ENSG00000230506_5 (sequence is synthesized)
cctgtgttaggcagagaaagaaagagacagagaaagagtcagggagaagagaggaagagagatgtagctggagagtcagggagaaattcaaagagatggagagagagactggttctggaa

SEQ ID NO: 958235 - DNA, 120 bp, Artificial Sequence
  ENSG00000230506_6 (sequence is synthesized)
agaaaagataagttaaatagaaaaaggaaagtaatctttgaaaggtttgtttaagacatgtattttcttactctgtagtgggagcgctgaataaaaatatttaaataaaagctgtaatgt

SEQ ID NO: 958236 - DNA, 120 bp, Artificial Sequence
  ENSG00000255772_0 (sequence is synthesized)
ctcctttcattttgcctcttggattgtcatgaacttcctgagcaagaaggccatccaccatgcagtgtaatgtcttgctaagagaaattagtattcagtctgctcaggttccagcaagga

SEQ ID NO: 958237 - DNA, 120 bp, Artificial Sequence
  ENSG00000255772_1 (sequence is synthesized)
ctttcttcatgaagatcttcaagtggaatcaagcagccttgcccatgaagtcatgcctgtggctccactgagaaattcgattaagtattccaatactgctgtgaaacgaagtgatctgat

SEQ ID NO: 958238 - DNA, 120 bp, Artificial Sequence
  ENSG00000255772_2 (sequence is synthesized)
aagaagttacctcagagaagtcaaataatttacccagagtcacaaaataagcaaatgatggaatattcaaatccaggtcttctgactctacctctatctgccttagaggtttctgaagta

SEQ ID NO: 958239 - DNA, 120 bp, Artificial Sequence
  ENSG00000255772_3 (sequence is synthesized)
ttgataagatggaggctggaagagcttgaaacagaccatataaagccaggtctgagctggaaaagcaaagaggcccaaggaacagcacagaccctgactggtggggtatctgtgtatttt

SEQ ID NO: 958240 - DNA, 120 bp, Artificial Sequence
  ENSG00000255772_4 (sequence is synthesized)
cccttttcagtcggcctaggcagaagtagatttactctgaggattcactccaagggtgaagttttaagggtgcttcacttgctctggtttcataaataaattttgatcttcttaaataca

SEQ ID NO: 958241 - DNA, 120 bp, Artificial Sequence
  ENSG00000255774_0 (sequence is synthesized)
gcaagacagccacaccttgaactctgactcaaggaagagagtgggcagctcaccagagaggccagaggaggcggcaggaaggtggggtctctccagccaggggcttcctgaaagagctgc

SEQ ID NO: 958242 - DNA, 120 bp, Artificial Sequence
  ENSG00000255774_1 (sequence is synthesized)
cttctgagcaggccccccaggctaggaagatgtgcacctgccgagctgggcaggagagggtggcccagtggaggacccagcatgggcagaggtttggaggtggcaggtcctgagggaagc

SEQ ID NO: 958243 - DNA, 120 bp, Artificial Sequence
  ENSG00000255774_2 (sequence is synthesized)
ggaaggcagccaggttgtgacagcctgtgaggacctcttggctcccggagccttctctctcctggaatagagatgacaccgtgctgccattgaactcaacccgaaaaaatgatctgttgc

SEQ ID NO: 958244 - DNA, 120 bp, Artificial Sequence
  ENSG00000255774_3 (sequence is synthesized)
cacaggaaataatggagcaatgttacacgataaactgtaaagtgtggtgagcatgtgaacaagcgtccaggacccagcgaagccccaggctactgggctaggcgtcagatgagaagaggc

SEQ ID NO: 958245 - DNA, 120 bp, Artificial Sequence
  ENSG00000255774_4 (sequence is synthesized)
agagggcaacctcctgtaggatctgaggccttcatgtgctcagcccatggctgtcgtcacggtgacgtgtgcatgcgatgtatctgggccatccttgttcttgaacgcgggcagtgagtc

SEQ ID NO: 958246 - DNA, 120 bp, Artificial Sequence
  ENSG00000255774_5 (sequence is synthesized)
ccacggtgatgtggcatgtcacgagctgaaggaggggcacctgcattcaggcttgcgaaccagcgagacagcctttggacctttcggagcctcactttcccacactaagaattggagtgg

SEQ ID NO: 958247 - DNA, 120 bp, Artificial Sequence
  ENSG00000255774_6 (sequence is synthesized)
agagggctgcatgggcctctatgtgaggacctgattcagggaaggtcttttgccacagtgagctgcatcagcctggactgtcagagaagccctgttggagtgactgctgggttcgagggg

SEQ ID NO: 958248 - DNA, 120 bp, Artificial Sequence
  ENSG00000255774_7 (sequence is synthesized)
ttttatttctccagaacattctgcaggtgagctggggaagcccactggccctggcctcacccccgagcccgagccttcagcctgggaatggtctggcctcttccttgctggctctccagc

SEQ ID NO: 958249 - DNA, 120 bp, Artificial Sequence
  ENSG00000255774_8 (sequence is synthesized)
ctggcctcgcaggaccctgggcgggaccccaggaaccctcacccgctatgtgcttccccaagaagcgctccctgtggcctaatttgagaaaacaatgggcctcaatccatattaatgacc

SEQ ID NO: 958250 - DNA, 120 bp, Artificial Sequence
  ENSG00000255774_9 (sequence is synthesized)
ctagagggaccctttgtcctcggtgcacaggctgtaatcagcggggctccgggggctctggcctaatttggagggacaggttttatcatcacccttgattcgggtgacccaatctgacag

SEQ ID NO: 958251 - DNA, 120 bp, Artificial Sequence
  ENSG00000255774_10 (sequence is synthesized)
accccctgtatgcggggtccacgtcagagatgggcttcctcccagcggcccaccccagcgggctggggagagggaagggggaggtggtggccatgggggaagttcggggtgaagaagggg

SEQ ID NO: 958252 - DNA, 120 bp, Artificial Sequence
  ENSG00000255774_11 (sequence is synthesized)
tcacagccagacccccacttggatgggcctgtgatcgggttctcgggaggagcaggatattgattagatcagtgaatggtgtggaggcagctctccccaggcacgtgctcccgaccaccc

SEQ ID NO: 958253 - DNA, 120 bp, Artificial Sequence
  ENSG00000255774_12 (sequence is synthesized)
accagcaagcgtctgttgcctgccggtgccagggctgggtggggactctgggacaggccggctgcctaggaggggccaggcaggagccaaggggctggctccagggactgccaggagggc

SEQ ID NO: 958254 - DNA, 120 bp, Artificial Sequence
  ENSG00000255774_13 (sequence is synthesized)
cccagggaaggggagccgggaagcgttttggctgcctccggcgtgaagtcgtggaaacgtgtttgcaggttagggccgtggcatcctcgttgcaccatttgagcgcctatggggtgccag

SEQ ID NO: 958255 - DNA, 120 bp, Artificial Sequence
  ENSG00000255774_14 (sequence is synthesized)
atacatgacaaagggccacctcatttaatgcttccctcaaccttcccaggccccgatccccatgttctgggtcaggaggcccattcgaggtcaaggggtgggcgaaggctgacgagacaa

SEQ ID NO: 958256 - DNA, 120 bp, Artificial Sequence
  ENSG00000255774_15 (sequence is synthesized)
acccagggactagctcctgagtcccaaaacctgtcctcacccacccaggggtcccctgcacgctctccagggtgtgcggtgcgtggctgctgggtttgggtgcattagagcctgaggcaa

SEQ ID NO: 958257 - DNA, 120 bp, Artificial Sequence
  ENSG00000255774_16 (sequence is synthesized)
gggcttgagtctgaattctcgctacggaccaaatgtgtgcgtcctccctaaatacatatgttgaagccttaactcccaatgtgatggcattaggagaggggacctgtggaatgtagttga

SEQ ID NO: 958258 - DNA, 120 bp, Artificial Sequence
  ENSG00000255774_17 (sequence is synthesized)
gtcctgagggtgcggccccgtgatgaaattagtggcctgataagaagaggcccagagaaccggctctgtctctgctctctgtcgcacgaggaccccacaagaagacggccacctgcaaac

SEQ ID NO: 958259 - DNA, 87 bp, Artificial Sequence
  ENSG00000255774_18 (sequence is synthesized)
gtcgcacgaggaccccacaagaagacggccacctgcaaacagccattgaatctgccagtgacttggtcgtggagttcgatttaaacc

SEQ ID NO: 958260 - DNA, 78 bp, Artificial Sequence
  ENSG00000255775_0 (sequence is synthesized)
ctgaagctacagaccttcgtgcgtgtcagattccatgccacccatgtgatgttactcaatggaaaactgggaagactt

SEQ ID NO: 958261 - DNA, 120 bp, Artificial Sequence
  ENSG00000255775_1 (sequence is synthesized)
cattatgtgtcatttccatcacacagatacagacattggaaccctgatccgcaaagatgatagcagttctgcttggttcctgtctgagcctggatctggatctgggaggtgctggcgggg

SEQ ID NO: 958262 - DNA, 120 bp, Artificial Sequence
  ENSG00000255775_2 (sequence is synthesized)
tcctgttcttccgctctggtgggaatctgattgtgatcagcattgggccgcatgccagagacggctgcagtcctgtgcctggcctggccggcctcggtgctacccgccacccctcacgtc

SEQ ID NO: 958263 - DNA, 120 bp, Artificial Sequence
  ENSG00000255775_3 (sequence is synthesized)
ttcccttctggctccttgtacgtcactggtcagtccgcgaaccctgactctccatcagtgagctgtgtggcactgggcaagcctctgcccttctctacttcccagggtacagagtgagct

SEQ ID NO: 958264 - DNA, 120 bp, Artificial Sequence
  ENSG00000211739_0 (sequence is synthesized)
atggactcctggaccctctgtgtgtccctttgtatcctggtagcgacatgcacagatgctggcattatccagtcacccaagcatgaggtgacagaaatgggacaaacagtgactctgaga

SEQ ID NO: 958265 - DNA, 120 bp, Artificial Sequence
  ENSG00000211739_1 (sequence is synthesized)
tgcaggtatgcccacagagcgattctcagctgagaggcctgatggatcattctctactctgaagatccagcctgcagagcagggggactcggccgtgtatgtctgtgcaagtcgcttagc

SEQ ID NO: 958266 - DNA, 120 bp, Artificial Sequence
  ENSG00000242282_0 (sequence is synthesized)
tgtgaagaatgctgctgtgaacaggggagtgcccctgcctgtttgggtccctgctttccatttctttgggagctcttggaacagaaccagacttctggccggggctcagtcagtgcttgc

SEQ ID NO: 958267 - DNA, 120 bp, Artificial Sequence
  ENSG00000242282_1 (sequence is synthesized)
aagatgtttgttggcaccaggctgtgccaggagagcatcattataaactgctgatctactgtttctttgtcaaacgggaggagataacatgagggtcatgagaaatgtttgcagacggag

SEQ ID NO: 958268 - DNA, 120 bp, Artificial Sequence
  ENSG00000242282_2 (sequence is synthesized)
aatgccttgaaagtgctgcgaccaggtgctgacacccggaggtctggctgctcaaagtgttagctgacacggaagacacacggactttccctccattccccaaaactccccttccctgac

SEQ ID NO: 958269 - DNA, 120 bp, Artificial Sequence
  ENSG00000242282_3 (sequence is synthesized)
tcgtcagctgcataaaaaccctctccttatctctttgtcaaggggatttgagaaatcttgctgtcttgtcttcttgctttggccaaatggaataaacctttctctgtctccagacaccta

SEQ ID NO: 958270 - DNA, 120 bp, Artificial Sequence
  ENSG00000242282_4 (sequence is synthesized)
caggaaggagcctctgcagaaacggaaccagcgggaaccttgacctgagacttgcagcctccagaactgggagaaaatagatttctgttgtttcaagcccccgagcctgtggtattttgt

SEQ ID NO: 958271 - DNA, 120 bp, Artificial Sequence
  ENSG00000242282_5 (sequence is synthesized)
cccagcagcctgagcaggctgaaatggtcccaagttcttgtcccacatccagaagaataaggttatgcagacaaccagagagtgagcagggcagaaaaaaacttctattgcatgatggaa

SEQ ID NO: 958272 - DNA, 120 bp, Artificial Sequence
  ENSG00000242282_6 (sequence is synthesized)
cagctcccagcgttgaggggacctgagagtgggcagccactacctgaagagggaccacgcttcgcttatccagtcgtcattcacggaccctgcattgtctctgcctcttgggctttgtga

SEQ ID NO: 958273 - DNA, 120 bp, Artificial Sequence
  ENSG00000242282_7 (sequence is synthesized)
gagaggagattgcggggtcatgtggtcattctgtttggctcttggaggagcaggcatcctgttttccacagcagctctgccatcaaatggcactttcttagtgacacctcccgtatctct

SEQ ID NO: 958274 - DNA, 120 bp, Artificial Sequence
  ENSG00000242282_8 (sequence is synthesized)
ccccataaatgtatctctccccataaacattgcaactcctggctcaccttccttctcctgtaacttgtcactgtggaactctcaggtgtgcctgagccgactcgtagcagcccaggaggg

SEQ ID NO: 958275 - DNA, 120 bp, Artificial Sequence
  ENSG00000242282_9 (sequence is synthesized)
ccagcagtgaggccccttccccactccgtggtcagtgccttcacacagggagtttggaggtggctgtagtgggaggactcacaccgcagaaatcagccagtgctgcaggtcaggggccgc

SEQ ID NO: 958276 - DNA, 120 bp, Artificial Sequence
  ENSG00000242282_10 (sequence is synthesized)
catcccccagagctgctgtgagacatcgaccagcacatcagtgggctgctttccgctggttttatttgcatgtattttggtctgtttccctacctagaaaataaactccctgtggcagaa

SEQ ID NO: 958277 - DNA, 120 bp, Artificial Sequence
  ENSG00000242282_11 (sequence is synthesized)
gggcttctacaacaattgtacttatagcacaaataaagtacaaagtgttagggaagaccaaagaccataggtagaaaacttggatacaacttccaaataaacactcttcaaaacatttaa

SEQ ID NO: 958278 - DNA, 120 bp, Artificial Sequence
  ENSG00000229459_0 (sequence is synthesized)
ggagatggaaacagggaatttcctactctcctccattccctggactcatagccttttaagactccatcagcctcgaagttcatttgtgtggcactaaaagtaaaccaaaagcaggaagct

SEQ ID NO: 958279 - DNA, 120 bp, Artificial Sequence
  ENSG00000229459_1 (sequence is synthesized)
aaggatctttcacctctaatgcaccctgaccttggctatttcatgtcagggtctgtgcagtctaagcccaggcagccaacatgcttggaggatacttcatgtagtggtacctacagctct

SEQ ID NO: 958280 - DNA, 120 bp, Artificial Sequence
  ENSG00000229459_2 (sequence is synthesized)
agaccaatgtctgagacttgtccttctgaagaagtggatgtctgctgcccacttgtgagaattgcttgcagccaaacgtaaggccgtgggcccagttaggcaccagagggctcatcagct

SEQ ID NO: 958281 - DNA, 120 bp, Artificial Sequence
  ENSG00000229459_3 (sequence is synthesized)
cattgtcgcccactttagtctgccgagatcccacccacttgatcttgtcgggagagaaggctggttcttcctcagtcaccaggggccaacgtcacccttgcagagtatgtgagcaccaag

SEQ ID NO: 958282 - DNA, 120 bp, Artificial Sequence
  ENSG00000231231_0 (sequence is synthesized)
ttccaccagtttgtccaccggtgaaaaggagaagccagccaagaaccagcagcttctggctaccttgatcagaaggttgatgaaggcaatgaaacaaagatggaaaaacacatcacacag

SEQ ID NO: 958283 - DNA, 120 bp, Artificial Sequence
  ENSG00000231231_1 (sequence is synthesized)
gcccttaccagatgccagcatcttgatattggacttcccagccttcagaactcaattacaaagatatgctaatgctctgcaccaagtggcagctacatgcttgagaccaacactgaaaat

SEQ ID NO: 958284 - DNA, 120 bp, Artificial Sequence
  ENSG00000231231_2 (sequence is synthesized)
gaatcactgcatatctgaacaagggccacgagaggaggcacagatgggtcaactgacttgagcagagccacccagcaaattcagcgtcggagtatgcttcccttgcctgagaatcgttac

SEQ ID NO: 958285 - DNA, 120 bp, Artificial Sequence
  ENSG00000231231_3 (sequence is synthesized)
aaagaggagcatctgatgaggaaatgagaactccagccagaaaccagcaataaattgagggctcctatatgagcaatgcattctccagccccaatcaagcctttggataactgcagctcc

SEQ ID NO: 958286 - DNA, 120 bp, Artificial Sequence
  ENSG00000231231_4 (sequence is synthesized)
tgccagcattttgactgcacttcatgaaacactttgagtcagagccacctacctaagccactccaaaattcctgaccgtcaaaaactttgagataataaatgcttgttgttttaaactac

SEQ ID NO: 958287 - DNA, 120 bp, Artificial Sequence
  ENSG00000231231_5 (sequence is synthesized)
accagatgccagcatcttgatattggacttcccagccttcagaactataaggctccagtcaagcaacccaccttatcaagtggaccaggcacagctcctacttatccctgagtagtgggt

SEQ ID NO: 958288 - DNA, 120 bp, Artificial Sequence
  ENSG00000231231_6 (sequence is synthesized)
atcagtttcctgctaacctcggaattgttcaaagcccatcacattctcctgcaggaaccagggagcacctcaccctcttgttgctacaaagcttgccacccacagcccctgcctgttcac

SEQ ID NO: 958289 - DNA, 120 bp, Artificial Sequence
  ENSG00000242136_0 (sequence is synthesized)
caaggagcgagtgaaggtcaaagccacacatggggctgaggggccaggtggccgccttatgagatcgaaggcgggaagctttggaacagggcaaaaaggggagcccagggtgaggggaga

SEQ ID NO: 958290 - DNA, 120 bp, Artificial Sequence
  ENSG00000242136_1 (sequence is synthesized)
accctggggcctgactctgccccgcccctcgcaacactcaacaaacgcttgtggaaggagtgaacaaatgacaagtcacgaaacctaaatacagagtcttcagctttggaggagactgag

SEQ ID NO: 958291 - DNA, 120 bp, Artificial Sequence
  ENSG00000242136_2 (sequence is synthesized)
gtgcgggacatggaaaagaaggtcattctcttggagccccaacaatgaccaggagaaattcatttggcggtaaaaccacacgaaccctattacatcaccaagccctcaccgtttccagca

SEQ ID NO: 958292 - DNA, 120 bp, Artificial Sequence
  ENSG00000242136_3 (sequence is synthesized)
aggtatgtcacaagaagccctccaggcagcgagtcacttagcactgcacaggtagcaactttctaaaatattttacctttagtattgtcatttcatatttctgtctttctcttactttag

SEQ ID NO: 958293 - DNA, 120 bp, Artificial Sequence
  ENSG00000242136_4 (sequence is synthesized)
tgtactattttatggtgtcttaaaccatcacgcaattccacgggtatgcagcacaaagaattgagaagtaattccgataagagcaggggaatagtaattgaaactgacacccatgtgaca

SEQ ID NO: 958294 - DNA, 120 bp, Artificial Sequence
  ENSG00000242136_5 (sequence is synthesized)
gggtctctacaaagaggcaagctgggactgaaatctctcccgagtgtggaagacggacgggagcagcagccggacagcacagctcaaggccgagaggctcactgggtgactcgggccgct

SEQ ID NO: 958295 - DNA, 120 bp, Artificial Sequence
  ENSG00000229457_0 (sequence is synthesized)
agaagaggaaactgaggctttagagaactgtagcacattggcaaggacatccagctcataaacaatccatcagaaaagtgaggtcactgagcaacccaccacccaaaacctggacagaca

SEQ ID NO: 958296 - DNA, 120 bp, Artificial Sequence
  ENSG00000229457_1 (sequence is synthesized)
gagaaatacagaagcatggcttacagagagcagaagcagctgctggagccaccatctggtagaaacacttcagggatgagaaaacagtgacctggagacagttatttcaccaacaaaggc

SEQ ID NO: 958297 - DNA, 120 bp, Artificial Sequence
  ENSG00000229457_2 (sequence is synthesized)
ctcagttccatcatacagagaacattttgctgagatgacaccaacttccagttcttcacaaagatgcagccctcagccttcagcatgagaacagggacatcagcctgctttgcccatgga

SEQ ID NO: 958298 - DNA, 120 bp, Artificial Sequence
  ENSG00000229457_3 (sequence is synthesized)
actgtctccagagcctacaacaatgctcagcctatgagagttgtcacatctgggaggatcatgggagagctgcttctgatatctggagagcagaggctaggagtgctgctcaacattcca

SEQ ID NO: 958299 - DNA, 120 bp, Artificial Sequence
  ENSG00000229457_4 (sequence is synthesized)
acagcagaaatgacaaggcataacaagtcacgtaagggagctctttggtttttcctgggagttaaagtaaagatttacctcctcttaatttttccagtgggtggtaaacaaacttctcta

SEQ ID NO: 958300 - DNA, 120 bp, Artificial Sequence
  ENSG00000229457_5 (sequence is synthesized)
agcctcttctggtaagggcttccgagatagtttttacatgcaggaagagagaacaagtgcaggcaacgtccaaggtcctcttgttttgcagatcactgcacaacagaccctcaggtagaa

SEQ ID NO: 958301 - DNA, 120 bp, Artificial Sequence
  ENSG00000229457_6 (sequence is synthesized)
caagtttagatagtgactcttaaccaaagtacaagttagcatcacctggaagactttactaaccatggttggctgagagtctgtgggagcagaagaggaaactgaggctttagagaactg

SEQ ID NO: 958302 - DNA, 120 bp, Artificial Sequence
  ENSG00000229457_7 (sequence is synthesized)
ccagctcataaacaccctcagccttcagcatgagaacagggacatcagcctgctttgcccatggaactgtctccagagcctacaacaatgctcagcctatgagaggtgtctcctagaaga

SEQ ID NO: 958303 - DNA, 120 bp, Artificial Sequence
  ENSG00000229457_8 (sequence is synthesized)
ctttccatttcaacaagcctcatttatatgcaactggcaatttctctaaacagaagaaaaggggagattttgccaatcaattggcttcaccatcccccagccccaaagtgtgtttaagaa

SEQ ID NO: 958304 - DNA, 120 bp, Artificial Sequence
  ENSG00000229457_9 (sequence is synthesized)
catttgcctgtgcatgcatgtgttttcctttgcatcccacaagaggaagggtctcgctctgtggcccaggctggagagtatggtgcaatcaaggctcactgccccatgttcaagccatcc

SEQ ID NO: 958305 - DNA, 120 bp, Artificial Sequence
  ENSG00000229457_10 (sequence is synthesized)
tcccacctcagcctcccagatagctgggactagagacacacatcaccacgcatggctctgggttacttcaataagtatttttcaataaatatttcttcaataaatatttaataacacaaa

SEQ ID NO: 958306 - DNA, 120 bp, Artificial Sequence
  ENSG00000286550_0 (sequence is synthesized)
ggctgcacaaatgcatatgaagggcggagatatgaaactttacctctagctccaggggctggaaacagcttgtcaggaagaatagagagggactgctcctagagctttgttcgacagttt

SEQ ID NO: 958307 - DNA, 120 bp, Artificial Sequence
  ENSG00000286550_1 (sequence is synthesized)
ccaggacagccaggagaggacacaggaatgaccagacccaaagggcatagcccacagccaagtggacaggaacacaacttgatgtcctcaaagtagcccaataggttctggaaccgaagt

SEQ ID NO: 958308 - DNA, 120 bp, Artificial Sequence
  ENSG00000286550_2 (sequence is synthesized)
tcagactggtcacctccctctggctggcaggaaaatgggaggccacagaagagctcagcatctgaagaaagggtggtgctggcaggcagagagcaacaagccctggcttcttgttgggct

SEQ ID NO: 958309 - DNA, 120 bp, Artificial Sequence
  ENSG00000286550_3 (sequence is synthesized)
ggtagtgtgaggactcctgagaaaatccattgcctatatgggcagcaacatgcaacagctgggggctaagtgtcaggttaaagtgtacaaccccatgggattactaggaagaacacagcc

SEQ ID NO: 958310 - DNA, 120 bp, Artificial Sequence
  ENSG00000286550_4 (sequence is synthesized)
ggccagtgaagagtgcctattccaggaaaggccctgtggacttacacccttgggtttgttagcaagtgagtcttgcaagttgcaattatggagtgtacaaattttctcaggaaagacatc

SEQ ID NO: 958311 - DNA, 120 bp, Artificial Sequence
  ENSG00000286550_5 (sequence is synthesized)
aagaaaagtggcatgaagggagaggaaaggcagaaaagatggtcatgcaatcctctacactttgtgagacctttgcagtgggagacccccgagctgcccacaattcaaaggccatctcca

SEQ ID NO: 958312 - DNA, 120 bp, Artificial Sequence
  ENSG00000286550_6 (sequence is synthesized)
atctcagcctgcaagaagattccagagcgatcacagcccaccagtctcagctgttttgtaagcattgattgctgccaacaactgttctctaggggctttgtgtatgtgctaggaggtagg

SEQ ID NO: 958313 - DNA, 120 bp, Artificial Sequence
  ENSG00000286550_7 (sequence is synthesized)
gctcttcagaaaaggagtggaagctacaacctcaagacaatatctagagagaaggcagtcagaggagccaaggaaagagctagtttattaacgtttgaccaagacccaggacaactgtta

SEQ ID NO: 958314 - DNA, 120 bp, Artificial Sequence
  ENSG00000286551_0 (sequence is synthesized)
gagcatttgcagcccaggctgtcaggaatcccaggcctgccgcggcctccctgagctcctggggcaattccatgtctacagttcttcagttccacagtggtgtcaaagcccatggttcat

SEQ ID NO: 958315 - DNA, 120 bp, Artificial Sequence
  ENSG00000286551_1 (sequence is synthesized)
ggggacacagtcctttccactggcagagaccaactgggactgccaggtggaggtgctgcagtcagccatgggggcaggaaagggaaggtcagatgctgggcaggagaccctggacttgga

SEQ ID NO: 958316 - DNA, 120 bp, Artificial Sequence
  ENSG00000286551_2 (sequence is synthesized)
gtgtcacagacagaaggcaacttggagggcaaccgggtcagcccacccactcccctcagggagactgaggccccagacagaggggaagtgacttgtccaagaccacaccagtgctgagct

SEQ ID NO: 958317 - DNA, 120 bp, Artificial Sequence
  ENSG00000286551_3 (sequence is synthesized)
ttctttctgcatagaccctgctccctctggagtttgtgcctcagtgtgcagttctgtgacctgactggattggtccagatgactcaaagttcctccaagctgagacatctgcttttgttc

SEQ ID NO: 958318 - DNA, 120 bp, Artificial Sequence
  ENSG00000286551_4 (sequence is synthesized)
atggcttattcctgagaacccctggaaaaggcagctgcagctggagctggcccccgcccctcccaggcactccaaggccaagggtcctttccctcctgacgcaggagtcacccgtgggga

SEQ ID NO: 958319 - DNA, 120 bp, Artificial Sequence
  ENSG00000286551_5 (sequence is synthesized)
cagagggggggatcagcccacctgcagcccacacctgcagcggagggcaggagaaggcagtggttcccctgggaacggctcacctgcaggggcctgggagggtcttgtgagctccttgga

SEQ ID NO: 958320 - DNA, 120 bp, Artificial Sequence
  ENSG00000286551_6 (sequence is synthesized)
tccaggtgggagcagcctccatgcagagctcagacaatatcttccctggggaagtttagacaaccaggctggtgagcaaacttcctagatttgattaaaagaagcctgacgctttcaggt

SEQ ID NO: 958321 - DNA, 120 bp, Artificial Sequence
  ENSG00000286551_7 (sequence is synthesized)
tctgctgctgacagccgagagcagacttgcctcctgctcagcaaggtgggggccactgaggcatcttttcttttaaaaaagaaaaaacaagaataccatggtgatagtgaggatgtggag

SEQ ID NO: 958322 - DNA, 120 bp, Artificial Sequence
  ENSG00000286551_8 (sequence is synthesized)
caattgagataccctttttcttttttgctgcttggaatgcaaaatgttacaactgctttgaaaacaggtttgcaattgcagtttcttattgctttaaacacacacttaccccgcaaccca

SEQ ID NO: 958323 - DNA, 120 bp, Artificial Sequence
  ENSG00000286551_9 (sequence is synthesized)
gcaaatcctctttcaagatatttacccagaggaagtgaaaagaagttatgttcacacaaacacttatgtgtataagtttgcggtggttttattcataatcaccaaaaattagaaataaca

SEQ ID NO: 958324 - DNA, 120 bp, Artificial Sequence
  ENSG00000286551_10 (sequence is synthesized)
caaattttatttaaccgatgaaatgcataaacagactgaagtatatccataaaatggacttgtactggaaaatataaacaaactacggatatgtggaacgtggtgaaactcaaaagtgtt

SEQ ID NO: 958325 - DNA, 120 bp, Artificial Sequence
  ENSG00000286551_11 (sequence is synthesized)
atttttgaattctggaaattaactacacgcgagaacaaactgaaaaacaccaattaccaattactgaaccttggtaataccagtgggtctgtggtgtatttaacttggggctattctcat

SEQ ID NO: 958326 - DNA, 120 bp, Artificial Sequence
  ENSG00000286551_12 (sequence is synthesized)
actctctcaccctccagctcagaggtgcagtggtggtgaaaagccaacattctcgcagccaaaagaggattgactgctttaaagctctgtagctggaagagaggatattgcgtgttctca

SEQ ID NO: 958327 - DNA, 120 bp, Artificial Sequence
  ENSG00000286551_13 (sequence is synthesized)
aaatgataaatgtttgagatgatggatatcctaattaccatgatctgatcattaacatggcatatattgaaacatcattatccattttatatatatatatatacacaatcactatgtgtc

SEQ ID NO: 958328 - DNA, 120 bp, Artificial Sequence
  ENSG00000286551_14 (sequence is synthesized)
atatatacacaatcactatgtgtcaattaaaagtaatttttattttgtcaggcacagtggttcatgcctgcaatcccagcacttcaggagactgaggcaggaagatcgcttgagcccagg

SEQ ID NO: 958329 - DNA, 120 bp, Artificial Sequence
  ENSG00000286551_15 (sequence is synthesized)
tggcaacatagcaagatcctgtctctacaaaaaaatttttaagaattagctaggcatggtgatatgcacctgtgatcccacaggtgatatgcacctgtgaggtgggatgatcacttgagc

SEQ ID NO: 958330 - DNA, 73 bp, Artificial Sequence
  ENSG00000286551_16 (sequence is synthesized)
tttttttaaagggcctatactcagagaaagtcagtagtttagcccaaccagaagctgcctagaatatctctat

SEQ ID NO: 958331 - DNA, 120 bp, Artificial Sequence
  ENSG00000286551_17 (sequence is synthesized)
gtagtttagcccaaccagaagctgcctagaatatctctattcctatgatgttgttgctatttgacttgtctgtgaactcagctctgcaaataaaacttcatgcccatggcactactgaaa

SEQ ID NO: 958332 - DNA, 120 bp, Artificial Sequence
  ENSG00000286551_18 (sequence is synthesized)
acggtaagaatctgctggtaacattgctgctgcctaaggctatgatttcagttggggctaacaagagcctggccgaaaaatgaaaaggaagacatatagaactaaaaagccatggggaac

SEQ ID NO: 958333 - DNA, 120 bp, Artificial Sequence
  ENSG00000286551_19 (sequence is synthesized)
ttgaagagttctgtatttctgcctgtgcagggctatatacacgtccaagaaagacctggggaaggaggaggccctgtcgctcactgctgaccttgaggccctaaacaagcaggaagtgga

SEQ ID NO: 958334 - DNA, 120 bp, Artificial Sequence
  ENSG00000286551_20 (sequence is synthesized)
aactacagagggtttttaaactgcttgaagtttgaaagtatgtacattcccacacagataactttggcaaaggatggagaaccgatgctcaaggcagttaagaaaatctgatcgatcact

SEQ ID NO: 958335 - DNA, 120 bp, Artificial Sequence
  ENSG00000286551_21 (sequence is synthesized)
tgctgagcaataaattgtattgacaaaagactgaaccccaggagaccaggcttaaagatataaacaaactgatcaaaaggtggggaacaaggaatttagtggctgcatagtacaggaaac

SEQ ID NO: 958336 - DNA, 120 bp, Artificial Sequence
  ENSG00000286551_22 (sequence is synthesized)
gattttcttttgggctggcaaagacaccagccgtgttcatgccggctggtggcaacctattcaggggccacaacttccgcggtcatttatttgccgcttctttgaaagcccacctccctg

SEQ ID NO: 958337 - DNA, 120 bp, Artificial Sequence
  ENSG00000286551_23 (sequence is synthesized)
gcagtctcggcgaagccttgaatctcacggctccgctccctctggaaggcgtggagaggcccaagccgggagggctgtccgggcacaggctcttgctccatccccactgcccctggtgat

SEQ ID NO: 958338 - DNA, 120 bp, Artificial Sequence
  ENSG00000286551_24 (sequence is synthesized)
ggacgccatgggaaatgagtgagcggccctcctgtaagtgtttgcagcatcttgtcatcagagaacctctctgaacctctgttttgtcttctgtggaaggaagtcatcatggcgtctacc

SEQ ID NO: 958339 - DNA, 120 bp, Artificial Sequence
  ENSG00000286551_25 (sequence is synthesized)
aaaaatacgggactggggtaaggcaagtgaagcacttattggaggcccaacctttagtttggtgggagggggcatgcgcagaaaaactcagtaattgagataaataatattttagcacaa

SEQ ID NO: 958340 - DNA, 120 bp, Artificial Sequence
  ENSG00000286551_26 (sequence is synthesized)
tctatttaaatatcaaaattaatgcaaagatatccccgataaatgaaagatcaaaattgtaaatagagaaactcagtaattgagataaataatattttagcacaatctatgtaaaaatca

SEQ ID NO: 958341 - DNA, 120 bp, Artificial Sequence
  ENSG00000286551_27 (sequence is synthesized)
aaattaactcaaagatatccacgataaacaaaagatcaaaattgtgactcaaggcaggaaagacgattcatatttctgcggtttcctttggcttcaggaaactgttcagtaactgtgaaa

SEQ ID NO: 958342 - DNA, 120 bp, Artificial Sequence
  ENSG00000286551_28 (sequence is synthesized)
taaaggaccttagattgaaggactcttttcaaagttatcttagcaaacctccttgttgaacgtgagggaaacaacggctgaggggtggggctttactccaagtcagtgacagggctggag

SEQ ID NO: 958343 - DNA, 120 bp, Artificial Sequence
  ENSG00000286551_29 (sequence is synthesized)
cagggtgcagggtcctgggcttacccagggctctctctggggtctgcacctagaccgccttacctccgagggaaaccctgcaaacctcagccacgggccccgccaattgttcctggcagc

SEQ ID NO: 958344 - DNA, 120 bp, Artificial Sequence
  ENSG00000286551_30 (sequence is synthesized)
gctgatcaagggaggccggccctgtctccaggtgtccgtgcgaactgacctcttctgcaaagtgaccaaagtcccctcccactgtaagaatccagccccttcctttccccattctgctcc

SEQ ID NO: 958345 - DNA, 120 bp, Artificial Sequence
  ENSG00000286551_31 (sequence is synthesized)
ttctacctcctagtctagcccgctctgttttatcaactttggcttattttgtgcatttattccatcctgttttatagtttccattctagtgtatatgttccattcctttctattttattt

SEQ ID NO: 958346 - DNA, 120 bp, Artificial Sequence
  ENSG00000286551_32 (sequence is synthesized)
attttatccattccatccttttgggtccaccccacctcactgtgctcctgcacgcagccccgctgaagggccccagtgtttatttagaagggcacggtggaaacatccatgtctgcaagc

SEQ ID NO: 958347 - DNA, 120 bp, Artificial Sequence
  ENSG00000286551_33 (sequence is synthesized)
ctgcctcccaggggccgcctgccgcctttccggcaaatgcccacatgagctcatgctttgtggttggggctttaaaaaaaaaaaagtcaacaaatttgaagggaaagcaaggcctgtctt

SEQ ID NO: 958348 - DNA, 120 bp, Artificial Sequence
  ENSG00000286551_34 (sequence is synthesized)
tcatctgatagctcccagatccgtttctgatcagcctcccatcatcagaggtgtctgcaaaatttcagctgcaaacattcacctccatgtttgcctccgcacccgctgccagctgtctgg

SEQ ID NO: 958349 - DNA, 120 bp, Artificial Sequence
  ENSG00000286551_35 (sequence is synthesized)
gcacccgctgccttggggctgcactgcagacggggttgggagggaccttggggcttcatcccatcttgatgcttcctcaagaagaacgttcttgttggggtggcagcctgagcttctctc

SEQ ID NO: 958350 - DNA, 120 bp, Artificial Sequence
  ENSG00000286551_36 (sequence is synthesized)
ttaactgccttgtgccttccacgcttccagaattgtcataaaactaggaagacacacacgtatgcatgcaaaaacgcacaatatctcaacttccacttccctggcccagcgccctcagcg

SEQ ID NO: 958351 - DNA, 120 bp, Artificial Sequence
  ENSG00000286551_37 (sequence is synthesized)
ccaggctctgtcacagagatgagggcgcccatcaggcattaagtgaaacctagtgtttggtgctttctttttcctttgttgttgcaaaacgaaaatgtttctcttggaaatcaatggtaa

SEQ ID NO: 958352 - DNA, 120 bp, Artificial Sequence
  ENSG00000286551_38 (sequence is synthesized)
tggtctgtattctagacctttgtctttgcattgacatgtataggtggatattttgccaaaaaaaagttgtttagtattgttctgccatgatttggtttcactcctggacatattgtcatg

SEQ ID NO: 958353 - DNA, 120 bp, Artificial Sequence
  ENSG00000286551_39 (sequence is synthesized)
ttggcacatatagatgtatcacatttttactggctgcataatatttcgttgtatgaagtattgttttgtttcgtgatttctctgctgaagaatttttatttttgcttttacaaataaagt

SEQ ID NO: 958354 - DNA, 120 bp, Artificial Sequence
  ENSG00000286552_0 (sequence is synthesized)
tacatggtactgtttctcccatagccaggagtgtccaggaatcaaggggtggaaatggaagtggaagtggcatgactcaccatcactgctagtgatccatgagcaaaatttttgcttcct

SEQ ID NO: 958355 - DNA, 89 bp, Artificial Sequence
  ENSG00000286552_1 (sequence is synthesized)
ttatgttctgctggcctagagagggagacacaacaatgatcccattaaactggaagttaagatggccacctggacactttgggctcctc

SEQ ID NO: 958356 - DNA, 87 bp, Artificial Sequence
  ENSG00000286552_2 (sequence is synthesized)
ggctcctcctacctttaagtcaacaagctaacaagggagttatagtgttagctggggtgatttatacaacggaggtaaggaagagta

SEQ ID NO: 958357 - DNA, 69 bp, Artificial Sequence
  ENSG00000286552_3 (sequence is synthesized)
gatgaaatcagtctactactctacaacggaggtaaggaagagtatgcatggaacacaggagaaaactac

SEQ ID NO: 958358 - DNA, 120 bp, Artificial Sequence
  ENSG00000286552_4 (sequence is synthesized)
aagggaatacagaattggtagcagaagaaggtagtcatcaataccagctacaaccacgtgaccagctgcagaaacgaggacgatggaaaaaagaagcttggagaaggggaaatgacttta

SEQ ID NO: 958359 - DNA, 120 bp, Artificial Sequence
  ENSG00000286552_5 (sequence is synthesized)
cccagctaagaatatggcaaagctgagccaactagtcaagttttctgaccccaaatcctgtatttcccatgactcatcttgtggaaggctgaggcctcagtttctctgtcagcaccagat

SEQ ID NO: 958360 - DNA, 120 bp, Artificial Sequence
  ENSG00000286552_6 (sequence is synthesized)
ggggacttcttcagcctgacactccataactcaaggttgcacccacatctcctacctttgggggaaggagagagggattatgggacagtggcatcaatctccttcccaggatggatcctc

SEQ ID NO: 958361 - DNA, 120 bp, Artificial Sequence
  ENSG00000286552_7 (sequence is synthesized)
tgagctctatatttcttgcctatagtgaccagggaattttcctctattgattgctttctgtaatcgagcttaacaaatagaacttccctcaaatgattcttccaactaaactgatagaaa

SEQ ID NO: 958362 - DNA, 120 bp, Artificial Sequence
  ENSG00000230768_0 (sequence is synthesized)
cataggcattcagaatctggtgaaaaaatcttctaggagcagctaacaagaatcctaatacaggagtgtttatggttgggttgagacacattcagtagctgagtgattgacagcaagagg

SEQ ID NO: 958363 - DNA, 120 bp, Artificial Sequence
  ENSG00000230768_1 (sequence is synthesized)
agcaagacatgaggttaataattatcaaatatatggcaatgctggactttagctgatcatcgtgcttctggaaaacaacaaaaattgagatatctgttcaccactttgtgtgtccaagga

SEQ ID NO: 958364 - DNA, 120 bp, Artificial Sequence
  ENSG00000230768_2 (sequence is synthesized)
ccacctactttttacatgtgacaagaactacccacctccactcttcaggatagaacatgctgaagaaaagagttgcaatgagaaaatatatgggaacaaaatacctatgcaatgcagaag

SEQ ID NO: 958365 - DNA, 120 bp, Artificial Sequence
  ENSG00000230768_3 (sequence is synthesized)
cctacatctgaggaaatatgcattgatcttgcagtacttttctcctccaaataaaagtcagtatgataacaactacactatcagaagtctaagccaaaggacacttcagttatccaatct

SEQ ID NO: 958366 - DNA, 120 bp, Artificial Sequence
  ENSG00000230768_4 (sequence is synthesized)
tgcaacaaatacatttaagcacttaatatgggctactgttggtactaggggcattgagaacttcagatttgattaacacccaagagctgctaccataaaataaactaggcagctactagg

SEQ ID NO: 958367 - DNA, 120 bp, Artificial Sequence
  ENSG00000230768_5 (sequence is synthesized)
caataagatgaggcacatgtgtaaaacttctgcttttagcttggtgaagagtggttacacagccattattacaaaaattacatttttccacaaataaagacatcacttttctagagagta

SEQ ID NO: 958368 - DNA, 120 bp, Artificial Sequence
  ENSG00000230768_6 (sequence is synthesized)
aatacaggagtgtttatggttgggttgagacacattcagtagctgagtgattgacagcaagaggagcaagacatgaggagctggtgacacagttattatggaaggataactgatagtctt

SEQ ID NO: 958369 - DNA, 120 bp, Artificial Sequence
  ENSG00000230768_7 (sequence is synthesized)
gctggagtacaatggcgcgacctcggctcactgcaacttccacctcccagttcaagcaattctcccacctcagcttccttagtagctgggattacaagtgcctgacaccaggccaagcta

SEQ ID NO: 958370 - DNA, 71 bp, Artificial Sequence
  ENSG00000230768_8 (sequence is synthesized)
ccaggctggtctcaaactcctgacctcagtccatcgtcctggcctcaagtttaattcttaaattgccattt

SEQ ID NO: 958371 - DNA, 120 bp, Artificial Sequence
  ENSG00000230768_9 (sequence is synthesized)
ttaagtgctcttcctcactctctggcttgctcactttctgggaagacatttgtcatacagtgagataccctacgaaaagtctaaaattgcaagaagtgagaggctccagacaatagccag

SEQ ID NO: 958372 - DNA, 120 bp, Artificial Sequence
  ENSG00000230768_10 (sequence is synthesized)
gtagaaactgaggctgttcatccaacatctttgaggaactaaatattgccacgaaccaaataaatgaacttgacattccaccctccccaggttgcccttcagataaaactccagccctgg

SEQ ID NO: 958373 - DNA, 120 bp, Artificial Sequence
  ENSG00000230768_11 (sequence is synthesized)
taggagcagctaacaagaatcctaatacaggagtgtttatggttgggttgagacacattcagtagctgagtgattgacagcaagaggagcaagacatgaggtagatttgtattatattct

SEQ ID NO: 958374 - DNA, 120 bp, Artificial Sequence
  ENSG00000230768_12 (sequence is synthesized)
ttaagtgagtcaatcagttatagttctgttcaaagctttcagtgcacctaaaatttcatccaacatctattatctttcatcatatgctaaaacagcttgaagatgtatatgattttataa

SEQ ID NO: 958375 - DNA, 120 bp, Artificial Sequence
  ENSG00000230768_13 (sequence is synthesized)
gcaccaatattcacctatagttggtgaatgtacagttagaatgaaaaaaaatagaattttggtgaattctgaaatggttccaccctatccaaacaagttgtattaatgcatgtatacatt

SEQ ID NO: 958376 - DNA, 120 bp, Artificial Sequence
  ENSG00000230768_14 (sequence is synthesized)
tcttaatagataaagtactcgaattgctacaaatacagaagcttacaagtttccagtgagaataggctctgtcaaaaactttgctgtatattgattaattttgttactataaaacaaaaa

SEQ ID NO: 958377 - DNA, 120 bp, Artificial Sequence
  ENSG00000230768_15 (sequence is synthesized)
gatatctttcaattgaaaaatatcaaatgcaaagttttgaattataaaagcagcttcaagcaaataataatttttacccagcatcaaaatttacatatttaaagggcataagcaagcatt

SEQ ID NO: 958378 - DNA, 120 bp, Artificial Sequence
  ENSG00000230768_16 (sequence is synthesized)
gggcacagataaagcattcttttcccggaggatcccaaaaccaacagacggagcaacaaaaactcattttcctcctatattaacatgtatttcaattttggattaagaagttttgacaat

SEQ ID NO: 958379 - DNA, 120 bp, Artificial Sequence
  ENSG00000230768_17 (sequence is synthesized)
gtgtgcagaaacacaattcacaaaaggaaactattatggttttggagactttttcttttatatactgttgattgcattgagaaaaaaattatttatgggcttctccctattttcaagcca

SEQ ID NO: 958380 - DNA, 120 bp, Artificial Sequence
  ENSG00000230768_18 (sequence is synthesized)
gccagctatcctaaattcatatgttttattttaaattataacaaatcaagaccatgatattatcgtctgctccagacaacagcctttccctagtttataccattaacattttattaatgg

SEQ ID NO: 958381 - DNA, 120 bp, Artificial Sequence
  ENSG00000230768_19 (sequence is synthesized)
tatttatatttggtattagtaggaggtcattataattttacaggaatgtctaattgagataattaattcactcttttatgttaatacttttctacctagcatcacataagataatggagg

SEQ ID NO: 958382 - DNA, 120 bp, Artificial Sequence
  ENSG00000230768_20 (sequence is synthesized)
gaggtgtgatttttttcagtaatttttgctagtttaataaatgacttaatcctcctcatccatattcattttgaaattatacttagtattttaatataaaagaataagatagcataatac

SEQ ID NO: 958383 - DNA, 120 bp, Artificial Sequence
  ENSG00000230768_21 (sequence is synthesized)
taactgaaccactcagaggaaaaagaatcaatgagacaataattataagacacgagcatacaataagccaattcttgagaagtggattttattcttcttcagtcaatatggaatcaggat

SEQ ID NO: 958384 - DNA, 120 bp, Artificial Sequence
  ENSG00000230768_22 (sequence is synthesized)
gattgacagtgtattgaaatttcatttttatgacacttttaaaactgtcatttctggaatagtagagttaaagatctgcaataaaataaaaaactactgtttacagcaatcagagaagta

SEQ ID NO: 958385 - DNA, 120 bp, Artificial Sequence
  ENSG00000230768_23 (sequence is synthesized)
ttatgctcattggattattttacttttattcaaattttgttatctggtacttattatatggaatatgcaaatcgaagtcctgtccttcagcaatcaataaggtaaaggagaagaaagaca

SEQ ID NO: 958386 - DNA, 120 bp, Artificial Sequence
  ENSG00000230768_24 (sequence is synthesized)
aaaacgagtagaattttatgataatttaagatacaaacagactttgctttgcatgagagtgtgagaccataaaaatttactatgaaagctgaaactgtggcaataaaccttaataatcaa

SEQ ID NO: 958387 - DNA, 120 bp, Artificial Sequence
  ENSG00000230768_25 (sequence is synthesized)
acaagaactacccacctccactcttcagattgccatttcaggacacctcctacatctgaggaaatatgcattgatcttgcagtacttttctcctccaaataaaagtcagtatgataacaa

SEQ ID NO: 958388 - DNA, 120 bp, Artificial Sequence
  ENSG00000254826_0 (sequence is synthesized)
tcttgggtgggcagcccaggagcagaactcagcctctagcagatgcccaagaagcagaggagaagcagagtctagaagctcccctcctggtgtggagcctggggtgtaaagggtacttag

SEQ ID NO: 958389 - DNA, 120 bp, Artificial Sequence
  ENSG00000254826_1 (sequence is synthesized)
aaagcactggtatgaatgccctgtttattcatcacagtcctctcaagcattcagtcattcagcaaacatcgatcgagcaccttctctgcgcctgaccctgtgctgagcaccagggcccag

SEQ ID NO: 958390 - DNA, 120 bp, Artificial Sequence
  ENSG00000254826_2 (sequence is synthesized)
atgaatgagacatggtccctgcaaatgcacacacataccttttcccataatgagaaagggctgagtacaggggtgagatgggacaggcagggatgcggtcaatccaacccaggtggagga

SEQ ID NO: 958391 - DNA, 120 bp, Artificial Sequence
  ENSG00000254826_3 (sequence is synthesized)
aggaagactttccagagaaagagtcaacaggttggtctctagcaggccagtgctcagtgcctggtggatgcctggtatgcatgtgctaaaagactgaccaaactagacttagaagcaata

SEQ ID NO: 958392 - DNA, 120 bp, Artificial Sequence
  ENSG00000254826_4 (sequence is synthesized)
gaactctacctggaggcactgcagtgaagtccctccttcctggagggaacgagtctctggctgagcacatggtgaggcaccaagtggagacagcttcctgtgtgaggcttacgggagccc

SEQ ID NO: 958393 - DNA, 120 bp, Artificial Sequence
  ENSG00000254826_5 (sequence is synthesized)
agccctggcctgggattctaatagcagtgggcatgaccctccagagatggcagctttgccatgaccggcctctcatcatcatgtgtgtggactcccgctgaaaggtgtctgcctggagga

SEQ ID NO: 958394 - DNA, 120 bp, Artificial Sequence
  ENSG00000254826_6 (sequence is synthesized)
gcctggaagagagctcacctccagccttgatgaagtggcatctctttggcacttggcctgacttcctagacctccctggggctggaagagcctgctaggggtcaatatgtactgaccctc

SEQ ID NO: 958395 - DNA, 120 bp, Artificial Sequence
  ENSG00000254823_0 (sequence is synthesized)
ctctgacctctctatggcaagccaaatggccatgggaagaccccatggagtgtcagaatgatgccgttgagggcaaggattttagaccggtcatggattctgcctgtgcactgggctcta

SEQ ID NO: 958396 - DNA, 120 bp, Artificial Sequence
  ENSG00000254823_1 (sequence is synthesized)
tagtcatagaagtagcaagtctactgcatatcaacagtgtagcactgagcctggctctttgtaagtgttcagctggagcgcagtgggatgatctctgctcactgcagcctctgccttctg

SEQ ID NO: 958397 - DNA, 120 bp, Artificial Sequence
  ENSG00000254823_2 (sequence is synthesized)
ggttcaagtgattctcctgcctcagccgcataaggaaacaggccgagagacgcaagtcaaacagcaaaggatggtctgctgtctgtctgactccaatgccaatggtctttcctctataac

SEQ ID NO: 958398 - DNA, 120 bp, Artificial Sequence
  ENSG00000254823_3 (sequence is synthesized)
ggagggaggggaatggcaggaactccaaacaagccagggatcatggagaagagacagcagaagccaaaggggctgctgcagcgcagtgctggggacagcagcaagaaacaagagtgtccg

SEQ ID NO: 958399 - DNA, 120 bp, Artificial Sequence
  ENSG00000254823_4 (sequence is synthesized)
tggggccccggagaaggacgtccgtgaaactgggctaaaccccaagtgtgaaatttggcaggggttctgggtactgaatgttctccattgttggccacagtcaaaagaagcctcgccgga

SEQ ID NO: 958400 - DNA, 120 bp, Artificial Sequence
  ENSG00000254823_5 (sequence is synthesized)
aatctacagcatggcacagctcgtccctgaacgacactgtcactcgctcttgggaagtcctgtcctcattcagattgctttatttctgagaccaatcacctgatcacacatctgctgcta

SEQ ID NO: 958401 - DNA, 120 bp, Artificial Sequence
  ENSG00000254823_6 (sequence is synthesized)
gcattcgagccctaacacaagagtgtgcgtgaatataggtgattgtgtttcaaaaaggagggagaaggaggcctgaatgcctctcagagtgcattgtgtctggggctagtagggttgccc

SEQ ID NO: 958402 - DNA, 120 bp, Artificial Sequence
  ENSG00000254823_7 (sequence is synthesized)
ttactcattataatgtattattattattactactactactacttttttcttttttttttgagatgaactctcgctctgttacccaggctggagcgcagtgggatgatctctgctcactgc

SEQ ID NO: 958403 - DNA, 120 bp, Artificial Sequence
  ENSG00000254823_8 (sequence is synthesized)
tataggcatgagctaccacgcccagcttatttttgtattgttagtagaggccgcatttcaccatgttggctgggctggtcttaaactcctaacatcaaatgatccacccaccttggcctc

SEQ ID NO: 958404 - DNA, 120 bp, Artificial Sequence
  ENSG00000254823_9 (sequence is synthesized)
gtgcccaacctactactaccattttaaaagcctctacctataaaggatcacaatgctttgaaaaggaagtgcagaggttgaagggtgtctcaaggagggcagtgatcaaaaccatactaa

SEQ ID NO: 958405 - DNA, 120 bp, Artificial Sequence
  ENSG00000254823_10 (sequence is synthesized)
gtatttgaaaatcagaagaaaaggttgggtgagggtagatcctggatgaaataatattattaaatagcttttcaagtatagacattgaagagctacaagctggaaagggggccaaaacta

SEQ ID NO: 958406 - DNA, 120 bp, Artificial Sequence
  ENSG00000254823_11 (sequence is synthesized)
actcgttttttggtataccttaccatatgccaaataccagactgcagagtttacatttgttattgcattcaatccccattgcaaccctctgaggttgttattatcattcccacttcacag

SEQ ID NO: 958407 - DNA, 120 bp, Artificial Sequence
  ENSG00000254822_0 (sequence is synthesized)
aaagaagcagggaggggtgaaaggtgttgaggagatgaaatgccaggggtttacagtcagggctctcacaccaggtttcaattcacagctgcaggtaagacactgttctggggctcccag

SEQ ID NO: 958408 - DNA, 120 bp, Artificial Sequence
  ENSG00000254822_1 (sequence is synthesized)
acctccatccccaaaaagagaaaactctctattttcaagtggactgttcctatcaagagaattctatgaaatgttaatttttttaaacttataatattgattcttttctgtataaagaaa

SEQ ID NO: 958409 - DNA, 120 bp, Artificial Sequence
  ENSG00000254821_0 (sequence is synthesized)
ggagggtcttccaacggcggcgaccttcgcctggacagcggtatcctgcgggcgaccatgggccgaacggccgggactccaagcttacctcggacacgaacgccgcgccagtctccaagc

SEQ ID NO: 958410 - DNA, 120 bp, Artificial Sequence
  ENSG00000254821_1 (sequence is synthesized)
caagctatacaagaagaagcatggcaccagcatctgcttctggtgagcagctcaggctgcttccattcctggtggaagggaaaggggagctgacttgtgcagagatcacttccaagaggg

SEQ ID NO: 958411 - DNA, 120 bp, Artificial Sequence
  ENSG00000254821_2 (sequence is synthesized)
acgtccagttatcttgggagctaatagagtaagaactcactgatacctactacccccatcctccatctcttcgtgaagagtctgcccccatgatccatacacctcccattaggccccccc

SEQ ID NO: 958412 - DNA, 120 bp, Artificial Sequence
  ENSG00000254821_3 (sequence is synthesized)
tttaacactgaggatcacatttcaacctgagatttggaggggccaaacaaaccatatccaaactatagaagtggcaaattgacaacatctacttattcgttcaaaagaaatagggtgaaa

SEQ ID NO: 958413 - DNA, 120 bp, Artificial Sequence
  ENSG00000254821_4 (sequence is synthesized)
acatgagatgatccatggatgtttcagcttttctgtgactgaccctgcatactgaaaagcaataaattccttgctaacttaaataaagtaatggcagatatgcctaaggccacaaatcta

SEQ ID NO: 958414 - DNA, 120 bp, Artificial Sequence
  ENSG00000254820_0 (sequence is synthesized)
acaatttgaggaatgatttgaaggagataatgaagccatgcaggaagcatagctgcatctgcttctggggaagcctcaaaaaacttccaatcatgacagaaggcaaagggggagcaagac

SEQ ID NO: 958415 - DNA, 120 bp, Artificial Sequence
  ENSG00000254820_1 (sequence is synthesized)
aatcattcatgaagaatccaccctcatgatgcaatcacctcccaccatgctacccctccaacactggggattacaactggacatgatatttgggtggagacatagatccaaaccatatca

SEQ ID NO: 958416 - DNA, 120 bp, Artificial Sequence
  ENSG00000254820_2 (sequence is synthesized)
tcaggcaaagccatttcttcaaggaaactaaatttctgcttatacttaatcaaaggtaaacatgtgcaaggtttagaagattcataagggaaatcaaccgagataaaacagcattctgaa

SEQ ID NO: 958417 - DNA, 120 bp, Artificial Sequence
  ENSG00000254829_0 (sequence is synthesized)
tctcgtgcaagtggtttattgatggagtgctcttaggagaaggggagtgagggaagcagcgtaggacagaggaaaaaaactgagtaagaatgtgctctcagaagaagactgacttcagct

SEQ ID NO: 958418 - DNA, 120 bp, Artificial Sequence
  ENSG00000254829_1 (sequence is synthesized)
tgattccatgaggagctctgggaaaggaagttccttgatgtaagaggtcagtcttttgtacctccatacaagaggtagcaattcttttctagagatggtctcaaaattagaatacatcaa

SEQ ID NO: 958419 - DNA, 120 bp, Artificial Sequence
  ENSG00000254829_2 (sequence is synthesized)
gcatctcgcaaaggggatcaggaaagcacctactacatgaaggcacatgccagggacagatggattggaccccaagctggggctatgtagactacatctttaggtcagaacatctagatt

SEQ ID NO: 958420 - DNA, 120 bp, Artificial Sequence
  ENSG00000254829_3 (sequence is synthesized)
cacagtatcttgtatgttcctgttgtcatctcacatctcttgccaacgcattgttgaaacattcttacttggtcttgttattggacttcaagagaagggtctgggagatacatgaggctt

SEQ ID NO: 958421 - DNA, 120 bp, Artificial Sequence
  ENSG00000254829_4 (sequence is synthesized)
tgaaaaggaagtagctgcaagttgctaggcaaatatagtggcatcagttgcaatggagtggaaagtccttaaacgagtgatcaatatttagtggcaagactctagaccaaccctggaaat

SEQ ID NO: 958422 - DNA, 120 bp, Artificial Sequence
  ENSG00000285079_0 (sequence is synthesized)
tagtcccaggatggctgggtcactggccacctgcggttgtcttctttctcttctcattaccaccttccattttccctcaagtgggagaaaaagtgagtacagaacgcagaccacctgctg

SEQ ID NO: 958423 - DNA, 120 bp, Artificial Sequence
  ENSG00000285079_1 (sequence is synthesized)
aggtgggtgctgcagagagccactgattaaaggtggagatggaactccttttctcaatttcatcttcttgaacctaataccagctgtgtttcaagctgagctactacacgcctgctggga

SEQ ID NO: 958424 - DNA, 120 bp, Artificial Sequence
  ENSG00000285079_2 (sequence is synthesized)
ggccatttgctgcatgacactatgaaaatgatggcgtttgctccttcaagtaagagataatcagcttattcagagcctaaaggaagagaaagttttttcaattaggtctgctggagtttg

SEQ ID NO: 958425 - DNA, 120 bp, Artificial Sequence
  ENSG00000285079_3 (sequence is synthesized)
ccagctggagctctcctgtatgagatatgaaaaatgagcatttaaaatgaagaaagtaattagaagaggtttcatgtgatccaggagcaaaaatatatcaaaaagaaggaaagatggatg

SEQ ID NO: 958426 - DNA, 120 bp, Artificial Sequence
  ENSG00000285079_4 (sequence is synthesized)
catccaacattaaatacagagggatataagagaaaatgtagcttagtgcaaatggaaaagaaaaccaaaactggaatcctttttgcaataaatgttattgcttacatgttaattgtcagt

SEQ ID NO: 958427 - DNA, 120 bp, Artificial Sequence
  ENSG00000285079_5 (sequence is synthesized)
tgtatggttctgtgcagcagaggttctctaagatacataaggcttaggattaggtaaaagtagcttttttatatggacacaataaaaaatatacattgagcagagtttaactgcatttcc

SEQ ID NO: 958428 - DNA, 120 bp, Artificial Sequence
  ENSG00000285079_6 (sequence is synthesized)
tagattctgaataaataattcaataattgatctactaatatcaatagattttgcattatatgttattgcttttctcactgaattgggtaaaatttttttttatttttgcttatttccttt

SEQ ID NO: 958429 - DNA, 120 bp, Artificial Sequence
  ENSG00000285079_7 (sequence is synthesized)
ctacaatagaaaatatcagttatatgtagttaacacgtggcccatggtagtttcagtttatttgcatttagctaaacccttcagaatgacctttataccagactctttcatctgcaatac

SEQ ID NO: 958430 - DNA, 120 bp, Artificial Sequence
  ENSG00000285079_8 (sequence is synthesized)
aattttatggaaatggaaaatctccaaacataccatcttatatccaaaggagaaattgacatgtccataaataacgaatgtgatttttttcaagtccagtgaaaccagcattggttgtct

SEQ ID NO: 958431 - DNA, 120 bp, Artificial Sequence
  ENSG00000285079_9 (sequence is synthesized)
ctgttcaggatggaggccagtaataaaaagagatgccctaactctgctatgcatgcccaagagagaaatgtgctcacattatctcttagctataaagaatgaaaaggagaaagtgtttgt

SEQ ID NO: 958432 - DNA, 120 bp, Artificial Sequence
  ENSG00000285079_10 (sequence is synthesized)
gggaataaatggaaaatcattagttggcttctgttaagagggcaagggagagagctaatgcattaaggccaaactagcttctcagaatatggttatcaaacttatcaccctcctccctca

SEQ ID NO: 958433 - DNA, 120 bp, Artificial Sequence
  ENSG00000285079_11 (sequence is synthesized)
accgtctcactctcttcattttctatttccaagtgacatgaagccttggcttctaagatagtgcagtaatgaatacctaaattctgtatgtaaaagagctcaaccataaaatcagctacc

SEQ ID NO: 958434 - DNA, 120 bp, Artificial Sequence
  ENSG00000285079_12 (sequence is synthesized)
catacacctgtaaagcaggaagagaaaagaaccttttccttagaatggactctatacaaatgcaaagacagtaatggaataataggaaataaaaagacagagaggcacaaaaatgcatat

SEQ ID NO: 958435 - DNA, 120 bp, Artificial Sequence
  ENSG00000285079_13 (sequence is synthesized)
tttgcaaaactatatataccaaataaactaaaaaatgcagtgtttactttcttaaaagaaacagaaaacaagtgatataagtaaagaaacaagtggaaaaacattcccgtctttgagtat

SEQ ID NO: 958436 - DNA, 120 bp, Artificial Sequence
  ENSG00000285079_14 (sequence is synthesized)
attacagtctttcttgctaccaaagactttttaaaatatgatttttttcataattatagacataattagggactttgcttcctaatgttttccacgatacttaaaatgaagatagtctga

SEQ ID NO: 958437 - DNA, 120 bp, Artificial Sequence
  ENSG00000285079_15 (sequence is synthesized)
tgatctaaattaatccttagaatgaaggcttgttattcctgctaggaaagatttgtctccctagactatcttagaagctaaaaccatgaaccaggctgtattgtagtgtctgcaatgcag

SEQ ID NO: 958438 - DNA, 120 bp, Artificial Sequence
  ENSG00000285079_16 (sequence is synthesized)
cactgaacaagacagaaaatgtccctgttcctggggattttacatcctaaagtttgcatttgttcctgttcttgcatttctccccgccgtttattttaccttcatgattttgtgtatctc

SEQ ID NO: 958439 - DNA, 120 bp, Artificial Sequence
  ENSG00000285079_17 (sequence is synthesized)
tttctccctttctctgttttccctatgttccctttttcccacttattattttctgaattggacataaattagaacaaaatatttttgattatgcattatatttgttgaaaaattgtttag

SEQ ID NO: 958440 - DNA, 120 bp, Artificial Sequence
  ENSG00000226438_0 (sequence is synthesized)
aaggaccacacaagaattccttacagtagaagccaggcctgggagcattacacaaagcaccccctaagaccagatgaaacagtgatggctgctgcccttgcactcaatgagatggaccaa

SEQ ID NO: 958441 - DNA, 120 bp, Artificial Sequence
  ENSG00000226438_1 (sequence is synthesized)
acagagagatcaggttatggccatcccgcagatcttcataaagatcattgatgtgcttgcggacctgtgaatgagagtgaaacagacagatttttatttgatattgaattattatactat

SEQ ID NO: 958442 - DNA, 120 bp, Artificial Sequence
  ENSG00000226438_2 (sequence is synthesized)
ccacataaaaatctctggttctaggtaaacacaaattaaagaatttaaaagtggaagcaacaattaaataataaaattcaggaagtttcagattggaataaaatacatgtgaaatgataa

SEQ ID NO: 958443 - DNA, 120 bp, Artificial Sequence
  ENSG00000256085_0 (sequence is synthesized)
tatttttttatttgttaaggatcatgaacatttgcagtcactgtttctgatgggtgttcattgtcaacaagcgaatagatttctgcatctctccgaaatagtcttcgatgtttttgatga

SEQ ID NO: 958444 - DNA, 120 bp, Artificial Sequence
  ENSG00000256085_1 (sequence is synthesized)
tgagggagtgttctttgcgacagccatttcctttgatgacttaactgtgtgggccgcacggtctcgggtctgtcccttcacgctccatgacaaccctttacccccaaactgtgaatcacc

SEQ ID NO: 958445 - DNA, 120 bp, Artificial Sequence
  ENSG00000256085_2 (sequence is synthesized)
caaatgtctgccagctggtgagggataaataaccgtggtacatttaagcaacggaatactactcagcaatgaaaaagaacaagcgacagaagcgttgagaaaacatagataaggcctgaa

SEQ ID NO: 958446 - DNA, 120 bp, Artificial Sequence
  ENSG00000256085_3 (sequence is synthesized)
cagacacaaggggacacgttgatgattccgctgatattcagtttctagactgcattttaaattgatagattttcagcttctcagtgggacacactaagttacgaagtacctggttacctt

SEQ ID NO: 958447 - DNA, 120 bp, Artificial Sequence
  ENSG00000256085_4 (sequence is synthesized)
aattctttctcaactgctctttgattttctttttattttctatataaacttgctcttttccttttagagctttttctaaaaggaactcttaacttccatttaaaagctctgtgatcagca

SEQ ID NO: 958448 - DNA, 120 bp, Artificial Sequence
  ENSG00000256085_5 (sequence is synthesized)
gtagaagaaataaatgatccgttcaccagccattctaatcaggggtagcgttaaaagctttttcaccttgctattttgaagacgtttacttctttaaacaaatgattccaattaataaat

SEQ ID NO: 958449 - DNA, 120 bp, Artificial Sequence
  ENSG00000256084_0 (sequence is synthesized)
actttcactttaataaatcttgccactgcacactctttgggtctgtgtgtttctctaatcgagctgtaacactcatcactgcagtccacagcttcatttcttgaagcctgtgagaccacg

SEQ ID NO: 958450 - DNA, 120 bp, Artificial Sequence
  ENSG00000256084_1 (sequence is synthesized)
aacccttcaatcgagaaaaaccttcgataaggagaagacttctcatctcatttctggggtctggtccgggatttctccaaagcgaatagaatccatgaagctgcaaatggttctacaaat

SEQ ID NO: 958451 - DNA, 120 bp, Artificial Sequence
  ENSG00000256084_2 (sequence is synthesized)
cccctagacccacccaccaacctgttctcacaccacgacaccaaagactcccctcctgaggaaacctcaactgcagtgccccttctaccccccagttcagcaggaagtagctagaacaat

SEQ ID NO: 958452 - DNA, 120 bp, Artificial Sequence
  ENSG00000256084_3 (sequence is synthesized)
caggaagtagctagaacaatcgtcatccaacttcccaacagcacttgggctttcctgttgaaaggggggactgagggactaagtggctaaattggctggacttcctgggtcaatagggac

SEQ ID NO: 958453 - DNA, 87 bp, Artificial Sequence
  ENSG00000256084_4 (sequence is synthesized)
agattaaaacttcaaccaatcaaaggggattttcccctaagccaaaattagtcatagctgcaagctaaagggattgaaacttcaacc

SEQ ID NO: 958454 - DNA, 120 bp, Artificial Sequence
  ENSG00000256083_0 (sequence is synthesized)
gaaacaaactgctgtctggaaagctttttggacgccaaacaaactgagatggttgtgctctgaggaacataaagcagtctgaagtaaacagtcgcacacagacgcaacaactacagtatc

SEQ ID NO: 958455 - DNA, 120 bp, Artificial Sequence
  ENSG00000256083_1 (sequence is synthesized)
gggtttggttgctcttcagttcagaagccatcactgccagcacctgcaacttgctgctctgcaccttctgctctgaccactggtgagagaagtcactccttccttctcttgctcttaaga

SEQ ID NO: 958456 - DNA, 120 bp, Artificial Sequence
  ENSG00000256083_2 (sequence is synthesized)
tccctcttaagtcctgcagggtaacacctgcttggctgccacagaggtgtctgggtctcctggtgcctttatggatactcaccactcatgcagggtcttcagggagaagatgaagaaatc

SEQ ID NO: 958457 - DNA, 120 bp, Artificial Sequence
  ENSG00000245112_0 (sequence is synthesized)
agctctcgccattgtttctgcccacaacagataccgcccctgcaaggaccgggaagaagaaaaggaggcccaagtcctcggacgcgctgcttttaaatgcctccttcaccccgcccgtgc

SEQ ID NO: 958458 - DNA, 120 bp, Artificial Sequence
  ENSG00000245112_1 (sequence is synthesized)
atcccgctcctaaggggtcatctcctcgcccttccccgaagtttggtggaaactaaaaaccacattcagagggtgtgaagctgagtctggtgcagagagagaaacccggctctgcgtccg

SEQ ID NO: 958459 - DNA, 120 bp, Artificial Sequence
  ENSG00000245112_2 (sequence is synthesized)
atcgccacgatccggcgagggagccagctcctcctccccgctgcacccgctccccatgccgcaagtcgccctcacctccatctcggcgtctgcgggaccagcgctggccgcagacgcaac

SEQ ID NO: 958460 - DNA, 120 bp, Artificial Sequence
  ENSG00000245112_3 (sequence is synthesized)
tggcggaggctcggccgcggacgacatgatgttccgtctgcgtcacccgctgctgccagaggcccgagtccggcggggatggacggggaggcctaggcctggatgctacgtcgcaataaa

SEQ ID NO: 958461 - DNA, 120 bp, Artificial Sequence
  ENSG00000245112_4 (sequence is synthesized)
ctggtggaggagcgagactcccacccgagcgctcccctgcgccgcgcctccgcgacgggcctgagccgggcccaggagctgcacactcccaaacgttctgctcttccgcggggctctagg

SEQ ID NO: 958462 - DNA, 120 bp, Artificial Sequence
  ENSG00000245112_5 (sequence is synthesized)
ttccaccggcgcttacctcacggcgggaatcacgtcgacgagggtgggcggggccagacgggtcactgaggtcaaggaaggccggctgatttagagaagggcggagggttgggggaaggg

SEQ ID NO: 958463 - DNA, 120 bp, Artificial Sequence
  ENSG00000245112_6 (sequence is synthesized)
aaaaggaaaacgaaagagagactgaggctgggaaaacgcttcgccgcctcctcctcttcctctggaagataacatctatctcgccagcatccaggacgacgacctacgccaccgactttc

SEQ ID NO: 958464 - DNA, 120 bp, Artificial Sequence
  ENSG00000178440_0 (sequence is synthesized)
tttgggttctttttctattcactcatgtcagatagagacatgcatgttgtaaattattttgtcagaatgaaagcctggcagattaaatgctttcttctcttcttgctttacttgatatca

SEQ ID NO: 958465 - DNA, 120 bp, Artificial Sequence; identical to SEQ ID NO: 836198
  ENSG00000178440_1 (sequence is synthesized)

SEQ ID NO: 958466 - DNA, 120 bp, Artificial Sequence
  ENSG00000178440_2 (sequence is synthesized)
gagtagtgtcattgagcaaacacaaagtcgggctcatccaaggatgagattttgccagagaaaggacgagcagcaagtcagggagcttaaggttctagaaaggaaatccctcacagcaac

SEQ ID NO: 958467 - DNA, 120 bp, Artificial Sequence
  ENSG00000178440_3 (sequence is synthesized)
tggcaccataatcaagacagaatttttgcagaataaatggagttacctgctttcagccccaggtcgtagctattgtctgccctgctgatatgtgataataatttgtgatcctgttgtctt

SEQ ID NO: 958468 - DNA, 120 bp, Artificial Sequence
  ENSG00000178440_4 (sequence is synthesized)
gggaaccggcgcccggaatgtcagcgtgtgaagtaggcgctggcaacgcggggttacccgctgttattgaggagtaacggcccagcggaccacccaggcttgaggcagcggcgggaacca

SEQ ID NO: 958469 - DNA, 120 bp, Artificial Sequence
  ENSG00000178440_5 (sequence is synthesized)
ctcggtttgctgcgataccatggaaggaggcgggggaagcggcgacaaaaccacaggggtattggccggctttttcggagccggcgaagcaggttactcgcacgcggatttggctggcgt

SEQ ID NO: 958470 - DNA, 120 bp, Artificial Sequence
  ENSG00000178440_6 (sequence is synthesized)
cccgctaactggtatgaaccctctgtgtccttatttaaatgtggatccacgatacctcgtgcaggatacagatgagttcattttacctaccggagctaataaaacctggggcagatttga

SEQ ID NO: 958471 - DNA, 120 bp, Artificial Sequence
  ENSG00000178440_7 (sequence is synthesized)
gctggccttctttacgattggagggtgttgcatgacaggggctgcgtttggggcaatgaatggtcttcggctaggattgaaggaaacccagaacatggcctggtccaaaccaggaaatgt

SEQ ID NO: 958472 - DNA, 120 bp, Artificial Sequence
  ENSG00000178440_8 (sequence is synthesized)
acagattttgaatatggtgactaggcaaggggcactttgggctaatactctaggttctctggcgttgctctatagtgcatttggtgtcatcattgagaaaacacgaggtgcagaagatga

SEQ ID NO: 958473 - DNA, 120 bp, Artificial Sequence
  ENSG00000178440_9 (sequence is synthesized)
gtgtgtgtcaatcccaactggtgaagtactgagaagaagctacacaaaaggcagcaaagtattatcctggaggctgagaagtgcaagatcaaggtgccggcagtcttggtgtctggtgaa

SEQ ID NO: 958474 - DNA, 120 bp, Artificial Sequence
  ENSG00000178440_10 (sequence is synthesized)
ggcctgctttctcatagaggcttccttcttgctgtgtcttcgcatgttgctccttcacatgttcccactctctgtgcggccaccatgtaagtcggacctgcccttctgccatgattcgtc

SEQ ID NO: 958475 - DNA, 120 bp, Artificial Sequence
  ENSG00000178440_11 (sequence is synthesized)
agcctcgagtttgaccagcagcaggggtcggtgtgtccctctgaatctgagacctatgaggcaggagctagggacaggatggcaggagcgcccatggctgctgctgtacagcctgctgag

SEQ ID NO: 958476 - DNA, 120 bp, Artificial Sequence
  ENSG00000178440_12 (sequence is synthesized)
gtgactgttgaagttggtgaggacctccacatgcaccacgttcgtgaccgggagatgcctgaagctttggagtttaacctttctgccaatccagagtcaagcacaatattccagaggaac

SEQ ID NO: 958477 - DNA, 120 bp, Artificial Sequence
  ENSG00000178440_13 (sequence is synthesized)
tctgctgtgcgtttcagtcaacaatacagcttgtgttcgacaatattccttgatgacagcacagccatccagcattatcttacaatgacaataatatctgtgaccttggagatacctcat

SEQ ID NO: 958478 - DNA, 120 bp, Artificial Sequence
  ENSG00000178440_14 (sequence is synthesized)
catatcacacaaagagatgcagatagaactttgagcatacctgatgaacagttacactcatttgcggtttccaccgtgcacattatgaagaaaagaaatggaggtgggagtttaaataac

SEQ ID NO: 958479 - DNA, 120 bp, Artificial Sequence
  ENSG00000178440_15 (sequence is synthesized)
tattcctcctccattccatcgactcccagcaccagccaggaggaccctcagttcagtgttcctcccactgccaacacacccacgcccgtttgcaagcggtccatgcgctggtccaacctg

SEQ ID NO: 958480 - DNA, 120 bp, Artificial Sequence
  ENSG00000178440_16 (sequence is synthesized)
gcgaagtgggaaatggctgaagacatggaaaaagaaatacgtcaccctgtgttccaatggcatgctcacctattattcaagcttaggtgattatatgaagaatattcataaaaaagagat

SEQ ID NO: 958481 - DNA, 120 bp, Artificial Sequence
  ENSG00000178440_17 (sequence is synthesized)
tgaccttcagacatctaccatcaaagtcccaggaaagtggccatccctagccacatcggcctgcacacccatctccagctctaaaagcaatggcctatccaaggacatggacaccgggct

SEQ ID NO: 958482 - DNA, 120 bp, Artificial Sequence
  ENSG00000178440_18 (sequence is synthesized)
gggtgactccatatgcttcagccccagtatctccagcaccaccagccccaagctcaacccgcccccctctcctcatgctaataaaaagaaacacctaaagaagaaaagcaccaacaactt

SEQ ID NO: 958483 - DNA, 120 bp, Artificial Sequence
  ENSG00000178440_19 (sequence is synthesized)
tatgattgtgtctgccactggccaaacgtggcactttgaagccacgacgtatgaggagcgggatgcctgggtccaagccatccagagccagatcctggccagcctgcagtcatgcgagag

SEQ ID NO: 958484 - DNA, 120 bp, Artificial Sequence
  ENSG00000178440_20 (sequence is synthesized)
cagtaaaagcaagtcccagctgaccagccagagcgaggccatggccctgcagtcgatccaaaacatgcgtgggaacgcccactgtgtggactgtgagacccagaatcctaagtgggccag

SEQ ID NO: 958485 - DNA, 120 bp, Artificial Sequence
  ENSG00000178440_21 (sequence is synthesized)
tttgaacttgggagtcctcatgtgtattgaatgctcaggtatccaccgcagtcttggcccccacctttcccgtgtgcgatctctggagctggatgactggccagttgagctcaggaaggt

SEQ ID NO: 958486 - DNA, 120 bp, Artificial Sequence
  ENSG00000178440_22 (sequence is synthesized)
tatgtcatctattgtcaatgacctagccaacagcatctgggaagggagcagccaggggcagacaaaaccctcagaaaagtccacgagggaagagaaggaacggtggatccgttccaaata

SEQ ID NO: 958487 - DNA, 120 bp, Artificial Sequence
  ENSG00000178440_23 (sequence is synthesized)
tgaggagaagctctttctggccccactaccctgcactgagctgtccctgggccagcagctgctgcgggccaccgctgatgaggacctgcagacagccatcctgctgctggcacatggctc

SEQ ID NO: 958488 - DNA, 120 bp, Artificial Sequence
  ENSG00000178440_24 (sequence is synthesized)
ctgtgaggaggtgaacgagacctgtggggagggagacggctgcacggcgctccatctggcctgccgcaaggggaatgtggtcctggcgcagctcctgatctggtacggggtggacgtcat

SEQ ID NO: 958489 - DNA, 120 bp, Artificial Sequence
  ENSG00000178440_25 (sequence is synthesized)
ggcccgagatgcccacgggaacacagcgctgacctacgcccggcaggcctccagccaggagtgcatcaacgtgcttctgcagtacggctgccccgacgagtgtgtgtagtatctgtttta

SEQ ID NO: 958490 - DNA, 120 bp, Artificial Sequence
  ENSG00000178440_26 (sequence is synthesized)
tttgactgcagtctccttggtgcaaaaacaaaatgggaaaaataaggataactcagaatttcaaaaggaaatcacaaattcagctaatattagcattttcagtacttttcgtaaactaag

SEQ ID NO: 958491 - DNA, 120 bp, Artificial Sequence
  ENSG00000178440_27 (sequence is synthesized)
taaatacacaaaatgttgatttttctgaccataagacgtattttatgtccttctgccaaggtggatttgttagtctcaggccctcctggccacattgcccaagtcacacaggcttctgta

SEQ ID NO: 958492 - DNA, 120 bp, Artificial Sequence
  ENSG00000178440_28 (sequence is synthesized)
ttatgtatttagataaaatgtgtgaaaacatatttgaaataaagttcataaatatgcattgatttttgtacacatggcacctctttttcatttttatttttattttttttggacgatgtt

SEQ ID NO: 958493 - DNA, 72 bp, Artificial Sequence
  ENSG00000178440_29 (sequence is synthesized)
gaaaagaaaaagagggttacagatcactgcacatggaaaatattcccagcagtaaacacttccattaatgtg

SEQ ID NO: 958494 - DNA, 68 bp, Artificial Sequence
  ENSG00000178440_30 (sequence is synthesized)
gtctcaaagaaaagaaaaagagggttacagatcactgcacatggaaaatattcccagcagtaaacact

SEQ ID NO: 958495 - DNA, 120 bp, Artificial Sequence
  ENSG00000178440_31 (sequence is synthesized)
ccgcagtcaggacctcgttctgtcacccatgttggggtgcggtggcatgattatagttcactgaagcctggcactcctgagctcaaacaatcctcccctctaagcctcctaagtagctgg

SEQ ID NO: 958496 - DNA, 120 bp, Artificial Sequence
  ENSG00000285790_0 (sequence is synthesized)
ggataattactctgaatctaccaggctgattaagccacagcagatcagcagaattcaactgtccagatagaaaggtggacatggaaaaattgggctttgcaaatggtcacccaattcttg

SEQ ID NO: 958497 - DNA, 120 bp, Artificial Sequence
  ENSG00000285790_1 (sequence is synthesized)
ccttcctggtctccagatcacccttcctataccgccactctggagaaagaagtacagaacgctaacaaggatggcttggagttgcagtggtcacctcagatcttaaggtcactttggaga

SEQ ID NO: 958498 - DNA, 120 bp, Artificial Sequence
  ENSG00000285790_2 (sequence is synthesized)
tggaacccctgtgactaggaatggcagaacagaaaggtagaaagagattgagtcctggggatgtggcagagccaccatcctagccccgtactgcgtacttctggacttcctttaaattga

SEQ ID NO: 958499 - DNA, 120 bp, Artificial Sequence
  ENSG00000285790_3 (sequence is synthesized)
accatatttaaccatttggtgttctaaaccccattcctagctctggaatgccctggcagagctggtgctggctgggaccccagtggtccttggtgaccttgctcagcagtgctctttcca

SEQ ID NO: 958500 - DNA, 120 bp, Artificial Sequence
  ENSG00000285790_4 (sequence is synthesized)
caaatgaccccactactatcatgtgcagaactatcttggtgtgtgtgtgtgcatgagcagacatccacagccaagtaattttcaaagctgtcagctctgctctcctgtagcctcctgctc

SEQ ID NO: 958501 - DNA, 120 bp, Artificial Sequence
  ENSG00000285790_5 (sequence is synthesized)
cccactgccttctcatttccaccagaggaaggtgaggctgctggtgaggagctttttccttttcccttttctgaattgtttactatattaaacactcaatatccactgcccagaatatta

SEQ ID NO: 958502 - DNA, 120 bp, Artificial Sequence
  ENSG00000285796_0 (sequence is synthesized)
acaaaggcggtggcggcggcagcagcggaggggccctagagcccgctccgctggggctctccgggcccacctccctcacttcggccaccggcgcggccgcccacccgcgggtctaagatg

SEQ ID NO: 958503 - DNA, 120 bp, Artificial Sequence
  ENSG00000285796_1 (sequence is synthesized)
gcggcggcaacagagacagggcaagcggcagtcccgagcagaaagcgccggaggggccgccgccccccagcttcggatccccagaccctggcgcggctcgctgcgggaccatggcttcct

SEQ ID NO: 958504 - DNA, 120 bp, Artificial Sequence
  ENSG00000285796_2 (sequence is synthesized)
gggactcttacctgcccggagcggactggaggggacgcggctacacgttctgctcgaccgcccgttttgccgcctccgcctcgccctccccagcgccgctgccgccatcttgtgtcccgg

SEQ ID NO: 958505 - DNA, 120 bp, Artificial Sequence
  ENSG00000285796_3 (sequence is synthesized)
gccgggactccgcgctgcgcatgcgctggtaccgcctctgagggacctcgccgcggccgcgccgccatcttgagtgtggcagggtcggctggctcctcgcacccagcttgctttcggccc

SEQ ID NO: 958506 - DNA, 120 bp, Artificial Sequence
  ENSG00000285796_4 (sequence is synthesized)
cctccccttcttcccatccgtccctgctgttccttgtggcgctgaggaaggggagacagctttgtaggcctgcgggtggactgaggaaggaatgaattcactggcacgtccccgcctcag

SEQ ID NO: 958507 - DNA, 120 bp, Artificial Sequence
  ENSG00000285796_5 (sequence is synthesized)
tttccccctcgagcacacacgcaggagccggatgttcgcggtgggcggtgcgcggcggggttggactgagcgtgcgcactggggggcgtgggggctgtcttagaacctgcgggggtctcg

SEQ ID NO: 958508 - DNA, 120 bp, Artificial Sequence
  ENSG00000285796_6 (sequence is synthesized)
ggttctgccgccggcccaggggaggcatcgtggtgacgtaggctccggacgtagcaaggacctgggtcctggcacccgcgcggctctgcctcttccagccagtctctttccctctctggg

SEQ ID NO: 958509 - DNA, 120 bp, Artificial Sequence
  ENSG00000285796_7 (sequence is synthesized)
cctttgtgctgcgtggtgtccaaatgttaagaagccctgccccatgcccgggctacatatacatcgaacccaagctgtaaatgctcttgagtagaagcaacttaaactagccttcggggg

SEQ ID NO: 958510 - DNA, 120 bp, Artificial Sequence
  ENSG00000285796_8 (sequence is synthesized)
caagtaatagagatggctttcggcagagttgggaaatcaactaaatgcattgtagggcctttccaacattgacatctgtggccattagttgcagttcaaagcctcactgagccctcaaac

SEQ ID NO: 958511 - DNA, 120 bp, Artificial Sequence
  ENSG00000285796_9 (sequence is synthesized)
cagctacagcgggtagcctggcagggaactggcagctgtgaggtgctcctcatccggctccctgcaggattctttttggtaggagcctgcaggcgtccgagtggtagctccacccatctc

SEQ ID NO: 958512 - DNA, 120 bp, Artificial Sequence
  ENSG00000285796_10 (sequence is synthesized)
cggtctccccagcaagcatcccttccagtgctagcttgagaagaggaaaagcttgccacctgctgtcagaccggcgcttgtgtggagccaggggctgtaggtaccccggctgagtagcct

SEQ ID NO: 958513 - DNA, 120 bp, Artificial Sequence
  ENSG00000285796_11 (sequence is synthesized)
ctcagatgtccatggtcctggctgcacgccagcgtgggggcaggcaggcggacgctcaagaaaaacggaggcaccgatatgagtagtaattgagaacgagggttcatgatcctcatctga

SEQ ID NO: 958514 - DNA, 120 bp, Artificial Sequence
  ENSG00000285796_12 (sequence is synthesized)
tttcaatccctgctcctccacccaaaatgtgtggccttgaaggagttaaccaatttaaattttagtttcctcagtggaagataataaatccgcctacctcataaaggtttggtgagaatt

SEQ ID NO: 958515 - DNA, 120 bp, Artificial Sequence
  ENSG00000285796_13 (sequence is synthesized)
aactcaggtgatgcatgtgaagtcctcagcgcaatacctggcgcttcctaagtgctgaatcggttagccgtgatcatctcacagtggcatgagcattgctccaagtagatttgagccctc

SEQ ID NO: 958516 - DNA, 120 bp, Artificial Sequence
  ENSG00000285796_14 (sequence is synthesized)
cagaaataagccagctctatataggcacagcagttctgccctcgcagagcttctcgttcagataagaggcctgatgggaaaccagactcctgggtcctgtctcagttctggaagggtggg

SEQ ID NO: 958517 - DNA, 120 bp, Artificial Sequence
  ENSG00000285796_15 (sequence is synthesized)
gggccagctttgatttatgcctgctgccctggcataattactaatattgcctcctttttcagaagtgccctgctttgggccgggcgtggtggctcaccccggtaatcccagcactttggg

SEQ ID NO: 958518 - DNA, 120 bp, Artificial Sequence
  ENSG00000285796_16 (sequence is synthesized)
aaaaaaaagtactgctttgggcagtaaactacgtggtcgctcttgacctacgggataaccagttttccatgctcatgccccccagctagcccgcgctttcactaaagtttaaaaaccatg

SEQ ID NO: 958519 - DNA, 120 bp, Artificial Sequence
  ENSG00000285796_17 (sequence is synthesized)
gcccgcgctttcactaaagtttaaaaaccatgtagtgattattacccttttttttttttgagacgaaatctcgcactgtcgcccgggctggattgcagtggcgcgatctcggctcactac

SEQ ID NO: 958520 - DNA, 85 bp, Artificial Sequence
  ENSG00000285796_18 (sequence is synthesized)
tctattcttttatgttttcaaagtattttctcattcattgttcagattctcttaattgataaccaagataccaaacatcccaagt

SEQ ID NO: 958521 - DNA, 120 bp, Artificial Sequence
  ENSG00000285796_19 (sequence is synthesized)
attctcttaattgataaccaagataccaaacatcccaagtgcctagtcttctgttttatcatggaattctgtgaattattacctaaatctgcacatgagcaaacaggttggagcgagggg

SEQ ID NO: 958522 - DNA, 120 bp, Artificial Sequence
  ENSG00000285796_20 (sequence is synthesized)
caggggcgaagtcattgtccaggttcacacagccatcaacaagtaacaaaactgggattttaagcccggagttctcaacaccaaaatgcagggctggttccattaaaccactctggcctc

SEQ ID NO: 958523 - DNA, 120 bp, Artificial Sequence
  ENSG00000285796_21 (sequence is synthesized)
aaaccactctggcctccctgttttgtgaagaagggatctagattcaggcgatgtgactggtctgagtggacacagtggccctggatagttcaatctttttttttttttttttttttgaga

SEQ ID NO: 958524 - DNA, 120 bp, Artificial Sequence
  ENSG00000285796_22 (sequence is synthesized)
acgtgagccaccgcctccggcctggatagttaagtatcttaaaggtttctctatctcacagtgttcagcactgcttttcacctgatacatgcctcatcttctccgtttgctcactttccg

SEQ ID NO: 958525 - DNA, 120 bp, Artificial Sequence
  ENSG00000285796_23 (sequence is synthesized)
ggttgcaatgagccgaaatcacaccattgcactctagcctaggtgacaggagcaaaactccgtctcaaacaaaacaaaacccaacctcttctcaccattctaatgactaccttaagagct

SEQ ID NO: 958526 - DNA, 120 bp, Artificial Sequence
  ENSG00000285796_24 (sequence is synthesized)
ggcgtttcccacccctaccccccttttttttagaagcagagtctcagtctatctcccagactgatgtgcactcatagctcattgtaaccttgaactccttgccttaagcaatcctcctgc

SEQ ID NO: 958527 - DNA, 78 bp, Artificial Sequence
  ENSG00000285796_25 (sequence is synthesized)
tacaggcatgagccaccacacacagcccaattttgttttgttttttgaaaaggagtcttgctctgtcgcccaggctag

SEQ ID NO: 958528 - DNA, 75 bp, Artificial Sequence
  ENSG00000285796_26 (sequence is synthesized)
ttttaaaacctttttattgttaagaatagcattcccaggaggcctaagcgggcagatcatgaggtcaggagatcg

SEQ ID NO: 958529 - DNA, 120 bp, Artificial Sequence
  ENSG00000285796_27 (sequence is synthesized)
acaaaaaattagccgggcacggtggcacgcgcctgtagttccagctactccggaggctgaggcagggacaccacttgaacctgggaggcagaagctgcagtgagccaagatcgcaccact

SEQ ID NO: 958530 - DNA, 120 bp, Artificial Sequence
  ENSG00000285796_28 (sequence is synthesized)
tccgtctcaaaaaaaaaaaaaaaatagtgtatgatagactggcacagtagctcatgcctgtaatcaccaacactttgggaggccaaagtgggaggataccttgaggtcaggagttaagag

SEQ ID NO: 958531 - DNA, 120 bp, Artificial Sequence
  ENSG00000285796_29 (sequence is synthesized)
accagcctgggcaatgtagcaagaccctgtctctgaaaaatgttttaaataaaattagccgggcatggtggcatgggcctgtaattccagccacttgggagtctgaggtgggaggatcac

SEQ ID NO: 958532 - DNA, 120 bp, Artificial Sequence
  ENSG00000285796_30 (sequence is synthesized)
gtaattccagccacttgggagtctgaggtgggaggatcacttgagccctggacgtcgaagctgcagttagctgcactccagcctgggcgacagagaccgtgtcttaaacatagctgggcg

SEQ ID NO: 958533 - DNA, 88 bp, Artificial Sequence
  ENSG00000285796_31 (sequence is synthesized)
tacaaaaaacacaaaaattagccaggtgcggaagcacacacctgtagtcccagctacttaggcggtcaaaactgcagagagctatgat

SEQ ID NO: 958534 - DNA, 67 bp, Artificial Sequence
  ENSG00000285796_32 (sequence is synthesized)
agagcaagaccctgtctcaaaaaaatgtatacaaaatagactgggcatggtggctcacgccctgaga

SEQ ID NO: 958535 - DNA, 120 bp, Artificial Sequence
  ENSG00000285796_33 (sequence is synthesized)
gcacacatggaaaagtgcacaaaacataaatgtaaaacctaatgatttatcaaaaagtgagcctgggttagcatcacccatgccatggtactgaacagtcaagcagaagacctctgcagg

SEQ ID NO: 958536 - DNA, 120 bp, Artificial Sequence
  ENSG00000285796_34 (sequence is synthesized)
gtaattggtgttccaactacttttgtgataatcgcttccttgcttttggagttgtaccacctgagaatgtgtccctaaacactgtagtttcgttttgtctgttccttgaactttatgtaa

SEQ ID NO: 958537 - DNA, 120 bp, Artificial Sequence
  ENSG00000285796_35 (sequence is synthesized)
attgaattatacagtattattttgtgtctgccttcttttgcacaagaatacacttgcaaaactcctttatgttgtttcatatagctgtggtgagttcattttcattgctgtttttttgtt

SEQ ID NO: 958538 - DNA, 120 bp, Artificial Sequence
  ENSG00000285796_36 (sequence is synthesized)
ttccactgtatgtttatctactctattgttaagggatataagtgaagcctcccacctgccatacctctcaatttcttttctaaaaattatttttatttttatttatttttttagacagag

SEQ ID NO: 958539 - DNA, 120 bp, Artificial Sequence
  ENSG00000285796_37 (sequence is synthesized)
attacaggcatcagccaccgtgcctggctttatttatttgtttattgagtctggctctgtcacatgggctggagtgccatggcacaatatcagctcactgcagcctccgcctcccaagtt

SEQ ID NO: 958540 - DNA, 120 bp, Artificial Sequence
  ENSG00000285796_38 (sequence is synthesized)
cacctgcctctgcctcccaaagtgctaagattataggtgtgagccaccatgcccagtctctctctctctctctttttttttttaactagagatggggtcagtatgttgccaagactatct

SEQ ID NO: 958541 - DNA, 120 bp, Artificial Sequence
  ENSG00000285796_39 (sequence is synthesized)
tctctctctttttttttttaactagagatggggtcagtatgttgccaagactatctctaacttctgggctgaagcaattctcccacctcagcttcctaaagtgctaggattacaggtgtg

SEQ ID NO: 958542 - DNA, 120 bp, Artificial Sequence
  ENSG00000285796_40 (sequence is synthesized)
ttttcaaagtggccttctgatcctccagccttgcttctcttctagttcataatccaccaaggagccacggggatctggccatatagcaaatctcatcaagtcactctgggcttaaagctc

SEQ ID NO: 958543 - DNA, 120 bp, Artificial Sequence
  ENSG00000285796_41 (sequence is synthesized)
ttgaatgtctccccattgactacgggacaaaatcccaaacccttaatttggcctacaaaaccagaattataatgagctaccatggcagaatatttactatgcacaacgtcaagcacttta

SEQ ID NO: 958544 - DNA, 120 bp, Artificial Sequence
  ENSG00000285796_42 (sequence is synthesized)
cacacattcattttattcatgatctggaccttcaaaccatctcttcttgatccagtcccagctaccatgaactacttcataatttccctaaatgtgccaggttctttcatgaccctgatc

SEQ ID NO: 958545 - DNA, 120 bp, Artificial Sequence
  ENSG00000285796_43 (sequence is synthesized)
ctttgtgtttttgtttatttctttctttgttttgttcgtttttgagccagagtctccatttgtatccaggctcactgtagccttgacctcctaggctcaagtgatcctcttacctcagcc

SEQ ID NO: 958546 - DNA, 120 bp, Artificial Sequence
  ENSG00000285796_44 (sequence is synthesized)
tcctaggctcaagtgatcctcttacctcagccccctaagtagctgggactgcaggagcacaccaccaccacacctggctcattaaattttttttttttttgtagagacaagatctcacta

SEQ ID NO: 958547 - DNA, 120 bp, Artificial Sequence
  ENSG00000285796_45 (sequence is synthesized)
ctgcttcagcctcccaaagtgttgggatttcaggcatgagccaccgtgtccagctcctgagtctctgcatatgctgtttgcccttactcttcttcccctcttgacctaattcagccttcg

SEQ ID NO: 958548 - DNA, 120 bp, Artificial Sequence
  ENSG00000285796_46 (sequence is synthesized)
attcagccttcgagtcttagcctagatgtcgcctccaccaggcagccttccctgaacttccttctaccccggctaggacaggttccctctcttgtactaccacaatggtctaagctcata

SEQ ID NO: 958549 - DNA, 120 bp, Artificial Sequence
  ENSG00000285796_47 (sequence is synthesized)
atgtttgtcaattttcctcatccactaggctgtgcgctgcttaagggtggggcctggggcttattcacccttgtaaccccatgctcagtactgtgcctgaccctctgtaaatatttgatg

SEQ ID NO: 958550 - DNA, 120 bp, Artificial Sequence
  ENSG00000285796_48 (sequence is synthesized)
accatgaacagaccactctgggttgaagtctaggtggctttttcaggtagcccgtttatttatttattttttgagacaggatctccctctgtcgcacaggctggaatgcagtggtgtgat

SEQ ID NO: 958551 - DNA, 71 bp, Artificial Sequence
  ENSG00000285796_49 (sequence is synthesized)
tctcctgcctcagcctccggagtagctgtgactaaaggcacacatcaccaggaccaggctggcctcgaact

SEQ ID NO: 958552 - DNA, 60 bp, Artificial Sequence
  ENSG00000285796_50 (sequence is synthesized)
gcactgtgcctggccaggtatccccgtttctattccaggctctggtttctgtggtgggaa

SEQ ID NO: 958553 - DNA, 120 bp, Artificial Sequence
  ENSG00000285796_51 (sequence is synthesized)
tccccgtttctattccaggctctggtttctgtggtgggaacaccaaggcagcaccctgtgggctgcctgctgtggccgagtctctgtcagtagcctggagtcttttattcccaatatagg

SEQ ID NO: 958554 - DNA, 120 bp, Artificial Sequence
  ENSG00000285796_52 (sequence is synthesized)
gatgagcagttgagcaaagatcctaaggctttccatttctccagctacttttctgaactaagaagcctgggtagacaataggtctgggctgagagaggtggttggaataagctgggctcc

SEQ ID NO: 958555 - DNA, 120 bp, Artificial Sequence
  ENSG00000285796_53 (sequence is synthesized)
ggtctgggctgagagaggtggttggaataagctgggctcctctccctggcaccagggccggctgcatagatttagaaaggcccatgcttactgggtgtggaggctcatgcctgtaatccc

SEQ ID NO: 958556 - DNA, 120 bp, Artificial Sequence
  ENSG00000285796_54 (sequence is synthesized)
aaaagttcaagaccagcatgtgcaacatagaaccccatctctacataaaataataatagtaataattagctgggcatagtaggtgctcctgcagtcctagctacttgggaggctgacgca

SEQ ID NO: 958557 - DNA, 89 bp, Artificial Sequence
  ENSG00000285796_55 (sequence is synthesized)
aggtgctcctgcagtcctagctacttgggaggctgacgcagggggtgattgcttgagtccaggagttcgaggctgtaccctgtctcaaa

SEQ ID NO: 958558 - DNA, 120 bp, Artificial Sequence
  ENSG00000237233_0 (sequence is synthesized)
ccaaacctgagactgggtgactcttgcctaggctcacagatcgagccttcccagtgttgcactgggaccctagggtggccctggggtgcccaagagatgcgcaagcatctcgcgccttcc

SEQ ID NO: 958559 - DNA, 120 bp, Artificial Sequence
  ENSG00000237233_1 (sequence is synthesized)
aagcgatcagcgaggaaaaacggggtccaaattcgagtagaatctgcgggttgcgggaagatggcctgcgagtgcggtgggggacaataccctagggccccgtgcgccctcgctttcccg

SEQ ID NO: 958560 - DNA, 120 bp, Artificial Sequence
  ENSG00000237233_2 (sequence is synthesized)
gggcactctcaccatttgtagcctctgccgcgcttgaacttgagggtgagcgcagtctccaggaagagcaagaggttgagcagcgcaagcagccagtaccgcggctccttcttcacctcg

SEQ ID NO: 958561 - DNA, 120 bp, Artificial Sequence
  ENSG00000237233_3 (sequence is synthesized)
cgagtgcagcaggaacagcaaccgagtggccagggcgttaaggaagaccagtccctccatgctggccggagcactctgcctacgtccccttgcctgcgcccccaggaccctgccgggcgt

SEQ ID NO: 958562 - DNA, 120 bp, Artificial Sequence
  ENSG00000237233_4 (sequence is synthesized)
gcccggagcccaccggtgagcaggaatatgacaagcactgagacctgctgctgcttgtggtcccttctcaccctcagcgcccgatgccggtagaactggtgcgcggctcgcccctccccc

SEQ ID NO: 958563 - DNA, 120 bp, Artificial Sequence
  ENSG00000237233_5 (sequence is synthesized)
aaacttcctgagaactcttcaaagagggttgtgatttgaagagtaaccttcttcagaaaactgtggagacttcacagaaatggcagaagctagttgaagtctacaaattacctaatggaa

SEQ ID NO: 958564 - DNA, 120 bp, Artificial Sequence
  ENSG00000237233_6 (sequence is synthesized)
caggtgttattcccatgagattcccaaataaacttcctgcatgcaaatctccatctcagcatctgtttccctgaggaggaaccaacctaaaatgaattgcaaattaaaatctcagtgggt

SEQ ID NO: 958565 - DNA, 120 bp, Artificial Sequence
  ENSG00000237232_0 (sequence is synthesized)
gggctctctccggtccccagtgcatgggctggagtgtggcccctggcagagccctggaggccggctctgcttcctgcccccttccagcctggagcagcccgagggcgcagcattcctggg

SEQ ID NO: 958566 - DNA, 120 bp, Artificial Sequence
  ENSG00000237232_1 (sequence is synthesized)
gcaggcctgagccctgtggtgggctgagttgagtccccagaaaggatctatgaaagataaaatgtggtgtgaggacacggcccagccccaccgtcgtcttccagccccaccatcgtcttc

SEQ ID NO: 958567 - DNA, 120 bp, Artificial Sequence
  ENSG00000237232_2 (sequence is synthesized)
cagccccaccgtcgtcttccagtcccaccgtcgtcttctagccccaccatcgtcgtcttggactctctgggtggcaccacgctgtgggtgctgctctcctctgtgtcccaaacgagtttg

SEQ ID NO: 958568 - DNA, 120 bp, Artificial Sequence
  ENSG00000237232_3 (sequence is synthesized)
tcccattctcctctccaggccagggtggcttccccagccctcctccccgggtcctgcctgtgccgagccttcctcccaggagggaggtgatactgacttgagatcttatgggtgttttgt

SEQ ID NO: 958569 - DNA, 120 bp, Artificial Sequence
  ENSG00000237232_4 (sequence is synthesized)
ttgtggctgggcctggccgaccctctctccacggccttagatcacactctggatggataggacagtcgtcctcaatactgagcctctttggagcatacccactgatggtggttcacaagc

SEQ ID NO: 958570 - DNA, 120 bp, Artificial Sequence
  ENSG00000237232_5 (sequence is synthesized)
tacccacgcccacaggctgacccagatctccgtgaaattaaaaaatactgtgaaaggaaaaagagccaatgtcatgtggataatgaagtgtcagccactgaaaaatctcaaaataataaa

SEQ ID NO: 958571 - DNA, 120 bp, Artificial Sequence
  ENSG00000237232_6 (sequence is synthesized)
accggggcacctgtctaaaaacaccccgcctccgaacgcgcgctcttgcggaattctcccgaaccgcagagccctcgtggctgggaccgcatagcaaccgggggcagagtgcgagccccc

SEQ ID NO: 958572 - DNA, 120 bp, Artificial Sequence
  ENSG00000237232_7 (sequence is synthesized)
agcggtgtgctgggatggaaaagcaggagccgctgaggatggactacggggcgtgttcccgaaaagccgggaagagatgtggcggggctgccgcgggcgtctctaaggccggcacgggtg

SEQ ID NO: 958573 - DNA, 120 bp, Artificial Sequence
  ENSG00000237232_8 (sequence is synthesized)
gcgtcttgactccctgcccctccagccgcggacctcggacggggggaagggggctcctccaagcggggagacggtcgccggccgagcagcagggctcctggccggcggagggtgctatgc

SEQ ID NO: 958574 - DNA, 120 bp, Artificial Sequence
  ENSG00000237232_9 (sequence is synthesized)
gggggggtctctctggagagtggctataaatgctagcctttgtgctgggcagcaaagcaaatcatcgggaataacccgggagcctggcagggaaaccgctgcactatggagaggacgctt

SEQ ID NO: 958575 - DNA, 120 bp, Artificial Sequence
  ENSG00000237232_10 (sequence is synthesized)
ccagatacagaggacaaatcaagtgaagggacggaacaggtcacacccagagcggcacagagattgacgactctgctttctcttggtccgtgatggaagaggaagcccgaacgcacgcct

SEQ ID NO: 958576 - DNA, 120 bp, Artificial Sequence
  ENSG00000237232_11 (sequence is synthesized)
ctatcagcaactctgcagcaccgcacttgccactcggagaaaatgctttgaaagcccagacagccacataccattagaaacagatgaggtttcatcatgttccccaggctggtctcatac

SEQ ID NO: 958577 - DNA, 120 bp, Artificial Sequence
  ENSG00000237232_12 (sequence is synthesized)
tgctgggattacaggtgtgagctactgcgtctagccctcttccatcgttttcaaggagggatcaggggtcagctgttcgcaacttggtacgaatgagtttgtcattggatcacctccctt

SEQ ID NO: 958578 - DNA, 120 bp, Artificial Sequence
  ENSG00000237232_13 (sequence is synthesized)
aacttggtacgaatgagtttgtcattggatcacctcccttgggaggaagtcttgccctggggatgtaggaacaagaactaacatgctcagtgcctcctaacagccccactttacctagtg

SEQ ID NO: 958579 - DNA, 120 bp, Artificial Sequence
  ENSG00000237232_14 (sequence is synthesized)
tgtcaattccccacagacaagtaaactgaggcccaggaagcatcgttgcctgaggttgccgagttgataagcaaaggtctcagtccctgtggactcagagcctgggcttctcccctggga

SEQ ID NO: 958580 - DNA, 120 bp, Artificial Sequence
  ENSG00000237232_15 (sequence is synthesized)
ctcctgcctgtggtgcagagaacgcccaggcagaagacccttggaggctcagacagagaactcactgcactttcagtcatcctgggctggctccccggcccctctcacgttctttatgga

SEQ ID NO: 958581 - DNA, 120 bp, Artificial Sequence
  ENSG00000237232_16 (sequence is synthesized)
tttgacccaaagtcttccagatggatggagctgtgggcactgagtctgggaatgtctcagcccaccttggctcccttctccagcaggagtggaggtgtgtgatgtcaaacaggcccagcc

SEQ ID NO: 958582 - DNA, 120 bp, Artificial Sequence
  ENSG00000237232_17 (sequence is synthesized)
tctctctcagacccggttctgggcccacacagccccttcttcctgaaagcagaggtggcagtaagaggatggctttggcctttgaatgttctcaagcgatccaagttcagagtatactgt

SEQ ID NO: 958583 - DNA, 120 bp, Artificial Sequence
  ENSG00000237232_18 (sequence is synthesized)
tgctgtcctctgtccctgaagcttctctcctactccttggacaaactcacttctcccctcagggacttctctcatgtagcagagtgtacacctgctgccccagcaaggccttcacaatga

SEQ ID NO: 958584 - DNA, 120 bp, Artificial Sequence
  ENSG00000237232_19 (sequence is synthesized)
tccaagcctggcctgttgctccagcttctggaacctcccatggccttcggtctacttgaatgctcctgaggccaggtagctcatcactgccggaggacctgttgccactcacttctagcc

SEQ ID NO: 958585 - DNA, 120 bp, Artificial Sequence
  ENSG00000237232_20 (sequence is synthesized)
acaagaaatgtctgcctgtcctgagcaaaacccaccttggaggaacttctttactcccttgttgaatttttggctctaccaaataaacatgaattgcttccctgtgaaagacctccaaac

SEQ ID NO: 958586 - DNA, 120 bp, Artificial Sequence
  ENSG00000237234_0 (sequence is synthesized)
ctagatttggaaatctctgtctacgtgtatgaaaggagggaagcagctataaattagaaaggagataggaaagtgaagatatttactagactctgcctttgcttgcagttctctggcttg

SEQ ID NO: 958587 - DNA, 120 bp, Artificial Sequence
  ENSG00000237234_1 (sequence is synthesized)
attgaggaggttctcactttcatctttatgggactttggctaaaaaaataaactgtcaaaggaactggcatttgctgactggactacagcacatctcgaagaatctgcagactgaaacct

SEQ ID NO: 958588 - DNA, 120 bp, Artificial Sequence
  ENSG00000237234_2 (sequence is synthesized)
tcaaggcattcatgaaatggtcttcccttagttcccctgccttttccactctttctgccatttggatttcacactggaagttcaagagatgacatcagaaaacagaaaagccagtgggaa

SEQ ID NO: 958589 - DNA, 120 bp, Artificial Sequence
  ENSG00000237234_3 (sequence is synthesized)
tagcatgggaagtgggttcccaccagtcgcatgcagctgctctggtatggccatggtgctggggatgagtcagaaatctcagtcttttctggcttaaagaaaaggaagaatggaacccat

SEQ ID NO: 958590 - DNA, 120 bp, Artificial Sequence
  ENSG00000237234_4 (sequence is synthesized)
cttctccagatatgttgttatggggtaggtgtaggtctagagacagaaaagaatcacatttgaacatcctcttaatgcaagaacatttttaaagaaacaattttccctgaatatccatca

SEQ ID NO: 958591 - DNA, 120 bp, Artificial Sequence
  ENSG00000237234_5 (sequence is synthesized)
agcctaatacagtgtgactatctgagatcaattattcttatctttacaaagactgggagttatacagcaaaagcaatactgtaaaatatgtgtattaaaatatgtaaaagaagggagttg

SEQ ID NO: 958592 - DNA, 120 bp, Artificial Sequence
  ENSG00000237234_6 (sequence is synthesized)
ggcttcactaacataattaacaatattttcatagacatttgatgcatccaaagccttctgtaccagcccgttcatatctgaactgtgcaacttcctgttaataaacaaacattgttattt

SEQ ID NO: 958593 - DNA, 120 bp, Artificial Sequence
  ENSG00000237234_7 (sequence is synthesized)
caaatagttcctgctgggcactgtggagtatttatcagaagtcagttatattgccaattcccgaccagttttacttaagacacttgggtgtggaaagataatgctgtctatgaaataaat

SEQ ID NO: 958594 - DNA, 120 bp, Artificial Sequence
  ENSG00000237234_8 (sequence is synthesized)
tacttcctaaaaatcaccttgtaacacaggctctcttggtttttaatacaaccacagacctacgattttgcttaaagatcgtgcaactgtgtagacggatgttcctgcaaacccaaagca

SEQ ID NO: 958595 - DNA, 120 bp, Artificial Sequence
  ENSG00000237234_9 (sequence is synthesized)
acataagtctaaaatactacctacgattttgcttaaagatcgtgcaactgtgtagacggatgttcctgcaaacccgattgttctgctactgcataaagaatatgtcttgaaggacaagag

SEQ ID NO: 958596 - DNA, 120 bp, Artificial Sequence
  ENSG00000237234_10 (sequence is synthesized)
tggagacagttggatcagctaggaggctctggtggcaatttaaactgtagatgaggtgacttggaccaaagagcagcagtagagacaaggaaagtggtcagaaatcaagattcaaggcct

SEQ ID NO: 958597 - DNA, 81 bp, Artificial Sequence
  ENSG00000237234_11 (sequence is synthesized)
tgccaagaaagcaggaagccaagtcaccaggcagaactgatagcatgggaagtgggttcccaccagtcgcatgcagctgct

SEQ ID NO: 958598 - DNA, 120 bp, Artificial Sequence
  ENSG00000277651_0 (sequence is synthesized)
catctggtttccattcccatgttttgagccaaatggcgttcttgcaaaccttaccagtcacctcttgactgctaaacacaaccatctgtactaggtccttgttatatgggttgagtcgtg

SEQ ID NO: 958599 - DNA, 120 bp, Artificial Sequence
  ENSG00000277651_1 (sequence is synthesized)
tgctccaaaaagaaatgttgaagttctaacccgtagtacctcagaatgtgaccttatttgcagatgtagttagttaagatgaggtcatacttgagtatggtgggcccttaatccagtatg

SEQ ID NO: 958600 - DNA, 120 bp, Artificial Sequence
  ENSG00000277651_2 (sequence is synthesized)
ctgatgtccttataagagaacatgtaaagacgtggaaacacatggggagaagactcgtgtgaagggattggagttctgctggctgttacagccaaggaacacctggaatcaccagaagcc

SEQ ID NO: 958601 - DNA, 120 bp, Artificial Sequence
  ENSG00000277651_3 (sequence is synthesized)
aggaagaggcaatggaatctcctttcctagaggttttggagggaatgtggtcctgccaacaccttgatattggacttccagcttgcagaactctgagagaataaatttctgttgctttaa

SEQ ID NO: 958602 - DNA, 120 bp, Artificial Sequence
  ENSG00000249362_0 (sequence is synthesized)
agttcagttttattggttgcacgcacagtcagttatttcatccagaaaatctgaaggccctacaaactaaccaggcagaagctgtatgctatggatttttctgatcatttcatgctgagc

SEQ ID NO: 958603 - DNA, 120 bp, Artificial Sequence
  ENSG00000249362_1 (sequence is synthesized)
tcaggggagggactctaaacttggatgggaacaatgatgatgactttggaaactgcatcttgaacaaggcaaacgtccttcagctggtccctggtcccctgaggtctccttcacctgaat

SEQ ID NO: 958604 - DNA, 120 bp, Artificial Sequence
  ENSG00000249362_2 (sequence is synthesized)
cctgcttctctgccttttcatgaaagaatattatatgagcaagaaataaacttctattgaattagcttctaatttgaggcccatagatctccaaggggtctgtagattgaattcaagggg

SEQ ID NO: 958605 - DNA, 120 bp, Artificial Sequence
  ENSG00000249362_3 (sequence is synthesized)
tctgtgaacttggaatgggaaaaatatgatttttactaatgtctttcttacctcaatttagcattttcttttgttatgagtataaacaacaaaccagtcgcattagcagtacctatgaaa

SEQ ID NO: 958606 - DNA, 120 bp, Artificial Sequence
  ENSG00000249362_4 (sequence is synthesized)
ctatgaaaagtatttttgtatcacattacaattgtaacaaatatctgaaatttaattcatactcatcaagattttaaaaatatagtagtaatgaacctgctggtatattttatttgatgt

SEQ ID NO: 958607 - DNA, 120 bp, Artificial Sequence
  ENSG00000249362_5 (sequence is synthesized)
ttatatcataaattattttaatactttagcactgcatttcaatgtaattagtttcttttgaaactttaaaaattttctttcatgtatttaaaaacactattttgatgatgtgtacacatg

SEQ ID NO: 958608 - DNA, 120 bp, Artificial Sequence
  ENSG00000249362_6 (sequence is synthesized)
ggttatattacactaaaaacccaggctttaccaccacacaatatatccatgtaacaaaactgcacttgtaccccttaaatctataaaaataaaaaatatataaaatacaaagaaataaaa

SEQ ID NO: 958609 - DNA, 120 bp, Artificial Sequence
  ENSG00000249362_7 (sequence is synthesized)
aattattttgagaagggattctaagcttcaccagactgctaacatggccctggtataaaaagtttacaaatgcttgtttctattatatttgagccattttacaatttgggatatttttgt

SEQ ID NO: 958610 - DNA, 120 bp, Artificial Sequence
  ENSG00000249362_8 (sequence is synthesized)
tatatcttttaacatcaccctaatttatagaagtaatgaatgttattgctggggatttgagtgttggtcattacatatacatgaatttatacacaaatcctgcgaggatataatatttat

SEQ ID NO: 958611 - DNA, 120 bp, Artificial Sequence
  ENSG00000249362_9 (sequence is synthesized)
tgcaaatgtttttaccagtcattctttgtcgtaatttgtataagacaaattaagtttgatgtataatattcaactgtgttgatatggtcaaatctatgaatctcacttatgtgattttca

SEQ ID NO: 958612 - DNA, 120 bp, Artificial Sequence
  ENSG00000249362_10 (sequence is synthesized)
tattgctttcccacttaaaaaattctttcccaaccaaaaatcagttgcaaggtgttaaaaccattcacctaggtgtcattgtgcagctgcacacgacttgggcaaccatatctagcattc

SEQ ID NO: 958613 - DNA, 120 bp, Artificial Sequence
  ENSG00000249362_11 (sequence is synthesized)
ccaatttgttaaatacttacctatacattttatttgcatttaattatttcatctacttggaatatatttcaatccctgttgtgagatgaataaaaatgatggatattctttctaacacca

SEQ ID NO: 958614 - DNA, 120 bp, Artificial Sequence
  ENSG00000249362_12 (sequence is synthesized)
ttcagttttattggttgcacgcacagtcagttatttcatccagaaaatctgaaggccctacaaactaaccagaacagtaagggttgaaactgaaggccgattgtgaatactatccaccgg

SEQ ID NO: 958615 - DNA, 120 bp, Artificial Sequence
  ENSG00000249362_13 (sequence is synthesized)
gagcttcttatgaattgactcatgttcctcagataataaataacactaaaagacaccagttagcttctgacctcaaggagtgctactttcatctcctgcaagctttgaaaagggatctga

SEQ ID NO: 958616 - DNA, 120 bp, Artificial Sequence
  ENSG00000249362_14 (sequence is synthesized)
ccaaaattattgatgtcgctagtgattcagggtactctagattgtttggagtcctatataaatacatttaatagacaaaaaaattgctgccttaatctaagcagaaatgaccttagtaga

SEQ ID NO: 958617 - DNA, 120 bp, Artificial Sequence
  ENSG00000249362_15 (sequence is synthesized)
tagatactgcttaccccactgatgcattagagctatactagttctactcctaattcttgagaagctgtgttttctctaatttatttcctttttgatcttcacctatagttttgctaggct

SEQ ID NO: 958618 - DNA, 120 bp, Artificial Sequence
  ENSG00000249362_16 (sequence is synthesized)
tatttgtaacttctgtatccataaataaataatcgctgtggctttagcattaaataatatctatctatttaatattttgagtcatcatttttattgtggctaatgataatgactgggaat

SEQ ID NO: 958619 - DNA, 120 bp, Artificial Sequence
  ENSG00000257842_0 (sequence is synthesized)
ccaagaacttgccatgtgatccatcactactagactcccacaactgcattagatttgttcaggattttcatataattttcataactggctaagcattggaaatggatggggagaaggcct

SEQ ID NO: 958620 - DNA, 120 bp, Artificial Sequence
  ENSG00000257842_1 (sequence is synthesized)
ccaggctggagtacagtggtgtgtatgtagcacactgcagccttcaactcctgatcctccaacctcagcctccacagttgctgggattacaagttcaagttggtgtgtatctgcaaaggc

SEQ ID NO: 958621 - DNA, 120 bp, Artificial Sequence
  ENSG00000257842_2 (sequence is synthesized)
gatggaaaggagttcttacatatgcatattctgaagaaggatgttacccttactgaaaaacttattccaagatatgtttaatcaatcatgagaaaaataaagagacatccttatgaatgg

SEQ ID NO: 958622 - DNA, 120 bp, Artificial Sequence
  ENSG00000257842_3 (sequence is synthesized)
gtcgctggtccccggcaacacggctcaggcaaacgtaagcggcttgtcgcagaaaccaaggggtccacgaaacgcgctaggctagaaggcgggaaggagagattactgacagccgtgcca

SEQ ID NO: 958623 - DNA, 120 bp, Artificial Sequence
  ENSG00000257842_4 (sequence is synthesized)
ttgcacctttggaaagcaactgaaaaaggaagcctggaaaaaatcctgcctaacaaagcagcagtactcaaatagctttaactataagaaagaactgattcaagatatgagaagagattt

SEQ ID NO: 958624 - DNA, 120 bp, Artificial Sequence
  ENSG00000257842_5 (sequence is synthesized)
aagatataagattaaatataagtgtaaatgatatcctcatttttattgaaatgctgtgtattcctattatttcagtgaaatgttaaatggcaaaggatgcattttttagattattttttt

SEQ ID NO: 958625 - DNA, 120 bp, Artificial Sequence
  ENSG00000257842_6 (sequence is synthesized)
cactgaattttaaacagtctttgaagcagatatttcatataacaatatccagaaacaataacacatatgtggataaagttgagtggttggataatgtattgtgcaaattatcaagaagaa

SEQ ID NO: 958626 - DNA, 120 bp, Artificial Sequence
  ENSG00000257842_7 (sequence is synthesized)
attcatggcactgctcctctccatccataggattatcttatgccctgtggcatttatcattttggaccctatctctctcctatctatattggactatggtggcacacagagtgttgtaga

SEQ ID NO: 958627 - DNA, 120 bp, Artificial Sequence
  ENSG00000257842_8 (sequence is synthesized)
aatgcaaatcaaaaccacacaaaagatgatcaagaggagcatgaaaaaatcccctgaatccattggctttcttccctatactgacaacagtttacttgtgtaagagatgagggtctcatc

SEQ ID NO: 958628 - DNA, 120 bp, Artificial Sequence
  ENSG00000257842_9 (sequence is synthesized)
gacaacgggtgggacagcgtcagagctggagggagagccagcactgtatgcttccaggacttcttgctaggtgcattagtttttatttttaagagttgggtaaaagacattaattagtta

SEQ ID NO: 958629 - DNA, 120 bp, Artificial Sequence
  ENSG00000257842_10 (sequence is synthesized)
gcatctcactcatcggcgattttctacggtatgatttcatccaaagaggatttcttaatcgcactgtgtgacaccgttaggggacttagagtgtcactcgccgccttaaatcctttcggg

SEQ ID NO: 958630 - DNA, 120 bp, Artificial Sequence
  ENSG00000257842_11 (sequence is synthesized)
aacaagccaggatataaataaataaagctaggtgtgggtcttcccttcacaaggcgctggtaggcagactaaagacaggcaacagctgagtgtgcacacagaactaaatattgaacgaaa

SEQ ID NO: 958631 - DNA, 120 bp, Artificial Sequence
  ENSG00000257842_12 (sequence is synthesized)
tacgagtgtcggaataaaattcattgccatgtgcacggcttatgattatacagatcttggacatatcacggacctgaacgtcaaccctgcaacaccggataaaacatctaatgtagctgg

SEQ ID NO: 958632 - DNA, 120 bp, Artificial Sequence
  ENSG00000257842_13 (sequence is synthesized)
aatagactctgaaaggacgttaggcattatctaaatcaagtccctcattttacagatgagtaaactgactcagtgaagtattttgctcaaggtcgttcatcaaattagtagtttaattaa

SEQ ID NO: 958633 - DNA, 120 bp, Artificial Sequence
  ENSG00000257842_14 (sequence is synthesized)
ctcagtgttctaggaagcagggtagtagaaaagcatgggattcggagtctgaaatcttccttggtttctggtccttgtaggctgttttacaagtgtatcttgggcaaatcccttaacgtc

SEQ ID NO: 958634 - DNA, 120 bp, Artificial Sequence
  ENSG00000257842_15 (sequence is synthesized)
ttgccatttattaagggcttacttaccacgtggcaaacaatccactttgcatgctgtgtcaattacatgcagtatgtcgtgtagttattactgtccccattttatgaggtagtttaggtt

SEQ ID NO: 958635 - DNA, 120 bp, Artificial Sequence
  ENSG00000257842_16 (sequence is synthesized)
taaagatattagaaatttacccaaagttacgcagttataaacattgtagtaatttcaaactcaggtcttcgtgactgcaaaggctgctgtcttaagtattgtaatacattagagctccgg

SEQ ID NO: 958636 - DNA, 120 bp, Artificial Sequence
  ENSG00000257842_17 (sequence is synthesized)
gggagtcaaacgagagagactgtggcaatgtattctaagctgtacaaaggtataaacatattcactagatttgtagaatgaagttattccttccctatactttccactacaacaattcag

SEQ ID NO: 958637 - DNA, 120 bp, Artificial Sequence
  ENSG00000257842_18 (sequence is synthesized)
ccaaaaagatggctttcatactaagcataagaaggaacttcactgtaattatgatattctaaccaagaatatatgcatatctaggcaataaccaaagtgaatagaataaaatttaattcc

SEQ ID NO: 958638 - DNA, 120 bp, Artificial Sequence
  ENSG00000257842_19 (sequence is synthesized)
tgatagattaaataggcaatagcaaggaatgctaacgctcctcatagcgttcttgttggaagaatcatctaggaggcattgggatttctggtgctttttaagcaatgagagatatcagtc

SEQ ID NO: 958639 - DNA, 120 bp, Artificial Sequence
  ENSG00000257842_20 (sequence is synthesized)
cactgaatgaggaagagaataacgtttagtttcggactaaaagttcatctggactacggaaaacacgtttgcctcaatcagtgaagaaggtatgctgagagctgaaagaaaaggaaagca

SEQ ID NO: 958640 - DNA, 120 bp, Artificial Sequence
  ENSG00000257842_21 (sequence is synthesized)
aattttcataactggctaaggattgttttctgctggttgctttctgaaattctactggacctaatgccaaaagatgatcaagaggagcatgaaaaaatcccctgaatccattggctttct

SEQ ID NO: 958641 - DNA, 120 bp, Artificial Sequence
  ENSG00000257842_22 (sequence is synthesized)
tccctatactgacaacagtttacttgtgtaagagatgcatgcctcgactccggaccccttctttcatctgcaaaatcagcagcaccctcacatcatctcctgtaacaaactctctctgtc

SEQ ID NO: 958642 - DNA, 120 bp, Artificial Sequence
  ENSG00000257842_23 (sequence is synthesized)
tcctccatataaggtcactgatggttacatttagggtccatgatataagaagatggatgtctattgcttttctcttgatattcatggcactgctcctctccatccataggattatcttat

SEQ ID NO: 958643 - DNA, 120 bp, Artificial Sequence
  ENSG00000257842_24 (sequence is synthesized)
tttctgctggttgctttctgaaattctactggacctaatgccattggaaatggatggggagaaggcctgatgaaaattactgaggaagcctcttagcctatgtgctctgagagtagtgac

SEQ ID NO: 958644 - DNA, 120 bp, Artificial Sequence
  ENSG00000257842_25 (sequence is synthesized)
gaagcctcttagcctatgtgctctgagagtagtgacacctagcagtcgttaagaccacttaaattatcctaagacaatggatgtgaacaggcacttttcaaaagaagacatacatgcagc

SEQ ID NO: 958645 - DNA, 120 bp, Artificial Sequence
  ENSG00000257842_26 (sequence is synthesized)
agagaaatgcaaatcaaaaccacacaaaagatgatcaagaggagcatgaaaaaatcccctgaatccattggctttcttccctatactgacaacagtttacttgtgtaagtcaagttggtg

SEQ ID NO: 958646 - DNA, 120 bp, Artificial Sequence
  ENSG00000257842_27 (sequence is synthesized)
ggccccttcccaatcaggaaacttgggtgatgaggggcagcgaaggggtggggtgggatcttggtccagctggtactggagcggcgacaattttggctagtctaagaagggcattcgagt

SEQ ID NO: 958647 - DNA, 120 bp, Artificial Sequence
  ENSG00000257842_28 (sequence is synthesized)
tgaatttgttctttaccaatatcttatgggatctaaacctgctactatatccttctttatattattacagtgttgaagaacacatttccattagacattatgtttctcatgtttgaagaa

SEQ ID NO: 958648 - DNA, 120 bp, Artificial Sequence
  ENSG00000257842_29 (sequence is synthesized)
cattttctcttgttcaatatttagaagtagcatgacatggtagaaaagcctctagactgattattaagaggcctggtttttcatcctgttatgtcttgactcattttttatgatactttt

SEQ ID NO: 958649 - DNA, 120 bp, Artificial Sequence
  ENSG00000257842_30 (sequence is synthesized)
atattatttaagttgcttttgttataaggaacagaagctcaccctagctaatgtaggaaaaaaataatttcttggaggatataagaagatacaaggatagcttatttaaaaagaaacaag

SEQ ID NO: 958650 - DNA, 120 bp, Artificial Sequence
  ENSG00000257842_31 (sequence is synthesized)
ggaatcctggtagcaacaacaaagaactcatcaggtactgctgatgggataaaacaggtccaaaccctctcagtcttctttttctttcttgtttactccttgctctgtcacaaatttcag

SEQ ID NO: 958651 - DNA, 120 bp, Artificial Sequence
  ENSG00000257842_32 (sequence is synthesized)
ataaaacatatcttattgatctaaattgaagaacatgaagggaagcaaatcctcttgattgatttcctaactggactggacttaatgggagaagaccacttacctcaaaacaaaattcaa

SEQ ID NO: 958652 - DNA, 120 bp, Artificial Sequence
  ENSG00000257842_33 (sequence is synthesized)
gtgtgttaatgggaaaagaaaaaaaaagatattggcaaaataacaaaatgcaaaaggatgtggcaaaaataacaagttgttcactcaacctttatgcttccaaagacgtcaccccatatt

SEQ ID NO: 958653 - DNA, 120 bp, Artificial Sequence
  ENSG00000257842_34 (sequence is synthesized)
gctatggtttgtttgataggaaatattagaaaagaaccataataattcaacttgataattatatgtgtttaaatgggagccactttctagcagttctttcactgctttggaccatttcct

SEQ ID NO: 958654 - DNA, 120 bp, Artificial Sequence
  ENSG00000257842_35 (sequence is synthesized)
tattctcctatagtaggctatagatgtagctttcaaactgacaacatggcatctagttttattcatcatcctcctaactgctcatccataacttttagagttattctaaaatataatttt

SEQ ID NO: 958655 - DNA, 120 bp, Artificial Sequence
  ENSG00000257842_36 (sequence is synthesized)
gtgtcttggaagctttcagtggcttcagcattatctatagataaacgtaatactgttccgtcgacatgtttggcagaattagatgcccattctacttagctattacagcattctgtctat

SEQ ID NO: 958656 - DNA, 120 bp, Artificial Sequence
  ENSG00000257842_37 (sequence is synthesized)
aacttctttacagttctcaaatcactgaataattattgtaggacagagaaaacgtctgtttaaaacaaaaatatttcagataattgtatataattctggctttcttgctgctgctgtttt

SEQ ID NO: 958657 - DNA, 84 bp, Artificial Sequence
  ENSG00000257842_38 (sequence is synthesized)
taattgtatataattctggctttcttgctgctgctgttttctaagacaattcatatctgctttaaaaaaaaattgtatagttct

SEQ ID NO: 958658 - DNA, 120 bp, Artificial Sequence
  ENSG00000257842_39 (sequence is synthesized)
gatggctagccagactctgtcctgccacagttctcctcctactcttcatttcttaccccaaggagtagtaaacatgaatcctgacccaccaatgcagtcccagaactgagaaaagattca

SEQ ID NO: 958659 - DNA, 120 bp, Artificial Sequence
  ENSG00000257845_0 (sequence is synthesized)
ctagtatagtttgggaaagaactccttgtgtgtgatcatgtttgtttgcttgtttttctcaaatcttgttgtcttatacctgagaaccacttcgaatctaaaagataaacatatacctag

SEQ ID NO: 958660 - DNA, 120 bp, Artificial Sequence
  ENSG00000257845_1 (sequence is synthesized)
ttccttcctgaaataccagaaattgcaagcttgtcaaattgtgattaatgaggatttactggatatcaacatatgagtcttcgatcaccaagaaagcaaagtgtattccatctgcatgac

SEQ ID NO: 958661 - DNA, 120 bp, Artificial Sequence
  ENSG00000257845_2 (sequence is synthesized)
ccaagaatataatgttatgacctaagaaatctgaggatatcgtccttctgcctgctgaaaatcatggaattaaaaagatatagagtccattctgagaaattcaatttcatcaaatggaaa

SEQ ID NO: 958662 - DNA, 120 bp, Artificial Sequence
  ENSG00000257845_3 (sequence is synthesized)
gtgaaagcatctccaattctatatatacactgaagccttcatgccccatttacactacttgtatcgaatcccgtaataggtttctgcctattgagtccaaataaatggtggttatcaaaa

SEQ ID NO: 958663 - DNA, 120 bp, Artificial Sequence
  ENSG00000249364_0 (sequence is synthesized)
acagctgagccgtgtgaagaggctgacagcggcgtggccaccacccaggatggagagaaaggcactgtgaggtgttaatggaaaaatccaacttccttttcttccaaagatgatgactga

SEQ ID NO: 958664 - DNA, 120 bp, Artificial Sequence
  ENSG00000249364_1 (sequence is synthesized)
aaccaaagtggagctttccctgaaactttctgagatgcaagtgggtgttaaatggttcagcaaagccaagccagagcagttggtgtgctttgaaatgaagcaacattggaaaaatgaaat

SEQ ID NO: 958665 - DNA, 120 bp, Artificial Sequence
  ENSG00000249364_2 (sequence is synthesized)
ctactgaaagatcactacgtgtttcaaaggccttcagactcagactggaactgcaccgttggctctcctgggtgggtctccagcttgctgaccacagaccttgagacttctcagccttta

SEQ ID NO: 958666 - DNA, 120 bp, Artificial Sequence
  ENSG00000249364_3 (sequence is synthesized)
caatgccgtctggactctacagattttgaccctgaagtaaagtaggaaaggctatgaggacatgttaaatgttgtactaccgcctgaagccttttcttctttaaatttttcaacaagagt

SEQ ID NO: 958667 - DNA, 120 bp, Artificial Sequence
  ENSG00000249364_4 (sequence is synthesized)
tgaatgcacacgtggagcttaattggacaacaacttttctcctcttctgtgggatcccgtcagtgctttaagcaatgagaaggcagctcatttccaagtttgtgtggtaagaaagctggg

SEQ ID NO: 958668 - DNA, 120 bp, Artificial Sequence
  ENSG00000249364_5 (sequence is synthesized)
acccagaaaaatgcactgatttacccaaggaagcagagctgggaacagaatacgaggcttctaatctactgatcatttcactgtgtcacactatttaagatgtagaaacagctgaattca

SEQ ID NO: 958669 - DNA, 120 bp, Artificial Sequence
  ENSG00000249364_6 (sequence is synthesized)
gcttatgttactttttataagattatccatttgactagatttctttcctgctgacaaaagaggcaatttctacatataaaataaatctgattaaaactctttctctgttcctgtcaaggt

SEQ ID NO: 958670 - DNA, 120 bp, Artificial Sequence
  ENSG00000249364_7 (sequence is synthesized)
ctcctgtactgccctgtaaaaataacgggaatggaaagcttttccttaggcataaaaagttaattttatttcttattctctttcacagcggtaactattactttgtaattttcctggtat

SEQ ID NO: 958671 - DNA, 120 bp, Artificial Sequence
  ENSG00000249364_8 (sequence is synthesized)
tttgttggcagccaaaaataacacaagtaatagtccttgcctacaatatgcagctccgattcattttgcttagctcaagttgcctcctataataaaggtggtggcactagaccttaagca

SEQ ID NO: 958672 - DNA, 120 bp, Artificial Sequence
  ENSG00000249364_9 (sequence is synthesized)
taggtctaaactagagcaaatttcttaagcccgtttttaatcagaaaggcagaacaagttcaaatcctttccattcctttatcctagtagggtttttagaacacaccaaatagcaagaaa

SEQ ID NO: 958673 - DNA, 120 bp, Artificial Sequence
  ENSG00000249364_10 (sequence is synthesized)
tgaatgcagctttagtaattaacattgataactcttctcagcctccaactgagtgaacagcctctttcaggccagtcaagaaccattctgtataatcctatctgcatgttatcttgacag

SEQ ID NO: 958674 - DNA, 120 bp, Artificial Sequence
  ENSG00000249364_11 (sequence is synthesized)
tgggagatagtgagtcatagacaaaggccaaggtgttgggcctgagctaaccaagtgcgttgagaatggaggcagtctcccaggatctgggacaggtgtgaggagccaccaggagccagg

SEQ ID NO: 958675 - DNA, 120 bp, Artificial Sequence
  ENSG00000249364_12 (sequence is synthesized)
gaccattaagtggatgggttagtcaaagcattacttcataaatccaggcggccacagaggtctgcgtatttacagacaccacttgtcaagagaagtggcagccttgaaaccagaaggcac

SEQ ID NO: 958676 - DNA, 120 bp, Artificial Sequence
  ENSG00000249364_13 (sequence is synthesized)
aaacactgaaaaatcaggtggttcaggctgctaatggtcctattaggcagtcacgcatcagaggacccatggtagacaacagagcaccacaaaggccccatgtggggcatggcttctatg

SEQ ID NO: 958677 - DNA, 120 bp, Artificial Sequence
  ENSG00000249364_14 (sequence is synthesized)
ctagaatccacctctatgcagacaaaggactatcatgtgcttcttctcttaaacaaagaaatccatgtgtggcttgtccagggcattcagatgcaaacaagcaacttagaccaccaaaaa

SEQ ID NO: 958678 - DNA, 120 bp, Artificial Sequence
  ENSG00000249364_15 (sequence is synthesized)
ctttcccttgtgaagtgaaagcaaagttttaaaattttttctcctctgcaagaaaatatatttcagaaaatctctatctcaaaaatgaagcaattaagaactgtctggctgtgaggatct

SEQ ID NO: 958679 - DNA, 120 bp, Artificial Sequence
  ENSG00000249364_16 (sequence is synthesized)
ggcctcaacttgacttaaagcaacaacttcagttacatatcaagatgtgcgtgagaatgaacctgctctgctcagccaacgtgctgagtgacttgatgtttgtaataaataaataaataa

SEQ ID NO: 958680 - DNA, 120 bp, Artificial Sequence
  ENSG00000249364_17 (sequence is synthesized)
tttggcaactttaaaaatttttgagcaaaagcaactgtttaggagtttaaccattacttaaaaaaagatacatgaaagttattatgtgtatgttcctgcatggtacataggaaattacta

SEQ ID NO: 958681 - DNA, 120 bp, Artificial Sequence
  ENSG00000249364_18 (sequence is synthesized)
attgctagttagttcaatttacttaattaggtatttactcattggctattatgtgcccagtttcgggctatgtaatattttaaaaattagcattatatatgttgccctatctacactttc

SEQ ID NO: 958682 - DNA, 120 bp, Artificial Sequence
  ENSG00000249364_19 (sequence is synthesized)
tggggagcaaaattttgaaaatcatttgatgtggaaaccctttaaaaagaactagattgcagcatgtattcgaattcaaaattgattttcatcaagtactaaaatgtgatacaagccaaa

SEQ ID NO: 958683 - DNA, 120 bp, Artificial Sequence
  ENSG00000249364_20 (sequence is synthesized)
caataggaattttcaggaatgagaatggttgtgctgtcaaaaaagataaacaatatggatgacttatgaatatttatgtcctattaaatttattgaattttggaaggcagagattgctaa

SEQ ID NO: 958684 - DNA, 120 bp, Artificial Sequence
  ENSG00000249364_21 (sequence is synthesized)
agcggagatagttgacagcagagaagagctaccagtgaattcacgaattacattctggattattctttttgaaagaatatatatttggtgcatttgtcattagtaaagttaattaatcag

SEQ ID NO: 958685 - DNA, 120 bp, Artificial Sequence
  ENSG00000249364_22 (sequence is synthesized)
agagaagagtacaatgtatcagttgagtactaaacattggctatttgtataatgaaaaagtacagagagttccatttatgtttgtccttttattgaaaattgctacaacctggtcaaaaa

SEQ ID NO: 958686 - DNA, 120 bp, Artificial Sequence
  ENSG00000249364_23 (sequence is synthesized)
attccattccagaaccccagctaaaatgttctcaagggctgaccagagattcctcctcctttctctgggctggtacaacttgaccgctgcttgacatcaaggtcaactggagactgggaa

SEQ ID NO: 958687 - DNA, 120 bp, Artificial Sequence
  ENSG00000249364_24 (sequence is synthesized)
cagttatgtaactgtgttgtaaattgaattagagctgtacatgagcccagaccaagtaaccagtgcagctccaggcaagagcagcaacatgtcccccagagacagcattggaggaacagc

SEQ ID NO: 958688 - DNA, 120 bp, Artificial Sequence
  ENSG00000249364_25 (sequence is synthesized)
gggtaaaagctgacttggcagaagctgtctgatactgtgggtcatcctgaccttgagactgcgcaacgtgccctggcagattcagagtgtgtcctgctagaacccatgtgctggactcat

SEQ ID NO: 958689 - DNA, 120 bp, Artificial Sequence
  ENSG00000249364_26 (sequence is synthesized)
ttccaagtgtgcctgcagcatgcattcattactgcatctgatggaagcacaaagggagagacaaagatgcagagaacaatgctcagaatggctgtattgcacacaatcctcttctgaggc

SEQ ID NO: 958690 - DNA, 120 bp, Artificial Sequence
  ENSG00000249364_27 (sequence is synthesized)
cccattcctgaaagaaagcaggccatgctggtctcagtatttgcatggaaggatatctgccagtgaatgagtctgttgaaatcaccacaccaaattcaacattaagggccaaccctgacc

SEQ ID NO: 958691 - DNA, 120 bp, Artificial Sequence
  ENSG00000249364_28 (sequence is synthesized)
aacagtgaccttgccatcagagagaacctcatcaggaaggactttgagctcttaaggaagccacccctttggagaggctctacttggacccaccaaattccaatctgtaggaaaaaagct

SEQ ID NO: 958692 - DNA, 120 bp, Artificial Sequence
  ENSG00000249364_29 (sequence is synthesized)
acagccaattttcaggccgcttccaaatactacatgagctagtttggtgtctaatgtaacagttgtacatgttttagtggctccacagttagacttgttggacactaaggaagccatcta

SEQ ID NO: 958693 - DNA, 120 bp, Artificial Sequence
  ENSG00000249364_30 (sequence is synthesized)
tgccgcatgcccccagattacatttgtggagtgaaggctttgatctctgcttcctacatgtgtctgcgaggattggtactatgagtgtgcctgcagcatgcattcattactgcatctgat

SEQ ID NO: 958694 - DNA, 120 bp, Artificial Sequence
  ENSG00000249364_31 (sequence is synthesized)
ggggatgtaggagtgtgcagagaagaagccatgttttgaggacactcaagcaacctttggagaggcccacatgggaaggaactgaaacctcctaccaaaaaccagcgctaatttgccagt

SEQ ID NO: 958695 - DNA, 120 bp, Artificial Sequence
  ENSG00000249364_32 (sequence is synthesized)
cttcagaaaagaatgtgctaaaggtttgtccttgagaagtttccaagccaagacactcctaggagcacttcccattgaggccgaaaggctcatccacttacagcgattcatgggaaaaga

SEQ ID NO: 958696 - DNA, 120 bp, Artificial Sequence
  ENSG00000249364_33 (sequence is synthesized)
gaatggaaaaagggtatcacagggtaaaaaagaaaccgtctctttccagtccttctaaagtctgggcagttggctgccccatcacatgtggaataagaggggggcattaagtgcagaggg

SEQ ID NO: 958697 - DNA, 120 bp, Artificial Sequence
  ENSG00000249364_34 (sequence is synthesized)
agctggtgtcagtatggcaggcaaacactgaggaaaaatcagcatacatagtatacacaaagagaatgagaaaaaaatatttgtaacaccagaacagacaccacccagatgaaagaaata

SEQ ID NO: 958698 - DNA, 120 bp, Artificial Sequence
  ENSG00000249364_35 (sequence is synthesized)
agaaggcttacacgtggagaggaaaaaagcctctggcagtggtcagtggactgtagaatgagcaagaaaggcatgaccatcctcctaccagtgactggtcattctggagaggatacatgt

SEQ ID NO: 958699 - DNA, 120 bp, Artificial Sequence
  ENSG00000249364_36 (sequence is synthesized)
gcacagatctggaaaaccagggctgaaaagccttttgacacctttggtgacctaggacatggtcccccaatgtaagacatcatgctagatagaggggaaaatagtaagttttcttcaaag

SEQ ID NO: 958700 - DNA, 120 bp, Artificial Sequence
  ENSG00000249364_37 (sequence is synthesized)
gcaaatgaatacaacttgagataacttttgaaaagaaaaaaggtactgggaccatggcatgactttgatctgtgctaacatgaccgcctgcagaagcagatgaggagaggcagaataatg

SEQ ID NO: 958701 - DNA, 120 bp, Artificial Sequence
  ENSG00000249364_38 (sequence is synthesized)
taaagctgaaagcttggagtcaccaaaccatagatagcttcacctcttaccaagtgcttgatgtgtggctaggttcttaaatcccctacaagttccagcttcctcatctgtaaaaaacga

SEQ ID NO: 958702 - DNA, 120 bp, Artificial Sequence
  ENSG00000249364_39 (sequence is synthesized)
gcaagttaagactgggtgagttaatagatgtaaaagtacttagtacagtactctacaaatagtaagtgcccaataaatgttaactgttattattatgtattctgtccttcactatgttag

SEQ ID NO: 958703 - DNA, 120 bp, Artificial Sequence
  ENSG00000249364_40 (sequence is synthesized)
gccctgggatgtagtggtgacaggcaaggctgctgctcttgtggttcttacatgaaacaagggaacagggaaataaacaaaataaatgcagactatgaaaagtgctaaagaataaataaa

SEQ ID NO: 958704 - DNA, 120 bp, Artificial Sequence
  ENSG00000249364_41 (sequence is synthesized)
atctttggtccaagaacacaatcctgagtgacacaggattgccctgaaagtcaacagcatccgtcttacaaaaatcaacaacactcgcttttcaaacttccaaagaatttactggtctgg

SEQ ID NO: 958705 - DNA, 120 bp, Artificial Sequence
  ENSG00000249364_42 (sequence is synthesized)
gcttctaagatgccttctgctttccacttaggtctaatttttttctttaagcctgtacatgcagtcttaagattatttttatgatgcaattaatagctatttaaacactttaagttgatt

SEQ ID NO: 958706 - DNA, 120 bp, Artificial Sequence
  ENSG00000249364_43 (sequence is synthesized)
cttttcagatattatttactctagtccatttacatgtggtaagtcattatttcattgtgtttttttagttttcgttttgtttttctatggagatgttttttaaatgaagaaattttaaat

SEQ ID NO: 958707 - DNA, 120 bp, Artificial Sequence
  ENSG00000249364_44 (sequence is synthesized)
gaaagactttagcctctcttcaaaagaacagtaaaaatgaatactctctttgctaggatgcatatgatggcatgagtttaagttttagattctctgttgatgtcaaagttgcaaacattt

SEQ ID NO: 958708 - DNA, 120 bp, Artificial Sequence
  ENSG00000249364_45 (sequence is synthesized)
tttgtatctgggcaccatgatggtatggcactccatctgtgatttactctactcagagaggaatgaagtgtagttaacaagaatcaaactaatggaaaacaggattttggtgttgctgga

SEQ ID NO: 958709 - DNA, 120 bp, Artificial Sequence
  ENSG00000257849_0 (sequence is synthesized)
tctggaagtgctgcccaaagacatggccaccggggaggaaaggaagaaagcagcacagagccaagtttgaagtcctggaagagaatctcctgagacattggctgaggaacacagaaagtt

SEQ ID NO: 958710 - DNA, 120 bp, Artificial Sequence
  ENSG00000257849_1 (sequence is synthesized)
ttctggaatttttccattctgggatactctgagcccattttgtcacaggtcatcatgacttgatgaatgaatatcatattggttaattcctgcggcttaataaaatcctttgttcaagaa

SEQ ID NO: 958711 - DNA, 120 bp, Artificial Sequence
  ENSG00000241684_0 (sequence is synthesized)
aaacaatctcgacagcgcatttcgggagccacggctccgggcgctttgctgggggctaaaggggtttatccctttccttgaatcccagcaggctagaactaccccctcccagtcttcagg

SEQ ID NO: 958712 - DNA, 120 bp, Artificial Sequence
  ENSG00000241684_1 (sequence is synthesized)
cttgccacgctctccacccgatccttccattgaaaggcagagaaggaaggatgtgcttgggaactttaagacccacgaacgacagcgcactgatggagcagcccagtgtctggggcaaag

SEQ ID NO: 958713 - DNA, 120 bp, Artificial Sequence
  ENSG00000241684_2 (sequence is synthesized)
tcctcgaggttcattcattcaggaagcctctgaccagcctttaccatgcgctgagtgagaagctgaggataaggaaagagcaagacccccaagaaaccctgatgtctggctgaaagccga

SEQ ID NO: 958714 - DNA, 120 bp, Artificial Sequence
  ENSG00000241684_3 (sequence is synthesized)
agcatgacgcaactttgctatatttctctccaacaaggatttgtatattttcgctttctcctcaagtaacacctggacctgctcctttcccttcaaacgctgagggctcagtctccaagt

SEQ ID NO: 958715 - DNA, 120 bp, Artificial Sequence
  ENSG00000241684_4 (sequence is synthesized)
tcctttatgaaacagggtgtaccatcagagacgcaggtatttattgaaacctgctttgtgctgggcaatgtgccagatgttggggataaaatggagacttcagaaatgaagatgcaaaga

SEQ ID NO: 958716 - DNA, 120 bp, Artificial Sequence
  ENSG00000241684_5 (sequence is synthesized)
caacaggggaaaccatatatgtttatggacagtcatgccaaagtatgattggaagacaaaaagacctgtgatctcactatgttgcctcggctgctctgaaactcctggcctcaagtgatc

SEQ ID NO: 958717 - DNA, 120 bp, Artificial Sequence
  ENSG00000241684_6 (sequence is synthesized)
ccccctgccttggcctccacagtgctggaactataggtatgagccattgcacccagccaggaaatacaattttcgaaagactaaacaagtttctaaaatcatggcacaattaagtagcaa

SEQ ID NO: 958718 - DNA, 120 bp, Artificial Sequence
  ENSG00000241684_7 (sequence is synthesized)
aattagaatacagagtgggcttgttggaaagcgtcaactattaatcaccatgccatacttttgaggagcagaccccacacttgtaaccaggcccttcaatttatcattcctgcaagtcaa

SEQ ID NO: 958719 - DNA, 120 bp, Artificial Sequence
  ENSG00000241684_8 (sequence is synthesized)
gacttcacctgtgaaccagctgccctctgccagcccaacttcgtggatgtgcaatctctacagttgcacagggtcccgtgtttagtttagtactttgcttttgctatctttaaatactta

SEQ ID NO: 958720 - DNA, 120 bp, Artificial Sequence
  ENSG00000241684_9 (sequence is synthesized)
aagctgcatggagtttagctgaaattgctgcccagtccgaagctaattttggaagatgctgttcggtcttaggttatgaaaaacggttctgcccttttacaactccagcaggaagagcta

SEQ ID NO: 958721 - DNA, 120 bp, Artificial Sequence
  ENSG00000241684_10 (sequence is synthesized)
agctcccaatattccgtccattaatgtccctggtgagagtcttcaaaactcacgagcaacaatgcaagaatttcccagccttcaacgtgtgacccacttctacattattgactccaataa

SEQ ID NO: 958722 - DNA, 120 bp, Artificial Sequence
  ENSG00000241684_11 (sequence is synthesized)
actgaccaattaaatgtttttgtggtcacagaacttgtaattatgtggttaaagatgtttcagatatatcacattctttcacactgtggcagaaactattggttaaataactcagccatg

SEQ ID NO: 958723 - DNA, 120 bp, Artificial Sequence
  ENSG00000241684_12 (sequence is synthesized)
tctatcttccttgtccaatctgcacaaaagagactggaaaaaagctggacacttgcttctttcccatcctcctttgcaggtaagcatcgctgtgtgacttagttctggccaatgagatgg

SEQ ID NO: 958724 - DNA, 120 bp, Artificial Sequence
  ENSG00000241684_13 (sequence is synthesized)
gaaggcagtcttctgggatgcaaaaagcttttttctttgttaataaaaaggagaatgcctctataggaaaagatctttttcaataccactctgttgcccatttcctaccttgatgttgtt

SEQ ID NO: 958725 - DNA, 120 bp, Artificial Sequence
  ENSG00000241684_14 (sequence is synthesized)
tggagctacggcacccatcttgagataataaggtaaaacacatcactaggaaaaaccaacagctgaatttagagtagacaggatggaagggacctggtgatattgtggagcaatgaacga

SEQ ID NO: 958726 - DNA, 120 bp, Artificial Sequence
  ENSG00000241684_15 (sequence is synthesized)
atgctgtcgactgcctagttaacctattacttgtttaaatctctgataggctatatttttaaaattttgcaaccagggttattcttagtctaagcatgcaactttgaaaaatgtgatccc

SEQ ID NO: 958727 - DNA, 120 bp, Artificial Sequence
  ENSG00000241684_16 (sequence is synthesized)
tttgacaagataacaagccttccattacctgctgcaggtgacccagtttgctggctgttgtgggtagctcagaacaggaccctaaggcaccttggccctccctctgctttaaaactcaac

SEQ ID NO: 958728 - DNA, 120 bp, Artificial Sequence
  ENSG00000241684_17 (sequence is synthesized)
accaaactgtattcattcttgtggtactgcctgtgtcttaacatgcatcccaacatctggcacagagcctggcactggcaacctcttaggaaatttgttaaatgaactgatagtgtagca

SEQ ID NO: 958729 - DNA, 120 bp, Artificial Sequence
  ENSG00000241684_18 (sequence is synthesized)
ttctgtcactttcctcagcgataaaattctcattcttcaaaaaattttccttttgcaactgaatttaaaaatgaaatacctaccacctaccacttcaagctttgctaggtgacggcttac

SEQ ID NO: 958730 - DNA, 120 bp, Artificial Sequence
  ENSG00000241684_19 (sequence is synthesized)
cctcctgagcatcttggaccacaggcatgcactaccatgcccagaaaagcggtgtctgatttggcaagaatacatttctgcattcaaagttgaaatgtgaagataaacctcacccacttg

SEQ ID NO: 958731 - DNA, 120 bp, Artificial Sequence
  ENSG00000241684_20 (sequence is synthesized)
gaataggataaaagaaaatcccctggatagagggaaatatgcaaacagttctattaccatgtgtatcttttcctgagctgggtctttatgcaacaaaggaactggaggtaatccatgcct

SEQ ID NO: 958732 - DNA, 120 bp, Artificial Sequence
  ENSG00000241684_21 (sequence is synthesized)
ctaggggcactccaggctctgggctcagacggctggcttctgcctacccgagccttaacctttcaaggaccagaaggattccagagctcttgccctaggtcctggggcagcgatgactca

SEQ ID NO: 958733 - DNA, 120 bp, Artificial Sequence
  ENSG00000241684_22 (sequence is synthesized)
ccaattcactgctcactaacatctccatcaaagggtaactgggttggggcaccgggtgtgggaaggagaggaaggaaacgagaatcggcagtttccattacctgctagcaactctggaaa

SEQ ID NO: 958734 - DNA, 120 bp, Artificial Sequence
  ENSG00000241684_23 (sequence is synthesized)
aacacacattgtaaaataagaattcttcaaagacaacttgaagacatctgggaattctgaagcctgaaaattccatgagttcatagcagtgttcactaattccactgatctaaagacaaa

SEQ ID NO: 958735 - DNA, 120 bp, Artificial Sequence
  ENSG00000241684_24 (sequence is synthesized)
ctgtcaggaacagagtcggctttcaagattggaatgtcaaagtagagtcttcttttcctcagaccagaaggggcttggttggggataaagcttaaaagcatgggatgtatctccattagg

SEQ ID NO: 958736 - DNA, 120 bp, Artificial Sequence
  ENSG00000241684_25 (sequence is synthesized)
aaatatgaagtgagttggtatattacagcccccacatgcaagaatagcaatgctggcaatttggataagccaaagagaagccacaaagtacttcaagtaaaaatgtgaaagttcttgact

SEQ ID NO: 958737 - DNA, 120 bp, Artificial Sequence
  ENSG00000241684_26 (sequence is synthesized)
taacaaggaaaaaaaagtcatgctgaggcagctgagatctacagtatcagcccaagaaaaataaaaaacatatgtctgctacacagactgcttgtctacctatgtatcaacacttgttga

SEQ ID NO: 958738 - DNA, 120 bp, Artificial Sequence
  ENSG00000241684_27 (sequence is synthesized)
acataatgtgaatgaatctcaaaaatattttgctgagtaaaagtgcccaatccccaaaaactacacatcatatgactcaatttgtttgaagatctaaaacagttgaagaaaccgaagcac

SEQ ID NO: 958739 - DNA, 120 bp, Artificial Sequence
  ENSG00000241684_28 (sequence is synthesized)
aaagaataacttgtccaagatcacagagtttaggaagtaaggaagcagggctttgagctttgcatcaagtgatgacccataaatgcaaatggaatacaacaggagtgggtccctaaagtc

SEQ ID NO: 958740 - DNA, 120 bp, Artificial Sequence
  ENSG00000241684_29 (sequence is synthesized)
ccacccagagaatgcccttctgccaaaaaatttcggattgaaacagcaaaaacacctaagcaactgatagtcaggtggttctctgatttaattgtttgaaagcagtcactggaagcaaag

SEQ ID NO: 958741 - DNA, 120 bp, Artificial Sequence
  ENSG00000241684_30 (sequence is synthesized)
ctatgtgactcagctttggtgatgtactccagctggagtctgacagatggtcatagcaacctagaaccattgattcatggagtttctagcaaaaggtcattaggaactaatggaagtgtt

SEQ ID NO: 958742 - DNA, 120 bp, Artificial Sequence
  ENSG00000241684_31 (sequence is synthesized)
aggaggaagatgagctcagttttgatgatgattattcacatgactttcattgactttgaagaagtgtctggatgaagctggatgaagactgacaatcactgcccatcttacacagcaact

SEQ ID NO: 958743 - DNA, 120 bp, Artificial Sequence
  ENSG00000241684_32 (sequence is synthesized)
gtgaacagactgtatgtgaatgcattctataaactatggagagttatgaagctataaagggttatttatttatgcaatgattcttagtacattcattacttacatttaatatctgctttc

SEQ ID NO: 958744 - DNA, 120 bp, Artificial Sequence
  ENSG00000241684_33 (sequence is synthesized)
ggagacaggactgggatataggagcttgtacggataaacaacacaaacaccttgggtaagtgatacaccaagagagatcaaaatagggtaggaacacgatcctaaagctatgtgagatac

SEQ ID NO: 958745 - DNA, 120 bp, Artificial Sequence
  ENSG00000241684_34 (sequence is synthesized)
gaagccaagagaccctgtctacaggctgatatgtattgcaaccagaggccacctacactcaagaaaattctaaatgatgtaataggttgtggacactttcttgtaaaaatgatcgatatt

SEQ ID NO: 958746 - DNA, 120 bp, Artificial Sequence
  ENSG00000241684_35 (sequence is synthesized)
tttttcttatagggataaagcttaaaagcatgggatgtatctccattaggaaatatgaagtgagttggtatattacaggtaggttagactgagataattataaaactgggctgattttac

SEQ ID NO: 958747 - DNA, 120 bp, Artificial Sequence
  ENSG00000241684_36 (sequence is synthesized)
atagagaagaacttgattcctaaaggtgttgaaggacaagatggggacagttattgaagtgttcaggtgctgtcctttgtagtctgtagcctattaaaataatacacaactgaacacaga

SEQ ID NO: 958748 - DNA, 120 bp, Artificial Sequence
  ENSG00000241684_37 (sequence is synthesized)
cccaaggaaaggggttctactcatcgctagaatgtaaactctaagaagataaggattttgtctgcttcatttattactgtattcccagctcctaaaagagtgtccagcacttagtatctg

SEQ ID NO: 958749 - DNA, 120 bp, Artificial Sequence
  ENSG00000241684_38 (sequence is synthesized)
ttggtaagtacctgttgaattaattaaccagtgatgagactttggaaagcagctagtccatctgtaagattgttttctcatctgtgagatgagtcagttagattagatgttttctaagct

SEQ ID NO: 958750 - DNA, 120 bp, Artificial Sequence
  ENSG00000241684_39 (sequence is synthesized)
tattctagttttaaaattgtatatttctataagaaatgataaatgaaaaatgtccattcctttttcatctccatcacccatctcacatcttccttcagtgcctatgtgatctgtttgagt

SEQ ID NO: 958751 - DNA, 120 bp, Artificial Sequence
  ENSG00000241684_40 (sequence is synthesized)
ataaccaggtgtacaaaagtactaagtgatatgagatgacttcagtagtccagggactctttcttcccccactctgtaaagagttatttgcttaatttaatgtacattataaaaacagaa

SEQ ID NO: 958752 - DNA, 120 bp, Artificial Sequence
  ENSG00000241684_41 (sequence is synthesized)
ctgaactgcgtggcctcacataaaccccaccacacctctgtcctgggctccttccccgcaacaggtgtaaagacaaaaggctcattgtcctttggagcctataggataaacagaaagaac

SEQ ID NO: 958753 - DNA, 120 bp, Artificial Sequence
  ENSG00000241684_42 (sequence is synthesized)
atgtccttgccggttaatctgccggtgataaagagtattgttttatctcctgccatctccacgttccaagagatgaattctattgtgacacaaagtctgctttgtccttccaacccactg

SEQ ID NO: 958754 - DNA, 120 bp, Artificial Sequence
  ENSG00000241684_43 (sequence is synthesized)
agatgtttaaattggcctctcatatattccttggttgtcacaataagagcaatgagttgttataatgtgttgagaggatctttcccccatgacaaggagaccatcatctacagagatgct

SEQ ID NO: 958755 - DNA, 120 bp, Artificial Sequence
  ENSG00000241684_44 (sequence is synthesized)
atgatgctgagaaataatgtgcttctcttctgctctaattttttttaattaagacttttattttttgagcagttataggtttagagaaaaattgaagggaaagtacagagagttcccatc

SEQ ID NO: 958756 - DNA, 120 bp, Artificial Sequence
  ENSG00000241684_45 (sequence is synthesized)
ttctctcacccctttcatctctgtttccatacgtttgctacaaatgatgagccaacagccatacgttattaactaaagttcacagtttacattagggttcactctttgcttgtacattct

SEQ ID NO: 958757 - DNA, 120 bp, Artificial Sequence
  ENSG00000241684_46 (sequence is synthesized)
atgggttttgtcaaatatatgataacctgtatcctccattatagtacaatacagaagaatctcactgccctaaaaatctcctgtgttcctcctgtgcatccctccctcccatcccctggg

SEQ ID NO: 958758 - DNA, 120 bp, Artificial Sequence
  ENSG00000241684_47 (sequence is synthesized)
catccctccctcccatcccctggggaaccactgatctttttgctggctccagttttacctttttcagaatgtgaggtagttgggagtcatacagtatatgtgtatatatatatgtgtata

SEQ ID NO: 958759 - DNA, 120 bp, Artificial Sequence
  ENSG00000241684_48 (sequence is synthesized)
tacacatatatatacatatatatatatataaaaaatagcctttttagatggatgtctttcccatagcaatatgcattgaactttcctccatgactttgtgtggctcaatagttcatttat

SEQ ID NO: 958760 - DNA, 120 bp, Artificial Sequence
  ENSG00000241684_49 (sequence is synthesized)
tgtgtggctcaatagttcatttatttttgttgctgaatagcttctgcttaattttcaaagtgtttaatgtaagaaagcggtatagtccaggcgcagtggctcaacacctgtagtcccagc

SEQ ID NO: 958761 - DNA, 120 bp, Artificial Sequence
  ENSG00000241684_50 (sequence is synthesized)
gcttgtagtcccagctactcaggaggctgtggtgggaggattgcttaagcccaggagctagagcctatagtgagccatgattgtgccaccgcactccagcatgggtgacagagtgagatc

SEQ ID NO: 958762 - DNA, 87 bp, Artificial Sequence
  ENSG00000241684_51 (sequence is synthesized)
caacaacaacaaaacggcagtatatttgtccccaccctcatctcttcctttatgggtatttccctaattgtgagagattacctgtgt

SEQ ID NO: 958763 - DNA, 120 bp, Artificial Sequence
  ENSG00000241684_52 (sequence is synthesized)
ctttatgggtatttccctaattgtgagagattacctgtgttttaaaaggtggcttactgtatgcattgagaaaattaaatgacatttcagaccagttccaagtaccttttgcaaagctag

SEQ ID NO: 958764 - DNA, 120 bp, Artificial Sequence
  ENSG00000241684_53 (sequence is synthesized)
agaaataaaagtgaattctagtatctcaatcacagagtaaaactagagaaggtctgttgggcttcaggcaacattggtgttcttggcaattttacccagaagaatttatattcctataat

SEQ ID NO: 958765 - DNA, 120 bp, Artificial Sequence
  ENSG00000241684_54 (sequence is synthesized)
tagtatttcctccaaaattaatgatcgcctgattgatttatttctttcctagcagcactggaggtcccacttacctagttagtaataacatttgctcttaatacatgagtcagttttctt

SEQ ID NO: 958766 - DNA, 120 bp, Artificial Sequence
  ENSG00000241684_55 (sequence is synthesized)
ttttctttttctttttttttttacatttccaaaacagaataccctgcaggaagaatgggatggcagtggaggagctctcactcacatatcatgtaatgtgggaggcagggctatgcgata

SEQ ID NO: 958767 - DNA, 120 bp, Artificial Sequence
  ENSG00000241684_56 (sequence is synthesized)
atgcgatagtcataaagggtgcaggcttcagaatcaaaggagtgaggttggtgtccctgcttacgccctactagctgagtgtccttcaggtcatttctcctctctcagactcagtggact

SEQ ID NO: 958768 - DNA, 120 bp, Artificial Sequence
  ENSG00000241684_57 (sequence is synthesized)
gtttcctaaagcacagctcataacaggctgtacgtggtaagaccgtcgggaagatggaaggagatcagtcatccctagagagcattaagcacagtctcagccacaaaacacttcctcaaa

SEQ ID NO: 958769 - DNA, 120 bp, Artificial Sequence
  ENSG00000241684_58 (sequence is synthesized)
catgatgcaagccacacagggcatttggcctgcgtataaaggacatactgaggacagtgtagatgctcaagaaattagtcctgaatgatcaaggggggaaagagagggttaatcttatca

SEQ ID NO: 958770 - DNA, 120 bp, Artificial Sequence
  ENSG00000241684_59 (sequence is synthesized)
tatgtgggctctcagagaacacagagctatagaaggaagctgacttaataagggtcaagcatgataggggagattaggaaccgtgtgcaatctaatggaaccacagataacaccttctag

SEQ ID NO: 958771 - DNA, 120 bp, Artificial Sequence
  ENSG00000241684_60 (sequence is synthesized)
tactttttccctttggccctgcccctgctgagacagggccactgctaataactcacattcttctcttctctcctctcaaaaagcccatttcctgagcaagtatatgctttggtaaggtca

SEQ ID NO: 958772 - DNA, 120 bp, Artificial Sequence
  ENSG00000241684_61 (sequence is synthesized)
ttagcggtcaacatggttcccaagtttagtgaatactttcagataaaactgaagggtacaaaatcactctttcctctctccctctccttgtcctacctctcacaataaaacgacttatct

SEQ ID NO: 958773 - DNA, 120 bp, Artificial Sequence
  ENSG00000241684_62 (sequence is synthesized)
actaattacaaagacctcaatagtggaagaaatccatatcctacataacatggagagctagctatatacccttggcatcagtttttatcctacttttactttttactgactttcatttac

SEQ ID NO: 958774 - DNA, 120 bp, Artificial Sequence
  ENSG00000241684_63 (sequence is synthesized)
tgaacaaagcctcctttgccaaaggcagggtaaataaactcagtcacatcctgtcttccttacatctttgtttatccataaactgtcgaagatacagatgaaaatccactaaagcatgct

SEQ ID NO: 958775 - DNA, 120 bp, Artificial Sequence
  ENSG00000241684_64 (sequence is synthesized)
tgaagcggttacacgaaggccaaataagatgggaatggaaatgcctgatgttaagggaagatactacctaaaatgatactgagctggccagtgtaatgacatgaaaacaaaacaaaaaaa

SEQ ID NO: 958776 - DNA, 120 bp, Artificial Sequence
  ENSG00000245812_0 (sequence is synthesized)
attaacatcccgctcccggtggcgcaggggagccggccaaagttcctcgcaaagtggcgagcgaaggagcgctgagcactgacgtctgggctggggaggagcgggtccgagcgaggacgg

SEQ ID NO: 958777 - DNA, 120 bp, Artificial Sequence
  ENSG00000245812_1 (sequence is synthesized)
agaggggacagagggaaagggaggcgggtgtcttcctcaggaatttgagctggggatctgcatcctggccattgcagtcctttagcatcctcgccgcgccctgagcgcgctggaggctcg

SEQ ID NO: 958778 - DNA, 120 bp, Artificial Sequence
  ENSG00000245812_2 (sequence is synthesized)
caggctgcgccctcccagggctgatgccgcgtcctgctccgccgttctgggacgtcggggacaaaagtggaggagacgggagagcccgggcagaaaaagcaggacgcgcgtcccagacat

SEQ ID NO: 958779 - DNA, 120 bp, Artificial Sequence
  ENSG00000245812_3 (sequence is synthesized)
gatcgctggtaacagatgcctggttcactctcatcctggccatacctgaggactatgctcctcttctagaagttcggtgcagtcatctgacttaattgattcagcgcatttatctgcagg

SEQ ID NO: 958780 - DNA, 61 bp, Artificial Sequence
  ENSG00000245812_4 (sequence is synthesized)
agtcatctgacttaattgattcagcgcatttatctgcaggctggagtacaatagcacgaca

SEQ ID NO: 958781 - DNA, 120 bp, Artificial Sequence
  ENSG00000245812_5 (sequence is synthesized)
caccgcacctggcctgtgagatggttttcttgggtagaatgaaagaagcttggctactgggtccattttatgtgaacatgttgctccctattatagtcagtccctggaacccattgtaaa

SEQ ID NO: 958782 - DNA, 120 bp, Artificial Sequence
  ENSG00000245812_6 (sequence is synthesized)
gtcagttctgggtttttgcttagctaccatgtagtaacagtcacagcctgtctcctgtcaccctaacaccatcaccattgccagtggatatttttacccctagtttatagttaggaagcc

SEQ ID NO: 958783 - DNA, 120 bp, Artificial Sequence
  ENSG00000245812_7 (sequence is synthesized)
tgagacccagagggattaaagagcttttccaaaatcatatggctggcaacactagtaatctgggctgcctgagtcctaaacatcattctaccccagcattgaattccgaggcctctagaa

SEQ ID NO: 958784 - DNA, 120 bp, Artificial Sequence
  ENSG00000245812_8 (sequence is synthesized)
tcttacctaccttccctgtttgaaatgtatttgtgggggaacaattgacctcagaatgagtaatttgtcactactctgagaaagtttcaccgagtttcacattttcccattacaaaagga

SEQ ID NO: 958785 - DNA, 120 bp, Artificial Sequence
  ENSG00000245812_9 (sequence is synthesized)
aaatgagaaaatatgtcctagatactacagagaaaaatacttcattgtcttaattgcctttctatttcaatcaaggaaggcatttaattatttctgaactacattcaaaactctctctca

SEQ ID NO: 958786 - DNA, 120 bp, Artificial Sequence
  ENSG00000245812_10 (sequence is synthesized)
caatctgaataataacatcaaaaaatttattgagcactttttatatgccaaactagtcaattctttctgtttatgacctcattgattcctcatggcaagtttatgaagtggaagcaatca

SEQ ID NO: 958787 - DNA, 120 bp, Artificial Sequence
  ENSG00000245812_11 (sequence is synthesized)
ttctctcttctaacaaatgaggaaactgaggcacagagggatgagatagtttgtctaagattgtaaggcattaggtggtgaagtcagcattggatcccaggccaagcccgaggccatcac

SEQ ID NO: 958788 - DNA, 120 bp, Artificial Sequence
  ENSG00000245812_12 (sequence is synthesized)
tccaccatgctgcctctcaagagaaagattcagtttcccctttgagatatccatttataagtacatgtgccaaagcaatgtgaagaaaccaacccagatgacttgattaagctacagaag

SEQ ID NO: 958789 - DNA, 120 bp, Artificial Sequence
  ENSG00000245812_13 (sequence is synthesized)
ggacatctggggtctcaagcctctggaaatcaaggtggagcatgtagaggttatgggatcaggagagacagagtttgacttctttgttttttctttgagaccaagtcttgctctgttgcc

SEQ ID NO: 958790 - DNA, 120 bp, Artificial Sequence
  ENSG00000245812_14 (sequence is synthesized)
ccaccgtgcccggcctgggtttgacttcttaagcaacctgaggaatgatgtccttgctgctgagcacagctgccctgggccctggaaaacccacatgacactcactcagcacccaatgct

SEQ ID NO: 958791 - DNA, 120 bp, Artificial Sequence
  ENSG00000245812_15 (sequence is synthesized)
ggcttcattgtggctgttggaaaccatgtggaaaagaaataactttttttgtgatctgtacgttatggctattatttttttacctcgcttagcttttcaagagaatgaagaccagtcgac

SEQ ID NO: 958792 - DNA, 120 bp, Artificial Sequence
  ENSG00000245812_16 (sequence is synthesized)
ttagtatttgtactctgaaatcgaatggcatgaacacatgtgttgtataagtgagaagaagtattctcttgtgtgatggactatagccttcagaaagcacctactattaaacagaataga

SEQ ID NO: 958793 - DNA, 120 bp, Artificial Sequence
  ENSG00000245812_17 (sequence is synthesized)
gattggattttgaaatatgtaggccacatcagtaggaaagttgacacttcaaattgctcacaaggactttaaactctacaataggtaaaatgtggagtaccttatgttttcagaccaaat

SEQ ID NO: 958794 - DNA, 120 bp, Artificial Sequence
  ENSG00000245812_18 (sequence is synthesized)
cttatgttttcagaccaaatgattttgtaatttgaattcaaaatttttttagtcttcacagtagtcttagcattaaaagcatagttatttttaatattttgataaaatattctatttcat

SEQ ID NO: 958795 - DNA, 120 bp, Artificial Sequence
  ENSG00000245812_19 (sequence is synthesized)
cagcgccacctcgcgatcctccagcttccctccctcatggccacggaaggctggccctttctggtccaagcccccagggtcccacacttactggttttccatgcactttcattatttccc

SEQ ID NO: 958796 - DNA, 120 bp, Artificial Sequence
  ENSG00000245812_20 (sequence is synthesized)
tttctctctcttcaatgttcccttatcctgagtattgaggtccccaaacgcgcctttctaccccacgtttggacatagccggaatgtctacctccttctccatccggtgaagcactgctc

SEQ ID NO: 958797 - DNA, 120 bp, Artificial Sequence
  ENSG00000245812_21 (sequence is synthesized)
acagcctctttctaataagcaagagcaattgttgatttttaaattttgtgtttttggaggcttccattcacaaatctgattgtttaaataaatctgtctccagtaaatatgttggcactt

SEQ ID NO: 958798 - DNA, 120 bp, Artificial Sequence
  ENSG00000273164_0 (sequence is synthesized)
caccagtgactgacatgacttggtgcaaatcttgggtagagacctatacttaagctcctcacccccacctgccgaggcgtaagggctcagagggggttccatggggtgggcgggagtggt

SEQ ID NO: 958799 - DNA, 120 bp, Artificial Sequence
  ENSG00000273164_1 (sequence is synthesized)
aagggtcgaggtgcagccacagcctggctctgtgcacaccccctccctccccctggtcccatgtgcacaccctctccctgccccctgccccttgtgcacaccctctgtaccccccttccc

SEQ ID NO: 958800 - DNA, 120 bp, Artificial Sequence
  ENSG00000273164_2 (sequence is synthesized)
tgcagtgctacagggtggctgcagcctttgcctcccacagctcctcaaggtcagagggctgggaacccctgggatgtggctgggatgaggaccctgcccctcctcaggcatttccaggca

SEQ ID NO: 958801 - DNA, 120 bp, Artificial Sequence
  ENSG00000273164_3 (sequence is synthesized)
aggggcacagagacacagccagcccagcagctgagcccctcctatcaggccaggtgggaaactgaagcatgaacacaaccccagactggaaataaaaagccgtcatgtactgtgtgccta

SEQ ID NO: 958802 - DNA, 120 bp, Artificial Sequence
  ENSG00000271714_0 (sequence is synthesized)
caaaatggtggcgccgaggcggaggccggcgcacctgggggcgccacacgccctacgggatccccgcagaccgccgccagctggacgcgagccccgggtccaggcggcccgcactggtct

SEQ ID NO: 958803 - DNA, 80 bp, Artificial Sequence
  ENSG00000271714_1 (sequence is synthesized)
gtctgcgccaggcccagcccgcaggggccgcccacagccggtggcccgcgtcgccgctcggtgtccgcgggtctggtgct

SEQ ID NO: 958804 - DNA, 120 bp, Artificial Sequence
  ENSG00000271714_2 (sequence is synthesized)
cggtccgcgccggggagagggagcgcactcacctcagacgcgccccgggagccgctggaagagcccgggaaaggaggcggagccgcgcgaatgaatggagccggcggctgctcgctggcg

SEQ ID NO: 958805 - DNA, 120 bp, Artificial Sequence
  ENSG00000271714_3 (sequence is synthesized)
cgcacagctcgcggctgccagggcgagtgcggctgcctcccgctcgccccggacgcccggctcctcgtcgcgggtcggccgcggcccaccgtgccctccgacgacgtgacgcactagcgc

SEQ ID NO: 958806 - DNA, 120 bp, Artificial Sequence
  ENSG00000271714_4 (sequence is synthesized)
tccgacgacgtgacgcactagcgccgcagcgcctccagccttcgcttccgctccgcgcccgcgcccaccgcgaatccccccgcccgccagcgcggagcggcccctcctcggagcctggga

SEQ ID NO: 958807 - DNA, 80 bp, Artificial Sequence
  ENSG00000271714_5 (sequence is synthesized)
cggagcctgggacgccgccctgcctccctccagccccggctttcaggcgccggcccggcaggtgcgggcttggccagccc

SEQ ID NO: 958808 - DNA, 120 bp, Artificial Sequence
  ENSG00000271714_6 (sequence is synthesized)
gccgtcacccggcagcgcgacgcccagctcagggcaatggcctggtattaaagagtgaccttggcttagatataaaaatagatgcggttaagccgcgggggctgcaacgctgattttgcg

SEQ ID NO: 958809 - DNA, 120 bp, Artificial Sequence
  ENSG00000271714_7 (sequence is synthesized)
tattcctttaatgccgaccttcgcaggattctgttcgcatagcccggtggagttctccagccccgcgtaggccctcctgaaatttacccagagtgggcgcggccatcccggcctcgggac

SEQ ID NO: 958810 - DNA, 120 bp, Artificial Sequence
  ENSG00000271714_8 (sequence is synthesized)
caccactttcatcctaaacctactgccacttaggtgcatgcaagttagaatcgtgggctgctttcacagtctacagaagtcctagagcccggactttcatctggagatgtcagggaaata

SEQ ID NO: 958811 - DNA, 120 bp, Artificial Sequence
  ENSG00000271714_9 (sequence is synthesized)
ccacattcctgcgctgaccttttctctttcaccgtttaaccggtacagaataaccctgacccagaaagacaacagggttccatccggctttcctcccgtgcctctcccagctctattcta

SEQ ID NO: 958812 - DNA, 120 bp, Artificial Sequence
  ENSG00000271714_10 (sequence is synthesized)
ccgtcttatggcctctggcgcctttgctaattacacactcctactgaaaattagccctccagcatttaaaacatgataaattgtctttaaggtaatgcgtattgtagtctaaatatattt

SEQ ID NO: 958813 - DNA, 120 bp, Artificial Sequence
  ENSG00000271714_11 (sequence is synthesized)
aataactgtattgagaaacaatattgtatctaagtattaatgtcaagactttcttttactcatcatccaagaaccgtagtattatgttcagctcatccagaaaagttgaaaattgcttct

SEQ ID NO: 958814 - DNA, 120 bp, Artificial Sequence
  ENSG00000271714_12 (sequence is synthesized)
ttcattcctgggaaatatttagcaatcacaataccaactttcacgaatttactaatgattagcaaaattagcaagatcaaaaaatacttcaaagaatgcttgttgatatagatatatttg

SEQ ID NO: 958815 - DNA, 120 bp, Artificial Sequence
  ENSG00000271714_13 (sequence is synthesized)
accctgatttttaaaaaaagcttttctgccatataagaatctattgtttcatttgtataatatttaattagccaaaatctttactattacacatcatttaccattttaatgaaacttaat

SEQ ID NO: 958816 - DNA, 120 bp, Artificial Sequence
  ENSG00000271714_14 (sequence is synthesized)
gaattagatttaatagagcaggaattttgggtagttgggttctacccatagccagtgatgaatgaaattatatgacttgtatttacatttctagagctatgtgtaagtaggagtccccag

SEQ ID NO: 958817 - DNA, 120 bp, Artificial Sequence
  ENSG00000271714_15 (sequence is synthesized)
ggtaatcccaaacaattgccatttggggaagctttggctaccagactatgccctacagatgttgaagcctcaggccttagtgtaaagctaaccaatacaacttgttgataatatttgaaa

SEQ ID NO: 958818 - DNA, 120 bp, Artificial Sequence
  ENSG00000271715_0 (sequence is synthesized)
gcccgcaccttgccaaggccgccatctcttgagtctcctgctgtatctttcacctttatctgtgagcccctgtgggcttgtgtgactgcattggaaccacctggataattgccctctttt

SEQ ID NO: 958819 - DNA, 120 bp, Artificial Sequence
  ENSG00000271715_1 (sequence is synthesized)
aaggaataaccagatgggctcttgggagcacaggtttagaattctgcctctcacaggaggtgagggacgatgaactgctgcaaacgaagtgggagccgaggagctgaaagaccacactgc

SEQ ID NO: 958820 - DNA, 120 bp, Artificial Sequence
  ENSG00000271715_2 (sequence is synthesized)
tggcttcagttgcgtctttgcagtaggcgtcaagatcatgtgataaataagacatcctgctaagtgcacattttcagctgcttatactgaaaactatataaagttaaaaagtttatttcc

SEQ ID NO: 958821 - DNA, 120 bp, Artificial Sequence
  ENSG00000271716_0 (sequence is synthesized)
ccaaaatgtccatcaactaacagatgtaaaaaatgaaatatccatgatgtaatattatgcagctataaaaaggagtaagatactgattcatgccatgacacagatgaacctacaaaacag

SEQ ID NO: 958822 - DNA, 120 bp, Artificial Sequence
  ENSG00000271716_1 (sequence is synthesized)
tatgctgagtgaaggaaagcagacacaaaaggccacctactgtctgattccacttctatgaaatgtcagaagagggaggctcacaggcagaaagcaggacgcccattgcaatgcgagccg

SEQ ID NO: 958823 - DNA, 120 bp, Artificial Sequence
  ENSG00000271716_2 (sequence is synthesized)
ctctgggcggccccaggctcagctctaatcgtgcagagcctgacctcgcctcgggggagccggctggactgggaagggctgtgcagggtccacaccctggactgggcttggtttgagcag

SEQ ID NO: 958824 - DNA, 120 bp, Artificial Sequence
  ENSG00000271716_3 (sequence is synthesized)
ctctactctttttgtttaagagcaaagatgagattgtgttgagagagtacagcctctatcttggactgctaataatatagataaggataacaacagcacaataaaactggtagaagtgaa

SEQ ID NO: 958825 - DNA, 120 bp, Artificial Sequence
  ENSG00000271717_0 (sequence is synthesized)
agatcacaggtcactcagtcagcaagggggacagtcaaggatagaagcttccttgggtgaggagggggctgctctgctcccacagtgggctcagggttcatacggtcctgcggaggcctc

SEQ ID NO: 958826 - DNA, 61 bp, Artificial Sequence
  ENSG00000271717_1 (sequence is synthesized)
ttctcgagactccatctcaaaaaaaaataaatagggccgggcgcggtggcttacgcctgta

SEQ ID NO: 958827 - DNA, 120 bp, Artificial Sequence
  ENSG00000279548_0 (sequence is synthesized)
ctctaagatgctaaataagtccagataccatgagtctcatgccaaatgactctaagcaatctgggacataagatgagttactctagctgtggctgtggctactgaatgacagaatcaaaa

SEQ ID NO: 958828 - DNA, 120 bp, Artificial Sequence
  ENSG00000279548_1 (sequence is synthesized)
agctgtgaagtgctcagccagaggctcaatccaccaatcctcacccagggacccctatcagtttcacaagccagaggctcaatctaccaaccctcacccaaagacctctatcagtttcac

SEQ ID NO: 958829 - DNA, 120 bp, Artificial Sequence
  ENSG00000279548_2 (sequence is synthesized)
tgggccacacagaggagctccaccccgagggcaggcacctgctacatccacattaacctcacactgtcacaccagctcacctgcccaaatgtggaatgaatgcttctctgcatggatttt

SEQ ID NO: 958830 - DNA, 120 bp, Artificial Sequence
  ENSG00000279548_3 (sequence is synthesized)
cctgggaaaagagtcaccaagagcaactgtttgctgaattaggatcaatggtacacaaatgtcaccccactttgggaaccttgaacccacctcagggactatactgcatggaagtaaaag

SEQ ID NO: 958831 - DNA, 120 bp, Artificial Sequence
  ENSG00000279548_4 (sequence is synthesized)
gagaaggacaagataaattaagtcccttggtccacgctcctctacaccaaacagtgcctctgtgacccgtcatctgctttgtatcttgaactgcctctcaagttaccattgcaaatgcct

SEQ ID NO: 958832 - DNA, 120 bp, Artificial Sequence
  ENSG00000279548_5 (sequence is synthesized)
agcagatgtctgatatgtaaacacagttgcacaaatgagtcaatgaatgaattaataaatcaatgaacaaagaaaagtaaaaggagttttttgggattttttttttttgaaacagagttt

SEQ ID NO: 958833 - DNA, 120 bp, Artificial Sequence
  ENSG00000279548_6 (sequence is synthesized)
ctagtaaaaggagtttttaaaccaccatagtagatggctccgtaatattttaaagtcctagccaaacctagaaacctatgattctcaggttttcatttaacctgctgtaaaatacaggga

SEQ ID NO: 958834 - DNA, 120 bp, Artificial Sequence
  ENSG00000279548_7 (sequence is synthesized)
aaccaatttaactgtatgctttgaagtcttcttttaaatgttatcacatatgttacacttgatttaagagatgttagcctctttgaaaacctttctgaagcccactcacggagaggctag

SEQ ID NO: 958835 - DNA, 88 bp, Artificial Sequence
  ENSG00000279548_8 (sequence is synthesized)
ctttgaaaacctttctgaagcccactcacggagaggctagatgctgtttattcttggggtggacatgtccacatttttagacagtctc

SEQ ID NO: 958836 - DNA, 120 bp, Artificial Sequence
  ENSG00000279548_9 (sequence is synthesized)
ctcactgcaaactccaccttccaggttcaagtgattctcgtgccttaacctccgtgaagctgggattacaggcacctaccaccacatctggctgtttatttatttagagacagagtctcg

SEQ ID NO: 958837 - DNA, 71 bp, Artificial Sequence
  ENSG00000279548_10 (sequence is synthesized)
accacatctggctgtttatttatttagagacagagtctcggtgtgtcacgcaggctagagtgcaatggcac

SEQ ID NO: 958838 - DNA, 120 bp, Artificial Sequence
  ENSG00000279548_11 (sequence is synthesized)
acaggcgtgagccaccgcgcccggcctcggcctcttttttaaacagtgtattagctgaccattatgaccaaagccaagtcaacaagacctccccagagaaagaagggaaaccaagtctga

SEQ ID NO: 958839 - DNA, 120 bp, Artificial Sequence
  ENSG00000279548_12 (sequence is synthesized)
ctgagccacctctagtttcatatgtatgtaaattatcatggagggcagcacggtgaacagatggagaacaaaggcatccatctgggaaggtcaggaggctgtggcaggaccgtgagagag

SEQ ID NO: 958840 - DNA, 120 bp, Artificial Sequence
  ENSG00000279548_13 (sequence is synthesized)
gggacatcaggctgaccccaggcagtgggctagcaatgagtgtttctctactgttgctgaacttgccaagtccacaagcttgatctccccaagcttaatttgcaaagtgcaagattccca

SEQ ID NO: 958841 - DNA, 120 bp, Artificial Sequence
  ENSG00000278630_0 (sequence is synthesized)
tatacgcaggggccactgctttcagcctttaaattctgttaaaaacagcgttggtgagaaagaaaatgtctacttcctgagaaagactgataagaatctaaaaggcataattttctcata

SEQ ID NO: 958842 - DNA, 120 bp, Artificial Sequence
  ENSG00000278630_1 (sequence is synthesized)
aaagggcagctgcatatgttggcatgattgatgagatctgctacagtcaagcaagcagccctgggtgaccagtttacccttccctgcgagggttccagctgccagttgcccccattctgt

SEQ ID NO: 958843 - DNA, 120 bp, Artificial Sequence
  ENSG00000278630_2 (sequence is synthesized)
aggtgagcatctgcctccataatcattgccaacagccctccattatcaactgccaggggtgcttcaaagcaatgtggagttctttctcttgacacagggaccaagtgtatttatgcctga

SEQ ID NO: 958844 - DNA, 120 bp, Artificial Sequence
  ENSG00000278630_3 (sequence is synthesized)
aacaaactctgcctttgctgactagggaaactcacatgtaaaatgtttttttttaattgcatcacaaatcactacagtattataaaacaggtcgtagcatcctccagccctcaccaccat

SEQ ID NO: 958845 - DNA, 120 bp, Artificial Sequence
  ENSG00000278630_4 (sequence is synthesized)
gacccccatcaggtattgtacattagactatgtaaagacctttcacttaaaaatagggattttctccctggttattatattctcatataaaagaaaaaataaaaagctctgtcaaacatt

SEQ ID NO: 958846 - DNA, 80 bp, Artificial Sequence; identical to SEQ ID NO: 858913
  ENSG00000278633_0 (sequence is synthesized)

SEQ ID NO: 958847 - DNA, 120 bp, Artificial Sequence; identical to SEQ ID NO: 858914
  ENSG00000278633_1 (sequence is synthesized)

SEQ ID NO: 958848 - DNA, 89 bp, Artificial Sequence
  ENSG00000278633_2 (sequence is synthesized)
cctgccttccttcctgggatcctgccttcaatttgattgcacaggtaccacagcaagccagtgctgtgtgctccgagttccagggcgtc

SEQ ID NO: 958849 - DNA, 120 bp, Artificial Sequence; identical to SEQ ID NO: 858916
  ENSG00000278633_3 (sequence is synthesized)

SEQ ID NO: 958850 - DNA, 120 bp, Artificial Sequence
  ENSG00000278633_4 (sequence is synthesized)
gagaagggtccccgaggtcaccggggatgcaccgtctgcatttcggcccctgcgggacaatagaggcctctctccctttgtgcccgggcccgggcctctgcagacagacctccatgccca

SEQ ID NO: 958851 - DNA, 120 bp, Artificial Sequence
  ENSG00000278633_5 (sequence is synthesized)
cccgggcctctgcagacagacctccatgcccagaggtcagaaatcagatataaccagacatcccagatctcctggacgagctcctgcaccaaccgaaatgccatctccagctcctacagc

SEQ ID NO: 958852 - DNA, 76 bp, Artificial Sequence
  ENSG00000278633_6 (sequence is synthesized)
tggtcacacccagtgtgaaaaggcagcagatatagcaccagggcagacactcgccctcaggaatgactcctccaca

SEQ ID NO: 958853 - DNA, 120 bp, Artificial Sequence
  ENSG00000278633_7 (sequence is synthesized)
cccagtgtgaaaaggcagcagatatagcaccagggcagacactcgccctcaggaatgactcctccacatccgaggcctctaggcccagtacacacaagtttcccctgctgccacgcaggc

SEQ ID NO: 958854 - DNA, 66 bp, Artificial Sequence
  ENSG00000278633_8 (sequence is synthesized)
cttagagctggggtaccgggtcactgttgaagacctggaccgggagaaggaggcggcattccagcg

SEQ ID NO: 958855 - DNA, 70 bp, Artificial Sequence
  ENSG00000278633_9 (sequence is synthesized)
cttctggtctgcctgccatttctaaagcacccagtatggatgtacagcaggagacacacaagtcccaaga

SEQ ID NO: 958856 - DNA, 120 bp, Artificial Sequence
  ENSG00000278633_10 (sequence is synthesized)
aagactgcctgggcctactggcccccttagcatctgctgcaggggtcccctctacagctcccatgtctgggaagaagcacagaccaccaggccccctgttctcctcctcagatccccttc

SEQ ID NO: 958857 - DNA, 66 bp, Artificial Sequence
  ENSG00000278633_11 (sequence is synthesized)
ttcctgcccccttcccagctgcaagcatggatgcgggcatgagaagaacaaggtgtggcacttcgg

SEQ ID NO: 958858 - DNA, 120 bp, Artificial Sequence
  ENSG00000278633_12 (sequence is synthesized)
gatcccagacctcccggaccagctcgtgccccaaacgaaatgccatctcgagcccctaccactctacgggaggcctcccggaacgaaagcggagaagggggccagcctcatcccactgcc

SEQ ID NO: 958859 - DNA, 120 bp, Artificial Sequence; identical to SEQ ID NO: 858928
  ENSG00000278633_13 (sequence is synthesized)

SEQ ID NO: 958860 - DNA, 120 bp, Artificial Sequence
  ENSG00000278633_14 (sequence is synthesized)
ggggcttctggtctgcctgccatttctaaagcacccagtatggatgcacagcaggagagacacaagtcccaagactgcctgggcctagtggccccccagcatctgctgcacaggcctgta

SEQ ID NO: 958861 - DNA, 120 bp, Artificial Sequence
  ENSG00000278638_0 (sequence is synthesized)
gaagacccagaaaccacccggcctgcacagggcttgtcctctagtccttaggcgtttgctttctcaatctctgtacccatatttccagctgtccttgggtttgaggccctggaggttttc

SEQ ID NO: 958862 - DNA, 120 bp, Artificial Sequence
  ENSG00000278638_1 (sequence is synthesized)
ctgtggcagcccgaggtccatgtcactttaaggaggggctcgagggaggcttttcaaggccagagaaggacgagggtaaaaggacaacctagccctccagcacaggcctgctctggggca

SEQ ID NO: 958863 - DNA, 120 bp, Artificial Sequence
  ENSG00000278638_2 (sequence is synthesized)
gacagctttaggaaagagcgtacgtctgaagactgactccttgactatctgtgtctaccttccccttggaaagtctctgcataccccagtgtgaagactgagccacagggtgcactgagc

SEQ ID NO: 958864 - DNA, 120 bp, Artificial Sequence
  ENSG00000278638_3 (sequence is synthesized)
tcttcctccctcaaacctaggcaggtgtctaggtgcttagggaaaggcaaagacatctgaaaagaaacaaaacatgtccacagcccttaccccatcccaagaaaaactgcaagtaaagac

SEQ ID NO: 958865 - DNA, 120 bp, Artificial Sequence
  ENSG00000278638_4 (sequence is synthesized)
ctaaactatcaatcctccaggttaaccttgttccatcagattctccaggtatccttcaaagaacttccttcctgcctctgcaaatcagaaattcagcaaaaggagcatctgtcctaaaca

SEQ ID NO: 958866 - DNA, 120 bp, Artificial Sequence
  ENSG00000278638_5 (sequence is synthesized)
cctgccaggggaggacaaagcattgaagaacaattgctcgtctttgcagcatttcacattccatacaagagacaaaaggcccaacccccactaccctctgagaagcagaaaggggaacgg

SEQ ID NO: 958867 - DNA, 120 bp, Artificial Sequence
  ENSG00000278638_6 (sequence is synthesized)
aacaggactgtgtctcctgggtgtcggcagccacgagtgctgctgcaggtcagctactgagactccaaacaccctggggcccatggctgctcacctgtctctcatcaagtaatttccctt

SEQ ID NO: 958868 - DNA, 120 bp, Artificial Sequence
  ENSG00000278638_7 (sequence is synthesized)
ctgggctgatgtttcctcatctatattgtagaagaaaggccttcagtcttatttaccacgtaagtggaggtgcccagggggtcaaagaattaatgtttataaagtgttctgctccccagg

SEQ ID NO: 958869 - DNA, 120 bp, Artificial Sequence
  ENSG00000276292_0 (sequence is synthesized)
ggaaatttggattcacatgtgggctgcaacttttaaaatcttagactccaagaagaaaagaaatttaaaaagcaattgttttcccattttataaagggaaacagccctctgatgacagga

SEQ ID NO: 958870 - DNA, 120 bp, Artificial Sequence
  ENSG00000232311_0 (sequence is synthesized)
ctaatgggagaaggaaaactggttagccaaaatgacctgtgagctatcaccaaccctgacatgctgggattctatggaaggttttatattgcaaagaaaggttaagtccccatttgacag

SEQ ID NO: 958871 - DNA, 120 bp, Artificial Sequence
  ENSG00000232311_1 (sequence is synthesized)
tgcctcacgattgcctccacacgtgccttcgaggttagctggtcagaatgagattgcttagagtggccagagaaggcaaagatgttcttatgtcctgaatatgctttttcttgaaatcat

SEQ ID NO: 958872 - DNA, 120 bp, Artificial Sequence
  ENSG00000232311_2 (sequence is synthesized)
gttttgctcttttaaaatcagtttaaagatacattctctttttctggtttggccccctagcattttttatatgttctgttgagataagtattgcttaaatgaatcgtttattgaaggaaa

SEQ ID NO: 958873 - DNA, 120 bp, Artificial Sequence
  ENSG00000232310_0 (sequence is synthesized)
acagagctccagttgtgtcttgtaagaattggtcattgtttcatggggacgactggctcctttgggtgggatctgatggcatctcatggagttgaggtctgctgcagtaatgaatacata

SEQ ID NO: 958874 - DNA, 120 bp, Artificial Sequence
  ENSG00000232310_1 (sequence is synthesized)
tagaaatatatataactgtcgaggcagagcccttcataacagagctcagtaaaggtgtgtacctggcccaggagttggagaagcttcaggaggatccatccaggggaaggtggaacagtt

SEQ ID NO: 958875 - DNA, 120 bp, Artificial Sequence
  ENSG00000232310_2 (sequence is synthesized)
gcaggcccagctgctgtctcatgcaagaggtgatccagcagcgaagagacatatataaggatatggtagtactaacaggaaacctagaactttagctttcaagacatgctcctgattctc

SEQ ID NO: 958876 - DNA, 120 bp, Artificial Sequence
  ENSG00000232310_3 (sequence is synthesized)
tttgtgtagaagcagcctagattgaatcactgccttctttgcctgttgattcaatggcatgagtcaaagcggtcaggtggcactccagatcaaccgagtcatcatatgtcccctgacaga

SEQ ID NO: 958877 - DNA, 120 bp, Artificial Sequence
  ENSG00000232310_4 (sequence is synthesized)
agaactcctccttttggaactaagacctctttaccacccgagcctgatgtcacagggactggaagcaatcgtttgttagtgaactgctagggataatagtgagaagatcctgtcctattt

SEQ ID NO: 958878 - DNA, 120 bp, Artificial Sequence
  ENSG00000232310_5 (sequence is synthesized)
cctaaaagaccatacatgagtctccaaaaggacattccaccattctatcaagccagctgcttcagggtgacggggaacacgagaagactgatgtcaacttttgtctcgtaatacacgaat

SEQ ID NO: 958879 - DNA, 120 bp, Artificial Sequence
  ENSG00000232310_6 (sequence is synthesized)
ctatgagtttctctcagaaaatggttgtctgccaacgctaactggccagctctgacaggaggtgcgtggcccaggaggagccatcaggccagttctctgggatactgctgtgtctccagc

SEQ ID NO: 958880 - DNA, 120 bp, Artificial Sequence
  ENSG00000232310_7 (sequence is synthesized)
tctgcagtttgctcttcgtcactcagcggcagacggagaggcagacacgagccccttgtgagccctcctccttaccgtcatctcacaatgctctgaaataaggaggcaaatggctgaggt

SEQ ID NO: 958881 - DNA, 120 bp, Artificial Sequence
  ENSG00000232310_8 (sequence is synthesized)
cccctcagttgtagatgtgattgagttctatctaccagaagcatatgcctcctggaagcctggttctaacacctcccacaaaatccttcaagcacttttttctgttccaaggtttgctta

SEQ ID NO: 958882 - DNA, 120 bp, Artificial Sequence
  ENSG00000232310_9 (sequence is synthesized)
tgggggacccagtgaagtgcttcagagccctagagatttgctgagtcatatgaggggtcagcaaacttttcctgtaaagggtcagataataaacattttaagctttgtagactgtataaa

SEQ ID NO: 958883 - DNA, 120 bp, Artificial Sequence
  ENSG00000232310_10 (sequence is synthesized)
ccttctaggctccagactcactggagacatcctgacacataatgcttcgcccagcacaatgcgatgccctttacctagtaaaagggtgagtcccgtaaaggtgctgccttccccccagaa

SEQ ID NO: 958884 - DNA, 120 bp, Artificial Sequence
  ENSG00000232310_11 (sequence is synthesized)
caaacaagggaaatgcatcaggagagctcagctgcagacagaatgcacatcatgaagcaggagccaccctgggattcctcagatgaaagccaatttcaatgaacattgtgtttcaaagcc

SEQ ID NO: 958885 - DNA, 120 bp, Artificial Sequence
  ENSG00000232310_12 (sequence is synthesized)
cgcttcctcttgctcggtaagagctgcagaaggaacatcccacttgagtctgctgacacaaaagaatgctgtggctgggagatcttatcgagccttcctgtgccacagcaacagagctcc

SEQ ID NO: 958886 - DNA, 120 bp, Artificial Sequence
  ENSG00000232310_13 (sequence is synthesized)
ttccaaaatctgtctatatttgacctgtgagctgtagtgtgctgagtcctgcattagtaggaaagatcttgagtttcagaatgacgatgtaaagcagagaccctcctccccgcacccatt

SEQ ID NO: 958887 - DNA, 120 bp, Artificial Sequence
  ENSG00000232310_14 (sequence is synthesized)
ctctgcaaccgacacttggattacttttcttttactctttgtctttctctgaagtatagatgtatggttggctttctgaggtcaaatataattaagaggtagccaaccatttggcaaatt

SEQ ID NO: 958888 - DNA, 120 bp, Artificial Sequence
  ENSG00000232310_15 (sequence is synthesized)
tgaaccaagaagagttctgatataaagaatgtaggacccattcactcccaattagtctcttcactgaaaggtggcttacaccaggtatatctcatttgctaatttgcttagtccatgtct

SEQ ID NO: 958889 - DNA, 120 bp, Artificial Sequence
  ENSG00000232310_16 (sequence is synthesized)
tgctaatttgcttagtccatgtctagggaaccattgtgatcaagccaatatacccaggccagagcagcctgctttagaatcaaagctttaggctaggcgtggtggctcacatctgtaatt

SEQ ID NO: 958890 - DNA, 120 bp, Artificial Sequence
  ENSG00000232310_17 (sequence is synthesized)
atgcttgtctcgtggggcaactggcaatgattgggaattagcaaagcctgggaagcctgagacaggcacctcttcctgggcaactgattcatcatatagagtgcagtctccgcttctctg

SEQ ID NO: 958891 - DNA, 120 bp, Artificial Sequence
  ENSG00000232310_18 (sequence is synthesized)
cttgtaaaacttataagggctcacagagccagaaaaggagatgaaatccctttaatggttcattgtcatcatcttcatccagcgtccttcagaagtatagaggccataattgccctgcaa

SEQ ID NO: 958892 - DNA, 120 bp, Artificial Sequence
  ENSG00000232310_19 (sequence is synthesized)
gtaggtggtgctgggaggtcagccagccacatgacctggcttgctggcttctcggaagtcagatagaagagcaaacttcacccagtttgctggatgccgaatagttaaacattttaagtt

SEQ ID NO: 958893 - DNA, 120 bp, Artificial Sequence
  ENSG00000232310_20 (sequence is synthesized)
taaccattaaaatatgtattttctgtttccttaataatatcttcaactgtacaagttaagaacaaaaattagaaatgatgttcaggttttctcagttggtataagctgtttattgttctc

SEQ ID NO: 958894 - DNA, 120 bp, Artificial Sequence
  ENSG00000232310_21 (sequence is synthesized)
ttttaaccaacagttatttgattctaacaaaactgaggaaaatcaagtagtgttttgaaaaatataaatttaattatttaaaactatctatggagaatgtagatgctaatacgtaaacat

SEQ ID NO: 958895 - DNA, 120 bp, Artificial Sequence
  ENSG00000232310_22 (sequence is synthesized)
tttagtgttgatgacataagtctcaaaaatatttatttgcttcgtgaagatgaacttccagtttacaatcatcacatttgtatataatagtgtaagttaataacatcaacttaattaaat

SEQ ID NO: 958896 - DNA, 120 bp, Artificial Sequence
  ENSG00000232310_23 (sequence is synthesized)
ggcacctcttcctgggcaactgattcatcatatagagtgcagtctccgcttctctgcttgtaaaacttataagccataattgccctgcaatggatcatggatcccaggctgcttctggac

SEQ ID NO: 958897 - DNA, 120 bp, Artificial Sequence
  ENSG00000232310_24 (sequence is synthesized)
ttgtgtcttgtaagaattggtcattgtttcatggggacgactggctcctttgggtgggatctgatggcatctcatggagttgaggatatggtagtactaacaggaaacctagaactttag

SEQ ID NO: 958898 - DNA, 120 bp, Artificial Sequence
  ENSG00000232310_25 (sequence is synthesized)
cagagcccccacctctgaccaggaggcctcccaacagagagctctaataaataagagttcttatctgtaaaatcaggaaaataacagtacctatcatatgggattattttgaaggaaaca

SEQ ID NO: 958899 - DNA, 82 bp, Artificial Sequence
  ENSG00000232310_26 (sequence is synthesized)
atcacttgaacccaggaggaggaggttgtagtgagctgagattgcatcactgcactctagccttgacaacagagtaagactc

SEQ ID NO: 958900 - DNA, 120 bp, Artificial Sequence
  ENSG00000232310_27 (sequence is synthesized)
aaaaaaaaaaaaaaaaaagaatcaaagctttaaaatccagcagaagtaaaatttccaagtgggagggaagaggatcaacaggagaatctgcaagagtaaaagaggaagaagatgtgtgct

SEQ ID NO: 958901 - DNA, 120 bp, Artificial Sequence
  ENSG00000232310_28 (sequence is synthesized)
tgctgcatggcacaaaatgaatctgcaaagcatctgggaactgcagaccctactgatgcctggaactcactggagtcagcatgtccaggcagtcattgtagcaagtcagagtggtgtgat

SEQ ID NO: 958902 - DNA, 120 bp, Artificial Sequence
  ENSG00000232310_29 (sequence is synthesized)
gaaatgcttcaggagaaaaacatttcaccacagcctggttcactcagataccttgccagggaaccaacatctcactcgggcctctgatattgtaactgtgggcctttaagaaacaacgga

SEQ ID NO: 958903 - DNA, 120 bp, Artificial Sequence
  ENSG00000232310_30 (sequence is synthesized)
aaacccaactgaataaaaactgacctcctttgtggctgccctgatggaaggggctcaggagcaacagccttcatggtgcccaccctctgggccagaacaacggatgccccacaactgagt

SEQ ID NO: 958904 - DNA, 120 bp, Artificial Sequence
  ENSG00000232310_31 (sequence is synthesized)
ttagtgcctccaagaaccacagcttttttttgcagcagtaagagcatacctctgaggcactgtgaagaatctgatagtcgaactgaatgaagccaagtccagtctttacggaaaaattta

SEQ ID NO: 958905 - DNA, 120 bp, Artificial Sequence
  ENSG00000232310_32 (sequence is synthesized)
ccaagtccagtctttacggaaaaatttacacaacacttccaggtgggcagattcaaagacaggatgaatcatggttcagtgcagtggttcctggctgtaatcctagcactttgggaggcc

SEQ ID NO: 958906 - DNA, 89 bp, Artificial Sequence
  ENSG00000232310_33 (sequence is synthesized)
ctttgggaggccgaggcagggggactgcttaagaccaggaattcaagacaaatctggggtttaaaaaattagccaggtgtggtggcccg

SEQ ID NO: 958907 - DNA, 90 bp, Artificial Sequence
  ENSG00000232310_34 (sequence is synthesized)
gcaagctatgatcgcacatcactgcacactagcctgggtgacagagcgagaccctgtgacccccttcctccctgaaaaaaaaaaaaaaaa

SEQ ID NO: 958908 - DNA, 120 bp, Artificial Sequence
  ENSG00000232316_0 (sequence is synthesized)
actctctccaacaaatatgttatttgtaatagctatcttctctcatctaggtgtttgaaaaatgtctctaacgtgtgtgggctggaatgcattttgttttttctgcaggtatattcattt

SEQ ID NO: 958909 - DNA, 120 bp, Artificial Sequence
  ENSG00000232316_1 (sequence is synthesized)
aacaaggggagtctctgaggagctatcaaaaactgcttgccatctttccaaatcatctctgtctgcagtgaccatgtcttaatcctgaaggaaaacaaggtggaaattgatttttacttc

SEQ ID NO: 958910 - DNA, 120 bp, Artificial Sequence
  ENSG00000232316_2 (sequence is synthesized)
ctaagtatgtggcagtcttggccacatggtgactcagcagaggagcctatgtactggctgtcctgatgctcttcctgattcaactgattctctacacttgatcttagccaaaaggccgag

SEQ ID NO: 958911 - DNA, 120 bp, Artificial Sequence
  ENSG00000232316_3 (sequence is synthesized)
tgcaggaataaacccacttctaaatatggtacacttggaaagttgtccagctcgcaatgtcagagtcacagacttcatgcacactcatctcaagtcaatgttatctaacacatttccact

SEQ ID NO: 958912 - DNA, 120 bp, Artificial Sequence
  ENSG00000232316_4 (sequence is synthesized)
aattattggatgacactagcaagaaactctgatatttttcacctaacctttgctaatttaaatgtggccagcccaccctcatactgcattgtgatggggatataaaagccaatgaaagat

SEQ ID NO: 958913 - DNA, 120 bp, Artificial Sequence
  ENSG00000232316_5 (sequence is synthesized)
ttttggcagttgggcctgaagccccagaacttatgctggtcctggcaccaatgaggacagaaatgattgagcacatgaatttggtggaaattgatttttacttctctgcagctaagtatg

SEQ ID NO: 958914 - DNA, 120 bp, Artificial Sequence
  ENSG00000287001_0 (sequence is synthesized)
gctcaggcgcgttccgggacccggcggaggaagggaaggcctggctgtccagcggaatccgcctggacgcacggaactcgcggacccgaccggagcagctcttcgggccctggcgtgaac

SEQ ID NO: 958915 - DNA, 120 bp, Artificial Sequence
  ENSG00000287001_1 (sequence is synthesized)
gagcagctcttcgggccctggcgtgaacccttctcccagaggcacatgcccagaacccagcaatggccaatgggaccttgatggccgagggccagttagcttttctaaaccctacctgga

SEQ ID NO: 958916 - DNA, 66 bp, Artificial Sequence
  ENSG00000287001_2 (sequence is synthesized)
agaagaaatgaaccaagaggaaaggaaatattttcaaacatgtttttttttttaagttaaaagagg

SEQ ID NO: 958917 - DNA, 120 bp, Artificial Sequence
  ENSG00000287001_3 (sequence is synthesized)
tttttttaagttaaaagaggaacaataataaacaggcagaaaatgaataaaaaataaaatgtcatatcagaagtgaagataaattaaaagtgatcaaaggagaagagatctaaatgcaaa

SEQ ID NO: 958918 - DNA, 74 bp, Artificial Sequence
  ENSG00000287000_0 (sequence is synthesized)
actaaagagtttctgcacggcaaagaaaactatcaacagagtgaacagacaacctacatagtaggagtctatag

SEQ ID NO: 958919 - DNA, 75 bp, Artificial Sequence
  ENSG00000287000_1 (sequence is synthesized)
tgcatctgacaaaggtctaatatccagtatctatagggaacataaatttacaagtctgaaacaaataacaccaca

SEQ ID NO: 958920 - DNA, 120 bp, Artificial Sequence
  ENSG00000287000_2 (sequence is synthesized)
acatcactgatcattagaaaaatgcaatgaaaaccataatgagatactagctcacacaagttagaatggctattattaaaaagtcaaaatgtaataggttctggtgacattgcatagaaa

SEQ ID NO: 958921 - DNA, 87 bp, Artificial Sequence
  ENSG00000287000_3 (sequence is synthesized)
tgacattgcatagaaaaaggagctgtggaagacagtgtggctattcaaagacctaaaaacagaaatgccatttgacccagcaatccc

SEQ ID NO: 958922 - DNA, 72 bp, Artificial Sequence
  ENSG00000287000_4 (sequence is synthesized)
catgtacatgcccactaatggtactctggataaagaaaatgtggcacacatacatcatggaatactatgtag

SEQ ID NO: 958923 - DNA, 81 bp, Artificial Sequence
  ENSG00000287000_5 (sequence is synthesized)
atggaatcaatgtacatgcccactaatggtactctggataaagaaaatgtggcacacatacatcatggaatactatgtagc

SEQ ID NO: 958924 - DNA, 120 bp, Artificial Sequence
  ENSG00000287000_6 (sequence is synthesized)
gaacagaaaaccaattactgcgtattgttccttataagtgggagctaaatgagaacgcatggacacttggaggagaacaacacacactggggcctatcggagggtggagggtgggaggag

SEQ ID NO: 958925 - DNA, 120 bp, Artificial Sequence
  ENSG00000287000_7 (sequence is synthesized)
ggagaggatcaggaaaaaacaactaatgagtactaggcttcatacctaggtgacacagccatctgtacaacaaacccccatgacacaaatttaccagtataacaacgtgtatctgttgag

SEQ ID NO: 958926 - DNA, 120 bp, Artificial Sequence
  ENSG00000287000_8 (sequence is synthesized)
cctaatactgttcacttgtaaagtcaaacagttcagagaagacagggaagctaaaatttagaagttatgagtggatttatcattttaataccatatcattttaatgccttattttctcca

SEQ ID NO: 958927 - DNA, 120 bp, Artificial Sequence
  ENSG00000287000_9 (sequence is synthesized)
ctagcctgtgatctactaggaccttaggcaactttatgtccaagccctgtcttctaacagatgtagtccaccaagtgctgaggtacaagatccatatccaaaaagcacatgtacgcttaa

SEQ ID NO: 958928 - DNA, 120 bp, Artificial Sequence
  ENSG00000287000_10 (sequence is synthesized)
acttaaaagttaaggaacaagccttgatttcttgcctcaagccacagcattatggattacttagcgaaacaatgaagacatatcagttgtcttaggcccaatattcttttgctcttacta

SEQ ID NO: 958929 - DNA, 120 bp, Artificial Sequence
  ENSG00000287000_11 (sequence is synthesized)
gcaagatagaaataatccttctcatttagtcattgaatttaggctggggtagaagaggcatttaaattattgttaataaagaagattaattgattatcataactttgagtctgaaccaga

SEQ ID NO: 958930 - DNA, 120 bp, Artificial Sequence
  ENSG00000287000_12 (sequence is synthesized)
agttctttacaattggacacagtgggttgtagtgtaagaactaacattttattgaaggaaaacctcgttgctgagacacttttttttcccaaagcatcatatcctgataggttgtgtacc

SEQ ID NO: 958931 - DNA, 120 bp, Artificial Sequence
  ENSG00000287000_13 (sequence is synthesized)
cgagcagtggctgatttgaacattctagaagagaagccagatattaaccacttaccaagatgtggcaatcattcattctgttcttgaaaaaagctaggataatttttggtaaagaagcca

SEQ ID NO: 958932 - DNA, 120 bp, Artificial Sequence
  ENSG00000287000_14 (sequence is synthesized)
agtaatgaattgttttccaagctgagctttaagactgccagttaaatgatgtatcacctttgttgccaatatccaatatccatcaatatccaatatccaataaatatattgctcagtgat

SEQ ID NO: 958933 - DNA, 120 bp, Artificial Sequence
  ENSG00000287000_15 (sequence is synthesized)
tttcaaagaagtaacttacttcaagggttgactggaaaaacccatttcctcttaaaatgtctgtggaagtgaggtacgcacaaagatccagagtggacttatgcgtgggcgtctgattac

SEQ ID NO: 958934 - DNA, 120 bp, Artificial Sequence
  ENSG00000287000_16 (sequence is synthesized)
taaacacgaagtgactcacctgcggcttcacaagcacacgcacggaaaggcgtcgtgggagaggtcagaggctttccccaccctgcttgtgagtgacctttgtacatggtggggcagaga

SEQ ID NO: 958935 - DNA, 120 bp, Artificial Sequence
  ENSG00000287000_17 (sequence is synthesized)
caaagattcataacttactgacaggtgttggttaaactcggcttttattagtatttttataggtttcatgattaggacttaagcaagattgtgcctgagtgaaaaataaatgaatagagg

SEQ ID NO: 958936 - DNA, 120 bp, Artificial Sequence
  ENSG00000287000_18 (sequence is synthesized)
agctgcttcttcaccgtctcacatttcccaggcttgggcacaccggcttctcatgcagaggaggctttgagaggcacgaacaggggaagatttcttcactggtttccactcattccaacc

SEQ ID NO: 958937 - DNA, 120 bp, Artificial Sequence
  ENSG00000287000_19 (sequence is synthesized)
cctcgtctctgcttggctgggatggtcttaatactggctacttcgtaacgttctcatgaaccaaaaaacatcactaatagactccgtccttctttctgaaatgagggatatgcttcctgc

SEQ ID NO: 958938 - DNA, 120 bp, Artificial Sequence
  ENSG00000287000_20 (sequence is synthesized)
cttcagcattcctcgacttcagtctattttgaaaccagggctggtgaattggttaaattccatcaatggaaaggacatcctaacagaacttcttaaactgaagtgtgcatttgaacccca

SEQ ID NO: 958939 - DNA, 120 bp, Artificial Sequence
  ENSG00000287000_21 (sequence is synthesized)
tggcactttgttaaatatgcagattctggcaccctctgggaaccactgtgagcagcaaggtcctagaggatctgttgggagtgtctctgcagctggcagcctgcaacagcgctggcgttt

SEQ ID NO: 958940 - DNA, 120 bp, Artificial Sequence
  ENSG00000287000_22 (sequence is synthesized)
tttggagaggggacagattagccctgaagcctcaggtatctgacatgccagttactgcctcctgttttaggtaatcagccctgctgtctcctggagcaactctcagtgattgtgtcagat

SEQ ID NO: 958941 - DNA, 120 bp, Artificial Sequence
  ENSG00000287000_23 (sequence is synthesized)
gtgctgtcactgcgggctctatgtttttccctttccttgtcaagtgtatctcttcctgcagctcagagagcgagatggtattagccctacatacaaggaccagctcacattaaggcactg

SEQ ID NO: 958942 - DNA, 120 bp, Artificial Sequence
  ENSG00000287000_24 (sequence is synthesized)
ccttcagtctgatagagagccagacttggcagcactgcagaagcttctcctttctgctggtggaatgggtctggagagtttccactgcccaagccagcacagcatgaccagagttctggg

SEQ ID NO: 958943 - DNA, 120 bp, Artificial Sequence
  ENSG00000287000_25 (sequence is synthesized)
tgttcggtggacgtcagtccacagccaaagtccaggcagctacttcagttctctgctgagattggagcccagctctgagagttagatgagttctcacctttcttctgagctctgactctg

SEQ ID NO: 958944 - DNA, 120 bp, Artificial Sequence
  ENSG00000287000_26 (sequence is synthesized)
cttctgacactcttggtccaacctggatagagtgtggaggtgaaatgttgacagtgtctagtgttgacctcagactctgagctccagccctaccttctcaggtggctgcccttgaggact

SEQ ID NO: 958945 - DNA, 120 bp, Artificial Sequence
  ENSG00000287000_27 (sequence is synthesized)
gatgcgaatcccgggtggactagcactagtctgctgctgccgcttggtgagtcaaatgtaccttgtcttgctgttccagtctggaagctcctggcatgttaaattattattagcagtagc

SEQ ID NO: 958946 - DNA, 120 bp, Artificial Sequence
  ENSG00000287003_0 (sequence is synthesized)
cctttcaaatggaccttcctgtccccaatgcagcatcaactagctctctcataatgtgggttaattttccatcagctcctagaaagagtgtatttccagactctctggggacagacagag

SEQ ID NO: 958947 - DNA, 120 bp, Artificial Sequence
  ENSG00000287003_1 (sequence is synthesized)
gagtttcaaacaggataaagcaagcttcagtggagagtatttggagtctgccgtggcgtcaggctgctccaaccgcatttctgccagagggtgggaacgtgtttgcttggaacagacagg

SEQ ID NO: 958948 - DNA, 120 bp, Artificial Sequence
  ENSG00000287003_2 (sequence is synthesized)
gagctcctagaaggcagcaagtgtgttttatttatctccgcattccaagcacccagcaatatgcttcgtagatgtttctggaataaatgagaaaatgagttctaaatcctgaagctgaag

SEQ ID NO: 958949 - DNA, 120 bp, Artificial Sequence
  ENSG00000287003_3 (sequence is synthesized)
gaccacggggtctcctcccgcaactgcaggggccaggatattccgttccccgcctccctcccctcccccttctcctgtgagacacactccaagctcgtatgggacgcagacgcctttctc

SEQ ID NO: 958950 - DNA, 120 bp, Artificial Sequence
  ENSG00000287003_4 (sequence is synthesized)
aggatatctggtctccacagtgagaatacgtgatcacatctcactgccagggagagggaggaaagcacgagggaccctcaagcgagaaatggaggctccaaactgactgggaggaaaatg

SEQ ID NO: 958951 - DNA, 120 bp, Artificial Sequence
  ENSG00000287003_5 (sequence is synthesized)
gaaactccagctgacctaagagatttctataatgagagaaaaccaatttaaatgcaaatagcctacggtgtcgttggggaaaggcgccttgctacagaggaaggctggaaaaacaaacac

SEQ ID NO: 958952 - DNA, 120 bp, Artificial Sequence
  ENSG00000287003_6 (sequence is synthesized)
agccctcatcacgaggctggttcaccgttggacggaaaggttgctttatccgtttaggattaaagtctaaacgagtgacagagtcacatgcatcgctggcagcatttcccggtgctccac

SEQ ID NO: 958953 - DNA, 120 bp, Artificial Sequence
  ENSG00000287003_7 (sequence is synthesized)
ggtgcccactgagaaatgggtgtcttcgaggggacctggcattggccaccgccatttcccgagcccctagcaggtggcaggtgctgtacaaggcacagagaacaaaagctgtgccataca

SEQ ID NO: 958954 - DNA, 120 bp, Artificial Sequence
  ENSG00000287003_8 (sequence is synthesized)
cagctgccttgaggggcttacagcctagggggccgttagactctgaagtcgattctgggctgcaaagagaactaacatttttattgaacatttactatgtgccaagctgaggaccgaaaa

SEQ ID NO: 958955 - DNA, 120 bp, Artificial Sequence
  ENSG00000287003_9 (sequence is synthesized)
ctgtatgtgatgatggctcatcaaattctcacagcaactccataaggaagagcctattatttttccagttttacggataaggaaactgacgttccaggacagtaaaaaacttacctcggg

SEQ ID NO: 958956 - DNA, 120 bp, Artificial Sequence
  ENSG00000287003_10 (sequence is synthesized)
gggcttcagacccaggccgaatggctccgggacggtggctggtatctccctgtgtgctgggaggagagcagctgcagagaagcccctgggattgtgctgcctgaccctgggttctctttg

SEQ ID NO: 958957 - DNA, 120 bp, Artificial Sequence
  ENSG00000287003_11 (sequence is synthesized)
gacactgggtgcctgtccagagaagtcctctgaaaagcagagctgcccaaaatcaggaagccctgagacagggtctgccactggccttggcttggggcagcagaaaataatactgttcaa

SEQ ID NO: 958958 - DNA, 120 bp, Artificial Sequence
  ENSG00000287003_12 (sequence is synthesized)
ggaatcaggacgtgtgagttgctctgccactaactggctgtgtgaccttcacagtcactttccctctctgagcctcatttgcctatgtaagatgaagattctaaaattatatggggctac

SEQ ID NO: 958959 - DNA, 120 bp, Artificial Sequence
  ENSG00000287003_13 (sequence is synthesized)
ggaattctattatcttaggactccagctacccttgaaaatagccattgcccagttgatacagcacctccttcctgccctcctttctgccccacctcctgccttctgccccggctggccca

SEQ ID NO: 958960 - DNA, 120 bp, Artificial Sequence
  ENSG00000287003_14 (sequence is synthesized)
tatctgttgcaatggagcactttaatttcctcctttggtttcataattcaaggacagcaccatctgccacattaaatccacgctctctgcttgcctccttctcaaaacaagggctggatg

SEQ ID NO: 958961 - DNA, 120 bp, Artificial Sequence
  ENSG00000287003_15 (sequence is synthesized)
aaggcttcatccggtttatttcatggatgagcaagagctggcaaaaccaaatggggacagctttggccttgcaagctgcgttcatcccctaatcttctggtagggccccagagctcgttc

SEQ ID NO: 958962 - DNA, 120 bp, Artificial Sequence
  ENSG00000287003_16 (sequence is synthesized)
tgtcgcccccactgcctgccccagccaaaacatgatgctgctgctgatagatgacgtttacagaggcctttctgagtcaggcattttcttaagtgctgtagattcatttatttacttccc

SEQ ID NO: 958963 - DNA, 120 bp, Artificial Sequence
  ENSG00000287003_17 (sequence is synthesized)
actacatctctgtgatgaaggggctgatcataatagccccactttagagatgcagagactgaggcctgggaggcttcagaaatttgccaaaggcccacacagccagccaacaacagagac

SEQ ID NO: 958964 - DNA, 120 bp, Artificial Sequence
  ENSG00000287003_18 (sequence is synthesized)
tgaatgtgaactggctgcggaaatgaacacagacacacaaagatagccagcctgaaagaagctggacttcacagcggagctctctgactgctgatctttgaaaagttgaggctgggcaca

SEQ ID NO: 958965 - DNA, 70 bp, Artificial Sequence
  ENSG00000287003_19 (sequence is synthesized)
tctctgactgctgatctttgaaaagttgaggctgggcacaatggctcatgcctgtaactccagcactttg

SEQ ID NO: 958966 - DNA, 120 bp, Artificial Sequence
  ENSG00000287005_0 (sequence is synthesized)
gggtgggctacctctcaaccgacccctccgaaaaagacggggctgctgctatcacctccctcaaacagcagaggaggtgcctggctgcttctaaaggcagctcgctgtggcacttagtca

SEQ ID NO: 958967 - DNA, 120 bp, Artificial Sequence
  ENSG00000287005_1 (sequence is synthesized)
ctgcccctttctggcccagggtatcagctggacgggggacactacgcccagagcttccttcctgttccgatgtttggcgaacctgcagcgctccctgaagcagatgagagggaagctgca

SEQ ID NO: 958968 - DNA, 120 bp, Artificial Sequence
  ENSG00000287005_2 (sequence is synthesized)
ctcccagaaagcgcagttttggttcatattgaatggatttattgggggtgtcatcggcaggcggatgacagattgtcaggtgggctacagccctgccctcatccccacacccacagcccc

SEQ ID NO: 958969 - DNA, 120 bp, Artificial Sequence
  ENSG00000287005_3 (sequence is synthesized)
ttggcagagctgctagcggggtcctgaagtgcctcctgctgctctgggagctccgtaagccacctgctctcagcctcagggatgccacacctctttccccagcctcagccacgctcaagt

SEQ ID NO: 958970 - DNA, 73 bp, Artificial Sequence
  ENSG00000287005_4 (sequence is synthesized)
gatgccacacctctttccccagcctcagccacgctcaagtgaggcgtctgcacttttatacattctaaaggcc

SEQ ID NO: 958971 - DNA, 67 bp, Artificial Sequence
  ENSG00000287005_5 (sequence is synthesized)
actaaaaatacaagaattagccgggcacggtggcgcacgcctcatgggacatggaggttgcagtaag

SEQ ID NO: 958972 - DNA, 120 bp, Artificial Sequence
  ENSG00000287005_6 (sequence is synthesized)
aaggaaattaaagaaaagaaaagaaaaaggggaggggaggggaacaaatgttgctactattattctcctcatcaagacttcatactggtaaacatccccttgctgacttcaggcacatca

SEQ ID NO: 958973 - DNA, 120 bp, Artificial Sequence
  ENSG00000287005_7 (sequence is synthesized)
gtgtacacgtcagaaatgtccaaaccatgtcctcggaatatgcccatttctagcgatgttgtaacaccttacaggaccatcatcaaaagtttcattcaggtgcaaggtgcctgctgctgt

SEQ ID NO: 958974 - DNA, 120 bp, Artificial Sequence
  ENSG00000287005_8 (sequence is synthesized)
gacaagctggaaaatccattgcatttccagggtcacctgtttgtcattagcttcatcaatgagacagccagcatcaaggtcaaggtcttcacatccaggcttctctcaagccccaccaat

SEQ ID NO: 958975 - DNA, 120 bp, Artificial Sequence
  ENSG00000287005_9 (sequence is synthesized)
gagctaaggtattcaacttttccaagtcactcacaggtttgctcttgcactcaaagaaactctgagaatcccctactgcattttaacatttgtccagtattcctagtccttggcacatgc

SEQ ID NO: 958976 - DNA, 120 bp, Artificial Sequence
  ENSG00000287005_10 (sequence is synthesized)
tcctcctggaacccaacctgtaaggtaacccaacctgtaaagtggatgcgaaggtttaaagggtgtcccctggaattcatgtgttggaaatgtgagccccggtgacgttgctgggaggtg

SEQ ID NO: 958977 - DNA, 120 bp, Artificial Sequence
  ENSG00000287005_11 (sequence is synthesized)
gggcttttatgagctgatgaagtcattaagagggattcatgcctgtctcccaggcctgggttatatctcttgggagggagcgagttctcactctcactcacggcactggatgagttacca

SEQ ID NO: 958978 - DNA, 120 bp, Artificial Sequence
  ENSG00000287005_12 (sequence is synthesized)
agagtggctgttataaagccaggcgcccctcacgctgtgccccttctgcatgcctctgcttccctccccagaagctgtcaccatcctcttggacttcccggcctccaaaacctcaagcta

SEQ ID NO: 958979 - DNA, 120 bp, Artificial Sequence
  ENSG00000287004_0 (sequence is synthesized)
gcgtgagccactgcacccagccctaggcccatttttaaagctgacattgtattgggaagcaaaggtcaggggctctgtgtgaaggcaagaggtccaaatgatttctcaagggatctaagg

SEQ ID NO: 958980 - DNA, 120 bp, Artificial Sequence
  ENSG00000287004_1 (sequence is synthesized)
gaactggacggcggagaaaacgatcaaggggcaggccctgcacagggactgggaaggcaagcagagaaactaaagagcgctagccaaaatggtggaagagaattctggggctgtggcaca

SEQ ID NO: 958981 - DNA, 120 bp, Artificial Sequence
  ENSG00000287004_2 (sequence is synthesized)
actatccacaaaagcttcctctttccttagtggagtctcagtacagttcactcaggaggagaatctaacgaataggcaccagctgcatcaagggacacttacttcactccatgtcctggc

SEQ ID NO: 958982 - DNA, 120 bp, Artificial Sequence
  ENSG00000287004_3 (sequence is synthesized)
tagctgaagtaatcaaaggattccctaacgcaagagttgggacatgccaaagtccctcttcaaggggagagaggcagctgcatggttacaaagtagacaaagaaagacaaggggcttctt

SEQ ID NO: 958983 - DNA, 120 bp, Artificial Sequence
  ENSG00000287004_4 (sequence is synthesized)
ttaaactggaatgtgtgaaatagaagcagggagctgtgaatgccacagcagcaattatgcagaaagactgcagtgcagacactgagcagcaccatcctatctgataacatcagcagcggc

SEQ ID NO: 958984 - DNA, 120 bp, Artificial Sequence
  ENSG00000287004_5 (sequence is synthesized)
agaggcatattccaacaagagctgtttaagagctgctaattacttagattccaataggagctatgtcttaaaagtgattacaatttttgattacagctttttgaactgattgcagctgta

SEQ ID NO: 958985 - DNA, 120 bp, Artificial Sequence
  ENSG00000268066_0 (sequence is synthesized)
ctcttcaagtggcctgggagcgcgcgcatgcgcgctgctgggaaccggccggggtgccgggtcgaaagacagacgcgcgggccgggcgtgcgcgggcttggtggagggcgggaaggctga

SEQ ID NO: 958986 - DNA, 120 bp, Artificial Sequence
  ENSG00000268066_1 (sequence is synthesized)
agggcggtgacaggtcgcactgcctcgcgagggccagaacgcccatttctgcagaggtgcactcagtggcgtgggaaatcaaatgcatccggttatcccagttcggcctctctgggattc

SEQ ID NO: 958987 - DNA, 120 bp, Artificial Sequence
  ENSG00000268066_2 (sequence is synthesized)
cgcgggagggggtgtctggtctggtttggtttggtttggtttggtttggtttggtccggttcaaagtagcgcagtctgactgagcgggaggtggagtggaaggcgagaataggggtgaag

SEQ ID NO: 958988 - DNA, 120 bp, Artificial Sequence
  ENSG00000268066_3 (sequence is synthesized)
gattagacagaagaagactttgaactaggaacagtggcaaccagggtgacccaggcttttgtgacccgtagaggcagaagctgccttaatccatgttcccttcgggatgctggtatccaa

SEQ ID NO: 958989 - DNA, 120 bp, Artificial Sequence
  ENSG00000268066_4 (sequence is synthesized)
ctgagaagttgacggagcatctatcgtgtgccagacactgtgctaagtgctaacgagaaatcggtgagcaaaacagaaaagaaaaaaaaagaagaaacgactgccagcattgaacttagt

SEQ ID NO: 958990 - DNA, 120 bp, Artificial Sequence
  ENSG00000268066_5 (sequence is synthesized)
acctagcaaagtaggtggacataaatcaaattgtcagacaagtaaatgagtagttgcagctgtgataaggggtatgaagaataggcgcttccatgatggcggaacatgacctagtctggg

SEQ ID NO: 958991 - DNA, 120 bp, Artificial Sequence
  ENSG00000268066_6 (sequence is synthesized)
gtggagaaggggagatgattccagctggaatatggcaggtgagagttaactaatagcactgagttggcagaggcaggatgacctgccccaggcaggtgccccagaatgagaggatgttgc

SEQ ID NO: 958992 - DNA, 120 bp, Artificial Sequence
  ENSG00000268066_7 (sequence is synthesized)
tgctggtggaactccagctttaaagcggtggatctagggccacattcctcaaggccatagcaaacaggaaagaccttttggactagggtctttggagtagtcacatgaggccaagaaccc

SEQ ID NO: 958993 - DNA, 120 bp, Artificial Sequence
  ENSG00000268066_8 (sequence is synthesized)
acattgattagaatgattatacccctccaagtgtaagctgttgttcaatttacccagggcttaaaaatatgtcaactcttcacaaccatttttactacaagccacactcaacctgtgttg

SEQ ID NO: 958994 - DNA, 120 bp, Artificial Sequence
  ENSG00000268066_9 (sequence is synthesized)
ttccctgaacctgtgatgcactttcatccgttcatgtctctacacatccttcctgggccccatagaggccctgcaccttaaggttttcagctggattcctattagctagttattttatct

SEQ ID NO: 958995 - DNA, 120 bp, Artificial Sequence
  ENSG00000268066_10 (sequence is synthesized)
caggtacagagagttaactttgctcctcaattttcagcacattgtcatatcagtccctacagggtccttgtttacattattttatagtgtttatattattttttcctcatctttctcgat

SEQ ID NO: 958996 - DNA, 120 bp, Artificial Sequence
  ENSG00000268066_11 (sequence is synthesized)
ccccactctcattcttctagacacaagctgcaatatgttcgatagagatccttgataatttaacacagataatgttttgtttatgcctcttgcatttacagagatggtattggactgtaa

SEQ ID NO: 958997 - DNA, 120 bp, Artificial Sequence
  ENSG00000268066_12 (sequence is synthesized)
atctctatttcccactgttttactcaacagtctgtttttgagctatacccacattgctgtgtgtacacctagtttgctaccgagtatgccagaaattttattcatacatatccctactga

SEQ ID NO: 958998 - DNA, 120 bp, Artificial Sequence
  ENSG00000268066_13 (sequence is synthesized)
tcgggcatctaggttactgccaactccctgaagtcatactgtggtgaaaacccttgtgaatgtctttacaaacctttgccagaacttattttgtgctcttgtagaactttgtgcataccc

SEQ ID NO: 958999 - DNA, 120 bp, Artificial Sequence
  ENSG00000268066_14 (sequence is synthesized)
tctgcttcctcattacactgcttggcatatagcagagactcaacaaatgttgaatacctctactatgatggttagtgtactagaataatttatttatatttctgttttccttattggatt

SEQ ID NO: 959000 - DNA, 120 bp, Artificial Sequence
  ENSG00000268066_15 (sequence is synthesized)
attagtaccttccagacagggcaaatgtcttttctatctttgtgtccctggcacattaaaagtggttgatttcaaggtatgttcaatgaatgaataaatacttatcttcactgccagtac

SEQ ID NO: 959001 - DNA, 120 bp, Artificial Sequence
  ENSG00000268066_16 (sequence is synthesized)
cctgtggagacaccctgtgccctttaagggacatggattgagtcgggatctcaaaatgtgagcctttcctcagacccagctttgacccacgtactcgcctttcctcaactcattttcata

SEQ ID NO: 959002 - DNA, 120 bp, Artificial Sequence
  ENSG00000268066_17 (sequence is synthesized)
ctttcacttgactatatattttttaaaaattgtgttaagcacttgaggttcatttctgcccctactgtatgtgcaccctgtgccagagggtggggtgaacacgtgtgtagcagtcatgcg

SEQ ID NO: 959003 - DNA, 120 bp, Artificial Sequence
  ENSG00000268066_18 (sequence is synthesized)
tcctgtccacaggggccgatgcacctccttgcaaccctttacattccactgtgaaacaaacctcaactttttcttattcctgtttttacaccgtgcttatagctgccttaatccatgttc

SEQ ID NO: 959004 - DNA, 120 bp, Artificial Sequence
  ENSG00000268066_19 (sequence is synthesized)
agggcggtgacaggtcgcactgcctcgcgagggccagaacgcccatttctgcagaggcagaaggtgaggcgtctacgccctctctcaccagattttgggcggccctgtggagacaccctg

SEQ ID NO: 959005 - DNA, 120 bp, Artificial Sequence
  ENSG00000287006_0 (sequence is synthesized)
agtgaggagtcagtaggtagaaaattccacgtggaccatctacacatgttctcctggatgtttgccccatgacagcccagaggagacatcatttttcaatcatctctgcacctcaactct

SEQ ID NO: 959006 - DNA, 120 bp, Artificial Sequence
  ENSG00000287006_1 (sequence is synthesized)
aatattttatacataatcctattgcatgcagccttgattcaggaatattctagaggtggcacctgcaatcaaagcctcctcctgctcactgtcagtagttcagctttctgttctgagagc

SEQ ID NO: 959007 - DNA, 120 bp, Artificial Sequence
  ENSG00000287006_2 (sequence is synthesized)
cctgaagaaaatgaattcttcgaagctcgcctgcagatttcttttcttgagcactaccccttcatccctgcttccacatgtgagatccccagggctgggataaaggtgaagtgagcaagt

SEQ ID NO: 959008 - DNA, 120 bp, Artificial Sequence
  ENSG00000287006_3 (sequence is synthesized)
catctaggacacaacattgaaggggacaccactctcacagttttgcaaataccttcagctcctcacttgcctcaccctggtcctggcctggatgatcataggtacctcacctgggttcat

SEQ ID NO: 959009 - DNA, 120 bp, Artificial Sequence
  ENSG00000287006_4 (sequence is synthesized)
ggtgcaaagtgtgaacattcagtatggtgaactgaagaaaaacaaaaatcgaatgagaaatcaaaaaagcagaattttcattttgactttattactaactcaacatgatatcaagaaaaa

SEQ ID NO: 959010 - DNA, 120 bp, Artificial Sequence
  ENSG00000287009_0 (sequence is synthesized)
aaacaccgcgcccgatccgccccttcctccggggttcggctgccccgcggggagcgcggaggcacaccgtctcctactcccacccagctcctagaatgtaggagagtgtagagttcaaaa

SEQ ID NO: 959011 - DNA, 120 bp, Artificial Sequence
  ENSG00000287009_1 (sequence is synthesized)
agcccggaagtaaaacaaccccaggttaagaaagtaagggtaagctctagcagtcggcaaaagcgctcggcaaaaaaaccccgacttctccagaaaaactttgcggcaagttaagcggaa

SEQ ID NO: 959012 - DNA, 120 bp, Artificial Sequence
  ENSG00000287009_2 (sequence is synthesized)
gcgctgaatggccgggactatttaactcgcgcttcctctcacaagaggcggatccctggacctgtttgggggaccctgacggtccacaaactcgccgtttgcctgctgggtggccctcta

SEQ ID NO: 959013 - DNA, 120 bp, Artificial Sequence
  ENSG00000287009_3 (sequence is synthesized)
gaagttctgacatcctaaaaggtctgggcagtcccgctgacggggaatacctgtcgtagtacccattgcctgcgagtccctgatggcggccattacacttccatccgggtattgccgaaa

SEQ ID NO: 959014 - DNA, 120 bp, Artificial Sequence
  ENSG00000287009_4 (sequence is synthesized)
agctgatcgcagcgctaccgggagcgcacgctgcggcggagggatctgcgctttacctgagacaagcggaagagaacggaggccggcagggtccgcgctcggtctgacgagactaggcca

SEQ ID NO: 959015 - DNA, 120 bp, Artificial Sequence
  ENSG00000287009_5 (sequence is synthesized)
tggagctgggttcgccgctgacctctccatctagcgcgcggccccggcgcccaccagtccagtgacccactactacctctttgctcaccagcagctgctgatcttactgccggtgaaatg

SEQ ID NO: 959016 - DNA, 120 bp, Artificial Sequence
  ENSG00000287009_6 (sequence is synthesized)
gacaccaggagcaggaactgtatgcacttcccaagcccttgctgactgggaatggtctccaccctgagattttaaccagttccggtttagcaaatggcgcctccccacctctggcttctg

SEQ ID NO: 959017 - DNA, 120 bp, Artificial Sequence
  ENSG00000287009_7 (sequence is synthesized)
gcacgcaggttttagcaaccattgtagcccacgtcaacgaaagaagctgccgccagtagttctagaagacatactgaactccaaacctgtatatattgaataattgatcaaaaactatct

SEQ ID NO: 959018 - DNA, 120 bp, Artificial Sequence
  ENSG00000287009_8 (sequence is synthesized)
tcacaatgagggaggctcacatctccctcaaacgaatacttcctctacctgacaacagggctggacagttaatatggttggctttaccccaaaggccagtgtggctcctcttctgttctt

SEQ ID NO: 959019 - DNA, 120 bp, Artificial Sequence
  ENSG00000287009_9 (sequence is synthesized)
tataaatccaacctactaattgatacctcactttctacataattctacataaattatcttccttttaaaatgtggggagggaataagtggcggcaaacgtttaagcaacaacaaaaaacc

SEQ ID NO: 959020 - DNA, 120 bp, Artificial Sequence
  ENSG00000287009_10 (sequence is synthesized)
ttggcgcagaaggatataccaataaattgaaagtgaaactatgatcagatttttcattttttaatgttccgtgttttcttaagtagcatgtatgacatttataatttttaaaaatttttt

SEQ ID NO: 959021 - DNA, 120 bp, Artificial Sequence
  ENSG00000287009_11 (sequence is synthesized)
aaaatatgtgtatgatacatatttttcattgtcttagggcaggcttttgaaaatgtcagcctgtagccaaatgcaagattttctccatcctttaataaaaagcacactgagaaatcctca

SEQ ID NO: 959022 - DNA, 120 bp, Artificial Sequence
  ENSG00000268069_0 (sequence is synthesized)
acataagatgctcaatagatgttgagttgaagttgaaaatttaaagtactttacaaatgtgggggttatcccaagacgcagcccccaagccagcagagctcctgagacgcctgtggccag

SEQ ID NO: 959023 - DNA, 120 bp, Artificial Sequence
  ENSG00000268069_1 (sequence is synthesized)
gactgaggggagggatgggaaccaggccttttggcaaacaaggcctgagtgttgctcttgacctggccctggtctagggctgtcgctagagatggaggccagtccctaccttgaggggcc

SEQ ID NO: 959024 - DNA, 120 bp, Artificial Sequence
  ENSG00000268069_2 (sequence is synthesized)
actgtctggtaggccctgctggctccatcgggggggctcagaggataacccctcactggggggtgctcaccattgctgcctgggtcactcacaggaatcttactccagaccaacagcagg

SEQ ID NO: 959025 - DNA, 120 bp, Artificial Sequence
  ENSG00000268069_3 (sequence is synthesized)
tcacctggctggcaccggaagccctaggatctggccacggtggggcagggtaccaccaagatccttcagtctgagctcagcgagtgtcccatctccacacttactgtgcacccggatcac

SEQ ID NO: 959026 - DNA, 120 bp, Artificial Sequence
  ENSG00000268069_4 (sequence is synthesized)
ggcctccagagagcggatggcattgaggttgggtttctgtttccagccttcttctgaaaggggatccacctatagaaaacagtacatcagccaccagtctctcagggacccacaggccca

SEQ ID NO: 959027 - DNA, 120 bp, Artificial Sequence
  ENSG00000268069_5 (sequence is synthesized)
gctcactcccaccccaggggccccagccttctagccacaagcacactctacctaggccaggagatgctgcctggacctaacttggaacagaggcttccgcttcgcctaccttgtttcagg

SEQ ID NO: 959028 - DNA, 120 bp, Artificial Sequence
  ENSG00000268069_6 (sequence is synthesized)
cttggccactcccaccctgtcccatcccatctgcctgctccttgggtagtcctgagagccgggcttacctgcctgacagaagcatggatgggggagggagacggctcaccctgttaccca

SEQ ID NO: 959029 - DNA, 120 bp, Artificial Sequence
  ENSG00000268069_7 (sequence is synthesized)
gaagagcagccacacaggcctcagaggcgtcacagatggctgtgaggtcatggccaccctccaaggccagcaccactgcgcctcctgccaggttcatcagttgctgcgtcatgtatccaa

SEQ ID NO: 959030 - DNA, 120 bp, Artificial Sequence
  ENSG00000268069_8 (sequence is synthesized)
aacctagaggttgggaggggagaaatgggaggggcgggagtggagaggtgaccctgttctctacccctgtggcttccctgcttgcttcctccctaataaagaatgactcacatgtatcaa

SEQ ID NO: 959031 - DNA, 120 bp, Artificial Sequence
  ENSG00000254017_0 (sequence is synthesized)
gcctccacacagggcccatccatcttccccttgatcccctgctgcaaagacattgcctctgatgccacctccatgaacctgggctgcctggccacaggctacttcctgaagtcagtgact

SEQ ID NO: 959032 - DNA, 120 bp, Artificial Sequence
  ENSG00000254017_1 (sequence is synthesized)
gtgacctgggacacaggctccctcaacaggagcgctgggaccttcccagccaccaccctcacgccctctggccattacgccatcaccagccagctgactgcctcgggtgcgtgggccaaa

SEQ ID NO: 959033 - DNA, 120 bp, Artificial Sequence
  ENSG00000254017_2 (sequence is synthesized)
cgctcacctgcagcgtggcacacactctgtggtccgcagaccaggtcagtaccttcagcatctactccagggacttcaccctccccaccgtgaagatcttacagtcctcctgtgatggca

SEQ ID NO: 959034 - DNA, 120 bp, Artificial Sequence
  ENSG00000254017_3 (sequence is synthesized)
gtggacacttacccccgaccatccagttcctgtgcctcatctctgggtacacccaggtgccatcagcatcacctggctggaggatgggcaggtcgtggatgtgaactggtccatcgcctc

SEQ ID NO: 959035 - DNA, 120 bp, Artificial Sequence
  ENSG00000254017_4 (sequence is synthesized)
tcccatactggaggatgagctggcctccacacaaagcaagctcaccctcacccagaagcgctggctgcccgaccacacctacacctgccaggtcacctatcaaggtaacacctttgagga

SEQ ID NO: 959036 - DNA, 120 bp, Artificial Sequence
  ENSG00000254017_5 (sequence is synthesized)
ggtccagccccttctacctgttcatccgcaagttgcccacaatcacctgtctggtggtggacctggcacccagcaaggagaacgtgaagctgacttggtcccaggccagtgggaagtctg

SEQ ID NO: 959037 - DNA, 120 bp, Artificial Sequence
  ENSG00000254017_6 (sequence is synthesized)
tggctcaggtcatcctaaggcaagagaagcagtgcaatggcacgttcaccatcacgtccaccctgctggtgggcaccagagactggatcaagggggagacctaccagtgcagggtgaccc

SEQ ID NO: 959038 - DNA, 120 bp, Artificial Sequence
  ENSG00000254017_7 (sequence is synthesized)
acacccacctgcagtccacgaccaagatcagcggcccatgtgctcccccacaggtctacgtgtttgcaacgctagaagagccgaggaaccaggacaagcgcaccctcacctgcctgatcc

SEQ ID NO: 959039 - DNA, 120 bp, Artificial Sequence
  ENSG00000254017_8 (sequence is synthesized)
agaacttctggcccaaggacatcttggtgcagtggctgtacaacgaggtgcagctcccggacacttggcacagcatgacgcagccccgcaaaaccaagggctctggcgtcttagtcttca

SEQ ID NO: 959040 - DNA, 120 bp, Artificial Sequence
  ENSG00000254017_9 (sequence is synthesized)
gctgcctggaggttaccagggctgaatgggaacagaaaaacgagttcatctgctctgtggtccatgagacagcgactggctcacagaccgtcaagtaactgttgtctgtaaatcccatta

SEQ ID NO: 959041 - DNA, 120 bp, Artificial Sequence
  ENSG00000251209_0 (sequence is synthesized)
tggcaaaaagagtcctgtcccagcactgcaaggggaagataaaggctcgtcatctgtgcgtgcgtccatctgagtggaacgtgtgtcccgggggctgctgccaccgcgccggtccctcct

SEQ ID NO: 959042 - DNA, 120 bp, Artificial Sequence
  ENSG00000251209_1 (sequence is synthesized)
gtaatccgagcccgtgtcagaggacgcggcgcctgcaaggcaaaagggttgccgcaggtgtggccagatcctctaggcaagaggtgtggattcaggtcctactagtcttactcctgatga

SEQ ID NO: 959043 - DNA, 120 bp, Artificial Sequence
  ENSG00000251209_2 (sequence is synthesized)
ggagtaattagtagccccttcctcactgaccattgcaaggaaataccagtgaacttgagtttctccaatgaaggtgatcacagtgatgaatgacttggcttctgcacagcaaaagacatg

SEQ ID NO: 959044 - DNA, 120 bp, Artificial Sequence
  ENSG00000251209_3 (sequence is synthesized)
gcaaaagacatgatcatcagagcgaacagacaacctacagaatgggagagcatttgtgccatctatccatctgacaaaagtctaaaatccaaagtttacaaagaacttaaacaaatttac

SEQ ID NO: 959045 - DNA, 120 bp, Artificial Sequence
  ENSG00000251209_4 (sequence is synthesized)
agagatcatctataaattagaacatgcttatatgtatatacttaaattccactggggcctcatggagaggggaagagtgaatgggtaggaaggtggagagtactgccagcatgctttgat

SEQ ID NO: 959046 - DNA, 120 bp, Artificial Sequence
  ENSG00000251209_5 (sequence is synthesized)
cttgagcatcattaaggtgttggtagaagaaaagtccaagtctagctgatatggagtttaccttcccgtaacacacttttctgtatcaataacgtacatgataaatagatatggccagcc

SEQ ID NO: 959047 - DNA, 120 bp, Artificial Sequence
  ENSG00000251209_6 (sequence is synthesized)
acacatgacttagtttctctgttaagctcctggtatgatacttccatttcaaagagaagactggagatttaccactatgaagggaaacagaggaaggtgatggcataggtcagggatggg

SEQ ID NO: 959048 - DNA, 120 bp, Artificial Sequence
  ENSG00000251209_7 (sequence is synthesized)
caaacttccattgtgaagggccagatagtaaatattttaagtcttgggtcatttgggggcatccaggctctgaaggagggagtgaatttgctctttgtttgactttttgttccattcagg

SEQ ID NO: 959049 - DNA, 120 bp, Artificial Sequence
  ENSG00000251209_8 (sequence is synthesized)
acctcagctgattggatgatgcccaccatattgggggaggatcttcctcacccagtctaccaactgccatgccaatttcctccagaaacaccctcacagacacacctgagtagccgaatc

SEQ ID NO: 959050 - DNA, 120 bp, Artificial Sequence
  ENSG00000251209_9 (sequence is synthesized)
gacttttgcagggctgtgcctcctttcctccccagacaaaatccatcacgtcagcagtcacagggcaccctggttccctctctgaatgaactgttaaatgactaagctggctcccaacag

SEQ ID NO: 959051 - DNA, 120 bp, Artificial Sequence
  ENSG00000251209_10 (sequence is synthesized)
aggcagagcccagcaatatgcggcctgtaatctgtcagatgatacagcaacaggcccagtgaggggcccgacacaccccccaggagagtggagtctctcactgcatgtgacgtggaagac

SEQ ID NO: 959052 - DNA, 120 bp, Artificial Sequence
  ENSG00000251209_11 (sequence is synthesized)
gccgaagaggtgagggaggcaccatatgctgcgggcctgccaagggagaataaacagcaccggcagcctggcacagagctctggcgggaacgtccaccaagatcggtcaggcactctcat

SEQ ID NO: 959053 - DNA, 120 bp, Artificial Sequence
  ENSG00000251209_12 (sequence is synthesized)
ggcgtcctcctggatacaggcttttgcttttgtttttaattttggagcagtgaagccgaaagtgaggagtgaggacaaggagaagacccatttgctcctgttcattcaaacagcatctct

SEQ ID NO: 959054 - DNA, 120 bp, Artificial Sequence
  ENSG00000251209_13 (sequence is synthesized)
gtcctgtaaaacgccagttaataaatgctccatatgcagcacccgttggtttgcaaactccgtagaagaacttctgataatcccacatctctgaacttgatttagggcaagaactctaca

SEQ ID NO: 959055 - DNA, 120 bp, Artificial Sequence
  ENSG00000251209_14 (sequence is synthesized)
gggcaagaactctacatcttcaacattttgtagagcattccctgcgatgtggaaaattctgctgggctattccctgaggacacctctacctttcgtgtccagaattggtgggttcttggt

SEQ ID NO: 959056 - DNA, 120 bp, Artificial Sequence
  ENSG00000251209_15 (sequence is synthesized)
atgaagccgcggaccctcgcagctcaagcatatctgaatcgagaaaagcagacatgattgaagcgcatttatctccactaattaagaggcttatgccaggctgagctgagattgtaacac

SEQ ID NO: 959057 - DNA, 120 bp, Artificial Sequence
  ENSG00000251209_16 (sequence is synthesized)
cagatgagcctccatttcatcccgctacacctggagaagctcctgtgggaggaagactcatggagacactttaaactggaagcaagagaccccagggaagagtgttcttaggcagaggga

SEQ ID NO: 959058 - DNA, 120 bp, Artificial Sequence
  ENSG00000251209_17 (sequence is synthesized)
acataacatgctaacgtgctatgagggggacctcagctgattggatgatgcccaccatattgggggaggatcttcctcacccagtctaccaactgccatgccaatttcctccagaaacac

SEQ ID NO: 959059 - DNA, 120 bp, Artificial Sequence
  ENSG00000251209_18 (sequence is synthesized)
ggctgccttctcctctcctggaaatatgcaaattgacaacacattttatccttcacaggaaacaacagagtgaggacataacaggactcttcttcccagaaacttcttctcagacttcca

SEQ ID NO: 959060 - DNA, 120 bp, Artificial Sequence
  ENSG00000251209_19 (sequence is synthesized)
ctcagaggtcactggccagaaatgatgacatatggattccttaatttaagagaaacagaaaaataagcatcatctgctaaaagagaatggagttatactgactggctgaggacaatcatg

SEQ ID NO: 959061 - DNA, 120 bp, Artificial Sequence
  ENSG00000251209_20 (sequence is synthesized)
cccgagccactaggtctgggcaaattgggcacttccaaagtgcatcatgaaagtgctcttaagaaaaacgtggggtatgtggattctggataagcaaagtatctgccacactgaaatcct

SEQ ID NO: 959062 - DNA, 120 bp, Artificial Sequence
  ENSG00000251209_21 (sequence is synthesized)
tatctagtttcctaaaatcctagattagaaaattcaaacggcttcacttgtgtgattattatctctgctatatgcttcagaagaaaataaaagtatgttcataacgttcattttaaatct

SEQ ID NO: 959063 - DNA, 120 bp, Artificial Sequence
  ENSG00000251209_22 (sequence is synthesized)
gcctctcttctgcaaggtgccatgcatggtttgggcaggatttgccttccatctgtccactgacctctcagggatgcgccttctatttatgacatggaattttcagacattggtgtgcaa

SEQ ID NO: 959064 - DNA, 120 bp, Artificial Sequence
  ENSG00000251209_23 (sequence is synthesized)
gtatctacccaaaggaatataaatcatttcattataaagatacatgtacgcgtatgttcattacagcaccaatcacaatagcaaagacatggaatcaatccaaatgccaatcaatgatag

SEQ ID NO: 959065 - DNA, 120 bp, Artificial Sequence
  ENSG00000251209_24 (sequence is synthesized)
actgaattagaaaaaaaaagtagtacatgtataccatgaatactatgcagccataaaaggaatgagatcatgttctttgcagggtcatggatggagctggaagccgttactttcagcaaa

SEQ ID NO: 959066 - DNA, 120 bp, Artificial Sequence
  ENSG00000251209_25 (sequence is synthesized)
cttataagtgagagcagaatgatgagaacacatggacacattagggggatcaacacacactggggcctgttgtggggatggagggagggagagcatcagaagaatagttaatggatgttg

SEQ ID NO: 959067 - DNA, 120 bp, Artificial Sequence
  ENSG00000251209_26 (sequence is synthesized)
ggcttaatacctaggtgatggtttgtgatatggttaggctttttgtccccacccagatcttatcttgaattgtaatccctgtaatcgccaagtgtctagggagatacctggtagggggtg

SEQ ID NO: 959068 - DNA, 120 bp, Artificial Sequence
  ENSG00000251209_27 (sequence is synthesized)
tagggagatacctggtagggggtgattaaatcatgggggcggtttcccccatgctgtggttgtacggaaaagaaagagagatcagactgttaccgtgtctatgtagaaaggaaagacata

SEQ ID NO: 959069 - DNA, 120 bp, Artificial Sequence
  ENSG00000251209_28 (sequence is synthesized)
agagactccattttgaaaaagacttgtactttaaacaattgctttgctgacatgttgttaatttgtagctttgccccaaccactttgcccaaaccactttgacccaacctggagctcaca

SEQ ID NO: 959070 - DNA, 78 bp, Artificial Sequence
  ENSG00000251209_29 (sequence is synthesized)
tagtctcagtaaaccatgaaagctgggtcttgtccaaggtttctccccatgcgatagtctgaaatatggcctcgtggg

SEQ ID NO: 959071 - DNA, 120 bp, Artificial Sequence
  ENSG00000251209_30 (sequence is synthesized)
ttgcagattcacatgcagttgtaagaaatgatgcagagggattccatgtacccttcaccaagcctcccacaatgggcgtgaaggggaggagtgaaatccttctggaaaatataacagaat

SEQ ID NO: 959072 - DNA, 120 bp, Artificial Sequence
  ENSG00000251209_31 (sequence is synthesized)
agcagtttttgccggaatagctacttgcagaaacgtggtcaaaggtaccagcacagccacagaggagtagagcaccaagcaggcttttggagtccctgattctaggacttgactcttaga

SEQ ID NO: 959073 - DNA, 120 bp, Artificial Sequence
  ENSG00000251209_32 (sequence is synthesized)
cagaggggagtccactgcactgaagggaaatgttacaagacattctttagagagaaataaaataatacagatcagaaacttggatctacataaagaagacaaaagcatcaaagacggaat

SEQ ID NO: 959074 - DNA, 120 bp, Artificial Sequence
  ENSG00000251209_33 (sequence is synthesized)
aagtgcaggacctcagctgattggatgatgcccaccatattgggggaggatcttcctcacccagtctaccaactgccatgccaatttcctccagaaacaccctcacagacacacctgagt

SEQ ID NO: 959075 - DNA, 120 bp, Artificial Sequence
  ENSG00000251209_34 (sequence is synthesized)
ttgagtgcggaggatggacacctacattggcagaggcttgagagagatgaggacatagaaagatgaacttaaagctgaaaagtgaacttaaagctggaaaaaatgaagcaatctcagcta

SEQ ID NO: 959076 - DNA, 120 bp, Artificial Sequence
  ENSG00000251209_35 (sequence is synthesized)
tgatagctgtaatagaaaaatggagttttcctcagtttttcttcctcagaataaatgggatgatcctgatggctgtttaagtggagaggatttgtttggtatggctgctggtgctggcct

SEQ ID NO: 959077 - DNA, 120 bp, Artificial Sequence
  ENSG00000251209_36 (sequence is synthesized)
tggaggatctgcattggctgcggtctgcagttaggtccagactgccagtcccagcgccttagagacctctggaaatcaggcgaggagaccagccgtctgagagagctccactctctggct

SEQ ID NO: 959078 - DNA, 120 bp, Artificial Sequence
  ENSG00000251209_37 (sequence is synthesized)
gcccctgccagagtgcccaaataaggaagagctgtcacatcaaggttttgtcatgtgctaggcactgcacaaagcacttgaatgacatccttgaaacttttcccatactgatcatactgg

SEQ ID NO: 959079 - DNA, 120 bp, Artificial Sequence
  ENSG00000251209_38 (sequence is synthesized)
aggatgtccagagaaatacagaaaagtggtttggaggggagtagctgatgatgcagcatttaatgagaaaagtatgtgaaagagtttgttcagaggacagctatctggcttttgatggga

SEQ ID NO: 959080 - DNA, 120 bp, Artificial Sequence
  ENSG00000251209_39 (sequence is synthesized)
cttcaaaccacatcagatgtggagctaataaagaaagttaattattgaagcactgagaacattttacattcctggcttgtggttgcgtcttgcaaacgtgagactaatgagagcaagttc

SEQ ID NO: 959081 - DNA, 120 bp, Artificial Sequence
  ENSG00000251209_40 (sequence is synthesized)
ggccagagcggacgcagaggacggggaggcgccgccgagagcgagccagggctgctagcacgttgtcacctttcacttggaggtagggcttctagtaggagaggtggagagagacattga

SEQ ID NO: 959082 - DNA, 120 bp, Artificial Sequence
  ENSG00000251209_41 (sequence is synthesized)
tgaggagggagaacctgagtttaggccaggattccaaccgtccgtttcaagagaaaatgttcctgctgaataacaagggggaaacttgaccaggcagggcctggaaattaagatggaagc

SEQ ID NO: 959083 - DNA, 120 bp, Artificial Sequence
  ENSG00000251209_42 (sequence is synthesized)
tcgaggttatgagaggccagcgtttcgggtgctgtccaggtgactaggcctctagaggttcttagaaagagaaagcattctgtgtgggactcagtctgggaaacactgcatactgtgttc

SEQ ID NO: 959084 - DNA, 120 bp, Artificial Sequence
  ENSG00000251209_43 (sequence is synthesized)
ttgtggagtttcacaattaatgcaaacacattaaaggctcagagaagtcctgcagtaaagaacatttccaatacaaccctgtattcccagcacagatggccacaaagccacttttgttgg

SEQ ID NO: 959085 - DNA, 120 bp, Artificial Sequence
  ENSG00000251209_44 (sequence is synthesized)
ttggaagactcgccaaggcaggacatttattaatattttgtgaaagaagaattattttatttaaaaaaaaatagagacaggatcttgctgtattgcccaggctggtcttgaactcctgga

SEQ ID NO: 959086 - DNA, 120 bp, Artificial Sequence
  ENSG00000251209_45 (sequence is synthesized)
agaaatcctcctcggcctctcaaagtccggggattacaggcataagccaccgcaccccgccaagaagaattctttgggaaccactagcactctggaatgctttactgtagatatgaataa

SEQ ID NO: 959087 - DNA, 120 bp, Artificial Sequence
  ENSG00000251209_46 (sequence is synthesized)
gtgattttttttaaatacaaaagtcatattagtattaattagttttggtgcattttagaaaatacacgttttagaaagcttaccctaataacggttggaagacatgctggaagaggtagc

SEQ ID NO: 959088 - DNA, 120 bp, Artificial Sequence
  ENSG00000251209_47 (sequence is synthesized)
atgatagcaagtgctgcagagggagaggcgtaactgggttcaaatttgccgcttgctgcctgtgagtcaagcctcacaggtttgcatggtttgattaaaatatggctttaaagatcttag

SEQ ID NO: 959089 - DNA, 120 bp, Artificial Sequence
  ENSG00000251209_48 (sequence is synthesized)
cacaaagcctagcacatggtaagcactcactgtgtggaagctattatattattttcattttattatgataaattggggccgactaggtcaagtcatcaaagtttggcccacccatgggat

SEQ ID NO: 959090 - DNA, 120 bp, Artificial Sequence
  ENSG00000251209_49 (sequence is synthesized)
tttattccatgtctgcacgccctccagctcacaccgtggggcctctaaccttccaccatggtcctcccctggactctctgtgtgtgcagatcctcttctggagcagaactgggttgtcac

SEQ ID NO: 959091 - DNA, 120 bp, Artificial Sequence
  ENSG00000251209_50 (sequence is synthesized)
aggcctggagcgtgtgtttggaaggttctgactttgctgtcttgggaatcagttgccaacaagggtgaccaagctcctcagctagagacaggccatgtccagaggccctgcaggaggaca

SEQ ID NO: 959092 - DNA, 120 bp, Artificial Sequence
  ENSG00000251209_51 (sequence is synthesized)
taccccctagagggagaggcaagggtaggagagccagcctcccgcccctagagggagaggcaagggtaggagagccagcctcccgctgacagtgagcaccaaggcctggatgcaggatgc

SEQ ID NO: 959093 - DNA, 120 bp, Artificial Sequence
  ENSG00000251209_52 (sequence is synthesized)
ctgcctggagaacatccggcccagcccagcccggctgcccgctgaacccagcctccttgtgaatggtgtgtatagcggaactgtccaggccaacgcaaaagcatgggaaatagaaagtcc

SEQ ID NO: 959094 - DNA, 120 bp, Artificial Sequence
  ENSG00000251209_53 (sequence is synthesized)
ttatggttttatgccacttaatctgggggtcatttgttatatctcaattgatagatgaaactcatgccagcttcctgattttaggaagagttgatccaatttgtctggtgctcaggatca

SEQ ID NO: 959095 - DNA, 120 bp, Artificial Sequence
  ENSG00000251209_54 (sequence is synthesized)
caaatatctcaaacaatgctcattggtactcagtctctaaaaattctattgatatttttcttaagaaacatagttcttgatgactatcttcttgaagacatagacacgcaccactaccac

SEQ ID NO: 959096 - DNA, 120 bp, Artificial Sequence
  ENSG00000251209_55 (sequence is synthesized)
attcattaataataataataacaacaacgacaacaaaactagtatattgtgatttgcttggagtggccagcttcaggagggaaatgaataactgttttccagactcaaggaagattcaac

SEQ ID NO: 959097 - DNA, 120 bp, Artificial Sequence
  ENSG00000251209_56 (sequence is synthesized)
tcgagatgtaacattaggcaggcaggcaggccagtgttgaagcactggtttactgggccggagatgggtagttcacagactccatgcatggtttgactatgaaagaggagtccatgaaca

SEQ ID NO: 959098 - DNA, 120 bp, Artificial Sequence
  ENSG00000251209_57 (sequence is synthesized)
cagattacatgttcattctctcaatgcagtttttggctaggttgcattaatacatattcatcaatagatcagtagaaaaacgctgagctctgttaatcatactatagatctgtagtcaaa

SEQ ID NO: 959099 - DNA, 68 bp, Artificial Sequence
  ENSG00000251209_58 (sequence is synthesized)
ctacctcttgagagttttccaggcttcctaaggctttggagctttcctgagtcagggcctttgcacat

SEQ ID NO: 959100 - DNA, 120 bp, Artificial Sequence
  ENSG00000251209_59 (sequence is synthesized)
taaggctttggagctttcctgagtcagggcctttgcacatgctatgtcttttgccagagaggctgattgctcagcattatgcatgcctggttccttcccatcatgtaggtcttctggtca

SEQ ID NO: 959101 - DNA, 120 bp, Artificial Sequence
  ENSG00000251209_60 (sequence is synthesized)
agtaccccctcttcagagaacgtttctcccccacccttcccctccagtgcgcactgccaaaccctgctcgaaaccaccctgttctctgtcctatggtcactcagttgacatcacaatccg

SEQ ID NO: 959102 - DNA, 120 bp, Artificial Sequence
  ENSG00000251209_61 (sequence is synthesized)
aaatattattcatttccctttctgggaataaacatcacaggaataatcagagttgtagaatgagatttgtatacaaggctgcctatgtctgtgtttttataatggcgaaatattagaatc

SEQ ID NO: 959103 - DNA, 120 bp, Artificial Sequence
  ENSG00000251209_62 (sequence is synthesized)
agcttaaacattgacaaatatgtgtaaggctcagtaaattacagcatatcttgagggaagagcattagtgcaaagacattaaaattttgttgttcacgaatgattgtggggcacagtggc

SEQ ID NO: 959104 - DNA, 120 bp, Artificial Sequence
  ENSG00000251209_63 (sequence is synthesized)
ccaagtcactgtgcctttctggctttctttacctatgtcctgtaaaacgccagccagaagcaaatgaatatattatctgtccgaagcaagacatggggcaaatggatctatgagtcgtgg

SEQ ID NO: 959105 - DNA, 120 bp, Artificial Sequence
  ENSG00000251209_64 (sequence is synthesized)
gaaaaattagattactcatgctcagacagagggggcgatggcaatttagagtggccccttaaatgccaattacacttgtatttacaaaacaaattaaacccacgtataggacattgttca

SEQ ID NO: 959106 - DNA, 120 bp, Artificial Sequence
  ENSG00000251209_65 (sequence is synthesized)
gacattgcagagagcctcagcttctttccacacaacgatggctttccttttccccaattacaacagtaacagaggcatcaagttacatatacactatatccctggggataagcacttata

SEQ ID NO: 959107 - DNA, 120 bp, Artificial Sequence
  ENSG00000251209_66 (sequence is synthesized)
agggcctcctttggatgacatgagactgctcatcgtcaagagaacaattgagtttctatctgacctatctgaaagtggatagttgtgcgacctcaagcaagccacttctttcttctggat

SEQ ID NO: 959108 - DNA, 120 bp, Artificial Sequence
  ENSG00000251209_67 (sequence is synthesized)
ttggagttttgtaatccatatagcgaacccaccccagtgaccctggcatcttgctctttctcaaaccctgtaggagtcctcatgcctctgcttccaaggctccttctatcatgttcccct

SEQ ID NO: 959109 - DNA, 120 bp, Artificial Sequence
  ENSG00000251209_68 (sequence is synthesized)
tccctcagatatctgcagcctcacttctttatgccaaagcgtgtatcattgtttagcctattttacttttttaaaactttatttttagagcagttttacatttatgaaagattgcacaaa

SEQ ID NO: 959110 - DNA, 120 bp, Artificial Sequence
  ENSG00000251209_69 (sequence is synthesized)
aaataaagttcccctataacccttcctccccatcccccctccctcagtttcccctattattaacatcttgcaatagtgtggtccatttgtcagaattaatgagtcaatgttgatacatta

SEQ ID NO: 959111 - DNA, 120 bp, Artificial Sequence
  ENSG00000251209_70 (sequence is synthesized)
tggtctactaaatcccatagtttacattagggttcaatctttaagttgtgcattctatggattttaacaaatatataatgatatgtatctttcattacagtatcatatagaataatccct

SEQ ID NO: 959112 - DNA, 120 bp, Artificial Sequence
  ENSG00000251209_71 (sequence is synthesized)
ttgccaaaaaaaaaaaacccacacacaaaccctgtattccatctacacatttctccctcctttatcccaaacctctgtcaaccactgacctttttacggtctcttcacagaatttcaaat

SEQ ID NO: 959113 - DNA, 120 bp, Artificial Sequence
  ENSG00000251209_72 (sequence is synthesized)
tttagtgatatgtatttaagcttcctccatcacttttaatgcttgatagctcatttctttttatcattgaataatactccactatatggatatttttctttatccattcacctattgaaa

SEQ ID NO: 959114 - DNA, 120 bp, Artificial Sequence
  ENSG00000251209_73 (sequence is synthesized)
ggatgtcttggttgcttccaactactggaaattgtgaataaagttactataaacatgatgtgcagattttcttttggatatacatttccaatttatttgcataaaaaaccagcagtgcaa

SEQ ID NO: 959115 - DNA, 120 bp, Artificial Sequence
  ENSG00000251209_74 (sequence is synthesized)
ttgctggaaggtatggtaagcctacatatagctttgtaaaagacaccaaactgtctttgaaaatggctgtgttaatttacttttttactcttaaaagtttaactatatggctcaccaatt

SEQ ID NO: 959116 - DNA, 120 bp, Artificial Sequence
  ENSG00000251209_75 (sequence is synthesized)
atgaaagtgcctctttttttacagttccctcaatggaacctgttgccaaactttcagatttttgccattctgctaggtgagaaattgtattccagggtagttttcatttatggttctctt

SEQ ID NO: 959117 - DNA, 120 bp, Artificial Sequence
  ENSG00000251209_76 (sequence is synthesized)
tgtgtgagatcttggcatgtttcacgtgtttgagggttacttggttttctatttctgtgaactggcaattcatatctcatgctcatatttcaatcaggttcttagtgggttttttggcct

SEQ ID NO: 959118 - DNA, 120 bp, Artificial Sequence
  ENSG00000251209_77 (sequence is synthesized)
ctatttttaacaggtctatgtatactaagggtgtaaatcttccatccgtggtataaattagaaatattttcccaaatttgacatttgtctttttactttacttttttttttttactatga

SEQ ID NO: 959119 - DNA, 120 bp, Artificial Sequence
  ENSG00000251209_78 (sequence is synthesized)
cacattgtctttattgtagtcaaatttataattctttcccttataacttactgattttgaattatagttagaaaaacatttctcttctgaggttatggaagaattcatctactttttaaa

SEQ ID NO: 959120 - DNA, 120 bp, Artificial Sequence
  ENSG00000251209_79 (sequence is synthesized)
atctctgatccattttggaatgttttctgctgtaaactgtgaaagaaagatcaaattttatgttattccatatggtgatccatgatcctaacatcatttattaaaagctcgacttttttc

SEQ ID NO: 959121 - DNA, 120 bp, Artificial Sequence
  ENSG00000251209_80 (sequence is synthesized)
ccactgatatttcagatgtcatttttatataagccaaatttctatttggaattgtagactctttctgggttttgtaattgttctgtccacctgttcatttatgcaggcatcaaaacatac

SEQ ID NO: 959122 - DNA, 120 bp, Artificial Sequence
  ENSG00000251209_81 (sequence is synthesized)
atgcaggcatcaaaacataccattttctttatagttcatttataatattttaatatctggtaataaatatttcccagtattgctgcagaagaatatttttatcaattattaagatataat

SEQ ID NO: 959123 - DNA, 120 bp, Artificial Sequence
  ENSG00000251209_82 (sequence is synthesized)
gggctcctccagcgcggccagagcggacgcagaggacggggaggcgccgccgagagcgagccagggctgctagcacgttgtcacctttcacttggagacaaaatccatcacgtcagcagt

SEQ ID NO: 959124 - DNA, 120 bp, Artificial Sequence
  ENSG00000251209_83 (sequence is synthesized)
tgcctcccaagtcactgtgcctttctggctttctttacctatgtcctgtaaaacgccagaggcagtttggacacacagagataccagggatgtgtgcaccatgtgaggacccagccagaa

SEQ ID NO: 959125 - DNA, 120 bp, Artificial Sequence
  ENSG00000251209_84 (sequence is synthesized)
ggttagcatttgcaggccaaggagagaagcctcaggaagaaaccagccttgctgataccttgaccttgaacttccagcctccagaactgtgagaaataaagttgtgttggttaggcccca

SEQ ID NO: 959126 - DNA, 120 bp, Artificial Sequence
  ENSG00000251209_85 (sequence is synthesized)
tgaagatgcatactttaatagattcccagatgaggaagcacctatatctatgctttccatctgctacttctttgggaaaaaatggaagacagaaatagcaaaacttgtagtcgctccaaa

SEQ ID NO: 959127 - DNA, 120 bp, Artificial Sequence
  ENSG00000251209_86 (sequence is synthesized)
tacatcctcagatagagcacaaaatataatagacaaaagccctactaaaccaagtttatgtttaatgaaagcaagggcataaaagaaatacataatgtctaaagtagatacatcaagaaa

SEQ ID NO: 959128 - DNA, 73 bp, Artificial Sequence
  ENSG00000251209_87 (sequence is synthesized)
ctcttttcaagtccaaatttcccaaccgtgactcttcagtgcccacctaatctggccctgctcaccctccatc

SEQ ID NO: 959129 - DNA, 120 bp, Artificial Sequence
  ENSG00000251209_88 (sequence is synthesized)
cttcagtgcccacctaatctggccctgctcaccctccatcatgctttcttgctatgcccatgcttgtttgctgggctcctcaaagttcctccagtttttctgagcacttactcccctcag

SEQ ID NO: 959130 - DNA, 120 bp, Artificial Sequence
  ENSG00000251209_89 (sequence is synthesized)
gcctttggactcacccttccctctgcggatgatgctgctaaacagagtaatctcagttctaagtgtcatgtgctacttcccttggaaaacctcccctggcctaggtgccaccatgtgatc

SEQ ID NO: 959131 - DNA, 120 bp, Artificial Sequence
  ENSG00000251209_90 (sequence is synthesized)
ctttgggacctgcctcctgtccttagcacttacccttttgacctgtgactgttcctttgggtgtacctctggtccctcccttcctaggctgtaagctccacctgtgcagggacagggttt

SEQ ID NO: 959132 - DNA, 120 bp, Artificial Sequence
  ENSG00000251209_91 (sequence is synthesized)
gtcctgtttgtctgtcccagtgcataccacatgagaggcactgaatatgtttcttgactgaataaacaaatatatgattttattataatcttgtttttctacagagggttccactgacaa

SEQ ID NO: 959133 - DNA, 120 bp, Artificial Sequence
  ENSG00000251209_92 (sequence is synthesized)
agtttgctcacctgtgtcatcttatttaccatctcgaccacactgagcccctctgagacatcagcatggggcctgggactgccagcccacctttagcacacgtgaactgacaaagtaggg

SEQ ID NO: 959134 - DNA, 120 bp, Artificial Sequence
  ENSG00000251209_93 (sequence is synthesized)
ttcccccacccctattttgtaagcttattcatgtgagaggttttctaagaaattttaaggaaaattacatttaatcggatatttgatgaagatccatttataaagataagaacattttac

SEQ ID NO: 959135 - DNA, 120 bp, Artificial Sequence
  ENSG00000251209_94 (sequence is synthesized)
gagctgcctaggagacgcccggagctggggccccatatggacaaagctctcgtttgccaacaaaagcagttcttccctatccccaggcagcagctctagaaaacgatctactgtcatttg

SEQ ID NO: 959136 - DNA, 120 bp, Artificial Sequence
  ENSG00000251209_95 (sequence is synthesized)
aatcctttttactgacaatctccctttaccacatggttttcagtgcgcttgacagaattttttgttaaatcatatttctaagcttagagtgtgcgttttccctatttatcattctgtcct

SEQ ID NO: 959137 - DNA, 120 bp, Artificial Sequence
  ENSG00000251209_96 (sequence is synthesized)
catactggtgtacacgcagctactgttcatttctttacgcatttttaatgttatattttgagacgattgcagattcacatgcagttgtaagaaatgatgcagagggattccatgtaccct

SEQ ID NO: 959138 - DNA, 120 bp, Artificial Sequence
  ENSG00000251209_97 (sequence is synthesized)
tcaccaagcctcccacaatggtaatgtttgcataactacagtatggtatcttaaccagaaaatcaacattgttataattcacctaaaacatttctccagttttatataccctcatttgtg

SEQ ID NO: 959139 - DNA, 120 bp, Artificial Sequence
  ENSG00000251209_98 (sequence is synthesized)
tgtgtgtgtggggggggaggtgtatttagttcaatataattttattacctgtgtagactttcatgactactaacacagtcagcgtgcaaaacagtttgaggacaataacgccttgttctt

SEQ ID NO: 959140 - DNA, 120 bp, Artificial Sequence
  ENSG00000251209_99 (sequence is synthesized)
gttttgcattccgtcaaaacgtatttaagcaagcctgtgtcaaatggaaccctgaaaaatatggctttattatactgatgtcattagaggtcttctgagtagtttaaagtatacaacaat

SEQ ID NO: 959141 - DNA, 120 bp, Artificial Sequence
  ENSG00000251209_100 (sequence is synthesized)
ctgtttagttgggctttttgatcttaataacaagatcactaagtggcagttctacatggtgtaaggctagaagacaatctagtcacaattctcgagactgagttgatctagaaaaggtgt

SEQ ID NO: 959142 - DNA, 120 bp, Artificial Sequence
  ENSG00000251209_101 (sequence is synthesized)
tgcatcaattgctttgaacacctaacacatagaaccaatgcacgaatacctagctccctggacacctgatcagtgaccagtgagctggaataactagatgaacatttagaaagaataaat

SEQ ID NO: 959143 - DNA, 120 bp, Artificial Sequence
  ENSG00000251209_102 (sequence is synthesized)
aatagtcttagaaatactgtacatttcgttcatttgaaaaatatataatatcaattgtttcttcttcccatatcgacatggaaactagatgtggttaatgactcagctggtagtgattac

SEQ ID NO: 959144 - DNA, 120 bp, Artificial Sequence
  ENSG00000251209_103 (sequence is synthesized)
aaataaggagaaaatgaccatgttaatgctatggagtactaaggtaccatgctggaataccatgctggaatactagtattgacagtgatatattattgaaagcgtggtggggtcattatt

SEQ ID NO: 959145 - DNA, 120 bp, Artificial Sequence
  ENSG00000251209_104 (sequence is synthesized)
gtgttgtatactcccacctgatagagagtcaaagtccagggccaaggttcccctgtgcttcctattggaattctcctcccaagaaggataaatgaagaagcctggaggtaaaattaaagt

SEQ ID NO: 959146 - DNA, 120 bp, Artificial Sequence
  ENSG00000251209_105 (sequence is synthesized)
tttcctaggagtgactgcataaggatagatatggtgctggaggagagtgttgagaaagaagacgggattaggctgtactggaagagctgaaaatggtgtcagggagcctgtctgatcact

SEQ ID NO: 959147 - DNA, 120 bp, Artificial Sequence
  ENSG00000251209_106 (sequence is synthesized)
ttgttggtctctgaccctagatcccaccacatccacactctgctcctctttcatttaacacttctattgctcaccccacaaaaagtagatagagtaatactagtgtttctctgggaaaca

SEQ ID NO: 959148 - DNA, 120 bp, Artificial Sequence
  ENSG00000251209_107 (sequence is synthesized)
cttctcattaataaacattacaaaagatacttaatcttattaatgacctgggaaatgggaatttaaaccaaaagtatgatgctttggaatgataaataatctcggtcagggaaggatact

SEQ ID NO: 959149 - DNA, 120 bp, Artificial Sequence
  ENSG00000251209_108 (sequence is synthesized)
gaataattgtttctgaacgatagacctttgtttcttttgaaacggtaaggtagaatataagtctctggacacaactgatatataaattaaaataatattttgatacttaaaacagcattg

SEQ ID NO: 959150 - DNA, 120 bp, Artificial Sequence
  ENSG00000251209_109 (sequence is synthesized)
tgcaatggagttgcagttattagacttcccctggccagctgcacgtggactaggatgcaagtggatgtgccacatcacctggattttgaggctgcagttctggcttttggtctggaatgc

SEQ ID NO: 959151 - DNA, 120 bp, Artificial Sequence
  ENSG00000251209_110 (sequence is synthesized)
ccttcagtctctgctgatggcaacccagactcccagaggtggaaggcagtgatgatgccttctaagctgacctcaaatcactcacatcacaccctggaaggaaaaagccaagatttgctt

SEQ ID NO: 959152 - DNA, 120 bp, Artificial Sequence
  ENSG00000251209_111 (sequence is synthesized)
gaaacttcttcgagaaaatgtacccagtcctccctggtccatttatgctttcaatccagtatttttcttttattgaagtaaaactcactgcctcataacttcttgacagcagctctatgc

SEQ ID NO: 959153 - DNA, 120 bp, Artificial Sequence
  ENSG00000251209_112 (sequence is synthesized)
tccagagtacacagaaaagttgaaacctgtgtgcatatgacaggcttttaaaaatgggaagacagtcctcatgtctccctcccagtgctttttctttcccagatgaagtaactacttcta

SEQ ID NO: 959154 - DNA, 120 bp, Artificial Sequence
  ENSG00000251209_113 (sequence is synthesized)
tttagtggatgtgagctgtgcaaggtacatccttgatgtgttacccacatcgtctcatgaatcttgtcaagagcatcaccagagagacatcattattgacactttcagatgagagaattg

SEQ ID NO: 959155 - DNA, 120 bp, Artificial Sequence
  ENSG00000251209_114 (sequence is synthesized)
aggttcagaaaggaaatggcctcaaggtcccccagctgtgttaaagctgaggctggagccccaaacgactcactgcagagcggatgtttcttttatgcagattaactcccatggctaaat

SEQ ID NO: 959156 - DNA, 120 bp, Artificial Sequence
  ENSG00000251209_115 (sequence is synthesized)
gcccaccatgcctttaatcttcccttcatatcccagaccctatattatcctgttctcagtgaaacctcctgcagtgtataactcttggttttttctgccctgcccctggcttccttgtga

SEQ ID NO: 959157 - DNA, 120 bp, Artificial Sequence
  ENSG00000251209_116 (sequence is synthesized)
atggctggtccccacattctaatcagaaagttactgtaggagcatgtgagactccgtgaactttgctatatgggatttagacaggggtggaatctttacataggccacatatagggttcc

SEQ ID NO: 959158 - DNA, 120 bp, Artificial Sequence
  ENSG00000251209_117 (sequence is synthesized)
ctgggagttttttttttaaactggtactttgagagagaggtcatccttctctggtgggggaatggtaatatgtaaaaagtgagaactgcttgcagctggtaatcgaaatttttacagttt

SEQ ID NO: 959159 - DNA, 120 bp, Artificial Sequence
  ENSG00000251209_118 (sequence is synthesized)
ttaaattcgtcagttttctacaaactaacatcaatcttgaagtttgtaaagtgtttgggccctaagcaatagtaagtagtcaaatgatccttaggaaaacttgcagaatgccataactta

SEQ ID NO: 959160 - DNA, 120 bp, Artificial Sequence
  ENSG00000251209_119 (sequence is synthesized)
ataatgaagattactccatcctttctgtttgccttacttgcaagtatttgactttttaaaaaaatcttacataagatgtctatgaagtgaagcactttctgtgtgtaattcatggtcttt

SEQ ID NO: 959161 - DNA, 120 bp, Artificial Sequence
  ENSG00000251209_120 (sequence is synthesized)
atagagcaacacatttttgccttaccctaatattagagcactaatttggaaacctgaaacctttaattttgaatggggatatcccagaagaatcatcagaatcacagacaatcatgtccc

SEQ ID NO: 959162 - DNA, 120 bp, Artificial Sequence
  ENSG00000254019_0 (sequence is synthesized)
agagaggtgggaaggtgatacaaacaggtggtccgctggtaatccccatcgagtgactggatgatctgcaaaagaggaaaacaacccggccagagagtcaggggacggccaccagatggc

SEQ ID NO: 959163 - DNA, 120 bp, Artificial Sequence
  ENSG00000254019_1 (sequence is synthesized)
cctgtggaccgccgcccgacccccgagcaagccgtgtgccccgagggcccgacccaagatcacacagctctctgccactcactctggaggagaccagaaacctcgaggtgctgtcttcac

SEQ ID NO: 959164 - DNA, 120 bp, Artificial Sequence
  ENSG00000254019_2 (sequence is synthesized)
tgcgcctggctcttacgtcccagctcttccctacatcttctttcacgctgcagcggaaaccagaatgcctactaattccttaagaaccaaaggttcaagtggtgctacctatgtatttgc

SEQ ID NO: 959165 - DNA, 120 bp, Artificial Sequence
  ENSG00000254019_3 (sequence is synthesized)
ttcttacgtcccctgaacgtcgctacgattccacacgacagccctcgagaattctttcaagttttccaaatgtcctctaccgtagaaacatctcaattaaaacaagagtttccaaactgt

SEQ ID NO: 959166 - DNA, 120 bp, Artificial Sequence
  ENSG00000272971_0 (sequence is synthesized)
ctccccagagcgtgcaaggtagaactctgcagtacaaacctttacagctgctgggcataggagaccttctagtagaggacaggaggcttgggttctagttacagttctgccacagtgtca

SEQ ID NO: 959167 - DNA, 120 bp, Artificial Sequence
  ENSG00000272971_1 (sequence is synthesized)
ccttaggtgacacaggcccaggcttcgctgctgggcctgttacttcatctgcacaatggaaactcaattctatttaaattactttctaaagggcctcagtctgcagagacacagaagcaa

SEQ ID NO: 959168 - DNA, 120 bp, Artificial Sequence
  ENSG00000272971_2 (sequence is synthesized)
ctcagaggtggataaggataaagtgaaataatggaaagcacaaggaacagtaaaaggcaaatgtcaagaagctgtttgcaaagttaccaagatgtaaaattagattttacttattaataa

SEQ ID NO: 959169 - DNA, 120 bp, Artificial Sequence
  ENSG00000272971_3 (sequence is synthesized)
tcatgtcacttgtcattctgtttataatggtcaattcactgctgatattcaagtggaccgtttaaactgtatttttgctcagctatccctccaaataaatatctcaaaatcttgactgtt

SEQ ID NO: 959170 - DNA, 120 bp, Artificial Sequence
  ENSG00000272970_0 (sequence is synthesized)
gctgggattaccggcatgagccaccatttccggcaacaggcagacttttaacacattccttacctaaacttttaaaagggacaaaagatatatgcctttggtttgggagatgacgaaaca

SEQ ID NO: 959171 - DNA, 120 bp, Artificial Sequence
  ENSG00000272970_1 (sequence is synthesized)
tatatgcctttggtttgggagatgacgaaacatatgctttaatgactattgggttggaatcttcttgagagaggatccttcttagcctagactagagtcttcaaaagcccacagtgcttc

SEQ ID NO: 959172 - DNA, 120 bp, Artificial Sequence
  ENSG00000272970_2 (sequence is synthesized)
gtaaagtttcatacgtggaagagagaaggatgttccactggaaaagcagaattgcagctgagctgtcctgaaatgcccagcactctgtggagacgcggaggaggtttcctgggacaaagt

SEQ ID NO: 959173 - DNA, 120 bp, Artificial Sequence
  ENSG00000272970_3 (sequence is synthesized)
gctgaaccagatggtgaagccaaggcctgaagacctttcctgcaaggtcgcagaggaagaggcagaagaaggaccagaacccagctcccctgactccctatccagtgctcttctcataga

SEQ ID NO: 959174 - DNA, 120 bp, Artificial Sequence
  ENSG00000272970_4 (sequence is synthesized)
ttacattgcttcagcatccacctggctattgctccatccaggggttacaggagtcactgactgttttggttgcttcttggttggaggatgttgtgcctcaccgatgagagccggaagcaa

SEQ ID NO: 959175 - DNA, 120 bp, Artificial Sequence
  ENSG00000272970_5 (sequence is synthesized)
aggtaccagttcttagaggaagcataggaatgtgtcccttcctgctcgggtctctcaactgaactcaacccttccttgattgattgacaagcatgttatctctcataatccctgcccggt

SEQ ID NO: 959176 - DNA, 120 bp, Artificial Sequence
  ENSG00000272970_6 (sequence is synthesized)
aagggctgatgtccccattttacagatgaggatattggagctcagagaagtgaaatgattgctgaaggtcacacagcctggcttcaagcctctcgggctccaaaaggcatcttctgttct

SEQ ID NO: 959177 - DNA, 120 bp, Artificial Sequence
  ENSG00000272970_7 (sequence is synthesized)
tggatgattaactgagattaaaaatgaaaagacacatgaaagaaaggtcctttttttcaacctgacaagaactaagaatgcctctgtattccaggcacccagaccagggtgggctggaaa

SEQ ID NO: 959178 - DNA, 120 bp, Artificial Sequence
  ENSG00000272970_8 (sequence is synthesized)
gccagccagagagaaagcaggagaaagaaagcatgttctaacaggaaggttaaagcaccctgggatgtgagttggggtggagaagtgaagagggcagttctcacaggggcagagcttggt

SEQ ID NO: 959179 - DNA, 120 bp, Artificial Sequence
  ENSG00000272970_9 (sequence is synthesized)
ttggggtaggctaggagctgggaccagaagagggacagggaagggtttattgtgggtccacggcccagctccactgcatgggccatctgacagcgcctgaccgagcagaatgccagggtg

SEQ ID NO: 959180 - DNA, 120 bp, Artificial Sequence
  ENSG00000272970_10 (sequence is synthesized)
taaagaccccactaatacccagtcaatgagaggaacgccagaggagcacccagaatgttcttgtgcagaggcaaagagcaggagtttgtgaccacagctggcagtccatgtcatcctcac

SEQ ID NO: 959181 - DNA, 120 bp, Artificial Sequence
  ENSG00000272970_11 (sequence is synthesized)
tgaacgacctcttagcattccaggtggacaaacatattcacaggtgcccagacaaatgaggtctgcgggagagagacaggctacatcagaggtagactatgtatttacataaagtaggaa

SEQ ID NO: 959182 - DNA, 120 bp, Artificial Sequence
  ENSG00000272970_12 (sequence is synthesized)
taagagtctcagaagccttccaaagcagatgtctgcttaaacctcttgagcggtgccctccttagcctggaaggaaggccttgctcaggtagtctcaacccgcatctgtggtgtgattta

SEQ ID NO: 959183 - DNA, 120 bp, Artificial Sequence
  ENSG00000272970_13 (sequence is synthesized)
acaccttccccttcattccaccacactctatctcaaactatctgttgttctcaaacacacagaacactttcactccaccagctcttccacatgtgattatctttgcatgtacttcatctt

SEQ ID NO: 959184 - DNA, 120 bp, Artificial Sequence
  ENSG00000272970_14 (sequence is synthesized)
tctcatctacagccccacctggcaaactcctactcagccttcaaaaccctgcctaaatgtcactgaatctggaagccttcttcatcttctcagtacacatttgtctgtattcctgatcct

SEQ ID NO: 959185 - DNA, 120 bp, Artificial Sequence
  ENSG00000272970_15 (sequence is synthesized)
ttgtctataactctggtaaatcattgatcctagtgcactgtcaagaacttgtcctattttatctgtagattcccagagcccaatcaagatcctcacatgtagaaagtagtagatcaatta

SEQ ID NO: 959186 - DNA, 120 bp, Artificial Sequence
  ENSG00000272970_16 (sequence is synthesized)
aataaagcaagcacagccagaatggctgggaatttgagagcatgtgccccagaatgattgtacctcagacctggaagaaaatgtggagttgatctaagtaaacctgatgtttgaacgcct

SEQ ID NO: 959187 - DNA, 120 bp, Artificial Sequence
  ENSG00000272970_17 (sequence is synthesized)
ctgccaccacgtaagatgtgccttttaccttccgccatgactgtgaggcctccccagctatatggaactgtgagtctctttttctttatacattacccagtctcaggtatgtctttatta

SEQ ID NO: 959188 - DNA, 120 bp, Artificial Sequence
  ENSG00000272970_18 (sequence is synthesized)
tcagggtgaaaatggactgatacagtaggtgacatgtgtccagcctgcttggttcccaactttgctggatccattctatctgtggacggagccactatctctgaaaggagagatctcatc

SEQ ID NO: 959189 - DNA, 120 bp, Artificial Sequence
  ENSG00000272970_19 (sequence is synthesized)
cgctgtccactggggaatggccttgccctatggcccctaccaaacaaaaacgtagcagaacacagcaaaacagcagagtcggaatgtgaagtgctgatagagttccctaacgctgactgt

SEQ ID NO: 959190 - DNA, 120 bp, Artificial Sequence
  ENSG00000272970_20 (sequence is synthesized)
ctgctctgcatttctggagattgtatgcctgtcatcctgcattccttgctacagccacaagctgtctccaccatcagatgtggcttacctggttcctgagtcaattccatccaggtagga

SEQ ID NO: 959191 - DNA, 120 bp, Artificial Sequence
  ENSG00000272970_21 (sequence is synthesized)
gactctcccatccaaggcatgcagactggggaatgtttcggtgtacaagagatgaaatagggatggagtgccccccacgttctttctgcaagtgcctatttgtgagtgtgtgtatctggg

SEQ ID NO: 959192 - DNA, 120 bp, Artificial Sequence
  ENSG00000272970_22 (sequence is synthesized)
tctttctgcaagtgcctatttgtgagtgtgtgtatctgggattttcagtgctttaccggggctcttgtgcagagtgcacggtgaaggctgcgagggtctcactctgttacccaggctgga

SEQ ID NO: 959193 - DNA, 120 bp, Artificial Sequence
  ENSG00000272970_23 (sequence is synthesized)
tagtgtatgaatcatacctcaaaatttataaaaataaaaaaggattttaaaaaatgaacagccctttaggtatgggaggaggcgaggagtaagaaaggtgaatggactctgcattaccac

SEQ ID NO: 959194 - DNA, 120 bp, Artificial Sequence
  ENSG00000272970_24 (sequence is synthesized)
ttgccgatcgctagatgttaccatgttacagtggaaggaatgcaaacaataatttttcccatttttttttttgttatgtccaccatgtaaccggacacacagaatttttttttttttttt

SEQ ID NO: 959195 - DNA, 120 bp, Artificial Sequence
  ENSG00000272970_25 (sequence is synthesized)
tcagtggctatgtcacagcctcatcacagacctgaaaatggtgggcatgagaggcagacgtgtaatttcctctttactaccgccagtcatgtgattacagccgagctcaggagggccggg

SEQ ID NO: 959196 - DNA, 120 bp, Artificial Sequence
  ENSG00000272970_26 (sequence is synthesized)
tgagcattgcagaaaggctgtagctagataggatccctagagccagagcagggttggggagtgcaactctaggaaaagcttcattttccacacccactccactcccaaacataagctgaa

SEQ ID NO: 959197 - DNA, 120 bp, Artificial Sequence
  ENSG00000272970_27 (sequence is synthesized)
ggtcccagtgaactccgttaaagaagaatgaaaagtctgatgcagctatttaaaaacaggcaggcgtcaagtggccaatggcagtcgagtgcagccggggcagcgctcgggaaaatcatc

SEQ ID NO: 959198 - DNA, 120 bp, Artificial Sequence
  ENSG00000272970_28 (sequence is synthesized)
gtgccacggagctagttcatcacggggccttgctgattccttccccagcacgcctcaacaatcccgctgctctcctgagacccaagccctttcactctttgcttagaagtccagctttgt

SEQ ID NO: 959199 - DNA, 120 bp, Artificial Sequence
  ENSG00000272970_29 (sequence is synthesized)
ttccaaactgttttccctttctcttctccctacagcctcccttgacagggcagctttagtgtccgtgcttcccagaaccagtgctgcatgctcacctgctggactcccccaggatgtata

SEQ ID NO: 959200 - DNA, 120 bp, Artificial Sequence
  ENSG00000272970_30 (sequence is synthesized)
gacatctcataagagtgggggctgcctctgggaagggactggaaaaaggctaaggggaaggagctcgggggctggcaagcccggatgcgacaaagcaccgaggtgggcttgaatatggat

SEQ ID NO: 959201 - DNA, 120 bp, Artificial Sequence
  ENSG00000272970_31 (sequence is synthesized)
ttttctccccagaacatccctgggaatcatttctgtcagatgcttcactggatgtcccttggtctttacagccatctatcctccttctccaacccccacctcgaattgcaacttgctatt

SEQ ID NO: 959202 - DNA, 120 bp, Artificial Sequence
  ENSG00000272970_32 (sequence is synthesized)
tgtatgcctgtcatcctgcattccttgcaaattcatttcactaggtcctattatgatcaccattctgcattggaggaagccgagtaacagagacatgagctacagccacaagctgtctcc

SEQ ID NO: 959203 - DNA, 120 bp, Artificial Sequence
  ENSG00000272973_0 (sequence is synthesized)
tttccccagaggacgggaaaattaggaaagaccgaaagatagacccaccagtcttcggagcgctctcatctgtgcgtcctgggcagagcgagagacttggcggaatgcgggtaggagaac

SEQ ID NO: 959204 - DNA, 120 bp, Artificial Sequence
  ENSG00000272973_1 (sequence is synthesized)
cggtctcgggttgccgccaggggatccattgcgtgagaggcaggtccgacttatgctgggggcacttggagttgaggaaccacagagtccactgaaccggattaatcttttatccctcag

SEQ ID NO: 959205 - DNA, 120 bp, Artificial Sequence
  ENSG00000272973_2 (sequence is synthesized)
ctgcatggaggaatccaggagctggacaaagaccaactgaaactagacttgccaaagatgctatttgtggtcacagaaacatagagctggacatgaccttaagaagtcacctgagcagac

SEQ ID NO: 959206 - DNA, 120 bp, Artificial Sequence
  ENSG00000272973_3 (sequence is synthesized)
actgtgatgggcactgtagtagctctattgctcagacttggtttttgtttgacttttgctgctctgaactttaattcctaaaaacactgcatttttaaggaaaaacacaaaatattagca

SEQ ID NO: 959207 - DNA, 120 bp, Artificial Sequence
  ENSG00000272973_4 (sequence is synthesized)
gttataataaataggtattttattgcatgcttttcgtgcatctattaagatgatcatatgggtattctcctttaatctgttaatgagatcagttacatcaataaactttctaatggtaaa

SEQ ID NO: 959208 - DNA, 120 bp, Artificial Sequence
  ENSG00000272977_0 (sequence is synthesized)
acagtcatgagccaccgcacctggccccaaacttttttttttttaagcaaagaaattgtttcctggataacctcacataaagcatcccagtatgtaaagcagataatagtgttggaagtg

SEQ ID NO: 959209 - DNA, 120 bp, Artificial Sequence
  ENSG00000272977_1 (sequence is synthesized)
tggaagtgacaacctggaattctgtccatggggactcttctccttgtactcccacacacagaaacccttcagcttatgcttccaacgtcagtgtccaaagaaactttagacaaatccagc

SEQ ID NO: 959210 - DNA, 120 bp, Artificial Sequence
  ENSG00000272977_2 (sequence is synthesized)
cccttcattcacagatggagacattattgttagttgtagtaaatgttagctaactaccagtacttacactttaaacgtgcctggcataggagaatgattttatatgtctgatagtatcaa

SEQ ID NO: 959211 - DNA, 120 bp, Artificial Sequence
  ENSG00000272977_3 (sequence is synthesized)
atccccacaactacctgataaactaagtattataatgaccctcattttgcaggtgagtaaacagaagtctagagaggtacaatcacttccgaaagtcacccagctggtaagtggtgaagg

SEQ ID NO: 959212 - DNA, 120 bp, Artificial Sequence
  ENSG00000272977_4 (sequence is synthesized)
cagaattcagagcccagtgtggctgactcaatagcctgtgccatccacccctacatgagttgcccagggaggttagagactgtcccacagtctcataggagctgagcagggacaacgagg

SEQ ID NO: 959213 - DNA, 120 bp, Artificial Sequence
  ENSG00000272977_5 (sequence is synthesized)
tggcctggtgtggagggaaggtcacgggtgtgtggggctggagctctgggtccaagatgttcatcagctgcctgtcctggctggtaagagactgagggtgagtggtcagtgagcatgaga

SEQ ID NO: 959214 - DNA, 120 bp, Artificial Sequence
  ENSG00000272977_6 (sequence is synthesized)
gggggaagggagccttgggagaccacactggagaacctggaactagggagctatagcaggtgtctgagctagagaattaatcctactgttggctgcacatcaatattgggacaataggcc

SEQ ID NO: 959215 - DNA, 120 bp, Artificial Sequence
  ENSG00000272977_7 (sequence is synthesized)
cagatgtgtcattcctaataatcacaatggggcaggatggtgctcaaagcactttactggcatgatcttaatcatcacaaagcctctatgagagaggtgatgtcatgatacccattttac

SEQ ID NO: 959216 - DNA, 120 bp, Artificial Sequence
  ENSG00000272977_8 (sequence is synthesized)
agatgaggtcgctgggggctcagggaagtgaagtgctttgtccagggtcacgtggctgaagagtgggggagctgacacttgaagccaagactggctgactttcaagcccacatgcctctg

SEQ ID NO: 959217 - DNA, 120 bp, Artificial Sequence
  ENSG00000272977_9 (sequence is synthesized)
tcagttaagtgtggtgatggtaatgctgtgtaacaaacaatcccccaaatctctgtgctgtaggacagtaagtgttgatttagctcgcatgtctaatgtgggttggctgagccaggctgg

SEQ ID NO: 959218 - DNA, 120 bp, Artificial Sequence
  ENSG00000272977_10 (sequence is synthesized)
gctcagctgggcagctgtgtgctcatccatgtgtctctcatcctgtcctgggatcagtggactagccttggcatattcccctcctgctcatggcaggagtgcaagggggtgagcagaaac

SEQ ID NO: 959219 - DNA, 120 bp, Artificial Sequence
  ENSG00000272977_11 (sequence is synthesized)
acacaaagtctcttgaggcctagactcaggaccacacagagtcactcctgcctcattctattgaccctagcaagtcacagggccaaacccagggtcaataggtgggaaatggtactctgt

SEQ ID NO: 959220 - DNA, 120 bp, Artificial Sequence
  ENSG00000272977_12 (sequence is synthesized)
tcttttaacgggaggaactgcaaagtcgcttggcaagggtgagaatacaaagaagggtaaagaattggaggcaagttttgcattatatcatattgtctgtgctggtttaaaatatgttca

SEQ ID NO: 959221 - DNA, 120 bp, Artificial Sequence
  ENSG00000272977_13 (sequence is synthesized)
ctaattctacatctcttgagtgtgggctagccttactgactcccttttaatgaatagaacaaagtggaagtgatggtgtgcaacttccaaggcaaggtcataaaagacattgtggctccc

SEQ ID NO: 959222 - DNA, 120 bp, Artificial Sequence
  ENSG00000272977_14 (sequence is synthesized)
tcctcgctctcttgaggatcacccactctagggaagccagctgccatgtcgtggggatattcaagcagcccagtggagagacccatgtggtgaggacctgtgatctccagccagcagctg

SEQ ID NO: 959223 - DNA, 120 bp, Artificial Sequence
  ENSG00000272977_15 (sequence is synthesized)
tgtgagtggcctatcttggaagcagctcctccagccccagttcagtcttcagatgagactgcagctgcagctgacatcctgactgcaacctgatgagagacccagagtcagaactgctca

SEQ ID NO: 959224 - DNA, 120 bp, Artificial Sequence
  ENSG00000272977_16 (sequence is synthesized)
gactaaagttgctcctgaatttctgacccgcaggaactgtgagacaacaactgtttattgttttaagttgccaagttctggggtagatttgcttgcagcaatagatacgaatgctgtgtc

SEQ ID NO: 959225 - DNA, 120 bp, Artificial Sequence
  ENSG00000272977_17 (sequence is synthesized)
taagtattctgccaactcactgctgccatagcaaggcccatcataacaagcgaggcttggatggaagcagctttgtcttctacccagagaaccagcaaaatcccaacaatttaccaagat

SEQ ID NO: 959226 - DNA, 120 bp, Artificial Sequence
  ENSG00000272977_18 (sequence is synthesized)
tagagaaccaaaaatacccatggaaactatagttgttaagaaacatctgtttttgagctgtctaaattgggtagttctcaaaaggaataaaaatgtatcagaggatggggacagctgggt

SEQ ID NO: 959227 - DNA, 120 bp, Artificial Sequence
  ENSG00000272977_19 (sequence is synthesized)
ggggactgatgccaactgcctggcaggctcagctggtcactcgggttccttctcagagctgaggcagggagaaagatccaaataaagatctgatggggcagattagacagagctgcctgt

SEQ ID NO: 959228 - DNA, 120 bp, Artificial Sequence
  ENSG00000272977_20 (sequence is synthesized)
agcaaggcactgagggctgtgtccagctgcaggggcagtacttaagcttactgcacccctactatgtgccaggtgcagggtgggcacctgcatgtgaggaccagggattggggtgttgga

SEQ ID NO: 959229 - DNA, 120 bp, Artificial Sequence
  ENSG00000272977_21 (sequence is synthesized)
agattttggcttttggccaggactaaagggtgagaggtagtatggagaaggaattaaggccctgtggagaggcctgggcttaaatcctggcattgatgtttaccagctctgaggcttgta

SEQ ID NO: 959230 - DNA, 120 bp, Artificial Sequence
  ENSG00000272977_22 (sequence is synthesized)
cgtggccaatcacttaaacactctgggccagtttcctcaactgtaaaacgggcatagtcacagtgcctacttgatccatccttgtgttcctctcaggcttgctttgtaagactcctggac

SEQ ID NO: 959231 - DNA, 120 bp, Artificial Sequence
  ENSG00000272977_23 (sequence is synthesized)
tccttaggttttatcaatcctggtgcccttccattgtatcacatccttggatcacagtgatgggttcaggaatagacacatgacccaagggaggctaatcaggtgaatatagggagatgt

SEQ ID NO: 959232 - DNA, 120 bp, Artificial Sequence
  ENSG00000272977_24 (sequence is synthesized)
tctttctttcttaaggtggctacgtttaggacatgagccagggttgccagtgtcacccatcacatgtaccatatgaataactcttgtctaagatctggcaagagatggtggagcctaatg

SEQ ID NO: 959233 - DNA, 120 bp, Artificial Sequence
  ENSG00000272977_25 (sequence is synthesized)
acattgttaaagatcctggatacagccatacctgaagcgtatccagaattccggctgagtatctgtactagtcaatgttctccaaataatatacacaggcataactcagagatactgtag

SEQ ID NO: 959234 - DNA, 120 bp, Artificial Sequence
  ENSG00000272977_26 (sequence is synthesized)
gtttggttgcaggccacctcaataaaacaaatattgcaataaagtgggtcataggaatttttgatttcccagtgcacgtaaaagttacactatagtgtattaagtgtgcaataccattac

SEQ ID NO: 959235 - DNA, 120 bp, Artificial Sequence
  ENSG00000272977_27 (sequence is synthesized)
atctaaaaaccactgtacataccttaattaaaaatactttattgctagcaatcatctgagccttctgcaaattgtaatctttttgctcgtggagggtcatgccttgatgtttatggctgc

SEQ ID NO: 959236 - DNA, 120 bp, Artificial Sequence
  ENSG00000272977_28 (sequence is synthesized)
tgactcattagggtggtggttgctgaaggttggggtggctgtggcagtttcttaaaatatgacaacaataaagttggccacattgatggactctttcattaaagatttcatggaagcata

SEQ ID NO: 959237 - DNA, 120 bp, Artificial Sequence
  ENSG00000272979_0 (sequence is synthesized)
aaaagagtcgtacacaagcaagctctctagcatgtattcttgtaagggcactaaccccattatgagggccccactctcatgacctctaaacttcattacctcccaaagatcccatctcta

SEQ ID NO: 959238 - DNA, 120 bp, Artificial Sequence
  ENSG00000272979_1 (sequence is synthesized)
aaatgcttcttatctctatctttaataccttcactctctaacacaattggaaacctccccaggggctccatgaaccgtggctgcaggctctcaggtactctatcccaggaccacaaggag

SEQ ID NO: 959239 - DNA, 120 bp, Artificial Sequence
  ENSG00000272979_2 (sequence is synthesized)
ttaatttgatatttccaccaatggagggtatcaggctctcattaagccattgtaaaatggatgtaataaaacaactgttttctaagattactgtaacaataaaaatatttgttaaaacta

SEQ ID NO: 959240 - DNA, 120 bp, Artificial Sequence
  ENSG00000206249_0 (sequence is synthesized)
ccaggtttgaatccagacaggattcacatggtctcctgactccaaagacagtgctgttgggactgtctggggctcctcatctgtccaacccaggaactgcttaccatgccaatcaggaag

SEQ ID NO: 959241 - DNA, 120 bp, Artificial Sequence
  ENSG00000206249_1 (sequence is synthesized)
agggaagccagggaggagttggggaggacggcaaaggcctggacatccacggcagggtagaaggtgataacacagcctgcatcgcgaatccaggagaaaaggatggtcttcccaggaaat

SEQ ID NO: 959242 - DNA, 120 bp, Artificial Sequence
  ENSG00000206249_2 (sequence is synthesized)
ggtgccagaataactcgctattcatatggaagaaaatgaaaatgattccgtatgtcatcccacacattaaaaatccattccagatggattaaggatttaaatataaatgggatgcccgga

SEQ ID NO: 959243 - DNA, 66 bp, Artificial Sequence
  ENSG00000206249_3 (sequence is synthesized)
agaagcattgtgcacctggagagaaaccagatcgccattaacaatcgaacatagaaacatcgggcg

SEQ ID NO: 959244 - DNA, 68 bp, Artificial Sequence
  ENSG00000206249_4 (sequence is synthesized)
aaatacaaaaattagctgggtttggtggctcacacctataatcccagatagtcaggaggctgaggcag

SEQ ID NO: 959245 - DNA, 120 bp, Artificial Sequence
  ENSG00000270190_0 (sequence is synthesized)
cttacttatatatcaaagtttccctcataatgtctgctctgtgtcactatgtaccctcccctgtcctccattccccacaccaagagtattatgagtattaaatgccacgtgggcaggttc

SEQ ID NO: 959246 - DNA, 120 bp, Artificial Sequence
  ENSG00000270190_1 (sequence is synthesized)
cccaggcaatgagggggtgggcctgtcaaatgcaggccatgcagaatgccgcagggcgggagacgggtgagccaagggagccgagagttccagataacagagtgcacagcaaatgccatg

SEQ ID NO: 959247 - DNA, 120 bp, Artificial Sequence
  ENSG00000270190_2 (sequence is synthesized)
gtccagcaaccaggagaaacagaactgctgagctcagaataggccaaggccgcgtctgctagcagggagcaagggcacagcctgctgtctggcctcttctgccccatccctccaccggga

SEQ ID NO: 959248 - DNA, 120 bp, Artificial Sequence
  ENSG00000270190_3 (sequence is synthesized)
catggcccagatgagaaagagctgccagacggcaagtcaagcgtggggcgggagaggacaacgttttatgcaagagtggattctcggagcctctgcactctccatcagggctgctggcat

SEQ ID NO: 959249 - DNA, 120 bp, Artificial Sequence
  ENSG00000270190_4 (sequence is synthesized)
ggaaaacacagagaaaccatcacctaggacttgattgaactactggacttcccagaagagtccaatttaaagcaaagaggtccagagaaaaaagcattctagtgacatttttatatattt

SEQ ID NO: 959250 - DNA, 120 bp, Artificial Sequence
  ENSG00000270195_0 (sequence is synthesized)
acccggaacccggaacccggaaggcgcggcctgtggcgggtactgactgcttcccacggtcccgtggccgctgcaggccccgtacgcgccgtctattgttttgagccgcttaaagttttg

SEQ ID NO: 959251 - DNA, 120 bp, Artificial Sequence
  ENSG00000270195_1 (sequence is synthesized)
gagtaaccttttaggtcgcaacagttgacaactacactgagtctttccggtcccactgccctggccgttgaccgcacaccggccaccgactgagccgctagtttcggttgccgctgcctc

SEQ ID NO: 959252 - DNA, 120 bp, Artificial Sequence
  ENSG00000270195_2 (sequence is synthesized)
cctgcccgtccatgacgtcctccactgtgtcgccggtgcatgacgctcccaccctctgcctggagttgactgggtttgtatcctgaagaatccctggctcagcaggtaggttccacctgg

SEQ ID NO: 959253 - DNA, 120 bp, Artificial Sequence
  ENSG00000270195_3 (sequence is synthesized)
aactagaaccccaacgggtgcactacacctgagaacaggttcccacagcttcctgttggggacaacgtgagggatgcaggggagagtggaaccagccaaaagagtgggcagtggggtcag

SEQ ID NO: 959254 - DNA, 120 bp, Artificial Sequence
  ENSG00000270195_4 (sequence is synthesized)
gtccaggaggctgagccccagggatgcttgggatccctctaaggccttacacctctgggagggccggacttttgcacctgctgccctcaggactgtgccttggtgcgtccaccgccccct

SEQ ID NO: 959255 - DNA, 120 bp, Artificial Sequence
  ENSG00000270195_5 (sequence is synthesized)
tttgaactcaaaaaagtcatcctcagactaggacggacacatcctgtccccttcctccccaggccctgggcatcccataaccctcaacactgtaaactaaaaataaaatcctggcagggc

SEQ ID NO: 959256 - DNA, 120 bp, Artificial Sequence
  ENSG00000270195_6 (sequence is synthesized)
caggctgctgtcttggctgccctaggtgctcggctggcaattcctgggccaccctgacccacagtgaggtcagtagagacagcctggtgtcctcacaggacgcagctgcaaacataagtg

SEQ ID NO: 959257 - DNA, 120 bp, Artificial Sequence
  ENSG00000270195_7 (sequence is synthesized)
aaccggaaaggctgctcactccttggctacccatgtgtccccacatcagttcctgcatctggaagcagccgcagtggcgaccacacagtgacttcccccaggacgtgtctctgcccctcc

SEQ ID NO: 959258 - DNA, 120 bp, Artificial Sequence
  ENSG00000270195_8 (sequence is synthesized)
caccctgctcctgcagagggccctgggtcaggggttctcaagaccccagagtccctaaccagaaatcagaggggaaggttcctactgtacccgcctcccaaccaatgggtttttcctcct

SEQ ID NO: 959259 - DNA, 120 bp, Artificial Sequence
  ENSG00000270195_9 (sequence is synthesized)
tattctgaacaaagcacgccacgcacgcaattccacctctaaggtggcttctccaatacccacaggccattctccaactatgacaaaagtttggttttaatatcgggcaacacaaaacac

SEQ ID NO: 959260 - DNA, 120 bp, Artificial Sequence
  ENSG00000270194_0 (sequence is synthesized)
cagcagcctgacccaggatggctctactccccagccttcaatccctggacctgggtttggaattaggagacttccgtcgagggtcaattgtgcgggatcctggccattccatacaaaatc

SEQ ID NO: 959261 - DNA, 120 bp, Artificial Sequence
  ENSG00000270194_1 (sequence is synthesized)
tcacgactggcaaaagagagggggacccctcgagcagaggtcagatatcacaagggacccgggtttttccaccccgccctcattcccagcgtggggtctcagatgagtgggaaaacctca

SEQ ID NO: 959262 - DNA, 120 bp, Artificial Sequence
  ENSG00000270194_2 (sequence is synthesized)
aatatggatcagaaatcatgcaagttcggactctggccttaggagaaaactcttaacggagatggaatgtcacgagggatccagccacccccatccactcattgactggatgaagttttg

SEQ ID NO: 959263 - DNA, 120 bp, Artificial Sequence
  ENSG00000270194_3 (sequence is synthesized)
cgatgggaaaatccaggtcaggagttacggacgacctgcaccgcccggagctccttctgggtccggagtttgggaaaagtgcgggttaggggttaaaggtcacggaagaacttccccact

SEQ ID NO: 959264 - DNA, 120 bp, Artificial Sequence
  ENSG00000270194_4 (sequence is synthesized)
ccccccgcctctttcgtccgcgggccggttcaagaggtattcggaaccaggggaggagagcggcggccatcgtacctgagcaggagccagcgcctgctggagctgctgctgctcctcgct

SEQ ID NO: 959265 - DNA, 120 bp, Artificial Sequence
  ENSG00000270194_5 (sequence is synthesized)
gatcttttgcttcagtttcttgaacatggcgcagcgtacgtacggtcctgagtgtcaacgaaacctgaagggcgagagcccggggagtcccggccgcgacggctacggcgacttctttac

SEQ ID NO: 959266 - DNA, 120 bp, Artificial Sequence
  ENSG00000270194_6 (sequence is synthesized)
accagggacagcgggggccgggcctcgccgtctcctccttgaggctgtgggcaagtccggacactcgtcctgagggtgtcggcgtcgccgccgccgcgtctctttcttccgggtgccact

SEQ ID NO: 959267 - DNA, 120 bp, Artificial Sequence
  ENSG00000270194_7 (sequence is synthesized)
ggctggcctcggccccccatccagccccgggagccgcggcggcgacgacaacggcagcaggtgaactgtgcgccaagggcgcttgcgcggcctacgtggagctcacagaggctaactacg

SEQ ID NO: 959268 - DNA, 120 bp, Artificial Sequence
  ENSG00000270194_8 (sequence is synthesized)
gagcaccggatgggacaagcacaatgtcgggtcccgcacatgcgcgctcggccggtcgcttccgaactcgctgcactggaggacgcaaggttcggtcctgcctgatttcgttgcgtgcgg

SEQ ID NO: 959269 - DNA, 120 bp, Artificial Sequence
  ENSG00000270194_9 (sequence is synthesized)
cgatggcagcagggccgacgggcccaccgcaaagaacacagggatgagcgtcaaggatgggagaaggggagatccagagaacctgacgcgggccctaattgatagtgttcttttctttag

SEQ ID NO: 959270 - DNA, 120 bp, Artificial Sequence
  ENSG00000270194_10 (sequence is synthesized)
tagctgtagctaggattctgtgtcttcggtgccagaggggcccgcttcccttccctgaactcttccagcgtcgggaagtccctgataccaggcgccaggggtccaaatgttttatgccaa

SEQ ID NO: 959271 - DNA, 120 bp, Artificial Sequence
  ENSG00000270194_11 (sequence is synthesized)
tactgtaaaacctcaagtgtttggacacctgctttattcttttcttcaccgaaatcgtgtatttcacgaattcattcaaaaacctttatcaggccttggagatgttaaaagaatttacag

SEQ ID NO: 959272 - DNA, 120 bp, Artificial Sequence
  ENSG00000270194_12 (sequence is synthesized)
cctagtggaagacacagattcctaattagtccaaatttactcctaacacctgcaatcatcctacaagatcttaatgtttatgtgcctcatttatctaaaaccctgaactttggctgcctg

SEQ ID NO: 959273 - DNA, 120 bp, Artificial Sequence
  ENSG00000270194_13 (sequence is synthesized)
tgaatcctcaggtccatttcagcaacccacttttgcatgctgtacctttgatatcatctgaaactgcttacattgtctccggtatcagaatctaacagtatatgctgatctccacgttct

SEQ ID NO: 959274 - DNA, 120 bp, Artificial Sequence
  ENSG00000270194_14 (sequence is synthesized)
agcaaattttgtttaccagcaataataggagcaacctgctctcgagagtccatattctgatccctaaatgtattagagccacagtggggcctggaacactgccttaacacctgggctaag

SEQ ID NO: 959275 - DNA, 120 bp, Artificial Sequence
  ENSG00000270194_15 (sequence is synthesized)
tcctcttatatctcgtagtgaacaccttatgtatgtaaggtgtccccagcccccgggccacaaacgggtaccagcccatggcctgttaggaaccgggctacacagcaagaagtgaatctc

SEQ ID NO: 959276 - DNA, 120 bp, Artificial Sequence
  ENSG00000270194_16 (sequence is synthesized)
tggcaagccagggaagcttaatctgtatttacagctgctccccatggttcacattatcgtctgagctccacctcctgtcagatcagctgtggcatgagattctcataggagctggaacta

SEQ ID NO: 959277 - DNA, 70 bp, Artificial Sequence
  ENSG00000270194_17 (sequence is synthesized)
gatcagctgtggcatgagattctcataggagctggaactactgtgaactaggcatgagagggatctaggt

SEQ ID NO: 959278 - DNA, 120 bp, Artificial Sequence
  ENSG00000270194_18 (sequence is synthesized)
cagggctcccaccgattctacattatggtgagttgtgtaattgtttcattatatattacaatgcaataataatagaaataaagggcacaataaatataatgcacttgaatcgtccaaaac

SEQ ID NO: 959279 - DNA, 120 bp, Artificial Sequence
  ENSG00000234255_0 (sequence is synthesized)
aggtacagtcatcaagatctagatgactaattgcatgtagggggtaaaaaagtaggaagaagagaggatgatgactcctgcatttctggcttgggaaagtggttagattgtgggctggat

SEQ ID NO: 959280 - DNA, 120 bp, Artificial Sequence
  ENSG00000234255_1 (sequence is synthesized)
gtgtgcatgattatgtgtgtgtagctgaaaaggcaatttagctttgcaactgttgaagtgaatatggaccatagacatagatatccctaggtagctgaatatgtagcctgcaaatcagga

SEQ ID NO: 959281 - DNA, 120 bp, Artificial Sequence
  ENSG00000234255_2 (sequence is synthesized)
gaaaattctaggtgaagatggtaattgcgaatcatcagagtctatatgaggcaggcagtccaaggctgatgcccaaagaagccatcaagacccgtgctacttccagctccttctgtcctc

SEQ ID NO: 959282 - DNA, 120 bp, Artificial Sequence
  ENSG00000234255_3 (sequence is synthesized)
gattgctccacatccagggtggaatgcaatggtatgaacacaaggctcactacaacctctacctcctgggctcaagcgatcctctcaccacagcctcctgagtagctaggactacagcac

SEQ ID NO: 959283 - DNA, 120 bp, Artificial Sequence
  ENSG00000234255_4 (sequence is synthesized)
ctaacaccagtactcagttaaattttttgctgaataaatcaatgaatggagaggtaaagaggaaccagaagttggggttacagaagtcactgatggaagagtttcaagatagtagaagtg

SEQ ID NO: 959284 - DNA, 120 bp, Artificial Sequence
  ENSG00000234255_5 (sequence is synthesized)
gtcagccctgttaagtgacaagccaaggactgaagaaagactggcagatttggcaatcagatgaagtgacctgaccaaagagcagcttgtgtgaagtagtgaggacaggcgctggtctgc

SEQ ID NO: 959285 - DNA, 120 bp, Artificial Sequence
  ENSG00000234255_6 (sequence is synthesized)
ggggggaattaccattagcagttgaagtggtaggaaatttttacataggagagtatggtgatcatatttgcattttagaaaataatggatagcagtttgttaggggaacaaaggacagag

SEQ ID NO: 959286 - DNA, 84 bp, Artificial Sequence
  ENSG00000234255_7 (sequence is synthesized)
tcccctgctttgcatggccggctaatttttttttgtattttagtacagatggggtttaaccatgttggccaggatgatcttgat

SEQ ID NO: 959287 - DNA, 120 bp, Artificial Sequence
  ENSG00000234255_8 (sequence is synthesized)
tttttctaatgcatttgccccagctatctgtatagcctgcaatctggtagatggaccacagggaaaccactgcagcaaactaaaagtgtctatctcagatccttccaccaccatcatttc

SEQ ID NO: 959288 - DNA, 120 bp, Artificial Sequence
  ENSG00000234255_9 (sequence is synthesized)
caaaatcaccgtcactatctccaccaccatcacctttaccaccatcaccactatcatcctcatccttcccatcaccatctccactgctatctctcaacaccatcatcatcaccaccacca

SEQ ID NO: 959289 - DNA, 120 bp, Artificial Sequence
  ENSG00000234255_10 (sequence is synthesized)
ccatcatcaccatgagcaccacctctgtcgtcatcaaaaaagcacacagttcaggctggcctgttggaggataacagatcatgtggagcagagacgagctggcccacctcaggccctacc

SEQ ID NO: 959290 - DNA, 120 bp, Artificial Sequence
  ENSG00000234255_11 (sequence is synthesized)
agagcaatcagcttgccaaacacgacatacatcagcgaggccatcctagaccatccagccctagctgagccagcccagaccagagactcatgagaaacagtaaaatgttcatcattttaa

SEQ ID NO: 959291 - DNA, 120 bp, Artificial Sequence
  ENSG00000234255_12 (sequence is synthesized)
aacacatttggcctgctacctgaattttttaaatcggctcaccaaaaaatatcaggcttattgaaatattggaatatctgatgaagtttcctcttatctttgagctgtttgggtttgggt

SEQ ID NO: 959292 - DNA, 120 bp, Artificial Sequence
  ENSG00000234255_13 (sequence is synthesized)
aaaatttcaatgcttaaaattcacgtctacaactagcaggcagaaccttaaagtccagaaccattaaagggtttaataatggtgaggcatatgatgatgctgatgatgataatgtttctt

SEQ ID NO: 959293 - DNA, 120 bp, Artificial Sequence
  ENSG00000234255_14 (sequence is synthesized)
tctttcttttgtgatcttaatcactgtgtgatcttaactagtttgaaatgagaatttcaatggagacagtagtgtaaatttaccaacagaacaattacagtcgtgacaaaacaaaaacta

SEQ ID NO: 959294 - DNA, 120 bp, Artificial Sequence
  ENSG00000234255_15 (sequence is synthesized)
aaccaaaagcagctgcctgtgaaggagattgaggagtcaagccacacaaactcaaaactgtaaacatcattgggagccttagacagtctagctcagttggagttggatttgactatatgt

SEQ ID NO: 959295 - DNA, 120 bp, Artificial Sequence
  ENSG00000234255_16 (sequence is synthesized)
aacagaaacccaactacagtgtactaacagacttcttattcagaggcaggcagtccaaggctgatgcccaaagaagccatcaagacccgtgctacttccagctccttctgtcctcataat

SEQ ID NO: 959296 - DNA, 120 bp, Artificial Sequence
  ENSG00000234255_17 (sequence is synthesized)
catagatgattgctccacatccaggtattaagctcttattccaagcaggaaggggaaggacaaagggcaaaaggcatttgccaagtctctccctttttatgaggaaaaacaatcattttc

SEQ ID NO: 959297 - DNA, 120 bp, Artificial Sequence
  ENSG00000234255_18 (sequence is synthesized)
aaacattaataaaaaataccagtgacagatgatgaggcacctacctgatgggaatggagaagaggagatggattcagaaactacttaggagaggcaggcagtccaaggctgatgcccaaa

SEQ ID NO: 959298 - DNA, 120 bp, Artificial Sequence
  ENSG00000234255_19 (sequence is synthesized)
ccaagattgggtatatgaatatatcactgcatgagtaccagggcaaaatgagtatttttttaaactttttgctttggaataatttcaaatggacaaaatttgcaaaagtagtacaaagaa

SEQ ID NO: 959299 - DNA, 120 bp, Artificial Sequence
  ENSG00000274630_0 (sequence is synthesized)
atatgaagcttctttgtgtggactgaaggggtgttagcctgtggatgttggtcttcggtgcctgtaccccagtggctgtttacattccaggcccctgctaaataaagcaggctccactgc

SEQ ID NO: 959300 - DNA, 120 bp, Artificial Sequence
  ENSG00000231150_0 (sequence is synthesized)
ctttcaagggcctgtgcctgtggtaactgtctatgagccaggtatatctgaagcatatttgacaacagaaaaagttaatgtaattttcaaaggaaaaacgccaacttttttcaaaaaggc

SEQ ID NO: 959301 - DNA, 120 bp, Artificial Sequence
  ENSG00000231150_1 (sequence is synthesized)
cctcaatgagaaggggtcggcccaaggaaaggctgtcctccaagtgtgtgcgaaaatatttatggttcagagatgtcacctaaacagaaagaactcattggtctatctgtgttacaaaga

SEQ ID NO: 959302 - DNA, 120 bp, Artificial Sequence
  ENSG00000231150_2 (sequence is synthesized)
atgtgcccattgctaagggaaaccgagagatttgttggacaggtaatcaagaattttaagggcaatagaagaagacttacttaaaaaaattaaagtaacatacaaaaattaatttctaaa

SEQ ID NO: 959303 - DNA, 120 bp, Artificial Sequence
  ENSG00000231150_3 (sequence is synthesized)
atatctgaagcatatttgacaacagaaaaagttaatgtaattttcaaaggaaaaacgccaacttttttcaaaaaggaaacagcaactggagagcagatttgcaaaccagaaaagcaactc

SEQ ID NO: 959304 - DNA, 120 bp, Artificial Sequence
  ENSG00000231150_4 (sequence is synthesized)
atgaatacaaattgcctggaaagcatttattacaacagaagctctgcaagatataccggaaattgacagtggcatcgaattcccagcaaggaagttttctaaggacaccaacagacacca

SEQ ID NO: 959305 - DNA, 120 bp, Artificial Sequence
  ENSG00000231150_5 (sequence is synthesized)
gcagaagacagccttgcatttacaacaaaccattgatccacaacaaaccattgatccacactttcaaaatcattgaggtgaagcatagagaactggagtggagacggctctggcaaatcc

SEQ ID NO: 959306 - DNA, 120 bp, Artificial Sequence
  ENSG00000231150_6 (sequence is synthesized)
ccacagtgctgaaccacagctgagatgtaaaatatttcacaaaatcttcttcaccctctatagtatttcacctgagagtgcatgatttaagttgcaagcactgtcatagatgatgggatt

SEQ ID NO: 959307 - DNA, 120 bp, Artificial Sequence
  ENSG00000231150_7 (sequence is synthesized)
cagagatgaacacatggaaatggactttatgttctctaatgtcacaaagaaagagtgattatgaagaagacccagattcccacctattaatctgagctttgaattctttactttgctggg

SEQ ID NO: 959308 - DNA, 120 bp, Artificial Sequence
  ENSG00000231150_8 (sequence is synthesized)
tccaccggattttttctccactcagcccatcgatgagagtggaggcggcctgcatctttttccggcacgtatcagcgtcattaagcaaatcctgcagccataatgggagaatgtctcaaa

SEQ ID NO: 959309 - DNA, 120 bp, Artificial Sequence
  ENSG00000231150_9 (sequence is synthesized)
tgaagcccatgagccactagaagccacatgttctgccatgtggagaagaatgagagagtacatcctcaaattgaggtgtggcatgatgatttggctgcccagaggagaacctgtctttcc

SEQ ID NO: 959310 - DNA, 120 bp, Artificial Sequence
  ENSG00000276900_0 (sequence is synthesized)
acacggatttttccggtgaccggggcgtggccacgcttcggactccacaaggaaagaagagagccccctttggggcggagccactgagggctgcgcggaagaggctgggtgtgataaact

SEQ ID NO: 959311 - DNA, 120 bp, Artificial Sequence
  ENSG00000276900_1 (sequence is synthesized)
ataaagaggccctaaactcggatgcaacgtgacgggagttgtagttctttcacctggcgggcgtctgctccggttcagctgcaggaggtttcttgggagttcagcccagcgcgcagcccc

SEQ ID NO: 959312 - DNA, 120 bp, Artificial Sequence
  ENSG00000276900_2 (sequence is synthesized)
gccgcgacgccgcgagccgagaactctcctggggcgaagggagcgctgagaagtcgctactcttactaaaaggatgcgttggatgctgggccatacccttggcgatgcacactggagacc

SEQ ID NO: 959313 - DNA, 120 bp, Artificial Sequence
  ENSG00000276900_3 (sequence is synthesized)
cgctcggatacggactccattaacatcaaacggagcgtgttagaggatccgagtttactgagcactttctaggaagcgtgcactgagctacgtgctttctaggccttagttcaatactta

SEQ ID NO: 959314 - DNA, 120 bp, Artificial Sequence
  ENSG00000276900_4 (sequence is synthesized)
accatattcattataatccggtgaaatcgtaattatttagccttattttacagatgaggacactgcgtaccaacaagtaacctcactaagaatttcgtcatggaggagaagggaacctgt

SEQ ID NO: 959315 - DNA, 120 bp, Artificial Sequence
  ENSG00000276900_5 (sequence is synthesized)
attcaaattaggaaggatcctgaagaaagggcacctttaggtggaattttatctttggttctgctgcagagtacttgctgctttttagtgctccctccacccccctcattcttccttgta

SEQ ID NO: 959316 - DNA, 120 bp, Artificial Sequence
  ENSG00000276900_6 (sequence is synthesized)
gattagtctgttgtttgtatgctgagttccttttttaagctccttgaaagttggaacccactgctgttgcctgttcaggatgctacacattgaatcaacatggatttattaagcgctgaa

SEQ ID NO: 959317 - DNA, 120 bp, Artificial Sequence
  ENSG00000276900_7 (sequence is synthesized)
cgagggctagggatcgtgctgggtgctgaggattgagtggcgaacacttgggtcagacaagtaaaagggcaattagaataactgttaaatgcttagatggggttagttctatggaagcac

SEQ ID NO: 959318 - DNA, 120 bp, Artificial Sequence
  ENSG00000276900_8 (sequence is synthesized)
gtttgggatggctacactggagagtgatcaagagtgagtgtagggcaggggttggccgactttttccataaagtgctctgaaagttgcagattccaggagaagtaactattgtcagaccc

SEQ ID NO: 959319 - DNA, 120 bp, Artificial Sequence
  ENSG00000276900_9 (sequence is synthesized)
attgtcagacccagacaaattggagcctagagaccagaaaggaaggaaactcatgcttgtatgtctgagataagaactgtctcaaggccagacgcggtggctcacacctgtaatcctagt

SEQ ID NO: 959320 - DNA, 120 bp, Artificial Sequence
  ENSG00000276900_10 (sequence is synthesized)
aaaaaaaaaaaaaagaaagaacgaactgcctcaaggactttaaaaaataaaccaaaaaacccacaatttcttcacatctttcatgcatttaatgttttgcacaacttgcttgttttgcaa

SEQ ID NO: 959321 - DNA, 120 bp, Artificial Sequence
  ENSG00000276900_11 (sequence is synthesized)
atatgcgcacatttctatgacaagatttattgctaaatattctttaaaactgcagcagttcagataagatactgtcgaaaggacgtttggcccagcagcaggacctccaccaatgaacgg

SEQ ID NO: 959322 - DNA, 120 bp, Artificial Sequence
  ENSG00000276900_12 (sequence is synthesized)
actccaattcttgatttgagccttgggaaccaatcaacttagtttccaagagtttatgtgaacttccctcctttaccagtaaaatcttccccctattcttcccttctccagacccgtggc

SEQ ID NO: 959323 - DNA, 120 bp, Artificial Sequence
  ENSG00000276900_13 (sequence is synthesized)
ttgccatagctgtacatcttggattataattctttttgttcactcccaaagaaactcagtatctttggagaattctttctttgttgtcttttagcttcccagagccaaacaagaaatatt

SEQ ID NO: 959324 - DNA, 120 bp, Artificial Sequence
  ENSG00000276900_14 (sequence is synthesized)
ttaggttttgtgggtcatgctggcttggtcacagctattcaacttgtatcttaaaattagccatagacagtatgaatgggtgggtctctgttccaataaaaccttatcctaaacactgaa

SEQ ID NO: 959325 - DNA, 120 bp, Artificial Sequence
  ENSG00000273367_0 (sequence is synthesized)
tgcgtcatttttacatcatgttattcacgtttcctatatccttaacttttctcttgctagtcttaacgattagtgagaaagtcctgttaaaattacccaatatgaccaggcatttttttt

SEQ ID NO: 959326 - DNA, 120 bp, Artificial Sequence
  ENSG00000273367_1 (sequence is synthesized)
ctttgtaattctgtcacttcactttgtttcatatgtatttttcattaggtacttataaattttaaatttaaaacacatttcctttttagactcagaagtcatctaagactctttcctttc

SEQ ID NO: 959327 - DNA, 120 bp, Artificial Sequence
  ENSG00000273367_2 (sequence is synthesized)
tttaaaagatatctatatgtaaactgacgtcaatagacatgatgtaaaagaagggggtggctctggtaaagctaaagtaactccactatgagagtgcattaactatgggggaaatacttt

SEQ ID NO: 959328 - DNA, 120 bp, Artificial Sequence
  ENSG00000273367_3 (sequence is synthesized)
ctatattgcagaacacatatttggtggtacgtagcctcacatcgccacccggaaaagtctgcatatattgaatttggaatggatcaaactgcactgagtgcaaaattgtaaattgcatct

SEQ ID NO: 959329 - DNA, 120 bp, Artificial Sequence
  ENSG00000273367_4 (sequence is synthesized)
tatataaatgttttagaactagatgatggagcagatgggatctattaagagaacggggtgccagatgactgaccataaacatgctttttaataaagactctgctgagagattaactcata

SEQ ID NO: 959330 - DNA, 120 bp, Artificial Sequence
  ENSG00000273365_0 (sequence is synthesized)
agcctttcaaggaacatggagaagttaacgtgaggatgtcagaacaagaacacagagggtcccttggtccctaatactttgggggccaccatattatccctggactgcttagcatggacc

SEQ ID NO: 959331 - DNA, 120 bp, Artificial Sequence
  ENSG00000273365_1 (sequence is synthesized)
gttatataatagagaaataaatttatttcctgtatttgccattgctatttttgccttcgataatgcagctgatctgaaaactaattaattcagagataaaaagagaacgtacgttctgac

SEQ ID NO: 959332 - DNA, 120 bp, Artificial Sequence
  ENSG00000273365_2 (sequence is synthesized)
taatcatggtgaatagtctctgttctgttctttattaaaaagcatggatttctctgttgtgatgtcttcctatttaaggtaaaaagataaggtctttcttctttttttctctttttaaat

SEQ ID NO: 959333 - DNA, 120 bp, Artificial Sequence
  ENSG00000273365_3 (sequence is synthesized)
tttaaatttcaatatcttttgaggtacaagtggtttttggttacatggatgaggtctgtagcagtgaattctgagattttagtgtacccattacccaagcagtgtacactgtacccaata

SEQ ID NO: 959334 - DNA, 120 bp, Artificial Sequence
  ENSG00000273365_4 (sequence is synthesized)
tcatccctctcccaaccttccctctgggtcctcaaagtccattatatcactctgtatgtctttgcatcctcatagcttagctgaatcaagatatattttaaaggcaaaaatgttaacact

SEQ ID NO: 959335 - DNA, 120 bp, Artificial Sequence
  ENSG00000273365_5 (sequence is synthesized)
tgataatggattggatatgtggcatttagagattggataggttgggattttttaaacgttctgaattgtaatttatgttagaaattgtccaaagcactttcattaaacttctgatttctc

SEQ ID NO: 959336 - DNA, 120 bp, Artificial Sequence
  ENSG00000273363_0 (sequence is synthesized)
ggagaaagcagcccgactcagccccgagaggttcggtgtgcgggcagcggccagggactttgcggggtagcgcggactcctggacttccaacaagggccgctgcgcaggcgctgcaatca

SEQ ID NO: 959337 - DNA, 120 bp, Artificial Sequence
  ENSG00000273363_1 (sequence is synthesized)
ctgcaggcacttgtctgcatgcctggtggggcttggagtctggggaggcttatcagtaaagcccagagcatttgctatttattgctcaaggggcacctttgtacagtctggccgtttgct

SEQ ID NO: 959338 - DNA, 120 bp, Artificial Sequence
  ENSG00000273363_2 (sequence is synthesized)
tctttctctcccagtcactgcctcctggacgaatatttgccagcacggaggcagagaggacagaaaaccacaagccatttggggaactgggaacagttcagtgtttctggggtgtggggg

SEQ ID NO: 959339 - DNA, 120 bp, Artificial Sequence
  ENSG00000273363_3 (sequence is synthesized)
tgtcaaggtgggggatggggttgatggaaaacatttgcaatttctgctttacctcacgattcccagctctgacctctggacctgttctctcccacccctaacataaatcattttagtttc

SEQ ID NO: 959340 - DNA, 120 bp, Artificial Sequence
  ENSG00000273362_0 (sequence is synthesized)
agtaggcggcacccgcggggagacaggtgtcggcgcagcctgggaggctcaggtgctacctttgccgggtggggtttgtgaggagtgagctcttcgtccccggaggcgagcaaatctgtc

SEQ ID NO: 959341 - DNA, 77 bp, Artificial Sequence
  ENSG00000273362_1 (sequence is synthesized)
aggagtgagctcttcgtccccggaggcgagcaaatctgtcggtggctcatcacagagcgctgttttggaaagcgttc

SEQ ID NO: 959342 - DNA, 120 bp, Artificial Sequence
  ENSG00000273362_2 (sequence is synthesized)
gctgctccgtgccaggaggaggaagagacacctagagcctgcgacaccatgacttgcctcactgcgggtgggtggcagcgacggagactgcagtgcaccagagcagtaggagagcggccg

SEQ ID NO: 959343 - DNA, 120 bp, Artificial Sequence
  ENSG00000273361_0 (sequence is synthesized)
cacgtctacccgccgcgcacgggccaccgcgcgttcccgcctgaagttttcgtacgcgctgttcctttcgcgtagccaaattccaccgacctcgaggaaatgccaccttctccaggggcc

SEQ ID NO: 959344 - DNA, 120 bp, Artificial Sequence
  ENSG00000273361_1 (sequence is synthesized)
gggcccaaagcccgaccgtgggggacctcaaaccagaggccctcaaggcccgttccacccggcctgtggcgcagtgctgggcacttgggaacggaggtccctgtcttctcgctgcaagcc

SEQ ID NO: 959345 - DNA, 120 bp, Artificial Sequence
  ENSG00000273361_2 (sequence is synthesized)
cctccgtggtgcgcgccgtgggtctgcgggttggtctttttcctcgtttatgaagttcttttcactcgtcgttactattttgtaagttcaccatttaaaaattaataatgccaagcccga

SEQ ID NO: 959346 - DNA, 120 bp, Artificial Sequence
  ENSG00000273360_0 (sequence is synthesized)
atttctgctctcaaacagtttaaaagatccctgtgcagaaaaagacgtatttagaacattttggttggtgatatgtaacaaacttgagatcttataggataggagaacactaggacacta

SEQ ID NO: 959347 - DNA, 120 bp, Artificial Sequence
  ENSG00000273360_1 (sequence is synthesized)
attaggaactggtcccaggaacaaagaccttctggactcatctgacaagataagaatcatcaagcattcttccagcagaaagtgacaaagccctccttgagctgctcatgagaattcaca

SEQ ID NO: 959348 - DNA, 120 bp, Artificial Sequence
  ENSG00000273360_2 (sequence is synthesized)
gggtctgggcattaccagataaaagatgcctattttattctggctgaaagcatgaacagaataaacaatgagctctgtgaagaatgttctatgaacccgaatcaaactcaaactcctgtg

SEQ ID NO: 959349 - DNA, 120 bp, Artificial Sequence
  ENSG00000273360_3 (sequence is synthesized)
tcactccggtacgcctgatcactggatataaccacgtattggtccagaacctccctctctgttactactccctttggatttatccagtagtcttagacgtcaccagggccaagccatgca

SEQ ID NO: 959350 - DNA, 120 bp, Artificial Sequence
  ENSG00000273369_0 (sequence is synthesized)
aaatattacacttcctgagagattacctttattactctttactctttactaaatgtctactttctaccgcattacactccccaaagagatatgtttccatcaaaatattacatatacagt

SEQ ID NO: 959351 - DNA, 120 bp, Artificial Sequence
  ENSG00000273369_1 (sequence is synthesized)
aaggaaaataagctggtgaacctgacaaagaaaatggtttattgaagacaaatatcatgccttcccaatgttcccagcagctgggaggcttcggacaatactatatattattaatggatc

SEQ ID NO: 959352 - DNA, 120 bp, Artificial Sequence
  ENSG00000273369_2 (sequence is synthesized)
attttcagattcatgagttgggtttctgtttaactttctattaccaatgacaactctatgtttaaataaatgctatgacactcataaaatgccattaataaatgagacctttggatttcc

SEQ ID NO: 959353 - DNA, 120 bp, Artificial Sequence
  ENSG00000273368_0 (sequence is synthesized)
ttcaaacactggaaaattgcttgacattttattgggaggcattgtcaattattagctaagattgttttgtcttctgaagaattggccctctataaaaaaatagttgtggaaggtgggctt

SEQ ID NO: 959354 - DNA, 120 bp, Artificial Sequence
  ENSG00000273368_1 (sequence is synthesized)
ttaacagaaaatgtaaagtctgttcagttcatactaattagtacatggaattatttaacatataggcaataatggctaaaaactgacatgaccatcagctttattttaggatgttttaca

SEQ ID NO: 959355 - DNA, 120 bp, Artificial Sequence
  ENSG00000273368_2 (sequence is synthesized)
catgtatattaattcatttggcctttacctggactaatatcatctgaaaccttcttttctttgaaacattttatgaaatgtatacacttatttttactttattatgtaagcaaagcaatt

SEQ ID NO: 959356 - DNA, 120 bp, Artificial Sequence
  ENSG00000273368_3 (sequence is synthesized)
ttttattttccgtcccacaaattatgtgttcctttaaagatttgacattttgatgcagcaaatgttaagaaaaggtgtgagataaatgtctacaaaataaatgttttatacagaaccacg

SEQ ID NO: 959357 - DNA, 120 bp, Artificial Sequence
  ENSG00000226291_0 (sequence is synthesized)
ctgagagccgcttggcctgggccctgcacctcgtcccactctgcatgaactgcctttgcgggtggccaggcctggctatgaccgcacgggagagcagggcggaccccgcgaacggggaca

SEQ ID NO: 959358 - DNA, 120 bp, Artificial Sequence
  ENSG00000226291_1 (sequence is synthesized)
ctgcagctgacagccgccgggaggggacatctggacagcctcacgcagctttcagacctgcagtccatgttaaaaggatcttgtttccaatttgccttaattaaacaaacattccaaacc

SEQ ID NO: 959359 - DNA, 120 bp, Artificial Sequence
  ENSG00000254846_0 (sequence is synthesized)
tcatttccttcacaatacacatgagcctagaaagggagagagagaaaaaatcaacattagtataggttcagccctgacatcctaaatgaggctctaaattttcttatggctcaagtcatc

SEQ ID NO: 959360 - DNA, 120 bp, Artificial Sequence
  ENSG00000254846_1 (sequence is synthesized)
tggtggctcatgcctgcaatcccagcatttcgggaggctaaggtgggcagatcacttgaggcctgcttatctgttttacttgtgtcccaatgtcccccaaatacccacctcatacatgag

SEQ ID NO: 959361 - DNA, 120 bp, Artificial Sequence
  ENSG00000254846_2 (sequence is synthesized)
tcccaatgtcccccaaatacccacctcatacatgaggccgtatgggataaaggttagttaagtgctcaagggtctgtgcctaatttagagcctagctctgctgcttttctctgtggaaac

SEQ ID NO: 959362 - DNA, 120 bp, Artificial Sequence
  ENSG00000230205_0 (sequence is synthesized)
agatgaacgtagtcttcactgtgctacctgctctgaatatatccatgcagtttcattcaatttttctggaggagaccgatcagcaattttcataagatgggggcgagtagtagcgtgaat

SEQ ID NO: 959363 - DNA, 120 bp, Artificial Sequence
  ENSG00000230205_1 (sequence is synthesized)
caaactggctgtatactttgcttgaagaattatgaatcatgataaaagtaacctgtaatgcccctagaaatagggctcttgtttaatctctgcttaaacattgactaaagacacaatggc

SEQ ID NO: 959364 - DNA, 120 bp, Artificial Sequence
  ENSG00000230205_2 (sequence is synthesized)
cacatctagcaatgtgattctggagacagtgctgcggtctgcaacgggacatgaatggccaagccaagcttgcaaacatgggatgctgtgcgtggggacagacctatggagtcttgctct

SEQ ID NO: 959365 - DNA, 120 bp, Artificial Sequence
  ENSG00000285331_0 (sequence is synthesized)
cgcggtcgggtgaggcgggacggagttggggccggtggggaggggcatgaggcgctcgcaggcacctcgagaagcaggccccgaccgctcgccgacgaagcctcgtccgggcctcctggg

SEQ ID NO: 959366 - DNA, 120 bp, Artificial Sequence
  ENSG00000285331_1 (sequence is synthesized)
agcggggtggcaggtaccgtggcgcctcctcgcgttggtcttgctggttctcggcccccgaagcggagcgacggagacacagctgtggaagcatctggatccgctgcccaggtccccgag

SEQ ID NO: 959367 - DNA, 120 bp, Artificial Sequence
  ENSG00000285331_2 (sequence is synthesized)
cttcccggaacccgaggccgcaggacactgaaggctgccattcccgagtaggtcacgctggacgccaccctaagctgggcccagaggctcccgtccaggagggctgcagtcggcgcagac

SEQ ID NO: 959368 - DNA, 120 bp, Artificial Sequence
  ENSG00000285331_3 (sequence is synthesized)
accgcgcgtgtggagacgggagacccatcctcctcggccgttccgagagtaggcgcggccggtcagattcgatgcagagccgaatgcgggagaaagggcaaaacgtacctcaaaccagac

SEQ ID NO: 959369 - DNA, 120 bp, Artificial Sequence
  ENSG00000285331_4 (sequence is synthesized)
aaagccttgtgagcttcaggttctcaaataccccactcacccagaccccacatctccagtcagcccctcgcacccaaatcccattcggagcaaccgaactgcacgtgggactagttcttg

SEQ ID NO: 959370 - DNA, 120 bp, Artificial Sequence
  ENSG00000285331_5 (sequence is synthesized)
ggaatggatcaagccagtctcttcatctaacggagacagccctgggtggctctgtcacacagccactgtcttgtgcacaagttctgaacttggcctcagagaagccccagagtagaaaga

SEQ ID NO: 959371 - DNA, 120 bp, Artificial Sequence
  ENSG00000285331_6 (sequence is synthesized)
gacaaaataagccccagttcttcgattctgggctgaagtgagattttcttgaatggcagccattgttttgcctcttaggtaagtgagtgcagtaaagaccggtaaggcccacgcagaaga

SEQ ID NO: 959372 - DNA, 120 bp, Artificial Sequence
  ENSG00000285331_7 (sequence is synthesized)
aacactgaggaaagaagacacttccaaagtaacaaatgggaggaagcagccaacgcccgaggacaacatggcaagaaggagcctttggattccggactgggatggaaagagagttgattg

SEQ ID NO: 959373 - DNA, 120 bp, Artificial Sequence
  ENSG00000285331_8 (sequence is synthesized)
aatcccggaatttggaaaccccagatacggagggcggacggtacaaccggagctgtcaggtggatttccaaggctttgcattggctgtacctgaaacttatggtggcctagactccccag

SEQ ID NO: 959374 - DNA, 120 bp, Artificial Sequence
  ENSG00000285331_9 (sequence is synthesized)
tatccactcttccttatcttggtaaacaagcccagttctgagtcacatccctgctctgcctacttacaggggcatgtggtcccaatctaagcaacgtagcataattccaacctaaatcag

SEQ ID NO: 959375 - DNA, 120 bp, Artificial Sequence
  ENSG00000285331_10 (sequence is synthesized)
cagaatcccattccctgccacagttattggctggcaatgagcgtaacatatttgggccaatgagaggagcaatttcctggtctttgttgggaaaagtttttctttcattttctgagagcg

SEQ ID NO: 959376 - DNA, 120 bp, Artificial Sequence
  ENSG00000285331_11 (sequence is synthesized)
cttcagaggtaacccattctttctgcatgtcctcaaaaaaacgggtcccctggatggtgggtagccatcttccaaatacaagtctagccgggttaaaataaagaagacatcaagaaaaca

SEQ ID NO: 959377 - DNA, 120 bp, Artificial Sequence
  ENSG00000285331_12 (sequence is synthesized)
ggctggagtgcaatggtgcaatctcaagctcactgcaacctctgtgcaggttcaagtggagaatctgaatcttgatgatataattggaactcttcagccaagccatatctaacagaacta

SEQ ID NO: 959378 - DNA, 120 bp, Artificial Sequence
  ENSG00000285331_13 (sequence is synthesized)
ggttcaagtggagaatctgaatcttgatgatataattggaactcttcagccaagccatatctaacagaactatcttcaacttttcagttgagaaggagtctcgctctattgcccaggctg

SEQ ID NO: 959379 - DNA, 73 bp, Artificial Sequence
  ENSG00000285331_14 (sequence is synthesized)
ccgcctctccctagattgatttcatgtcttggctatattgtgaataatgctgcaatgaatatgggagtgccaa

SEQ ID NO: 959380 - DNA, 120 bp, Artificial Sequence
  ENSG00000285331_15 (sequence is synthesized)
tatattgtgaataatgctgcaatgaatatgggagtgccaatatctctttgacatactgattgcatttcctttggatatatacacagcagtgggattggattatactatagttatattttt

SEQ ID NO: 959381 - DNA, 120 bp, Artificial Sequence
  ENSG00000285331_16 (sequence is synthesized)
aattttttgaggaaacgttatactgttttccataataactatactaatttatgttcccacaaacagggcacaagtgtttccttttccttttctccatatccttaccaagacttgctgtgt

SEQ ID NO: 959382 - DNA, 120 bp, Artificial Sequence
  ENSG00000285331_17 (sequence is synthesized)
tttctccatatccttaccaagacttgctgtgttttctcttttttgataatagttattctaacaagtgtgaggtaatataaatatctcattgtagttttttgtttgtttgtttttgtttgt

SEQ ID NO: 959383 - DNA, 120 bp, Artificial Sequence
  ENSG00000285331_18 (sequence is synthesized)
cacccggccctgttgtttcattcttttatctttctgtttcatctcatttaatcaccacaataacccgacaagacaggaactattattatccccgtttttctttttctttttttctttttt

SEQ ID NO: 959384 - DNA, 75 bp, Artificial Sequence
  ENSG00000285331_19 (sequence is synthesized)
tattattatccccgtttttctttttctttttttcttttttatggcaggggggagtgcagtttcactcttgccacc

SEQ ID NO: 959385 - DNA, 120 bp, Artificial Sequence
  ENSG00000285331_20 (sequence is synthesized)
tcctaaagtgttgggattacaggtgtgaaccaccacgcccaacctcattgtagttttaattcacattccctgatgatgagtgggttgactatttttccatatacctgtcggccatttgta

SEQ ID NO: 959386 - DNA, 120 bp, Artificial Sequence
  ENSG00000285331_21 (sequence is synthesized)
tgtcttcttttgagaaatgtctatttaggttctttgctcattttaaaatcaggttgtcttcttgctattgacttgtttgagttccttatatatttttgataatgatcccttatcagaagt

SEQ ID NO: 959387 - DNA, 120 bp, Artificial Sequence
  ENSG00000285331_22 (sequence is synthesized)
tgacttgtttgagttccttatatatttttgataatgatcccttatcagaagtgttgtttgcacatattttctccctctctgtaggtcatctttttactctgttgattgtttcttttgctg

SEQ ID NO: 959388 - DNA, 120 bp, Artificial Sequence
  ENSG00000285331_23 (sequence is synthesized)
ccagtatgactgggggaatagtgtattatgtattcttttgtgtctggtctgctcttctctccactcaacattgtatctgtaagatttatttgtgttattttatgtatcagtagtttgtta

SEQ ID NO: 959389 - DNA, 120 bp, Artificial Sequence
  ENSG00000285331_24 (sequence is synthesized)
cttattgatagatgtttaacattccaatatgcaaacaaactacatttatttacaaattttattattgatggacatttagattgtttggggttactatgaataaaattgccatggacattt

SEQ ID NO: 959390 - DNA, 120 bp, Artificial Sequence
  ENSG00000285331_25 (sequence is synthesized)
agggtgatggctagaagactcaggcttccaaagtattcctctcctgagtatcagctaccaggtgaatttcacaatgaggatgacaacttggaaggggcaagagtcacgtgcctgagggga

SEQ ID NO: 959391 - DNA, 120 bp, Artificial Sequence
  ENSG00000285331_26 (sequence is synthesized)
atctctgttaatccttctctatacccagcttcccgatgcggcctgtacagaaacaagcacgcaggcacttaagaggacagtggtttcaccgtgtccctcccggcggcgctccccaccttt

SEQ ID NO: 959392 - DNA, 120 bp, Artificial Sequence
  ENSG00000285331_27 (sequence is synthesized)
ccttcctccccacacgcccctcccaggctgcaggcttagcagccgacttccgctgatcccggctggagggagcctggaatccaattactcttccctagggagcgcaatccacccgtctgg

SEQ ID NO: 959393 - DNA, 120 bp, Artificial Sequence
  ENSG00000285331_28 (sequence is synthesized)
agggagcgcaatccacccgtctggccgcaaagagcggagccggggtccgagagccgcacaggccggccctgctccgcccgcccccacttcccgccacccctgcctcgggctcggcagccc

SEQ ID NO: 959394 - DNA, 120 bp, Artificial Sequence
  ENSG00000285331_29 (sequence is synthesized)
gaggtgcgcggcactgccgccggaactatttgtccttccgcgcgcggcccggcccggcggggcgagaggttcgcggcgctgcatcccgggcgccgacgtcagccgggctgagtggcagga

SEQ ID NO: 959395 - DNA, 120 bp, Artificial Sequence
  ENSG00000285331_30 (sequence is synthesized)
gattagccaagggcttcccccgccgcgcgtccgggccaatcggctccgcgggcggtgctccagggacgcgcacacgcactttccagaatccacgcctcccagcaacagcctccagcaccg

SEQ ID NO: 959396 - DNA, 120 bp, Artificial Sequence
  ENSG00000285331_31 (sequence is synthesized)
cgacgctgcccttccggcccgctttcttcgtccggcctgctacggctgcgggcttggaccctggcctctagtctcctgcgtgctgctccctaaagtgacagggaaacggggcaagaggtc

SEQ ID NO: 959397 - DNA, 120 bp, Artificial Sequence
  ENSG00000285331_32 (sequence is synthesized)
caagggttccgtaggagaaagagtatctgtggctctcccaccgtcccggcttccctaacggactagggagtgaagctctggagatggatctttgggaggaaaaaactggacctctcttcg

SEQ ID NO: 959398 - DNA, 120 bp, Artificial Sequence
  ENSG00000285331_33 (sequence is synthesized)
ggttctttagagtttaggtggagaactctttcagtaccattgagtgttctctagtaagaggatcttacactgttgggtttctcacttgctttaaaattgtggtcagagtacttcataaat

SEQ ID NO: 959399 - DNA, 120 bp, Artificial Sequence
  ENSG00000285331_34 (sequence is synthesized)
cctttcctttctgcatctgggggaaggaaaaaaaatgcaacactctctttacacattgtcagactttcgaggccgcaacgcaactgacatacatgctagaaggagaaagtgctatattat

SEQ ID NO: 959400 - DNA, 120 bp, Artificial Sequence
  ENSG00000285331_35 (sequence is synthesized)
gccttgtgtcctcttttgaatcacattctcctgagatgtggctgacccttaggcccatggtgttcctgaatgtgattgacatgcgtagttagcaagctagtgagagagaaccaggaaaat

SEQ ID NO: 959401 - DNA, 120 bp, Artificial Sequence
  ENSG00000285331_36 (sequence is synthesized)
tgctatcaaaacaattacatacagggacatcagaacaaacgcttgagaccactggggaatgagggaccatcccagttctgccacggatgccttcggggatggtggccaagtcagatcttt

SEQ ID NO: 959402 - DNA, 120 bp, Artificial Sequence
  ENSG00000285331_37 (sequence is synthesized)
gtgtcttgtttcttcgtagcagattgaatagaactatcttcaccacactcactatttcaaagtgtgttataaacatttcacttaaggtgaaaatgttgaaggttttattttgggtggagg

SEQ ID NO: 959403 - DNA, 120 bp, Artificial Sequence
  ENSG00000285331_38 (sequence is synthesized)
gaaggtggtgccattgaaaggcactctctgaagggaagattctgtaaaaggaagccattttatctgcctacaatttggtcatttcaaagaaattcaatgtatatgtgttaagactaattt

SEQ ID NO: 959404 - DNA, 120 bp, Artificial Sequence
  ENSG00000285331_39 (sequence is synthesized)
gcaatcctcctgcctcagcctcctgagcagttgggactacaggagcatgccaccatgctgagctaattttttgtagaagcagggcttcaccatgttgcccagagtggcctcaagctttcc

SEQ ID NO: 959405 - DNA, 85 bp, Artificial Sequence
  ENSG00000285331_40 (sequence is synthesized)
tggtgaggatgcagagaaaagggaaactcatacactgctgatgggaatgcaaaccagtacaacttctatggaaaacgatatggag

SEQ ID NO: 959406 - DNA, 120 bp, Artificial Sequence
  ENSG00000285331_41 (sequence is synthesized)
aatgcaaaccagtacaacttctatggaaaacgatatggagactctcaaagaactaaaagcagaaccatcattccgtccagcaatcccaccactggtcatctacccaaagtttgggtatca

SEQ ID NO: 959407 - DNA, 120 bp, Artificial Sequence
  ENSG00000285331_42 (sequence is synthesized)
aaaatatacttacaaaagaagtaaagagagctcacctatttttgtcttcactgaatgaaaaagtctgttcaatacaggaaataaactttgaagatttggtaaaactcacctctttggagt

SEQ ID NO: 959408 - DNA, 120 bp, Artificial Sequence
  ENSG00000285331_43 (sequence is synthesized)
gcaggcatgagccaccgtgcccagcctccatcaatctcttaacaaggccaaggaactgaacttgccaagaaagaactttcctcggccaaaggagaaaaaggagagactgtgaacagttag

SEQ ID NO: 959409 - DNA, 120 bp, Artificial Sequence
  ENSG00000285331_44 (sequence is synthesized)
ttagccattaatttttttttcactttggcaacaatgtgaaatggctgtcaaaaaatgtaactcattttgcacattagattgtgcaatatcattgccaatattaagtttgcagtaatccaa

SEQ ID NO: 959410 - DNA, 120 bp, Artificial Sequence
  ENSG00000285331_45 (sequence is synthesized)
tgtggctggtgtctttataaaaagaggagattaaagacacagacgcacacagaggaaggaccaagtgaagacacaaggagaagatgactatctacaagccaaggagaaatgcctccaaag

SEQ ID NO: 959411 - DNA, 120 bp, Artificial Sequence
  ENSG00000285336_0 (sequence is synthesized)
acgctctgccgccaggagtggcaggaggcgagctgagtgaaatgagctgctccagttcccgcccacgaagggggttaagatgaagggaacaatcctgtctcatctgggggcctgtccagg

SEQ ID NO: 959412 - DNA, 120 bp, Artificial Sequence
  ENSG00000285336_1 (sequence is synthesized)
tgaagggaacaatcctgtctcatctgggggcctgtccaggatatgaaaaacaagtatcactccatcacccaggctggagcacagtggtgcaacctcagctcactgcaagctctgcctcct

SEQ ID NO: 959413 - DNA, 120 bp, Artificial Sequence
  ENSG00000285336_2 (sequence is synthesized)
ggaattacagactctacccaacaacagcagaatacacattttcttcaggttgaccaagagcattaaccaagagtaatcaaaaagaggagccgactagacacagccaggaagagcttctcc

SEQ ID NO: 959414 - DNA, 120 bp, Artificial Sequence
  ENSG00000285336_3 (sequence is synthesized)
caccggaagaccagaccagcaagaaagttggcaccctccaagcaggttgttgaaaggaaggccttgaatgtggacagaggacgatgcagatgaggaaagactagaaggttctgtacctgt

SEQ ID NO: 959415 - DNA, 120 bp, Artificial Sequence
  ENSG00000285336_4 (sequence is synthesized)
taacagtggctgatcctagaagagtgaaatttaggcaggtagttggaaagaacacagcacagaaaactttaggatgaattttcctagcagccattctgtatcgtcaaagccttcaatccc

SEQ ID NO: 959416 - DNA, 120 bp, Artificial Sequence
  ENSG00000285336_5 (sequence is synthesized)
tgaggagagagttaatggcacacaggagtggggtgatttgggcaatgagtgcttcttcctttcaacctgttgctgcctaacacaaggacaattggtcttccaccctcttcacagttcatt

SEQ ID NO: 959417 - DNA, 120 bp, Artificial Sequence
  ENSG00000285336_6 (sequence is synthesized)
cagtcattgtccctgtctcccaggtgagttgagtgaaaataatggtgacaagaagcccactgcctgattcacataagcaaggcatgctgcagggaagacagggttcttattaatatttcc

SEQ ID NO: 959418 - DNA, 120 bp, Artificial Sequence
  ENSG00000285336_7 (sequence is synthesized)
tttcatgtgcttacatatgagttacagttgctaatcctttcccacagtttagcacctagttaaaagaaagggcttcggaatcaggtaagtgtagattaaagttataacggcaaattgctg

SEQ ID NO: 959419 - DNA, 120 bp, Artificial Sequence
  ENSG00000285336_8 (sequence is synthesized)
aacctttggaagcctcggtttttccacctggaaaatggatttttatcttacaggactgtcgtgaggattgatgagctaacattcctaaatcagggagtttgaagtctggcccaggatcgt

SEQ ID NO: 959420 - DNA, 120 bp, Artificial Sequence
  ENSG00000285336_9 (sequence is synthesized)
ctagattttgacgttctccttgtctttgctgtgtacccctgggagaaacaaagggtgagaagaaacaagggaaaggagaaacatttgtgttttccaacttttcagtgttgatcagccagc

SEQ ID NO: 959421 - DNA, 120 bp, Artificial Sequence
  ENSG00000285336_10 (sequence is synthesized)
gggaataaagagaagatgtgtaagatggagggcaaaagagattcccagaagctgctgcagatctcttccagttgcatttcgaaagccattacttaagtgtatattcacacctagctgcaa

SEQ ID NO: 959422 - DNA, 120 bp, Artificial Sequence
  ENSG00000285336_11 (sequence is synthesized)
tgaccaagtgagaagaatcataagaatatgggattttgaaaaacatgaaaacatcctaagaaataccaggaaggagtcccacagtgaagcacaaatgaaactcaagatgactgcctaaaa

SEQ ID NO: 959423 - DNA, 120 bp, Artificial Sequence
  ENSG00000285336_12 (sequence is synthesized)
taagaaatcatggatcttaggagaaagggggcaaggaagtaaatcaaaggacaaagctgaagaccaagtggaccgaaaagaagatggaatacattttcccaaacactggtgttctctgga

SEQ ID NO: 959424 - DNA, 120 bp, Artificial Sequence
  ENSG00000285336_13 (sequence is synthesized)
gttggcttatcaacatcttgtgtaatagtcatataattgtccctcatttctatctcctcctaaaactagagaaatggcctattaattttagaaggtgtataattatcacaaagccctcag

SEQ ID NO: 959425 - DNA, 120 bp, Artificial Sequence
  ENSG00000285336_14 (sequence is synthesized)
attaaggtccaggacacagaatggaatatatgagcacgcagaaatgtatacctttagattgaacttggatgatttaccttttgactgtcaccaccagcaaatcctgaaattggatctctt

SEQ ID NO: 959426 - DNA, 120 bp, Artificial Sequence
  ENSG00000285336_15 (sequence is synthesized)
gaaacttatggttttctttcagcagcataggagttaagttttcttctaacttgccctaggttctctcaggaactgggaaagcagttctcccaaatcccaagtaaggtattcaagacaaca

SEQ ID NO: 959427 - DNA, 120 bp, Artificial Sequence
  ENSG00000285336_16 (sequence is synthesized)
taaggcagagctaaattcttctgttgaagaatttaacatgactcaaaccataaggaaatctaaagaaggctgccaaactatttcgctgctgccctcccccaccaaaaaagagataaaaat

SEQ ID NO: 959428 - DNA, 120 bp, Artificial Sequence
  ENSG00000285336_17 (sequence is synthesized)
gttagatttacaaagcaaactacagtgtatggaatatatatatctatatatagagagatatatatacacacacacaatttttttaacctaccactttgtcttatttgcatgagcacaaat

SEQ ID NO: 959429 - DNA, 120 bp, Artificial Sequence
  ENSG00000285336_18 (sequence is synthesized)
cgctttcaacttaatgccagagaaaaaggcaacattccccgtgatgacttgctgaaaagctcactgtatttgtttgataatggattttagttcattgtcatgtacttcactcttcatcag

SEQ ID NO: 959430 - DNA, 120 bp, Artificial Sequence
  ENSG00000285336_19 (sequence is synthesized)
caggagcacttcagggtaaagaaacaggcttttaccacactggaacaaaagctatataaggaaaaaaaaatcctgagcagatggaatattatttgcatttgcacaaatagtgctttttag

SEQ ID NO: 959431 - DNA, 120 bp, Artificial Sequence
  ENSG00000285336_20 (sequence is synthesized)
cacaattcatattactccattgtgagctaaagtaagccacatgtgtctacagcatgctgcagacgcagaatcggctttttgtttgtcagactcagaggtcccaaccttatgatatctttg

SEQ ID NO: 959432 - DNA, 120 bp, Artificial Sequence
  ENSG00000285336_21 (sequence is synthesized)
tacttgtatatccattagttttatttcagttacttatcagaagggaaaagaaaaaaatggcactatgcagttaagaggaccattgcatggagggctaaattaactattttttattttcat

SEQ ID NO: 959433 - DNA, 120 bp, Artificial Sequence
  ENSG00000285336_22 (sequence is synthesized)
gaatgaggatcaaataggtttcagatgtctcgacatctatctggagatctagatgatgatataaaattaaaatgcagaatgtaagtgtaataaaatttgtttctccatgattacattaaa

SEQ ID NO: 959434 - DNA, 120 bp, Artificial Sequence
  ENSG00000285336_23 (sequence is synthesized)
agtttcagtcagagtacgtacttccttgagattactacttggaagttgagaagcctgaagctcctgggaaacctagtttttgcctccactaccttactgatcatgcatttgcaagattaa

SEQ ID NO: 959435 - DNA, 120 bp, Artificial Sequence
  ENSG00000285336_24 (sequence is synthesized)
gtatttccaatatttattattataaaccacatattatatctttgttactatcgctgtagtatatgacctggaacggctagactaagagtaatcaaaaagaggagccgactagacacagcc

SEQ ID NO: 959436 - DNA, 120 bp, Artificial Sequence
  ENSG00000248559_0 (sequence is synthesized)
tcattttttatatgggacagtatgtattttactacaaactacaaagactcagaggatggacagtgacagttaatatgattcctctcattgcccataggtaggccaccgatccaaatggat

SEQ ID NO: 959437 - DNA, 120 bp, Artificial Sequence
  ENSG00000248559_1 (sequence is synthesized)
cctgagttcagacagaatccttacctcctgataaggttgagtgaggattattaggtgagccacagactaaggaatgtttcagaaagcagttttctaggtgtagtttggatttacaaaaaa

SEQ ID NO: 959438 - DNA, 120 bp, Artificial Sequence
  ENSG00000248559_2 (sequence is synthesized)
caagtctagaagacccaagcctcaggcttcctccagaaaagcagtctgggagacagaatttacaaatcaactggctgaccggacgaagccccggaatcctgtgtcaattcgttttaaact

SEQ ID NO: 959439 - DNA, 120 bp, Artificial Sequence
  ENSG00000248559_3 (sequence is synthesized)
aaggccagatgctttttggtaggctgcctcttcccgtgagctggtgggtacttcaagtctatgatttgattctcatttcttaaaaaaggatgagtatgtgtggtagttgggtatggtata

SEQ ID NO: 959440 - DNA, 120 bp, Artificial Sequence
  ENSG00000248550_0 (sequence is synthesized)
gaggagaaagagaactagagacagagagaggcagacaaggaaggggggggggggtgaaagactttctttttctttctagaggaattctgcccagactctgcagcagttggtagcaggcaa

SEQ ID NO: 959441 - DNA, 120 bp, Artificial Sequence
  ENSG00000248550_1 (sequence is synthesized)
tgcaaaattgctcttcacctgtaagaacatgctctttatcttccagtctcttcttgtcaatttggaaattgcagactgcccggctcaggcttacctgtgcgtatattagaagtcttcccg

SEQ ID NO: 959442 - DNA, 120 bp, Artificial Sequence
  ENSG00000248550_2 (sequence is synthesized)
gtgccaggaatcaacaaagagttgagtaacgaagaactaatttaatcagctaatttggagaaactaagtcttacaactattatttagttcatcaaaacaaataaatctcaatgagaacaa

SEQ ID NO: 959443 - DNA, 120 bp, Artificial Sequence
  ENSG00000248550_3 (sequence is synthesized)
gcttcccaagtagctgggattacaggcttgtcaaagaaaatttcttaatgaaagcgatgatgatgtcgaccttaacctccagaatgaagatacttcaggacttagtctgagaaggctacc

SEQ ID NO: 959444 - DNA, 120 bp, Artificial Sequence
  ENSG00000248550_4 (sequence is synthesized)
aagtcatgatggagaaaaacgtgaaaccactgattcagttcattgcaaattcattctaccaaaccttacctggctcttgttgctgcttggtagtccttttattaatctcttggagactca

SEQ ID NO: 959445 - DNA, 120 bp, Artificial Sequence
  ENSG00000248550_5 (sequence is synthesized)
ctgattagtttcctccattgatcatctaaaagcttttttcatatttttgaaactcactgtttgatctccccttccccttgtactcggaagatgatcttgctttctgctttactgagaagt

SEQ ID NO: 959446 - DNA, 120 bp, Artificial Sequence
  ENSG00000248550_6 (sequence is synthesized)
tcaaggttatctgcaatctccttcaacttttcactcctatcctattttctattttccttcatctcttgcttcctctgctcttttgttttagggaaagaaacagtccctttatttctaggt

SEQ ID NO: 959447 - DNA, 79 bp, Artificial Sequence
  ENSG00000248550_7 (sequence is synthesized)
ttttgttttagggaaagaaacagtccctttatttctaggttgaactcaacttctgcaggacttttgtctgtaaattgta

SEQ ID NO: 959448 - DNA, 71 bp, Artificial Sequence
  ENSG00000248550_8 (sequence is synthesized)
ggcatgatctcaggtcactgcaacctctacctcccaggttaactcccggctaaatttttgtatttttagta

SEQ ID NO: 959449 - DNA, 75 bp, Artificial Sequence
  ENSG00000248550_9 (sequence is synthesized)
cccgtgcccagctaaattgtaccttctgttccttaaaaatcctaaaatcccttgttgtaggttctttaattttga

SEQ ID NO: 959450 - DNA, 120 bp, Artificial Sequence
  ENSG00000248550_10 (sequence is synthesized)
ctttaattttgagaaagtaataaataaagcacagagattaataagacaaatatgcttgtttgcaaaacccagaattgactgttaatattatcatacactggcttatcctttttctaataa

SEQ ID NO: 959451 - DNA, 120 bp, Artificial Sequence
  ENSG00000248550_11 (sequence is synthesized)
aaaagtttcagataaagttgaagttccccttgacctaccttttcagtcctgttgcctgcattccctccctcaaagcaaccctatataatatcggcatgtattctttgaggtcattaaaga

SEQ ID NO: 959452 - DNA, 120 bp, Artificial Sequence
  ENSG00000248550_12 (sequence is synthesized)
atacatttatgtgcccatatacataataatgtgtgtgattgtttagtgggtaatttaagaatttacatatttaatattcacagtctattttgtgatgtttctgtcttctatccatgctag

SEQ ID NO: 959453 - DNA, 120 bp, Artificial Sequence
  ENSG00000248550_13 (sequence is synthesized)
tatatgtagagctatttgtaagttccctgagggcagggactttgtcttgctcattgctgaatctccagcacctagaatagcatttggcatatagcaaacattcaatctttcttccttcct

SEQ ID NO: 959454 - DNA, 80 bp, Artificial Sequence
  ENSG00000248550_14 (sequence is synthesized)
ttctttctctctctcttttctctctccctctctccctctctcctttcctttctctttctttctttctttattcttccttt

SEQ ID NO: 959455 - DNA, 120 bp, Artificial Sequence
  ENSG00000248550_15 (sequence is synthesized)
tctttctctctctttctctctccctctctccctctctcctttcctttctctttctttctttctttattcttcctttttttttgttgacaggatctcactctgtctcccaggctggagtgc

SEQ ID NO: 959456 - DNA, 120 bp, Artificial Sequence
  ENSG00000248550_16 (sequence is synthesized)
ccaggctcaagcaatcctcccatttcagcctcccaagtggctgggactacaggagtgcaccaccttgcctggataattttttgtattttttttttggagagacagggtttcagcatgttg

SEQ ID NO: 959457 - DNA, 90 bp, Artificial Sequence
  ENSG00000248550_17 (sequence is synthesized)
tgatgtgagccactatgccagccaatatatgtatatatttcttaagtgagttaatatcattcatttttaactgctgtgtagtaatcaact

SEQ ID NO: 959458 - DNA, 120 bp, Artificial Sequence
  ENSG00000248550_18 (sequence is synthesized)
ttaatatcattcatttttaactgctgtgtagtaatcaactgtatgaatattccacatatcacattttatttattcattctcccaccagtagacaatgtgtgctttcctaatttccatgct

SEQ ID NO: 959459 - DNA, 120 bp, Artificial Sequence
  ENSG00000248550_19 (sequence is synthesized)
tcttattacaaatattgttgtggaacagccttgtacaagtctcctgtgcctatgtttgagttgtatcagagttggaattgctgcttgtcacaaataaactttaaactagatttagccaaa

SEQ ID NO: 959460 - DNA, 120 bp, Artificial Sequence
  ENSG00000248550_20 (sequence is synthesized)
atgggtcacttggcctaagaccatttgtgggagaaatgatatggatggatcagatggtgatgatagtggaggccctgcaggaaggcgaggcagaccaacattcaaaatattcttctgcct

SEQ ID NO: 959461 - DNA, 120 bp, Artificial Sequence
  ENSG00000248550_21 (sequence is synthesized)
ctgccgctcctgagacagtaagaccaacccctcctcttcctcctcctccacagcctactcagtgtgaagatgatgaggatgaaaacctttatgatgatccacttccacttcatgaatgaa

SEQ ID NO: 959462 - DNA, 120 bp, Artificial Sequence
  ENSG00000248550_22 (sequence is synthesized)
aacatgttcaagaatttctctccatatttttttccctttgagtgttctataccctgaaacaatagttttattctttctatcagtgttttaacttttcaagatgataatctatggccttag

SEQ ID NO: 959463 - DNA, 120 bp, Artificial Sequence
  ENSG00000248550_23 (sequence is synthesized)
gatcttcatgcctgatgcttgaaagaactaacctttgacttttaagtgatattagccaacctccccttataaagataattaatgtataaatacatatgtgtatctgagaaaactatcact

SEQ ID NO: 959464 - DNA, 120 bp, Artificial Sequence
  ENSG00000248550_24 (sequence is synthesized)
tgagaaaactatcactttgatcataaaattatttaaacaaaatttgactactataatgttgcttttatgtaactaattgcaaaccattttgttctataactacttaactatatatcttta

SEQ ID NO: 959465 - DNA, 85 bp, Artificial Sequence
  ENSG00000248551_0 (sequence is synthesized)
caggctggagtgcagtgggatgatctcggctcattgaaacctccacctccaggttcaagcgataagtgtgcaccacgatgcccag

SEQ ID NO: 959466 - DNA, 83 bp, Artificial Sequence
  ENSG00000248551_1 (sequence is synthesized)
ccaggctggaaagcaatggcgctttgattcctctgcctcagcctcccaaatagctggaattacaggacactcagaaaaaaaat

SEQ ID NO: 959467 - DNA, 120 bp, Artificial Sequence
  ENSG00000248551_2 (sequence is synthesized)
tcccaaatagctggaattacaggacactcagaaaaaaaatgaaattatgagaattgttttctcaaatccttttctactgcaaccttcccaccattacgagcataatgaaactcaaatgtg

SEQ ID NO: 959468 - DNA, 120 bp, Artificial Sequence
  ENSG00000248551_3 (sequence is synthesized)
aataactcattcaggaaatgaggctgggttgctgatgatggaatgagggagttggagggattagaaatgacgtatccagaatagacaatggaatcggtgacagacttccactagtggcag

SEQ ID NO: 959469 - DNA, 120 bp, Artificial Sequence
  ENSG00000248551_4 (sequence is synthesized)
caacctgtgcctcactcctgcacaaatccaaaagggtttttgaggcatttgatggcatgtgcctgtgaaacaagtagatattctgtcttgggagcttgagaaaaggccagtagcactgtt

SEQ ID NO: 959470 - DNA, 120 bp, Artificial Sequence
  ENSG00000248551_5 (sequence is synthesized)
ctagtagcctaaaggcaaacacacatttaaatagtggtggggttagtaggcatgggatgatgagtaatgagcagctcagaaatggtcactttaaagatcaaaggtcatatgcccacattt

SEQ ID NO: 959471 - DNA, 120 bp, Artificial Sequence
  ENSG00000248551_6 (sequence is synthesized)
tctgaaatcatgccatttggaatcatcttacatccctaagaataaaaatgttcctaccaaaatcatttagaagaagttttctctgacaactcaccctgttaaaggtcaacatgagatttt

SEQ ID NO: 959472 - DNA, 120 bp, Artificial Sequence
  ENSG00000248555_0 (sequence is synthesized)
acccgtctgcaagccaggaagagagcccttgccagaaactaaaccccgctggaaacttgattttgcgctttccagcctctagaactaatatgtgaaaaacatttaaatcagaaagtaaat

SEQ ID NO: 959473 - DNA, 120 bp, Artificial Sequence
  ENSG00000248555_1 (sequence is synthesized)
aagacacagggatgtaaaattaaaaagcctctcgagctccaaagctacctgttaacttcaacaagcacactggcctggagactacatgatggtgtatcagtaatggtgcctctccatcat

SEQ ID NO: 959474 - DNA, 120 bp, Artificial Sequence
  ENSG00000248555_2 (sequence is synthesized)
tgcccatcaaagacatttctgatgctccagaaggatacccttgaggtcatcctgttctcacctccaatattcattatgatctctaacatcactatatacaacatttttgtatatatagaa

SEQ ID NO: 959475 - DNA, 120 bp, Artificial Sequence
  ENSG00000248555_3 (sequence is synthesized)
tggcaatgtcatttgtccagaagggggagctctcagtccgcatgcagcggagcaaggcagacagtctggtatcttatctgctgcttgggaaattgtctgacaggaaaatatcaacacaaa

SEQ ID NO: 959476 - DNA, 120 bp, Artificial Sequence
  ENSG00000248555_4 (sequence is synthesized)
ccatgcgatttgccgctggagcacgctggacctcatctgcttaaaaagatgcacggatatagtcatcacagttcataatttaataaactgctaaaaaaaccacacattttcattttagcg

SEQ ID NO: 959477 - DNA, 120 bp, Artificial Sequence
  ENSG00000248555_5 (sequence is synthesized)
ttgaattttgcactaatatgtcatgagcactgcacccattgcaaattaatgagtctctgaatagcactgtgcatttgtcatttgaatttatgctaatgcagtgaggtctcctggtgatgc

SEQ ID NO: 959478 - DNA, 120 bp, Artificial Sequence
  ENSG00000248555_6 (sequence is synthesized)
tgatagtccatagcagctgcttgaaccacaaaatatatcggcacttcccttctactttatattgctacctccttttttggcttttctggcctgtcacttaggcagaaattctgtaactgg

SEQ ID NO: 959479 - DNA, 120 bp, Artificial Sequence
  ENSG00000248555_7 (sequence is synthesized)
ttattgatagggctgctaattatctgtgactttacactattggcctaacccccaacactgagaagaagtaatggatcagtgttgagagaattatgtacatcacatagagacagtctcaga

SEQ ID NO: 959480 - DNA, 120 bp, Artificial Sequence
  ENSG00000248555_8 (sequence is synthesized)
ccaggaggtcaggaggagttcactgagaaccaatggtatttataaaggatgttatatgtaaattggcaatattttttcagtgatatcatgtcatttatatcaataaatcaatctaagaaa

SEQ ID NO: 959481 - DNA, 120 bp, Artificial Sequence
  ENSG00000248555_9 (sequence is synthesized)
cgtgtgtccctacattatccaaaataggggtgggctaatgacgattgcaggctaactccagcctaccacttgcttctataaataaagtcttattgtacacaaacatagccatttatttaa

SEQ ID NO: 959482 - DNA, 120 bp, Artificial Sequence
  ENSG00000248555_10 (sequence is synthesized)
tggtagcttgaactctgccatgattgggaatatttacaccacaaaaatgggctaatctcctaggaatggattctaggacggcatcagcattgccataataaatacgcattttatgattac

SEQ ID NO: 959483 - DNA, 120 bp, Artificial Sequence
  ENSG00000248555_11 (sequence is synthesized)
agcacactggcctggagactacatgatggtgtatcagtaatggtaagagcatccttttccctagtattactaggtaagttgctacctacctgagaagcatcttatatatggattactaat

SEQ ID NO: 959484 - DNA, 120 bp, Artificial Sequence
  ENSG00000248555_12 (sequence is synthesized)
ttagttccttatttctggctataaaaggcaattgaaatataggcttgccagagattaaggagaaaagttaatggccagcctctactttttcttactttagaagtgaaaacagtggttatt

SEQ ID NO: 959485 - DNA, 120 bp, Artificial Sequence
  ENSG00000248555_13 (sequence is synthesized)
actattattaattacaaccaaaacaaccacaaatttaagcagccttccagacaacttaaggagtatttttaaataatcaattttactttaaaatgtttaattaaaaagtttagagaagaa

SEQ ID NO: 959486 - DNA, 120 bp, Artificial Sequence
  ENSG00000248555_14 (sequence is synthesized)
tactacttgcaaggagactagcaatttatccaaaattggaaacagagaaaacggcatcttcttttcactcattctgactcaaaatgggtgtagctcatcagagtacatcgttacattttc

SEQ ID NO: 959487 - DNA, 120 bp, Artificial Sequence
  ENSG00000248555_15 (sequence is synthesized)
caaagggggatgcatcaggacgataattccaagagttcaatggtgaatttccttggcttccactgaggttccttggagtctcagaaaaacccagtgaatccagtctcaagtgaacccagt

SEQ ID NO: 959488 - DNA, 120 bp, Artificial Sequence
  ENSG00000248555_16 (sequence is synthesized)
gatggtgattcatggttcctgattcttttctaaactgctttctcaattctctttgttcataatctttcccaggcaggaaactcaaaagagaggtcagagaaggacaagaatcctcatgct

SEQ ID NO: 959489 - DNA, 120 bp, Artificial Sequence
  ENSG00000248555_17 (sequence is synthesized)
atttggcatcttattgtaagacgtggtggaatatgttcagcaagtaaatttggcagaattgaagagtaaaggattggcatatcaaaatgcatatacaaaaaaattaatcaaagcaaacaa

SEQ ID NO: 959490 - DNA, 120 bp, Artificial Sequence
  ENSG00000258676_0 (sequence is synthesized)
agataaaataaatccttgctggaggaccagagtttgtcctgcagacccagggaggagagttgcactggggagaaggagagatggggagcaggtcccatgagctatactgataatgacaat

SEQ ID NO: 959491 - DNA, 120 bp, Artificial Sequence
  ENSG00000258676_1 (sequence is synthesized)
gtttcctgagggaacgcatagagccgaactttctccctgcgcctactccaacaatctggaatgtctgccttggaatattatgtgagaaagaaataaacatctcttgtgtttgaaccatta

SEQ ID NO: 959492 - DNA, 120 bp, Artificial Sequence
  ENSG00000258676_2 (sequence is synthesized)
ccgcatcatcctccctgctgaagaaacactttacacctcataaaacaattgctcaggaattctgggctcccagagagaccctgagtttcaaatagagatgagcttggcactcactccatg

SEQ ID NO: 959493 - DNA, 120 bp, Artificial Sequence
  ENSG00000258676_3 (sequence is synthesized)
aatgactggagtgtaggggcagctgggagtcctttaagttccagcttgaagagagtgagccggagctcatctcacactcgttcacctcagacacaagaaatgaatgatgccctctcccca

SEQ ID NO: 959494 - DNA, 120 bp, Artificial Sequence
  ENSG00000258676_4 (sequence is synthesized)
tcccaccctttactctctctgggcaagaagcactgtctgcaaggcccctggggggaagaagcagggaaagtaggtgaggtggcccaaagccctccacaagtcctgctttcctcgcttggc

SEQ ID NO: 959495 - DNA, 120 bp, Artificial Sequence
  ENSG00000258676_5 (sequence is synthesized)
cttgctcccccatctccttgggaagctgttgtcctatccattgagctgagtgtttccagtaagaacactgtcagcctctagcagcatccctccaactgccagcaccctgccattgcccag

SEQ ID NO: 959496 - DNA, 120 bp, Artificial Sequence
  ENSG00000258676_6 (sequence is synthesized)
acagtctaaggccccagggtgtggccaattcagatatgatccagctacggtggggttcactgatgctgagtgtagttgggagcccttcctcttgttgttctctcctgctgctgagtctcc

SEQ ID NO: 959497 - DNA, 120 bp, Artificial Sequence
  ENSG00000258676_7 (sequence is synthesized)
tcttctgctcctagccaccagtaagagaggttttatcaatccccaccgtccaacaattacattcatctgcatctccggctcaagtcactgcagagtctcccagattctcacaagactgcc

SEQ ID NO: 959498 - DNA, 120 bp, Artificial Sequence
  ENSG00000258676_8 (sequence is synthesized)
attgtccagaaatgtgtacagaatgctcactgcaccacgttcaagcctgagaaagtcccaaatgctcaaggagtatacaacatcacagagaagacatgattaatattgaacaaacatatg

SEQ ID NO: 959499 - DNA, 120 bp, Artificial Sequence
  ENSG00000258676_9 (sequence is synthesized)
caataatccaggcaatggataagtgcccacaagtgacctagagagagggtgagatgactggggtggtctgcacaaggtgaaataagagctcaagggcagtggcaggacatgagagtccaa

SEQ ID NO: 959500 - DNA, 120 bp, Artificial Sequence
  ENSG00000258676_10 (sequence is synthesized)
ggggtatggagagggtgtgtagaaatgggatggatgggagaagttaagccaaccaagcttaaaagaaagcctattcaggaggtaggcaattaggacgtggaaaagccttctaaagtcacg

SEQ ID NO: 959501 - DNA, 120 bp, Artificial Sequence
  ENSG00000258676_11 (sequence is synthesized)
tgtgggttgatgttggcttgtctccagaatgacaaaaagtagttatccttctagaaatgcaaccacagccaactggaagcagcagttatgattcaagcagtaactgtggtttttagagat

SEQ ID NO: 959502 - DNA, 120 bp, Artificial Sequence
  ENSG00000258676_12 (sequence is synthesized)
cctgtaacatcatcagtgacgtagccccttctgtgaggcacaatctcagcctcacagggccacaaagaacaagtttccccatgcaggcagcttctctggatttattttctccttcttctg

SEQ ID NO: 959503 - DNA, 120 bp, Artificial Sequence
  ENSG00000258676_13 (sequence is synthesized)
tatcatcattttttatcaagtggcaaagaatgtatttgaaagaagagacccttcctgctttccttccactgattgatgcttagtattcctagatcagaaagtcagccgagatacatgatg

SEQ ID NO: 959504 - DNA, 120 bp, Artificial Sequence
  ENSG00000258676_14 (sequence is synthesized)
ggggcagggagcaatccagcaggaaggccagggcttatcctgggttggccactggatgcgttcacaattaaggtctcttccaaatccaagaacctgagtctctctacttccacccaaatt

SEQ ID NO: 959505 - DNA, 120 bp, Artificial Sequence
  ENSG00000258676_15 (sequence is synthesized)
ttcctccatttccaaggtggctaggtacactcccccacttcccagtcaggatgtttgagtgtgtctgactatgttctttcccatgtgagcagaagaggtgcacgccacttccaagtggcc

SEQ ID NO: 959506 - DNA, 120 bp, Artificial Sequence
  ENSG00000258676_16 (sequence is synthesized)
ataagacctcccagatgttctcctctgtgttcttccccaggtcccatgagctatactgataatgacaatggtgatagcaactttggaagccagttaatattggaatatggcaaagccact

SEQ ID NO: 959507 - DNA, 120 bp, Artificial Sequence
  ENSG00000258676_17 (sequence is synthesized)
acacagacctgggaggggtgcagaggtggcatcagcgctatgagggcgtgcaggggaaagctgatgggagggaaagggcaggagttacggctgcctctggtgctgaacggtggacactgt

SEQ ID NO: 959508 - DNA, 120 bp, Artificial Sequence
  ENSG00000258676_18 (sequence is synthesized)
ctgagaatcttcaggagagaaaattccgatggcagttgagagcaacggtggagcagcgaagcccacaggcagcagagcacacagacctgggaggggtgcagaggcaggagttacggctgc

SEQ ID NO: 959509 - DNA, 120 bp, Artificial Sequence
  ENSG00000258676_19 (sequence is synthesized)
cctgccaaacatttcccattcaggatgcctttgggatctcagtaatgctttgcagtgcccctaaactaaaagaaataactagtagttctgttaatacatagttaggtccaaacaactcaa

SEQ ID NO: 959510 - DNA, 120 bp, Artificial Sequence
  ENSG00000258676_20 (sequence is synthesized)
cacctggtatctgacagatgccactgttgccactttgaaatttttaaaatattctttggcagttctgtgagcttgctgcagtgtcctagcggcatatcagtgcaaaatttgagaaccaca

SEQ ID NO: 959511 - DNA, 120 bp, Artificial Sequence
  ENSG00000258676_21 (sequence is synthesized)
aactgtggattaggaaccctggttgagtacggcaccccttactccctactaccaaagtgagagatggcagacatgtttgtctccaattttaatagagtaaaatttgtttaaaagagccaa

SEQ ID NO: 959512 - DNA, 120 bp, Artificial Sequence
  ENSG00000258676_22 (sequence is synthesized)
gctggaggaccagagtttgtcctgcagacccagggaggagagttgcactggggagaaggagagatggggagcaggctaagaggacatctggttacacctgttctcagcatgattcaggcg

SEQ ID NO: 959513 - DNA, 120 bp, Artificial Sequence
  ENSG00000258676_23 (sequence is synthesized)
agaagaaaaaccactgtcagcagatacgttttaaaatgagatattgtgtttggtttggaagaatcaaataaaaaatttaaacagattaaatttaaccacacgtcacagaaatgactgaag

SEQ ID NO: 959514 - DNA, 120 bp, Artificial Sequence
  ENSG00000258676_24 (sequence is synthesized)
aatagatcaaagctgctttcatagtataatatttttaatcgtgtgagtttttgcaccaaaaaaaaactgacatatttttataatctttgtggggttttttaacagtaagaatgatcgtgt

SEQ ID NO: 959515 - DNA, 120 bp, Artificial Sequence
  ENSG00000258676_25 (sequence is synthesized)
gcgttccacatttccacatgtaacacgctgcgcaaaggaaggcttttattcccacctccctgaaatgcgcgtgtgcattttccttttgaacactggtttttgaggtactggagacctctt

SEQ ID NO: 959516 - DNA, 120 bp, Artificial Sequence
  ENSG00000258676_26 (sequence is synthesized)
gatgtaagagttctccaaaatgttcttcaaactaaggcttttcattagatgaatggaacttggagatctggcaaggattatgctgcagcaaacccatagaattattttcatgtctgtgct

SEQ ID NO: 959517 - DNA, 120 bp, Artificial Sequence
  ENSG00000258676_27 (sequence is synthesized)
ctgcattaacttgtaattcaacatcaggattacctttgcttcttatttttaactaatgagtctgttatgggtccaaagcaaataacagaggatgagagaaaagagttcaaagtgtttaat

SEQ ID NO: 959518 - DNA, 120 bp, Artificial Sequence
  ENSG00000258676_28 (sequence is synthesized)
ggtcagaaggcatcatggcaactgtcgcaatggactgagagctaagcccctgcgtgacttggctcctgaagatgctcactgggtgttctccagctatacccctgcaggtgcagtcaatac

SEQ ID NO: 959519 - DNA, 120 bp, Artificial Sequence
  ENSG00000258676_29 (sequence is synthesized)
aaatgcctactgaagattttttaagttagatatttacctccattaattcctccacgtgcctctcagcgttcataaatcaacagctgaaagatgtctcctagagtgctaggaaggtactag

SEQ ID NO: 959520 - DNA, 120 bp, Artificial Sequence
  ENSG00000258676_30 (sequence is synthesized)
gatgaggactttgaaagtttcaaaggggcttgtttggcattgctttttgttgattggcttgtttaggggaaaatgttggccctggctgcttctgtgtgctttctcaattccctgttcttt

SEQ ID NO: 959521 - DNA, 120 bp, Artificial Sequence
  ENSG00000258676_31 (sequence is synthesized)
cgacttacgacctcatttcctaaagttcaggccaactccggctgcactgcatgttaaagcaccagggaataagagcatcatggactagtactcctgggattcatcagggacaataaactc

SEQ ID NO: 959522 - DNA, 120 bp, Artificial Sequence
  ENSG00000258676_32 (sequence is synthesized)
accctagcaagaaaagtgtgggcatgctcctgacatacaggacatcctattcatttggcactcccaagatgacgttgttcaagcttttgaaacccattgttcattttgattaacacaaaa

SEQ ID NO: 959523 - DNA, 120 bp, Artificial Sequence
  ENSG00000258676_33 (sequence is synthesized)
ataacatactaccctttgaagttttttgaaatttcaaaataaattcaacccataactcagaaacaattaaggtaacaggactacacactgacgacttctcaaactctacaatagaaagaa

SEQ ID NO: 959524 - DNA, 120 bp, Artificial Sequence
  ENSG00000258676_34 (sequence is synthesized)
ggaaacaaaatgtttgttacttacagactacattatgattatgcaccaagataatataaaagtactgactgtaaaattcttagtattcataaaaattagggaaggggtcagatacaagat

SEQ ID NO: 959525 - DNA, 120 bp, Artificial Sequence
  ENSG00000258676_35 (sequence is synthesized)
aaaaatacaaaaatctccaaaataaatactgtttctattctaacaacaagcagaaaatatagggagaaaaatgcattcttaagagtattggaaaaaaatataaagaacactaataagaaa

SEQ ID NO: 959526 - DNA, 120 bp, Artificial Sequence
  ENSG00000258673_0 (sequence is synthesized)
atcagtcttttccccaacagagtaacgctttaatggggcaaatttgttctctgcacgggaaacatgtgggcccttgtcaggtgctgcatcagagtgagttgccctccaccagcttcctag

SEQ ID NO: 959527 - DNA, 120 bp, Artificial Sequence
  ENSG00000258673_1 (sequence is synthesized)
atctggccgtgtgaggaggcagaaggagccctctgagactttggggacatctcccatggtgtggccccaatcctgtccatctgatggtttgtccaccactgagtcctcccctctagaggc

SEQ ID NO: 959528 - DNA, 120 bp, Artificial Sequence
  ENSG00000258673_2 (sequence is synthesized)
gtatgtacaggcgggtattcaaggcattctgtgtaccaggcttgtgttggaagcgtgggacacaaaggcagagaagacctagtcccagtctctgagagctaatgaggtgtgctagatgca

SEQ ID NO: 959529 - DNA, 120 bp, Artificial Sequence
  ENSG00000258673_3 (sequence is synthesized)
ttcacaggcaagatcttcttatgttgtccaggctggtcttggactcctcagctcaagctatctttctgccttggtttccaaagtagctgggactataggcatgcattaacctgagttttg

SEQ ID NO: 959530 - DNA, 120 bp, Artificial Sequence
  ENSG00000272103_0 (sequence is synthesized)
aatcccagctacttgggaggctgaggaacaagaattgcttgaacctgggaggcagatattaccccacactcaacaaataaatatgaaagaactttacttacaggataacatcatgataaa

SEQ ID NO: 959531 - DNA, 120 bp, Artificial Sequence
  ENSG00000272103_1 (sequence is synthesized)
ataacatcatgataaaatttgcattttagaataactctacaattaacaataaaaagaagtacctataacattaccccacaaaagggataaggtgtggtgaacttggaaatttcatacaat

SEQ ID NO: 959532 - DNA, 120 bp, Artificial Sequence
  ENSG00000272103_2 (sequence is synthesized)
ttagaaatatgtattgagctgtaaaaatgttcatattcattgacataaaactttcacatctgaactcttgaggtggctatatattgcttttgtaatttcaatgaaaacagaagcttgggc

SEQ ID NO: 959533 - DNA, 120 bp, Artificial Sequence
  ENSG00000272103_3 (sequence is synthesized)
aactgaatgaaggaaggatggaatgtaagagagggtggagaaaggtgaatcaatgagaaagttaatgtaaccagtcaaatgatttaataatttattttttagcagcaaatctccttaaca

SEQ ID NO: 959534 - DNA, 120 bp, Artificial Sequence
  ENSG00000272103_4 (sequence is synthesized)
ataatactttcaacttaataatactttcatcccacatctagaaagcttacagcaaactttccaagtagtttgtctgttctcaccccaaggtgcaactccaatgcaacccacgcttgctga

SEQ ID NO: 959535 - DNA, 120 bp, Artificial Sequence
  ENSG00000272103_5 (sequence is synthesized)
ccattcttgctgcttcactttcatcactcctccataacacgtttatctgactaccaaccttctcataatatctatccactcaccattggttcccaccatccccacacattttggttcctt

SEQ ID NO: 959536 - DNA, 120 bp, Artificial Sequence
  ENSG00000272103_6 (sequence is synthesized)
taaatcaagggtaaatatagtcttgattgttcatgtcacctagtggtaagacaaaaactagcatgacagggtggaagtgaagattatgccatatttcagaggtttacatgttttccagta

SEQ ID NO: 959537 - DNA, 120 bp, Artificial Sequence
  ENSG00000272103_7 (sequence is synthesized)
gtgaatcacaactatcagaaatccatatgtatgtgggccacatacattttaaattataacaatagtagaattataacctattagctattcaaaagtatttagtttttggcatgagccaca

SEQ ID NO: 959538 - DNA, 120 bp, Artificial Sequence
  ENSG00000272103_8 (sequence is synthesized)
ttgtaaaactaaaatggttgcaacatatttgccatagaaatgtacagatagttggaagaaactccaatatgtcataacccaagaaggaatgatagcctatttaacaaatgatattgggaa

SEQ ID NO: 959539 - DNA, 120 bp, Artificial Sequence
  ENSG00000272103_9 (sequence is synthesized)
acggctttttgtgaatccagttttgttcaagccagaaatctagaggtcttccttaatacctctctcccttatcccctgaccagtaccccacccattcaatcaatcaccaaatcttactca

SEQ ID NO: 959540 - DNA, 120 bp, Artificial Sequence
  ENSG00000272103_10 (sequence is synthesized)
ttttgttttctaaatatccatcaaatctgtctacttctccctgtctccagcaacaccaacttagtcatcaattattattcgtagccagaaatggctaccatcatttcttgcctgtgttac

SEQ ID NO: 959541 - DNA, 120 bp, Artificial Sequence
  ENSG00000272103_11 (sequence is synthesized)
tataatagcttacgggcttctgccatccacaaagacactcatcccctcaactctttcttctgcttccatagtgataaatttgatcatgttaacctgctgttaaaatctttaaatagttct

SEQ ID NO: 959542 - DNA, 120 bp, Artificial Sequence
  ENSG00000272103_12 (sequence is synthesized)
cactactcttaagataaagattaaaattcttaataagtcacaaggctctacatggcatatccttgcctgcttctccagtctcgtctcttagttatctccaccttgcagcccaacaccagc

SEQ ID NO: 959543 - DNA, 120 bp, Artificial Sequence
  ENSG00000272103_13 (sequence is synthesized)
cactctggtcctctttctaatactttaaatgatatcatgctccctgctgccaaggaacccatatttcctttcattttgggcacttatctcagtttatatttgtatgttattggtgtgatt

SEQ ID NO: 959544 - DNA, 120 bp, Artificial Sequence
  ENSG00000272103_14 (sequence is synthesized)
atttgatttatgtctgccttcactccctaaactgtaaattccactagagctaggactatgtttggtttatcagcacctaatagaatatgtacttgataaatatccactgaatgactcact

SEQ ID NO: 959545 - DNA, 120 bp, Artificial Sequence
  ENSG00000272103_15 (sequence is synthesized)
ggataaataaatgaatgcaaaactgcaatctcacattacatccactaaagcaaagtgcagatgaaattctaaattttaaatgtaaatcaaaattaatccatcattaaaaattataggtta

SEQ ID NO: 959546 - DNA, 120 bp, Artificial Sequence
  ENSG00000272103_16 (sequence is synthesized)
ttcaggtaagttaatagaactcaggatgtgaacagacttttaaaatattttagagtgactcatagaaaaatgatgtactacttataattgcaaagaaataaaaacttaaatgtctaccaa

SEQ ID NO: 959547 - DNA, 120 bp, Artificial Sequence
  ENSG00000272106_0 (sequence is synthesized)
gcgcagccccagcccatcccgtgcggaccctacgccgagtccagcccggggctgctgggccagcgggagcgggaaccggacggcgctcgcgttctgccagagcggagaacgactcgggga

SEQ ID NO: 959548 - DNA, 120 bp, Artificial Sequence
  ENSG00000272106_1 (sequence is synthesized)
cggtgcggaggaccaggggaggagatccgcgcccgcacgcaccatcagccgagaggacggcccgcatcgcgccagtgacctaggagcgactcggggacggcttcgggctcccaggccctc

SEQ ID NO: 959549 - DNA, 120 bp, Artificial Sequence
  ENSG00000272106_2 (sequence is synthesized)
agcgactcggggacggcttcgggctcccaggccctcctgggccaccgggcactgaggagagcggcggctggaaactgtgggacccgaagggcgggagcccagggcccgcccccgccggag

SEQ ID NO: 959550 - DNA, 120 bp, Artificial Sequence
  ENSG00000272106_3 (sequence is synthesized)
ggcagggcaagcaccggaagtgcgtcacgcgggagcgtctgcgtcgcctaccctgcgtggcgcagctaggttccgagcggcttagcctccgggcgcctgcgcagtggcggtcctagagac

SEQ ID NO: 959551 - DNA, 120 bp, Artificial Sequence
  ENSG00000272106_4 (sequence is synthesized)
gcactcggttgccatagagacgggggcttgggagcgacgtcgcgctcgctggcactggcggcacttgccgcgccgcagccacctctttccgactccaccagtgcgggccctatccggggt

SEQ ID NO: 959552 - DNA, 120 bp, Artificial Sequence
  ENSG00000272106_5 (sequence is synthesized)
tttgagtcacgcagacctggacacagcgagaaacggcagtccgggcccgtcctcccgccccgggttctgcaccccagagttggacgcttgcttctcgctttctcctgagagaagtctccg

SEQ ID NO: 959553 - DNA, 89 bp, Artificial Sequence
  ENSG00000272106_6 (sequence is synthesized)
tggacgcttgcttctcgctttctcctgagagaagtctccgcgtttctgaacaatgcactgctagtttctcgagacggagcctcgccctg

SEQ ID NO: 959554 - DNA, 84 bp, Artificial Sequence
  ENSG00000272106_7 (sequence is synthesized)
gggcttaaactattctcttgcttaccacgcacagctaatttttgcatttttagtcaagacggggtttcaccattttggccaggc

SEQ ID NO: 959555 - DNA, 120 bp, Artificial Sequence
  ENSG00000272106_8 (sequence is synthesized)
agacattgcgtacttccggagaaggtccctgagaacctggctgatcttccccgctgcacccctcacgtggtcctgttagctcccaaactgtcaacctgaaaggaaacccagaggcaggct

SEQ ID NO: 959556 - DNA, 120 bp, Artificial Sequence
  ENSG00000272106_9 (sequence is synthesized)
ctccaggacaagtgagttaatctgggaatcgcagggggttgcagcctaggctgttcgtgccatgacagatcataggcctatctgagagggccgggcgaaggggaaaatacagatgagctc

SEQ ID NO: 959557 - DNA, 120 bp, Artificial Sequence
  ENSG00000272106_10 (sequence is synthesized)
acaaaagttgttttgtaacaaaaaccactggctgtgggcgcttgctgcaggagtgggcgttagcttgttgttggagagagccttaccaggccgacgtccttgtgcaagctgcttatctag

SEQ ID NO: 959558 - DNA, 120 bp, Artificial Sequence
  ENSG00000272106_11 (sequence is synthesized)
aatactgcagtcctgaggaatttccctgcagtaagtccggttacaggcaaacgtgcaggacgtgcaggagcgtcttgtgaggaggcctgctgcaggtattcctgcatgagagctccccct

SEQ ID NO: 959559 - DNA, 120 bp, Artificial Sequence
  ENSG00000272106_12 (sequence is synthesized)
tcgtggcctcccgactccatttgtttagggattggtggaagtagttccattttggtacctgcaactttcacagctgtcgtgatgaaatcaggcttagctcttcatgattgagtacctgct

SEQ ID NO: 959560 - DNA, 120 bp, Artificial Sequence
  ENSG00000272106_13 (sequence is synthesized)
gttcactgctacagtataaaaccatgccacaattcctgtacaatctttttttttcttttgagttaataattacctaatattttcacatatctagctttttactaacccatggccagcctt

SEQ ID NO: 959561 - DNA, 120 bp, Artificial Sequence
  ENSG00000272106_14 (sequence is synthesized)
tttttcaagtaccccaacgttttcgccacatgcctaacgataccgttttccaaaggctcaaacacatccgttgtgtctaactgattctcctgttccgacctagaccgatcacttcctgac

SEQ ID NO: 959562 - DNA, 120 bp, Artificial Sequence
  ENSG00000272106_15 (sequence is synthesized)
ccggctgcacagctcttatctcgagcttttctctgctctcatccttgagactcactttgtctgtctcctttcttggattccctgtgtaaacgaaaaataaaatcctaagctctctaccaa

SEQ ID NO: 959563 - DNA, 68 bp, Artificial Sequence
  ENSG00000272108_0 (sequence is synthesized)
ctctggataattttttttttttttttgtagagacaggatcttgctatgttgctcaggctggtctcaaa

SEQ ID NO: 959564 - DNA, 120 bp, Artificial Sequence
  ENSG00000272108_1 (sequence is synthesized)
ttacaggcatgagctgccatgcccagcctcaaatttctttaaaatgatttttatctttcttcaacgataaggttcttgcctatattttaccagagagcaactagtttcctgcgtatccct

SEQ ID NO: 959565 - DNA, 120 bp, Artificial Sequence
  ENSG00000272108_2 (sequence is synthesized)
accagagagcaactagtttcctgcgtatccctctattttatctttctttgtatatttaaaatgaaaaaaattaaatatcatgcttcagatctggcaaccaattatgtaaatagtcatatg

SEQ ID NO: 959566 - DNA, 120 bp, Artificial Sequence
  ENSG00000272108_3 (sequence is synthesized)
aatccttcagaatggataacacagcttttctgactggtgtgaaatagttttcaggtgctcattctttacttcattagcttatcttatatcattagcttatcctccattcaggtataacag

SEQ ID NO: 959567 - DNA, 120 bp, Artificial Sequence
  ENSG00000272108_4 (sequence is synthesized)
atcttttttttctgataaatatggcagtttagggaaataaactatggcataatatgctaggccattcttctaggccacgcttcttgattgtaaccttaaaccctttatcagaacctaaac

SEQ ID NO: 959568 - DNA, 120 bp, Artificial Sequence
  ENSG00000272108_5 (sequence is synthesized)
aacttttcaaaagatctatacatatttttatccaatgtttaaggctatgagtaattcattatgtcactcttcatttttttcacctgataatgatctcgacaaaaatgttgagtattagtt

SEQ ID NO: 959569 - DNA, 120 bp, Artificial Sequence
  ENSG00000272108_6 (sequence is synthesized)
ttccttccaatgtgtaagttgtataaacatctctctttactggtaactaactatctctaaagggagacaagtaatttttaagtttctaataataattgaaaatttgaatataaatatatt

SEQ ID NO: 959570 - DNA, 120 bp, Artificial Sequence
  ENSG00000272108_7 (sequence is synthesized)
taaattatctgaaaagttgttcacctctccagctctgcttaggtatagaaaagaatggtttctggagtcacatagtaacagtttaaatcctggctctgccgtttcacatgctgtatgact

SEQ ID NO: 959571 - DNA, 120 bp, Artificial Sequence
  ENSG00000272108_8 (sequence is synthesized)
ttggacagattatttaaactctgtgtgccacaattcttcgtctttaaaatgtggctaataagactgcccacctcatagggttgttggggtgataaaatgagtcaacatacgcaaaatgct

SEQ ID NO: 959572 - DNA, 120 bp, Artificial Sequence
  ENSG00000272108_9 (sequence is synthesized)
tagaaaaatatctggtgtatagtggatatatatgttaatgttattgagatttcatttacttttggattgcaaaaggaactgaaaagacccaattcttactctatgtcaacatgtaggaat

SEQ ID NO: 959573 - DNA, 120 bp, Artificial Sequence
  ENSG00000272108_10 (sequence is synthesized)
aagtaaacaaaatatggtttgaattttgtcctgaatgcattaacttgaatctaactaaaacctggttactatattagaaacaattttctctttgatttgcccaggagatttgttttccag

SEQ ID NO: 959574 - DNA, 120 bp, Artificial Sequence
  ENSG00000272108_11 (sequence is synthesized)
ccaggagatttgttttccagttatgtctaaaataatactctttctttttattcttttcagtatatatttttattgtttttcatttaatagtgatgcatagtgtatcttttctgatttact

SEQ ID NO: 959575 - DNA, 120 bp, Artificial Sequence
  ENSG00000272108_12 (sequence is synthesized)
tactgccattgatatatcccttataggaattaattaatagaaatagaatcaaagtaaatttagttatataatgcttagcatgtattatattctcaaaattctgtattcagtttcagacat

SEQ ID NO: 959576 - DNA, 120 bp, Artificial Sequence
  ENSG00000272108_13 (sequence is synthesized)
ctgtattcagtttcagacatgttcaaggctgaatatatgatctgacaataatctgcttatatagataaaaacatcatttgagtggattaatttattaattcaactggtatttactaaata

SEQ ID NO: 959577 - DNA, 120 bp, Artificial Sequence
  ENSG00000272108_14 (sequence is synthesized)
tggtatttactaaataaaatccatgtatctttcacaatttttactaatactttctatcactatcagaatctgaaatctcagatttcatgctttaaaaagaattaatttaacatgaattat

SEQ ID NO: 959578 - DNA, 120 bp, Artificial Sequence
  ENSG00000272108_15 (sequence is synthesized)
tatgaattggataactaaataaaataacaagatatttaaggggagaaaatcttatatgtggcaagataagtggtgctccattcagtgtattaattgcaaccaataaattggttaactgtg

SEQ ID NO: 959579 - DNA, 120 bp, Artificial Sequence
  ENSG00000272109_0 (sequence is synthesized)
atcagaggaacatctgatcaagcaccactccccactgacactggaccttggagaaagtcaccctagtaccctggaaatcaaatgctgacacagtggcagccaccactagaacgaggtctc

SEQ ID NO: 959580 - DNA, 120 bp, Artificial Sequence
  ENSG00000272109_1 (sequence is synthesized)
tccaacagccccagagaagatctagaaattccaactcgttatgagctgacagaaaggctgatgtgctgcggaaggggttggtaccgggaccttggatcagaggctttgcagggttgggtc

SEQ ID NO: 959581 - DNA, 120 bp, Artificial Sequence
  ENSG00000272109_2 (sequence is synthesized)
catgaggggtccaaagagaaacagttatgtctcaacgaggatgcagtgcatgagtggggcttggtaaaaactccatgtagtgaataaagggcttcactaataaattctcttattaatccc

SEQ ID NO: 959582 - DNA, 120 bp, Artificial Sequence
  ENSG00000272109_3 (sequence is synthesized)
tgaacagggagaacatttttttgcccttgaagttggggaactagagagtaaatggaacttgtgttttgctttccatatggaattactggcagcaacagcttaatgagcatcgcccctgcc

SEQ ID NO: 959583 - DNA, 120 bp, Artificial Sequence
  ENSG00000272109_4 (sequence is synthesized)
gtggttccccagaaggtcagcgtggtaaggtttgcatggatcaagagatcataatgaactgggatgacgtactcaggaagtcgtattttattccaaggaaatggtgtcccatcactacgt

SEQ ID NO: 959584 - DNA, 120 bp, Artificial Sequence
  ENSG00000272109_5 (sequence is synthesized)
tttggagatgcttcagtgctctgacaccatgaaggagtggacacagttaagagagccaacagtgaggaaagtagaaatgacatggttgcaagggaccatttgaggggcagaaacaccatc

SEQ ID NO: 959585 - DNA, 120 bp, Artificial Sequence
  ENSG00000272109_6 (sequence is synthesized)
ttcttgctctacctacctagcggcacaaatgtacaaaagcaaaaatatatgtcattaaaatgttattgacacagcataatttcagaatgtatccacccagcattcacagaaataggcata

SEQ ID NO: 959586 - DNA, 120 bp, Artificial Sequence
  ENSG00000272109_7 (sequence is synthesized)
aacttccaaaagtactaggtcttttcctgaaagtaaaaggaccttccctatgttatggtttcatataagaaagatgtttacagttagcaacaatcattaacacgtactagaaagcatcat

SEQ ID NO: 959587 - DNA, 120 bp, Artificial Sequence
  ENSG00000272109_8 (sequence is synthesized)
ttgatgttcaaagtttaaattaactctacctgtcagggttcttggttgaaagcaaccgaacaagctctggctgatataggcagaaaaggaatcattaggggatcctgagtggctcactac

SEQ ID NO: 959588 - DNA, 120 bp, Artificial Sequence
  ENSG00000272109_9 (sequence is synthesized)
cacattagagagagtcttggaaatctcataatcccagttcaaaaggcaccacccagcaacagcttaatgagcatcgcccctgccccaagacgggatccagaggactctgtgaaggtggca

SEQ ID NO: 959589 - DNA, 120 bp, Artificial Sequence
  ENSG00000265490_0 (sequence is synthesized)
tcttctgcatcagtttctatgacgacataggcagccgagtagtcagggtccgtgtgctgcaggagaagagttccccgccgaaacaatgccagtgtgagaaacccgaaaagaaccatgaga

SEQ ID NO: 959590 - DNA, 120 bp, Artificial Sequence
  ENSG00000265490_1 (sequence is synthesized)
acaaagggctctgaatggagaaaaggaatgtcctcctgaaagatccaaaatgtttcaacaagagcaatactccaaaaagccaggcagaagatgtgaatgcattcataaagaagaattgtg

SEQ ID NO: 959591 - DNA, 120 bp, Artificial Sequence
  ENSG00000259995_0 (sequence is synthesized)
ccagagggccttcccaggagggtaggcattaatgcaagcaagtggtggtctgcatagctgagcagagtctgctgtgtttctgataaattgtgaagagccatagacctttgcctaatgaag

SEQ ID NO: 959592 - DNA, 120 bp, Artificial Sequence
  ENSG00000259995_1 (sequence is synthesized)
ttccacgtcctccagtttctgcaataatactacataaacagagaaaaaacaggatccggagacaaagacaagcctggaaataccttcaacactgttaaataggtccatttccttatgctt

SEQ ID NO: 959593 - DNA, 120 bp, Artificial Sequence
  ENSG00000259995_2 (sequence is synthesized)
tttctcaataactgaaatttctccatttccctccatttcccatgatgaagtttgcccagaccaattggatgatgatatcacctaggatatcaccaatactatcagctttcttcactctgt

SEQ ID NO: 959594 - DNA, 81 bp, Artificial Sequence
  ENSG00000259997_0 (sequence is synthesized)
aggcttctggatacaccttcacctactgctacttgcactgggtgcgatgggcccctggacaagggcttgagtggacaggat

SEQ ID NO: 959595 - DNA, 120 bp, Artificial Sequence
  ENSG00000259998_0 (sequence is synthesized)
aaggtgccacagcaacccccaaatcttgggagagggtctttgggggctttggactttgatcacactgaaactccaagtgaacgtgacttttctacagtcactactcatttttcctgttca

SEQ ID NO: 959596 - DNA, 120 bp, Artificial Sequence
  ENSG00000259998_1 (sequence is synthesized)
tctcccacttgattatgggcaacttaatttatcttagtgccgcagtggacactggcaagtagtagacagtcaatgaatacggacagaagaaaggaagggaggatgggaaggaaaggagag

SEQ ID NO: 959597 - DNA, 120 bp, Artificial Sequence
  ENSG00000259998_2 (sequence is synthesized)
agggaagggatagagggagagaggagcttagcgtgttgaaagcatgtgtacagaaacaaatgaaacaaaaatcaaatgaacagcaggacccggctcaagagacagccgaaatgccagaaa

SEQ ID NO: 959598 - DNA, 120 bp, Artificial Sequence
  ENSG00000259998_3 (sequence is synthesized)
attgtgtggaatctctgaagaatgcaatgggctcagctcaatggtgaagaggtctcctatgtcccttgtggccaagacaaaccaggcaaacctgaggctggacacacagaacagatattt

SEQ ID NO: 959599 - DNA, 120 bp, Artificial Sequence
  ENSG00000259998_4 (sequence is synthesized)
ttctcctctttttcttgcatctccaaaatttctaacttcctcttgtatgaaggcacctagacttagtgagtttccctttgtgacttggaagttgtgggaagggagaatcagtcaggaaat

SEQ ID NO: 959600 - DNA, 120 bp, Artificial Sequence
  ENSG00000259998_5 (sequence is synthesized)
gaggtgtcagtaggctctttagcaaactcagccagtagatggctaaaaaaggacttggttactttgggtccattttgtctatccatgggatacgaccatgagcgcggggaagagctctct

SEQ ID NO: 959601 - DNA, 120 bp, Artificial Sequence
  ENSG00000259998_6 (sequence is synthesized)
acctgagcatgtggactgaaaagagtagaaccttgggggatcctgaaggaagaggggaaaccaggaaaacagaggaagttaacttaggaggggtaagggaagaagaatgcaagattgacg

SEQ ID NO: 959602 - DNA, 120 bp, Artificial Sequence
  ENSG00000259998_7 (sequence is synthesized)
ttgcagaagccagaggccagggctaagaacagggtaagggacttttgagaaaggagtagcagagcattcacattagataagttctgaaaggtgtccactgagcctgggtttgttatctag

SEQ ID NO: 959603 - DNA, 120 bp, Artificial Sequence
  ENSG00000259998_8 (sequence is synthesized)
aaggtgacctactgtaaactttgccagagcattttcagtggtgaagaagtgagacctttggctcccagtgaagggagcaagcccagttaggtttctttaacaagcttggccaggaagatg

SEQ ID NO: 959604 - DNA, 120 bp, Artificial Sequence
  ENSG00000259998_9 (sequence is synthesized)
caccttcataagctgcacaaagagagcctgatgagagagggtgagaacgcagaagggaaaggaaacactgggcagaaaacagggtcttgggccaagaaaaggggagagggggacatttgc

SEQ ID NO: 959605 - DNA, 120 bp, Artificial Sequence
  ENSG00000259998_10 (sequence is synthesized)
agagcatcggtagtgggattgccttgaacttgagtttgagtgtaaacaaagttcaccaaaggggatggggaggagacagacacagaattagacccattcataggcttaggggaccttgca

SEQ ID NO: 959606 - DNA, 120 bp, Artificial Sequence
  ENSG00000259998_11 (sequence is synthesized)
tggcccttttgagggcttcgttttcctcagtgaggtggaaggcaaagccaacttcctgaggcatgaagtggggatgggatggggatttggtaagactggtaactgtttggaatagctgtg

SEQ ID NO: 959607 - DNA, 120 bp, Artificial Sequence
  ENSG00000259998_12 (sequence is synthesized)
gtgggatatgggtgagggttattacgggatgctgtgatcccgggagaggctggaggccctgtgtatgactttctcaagcagtgttcagcagcgcaggtgtaggagcattggagagggaga

SEQ ID NO: 959608 - DNA, 120 bp, Artificial Sequence
  ENSG00000259998_13 (sequence is synthesized)
aggtttggacctgtccaagatcggtaatagcgctggtgggcctgaaatagaaggggccaggtaattgaggatctcaccaagaatggaaaagggtctcactctgggtccttctgaaataaa

SEQ ID NO: 959609 - DNA, 120 bp, Artificial Sequence
  ENSG00000259998_14 (sequence is synthesized)
aagggaagccacaaaaagggagattggctgggaagtatggagggaagtataggatcaatgagcctgaagacctgttgtaaggtgaggaaagaaataagagttggacggttaatgagaggt

SEQ ID NO: 959610 - DNA, 120 bp, Artificial Sequence
  ENSG00000259998_15 (sequence is synthesized)
agccaggtcttggaatctgacatttccaagacagtgctatgatagggagtggcaaggtctacacagagagtatggctgttggaggaatagagttgtgaatttttcggcagacctttattg

SEQ ID NO: 959611 - DNA, 120 bp, Artificial Sequence
  ENSG00000259998_16 (sequence is synthesized)
ggcttgcttattgttcaattcagtactgtaactacagttctctaaatcttgatggagtaatctacatccccaagaaattatgataatgaaggttagggcactcaaaactatttttcttcc

SEQ ID NO: 959612 - DNA, 120 bp, Artificial Sequence
  ENSG00000259998_17 (sequence is synthesized)
ctagcatttagggattctgagtatgagtctctgtctttctctcttcctttccttttatgatactgaataattacaagaagacagttacagaaagttatagaccttgaacatatgcaagta

SEQ ID NO: 959613 - DNA, 120 bp, Artificial Sequence
  ENSG00000259998_18 (sequence is synthesized)
cttccctctaccttcattattagattcttgcccagctaggcaggtccaagattttgtttctggctatgctaattttggacaataaaaagaatatcctataagcaaaagcaccatctttca

SEQ ID NO: 959614 - DNA, 120 bp, Artificial Sequence
  ENSG00000249609_0 (sequence is synthesized)
agtgctgcagctgaggttcgggttcggcccgcgcccggcgtgaacaaagcggctgccaaggcctgggactgaggggactgagccgccggctccacgccgcccccaggcccagaagaaaca

SEQ ID NO: 959615 - DNA, 120 bp, Artificial Sequence
  ENSG00000249609_1 (sequence is synthesized)
ccgactgcgggccgggcacagcacccggccggggaaaggacgccccgagttacgcgcaaacttcctttgaatggcgcccaggtgcccggaaagatgcgtacacgtggaccagttttcact

SEQ ID NO: 959616 - DNA, 120 bp, Artificial Sequence
  ENSG00000249609_2 (sequence is synthesized)
gaaggttttacacacgaaccgtgggaggtgtggatacatcttggccatcactttgaacaagcctcagaattgctaaaactagtatcagtagaagcactgatgagaatttctgccaagttt

SEQ ID NO: 959617 - DNA, 120 bp, Artificial Sequence
  ENSG00000249609_3 (sequence is synthesized)
gaaaaagaatattccatcctcctctgaacactgaagattctgatcaagtcttctccttctattacttttatttcattcttccttgactaaaacttagcgctctgtggatttgagataaga

SEQ ID NO: 959618 - DNA, 120 bp, Artificial Sequence
  ENSG00000258028_0 (sequence is synthesized)
ggtttgtcacagatacactaatcatataaatgtaactcatacatttacaaggctatacatcacactgcagactgaaatctaaatttaaagaaataaactggagcttggggattctgcttt

SEQ ID NO: 959619 - DNA, 120 bp, Artificial Sequence
  ENSG00000258028_1 (sequence is synthesized)
agaaataaactggagcttggggattctgcttttgcatcttcctcgttttctcttgccgctgccaagtaagaagtgcctttcacctcacaccatgtttctgaggcctccccagccatgtgg

SEQ ID NO: 959620 - DNA, 120 bp, Artificial Sequence
  ENSG00000258028_2 (sequence is synthesized)
tcaggttccaaaattattttaggcatgggatcaaagaagaaacttctttgtagcagcatcccagtactaggactttttgtctctgcatggaaatctgaatatatttatatgttggagtga

SEQ ID NO: 959621 - DNA, 120 bp, Artificial Sequence
  ENSG00000258028_3 (sequence is synthesized)
gacctaactgtttgctacatgtcaccaaagttaaagtggctaccttaatgagcagccaggatgccatcatctccgacctgaatgacaataacctccaaaccagcctttgtatactccttc

SEQ ID NO: 959622 - DNA, 120 bp, Artificial Sequence
  ENSG00000258028_4 (sequence is synthesized)
ctgctgctctgcagtccacttccacagaccagccaactgaatctccttatagattcataatggccatcagcacaaagatgttttatctgcagtcaaccagtcatgtttcatgatggcatc

SEQ ID NO: 959623 - DNA, 120 bp, Artificial Sequence
  ENSG00000258028_5 (sequence is synthesized)
tcatgtttcatgatggcatcaaaatgtgtgctggagtttgctgggggtccactctagatcctgtttgcctgagtatcaccagcggacactgtagaacagcaaagattgctgcctgctcct

SEQ ID NO: 959624 - DNA, 120 bp, Artificial Sequence
  ENSG00000258028_6 (sequence is synthesized)
actcattcaagtaaatacatttaaaaattataccttttgctcatactagtaattgggtcagtcatgctcttgaaggaggcatactgggagccatacattaccagaggcagaggattcaat

SEQ ID NO: 959625 - DNA, 120 bp, Artificial Sequence
  ENSG00000258028_7 (sequence is synthesized)
ggatgttttctgttttctcttcttcgtgctctgtaattgagacacagaacaaaggtaatctttgcttagcgtaataatggagagtgactagaccaacaaaagatatgtcagaatcatttg

SEQ ID NO: 959626 - DNA, 120 bp, Artificial Sequence
  ENSG00000258028_8 (sequence is synthesized)
caagggtaaaacttacgagtgtatttgtgaacctgcttgaacgctccaatgcacatgtgtctgtacacaatttctggcctattaacatttcctaatattttaagcctctgaaattattgt

SEQ ID NO: 959627 - DNA, 120 bp, Artificial Sequence
  ENSG00000258028_9 (sequence is synthesized)
tataatatttggtatccttgggtaaaaaatgacatttaactataaaaagaatatttcatcaatcatttaaaagttgccattattttctttataagtctatggatgataacaaaaataaaa

SEQ ID NO: 959628 - DNA, 120 bp, Artificial Sequence
  ENSG00000258028_10 (sequence is synthesized)
gagaaaacaccaattagagtttttaacaaacagagaagctcgctgtggggtacagtttttaaatcagacaagagaaatttgggcttttttctctacctcggctctgctgtactgtgctct

SEQ ID NO: 959629 - DNA, 120 bp, Artificial Sequence
  ENSG00000258028_11 (sequence is synthesized)
tgctggaactgaaatttatgggattcagaatgcaccccaggaagaaaacacaaacaagcgggtgctctgggcattgtatctgagcagatgaaagcaaatattattctgatagcttttcat

SEQ ID NO: 959630 - DNA, 120 bp, Artificial Sequence
  ENSG00000258028_12 (sequence is synthesized)
tttgccctccaaggagctctgcgttattatccacgactagggattttaatagtcaaactaccacaaatttgtcaacactcaatttctgcctggttacagagtacagcttccatgcatgga

SEQ ID NO: 959631 - DNA, 120 bp, Artificial Sequence
  ENSG00000258028_13 (sequence is synthesized)
ggttaacacaggtttctctagccaaggaattttttgaagcaaatcatacttgcatagtctgttgcagctaatgtgcctccattgatgacgccacactacgttggcaggaggaagactaag

SEQ ID NO: 959632 - DNA, 120 bp, Artificial Sequence
  ENSG00000258028_14 (sequence is synthesized)
tgctctgccttaactcaggccaggctgtgggcgcaagtgcaccaacggctttgagactaacacacagctcagaacaagagaaaagaaaatcagacaaatgatgtgctctcatttattctt

SEQ ID NO: 959633 - DNA, 120 bp, Artificial Sequence
  ENSG00000258028_15 (sequence is synthesized)
cactttaatcctaaagaggtgaaaatctgacagctcaaaatgaagcaaaaacccaagattaaaacagacaccattttgtgcccactcagtcttctttccagggtcatacatgtgttgtct

SEQ ID NO: 959634 - DNA, 120 bp, Artificial Sequence
  ENSG00000258028_16 (sequence is synthesized)
gctgtaacacaaacagtactgaaacacacccacccgtttgccattttgtgggtgacgaaaaggagagaagtcctgcagcctatgtctgggaacccagacctcagggctctttaagccagg

SEQ ID NO: 959635 - DNA, 120 bp, Artificial Sequence
  ENSG00000258028_17 (sequence is synthesized)
actgtgacatgctgtaacaacctctttgaggctctgcagtttctgggatctccaagatttcgggcgccactgcattccccttgtccagatgttggtgcccacagcagaagtcacctgcag

SEQ ID NO: 959636 - DNA, 120 bp, Artificial Sequence
  ENSG00000258028_18 (sequence is synthesized)
tacatctggtacagctgcagccttgcatggagttggcacctgtgccagcacctggagctgcctgtccatcacagctggcatgcctggctgtgcacagtggccaggccccacgcttacctg

SEQ ID NO: 959637 - DNA, 120 bp, Artificial Sequence
  ENSG00000258028_19 (sequence is synthesized)
ctcacacacccctcactgcttcatgcctagctcacacttggcaggtgtgggatccaggctggtagcaggagctgagtgcatcatgctaggctgattggacagaacaagcccagtaggcct

SEQ ID NO: 959638 - DNA, 120 bp, Artificial Sequence
  ENSG00000258028_20 (sequence is synthesized)
gagcaaaacttgggcaaagacgccaccggccatagaggtttctggctggaaaccagtgacacccaaaggatcctgcgacagtatcacaccaaataaagggaagtgctgacaattatttac

SEQ ID NO: 959639 - DNA, 120 bp, Artificial Sequence
  ENSG00000258028_21 (sequence is synthesized)
tcatttaaactaaataattcagatacagaacatcttgtcatgtttgtctagagaaaatggttccataggtaaaattaagaggctaatttccaaagttgaatattggcacaggaaaaaaaa

SEQ ID NO: 959640 - DNA, 120 bp, Artificial Sequence
  ENSG00000258028_22 (sequence is synthesized)
ccaagtatgtatatagagagaatagctcagaaagaaaaaaatgtaactctatgcaattgagagagacgatgtaacttgaaaggattaacaatgcacaacgtcattgatcagctgaaaagc

SEQ ID NO: 959641 - DNA, 120 bp, Artificial Sequence
  ENSG00000258028_23 (sequence is synthesized)
tgattctaaaaatgtataagcaagaagaaccccacttctaattgctactgagcattgcccagatcttagcacctaaagttataagcaatccagaacacatgttattgggtgaactgtgtc

SEQ ID NO: 959642 - DNA, 120 bp, Artificial Sequence
  ENSG00000258028_24 (sequence is synthesized)
ccccaaaatttcagatgtggaagccctaaaccccagtacctagaatgtgactgtatttggagataaaggtcttaaaggaggtgatgaagttaaaatgaggccattagggtgagaatcaat

SEQ ID NO: 959643 - DNA, 120 bp, Artificial Sequence
  ENSG00000258028_25 (sequence is synthesized)
acaatctgattggtgtccttgtaagaagaggaaattcggacagagagagagggatacaggaatgcaggcgcacaagagaaggaccatgcgaggagacagcaaggaggcagccatctacaa

SEQ ID NO: 959644 - DNA, 120 bp, Artificial Sequence
  ENSG00000258028_26 (sequence is synthesized)
cctcagaggaaaccaaaccttgaatttgaacttctgcctccagaactgtggaaaaaatacattttttgttgtttaagccacccagtctgtggtattttattatgggggctctagcaaact

SEQ ID NO: 959645 - DNA, 120 bp, Artificial Sequence
  ENSG00000258028_27 (sequence is synthesized)
aatacaacgtatttttttttgattcagtaaaatcaaattattggcttctccttgcacacaattggctcagtcttgccaatatgtgtacatattagttcttattatgtccaccaatctctc

SEQ ID NO: 959646 - DNA, 120 bp, Artificial Sequence
  ENSG00000258028_28 (sequence is synthesized)
cttcaaaatgtagcttaacatctactttctccagggaccgtctcctacttattccattccaattgattactctcataacatctgagtcttaagaaagtcatgtgtttgtatatctgtgtt

SEQ ID NO: 959647 - DNA, 120 bp, Artificial Sequence
  ENSG00000258028_29 (sequence is synthesized)
acttcagaaatactatcatttgttggggttgttgctgtgctgtgtgttactggctattgatcaggcttcctaaagtcaggaaatattcttctccctgatggcatgattctcctctttcta

SEQ ID NO: 959648 - DNA, 120 bp, Artificial Sequence
  ENSG00000258028_30 (sequence is synthesized)
tttcaatggttatgaaaaaaggcaaaattcactctttgccagacactcttataatacattatatgccttgtctcatttaacattagtctttgtgttaaagaaaataaactacataaaatg

SEQ ID NO: 959649 - DNA, 120 bp, Artificial Sequence
  ENSG00000258028_31 (sequence is synthesized)
gattccatcacctcagcactttgcacttgaatgtcattggtcaaccagcacgatcctagaagaaaataacagagctgcaatcatgtgaatgacggtataggaagaaaaaaaaacgagaaa

SEQ ID NO: 959650 - DNA, 120 bp, Artificial Sequence
  ENSG00000258028_32 (sequence is synthesized)
acagctactagtagttgaatgaagaaaattcaactatatttatggaatagtcatttatgcgatactcattattctgaagaacaccttctgtaatgacccaaaaccagttcagaaaaccac

SEQ ID NO: 959651 - DNA, 120 bp, Artificial Sequence
  ENSG00000258028_33 (sequence is synthesized)
aacacttctgaattcaatctggaggctatgctacaatttgatccttgtgagtggtctggaggcgatgaaacaaaacgaaatcttgaaaagaagaagcattactttgcaagaaacttcccg

SEQ ID NO: 959652 - DNA, 120 bp, Artificial Sequence
  ENSG00000258028_34 (sequence is synthesized)
caggtaaggtctctaacagacctccaagtgatgggaggctatagagaagaagctgcttctgccatcctcaatggttcaggagcatctgggagctgataattctctgacttgtccacccaa

SEQ ID NO: 959653 - DNA, 120 bp, Artificial Sequence
  ENSG00000258028_35 (sequence is synthesized)
atgttccccaatgttcccattttgggttagatggtctcactcagtttctattagggccctgactttaacccagaaaacctgttacgtctctgcatggcacctctactactactactacta

SEQ ID NO: 959654 - DNA, 120 bp, Artificial Sequence
  ENSG00000258028_36 (sequence is synthesized)
tactactactactactactactactatcactatagtgataaccagatgggagaagaattaatatcttgcaaatgattgatatcagaacaattaaggaactcctgtaactcaacagcaaca

SEQ ID NO: 959655 - DNA, 120 bp, Artificial Sequence
  ENSG00000258028_37 (sequence is synthesized)
aacaacaacaaagaaagaactcccatggaatattggacaaaagttatgaaaaattcatttgcagaaaaataaaaagcatttgaggaatgattcaaagcattacagagaaatgataaacac

SEQ ID NO: 959656 - DNA, 120 bp, Artificial Sequence
  ENSG00000258028_38 (sequence is synthesized)
taagacacaataaagtatcacttaatacctaggactggtaaaaatgaaaatgctgaatttgatgagggatgttggtgaagtgagaacggagtaaccaccacgctccgctggtgagcatgt

SEQ ID NO: 959657 - DNA, 120 bp, Artificial Sequence
  ENSG00000258028_39 (sequence is synthesized)
agcctgttgcggtccctgtgaagagtagctgacattactgagatgagtgtctgtatacccgggaactagcaagtgcactcctgaatttatattccaaggaattttcagactaaatcaaag

SEQ ID NO: 959658 - DNA, 120 bp, Artificial Sequence
  ENSG00000258028_40 (sequence is synthesized)
cgagaaagagaagtgaactacttgttcttaaggaactgaagattgttacattcatactggactgccatgcaatgtgtgcaaaactggtaacaattttccaaaaattataggggtattctg

SEQ ID NO: 959659 - DNA, 120 bp, Artificial Sequence
  ENSG00000258028_41 (sequence is synthesized)
atgatagtaacctcatcctcccgagaacagaagagctggggcatttctgaaaggattaatgggaccaatttgccttatctcaagagattgatgtattctctctgattatgctacagtaga

SEQ ID NO: 959660 - DNA, 120 bp, Artificial Sequence
  ENSG00000258028_42 (sequence is synthesized)
ctgagaattgacttctctaaagggtagttggttctaggagtgatccaaatctataattctatcttatgaaattctacaggctttctttaaaaggcttataattccttgacttcaataagg

SEQ ID NO: 959661 - DNA, 120 bp, Artificial Sequence
  ENSG00000258028_43 (sequence is synthesized)
ggaattctcattttctaacatatctatgaaccacatcattaatacaatcatctatttctccccaattttaggcaccaaaactggggagggaatagagcaacatggtgctctattaaatct

SEQ ID NO: 959662 - DNA, 120 bp, Artificial Sequence
  ENSG00000258028_44 (sequence is synthesized)
aaatctaaattaaatcacatttccattaaggaaatgagattcagttcaatgtaacggctgtcatgaaatctaggctgggaagtggaatcaaacttacttttcctaattttaagtccaatg

SEQ ID NO: 959663 - DNA, 120 bp, Artificial Sequence
  ENSG00000258028_45 (sequence is synthesized)
tgttcatcctagtattttctaaattgtatgatattaacaagaatatcagctgtgagacaggaattacaagtgagatcatgcaagctcagagcttgagaactttgaccacttggtcttctt

SEQ ID NO: 959664 - DNA, 120 bp, Artificial Sequence
  ENSG00000258028_46 (sequence is synthesized)
ggtttgttttacttctatacatccctaccatccatgctgcatatcccctaagaaaatcttaagactaacgttactgatattctaagaaaagcataatcttctgctatactttcagaattc

SEQ ID NO: 959665 - DNA, 120 bp, Artificial Sequence
  ENSG00000258028_47 (sequence is synthesized)
agtccaaatttcacatctgaagatcatggtgaactaacttctctcattctctcatctttgcctatcatggtggtccatctagttttggctctaccaactatttcactcaactggaggaga

SEQ ID NO: 959666 - DNA, 120 bp, Artificial Sequence
  ENSG00000258028_48 (sequence is synthesized)
tacacacacacacatacacacacacacacgtgcttgcacctttctgggatatgactggttgattagaggaaaatattcaaagatattagatgtgtttaattaggattccacatgcgccta

SEQ ID NO: 959667 - DNA, 120 bp, Artificial Sequence
  ENSG00000258028_49 (sequence is synthesized)
attccacatgcgcctattattttaagatgagaaataaaatgctctctgagaagccttatctaaaatttgaatggaatttccaagtcattctgttcttggttattgtgatagttcaatgtt

SEQ ID NO: 959668 - DNA, 120 bp, Artificial Sequence
  ENSG00000258028_50 (sequence is synthesized)
gtggaaatcattacaaattctgttttgctactataaagaaggatgagaccttgaaatgaatgaataaatcttccagattttaagttattagaccttcaacttttactcacaaaatctatt

SEQ ID NO: 959669 - DNA, 120 bp, Artificial Sequence
  ENSG00000258028_51 (sequence is synthesized)
actgtaaataataaacatgaacaatcaaacagcactatagtctttcatcccagaatttatttcaagcatatcattgataatagaaatacctttatatactcaaaatactttttgaaggaa

SEQ ID NO: 959670 - DNA, 120 bp, Artificial Sequence
  ENSG00000258028_52 (sequence is synthesized)
ggaaatttttatgctcagaggctcttggcagtcaatgagaaataggagattggaatggaaactataaaggggtgctggaaaaggtcagagaaaatcatcatcataaagtgaagtgatttt

SEQ ID NO: 959671 - DNA, 120 bp, Artificial Sequence
  ENSG00000258028_53 (sequence is synthesized)
cttctttatgagctcctgatgtaaacagactgatgagcacaacacaatccttactcacccacatgacatcatacacaatcacagctaaatgtttctatctgtcaaagcctgaagagtgac

SEQ ID NO: 959672 - DNA, 120 bp, Artificial Sequence
  ENSG00000258028_54 (sequence is synthesized)
taccagattgttgcctgattgctaagaattgatgcttgttcaactgggatctatccagagaaacataatccacttcaagaattttctgaaaagggaatctaatgcaaggaattaattgca

SEQ ID NO: 959673 - DNA, 120 bp, Artificial Sequence
  ENSG00000258028_55 (sequence is synthesized)
aagatgatgcaatatctgagaacgatagatttgacagtttggtctacatttcaaggctggttagatgggaggaggaagactaagtgctctgccttaactcaggccaggctgtgggcgcaa

SEQ ID NO: 959674 - DNA, 120 bp, Artificial Sequence
  ENSG00000258028_56 (sequence is synthesized)
gtgcaccaacggctttgagactaacacacagctcagaacaagaaaatatatattgagcaccttcaacataacaaattggctgggcactgatggaacaactataaacaagccagacagcat

SEQ ID NO: 959675 - DNA, 120 bp, Artificial Sequence
  ENSG00000258028_57 (sequence is synthesized)
ggacaatacattgtgaacaatgcataatgagagctggcatgcttgtcaatggaagtcatacacaacatctgcttgagtgattccagaggtgaccagagactgactaaaatgggcccaagt

SEQ ID NO: 959676 - DNA, 120 bp, Artificial Sequence
  ENSG00000258028_58 (sequence is synthesized)
cttgagattgacattgactccagaatgccaaagtactactacttcaccatgagaaatttcatctgtcacaaagcccagagtattcagttcaacataattagcatcttctcttctaatgag

SEQ ID NO: 959677 - DNA, 120 bp, Artificial Sequence
  ENSG00000258028_59 (sequence is synthesized)
gacaactatctggaaagccaaattacaaacagaagaaatttagaagaccttccccaaagtcgttagtgaggatagccagaggaacgttgctcatgtagccactgaatggaaataaccctt

SEQ ID NO: 959678 - DNA, 120 bp, Artificial Sequence
  ENSG00000258028_60 (sequence is synthesized)
tggccaagactctcctctggagaccgtaaattgtgtgatggcaaagttctttatctgatcccttttgtgtgtgtactccactgtttatcttctatagagagcttcatttctttctcttta

SEQ ID NO: 959679 - DNA, 120 bp, Artificial Sequence
  ENSG00000258028_61 (sequence is synthesized)
gctgtatacttttatactcttgtgtgaaccacagccttaatactgatagctgcttgttaaatacacttacaatgtactaactgaccagatcacctgattaaaagaaataattatttttca

SEQ ID NO: 959680 - DNA, 120 bp, Artificial Sequence
  ENSG00000249601_0 (sequence is synthesized)
gctatatgcacaagatgctacctgcagagattggtttttgcccagatgtgcaggagagatgcacagagaggaagaaatgcatacatgtgtgcaggttttggcgtgtgcacaagaagcctg

SEQ ID NO: 959681 - DNA, 120 bp, Artificial Sequence
  ENSG00000249601_1 (sequence is synthesized)
gaaggattttctttggatctacagtcaaaatggatttccgagaggaagctgtctgaaaacacacctcttccctgtgctacatacggtcccatctctgccagccaggttgtcaggaaagtg

SEQ ID NO: 959682 - DNA, 120 bp, Artificial Sequence
  ENSG00000249601_2 (sequence is synthesized)
caactctggctagagctctttggccaatgtgatgggcagaaaactggaatgaggacagaaaagcacctcagaggtttgaagagtctagtctctcaccaccttgctgctgagacttatttg

SEQ ID NO: 959683 - DNA, 120 bp, Artificial Sequence
  ENSG00000249601_3 (sequence is synthesized)
aatgcctgtttcatatggagcttttaagtgtaacagttgtgagtgaaattgccccttttcaagcgctccgagtttgcttctgcatggaaggggaagatggactagagctgatacctcctg

SEQ ID NO: 959684 - DNA, 120 bp, Artificial Sequence
  ENSG00000249601_4 (sequence is synthesized)
agtaagctcgagccagtgttcgtatttgccattgatcggccaccaagtgcttgctatgtgccatgcattgtgctaagcactatctcatttaatatttacagcaatcttatgaggtagatg

SEQ ID NO: 959685 - DNA, 120 bp, Artificial Sequence
  ENSG00000249601_5 (sequence is synthesized)
ctactgttatctccattttacagatggggaaactgaggcacagagttccacagctggtaacttgaggaataggaattcaaccactggagagtctggctggagttttttgtggtaggagaa

SEQ ID NO: 959686 - DNA, 120 bp, Artificial Sequence
  ENSG00000249601_6 (sequence is synthesized)
aatatgctgtctaaatttgccttgggaaaccatcatggtggtcacaaaaccacttctacggcttgccttgacctagcaggaatgaagatgtaaagaaagaatgagcgcgtcatggttatg

SEQ ID NO: 959687 - DNA, 120 bp, Artificial Sequence
  ENSG00000249601_7 (sequence is synthesized)
atgggatgatgatgtctgttgtgttgtttggtgtcagtttctgtaacgcctttctatttcaatcaaggctattatcttttcctctgttttagtgaagtttccttgaagtagaaaatggga

SEQ ID NO: 959688 - DNA, 120 bp, Artificial Sequence
  ENSG00000249601_8 (sequence is synthesized)
gtgtattgggcatctcagagttttcagctgaactgaagggtctgatggtaactttacccccaaatctctgagagaaaagcagggagtccctgcttcagctctgctcagaagagcctccct

SEQ ID NO: 959689 - DNA, 120 bp, Artificial Sequence
  ENSG00000249601_9 (sequence is synthesized)
ccaaatggttcttctaaatacccaacttttaatagaaactcctgcggcttggattattaaagtcctaacatgcttatttaatcgtgtttcaagtccatctatcttttttgagtctaagga

SEQ ID NO: 959690 - DNA, 120 bp, Artificial Sequence
  ENSG00000249601_10 (sequence is synthesized)
gccagaaaatagtacaaacccatctggctgcaacagtccagcagcatgaagatcaaagtcacgtagtagagccagagagaaatttgccctgggcctaatattcatgaagcctttccaatt

SEQ ID NO: 959691 - DNA, 120 bp, Artificial Sequence
  ENSG00000249601_11 (sequence is synthesized)
cagactcggtattattgccaagtcggtgtgtttgggagaaatcagaagccaacacactagaaaagttgcaagagattcctaggggaacccacaaattcagttccttgccagaaacctgct

SEQ ID NO: 959692 - DNA, 120 bp, Artificial Sequence
  ENSG00000249601_12 (sequence is synthesized)
cctccagatgaatctagtgcatcagatgggctcagaagcacaggtggcgcaggcagacctctactgagaagaacaacagtggaaggcagatgaaactcacattttggagtctgagagcca

SEQ ID NO: 959693 - DNA, 120 bp, Artificial Sequence
  ENSG00000249601_13 (sequence is synthesized)
tgcgggcccaccccagttacgtctacccctggtcggtgaccagagaatcctttagcagcaacagcagtgatgtttatttcactggtatgtataaagcgactgattgaaaacaagctgtat

SEQ ID NO: 959694 - DNA, 120 bp, Artificial Sequence
  ENSG00000249601_14 (sequence is synthesized)
gcccaacaacttggaactggttaaatgatttttggttcagccgcacagtggaatatcatgcggccattaagaataaataaaaaatcctatactttccatgttcaactttagactgcaaac

SEQ ID NO: 959695 - DNA, 120 bp, Artificial Sequence
  ENSG00000249601_15 (sequence is synthesized)
aactgaaaaaacaccttcataattaggcttcctcagattagaacgtgaagtcaaatcaacgtgtgtcagaaagttaacaacagctaactgtttgttgtggtgttctgagtaacttgtatt

SEQ ID NO: 959696 - DNA, 120 bp, Artificial Sequence
  ENSG00000249601_16 (sequence is synthesized)
atttttcagtttttttcccattcctaatgtgcaaatgtactatttttattgtaaaaaaaaatacatgtttgtaaagagcaataacataaatctctgcataggcaaattgaaaggaaatca

SEQ ID NO: 959697 - DNA, 74 bp, Artificial Sequence
  ENSG00000249602_0 (sequence is synthesized)
actgaggagtgtctctgcccagccgcgaccccatctgggaggtgaggagcatctctgcccgtcgtctgggaagt

SEQ ID NO: 959698 - DNA, 120 bp, Artificial Sequence
  ENSG00000249602_1 (sequence is synthesized)
ctgccccgtccgggaggctcagtcacctttcccggttgccttgatccaaggcctgatatgggatatccaggaagagtcgacggtcacagagaaggccgtgccaatgggcagaggtctggg

SEQ ID NO: 959699 - DNA, 120 bp, Artificial Sequence
  ENSG00000249602_2 (sequence is synthesized)
aggtctcattctgtgcctgtgaacatggcggcgcccgttgtcacggccccgggcagagctctgctgcgggcgggcgctggacggctgcttcggggaggcgtccaggagctactgcggccg

SEQ ID NO: 959700 - DNA, 120 bp, Artificial Sequence
  ENSG00000249605_0 (sequence is synthesized)
tgaaatagcacaggcatggaaaaggtctcccaggtcctccgtatgagatggcagccagcggtggaggcaggaatacaaataagatgaagttcactaagttctcagacccaggagtgacta

SEQ ID NO: 959701 - DNA, 120 bp, Artificial Sequence
  ENSG00000249605_1 (sequence is synthesized)
gcaaattcactgtctgcagataaatggggccatttcaccttccctggtacctcacagatcaggtagcaagtgatggagcatttctacgtgtatccaaacctttgcaaaatgggttgccat

SEQ ID NO: 959702 - DNA, 120 bp, Artificial Sequence
  ENSG00000249605_2 (sequence is synthesized)
catttccttgtaatggatagacaaagtccaggcacttctttggcacccttatagctttgaaaagctgatgctgatgacttcagtgaagatagcattgttgcataatgtccacaaatcatt

SEQ ID NO: 959703 - DNA, 120 bp, Artificial Sequence
  ENSG00000275345_0 (sequence is synthesized)
gcatttctcatttgacattagctgcccagctttccgctgatacgttgactccaggaggctccttgagttctgagtgtttggctggcctctggtggccccattattattttctgccaggtg

SEQ ID NO: 959704 - DNA, 120 bp, Artificial Sequence
  ENSG00000275345_1 (sequence is synthesized)
atcaaaggcaagctgttagtgaacacaaaacatttctccattacacagtcaacgttcctttgactcaactcaaaaaaggttttgttttttttttggctggcaattttagaaaattcatca

SEQ ID NO: 959705 - DNA, 120 bp, Artificial Sequence
  ENSG00000275345_2 (sequence is synthesized)
cacaaaccactgtatcattttctcggacaataatcaatccaagattttcaaccatatctgtggtccattgtaaaactttcatctctatttaaaataaaaatcatagagaactcaggttaa

SEQ ID NO: 959706 - DNA, 120 bp, Artificial Sequence
  ENSG00000275343_0 (sequence is synthesized)
ccatttttaaatagttgctaaaagcaaaagttattactggtgaaaagtccagaaaaaggacactatgtgacaccaagttcagctctcaccacatgtcagatcttgtaaatgttttcttac

SEQ ID NO: 959707 - DNA, 120 bp, Artificial Sequence
  ENSG00000275343_1 (sequence is synthesized)
agtattctcaaattcttagttgcatatgatcagtttccttcaaccaggagttcttcaagggtaaaggtttatattgtatttattttttcttattaataaatgtgtcttccttctaatgcc

SEQ ID NO: 959708 - DNA, 120 bp, Artificial Sequence
  ENSG00000267868_0 (sequence is synthesized)
gctccaggtacctgccagagtgctccccatgctgtaaactattggtctttacagagagctgggagaaggcactgtttttcgcgttttacagaatatgcagagaggttcagcgacttgccc

SEQ ID NO: 959709 - DNA, 120 bp, Artificial Sequence
  ENSG00000267868_1 (sequence is synthesized)
caggccacacagaggcacaaagatgcagacctgtggtgtctgcatcggggacgcctgtagtgtcgtgaggggaatggcatccacagagttcccgacaggtagacccaggacacttaggta

SEQ ID NO: 959710 - DNA, 120 bp, Artificial Sequence
  ENSG00000267868_2 (sequence is synthesized)
aggtcccaagccgtgtgtcccaagggatgggcttctttccatccctggctcggcctctctcccgggaaccagaggcgccccaggagggaggctgaaggtaaagcgacacctggataccaa

SEQ ID NO: 959711 - DNA, 120 bp, Artificial Sequence
  ENSG00000267868_3 (sequence is synthesized)
acatcctcatggcgacctttctggatgatcagccacaaagcggaggtgagaaatgggagctggagcaggcagggccaggctcccagagccaaccccgaggctaggggagcagggctatgg

SEQ ID NO: 959712 - DNA, 120 bp, Artificial Sequence
  ENSG00000267868_4 (sequence is synthesized)
agtggcacagtggccccggccacagaagggcaggcataggtgtttcctgcacagcctcactccatgtcttgggaggggtatcagagagggtagagactggaaaaggactgtgaggaaatt

SEQ ID NO: 959713 - DNA, 120 bp, Artificial Sequence
  ENSG00000267868_5 (sequence is synthesized)
cgattccggacaaccagggctggctctgaggtgcagcactgagcaaggctggtgactcctgcgtgcccagagctcatgctgcagcggaggtgacatggcacctgggtatgtgacagcctc

SEQ ID NO: 959714 - DNA, 120 bp, Artificial Sequence
  ENSG00000267868_6 (sequence is synthesized)
catgtggtgacgggagggcacctgctggcacctccccctccggggccagtgtgacgtgtgaacaggtccctgtgtcccagcagcaagcaggtcctggtccacacacggacgactgaagga

SEQ ID NO: 959715 - DNA, 120 bp, Artificial Sequence
  ENSG00000267868_7 (sequence is synthesized)
ctgcacttctgaagtgggggacagggaggggaggggcaggagaggaaggaagaggaggagctgctggacttctgactttttttatggctttgcccagcaaggaagtctggaattcacatt

SEQ ID NO: 959716 - DNA, 120 bp, Artificial Sequence
  ENSG00000267868_8 (sequence is synthesized)
aacataaactataaacgcagaatcagttgatgaggacagttagtgaggagatggtcttttggggataaaatctggcaggattgctgacctggactctgtcatctaaagttctcacacaaa

SEQ ID NO: 959717 - DNA, 120 bp, Artificial Sequence
  ENSG00000267868_9 (sequence is synthesized)
tgaccattacgttgtgatgcatgaaacaagtaacttaatatgtatttttgtctgagtataaaatcattgtgttcactttggaaaatatagaaaataaaaataaaatatactttaacagca

SEQ ID NO: 959718 - DNA, 120 bp, Artificial Sequence
  ENSG00000271452_0 (sequence is synthesized)
aggcatgagccactgtgcctggcccatttgtctatatatgagtaccacacatttaattattttgctaaataatagattttaatagctaaattttttagaaatgataaaattagaatcagt

SEQ ID NO: 959719 - DNA, 120 bp, Artificial Sequence
  ENSG00000271452_1 (sequence is synthesized)
tccctagtcctagttcttgcaaggtgtcatctgtaaggagtccattccaaagaagaatattgcggaagagctaaaataaaatatcaagtaaatatgtaccttttctccaaagagaaactg

SEQ ID NO: 959720 - DNA, 120 bp, Artificial Sequence
  ENSG00000271452_2 (sequence is synthesized)
taatagtctctaacaaacatgaagagttggtcaaactaaaattctcactacaattagccctgttggaactgtcaattttagaatacaatatctctgaataaatacttgattctttccaaa

SEQ ID NO: 959721 - DNA, 120 bp, Artificial Sequence
  ENSG00000229847_0 (sequence is synthesized)
aggaagtggagggacaggaagtggagaatccagcaggggccaatgttggacaacactcctttgccagctgtgctccccatgcaacgggatgaggagattttaagcctctaccagaaaaac

SEQ ID NO: 959722 - DNA, 120 bp, Artificial Sequence
  ENSG00000229847_1 (sequence is synthesized)
tcaaatctggagataatttaatttttcctgggtctctgccagccatctccagagttttgtcaaattttccacctacttcctctgtgtgtggaaactcagcctccattttagaactccatt

SEQ ID NO: 959723 - DNA, 120 bp, Artificial Sequence
  ENSG00000229847_2 (sequence is synthesized)
tttatagggactggctggaggtatgcccccccttccacccacacacccacacacacatacacacgcacacgctgttgtgcagaagatgtttcttgggtggctgagcaaagaatcagatac

SEQ ID NO: 959724 - DNA, 120 bp, Artificial Sequence
  ENSG00000229847_3 (sequence is synthesized)
aagcaaggaaacgtgtggcatctggctaccatgagctgaagacaaagcctacatggggaaaagtgcaaaaccaggagaatgggagagaaatggagccacgcactgatgctgttgtgaaac

SEQ ID NO: 959725 - DNA, 120 bp, Artificial Sequence
  ENSG00000229847_4 (sequence is synthesized)
gaaggagccttcggagggaacatgcactgctgattccttgattccagatttctgacctccagaagcatgggagaacagatttcccttgtttgaaggcacccagtctgtggtccttcatca

SEQ ID NO: 959726 - DNA, 120 bp, Artificial Sequence
  ENSG00000229847_5 (sequence is synthesized)
gggaacccggaggcctggatccgggccgagagtggaacggagtcggcgccgccgcctcggctgagccttctgccgcccaccgggcggccgggcttctccgcgccttcgcccctcgctccc

SEQ ID NO: 959727 - DNA, 120 bp, Artificial Sequence
  ENSG00000229847_6 (sequence is synthesized)
agctcactcgctcctgcggcgcccgctgcggcttctcctcctccttcgcctcctcctcttcctccagtttcttcttctcctcctcctcctcttcttcctcctcctcctcttcttcctcct

SEQ ID NO: 959728 - DNA, 120 bp, Artificial Sequence
  ENSG00000229847_7 (sequence is synthesized)
cctctttccccacctactccccctcagccaccgcctcctcctccaccagcaccactccctccggggcaccccggtccctgcagagtccctggccggcgccgcctccgctgcggccccctg

SEQ ID NO: 959729 - DNA, 120 bp, Artificial Sequence
  ENSG00000229847_8 (sequence is synthesized)
aatcccgagcctgcctcgcccaagctggtaggacagaaggacagacagattcctctagcctagcgctccgccgctgctgccttacgcggccccgcgtcgggagaactgggatcgccccaa

SEQ ID NO: 959730 - DNA, 120 bp, Artificial Sequence
  ENSG00000229847_9 (sequence is synthesized)
gagcaccgcgaggggtcatctcaggctggctgcatgcctcagctgaagatcccagctcctgtcaatgccacctctctgcttgactgtctccttccagattcgagcaggtatgagctggga

SEQ ID NO: 959731 - DNA, 120 bp, Artificial Sequence
  ENSG00000229847_10 (sequence is synthesized)
agaatgaaggcagggcatgcccgtgtgccagctctgcacagctggatagctgaggaaagatgtggaggagaagccggggattgtgtggaagtctaagggtgttgtttgccctttgggttc

SEQ ID NO: 959732 - DNA, 120 bp, Artificial Sequence
  ENSG00000229847_11 (sequence is synthesized)
cagaagatgcatgccaggaccctgggtggcactgccaggaagcaacagagaggagataaaactcacagcagacagacttgccttaacaacaactcccttgaattaaaacacgcttttcaa

SEQ ID NO: 959733 - DNA, 120 bp, Artificial Sequence
  ENSG00000229847_12 (sequence is synthesized)
gaaaacaaattatcagttcgatcagcaaacagcagagaagtttctctcataatggcaaagaagggccgggttgctgaccagtgaaagagcttcagaaaaggagaggggagatgagatggc

SEQ ID NO: 959734 - DNA, 120 bp, Artificial Sequence
  ENSG00000229847_13 (sequence is synthesized)
cagaaggagcaagagcaccgtacatccctggacaacctcattctaatgggtcaggggctgggacgtgcattttggagtgcaggagaagtggcaactcacaaatgctagattttcttctag

SEQ ID NO: 959735 - DNA, 120 bp, Artificial Sequence
  ENSG00000229847_14 (sequence is synthesized)
agatgaccaagctgtagttcttaaagcagtggcactagggcagaaaactctcacactttgatgtgcacacacagcccctggggatcttgttgacatgtagattctgattccgtaagtcgg

SEQ ID NO: 959736 - DNA, 120 bp, Artificial Sequence
  ENSG00000229847_15 (sequence is synthesized)
gctgagattctgcatttccaacaagctcctagatgaggtccattttgctggtccatgaaacacacttagaataagtagcaaggtataggaggatactgactttgctcagtgatgcttggg

SEQ ID NO: 959737 - DNA, 120 bp, Artificial Sequence
  ENSG00000229847_16 (sequence is synthesized)
cttccgtccaaactaaaataaaacaaaagcagacataaatggcccaattcaacagcctgagaagtttggtgataatgacccaagccctggcctggtgaccaagtggctgctcagagagct

SEQ ID NO: 959738 - DNA, 120 bp, Artificial Sequence
  ENSG00000229847_17 (sequence is synthesized)
aacggcttacctgtgcaaagctatcagccctggacctatgggcctagaaacattacttgccactcactcactcactatcattcattcatttctgcaacaaacacttcctgagcatatgct

SEQ ID NO: 959739 - DNA, 120 bp, Artificial Sequence
  ENSG00000229847_18 (sequence is synthesized)
atacaccaggccctgagctcagctctggggatacaggatgaatggcagattgtgccatcaggaagccgactgcacagtcagcccgctggagcacatatgaaaaacaatacggatgttttg

SEQ ID NO: 959740 - DNA, 120 bp, Artificial Sequence
  ENSG00000229847_19 (sequence is synthesized)
atttattatcatattgatcattatgatggtagcgtatacttttggaaggcttgccatacattaggcattgtgctaagcacattatatggttaatctcatcaatcttcacaacctatgtgg

SEQ ID NO: 959741 - DNA, 120 bp, Artificial Sequence
  ENSG00000229847_20 (sequence is synthesized)
caggtactattattaaacccacttcaaagaggagggaactgaacctcagagagggtaagtgacttgcacaaggacacaagctagtgaggagaggaactgagaggaatggccagacaggcc

SEQ ID NO: 959742 - DNA, 120 bp, Artificial Sequence
  ENSG00000229847_21 (sequence is synthesized)
atcagcctctgtccccacatgctgggtctgagtgtctgacggtggacacattcccttcctggagggagagctcctagggagctgatggcagcactgagtctggaatgtgatgggagtgca

SEQ ID NO: 959743 - DNA, 120 bp, Artificial Sequence
  ENSG00000229847_22 (sequence is synthesized)
ttagatgacgtgggtgatctgatgagtacagaggcgtcacactgcaatgacttcatgcacatatctccccttgaatgcacagagattcagcagaggccaggagctcaagtttctggccca

SEQ ID NO: 959744 - DNA, 120 bp, Artificial Sequence
  ENSG00000229847_23 (sequence is synthesized)
gtgtccccctcttcccctggggaaagccagggacacactgcctggctttgctacacctttctaggcaaaggcagtatgctctccctctccttggcctccctggctgtccacacatccaca

SEQ ID NO: 959745 - DNA, 120 bp, Artificial Sequence
  ENSG00000229847_24 (sequence is synthesized)
cccactcacacacacatgcacatgatcatacacattacacaagcccacatgcccacagacatgctcacactcacactcacatgcatacactgccatacacaacacacatacatacattca

SEQ ID NO: 959746 - DNA, 120 bp, Artificial Sequence
  ENSG00000229847_25 (sequence is synthesized)
cacacacttgtgcttcacacacacacaccaattctatcatttaatacattttggaaaggctacatactactacagcctcttttacagattagcaatgtccatgagcgcactaaaggttga

SEQ ID NO: 959747 - DNA, 120 bp, Artificial Sequence
  ENSG00000229847_26 (sequence is synthesized)
gacattctgcagtgaagaagcctatttcattttgtttaaccaagtatttctcaaatttatttgatcatatgtggcagaaaatgctgtgtctggcattcttcatttccctcttcctccttt

SEQ ID NO: 959748 - DNA, 120 bp, Artificial Sequence
  ENSG00000229847_27 (sequence is synthesized)
aacatggaacccctgatgtctttagcttggcacatcgccacccagaataaaaactacctttcccagctcttcctgcagctaggggcagccctgggataaattctggacaatgaaatacag

SEQ ID NO: 959749 - DNA, 120 bp, Artificial Sequence
  ENSG00000229847_28 (sequence is synthesized)
gcagaagtaaatcatatacgatttccatgaagggaccttaaacagaagtgtgcccttctcttccccacacattcctcctcctgtctgaaatgtagatgcaactgctggcatttgagcagc

SEQ ID NO: 959750 - DNA, 120 bp, Artificial Sequence
  ENSG00000229847_29 (sequence is synthesized)
cacacttgcacacacacacacacacacagttctgatggccaatcttttggggctatgttgacactgtgaagcaggtgaaacaaagtctttgccactccctgctttgggcctattatgttt

SEQ ID NO: 959751 - DNA, 120 bp, Artificial Sequence
  ENSG00000229847_30 (sequence is synthesized)
gtctttgccactccctgctttgggcctattatgtttgttttatagtttaactctcaaaagacaactttattttccaaaattattcaggttcccagccaggtgcagtggctcacacctgta

SEQ ID NO: 959752 - DNA, 120 bp, Artificial Sequence
  ENSG00000229847_31 (sequence is synthesized)
tcaggttctgtaggggaccctcactgtgtcctggattccattccacttttaaagtcccaaacagcttgtatggccacttcccttgacacccaaaccagataggagtcttaaatgacacag

SEQ ID NO: 959753 - DNA, 120 bp, Artificial Sequence
  ENSG00000229847_32 (sequence is synthesized)
agtattgatggtttctttaaaaggaaatccactctcaatgggaagctggataacttcgcatccagatttcatccatcttgggctttggtggctgctgtttgtttttgtgcaggagaatct

SEQ ID NO: 959754 - DNA, 120 bp, Artificial Sequence
  ENSG00000229847_33 (sequence is synthesized)
ctcccagccaacgtcgatttcactaacacagtggttaacctttgctctctactcctgcatcaatcttccgcctaccgcatgttgagccatgctgctttctggcattccttttggattttc

SEQ ID NO: 959755 - DNA, 120 bp, Artificial Sequence
  ENSG00000229847_34 (sequence is synthesized)
agtttactacccaactaccagtcctaataacatcagataaaagggcttccgctgtgctgcacttgttttcaaaaactataaatgccatcgacccagagttaagtccagcctcagagagac

SEQ ID NO: 959756 - DNA, 120 bp, Artificial Sequence
  ENSG00000229847_35 (sequence is synthesized)
gatttctgatgggcctctgttatgagctaaattgagtccaccccaaaattcagatgttcaaatcctaacctgtagtacctaagcatgtggccttatttggaagcagaagcataacagagg

SEQ ID NO: 959757 - DNA, 120 bp, Artificial Sequence
  ENSG00000229847_36 (sequence is synthesized)
taattcgttaagatgaggtcacagtggaagagggtggaccccaatctgatacaactcgtgtccttataaaaagcagaaatttgaagacagacacacaagaagatgaaggcagagacctgg

SEQ ID NO: 959758 - DNA, 120 bp, Artificial Sequence
  ENSG00000229847_37 (sequence is synthesized)
ctgatgcggctataagccaaggaacgccaaagattgccagcaaagcaccagcagccagggagaggcctcgaacaaattctccctcccagcaaaaaggaggaaggaaggaacctccaaaag

SEQ ID NO: 959759 - DNA, 71 bp, Artificial Sequence
  ENSG00000229847_38 (sequence is synthesized)
gaggaaggaaggaacctccaaaagaagtaaggcaggcggatcacctgagatcaagagttcaagaccagcct

SEQ ID NO: 959760 - DNA, 62 bp, Artificial Sequence
  ENSG00000229847_39 (sequence is synthesized)
ggccaacatggtgaaacctcatctctacagaaaaatacaaaaattagtcaggtgtagtggcg

SEQ ID NO: 959761 - DNA, 120 bp, Artificial Sequence
  ENSG00000229847_40 (sequence is synthesized)
acagagcgagactccatctcagaaaaacaaaaaagaaccctactgacacctggatttcagacttccagcctccagaactgtgagatgttacatttctgtcatttaaacacccagtttgta

SEQ ID NO: 959762 - DNA, 120 bp, Artificial Sequence
  ENSG00000229847_41 (sequence is synthesized)
tttctgtcatttaaacacccagtttgtagtactttgttgcaacagctctagtgagctaatacagccttgtaggacaggtaggaatttgtaatgcacagagaaagccaactggccacagtt

SEQ ID NO: 959763 - DNA, 120 bp, Artificial Sequence
  ENSG00000229847_42 (sequence is synthesized)
gttgaaaataatagaatcgaagcgcccctatcactaccaccccaggccatcactttcaaagctgttcaaaatgatgcagccgcgtgagaaggccggaaggccagggcgggagatgggctc

SEQ ID NO: 959764 - DNA, 120 bp, Artificial Sequence
  ENSG00000229847_43 (sequence is synthesized)
caggtgggcccaggctgcctgcagaaccagcttgcctcactgcctggttgccaaggagcacctgtggctaggaggagatgcccaggaagaaaatttggccacatccctgcctgcctccct

SEQ ID NO: 959765 - DNA, 120 bp, Artificial Sequence
  ENSG00000229847_44 (sequence is synthesized)
ggcaatgggtgatgctctctgccagctggcccagctcccccaccacatacctggctaggagtcagtaggaaaacagtgtgtgtttgtagggctctgcactgaagggcattagatccatgc

SEQ ID NO: 959766 - DNA, 120 bp, Artificial Sequence
  ENSG00000229847_45 (sequence is synthesized)
aaaggctaataaattagagataagtgggatttgtagatttgctggaggttagagctgcagggtctggcatcagctctgggtcttttccatggccccaggctggctcaggtgtgagctgaa

SEQ ID NO: 959767 - DNA, 120 bp, Artificial Sequence
  ENSG00000229847_46 (sequence is synthesized)
gaggcaaaactgtctgtttaggttgcattgggttcccctgaaagatctgttgaagtcctaacctcgggtacctctgtttgtgctatttgcaaacaggctctttgcagatgtaatcaagga

SEQ ID NO: 959768 - DNA, 120 bp, Artificial Sequence
  ENSG00000229847_47 (sequence is synthesized)
aagatgaggcaacgctgatttagtcaggccttaatccagtgactggtgtcttcataagacaaggaaatctggacacagacacacaaagaggaaaaagccaaagacacagagacacatgta

SEQ ID NO: 959769 - DNA, 120 bp, Artificial Sequence
  ENSG00000229847_48 (sequence is synthesized)
aatggatacaggcccttccctgcctgcctggtggagcagcctccaaggggagcctttgctagcaggaagaggcatcgcatggagctcagacccgcctcagaggaacttctctcagcctcc

SEQ ID NO: 959770 - DNA, 120 bp, Artificial Sequence
  ENSG00000229847_49 (sequence is synthesized)
tctctccgcacacccgaccaaggtgtgaaatccctcccctttacctctgccacttgcaggtggcaggatgctggagctgtccctgcctctttgtaaagtgagggaagggcagccctctct

SEQ ID NO: 959771 - DNA, 120 bp, Artificial Sequence
  ENSG00000229847_50 (sequence is synthesized)
acagacatgagccaccacgcccggcctgctccacttctaaggcttcttgtgacaatgtaagagaaaggagatgacagagctttgcaacgggaggagggctatgtgttctggtgaccaatt

SEQ ID NO: 959772 - DNA, 120 bp, Artificial Sequence
  ENSG00000229847_51 (sequence is synthesized)
caacgggaggagggctatgtgttctggtgaccaattcactgtcttgtgtcgggacaggaagaagcccttcatacgggcagcaggctgggagccagggaggaggaaagatcacgatccact

SEQ ID NO: 959773 - DNA, 120 bp, Artificial Sequence
  ENSG00000229847_52 (sequence is synthesized)
ccctggtacatggcccttctgcaccccgcagtctccttccaggtgccacaacgagaaggcacacatccttggcacagcacttgaggcttttcaccactggctgcactcacccctccagac

SEQ ID NO: 959774 - DNA, 120 bp, Artificial Sequence
  ENSG00000229847_53 (sequence is synthesized)
tcactgccttgcaccaacccttttccgcccaccccactctatgctgtccacagcctccaccccagccacctgattctgcaggccaatgtcacattcttccagtccaggttctattctggc

SEQ ID NO: 959775 - DNA, 120 bp, Artificial Sequence
  ENSG00000229847_54 (sequence is synthesized)
atttcttgtcattattttgctgagaatgtgtctctcttgactttgaacttattgagagcaggaatcatgactcagccatatatcccagcacttggcccagggcctgtcgtttccagggta

SEQ ID NO: 959776 - DNA, 120 bp, Artificial Sequence
  ENSG00000229847_55 (sequence is synthesized)
ggtggtctaggctgattgaaggaatggcatttagtctttaaaatgaaagcatgttgcctagcttggttatttttgaactctataatcaaggactacgtttacctgaatagcctctgcaga

SEQ ID NO: 959777 - DNA, 120 bp, Artificial Sequence
  ENSG00000229847_56 (sequence is synthesized)
ggaaagagtaaacaaaaccaggaaagtaatccattgataaaacgccaagtgatgttgttctgcggagccagagtggggccacctgggcacaattctcccacaaaggagccaactctactg

SEQ ID NO: 959778 - DNA, 120 bp, Artificial Sequence
  ENSG00000229847_57 (sequence is synthesized)
gggctgagacccagagccatctggactcccaggccagccccagagcattgagcagcgggttaggatacttaaggagaggcaagtcaggcaagaagcagaaagacaggaaatggagagata

SEQ ID NO: 959779 - DNA, 120 bp, Artificial Sequence
  ENSG00000229847_58 (sequence is synthesized)
gaacagaacaatagtatgctctcaataaataaggatgaacgcatgattgaaatagtttaaaaatcaagacccggaaaactgaagcttaaaaaggaagagaaggacatcagaaagttgatg

SEQ ID NO: 959780 - DNA, 120 bp, Artificial Sequence
  ENSG00000229847_59 (sequence is synthesized)
gtgcttggctacagccgctgctgcctctcgcgaactgggctccggggctcccggctcccgagaactagaagagaaacgcgagcgaagggatcgaaacccggggggttaccgacttgcaga

SEQ ID NO: 959781 - DNA, 120 bp, Artificial Sequence
  ENSG00000229847_60 (sequence is synthesized)
caccgccaggacagtctgtaacgcaggaagatcccagcggctccgggtctggtgaggggaccataagcatgactgatagcgaatgaggaagggcagccctaaacttttcaagcaaagcct

SEQ ID NO: 959782 - DNA, 120 bp, Artificial Sequence
  ENSG00000229847_61 (sequence is synthesized)
cagagttttgggttcactcattagcataggaaatcgattcaccgaaaacccaaacaaagaaaaacaagccgacagtccaggcaggatgcaggcaaatccagttcgggattaagggtaaaa

SEQ ID NO: 959783 - DNA, 120 bp, Artificial Sequence
  ENSG00000229847_62 (sequence is synthesized)
ggctttttgggttttttttcctttggtttgattttttaaaatatggggaggggggtgacatctacccgattctaggctccggcaggaacgcaatgggttaatgaatggacaagccgcgga

SEQ ID NO: 959784 - DNA, 120 bp, Artificial Sequence
  ENSG00000229846_0 (sequence is synthesized)
atatatcttctgattcaaccaagtgaaaatgtggcttcagaggaggtgacaaagtgtgaccatacccaaagccaagttctgcaacttgactctgagagcctgctgtctccactgaatttg

SEQ ID NO: 959785 - DNA, 120 bp, Artificial Sequence
  ENSG00000229846_1 (sequence is synthesized)
attatgtgctatcaggagaatccatctactgcctgcagctgtcgagctcctctcctggacatcctaaactcaaatggcagggaaaaaaaaacactgccatctattctgacctctgaagtc

SEQ ID NO: 959786 - DNA, 120 bp, Artificial Sequence
  ENSG00000229846_2 (sequence is synthesized)
accatgcccattaactgaggatgaagaagacagaaggaatactgaatgtctgaagagagagaaaacgttataaaattatcctttcaaaagatggaagaataaattcacttggcaaatgtg

SEQ ID NO: 959787 - DNA, 120 bp, Artificial Sequence
  ENSG00000229846_3 (sequence is synthesized)
tccttcattatctcagcactgcactaggatactaatgagttttcgggaacagaaaacccaatggaatattaaaattggaaagaagagctccttgagttaatttcactgaagtgcatcaca

SEQ ID NO: 959788 - DNA, 120 bp, Artificial Sequence
  ENSG00000229846_4 (sequence is synthesized)
acacactgcactgttgtaagaatgaatattcaaataggaatccagtcatgggaaaattaattaaggaaaatgttattgctaatatttctttttatgaatatacatatgcggagacacaca

SEQ ID NO: 959789 - DNA, 120 bp, Artificial Sequence
  ENSG00000229846_5 (sequence is synthesized)
accatctattggctccacactgacaataataaaagccaaacatttatgagagtcaaatgttcaagatctcttgctgagttggtgttaaaagattttaaataaaaaaattatgattccaga

SEQ ID NO: 959790 - DNA, 120 bp, Artificial Sequence
  ENSG00000229848_0 (sequence is synthesized)
gtgtttgggagtgacaacagcgagtcagggcaaggcggccggcccagctcacctgcgggctgcagtcagcccggacgccgagacccgtgcctaaggcccccgtgccccaggcctcccagg

SEQ ID NO: 959791 - DNA, 120 bp, Artificial Sequence
  ENSG00000229848_1 (sequence is synthesized)
gtgctgagcgcccccaggcccagaatctccgggggcccgggcaaggctgtcaggtgcctggcacggttgctgtccagggcttagaggacagaggaagagcccctgagtctgtgcacactc

SEQ ID NO: 959792 - DNA, 120 bp, Artificial Sequence
  ENSG00000229848_2 (sequence is synthesized)
tgccaccatggccctgcccacctctggagcccacaggtgcccagcccaggccccttgcttttggctagactcctgccctacggggacccccatgatggccactcaggagatgggcccagg

SEQ ID NO: 959793 - DNA, 120 bp, Artificial Sequence
  ENSG00000229848_3 (sequence is synthesized)
tgcaggagccaggcacggtgagcagggcccagtgcccctcaggctctggggaaggggtacagccaggtggcccagagcaaggaggtgctgtagacaggtgtgaccacttccagtctctcc

SEQ ID NO: 959794 - DNA, 120 bp, Artificial Sequence
  ENSG00000229848_4 (sequence is synthesized)
cggcctgctggccttcatcctctcccagattccaagggccaccgctgggagcatggggtggacatcgtcccaccagcctcctggatccacatccgtaaagactccaaagtgaagtgaggc

SEQ ID NO: 959795 - DNA, 120 bp, Artificial Sequence
  ENSG00000229848_5 (sequence is synthesized)
tggcttcactccagctcacagcagaggagggggcagcctcagggcccagcaacttgctcagagcgcacaggagtgcgctggggccgggccagcctggcccagggcctctgactctgcccc

SEQ ID NO: 959796 - DNA, 120 bp, Artificial Sequence
  ENSG00000229599_0 (sequence is synthesized)
aagtgttggggtgccttaatgcttgatgttagaccatctactcttctcacttaataacctttctctgaggcatctcaatcagagctgtggcctcaactgcttaacagaggcatgtgaaaa

SEQ ID NO: 959797 - DNA, 120 bp, Artificial Sequence
  ENSG00000229599_1 (sequence is synthesized)
gtgctgcaggagtgttcagccgagtgcgtgactatgtcatgtgaaaagtagcttgatttggggtcactgctattcagtggaaaatttaaccttgggatggataatgcagcccaaatttga

SEQ ID NO: 959798 - DNA, 120 bp, Artificial Sequence
  ENSG00000229599_2 (sequence is synthesized)
attattctacaaggtggccctccagagttagtgaactgtgacctccacatgggatttggacatgcgtgccctacatctggaatgcagaaacactcttcacagaactctgatagcccagga

SEQ ID NO: 959799 - DNA, 120 bp, Artificial Sequence
  ENSG00000229599_3 (sequence is synthesized)
atatttatgtaaatctctgtcctgataaaagcagctttgagatcagcatggaggaagaaggaataggaagaagctgctctgaactccctccagaaacacctacatttacatccaaggcac

SEQ ID NO: 959800 - DNA, 120 bp, Artificial Sequence
  ENSG00000229599_4 (sequence is synthesized)
cagctgttgagtttccctgacttgagaaatggcatcgctcttggccaacatctcccaaggagactaaatagaatattaatgtattagtagaatattaatattaatatattagtagaatat

SEQ ID NO: 959801 - DNA, 120 bp, Artificial Sequence
  ENSG00000229599_5 (sequence is synthesized)
atttatgtaaatctctgtcctggtaaggcacatgttgatgtacttgggcttaagctcataaaccaagaggaacagtttcctacatcccccttctaatgactaaagccaacgggctgagcc

SEQ ID NO: 959802 - DNA, 120 bp, Artificial Sequence
  ENSG00000229599_6 (sequence is synthesized)
aaatgggacaatttagacaaagagagactggcgaaaagcaaatgaatgtctgcttccttctagcattctaggaaaaataccaagcggctgtgccaatgtgcactgcttgcctttgttagg

SEQ ID NO: 959803 - DNA, 120 bp, Artificial Sequence
  ENSG00000229599_7 (sequence is synthesized)
agaatacactcaaaatcaggggaatcagtcagtaccaggttcaggaaagatgtatgcaagagagactccctgatgaggaaaaatcgactacagaaacacagcatgcacccagctcagcac

SEQ ID NO: 959804 - DNA, 120 bp, Artificial Sequence
  ENSG00000229599_8 (sequence is synthesized)
aaacacagcttaaaaatccaaggaattaggatgaagtgtagaatcccgaggttctcattcttgttcccataagccaggattggctgagccttagccaggataccacctggcattcagcca

SEQ ID NO: 959805 - DNA, 120 bp, Artificial Sequence
  ENSG00000229599_9 (sequence is synthesized)
gaggaagaggatgattcaagaggaccagaaatacaaggaaaggacagaggccctcggatggttcactgcagagaagacaggctgaaagatttaggaaccggctgaaagccaacatgccag

SEQ ID NO: 959806 - DNA, 120 bp, Artificial Sequence
  ENSG00000229599_10 (sequence is synthesized)
agcctcccaaagggtggaatcagagatctctcctgctattattgtatcagcagcctcacgtctaccctcgggcctgaattttgttatagatttatacacatttgatatagagtccttccc

SEQ ID NO: 959807 - DNA, 120 bp, Artificial Sequence
  ENSG00000229599_11 (sequence is synthesized)
atgctactttcctactatctctgtgtttcctagaaccaagatgagaaaatgtaggccacaaaactttcctgacgctcccaaagtcatccagcaagaagtaccagaatcaaaatcttctta

SEQ ID NO: 959808 - DNA, 120 bp, Artificial Sequence
  ENSG00000229599_12 (sequence is synthesized)
tccttgcaaaaaaaaagaaagaaaacataaataaaagtggaacagtaagaatcacaaaaaagagtgagggagacagagagaatcgggaggtactacaagaggaagaaacctaaatctaat

SEQ ID NO: 959809 - DNA, 120 bp, Artificial Sequence
  ENSG00000229599_13 (sequence is synthesized)
ttatctcacttggaattaaggacaatttgtaaaatttagcagtaaagactgtaatatgtttgaaatttgatagacttgggagatgtaataagaacagtctttttttgcaagtgtttattt

SEQ ID NO: 959810 - DNA, 120 bp, Artificial Sequence
  ENSG00000229599_14 (sequence is synthesized)
tcaaagagaagttgctgtgggatttctgcaagaccagagtcttagaggagacggtgcccaagtctaacttgttcactcttggaatgccaggcaccaaacatggtgcctggtccattgctg

SEQ ID NO: 959811 - DNA, 120 bp, Artificial Sequence
  ENSG00000229599_15 (sequence is synthesized)
gcagtgggttcttcctatgtgccatgcatttgactctcctagggaactcctttaaaatagagatatcaagcaccccctccttcccagaagatgctcatcctgttggtggagacaggacca

SEQ ID NO: 959812 - DNA, 120 bp, Artificial Sequence
  ENSG00000224745_0 (sequence is synthesized)
gccttatgtctttctgcataattatagagtagccaaaacctgttttaggttaatcacctctggcaaaataaatgataaaagcatagcttttgtaagcagaatgatattacagaagttaac

SEQ ID NO: 959813 - DNA, 120 bp, Artificial Sequence
  ENSG00000224745_1 (sequence is synthesized)
ttataaatctaagtgtattaaagacacttaggaaatttatgataatgctgggtcagcattacagttttaactttttacagtttttcatatgctttttttgtgattttgctgtagaaaatt

SEQ ID NO: 959814 - DNA, 120 bp, Artificial Sequence
  ENSG00000224745_2 (sequence is synthesized)
agttcaagtataatgctgttgacaagtatatctgacacgtcattgaactaataatatttttgaaagctgataggtacttatttttaaagctatagaggtaatatttcatcagttgcagat

SEQ ID NO: 959815 - DNA, 120 bp, Artificial Sequence
  ENSG00000224745_3 (sequence is synthesized)
ttgttgccaaatgaacgagtttgtagtattgctaacaaggagaagaattactagcaagtcttgatgttacttttgaagagtgtgatgattgcatttaggaagatatctaaacttctgttt

SEQ ID NO: 959816 - DNA, 120 bp, Artificial Sequence
  ENSG00000266941_0 (sequence is synthesized)
gtgacgcccccagaactgtcaccgagggactcctgggcggaacctccttacaccacccccacatgccagctgtcctgaccaagggacccctagctcatggagcacacctgacacgatcct

SEQ ID NO: 959817 - DNA, 120 bp, Artificial Sequence
  ENSG00000266941_1 (sequence is synthesized)
gaacattccttgcttcagagacccctaggagcaggtcagccgacctggacttgcagcccagcttcaaatgaccctggagcagttaatatgcttctccaaccttcagtccctacctgtaag

SEQ ID NO: 959818 - DNA, 120 bp, Artificial Sequence
  ENSG00000266941_2 (sequence is synthesized)
ctgtcaccgagggactcctgggcggaacctccttacaccacccccacatgccagctgtcctgaccaagggacccctagctcatggagcacacctgacacgtttcagatcctatcccctgg

SEQ ID NO: 959819 - DNA, 120 bp, Artificial Sequence
  ENSG00000229591_0 (sequence is synthesized)
caacgcctgatgaagcaacgttcccaccacagcatccaccttaaccttccaaatgccactgctgtgaagaggagccatcgcagatcgccatggcgacagagcccttctgacccaggggat

SEQ ID NO: 959820 - DNA, 120 bp, Artificial Sequence
  ENSG00000229591_1 (sequence is synthesized)
ccactgctctcaggcactgtccaaccgacacctggtgacagaggagcccgacagcctctggctgaccctctggagacagaagggcacacggctgccattttcgtcgatgcctcatcgggg

SEQ ID NO: 959821 - DNA, 120 bp, Artificial Sequence
  ENSG00000229591_2 (sequence is synthesized)
aacaactcactctccaacatgcgccatcactatgctcaaaaggaacctattctcttctgttctatttactcattgcttcaactcatagaacccaaatggatgtgtgcagtgttcactaat

SEQ ID NO: 959822 - DNA, 120 bp, Artificial Sequence
  ENSG00000229591_3 (sequence is synthesized)
atgaagaccctgaatcagagtcatagggagctgtgagagaattttctgcaacactgttattgtctcatagcctgtgtccaataagggagctactggccacatgcagctattgtacacttg

SEQ ID NO: 959823 - DNA, 120 bp, Artificial Sequence
  ENSG00000229591_4 (sequence is synthesized)
aaatgtgactagtggctacagaattagcacaactatgcatataagcataactaagcaataagcataactaagttagccttagaataggataactccatcaccccaacttatattttctgg

SEQ ID NO: 959824 - DNA, 120 bp, Artificial Sequence
  ENSG00000224746_0 (sequence is synthesized)
atagcagagtagccttacccttggttaacaggaacctcataagaactgatgttttctgacatatcaagggggtcttgcacctggacttgtggagctgtgttaatcagaaagataactctc

SEQ ID NO: 959825 - DNA, 120 bp, Artificial Sequence
  ENSG00000224746_1 (sequence is synthesized)
aagataactctcgttgttctctgtcttgacgtctctgggctttcaaattgtggcttattcttgtttgtttttgaggcagagtctcactctatccccaaggctggagtgcagtggcacaat

SEQ ID NO: 959826 - DNA, 61 bp, Artificial Sequence
  ENSG00000224746_2 (sequence is synthesized)
ctctgccttccgggtcgcccggctaatttttttgatttttagtagagacagggttttgcca

SEQ ID NO: 959827 - DNA, 120 bp, Artificial Sequence
  ENSG00000224746_3 (sequence is synthesized)
tcacttaacttcctttaagcataaaagggaatttattggaagagtcctggagtatcacacaaaacccaaggccaagaactacagccagagctacgtgaaggcctggaaccacgaatttta

SEQ ID NO: 959828 - DNA, 120 bp, Artificial Sequence
  ENSG00000224746_4 (sequence is synthesized)
aggttcaaagtgatcactcatcctgaaaattacactctaaaaaagtgctcgtagttgagtttgggaaatgcagatctccaagaaatgtggagcaacttagatgagcaatgaaaggatcag

SEQ ID NO: 959829 - DNA, 120 bp, Artificial Sequence
  ENSG00000224746_5 (sequence is synthesized)
agtaaaacaatgtcaggagactgacacaaaagcaaatcctttcaaagactgattttgaatcctgattgaagagatcaaaagagaatataagaagttagaactcatttctggggcaccacc

SEQ ID NO: 959830 - DNA, 120 bp, Artificial Sequence
  ENSG00000224746_6 (sequence is synthesized)
tcgatgaaaaagctgacaagttcctgctacccagagccctgcagttgccacagctcaatctcttctcaacctggtgcccagcttttcctgttgattctgcaactaggccagtcatctttt

SEQ ID NO: 959831 - DNA, 120 bp, Artificial Sequence
  ENSG00000224746_7 (sequence is synthesized)
caaaaattccttttctgcttgttgactatctctgctatttgcaaccagaagtatttagataaaatatttttaaaatgtatatgtcacctttttcctaattatgatgcaaacttatcgcag

SEQ ID NO: 959832 - DNA, 120 bp, Artificial Sequence
  ENSG00000224746_8 (sequence is synthesized)
tatcgcagaaaactcgtaattctatacattagatacaactaatgttaacatcttagtgtttccttctactcttctattctaaatatatatacatatatacttctttaaaaatagttgagt

SEQ ID NO: 959833 - DNA, 120 bp, Artificial Sequence
  ENSG00000224746_9 (sequence is synthesized)
gtagagtgactatatttatatcagacaaaagaagccttaagataaaaaaaattactagagacaaagagggacatttcataatgataaaaggttcacaattcaaacatgtaatttaaaaat

SEQ ID NO: 959834 - DNA, 120 bp, Artificial Sequence
  ENSG00000224746_10 (sequence is synthesized)
taaaaggttcacaattcaaacatgtaatttaaaaatttcatttgtaataccatcaaaagggatacaatactgaagaataaatttagggccaggcgcagtggctcacagctgtaatcccag

SEQ ID NO: 959835 - DNA, 62 bp, Artificial Sequence
  ENSG00000224746_11 (sequence is synthesized)
ccaggagttactcatgtgatggcacacgcctgtaatcctagctacttcggaggctaaggcat

SEQ ID NO: 959836 - DNA, 120 bp, Artificial Sequence
  ENSG00000224743_0 (sequence is synthesized)
gcccctgccaaggggtgctggccacgcaggaggcttaacctggccggcgcgggaatggggtgcagagagcaaagaaatgtggctttgatcttatggatgccttacttttacattatttgt

SEQ ID NO: 959837 - DNA, 120 bp, Artificial Sequence
  ENSG00000224743_1 (sequence is synthesized)
acagttcttgcagtgagctttccggaccactgtcttgtatgtttcctaagaaaagcaaaaagggaagagattgaagagaaagtagattttcaactacaaactttcatccatttgctttca

SEQ ID NO: 959838 - DNA, 120 bp, Artificial Sequence
  ENSG00000224743_2 (sequence is synthesized)
gcttaagcaaatgtgcgcaaagttgtcatggatttttgcagtcaataaaaaccaagcaagaagactgaatcccaagtcatctggggcagataagaaaagaaacaatttgctgaaactccc

SEQ ID NO: 959839 - DNA, 120 bp, Artificial Sequence
  ENSG00000224743_3 (sequence is synthesized)
tctgcttataacaaaactgactgaaatcagccggaatcaatatggccaaatgcagtttgcgcacagcaagcttgctgatgtcacagcctgaatttctactgcatgtttcataccaactcc

SEQ ID NO: 959840 - DNA, 120 bp, Artificial Sequence
  ENSG00000224743_4 (sequence is synthesized)
ctccaaatttgcacatgggacccaccaggaagcatgaagagagagccatgcatgcctgaagacttcccagatgttccctttgcttccaccaatcacctgctaaccccaggatccaaccct

SEQ ID NO: 959841 - DNA, 120 bp, Artificial Sequence
  ENSG00000224743_5 (sequence is synthesized)
aaaccttttgtaataaaattactgccctaaagccagtacaagacagatttgaactggacttttgtttcctcagaagttaacttgcaatgtgaagctttccttttctcaaaaacttggtgt

SEQ ID NO: 959842 - DNA, 120 bp, Artificial Sequence
  ENSG00000224743_6 (sequence is synthesized)
catagtgttggcttctagtgcagtgagccccttttgctggataaccttacctggtaatttgacatactaggtggttagtaactactgactgtctccaggttacaacacagttattaccca

SEQ ID NO: 959843 - DNA, 120 bp, Artificial Sequence
  ENSG00000224743_7 (sequence is synthesized)
gaaaagagaagacaggaaatacattttggagttggctggcaacctgtttacaaagcaatttacaacagttccttattcttaaggggctattctaatacaagacctcagagaaacagtgca

SEQ ID NO: 959844 - DNA, 120 bp, Artificial Sequence
  ENSG00000224743_8 (sequence is synthesized)
gtgtgacaaaggaggaatttatcaaaggagacagaaaaagcatcaaggcaagctgtgaaatggtgcggtaggaaccaaatagagagccaaaggatctttctgtcactgcaggcccttagg

SEQ ID NO: 959845 - DNA, 120 bp, Artificial Sequence
  ENSG00000224743_9 (sequence is synthesized)
gagacggggtctcactgtatcagctcagctggagtacagtggtgagatcagagctcaccgcagcctccgggctcctggtctcaagcaatccggacctcagcctcccaagtagtggggact

SEQ ID NO: 959846 - DNA, 120 bp, Artificial Sequence
  ENSG00000224743_10 (sequence is synthesized)
acagagaatgtacaactcctctgccacaacgtgagggagagaagtctgcagacggctgactggtgacgactgaacaagacggaaaggcaagtcgctatgcccgaagcctttgaagggagc

SEQ ID NO: 959847 - DNA, 120 bp, Artificial Sequence
  ENSG00000224743_11 (sequence is synthesized)
cagcagggtccatgggaggttcaggacacatatctgcagccctgcttctggccccacccttggggaagccttttgcaggtgatcctgggcctctgctggggaaggccccaagaggtgaag

SEQ ID NO: 959848 - DNA, 120 bp, Artificial Sequence
  ENSG00000224743_12 (sequence is synthesized)
catcctctgcagaggagagagcacatccggaagtagaagacagaccactgtctgggctccgtttaactgctgtgatttgggattgtaacttactcccgtaaagcctcagtttcccacatg

SEQ ID NO: 959849 - DNA, 120 bp, Artificial Sequence
  ENSG00000224743_13 (sequence is synthesized)
gaaaatcaaatcgatcattgttataacatttcacttttttgttatgtgatgtaatttacacagtgctttcgtatacgttatccaatttagcgaaataatacagagcaatgcattttgaaa

SEQ ID NO: 959850 - DNA, 120 bp, Artificial Sequence
  ENSG00000224743_14 (sequence is synthesized)
cggcctcctgagcagctgggaccacaggtgcatgtcactatgcccagctaatttttgtagacaggaggtctcactatgttgcccaagctggcctcgaagtcctggactcaagcaatccgc

SEQ ID NO: 959851 - DNA, 65 bp, Artificial Sequence
  ENSG00000224743_15 (sequence is synthesized)
ctgagatctttggaagcatgccagaacagactggtgaaaataaatcatgcaaatctttaataaaa

SEQ ID NO: 959852 - DNA, 120 bp, Artificial Sequence
  ENSG00000224743_16 (sequence is synthesized)
gttccacgcggtcagaagggtcatcctggcttaggagaggggcagaagaggaaatgcacgcgtggaaacaggagtgggcagggaggatgtgacactgtcctcctcaccaggccacgttcc

SEQ ID NO: 959853 - DNA, 120 bp, Artificial Sequence
  ENSG00000224743_17 (sequence is synthesized)
tggcaccaaccatagtgtttgtgagggtcaatttaattgttcttgtgctctcatagaggaagctgtgtctttcatccccttgtaagagttttcactgatgaagggggtcttttatcttca

SEQ ID NO: 959854 - DNA, 120 bp, Artificial Sequence
  ENSG00000224743_18 (sequence is synthesized)
ccaagtgcagattagcttccttcaagaagttagttaattttctaactaaacccaagctcagatgccatgtggatgtaggtaggctgaatggcccccagcaggctgaaggatgcgtctgcc

SEQ ID NO: 959855 - DNA, 120 bp, Artificial Sequence
  ENSG00000224743_19 (sequence is synthesized)
gcagtctctctgaaacacagagctggttccccattgacacagctgcgagcatctgcacggagcgaatggctggctgagctgagcgcgcgggctgccttttgctacaccacagcatgtttg

SEQ ID NO: 959856 - DNA, 120 bp, Artificial Sequence
  ENSG00000224743_20 (sequence is synthesized)
tttcttatatctagtcatcagcagagacagctccaagcaattctttctggctgattgtccttccagtgcctgacatgaaaatcacagccttggcgagaaaacagccgctgcagggagtgg

SEQ ID NO: 959857 - DNA, 120 bp, Artificial Sequence
  ENSG00000224743_21 (sequence is synthesized)
tgcccacagtactctaggcatccctcacctgcgtccacttcccaccatccctcggaggggccagcacacaagacagtgaccggggcatgtgtcaagagcatgcgagagaatatctaccct

SEQ ID NO: 959858 - DNA, 120 bp, Artificial Sequence
  ENSG00000224743_22 (sequence is synthesized)
ttccgctcggctgtctcccagcttggtttcttagaaatctatgtcattatctttctgctgggattgtcagacctgattttgagagcatttaaaacctgacccctgatggagcctctaaaa

SEQ ID NO: 959859 - DNA, 120 bp, Artificial Sequence
  ENSG00000224743_23 (sequence is synthesized)
tccttccctgatccctggtctccttatctgtaaatgagaataccagcacccacctcactgtgctgtaaacatgatgagttctaacaataatttataaattgtaaaatcacacaaatctaa

SEQ ID NO: 959860 - DNA, 120 bp, Artificial Sequence
  ENSG00000224743_24 (sequence is synthesized)
ccatctctgggcctctctgaacaaatctaattcactgagcatgaattgatcactacccactcaaccttttgtggcgcaggaaggatgctctacctgtgaaaaaagcatccagaagatctt

SEQ ID NO: 959861 - DNA, 120 bp, Artificial Sequence
  ENSG00000224743_25 (sequence is synthesized)
cttgcaaagggaggtttgaggatccctgcaaagagaatgggtctggggtgggctgagactgtagacaggactcagaggctggggctgttttcacaggggagggatttggtgccagcagtt

SEQ ID NO: 959862 - DNA, 120 bp, Artificial Sequence
  ENSG00000224743_26 (sequence is synthesized)
aaatccattgtgccctatttagaacttcactcttgtcccaaacattgacagagtcatcactatgcaccagggaccatcttaagctctgaggtcacacacacacacacacaaggatccaat

SEQ ID NO: 959863 - DNA, 120 bp, Artificial Sequence
  ENSG00000224743_27 (sequence is synthesized)
aagttgccaacagcagagacaactgtgagacacagtgaaatgaagtgactgctccactgctgggcaacaggagacccggatgccaggctccctggcagaagaaatagaaagtcaatagca

SEQ ID NO: 959864 - DNA, 120 bp, Artificial Sequence
  ENSG00000224743_28 (sequence is synthesized)
aacacagatgtcttcctccctaccacatcacctccacttttcaccatcgcctgtgtgatacaaccaccccgcaatgccttcctcagccttttacttctgtttccagtgagtcaagaaaaa

SEQ ID NO: 959865 - DNA, 120 bp, Artificial Sequence
  ENSG00000224743_29 (sequence is synthesized)
cttctccagcttgccctgtggagatgaatgagcccataatccacttacacgtgtgacctttacacagccaggacccccatagagcagccaaacatgcagtcttgtaaacaaaaggaattt

SEQ ID NO: 959866 - DNA, 120 bp, Artificial Sequence
  ENSG00000224743_30 (sequence is synthesized)
caattagcagcaagagtcctgactcagggaagttgctctccagtccagactagcaaaagacagagagaatgggctctgcagaagacagatccagacaagccatgcatgattcatgccacc

SEQ ID NO: 959867 - DNA, 120 bp, Artificial Sequence
  ENSG00000224743_31 (sequence is synthesized)
tgcagccacacgggtgtcaataccaagaacctgccatatgtcatcaagagtgtgttaagtgaaaccttctcaagagttattcttttgtgctctgtccaaatctggagaacccttccaaat

SEQ ID NO: 959868 - DNA, 60 bp, Artificial Sequence
  ENSG00000224743_32 (sequence is synthesized)
tcttttgtgctctgtccaaatctggagaacccttccaaatactataaagattgatatctt

SEQ ID NO: 959869 - DNA, 89 bp, Artificial Sequence
  ENSG00000224743_33 (sequence is synthesized)
acgagagtgactgatatcttgaccatatagtgactcctcccaactgatcatttttgttcacattctgttgtacagaatatgaacatttg

SEQ ID NO: 959870 - DNA, 120 bp, Artificial Sequence
  ENSG00000224743_34 (sequence is synthesized)
atttttgttcacattctgttgtacagaatatgaacatttggaaggcagcagtcttccaatatgattgccaataatatttaaatgatcatcaatactcatttaaattaataataatattta

SEQ ID NO: 959871 - DNA, 120 bp, Artificial Sequence
  ENSG00000224743_35 (sequence is synthesized)
aagttattttggggtatactgcataatgtaatcctcatgtcagaagacttaaaggagctcaaaaggaaaagtcactgcatttgtttttggtaataaacatgccccacttcttactttctg

SEQ ID NO: 959872 - DNA, 120 bp, Artificial Sequence
  ENSG00000224743_36 (sequence is synthesized)
gagtggttctccctccacagacccaaaaggctgaactggtgaacctgctgcatctgtgggcagaattaggatgaaaagcactacctctgtgaaatacaaaatctctgtggaagaaaaatc

SEQ ID NO: 959873 - DNA, 120 bp, Artificial Sequence
  ENSG00000224743_37 (sequence is synthesized)
tcagcctctggaactgtgaggcaaatacatttctgttctttataagttacccagttggtggtattctgttatcacagcataaacagactaagacacaaagttggtggcactttgtgatgg

SEQ ID NO: 959874 - DNA, 120 bp, Artificial Sequence
  ENSG00000224743_38 (sequence is synthesized)
tgcttaaggctgtggaagatggcttgcagctccctgagggtgcagctggctttcccttgatgctgtggacaagctgttcctgccacacagcttcctactgtcttcacagcccctcactca

SEQ ID NO: 959875 - DNA, 120 bp, Artificial Sequence
  ENSG00000224743_39 (sequence is synthesized)
tcttttaagacccagtttcaacatcacctactcaaggctaattttggtgtccttcctccttgtcccataggacaaatgatacatattgtgtgtccccttaccacatcctgtactataagt

SEQ ID NO: 959876 - DNA, 120 bp, Artificial Sequence
  ENSG00000224743_40 (sequence is synthesized)
gttgtgttattgatttacttgtctgtctcaccctctaagcccaagagaaaagaaaacagcatcttatgcctttttattcctggtacaatgtggtttcacagaagatatcatatttatttt

SEQ ID NO: 959877 - DNA, 120 bp, Artificial Sequence
  ENSG00000224743_41 (sequence is synthesized)
cccaggtgattcacagagtttgagacggacagctctagaaccttgctgtgctccggtaacctcagcagcaccttgttagaaatgcagaagttcaggccccacccaaagctgctaaatcaa

SEQ ID NO: 959878 - DNA, 120 bp, Artificial Sequence
  ENSG00000224743_42 (sequence is synthesized)
gatctgcactctatcaagatctccggaggattcctaggaacattccagtttgagaagcactgctccaggtcatatgacaggcaaggtcatctcccgaatgagagggagagaggaaagagt

SEQ ID NO: 959879 - DNA, 120 bp, Artificial Sequence
  ENSG00000224743_43 (sequence is synthesized)
tgaaggcaaaaattcaaagagcaagctaatgaagaacgggtaaaagaactgacaggtggccactgccaaaagcccagaagaggtcacagacaatctgccaccttgccaattactttggat

SEQ ID NO: 959880 - DNA, 120 bp, Artificial Sequence
  ENSG00000224743_44 (sequence is synthesized)
acaaagataacgaagtgaagcttctctgccttcactcttacatttggacaaaagactttctattactatgcagtatgcaatgctttgattcgagcatccttatttaaaaaataaaataga

SEQ ID NO: 959881 - DNA, 120 bp, Artificial Sequence
  ENSG00000224743_45 (sequence is synthesized)
gacaagaaggggatgaaatggggagacagtgggaaaacagggtggttagaaagggaagagaagcatccaaaggggtgctgtcgggatgctaggaggggatcctccctcctctgtctctcc

SEQ ID NO: 959882 - DNA, 120 bp, Artificial Sequence
  ENSG00000224743_46 (sequence is synthesized)
tgtttgccttcccatcatatagaaactgagtgtattagatattttctgcactaattaagtattttcattttccattcttaatttacaacggaatgaattggaatgaaaatatgcatttca

SEQ ID NO: 959883 - DNA, 120 bp, Artificial Sequence
  ENSG00000224743_47 (sequence is synthesized)
ttcactcttttgggagcacaattctagggaatttgtacttgaacaatccttcactgctccatagccactgtggaatcacagttacccaactatacagcagcaatggccaattattgccac

SEQ ID NO: 959884 - DNA, 120 bp, Artificial Sequence
  ENSG00000235645_0 (sequence is synthesized)
gactccttagcaggaagctactcagggcggactgactcaagagcattgtttcctggaactcctgagtccaagagctgggggaatgctggaaacaaggagaaggaaggcagagaatgcttg

SEQ ID NO: 959885 - DNA, 120 bp, Artificial Sequence
  ENSG00000235645_1 (sequence is synthesized)
tggaggcagcaaggaataaatagatgcaagaatattggaaggtgtcataagagggataaggaaccaatcgcacctctgtctcgccccatcccctctccaggcttgggagcagatccacac

SEQ ID NO: 959886 - DNA, 120 bp, Artificial Sequence
  ENSG00000235645_2 (sequence is synthesized)
gtagctctaggagtgagtaaaagctccctgaggcctcccagaagctgagaaaatgctgatacgatacttcctgtacagcctgcagaactggtgaccagccacctctgcaggcatgagcag

SEQ ID NO: 959887 - DNA, 120 bp, Artificial Sequence
  ENSG00000235645_3 (sequence is synthesized)
gctgggatgtgagcagatttgattccagcccccaccaggcttccgggagaagttcccatggaggcagacagacatcagacggaggccccgtcgccggtgtttccttggttgctcaggccc

SEQ ID NO: 959888 - DNA, 120 bp, Artificial Sequence
  ENSG00000238230_0 (sequence is synthesized)
ggccgcctcctcggcctgaagactccccgcctcctcccgccccctccccttttcccaaagatcagcgttttctgggagaaacgctccggagttgttgatgaatgagaagaggactggaaa

SEQ ID NO: 959889 - DNA, 120 bp, Artificial Sequence
  ENSG00000238230_1 (sequence is synthesized)
gatggtgaaacaaaccatcaacaagtctttttctcttgagccacaaatgtttgaagtcaatgactttcgaaaaatgagtgaaatccacgcaggaaaatccagcgctcttgttctaaggga

SEQ ID NO: 959890 - DNA, 120 bp, Artificial Sequence
  ENSG00000238230_2 (sequence is synthesized)
agcaagctgctccatggaaagacccacagggcaagagctgatgtatctggccaaaggacagcaaagacttgaggcctgtcagcagctaagtgaaaaagtcacccgatcaaaccttgagat

SEQ ID NO: 959891 - DNA, 120 bp, Artificial Sequence
  ENSG00000238230_3 (sequence is synthesized)
gactacagccccaggtggcaccttgattgcagctttggaagagaccctgagctagaggatactcaacagcaaggccccctggattcaaaacccactgaaaccataagataatctgttttt

SEQ ID NO: 959892 - DNA, 120 bp, Artificial Sequence
  ENSG00000238230_4 (sequence is synthesized)
gttgttttaagccattaagttttggagtgacttgtgacacagcaagaggtagtgaatatactgtgtgatgtagtcaaggacatagctccagaaaaatctctcccctttctcttgcaacat

SEQ ID NO: 959893 - DNA, 120 bp, Artificial Sequence
  ENSG00000238230_5 (sequence is synthesized)
tctgggctgtagtgcactatgcccattggatgcctgcaataagttcagcatcaatatgttgacctcctggtagatagggaccaccaggttgcctaaggaggggtgaactggcacaggttg

SEQ ID NO: 959894 - DNA, 120 bp, Artificial Sequence
  ENSG00000238230_6 (sequence is synthesized)
gaaatggagcaagtcaaaactcctgcactgatgagtagtacgattgcacctgtaaatagccaaagcaatgtagcctggacaacatagcaagaccccatctctttaaaaaaagaaagaaaa

SEQ ID NO: 959895 - DNA, 120 bp, Artificial Sequence
  ENSG00000238230_7 (sequence is synthesized)
gagaaagaaagaaaccaaactttttcttccctactgaatcatttttgcagcataaaatatttgttatttcctcttttttaaaaaacctcttggtcaagagtggtggctcatgcttgtaat

SEQ ID NO: 959896 - DNA, 120 bp, Artificial Sequence
  ENSG00000238230_8 (sequence is synthesized)
cccagcaccttgggaggccaaggtgggaggattgctgcagcccgggagttcaagaccagtctaggcagcatagaaagacttcatctctacaaaaaatagaaaattagttgggtgttggtg

SEQ ID NO: 959897 - DNA, 120 bp, Artificial Sequence
  ENSG00000238230_9 (sequence is synthesized)
gtgtatgccggtagtcctagctacatgggaggctgaggcagtgaggcaggaggatggtttgggtccagaaggttgaggctgcagtgagccaagatccctgccactgcactccaaggggat

SEQ ID NO: 959898 - DNA, 120 bp, Artificial Sequence
  ENSG00000238230_10 (sequence is synthesized)
aacagagtgagacgctatcccaaaacaaacaaacaaaaaccaaaccagaacaaaaaactcccaggacctcattttttctcttctctgttcccttttacaatgaattccttaaaaagaaaa

SEQ ID NO: 959899 - DNA, 120 bp, Artificial Sequence
  ENSG00000238230_11 (sequence is synthesized)
taaacttagacttgtgtaggtcgagcggttgattaatatggattggagctcggctgctcaaggccgcgtgaataaacatgagcgcgcggcggctaggctcaccgctccccgaacttctct

SEQ ID NO: 959900 - DNA, 120 bp, Artificial Sequence
  ENSG00000238230_12 (sequence is synthesized)
ggggcgccgggagccggaactgcgaagcagctcgttccagatgcgggcgggactgcgggtccacctaaaccagcgcggtctctgtgcgccccccgacccgcacacacacaccctagcctg

SEQ ID NO: 959901 - DNA, 120 bp, Artificial Sequence
  ENSG00000238230_13 (sequence is synthesized)
gatgccctagcgtaccgcaggcgtcacggatctgcgctcactcaactctccggggtctttggacaccgtttctttgctttctagacgctgcctccactctaggatacagattcagatttt

SEQ ID NO: 959902 - DNA, 120 bp, Artificial Sequence
  ENSG00000238230_14 (sequence is synthesized)
gggaacctggggtgcgggaggttgcgggtgggggagattctccccatttcccaagtgttgagcaagggttacccaacttgaatcactgcgcaaaacaaaggcgaccctaagtgtgtccac

SEQ ID NO: 959903 - DNA, 120 bp, Artificial Sequence
  ENSG00000238230_15 (sequence is synthesized)
ggatgcgcggggtggagatcctggccccgcagctggaaagaatgtgttaagccgcggattccggggaggacacagcgctcacagaaggcccttgttttctgaagtctgcgggcctacagg

SEQ ID NO: 959904 - DNA, 120 bp, Artificial Sequence
  ENSG00000238230_16 (sequence is synthesized)
cggctgcggggatcatcacctacccactacacgtccaaagacttcaccatctcccgcttggaaaagtcgcccttgcgacttgtctccctgaagccaccgtgtcttcgtctttggaaccta

SEQ ID NO: 959905 - DNA, 120 bp, Artificial Sequence
  ENSG00000238230_17 (sequence is synthesized)
cgagaagtgtcaaagctaagtgtatgtgtaggcttcggcagcttcaccacccgcccccacccatggcctccaggtcgctgtctctccgctctcatatgcacacactgagtgaccggtctg

SEQ ID NO: 959906 - DNA, 120 bp, Artificial Sequence
  ENSG00000238230_18 (sequence is synthesized)
agtctcagcgaggaggcgaaggcttggcgggatgaggcttccgtgggccttaaggccttcctcaagcctgcagactcctgctactgcaaaaccaacaaggccccacgtcccaccttgggc

SEQ ID NO: 959907 - DNA, 120 bp, Artificial Sequence
  ENSG00000238230_19 (sequence is synthesized)
tgccacctccgcccacaccacgagtctaagtagtcggcttcttagtatccccaggactgcgcgctccgggctgtgcggggcacagagcagcgctgggaaggtgggaagggcttcgcaaaa

SEQ ID NO: 959908 - DNA, 120 bp, Artificial Sequence
  ENSG00000238230_20 (sequence is synthesized)
gacatgcatcgtgccagtcattaggttggcgggatgaagtcccaagagcgctacttggagcttgccgcccctcccctgtccctagcatttgtccgaggtcacccaaaggctgcccttgag

SEQ ID NO: 959909 - DNA, 120 bp, Artificial Sequence
  ENSG00000238230_21 (sequence is synthesized)
ataaggagcggggtttgtctgctaaagtgttggggacaagaccaagcccgggacccaacccagatcccaaggcccaaggcttttcttaaaaactgttccctggaaaatggtgtgggcttg

SEQ ID NO: 959910 - DNA, 120 bp, Artificial Sequence
  ENSG00000238230_22 (sequence is synthesized)
ggacatctattgacccacgcgccccagcccaggtcctgggctgccttcccgcatccagatcacatttattggacataaaggccgcgctagtccgtggctgggagcttttctctttgcagg

SEQ ID NO: 959911 - DNA, 120 bp, Artificial Sequence
  ENSG00000238230_23 (sequence is synthesized)
aagaacagaggttgacaattctagaacagcagggcaagcctcggaggaggtttgggtctactggcgaaagaggagaaagacctttctgctgggaaaatgctgtctcataagaaggctgaa

SEQ ID NO: 959912 - DNA, 120 bp, Artificial Sequence
  ENSG00000238232_0 (sequence is synthesized)
acttcctgccttatattgttgcagttgcaaagatcaaataccaaggttatgggaagatgttttgaagccccatataaatatgtaatttaatttattccaataaagactcattgcacaggc

SEQ ID NO: 959913 - DNA, 120 bp, Artificial Sequence
  ENSG00000235641_0 (sequence is synthesized)
aatataaccctgtggcaacatttgtaaaagtgactctgagaagacagaaagatcctctatgagagactggtgtccccaggaattggcgaggcctgctgaggatcatttgggtaaatgtca

SEQ ID NO: 959914 - DNA, 120 bp, Artificial Sequence
  ENSG00000235641_1 (sequence is synthesized)
tggtcacgcggccccattctcttcgctgagctccggatttccgtagccaattgtctgctggacattcctccctgatacatctcacaggaaactgacttttctcaaaaatgaactctccct

SEQ ID NO: 959915 - DNA, 120 bp, Artificial Sequence
  ENSG00000235641_2 (sequence is synthesized)
tctccctgtcagttactaattctctgtaaatgaccatttgacatcctggccggggaggattcagatcagagatgacttccccactgccacaaagtatggttctgggaaggacaaccagcc

SEQ ID NO: 959916 - DNA, 120 bp, Artificial Sequence
  ENSG00000235641_3 (sequence is synthesized)
ccaaggccacgaagattctgaaaaagtttcttctcatttgaagtccagtatttcctcggccccatttttctgttaaacaatccttttcccttggagattgctaaagcttagctccagggc

SEQ ID NO: 959917 - DNA, 120 bp, Artificial Sequence
  ENSG00000235641_4 (sequence is synthesized)
cctgtgtctacatagctcccttccctcctgccttcctactatcaaaggagaaacagcgtgtaatttgattttttccccttctcctcacttgccatactgtgttctttgcctgggcctgtg

SEQ ID NO: 959918 - DNA, 120 bp, Artificial Sequence
  ENSG00000235641_5 (sequence is synthesized)
gtcaggactgtcccttctgacctgaacacctacctccaagtcctccctgtcgccacagagacccggcaatgcaagtgagtcctgtttgacctcgtcaatcatcgcagactgtaaaggtga

SEQ ID NO: 959919 - DNA, 120 bp, Artificial Sequence
  ENSG00000235641_6 (sequence is synthesized)
ctcggatgctcaagaaacgagcatacccagcagtgggccccagacttctcgcaggcccaggtcctcctgggtgcacagagacctaccagacaacggtccggctgcactggtgttgtgaga

SEQ ID NO: 959920 - DNA, 120 bp, Artificial Sequence
  ENSG00000235641_7 (sequence is synthesized)
tgcctgtgtcagaagacactgagttcctcactcgcctcctatcatgccgatgatcacaggagaaagagcagggcacatgcatgccagcatgctgaagggaggccaaaacccatgcttgaa

SEQ ID NO: 959921 - DNA, 120 bp, Artificial Sequence
  ENSG00000235641_8 (sequence is synthesized)
atatttagccaagcaggatgtttgtgggtaaaccaacattttgctgtaaataaaattctgcaaactcgggactttgagaattgcagaagcttactttgcctgcgtattggcaagagagct

SEQ ID NO: 959922 - DNA, 120 bp, Artificial Sequence
  ENSG00000235641_9 (sequence is synthesized)
attttcctaacacaagctcaccatgaccctcattcagagatgcgcttgacgccgagggtggtgccttttcgctaaggggtgctgtcaggggattgagtaggagcctgaagagctaggagt

SEQ ID NO: 959923 - DNA, 120 bp, Artificial Sequence
  ENSG00000235641_10 (sequence is synthesized)
atcttctccctgggcagaccagcaggcagaccctgtcccttcacactacagtggcacgtgatgggccccactgcccacctggttctggtgtccaggctgaagtcctcgtgtgacactcca

SEQ ID NO: 959924 - DNA, 120 bp, Artificial Sequence
  ENSG00000235641_11 (sequence is synthesized)
aactgttctggcaaggaaggctcacgggttctgacctacactctgaaactgaccagtagtgataaactccgcatggacttcagccatcattgcgtacgtaagaaatacgtgttgcacaca

SEQ ID NO: 959925 - DNA, 120 bp, Artificial Sequence
  ENSG00000235641_12 (sequence is synthesized)
gagtgcttctctacattcccaggtttgccactccccgacttttgctgaagcaggtttctactccatcagtcccacagatgtgttcacagggccagcactgagtgtggtgctggggaaggc

SEQ ID NO: 959926 - DNA, 120 bp, Artificial Sequence
  ENSG00000235641_13 (sequence is synthesized)
atgtgcttggaggcagccctgtgagatggcacagcctaggggaggagtcgtggtggggaagaccctggccacgcatgatagaggaagcgtggccacacagtctttgctgtccctgccaca

SEQ ID NO: 959927 - DNA, 120 bp, Artificial Sequence
  ENSG00000235641_14 (sequence is synthesized)
gcatggtgctgtaagtctcctccttccgagtctgtgcagacttatgtgacacatttgacccaacagaaatgcagcatttgtggtgtgtgaaagttccagaccaggccacagcgagctccg

SEQ ID NO: 959928 - DNA, 120 bp, Artificial Sequence
  ENSG00000235641_15 (sequence is synthesized)
ctctcaggaccccctctctcagagcccaggcaccacgccgtgagagagccccagccacagagacaggctacgtgtaggtgctttcatcaaagtgccacctgtgcctccccgcagcagtgt

SEQ ID NO: 959929 - DNA, 120 bp, Artificial Sequence
  ENSG00000235641_16 (sequence is synthesized)
caggccaccagcttggacaggcagctccagcctccagtggaggcttcagaggacagcatcaaacagcatccacaaaggagacccaccttgtgaaaagcgcctagccaagccctgcccaaa

SEQ ID NO: 959930 - DNA, 120 bp, Artificial Sequence
  ENSG00000235641_17 (sequence is synthesized)
tccctggcctgtgcaattgtgagcaaagcaattcaatttggagtggttttatgctgcagtaggtgaccaaagcactatggaagtgaatatcaggagcccctcactgggatgtcagaagac

SEQ ID NO: 959931 - DNA, 120 bp, Artificial Sequence
  ENSG00000235641_18 (sequence is synthesized)
attcaaggaaggtttcctggaagatttagtacctcaggtggtacaggagaaggtgagatggagagaaagcaaccccagtctgaagacgcagtggtaagaaagggtcattcccctgggcat

SEQ ID NO: 959932 - DNA, 120 bp, Artificial Sequence
  ENSG00000235641_19 (sequence is synthesized)
gtgtggtctgctgggggatgacagccgaggtgaacttgaagcagaggacactcagacaagctgcactctgaatcccgctacgctgaccgcagcacttgctgaagaagccgcctcgccacg

SEQ ID NO: 959933 - DNA, 120 bp, Artificial Sequence
  ENSG00000235641_20 (sequence is synthesized)
cccaagccctgcagagggaaggactgaggaaggcagctcagaggcctcaggcagccacagtgtgcatgcttgtctatgactcacagctacgacgtggcctgtgctgctgcagctgctgat

SEQ ID NO: 959934 - DNA, 120 bp, Artificial Sequence
  ENSG00000235641_21 (sequence is synthesized)
aagcctcaaacctcatataccactctcttccgaggattttttaaatacacaaaactgggagtgagaggggtatttaattcccctactaacacatgttgggcgcagctggagcagccaggc

SEQ ID NO: 959935 - DNA, 120 bp, Artificial Sequence
  ENSG00000235641_22 (sequence is synthesized)
ccactgtagctgggaagatgcggtgccttgaggtgcaggcactgctcactgccacatgtgagcacaggttctgagggtgaaaggtccctggtatctggccagagtgttagactctggaac

SEQ ID NO: 959936 - DNA, 120 bp, Artificial Sequence
  ENSG00000235641_23 (sequence is synthesized)
ataagaagcccccgaggtggtggagaaggtctagccaggctccagactggcttcacagaggtaatgctttttggtttgaaatccgtaagagcgcactacaacttcagggcaagctccaac

SEQ ID NO: 959937 - DNA, 120 bp, Artificial Sequence
  ENSG00000235641_24 (sequence is synthesized)
agtgcttctcaaactttaatgagcacccaaatcatcagggggcgcgggggcagtgggtcgcttactaaaatgaagattctgcatcaggaggtctggggcggtgacacgattctgtgtttc

SEQ ID NO: 959938 - DNA, 120 bp, Artificial Sequence
  ENSG00000235641_25 (sequence is synthesized)
taacacgttcctgggtgaggctgaagccactagtccatgaagcacactttgagtagcaagaatgtggaggaactgtcccaggatgggccatgatttacctgaattctcacagtggcttag

SEQ ID NO: 959939 - DNA, 120 bp, Artificial Sequence
  ENSG00000235641_26 (sequence is synthesized)
acaatggagaccttgtccacaactaaaaaataaaaataaaatcgaaccacactcattgttccaggaaacagcaataacattggaaataaatcaaatggtttattactgagattgtattat

SEQ ID NO: 959940 - DNA, 63 bp, Artificial Sequence
  ENSG00000235641_27 (sequence is synthesized)
tctttcttttttactgctcactgcagcctcgagttttcgggctcaggtgatcctcccacctca

SEQ ID NO: 959941 - DNA, 86 bp, Artificial Sequence
  ENSG00000235641_28 (sequence is synthesized)
ctcaggacccccccaccccacccacctgtatattcattttctataactgtgtaacaaataataaattcctattactgtataacaga

SEQ ID NO: 959942 - DNA, 120 bp, Artificial Sequence
  ENSG00000235641_29 (sequence is synthesized)
ctgtgtaacaaataataaattcctattactgtataacagacttaatagcttaaaacaacacccatttatggtctcataattctgcaggtcagaagtccaggcgggtttaatggggttttc

SEQ ID NO: 959943 - DNA, 120 bp, Artificial Sequence
  ENSG00000235641_30 (sequence is synthesized)
tgcttggagtctcacaaggccaatgtcaaggtctcctatctggaggtttggggaaaaaaatctacctccaagtttaatctggttgttgggcaaattcacttccttgcagtcccctgaaat

SEQ ID NO: 959944 - DNA, 120 bp, Artificial Sequence
  ENSG00000235641_31 (sequence is synthesized)
gtggcaaacggtggggggaacaatcaagacggacccaaagcggttgcagcagagagggaggcatccaatcccgtccaccagcccccaaaggccgtcgtcctgcctggagaacctagcagt

SEQ ID NO: 959945 - DNA, 120 bp, Artificial Sequence
  ENSG00000280206_0 (sequence is synthesized)
caaaaaaaaaaaaaaaggtgtcataaacctctgagactgtagcctgcttcttagcttctcattgagattcctagaggtgcgttcgagttttcagagtaattttccagaccaaccagcgtc

SEQ ID NO: 959946 - DNA, 120 bp, Artificial Sequence
  ENSG00000280206_1 (sequence is synthesized)
agtgggaaatctgacctcttttggcaaactgcgatcattcattttcctgagtcccctggtggggtggggggaattctgcctcaggaccctgaggggtctttggggcaagatggccttggt

SEQ ID NO: 959947 - DNA, 120 bp, Artificial Sequence
  ENSG00000280206_2 (sequence is synthesized)
aatgcagccactaagaacaggacttcattcaaaggcataatgaagtaaccagggtgaccatcaagtaaaattaaagcacaagatcattgtaggaggcttccttgtcaaagacgtgaacgt

SEQ ID NO: 959948 - DNA, 120 bp, Artificial Sequence
  ENSG00000280206_3 (sequence is synthesized)
gttaggaactgctgtctctttgggacacgagttaaaagaacacactaatttctggagtgtgcctgcagcttcacggccttcattttgttactaagttattttctggaagaacagcaaaaa

SEQ ID NO: 959949 - DNA, 120 bp, Artificial Sequence
  ENSG00000280206_4 (sequence is synthesized)
tttcaggttgaaaacagaactttccaagtgctactgaaattccgcagagaattacgctgcgatggtgggtttcttaccctagaaacatcctaacctgtatccacagaagatgtcctttta

SEQ ID NO: 959950 - DNA, 120 bp, Artificial Sequence
  ENSG00000280206_5 (sequence is synthesized)
tttttttaaaagatcaataaaatcaagagaaacgaatgttgaacttgttgggcttctggtcaaagaggctttgtatgtttatactttaatgttttcccacagagtggtgaaaaacttttt

SEQ ID NO: 959951 - DNA, 120 bp, Artificial Sequence
  ENSG00000280206_6 (sequence is synthesized)
ttaaccaagttaaaaaatatgaaaaaatctttttgaaaatttctattcaagccaggtttttagaaatgtatccgggatgtgtttgtgcgtcattcaaggcatattagcatctggtcacaa

SEQ ID NO: 959952 - DNA, 120 bp, Artificial Sequence
  ENSG00000280207_0 (sequence is synthesized)
cagctgtgttgggccattccaaaaaatgtcagagaaatctgtctcggggtaaaatactcagacttccttcaggacctgctttcaggtgatgctataccagagcgcattggaagttgggta

SEQ ID NO: 959953 - DNA, 120 bp, Artificial Sequence
  ENSG00000280207_1 (sequence is synthesized)
gaatactgaggcgtgcccgacccctcttctccctcatggcctgaatgaagttttcaggtttatttgggtccccttggctgagaggaggatccgttcagttcattgaggggcttagaaatt

SEQ ID NO: 959954 - DNA, 120 bp, Artificial Sequence
  ENSG00000280207_2 (sequence is synthesized)
taattttaatttacattgtaaagtgtaaacatatacaatgttgatcagttatacctgaatagagctgagggaaaagagaataaaaggaaccatgactaacaacaatgaaaagaaatggaa

SEQ ID NO: 959955 - DNA, 120 bp, Artificial Sequence
  ENSG00000231079_0 (sequence is synthesized)
cggagtggccgcctcccaccacagggccccctaatgggcgcttttgtcctgcggggcagagggacctcattagaaggcgctggtgctaaagggaaatgcatttccagaacaggaggtttc

SEQ ID NO: 959956 - DNA, 120 bp, Artificial Sequence
  ENSG00000231079_1 (sequence is synthesized)
atcattcctagcgttagcgacagaatggtgacagaagcattcagagaggagagaaaaaagtcggccctggaagccatcccaggaaaccagaccctacagaggtcagcctgtcacagaggg

SEQ ID NO: 959957 - DNA, 120 bp, Artificial Sequence
  ENSG00000231079_2 (sequence is synthesized)
ggactggaagaggtttggatactgaccagattggcatttgtccctgactatgggacaagaggtggctgtaaaaggggaacaaaagtcccttcccccatgactatccaaagtttctaatat

SEQ ID NO: 959958 - DNA, 120 bp, Artificial Sequence
  ENSG00000231079_3 (sequence is synthesized)
cgatggagttgttatgtgcccagattcccaggtgaaaatcaataatctcttaggagtgaggtgccagacaggttgttcagagaaaaactatgatataatctcctcagagaattgaagccg

SEQ ID NO: 959959 - DNA, 120 bp, Artificial Sequence
  ENSG00000231079_4 (sequence is synthesized)
actgcttggcaaaataagacctggaaatgggagagaccagtaaaagactaagcctgacaaaggaagagtcccaccatgtgtcaatacagaattgtgtaacgaacatcttcaaataaaatg

SEQ ID NO: 959960 - DNA, 120 bp, Artificial Sequence
  ENSG00000231079_5 (sequence is synthesized)
aagcaccaaccaaaagaagaaaggaggatagaaaaaataaaatggaagatgtagggtgggcagattagggctgcgtttgttgcttgctttcatgttaccatcatagcgtttttgccactt

SEQ ID NO: 959961 - DNA, 120 bp, Artificial Sequence
  ENSG00000231079_6 (sequence is synthesized)
acaaaggaggaaaaaaatcaattctgtgccaacccagacaacagagacctgagtgggggttgggaagagagatttttcagcacagaatcagactccttctccaaagagctgtgtggcctt

SEQ ID NO: 959962 - DNA, 120 bp, Artificial Sequence
  ENSG00000231079_7 (sequence is synthesized)
gcactggcggaaaaggtcagctcgcagaatgatcgcccatccacacagcgtttggaggtcagacgttcctgatgactgtgaaaatggggaggtgagaagaggtcgtcaaagggagcagcc

SEQ ID NO: 959963 - DNA, 120 bp, Artificial Sequence
  ENSG00000231079_8 (sequence is synthesized)
ttttaaagccaggtcagctgctaacaaattttgtgactttggaaaatgtactgaacttctctgaatgtttatttttttatcccatctgttgaaacggtgctaaaaatattatctactctt

SEQ ID NO: 959964 - DNA, 120 bp, Artificial Sequence
  ENSG00000231079_9 (sequence is synthesized)
gcgttcagttcacatcaaggatgggtatgcactggcggaaaagcttaccattgcccagaagatatcacaggccattcaatgtgagcaccaagaagaaagggtatatccatcctatttttc

SEQ ID NO: 959965 - DNA, 120 bp, Artificial Sequence
  ENSG00000231079_10 (sequence is synthesized)
tctaagactacagtcttggcctctgtctctgtctgcctccagagagagatttagcttttgatcacctccaacaaacaacatcctttaggatattgaaactgacaaaagacagcctacaaa

SEQ ID NO: 959966 - DNA, 120 bp, Artificial Sequence
  ENSG00000231079_11 (sequence is synthesized)
atcctatggtttacattaaaagtctgaaggcattgccatgttccggatctgggggttaacagtgcatgacgaagcacataccctcagtaagaatttaatttagctcgaatatgaagggat

SEQ ID NO: 959967 - DNA, 120 bp, Artificial Sequence
  ENSG00000231079_12 (sequence is synthesized)
agtgagactataaaacagaagacaatttgctatttctaaattgctccctctcaaaaactgtggtgggtgtcttaaaatcatctcgtatatccttttacccagtaatctcaattctaggaa

SEQ ID NO: 959968 - DNA, 120 bp, Artificial Sequence
  ENSG00000231079_13 (sequence is synthesized)
tgtattctaacaaaataattgggcaagtccacaaggaggtatgtggactactgtttatatcatgcctttgtttataataggaaaaaaaaaccaacagaaaaacaaaggtccatcagtagg

SEQ ID NO: 959969 - DNA, 120 bp, Artificial Sequence
  ENSG00000231079_14 (sequence is synthesized)
aaataaagtattgattaggcatataatgaaattatatgcaacttttagaatgctgaaaaagtatagtacattagacttcagacatcagcatttagtttagtatactatactattaagtaa

SEQ ID NO: 959970 - DNA, 120 bp, Artificial Sequence
  ENSG00000231079_15 (sequence is synthesized)
gccctcaggaggaagcactcatctttaacaagacctgctttctcaggactgcaaacaagagaaaagcccaataagaggaaagtgaagtgtgaaaatccatttcaaagaactttactgaga

SEQ ID NO: 959971 - DNA, 120 bp, Artificial Sequence
  ENSG00000231079_16 (sequence is synthesized)
actcaccatgtcagagagcttccattaatacagttgcttcaaaaccaataggcagaacccaaagtaatggatgactcaccaggacttttagcagctaatggagtactctgagaaatgctg

SEQ ID NO: 959972 - DNA, 120 bp, Artificial Sequence
  ENSG00000231079_17 (sequence is synthesized)
taaatccaatatttttgctgaaaaattaatgtgttatgggagggagcctcttttctaatcacttacccacccccaccctctacttctagttcaccatcagcatctttagctcttctaatt

SEQ ID NO: 959973 - DNA, 120 bp, Artificial Sequence
  ENSG00000231079_18 (sequence is synthesized)
tttgccaaagctgaatgcagttctttcccaattttcttatatcattttaagtattatatatgctatcttaccaggcccactcagagaaacagcacttatctttaaaattattttttaact

SEQ ID NO: 959974 - DNA, 120 bp, Artificial Sequence
  ENSG00000231079_19 (sequence is synthesized)
actccccacagcctacggccaataaaaactctgtaaactatgttaaatataccaaagtaaagtttccagaattcacagagagatcgataaatatttactaagtgccttctacagacaaag

SEQ ID NO: 959975 - DNA, 120 bp, Artificial Sequence
  ENSG00000231079_20 (sequence is synthesized)
tatgaccaaagctaataataatccaaggcaaaaaacttgggagatcatatacaaaacaaatgctataggagttcaaagtggggaaagactgtggctggtgtggtcagagaaagacagctt

SEQ ID NO: 959976 - DNA, 120 bp, Artificial Sequence
  ENSG00000231079_21 (sequence is synthesized)
tgcacaaagctgaaaaactgcaggagtgatggagaacatttctcccaaacaggacattttcataaaagagaaatctagaaactccacctgtaaaatctctttcttggaatatatctccat

SEQ ID NO: 959977 - DNA, 120 bp, Artificial Sequence
  ENSG00000231079_22 (sequence is synthesized)
aacaaacagaactttaagggaaaaaatgaccccagtttcaaaaacacaaagaatttctgggattctgaatttggactaacagataactccaccaaaattcattctttacttgtctctgtt

SEQ ID NO: 959978 - DNA, 120 bp, Artificial Sequence
  ENSG00000231079_23 (sequence is synthesized)
tgaaggtgacatatttctggatgatctgggcttctttggtcatccacagtctgtgcccctagaactaaggaaggttgtgtacatctcagacagttttcacttgcaactgagccatgtcag

SEQ ID NO: 959979 - DNA, 120 bp, Artificial Sequence
  ENSG00000231079_24 (sequence is synthesized)
ccggctccaactgaattgacttgggaccattctactcattgcatatggcatgatacagactgccagaaccctcatttcctttagtgccacattatcaattaggaatgggaaggatcctgg

SEQ ID NO: 959980 - DNA, 120 bp, Artificial Sequence
  ENSG00000231079_25 (sequence is synthesized)
cacatgccaacccaactcccaaacccttcagtatctggcagtcttctattctgtacatgcactcaccaaaatatacataaacgaatgttcatagcagcactagccatattagccccaaac

SEQ ID NO: 959981 - DNA, 120 bp, Artificial Sequence
  ENSG00000231079_26 (sequence is synthesized)
cggaaactatccaaatatccatcaacagtcagtagacaaattgtagtatattcatatcatggaatactacaaaacaatgaggatgaatttgacaagcataacacttaatcccaagaaacc

SEQ ID NO: 959982 - DNA, 120 bp, Artificial Sequence
  ENSG00000231079_27 (sequence is synthesized)
acacacaaaagagaacatactctatggttttatgtaatataaagttaaaaagaaacaagcaaaactaatagcatcagaagtgagaatcatggttaccctgaagcagggggatttagggac

SEQ ID NO: 959983 - DNA, 120 bp, Artificial Sequence
  ENSG00000231079_28 (sequence is synthesized)
tggaagggccacaagggggatttctagggtcccaaaatgtctgtttcttagtctgtgaggtggttacagggagcatttactttatgaaaagtcatccaactgtatacttatgataacagt

SEQ ID NO: 959984 - DNA, 120 bp, Artificial Sequence
  ENSG00000231079_29 (sequence is synthesized)
tttctatatgaatgcttcatttcaataaaaagtttaccttagaaaaactgaaaactgttgtattaaaggattatagtaggatgagcaaaacttactttacggttgaaaagcaatgtgtat

SEQ ID NO: 959985 - DNA, 120 bp, Artificial Sequence
  ENSG00000231079_30 (sequence is synthesized)
attcacatctatgatttttatttaaacttcttatttaatatggtgacttggttttaatttgtttagccactaatatatgtttatttagataaggaaatatatactcatagcaatgtcata

SEQ ID NO: 959986 - DNA, 120 bp, Artificial Sequence
  ENSG00000226992_0 (sequence is synthesized)
aaaggagggaaaggagaccctgctaattatacggcaaccttagaatcggtttctcccgctgaactagaggacaagccacacacctgcagaactttaccagcaggagcagtgctgggaccc

SEQ ID NO: 959987 - DNA, 120 bp, Artificial Sequence
  ENSG00000226992_1 (sequence is synthesized)
aactcaggcaaccagctctgctaatgaacccagaaaaagcacacaaacttgttttccctccaagacagagacaacacagtggggttttcagaagtgtgtggtgtggaagcagccaggtgt

SEQ ID NO: 959988 - DNA, 120 bp, Artificial Sequence
  ENSG00000226992_2 (sequence is synthesized)
cctgggcagggagagctggttcacccatgtctgaacactgggacaccagttctcctccaaacatcttggactacttaaatgcaaagacaaattcaggaaagcccggaggcctggtataga

SEQ ID NO: 959989 - DNA, 120 bp, Artificial Sequence
  ENSG00000226992_3 (sequence is synthesized)
tgtttcatcaaaaatttcaccgtgctgtgtcagaaatcagaagacagaatttagaaccatcccgtttcctctgcagaaagcttttcaagaagatacactcggaattagcaatatttccac

SEQ ID NO: 959990 - DNA, 120 bp, Artificial Sequence
  ENSG00000262999_0 (sequence is synthesized)
gcctcccaacatttgtatactttttgaagtcacacatcttcctgaaaagtggatagaagttttcaaccttcttcgcaggatggagggcagacacagaacttcaacacagtgacaggggct

SEQ ID NO: 959991 - DNA, 120 bp, Artificial Sequence
  ENSG00000262999_1 (sequence is synthesized)
tcaaacgactaagttccgtccaggtacccttggagatgtgtgctgctgcgtggaagatgactgagcatgagacacgcagtgcccgaccgcgtggagcctacgtcctagagaggaggcaca

SEQ ID NO: 959992 - DNA, 120 bp, Artificial Sequence
  ENSG00000262999_2 (sequence is synthesized)
ggaacaccagacacgagaacgggaactgagtcaccagcggggaagacagaccttatccaagtagcttcactaagaaacagaactgattaaaagggaagaaatgtggttgtcttacggcaa

SEQ ID NO: 959993 - DNA, 120 bp, Artificial Sequence
  ENSG00000262999_3 (sequence is synthesized)
gtcacaaaagaatatgatgtgctctggggtaaccaaggcaggcttccctgaggaagtgacccctgaactgagacctaaagactgattcagagttaatgcatcatacagccccagatggag

SEQ ID NO: 959994 - DNA, 120 bp, Artificial Sequence
  ENSG00000262999_4 (sequence is synthesized)
aatcagcatgtgcaaacgtccagaagaaacctacagcaagaccagcacagcccaacagccccagagaggagccccacgtcctttagggtgagcccagggctgacctaaggagatccacaa

SEQ ID NO: 959995 - DNA, 120 bp, Artificial Sequence
  ENSG00000262999_5 (sequence is synthesized)
catggctgagaaagacggggctgttgtctagggcccacctggggctgcagggtataggcagcttccagcaggtactgtcggagccccgggtcccgtttctgcagcgtcacggccgcgaac

SEQ ID NO: 959996 - DNA, 120 bp, Artificial Sequence
  ENSG00000262999_6 (sequence is synthesized)
acaggcaatgagagcaggtagggctggccaggcaccggccaggtcactccagtgcacagtcgccagccccaggtgtaggacactgcagagagaggtaagcaggcagcactggtcagtgga

SEQ ID NO: 959997 - DNA, 120 bp, Artificial Sequence
  ENSG00000262999_7 (sequence is synthesized)
gactcagagggctctgggcatgggtgcccgcagctgccacatcagcaaagaaacctcttctctaatttcttctgaggaaaggcaccatgtagacaggactcctgtgaggcagtggtgtgt

SEQ ID NO: 959998 - DNA, 120 bp, Artificial Sequence
  ENSG00000262999_8 (sequence is synthesized)
cagtaacccctaccaacaaccaaatatttctgcacatattaccaaatgtctcctggggggtcaaaactgccccagctgagaacccctggtagactttttctttttttttttttttccaga

SEQ ID NO: 959999 - DNA, 62 bp, Artificial Sequence
  ENSG00000262999_9 (sequence is synthesized)
aacccctggtagactttttctttttttttttttttccagacagagtctcactttgtcacccg

SEQ ID NO: 960000 - DNA, 120 bp, Artificial Sequence
  ENSG00000262999_10 (sequence is synthesized)
acaggcgtgagctaccgtgcccagcccctggtagactttttaaaaagagtgtcaggcaatactgtgtagaacacaggctctgcagcaagaatgcctggttcaaattctagcttggccact

SEQ ID NO: 960001 - DNA, 120 bp, Artificial Sequence
  ENSG00000262999_11 (sequence is synthesized)
agcttggccacttcccagctgtgtgaccttggacaaattacttaacctctctgggtctcaatgtttctttttcattattattattgttactactccccagactcactgtaaaggcctcag

SEQ ID NO: 960002 - DNA, 120 bp, Artificial Sequence
  ENSG00000262999_12 (sequence is synthesized)
tctttctcatcttaaactgctaatgataatagttcctgcctcatggcgtagctgtgaggattaacaggtcagtaagtgttgagagcagcaccaggcctacagtaatgtctttggtagtaa

SEQ ID NO: 960003 - DNA, 120 bp, Artificial Sequence
  ENSG00000262999_13 (sequence is synthesized)
aggcctacagtaatgtctttggtagtaactcttatcccgattataaaaatatatttgttagctggatatggtcgctcacacctgtaatcccagaactgtgggaggccaaggcgggtggat

SEQ ID NO: 960004 - DNA, 76 bp, Artificial Sequence
  ENSG00000262999_14 (sequence is synthesized)
aggcgggtggatcacctgaggtcaagagtacaagactagcctggccaacataggaaaagcctgtctctactaaaat

SEQ ID NO: 960005 - DNA, 65 bp, Artificial Sequence
  ENSG00000262999_15 (sequence is synthesized)
acgactcaggagaatcgcttaaacccgggaagcagcacgctatctcaaaataaataaataaataa

SEQ ID NO: 960006 - DNA, 120 bp, Artificial Sequence
  ENSG00000231078_0 (sequence is synthesized)
cgagatctctgtgcagcctcgtgggaagccagcctaaaacctggaaaccttaacctccgtctcctgttgcttctcagtcaggactttcttggttgcaagtgatggaaaatcccacccatg

SEQ ID NO: 960007 - DNA, 120 bp, Artificial Sequence
  ENSG00000231078_1 (sequence is synthesized)
aagggaggatttttctggctaaccaaggagtttttggggagtgttctgattcagctcagggaggaagtccatgtttacttcctcaaaggtggctgagggatgaggctcttcttgctggcc

SEQ ID NO: 960008 - DNA, 120 bp, Artificial Sequence
  ENSG00000231078_2 (sequence is synthesized)
cctgaggtcacaccagccctcagaagaaactgagaaactcctagtaattttcgctaaagaagatggttcaagggttgtgtgtgtttcctctgcctgctgtaataaattactacaaactaa

SEQ ID NO: 960009 - DNA, 120 bp, Artificial Sequence
  ENSG00000262995_0 (sequence is synthesized)
ttcagtgttttatagaagtgctcacatgtaatctaaacaagaactctacaagagaggtatccagagccacattttatagataaggaaattgaggctcagagaggactagaaatttggcta

SEQ ID NO: 960010 - DNA, 120 bp, Artificial Sequence
  ENSG00000262995_1 (sequence is synthesized)
agctcctgcagctgagttgggggctgcatctgacaagtggccgtggtttcaagtctctggagtcccatttttttctcttccatggagtttgtttgctgcagtttgaggagccgaggcata

SEQ ID NO: 960011 - DNA, 120 bp, Artificial Sequence
  ENSG00000262995_2 (sequence is synthesized)
tgataaataccaggtgtccttagaagaagaggagattgggccccagacacacatgcacagaagaaagaccacgtgaagacagagggagaagacggcgatctacaaaccaaggaaacatcc

SEQ ID NO: 960012 - DNA, 120 bp, Artificial Sequence
  ENSG00000262995_3 (sequence is synthesized)
ctagacctccagcctccacaacggtctttggactcagatggaattataccacggggtttcctgggtctccagcatgcagatggcagattgtggaacttctcagcctccaaaatcgagtga

SEQ ID NO: 960013 - DNA, 120 bp, Artificial Sequence
  ENSG00000262995_4 (sequence is synthesized)
gccaattcccatcataaatcccctctcctgtgtctaaatatgtcctattgcttctctttctctggagaatgctgactaatacagacataatacagcagtctttggggatgatgtatgagt

SEQ ID NO: 960014 - DNA, 120 bp, Artificial Sequence
  ENSG00000262995_5 (sequence is synthesized)
atgtggaggaagaactagacatgaagcagagtgtgctttctttaacataactttttcattaaaatagttgtatgtgcttcgtacaaaaacttggaaaatacagaaatgtaatggaaaaag

SEQ ID NO: 960015 - DNA, 120 bp, Artificial Sequence
  ENSG00000262995_6 (sequence is synthesized)
ggaacttctcagcctccaaaatcgacattgcccagtgatcctggggatgccgtttggaagctgcacacctttgacatctttagggtcgaagagatgatgctccccatggggactgaccag

SEQ ID NO: 960016 - DNA, 120 bp, Artificial Sequence
  ENSG00000262995_7 (sequence is synthesized)
ctttccagaaaccgtctttggcagttctgaaacaaaggccacctagtgaccaaacacaaaacaaaaaacacttggaaatcatcatttctcaaaaagacttttgttttgaaagagacaata

SEQ ID NO: 960017 - DNA, 120 bp, Artificial Sequence
  ENSG00000260840_0 (sequence is synthesized)
actgaccgttagcgccactcccaccgtgctgctcgctacgataatcgcgccaccacttgtcctccgtagctctggagtcctggcctgccggttgctaactgggccactttacagaggcag

SEQ ID NO: 960018 - DNA, 120 bp, Artificial Sequence
  ENSG00000260840_1 (sequence is synthesized)
aagcaagctcagggagggtaaacaggaagggtaactaattttcctgggattacacagtcggtaaataatggaggcagcatcgaccccaggcagtctggccccagacaccacacttttacc

SEQ ID NO: 960019 - DNA, 120 bp, Artificial Sequence
  ENSG00000260840_2 (sequence is synthesized)
caattcccacagctgcctggaaaataaatagaaatcaaatagatgttaacaaggacctttgggagttgtccggcgtttgggcaacggattgcttttctgtttcatgttagtccaccgccc

SEQ ID NO: 960020 - DNA, 120 bp, Artificial Sequence
  ENSG00000260840_3 (sequence is synthesized)
tcacgtggccccgtcctgaacttcacccttgtttggtcccaaactgtaaagaccctcacggtgctgggaaacacagccctgctggcctcggactgcaggacagaatccttacccctcctg

SEQ ID NO: 960021 - DNA, 120 bp, Artificial Sequence
  ENSG00000260840_4 (sequence is synthesized)
ggcctccgttgtgttctttccaaaatgggataatggtagcaggttaatggaaataattaaataaaatagtccatctaaattcctggatcgaacgaagggtccaataaacattagctgtgc

SEQ ID NO: 960022 - DNA, 120 bp, Artificial Sequence
  ENSG00000260840_5 (sequence is synthesized)
tgttgtagtgctcagtgcctctctctcaaaagcgggtggcaacagacaccctcacaccttcgctgtaatgagagctctgcaaagccaactgcaaatattaggaatcagtgtcctcacgag

SEQ ID NO: 960023 - DNA, 120 bp, Artificial Sequence
  ENSG00000260840_6 (sequence is synthesized)
gccaacccctttccaaggctgcttggaaaatgctttgctagactagcttggatcttgctggcttgactcagatcacagttgagcaaatgtgcagaagaggaagagatgagggaaggcctg

SEQ ID NO: 960024 - DNA, 120 bp, Artificial Sequence
  ENSG00000260840_7 (sequence is synthesized)
gctcagtgtgctcagagcttcgattttgagactgttcgggaggaaaagttcctcaccagacagtgctctgctactcttaaagctagaaggacagaaagatttctccacagttggggtcat

SEQ ID NO: 960025 - DNA, 120 bp, Artificial Sequence
  ENSG00000260840_8 (sequence is synthesized)
ggaaatgtgtattttctccaaacctttttttcactgaaccagttgttggagccttccatttgagaccttgtgatgccttcatggacattatttctgctcatccacacagccagcagggac

SEQ ID NO: 960026 - DNA, 120 bp, Artificial Sequence
  ENSG00000260840_9 (sequence is synthesized)
ttgtgcagcaggaggggcaggctcagagttaagcagctgctccaacgtcacacggctagcctgggcctgatctggagcttgtcccagatctggagcttcccaggtttggacctgggtcac

SEQ ID NO: 960027 - DNA, 120 bp, Artificial Sequence
  ENSG00000260840_10 (sequence is synthesized)
tagagcagagcctccttgcctcttcgtggatatggagccaattcactgtggccgatcaccagcctcacagactaagggggcagccctgcccctgcctacgcccctaccactgctgaagcc

SEQ ID NO: 960028 - DNA, 120 bp, Artificial Sequence
  ENSG00000260840_11 (sequence is synthesized)
atctccttgccgacaaacacaagcagaaacttctcaggatctgctgcctcttgttccaaggattaggcgagcttctgtcttgaggacagaagaggcagctggaagatcagggttgtggtt

SEQ ID NO: 960029 - DNA, 120 bp, Artificial Sequence
  ENSG00000260840_12 (sequence is synthesized)
gaagaaggcctaggtaaggtgccatgactcaaatgtccctaatgggtgagggctttcaacttttggaaactgcaggggcaattttggagacaatgtttaactatagtgtaaagactgcca

SEQ ID NO: 960030 - DNA, 120 bp, Artificial Sequence
  ENSG00000260840_13 (sequence is synthesized)
gaagaaatgtatatgtggtcacaggctaatatttctaaaagtcatcgagtgactttacgtgtcctagccccatatttccccaaagatgactgtctaaatgcccctaagagaggctttgga

SEQ ID NO: 960031 - DNA, 120 bp, Artificial Sequence
  ENSG00000260840_14 (sequence is synthesized)
gttccttgacttctctgaattgttgtagtaaagataaggcagaaattttgaagagatcagaaagaaaaactttagaacaaatctcgtcttttctagaactgtcttcattttaatttactg

SEQ ID NO: 960032 - DNA, 120 bp, Artificial Sequence
  ENSG00000260840_15 (sequence is synthesized)
tcatatcagataacctgccagatggcttttactgtgtctgaattgagtcagaccagctgggatgggatcctgcctccagcagtggtgggccccaggaacatttatttcatctcagcatca

SEQ ID NO: 960033 - DNA, 120 bp, Artificial Sequence
  ENSG00000260840_16 (sequence is synthesized)
agcattcccaaagcagcaggggctaacggggccgtagagattacccctgcagctgtggggctggccagccacacttccatagatttgtctgtagggagacattgagccacatggatttgg

SEQ ID NO: 960034 - DNA, 120 bp, Artificial Sequence
  ENSG00000260840_17 (sequence is synthesized)
acaggttgttacatacgcagacagcaaaagctaaatcagcatgacatgtcgctccttgtgtccctcgtcccacaggaggacacaaggctggaaggttgggacaccagatggcatggacag

SEQ ID NO: 960035 - DNA, 120 bp, Artificial Sequence
  ENSG00000260840_18 (sequence is synthesized)
tgggttgccctgctgtgcagcagccagctctcaactgcaaccgagcactctacagacttagcaggcacctgcagacgtaacttgtgggagtggggagagaggaggaaagcgctgcgctca

SEQ ID NO: 960036 - DNA, 120 bp, Artificial Sequence
  ENSG00000260840_19 (sequence is synthesized)
acagaaactaggaagatcgatgagaaatggccttgcagcagttccaaaagggtggggaggcaggtgagaccactcacggcagcgatgcacagggccacttaacgccccttgctccatgag

SEQ ID NO: 960037 - DNA, 120 bp, Artificial Sequence
  ENSG00000260840_20 (sequence is synthesized)
gagttgcagggtgttccaccaagacgcaggtcaggttgccgtcgagcccggtggagatgtgcagggttgctgggcacctggcagagctggtccctgacacgcacttttatcatcagtaaa

SEQ ID NO: 960038 - DNA, 120 bp, Artificial Sequence
  ENSG00000260840_21 (sequence is synthesized)
atggggatgttaagaatacctaccgcagagttatgcaaccgtcgccattatctaattcgagaacctcttcaacactccagaaagaaacccagtgcacacgagctgccactccccactctc

SEQ ID NO: 960039 - DNA, 120 bp, Artificial Sequence
  ENSG00000260840_22 (sequence is synthesized)
tccttgcccaacccctggcaaccactaatccactttctgtgtccatggatttgcctgttctgggaatttcatttaaatggaatcatatactctgtggcgttttgcgactgacttttttca

SEQ ID NO: 960040 - DNA, 120 bp, Artificial Sequence
  ENSG00000260840_23 (sequence is synthesized)
cttaccatgtttgcaaagttcatccaagttgcagcatgcgtcagtacatcattcttttttatggccgcataatagtccattgtgtagatcatgtttgtttaacctttcatcagtgaatgg

SEQ ID NO: 960041 - DNA, 120 bp, Artificial Sequence
  ENSG00000260840_24 (sequence is synthesized)
acatttgggttgtttcctcttttcagttattatgaatgatgctgttctgagcatgaatgtaggaggttttgtgtgaacatatgttttcaattctcttggatatacctgggagtggaattg

SEQ ID NO: 960042 - DNA, 120 bp, Artificial Sequence
  ENSG00000260840_25 (sequence is synthesized)
ctgggtcacatggtaattctatgtttaatgttttgaggaactgccaaattgttttccacagggactgagtattttatattggtatgcacttttgaaataataaaaaacactcttaacaga

SEQ ID NO: 960043 - DNA, 120 bp, Artificial Sequence
  ENSG00000260840_26 (sequence is synthesized)
attcgtggagtaatcaaccaacccaccccaatccttggtggccagactctaccagagctgaaggcagtttgaaagacagctgtgtgaaaagaatgtgttgcccaggaccactggacaagc

SEQ ID NO: 960044 - DNA, 120 bp, Artificial Sequence
  ENSG00000260840_27 (sequence is synthesized)
gcctgcgagtggacatggtgggttttggttttcttaggtggacttgttcggggctttataaccatagaatggtgaacacttggaaaatactatgaaaggattaaaagttttatcgaaata

SEQ ID NO: 960045 - DNA, 120 bp, Artificial Sequence; identical to SEQ ID NO: 807646
  ENSG00000260847_0 (sequence is synthesized)

SEQ ID NO: 960046 - DNA, 120 bp, Artificial Sequence
  ENSG00000260847_1 (sequence is synthesized)
acataaaaacaggaaaatctcaatagagaaaaaatacgtattgatgatacataatctggatttttccaaagaacaaaaactatgaattgggttgcaaggatttcatgttaagacaacagt

SEQ ID NO: 960047 - DNA, 120 bp, Artificial Sequence; identical to SEQ ID NO: 807648
  ENSG00000260847_2 (sequence is synthesized)

SEQ ID NO: 960048 - DNA, 120 bp, Artificial Sequence; identical to SEQ ID NO: 807649
  ENSG00000260847_3 (sequence is synthesized)

SEQ ID NO: 960049 - DNA, 120 bp, Artificial Sequence; identical to SEQ ID NO: 807650
  ENSG00000260847_4 (sequence is synthesized)

SEQ ID NO: 960050 - DNA, 120 bp, Artificial Sequence; identical to SEQ ID NO: 807651
  ENSG00000260847_5 (sequence is synthesized)

SEQ ID NO: 960051 - DNA, 120 bp, Artificial Sequence; identical to SEQ ID NO: 807652
  ENSG00000260847_6 (sequence is synthesized)

SEQ ID NO: 960052 - DNA, 120 bp, Artificial Sequence
  ENSG00000261710_0 (sequence is synthesized)
gggcaagtctctgcggggtgggaccctgtcccaggacgcaggattggcgctgagctcgggatctctgtgtgcacctgcatcgctggtaggaggacgcccaggaaccaaggagtgaggcag

SEQ ID NO: 960053 - DNA, 120 bp, Artificial Sequence
  ENSG00000261710_1 (sequence is synthesized)
gagcagcccccggcatcatcactcccagtgacccaggaagggatttgtgcttttttccctgcggctctgggcactgcagagttagaggtcctggtccccggggatggagggagggggtat

SEQ ID NO: 960054 - DNA, 120 bp, Artificial Sequence
  ENSG00000261710_2 (sequence is synthesized)
atcagcgggcacagagcatgtccagtgacgcacaaaccacggctgccctctggtgcgtcgggttccttgtggggggatcaccaggcaggagagagcaccaccgtcctggcaggtacaaca

SEQ ID NO: 960055 - DNA, 120 bp, Artificial Sequence
  ENSG00000261710_3 (sequence is synthesized)
gaccccagccagagggtggaggcggggccgcggctgcacagggggcatgtggggaattcaggtgatctgcgtggacacctcatggtggccctggccagctgtcactaaatgggcagctac

SEQ ID NO: 960056 - DNA, 120 bp, Artificial Sequence
  ENSG00000261710_4 (sequence is synthesized)
ggcaggccccgctggacatggcatggtggcagggtgccagagccctcggtaggaaggactgggtcacagcactaagtgaactgctgttgtctgcagagacataactgagggtgagggtcc

SEQ ID NO: 960057 - DNA, 120 bp, Artificial Sequence
  ENSG00000261710_5 (sequence is synthesized)
gggctgggtaatggaaggagggggaaacggctcaagggggctagcatgggcgcagcagccactgcactggggccatgatcacagagtcattgcccagaagcatagctccggggcactggg

SEQ ID NO: 960058 - DNA, 120 bp, Artificial Sequence
  ENSG00000261710_6 (sequence is synthesized)
ccatgctcgtgacttggtgaatgagtgaatgggtgagtgaatgagcttcacagatttccacagtgaagagaacccttagagtgtctgatccgcccctccatttgcaaagcacagatctgg

SEQ ID NO: 960059 - DNA, 120 bp, Artificial Sequence
  ENSG00000261710_7 (sequence is synthesized)
tcaccaccccttcctcagtgggctgctgtggggactggagttagcatgtgcacgggcaatgctaacaggcacatacaaagcaccaagcaagcgtgagctttgggtactttttatcaccgt

SEQ ID NO: 960060 - DNA, 120 bp, Artificial Sequence
  ENSG00000261710_8 (sequence is synthesized)
atagaccaggcgctgagacccagagaggccagcgactttcccaacgctgcgcagtgagccaggtgcagggctgggtgggtcttgggtgcccggttccagggcggctgctgggccaggact

SEQ ID NO: 960061 - DNA, 120 bp, Artificial Sequence
  ENSG00000261710_9 (sequence is synthesized)
gcaggatgctggaggagaaagagtcctgaggtccccagctgccttctggggctgacaggcctgttccttggcctggagaattcctctgagaagagcgagcagctcagtgaggacacatga

SEQ ID NO: 960062 - DNA, 120 bp, Artificial Sequence
  ENSG00000261710_10 (sequence is synthesized)
ggccacccaggccaggaggggacttcaaagccatggacagctcacaatccccaggcggggacatgggaggcttcctttccattgctgtttgatttcagcctcccaattagccatgcctaa

SEQ ID NO: 960063 - DNA, 120 bp, Artificial Sequence
  ENSG00000261710_11 (sequence is synthesized)
gtaatgcactcagggccgtatccattgtttatgagaataagcaggcatgagaacgcccttctctctgcaagaagatgcccgcccttaccaaggtgacttccaaggacttcaggaacctga

SEQ ID NO: 960064 - DNA, 120 bp, Artificial Sequence
  ENSG00000261710_12 (sequence is synthesized)
aacctcgtccttgatcgactcgtggtgttgaaggccctgccaaagccagcctggcactgctctctgggatggagacgggagatggcattccgggtctaaattctcgtgggtggttctcag

SEQ ID NO: 960065 - DNA, 120 bp, Artificial Sequence
  ENSG00000261710_13 (sequence is synthesized)
ctgtcaggaggtgccaggcttacctgccaggaccgtggttttctgtcattgtaactgtgggaatggctaagtcctgtctatgacagtcacacgaaataaagtgttctgtgctccaggaaa

SEQ ID NO: 960066 - DNA, 120 bp, Artificial Sequence
  ENSG00000261713_0 (sequence is synthesized)
ctattctggagagggtgaagacgccaggaggattccagctccaggagccagccccgctgtggcccccgtcgtggggaggagaggccgggagcggcgcggtgggcagagtggggccatctg

SEQ ID NO: 960067 - DNA, 120 bp, Artificial Sequence
  ENSG00000261713_1 (sequence is synthesized)
ggtcccctgtggcttctgggctgaccctggcacacggggtgcctgcagatggctatatggaaagcacaggtgtttctgcttctggagaggccccaggaagcttccaaccgtggtggaagg

SEQ ID NO: 960068 - DNA, 120 bp, Artificial Sequence
  ENSG00000261713_2 (sequence is synthesized)
gcacaggggccatgagagccggaccccacgcagctgcagacctcgacccgaactgcatgcggctgaggacccccaagccaggcagaccccgacccagaccccacgcggccgcggaccccc

SEQ ID NO: 960069 - DNA, 120 bp, Artificial Sequence
  ENSG00000261713_3 (sequence is synthesized)
gacctcgacccaaactgcatgcggctgaggacccccaagccaggcagacgccaatccagaccccacgcggccgcggaccccaacccagacagaccccgacccacccgtgcagcccccagc

SEQ ID NO: 960070 - DNA, 120 bp, Artificial Sequence
  ENSG00000261713_4 (sequence is synthesized)
agcttggccgggaatcacgttaagcaaattgtttggaaaataagccaggagaggaaggagcggcgggcaggtggccccgggagcccagacggacggctgctgtcgatatggcgacagctg

SEQ ID NO: 960071 - DNA, 70 bp, Artificial Sequence
  ENSG00000261713_5 (sequence is synthesized)
cctgaagcccctcagagcctgccctgcagtgctgctgccctcgtctaccagtggctcaaacaggagttca

SEQ ID NO: 960072 - DNA, 120 bp, Artificial Sequence
  ENSG00000261713_6 (sequence is synthesized)
aaccccagcgtcccccagggcggcccgggctccctcagatacagcagcttcctgaggtggcctcacctgcaactccagaccaatcagagaaggccaaatgggctccccaagcccagcagg

SEQ ID NO: 960073 - DNA, 120 bp, Artificial Sequence
  ENSG00000261713_7 (sequence is synthesized)
tgggacccccgatctagagagccccttccccgccccaggccaacagccaccctcgggctccgcatcaggtctgccaaatgcaggggcgaggggccgaccccgccacgggaaccaaactca

SEQ ID NO: 960074 - DNA, 120 bp, Artificial Sequence
  ENSG00000261713_8 (sequence is synthesized)
ggaaacagcccatccagcgtccatctccatccggacccgccgccgcggccgcaggttcacgcgccgttccgcggagatctctcaggcgcctccggcccggcagaaacccgcggttccgat

SEQ ID NO: 960075 - DNA, 120 bp, Artificial Sequence
  ENSG00000261713_9 (sequence is synthesized)
ggcagaggtcctggtgggaatcgcaccgcctgccgttcctgcctccgcggaggatgcgctgccctaaactgcccccggctcttcatcccccaacccccggcagcctccgaccctcccccg

SEQ ID NO: 960076 - DNA, 120 bp, Artificial Sequence
  ENSG00000261713_10 (sequence is synthesized)
gccggcgcagctcagcctttcgcagacgcgggggagctggaatccgaccacgcgcagccttctcaccgtggtgcacgcttcgggccccccacgcctttcccaggcttcatcacccatttc

SEQ ID NO: 960077 - DNA, 120 bp, Artificial Sequence
  ENSG00000261713_11 (sequence is synthesized)
cactggtcccctcccggcaaccccacggcccatccccaacctgcactcaccctgtggggcctccaccctttggaggaaggacgtgtcaaagcttggaggtgcgcggcctgtctaacctcc

SEQ ID NO: 960078 - DNA, 120 bp, Artificial Sequence
  ENSG00000261713_12 (sequence is synthesized)
gcccaaggcgcgcggcaggcgacaggtctcagcccggatcagcgtggtccaaaaggacttatcgttaaaagtgctggtcccagaacccaaggggaagacatgctggttctctgatgagct

SEQ ID NO: 960079 - DNA, 120 bp, Artificial Sequence
  ENSG00000261713_13 (sequence is synthesized)
gggccgcctcctccaggaagcctcctccttggagctctgtagccatcgtgggcttgcaagagtcaaagggcctggcccacagcggcgcccggcactgagctggacagtgtcctgccccca

SEQ ID NO: 960080 - DNA, 120 bp, Artificial Sequence
  ENSG00000261713_14 (sequence is synthesized)
aaattcatgtccgcccagaacctcagaatgcaaccttccctggtagtagggctttgcagatgtaattaaggatctggggacgaggtcaccctggattgaggctgagtcccaagtcagtca

SEQ ID NO: 960081 - DNA, 120 bp, Artificial Sequence
  ENSG00000261713_15 (sequence is synthesized)
ctggtgttcctccatgaagagcagagcagaatagagacagatgcacagagcaggccctgtgaggacagaggcagggactggagcgtcggccgcagcaggggcgtggagcccccagagctg

SEQ ID NO: 960082 - DNA, 120 bp, Artificial Sequence
  ENSG00000261713_16 (sequence is synthesized)
gaagagggagggatcctccccagggcctccggaaggagtgtgctgcgtgctgcccacaccgtgattttggactcgtggcatccagaactgggagagaataaatttctgatgttgtaagcc

SEQ ID NO: 960083 - DNA, 120 bp, Artificial Sequence
  ENSG00000261713_17 (sequence is synthesized)
tgcactacagcagccccaggacgctgaaatagttcagccggtgcaggctcctccctccctctctctctcttgttgtgagatattttttagacggggtctcacctgtcgctggagtgcagt

SEQ ID NO: 960084 - DNA, 69 bp, Artificial Sequence
  ENSG00000261713_18 (sequence is synthesized)
tcagacctggctaatttttaaaaatctttttagagatgggggaggtctccctatgtggcccaggctggc

SEQ ID NO: 960085 - DNA, 120 bp, Artificial Sequence
  ENSG00000261713_19 (sequence is synthesized)
cttgaactcttgggctcaagtgatcctctcgccttggcctcccaaagtgttaggatggcaggcttgagccaccacgcctggcagctccatctgtgttgactcctgaagcccctcatcttg

SEQ ID NO: 960086 - DNA, 120 bp, Artificial Sequence
  ENSG00000261713_20 (sequence is synthesized)
gcagctccatctgtgttgactcctgaagcccctcatcttggctaatccggacaggcttgctggggaccccatctccccttggagactttgggatgtggctggatgtccaagtggccgggg

SEQ ID NO: 960087 - DNA, 120 bp, Artificial Sequence
  ENSG00000261713_21 (sequence is synthesized)
tcctccacagcccccagcttcccagggcgggaggcaggctgtgtcctcggtgggcactgacagtgaggctgaaatgtttgcacttcacatttccacatttaggggcattttgttgttgac

SEQ ID NO: 960088 - DNA, 120 bp, Artificial Sequence
  ENSG00000261713_22 (sequence is synthesized)
tcattcaaagctcttttaagtcgcttaatttgctgctcagagggaaatgaaaagggagccattttccctgatttgtttgcctcatcaacttttcaatcaataaaaaagtgcattttgctc

SEQ ID NO: 960089 - DNA, 120 bp, Artificial Sequence
  ENSG00000261713_23 (sequence is synthesized)
cctgccctgcagtgctgctgccctcgtctaccaggtaaggagccgaggcccagcgggcggcccctcccgggacacacagggagaggtggcagtggagagagatggggccggtggtcggcc

SEQ ID NO: 960090 - DNA, 120 bp, Artificial Sequence
  ENSG00000261713_24 (sequence is synthesized)
ccctgtccgcctgggatgaatggcacctggctaggacgacctgagaagtggctggacgtggtgtcgccaccgcagcctcgagggactttcaccggggtgcccgctgcccgttggccccga

SEQ ID NO: 960091 - DNA, 120 bp, Artificial Sequence
  ENSG00000261713_25 (sequence is synthesized)
catctgtaaacccaggcgggggcacagcacagggccagagagacaccaccctccccacggggcggctgcagagaagcaaacacacaaaccacacagagtggtcacacggagccccaggag

SEQ ID NO: 960092 - DNA, 120 bp, Artificial Sequence
  ENSG00000261713_26 (sequence is synthesized)
tcacacagggcgaaggaggggggactgcgggcgggggctgcacaccctgcagcccggaggagaagccgcggtggggggtgtgggcgggtcagaggcatagcgtatgggggctgcagccac

SEQ ID NO: 960093 - DNA, 120 bp, Artificial Sequence
  ENSG00000261713_27 (sequence is synthesized)
ctgacactgcccagtcccatcggagctttgagccccctcccaggccctggaaccccccactgtggcccagagagagaacaggggagacttgggggaggggagggaggggtgtccatggag

SEQ ID NO: 960094 - DNA, 120 bp, Artificial Sequence
  ENSG00000261713_28 (sequence is synthesized)
aagggtgggctgggaatggtgacgtctgtgggtccaaggccatgggcacgtgtgtacctcgtatattgtttttgtatttttctgcatgtttgaaatcattcataaaaatgatactccggc

SEQ ID NO: 960095 - DNA, 120 bp, Artificial Sequence
  ENSG00000261713_29 (sequence is synthesized)
gcaggagaatcacttcaacccaggagcagagggtgcattgagctgagatcgccccactgcactccctcctgggcgacagagagagacgctgtccacccccgcctccaccaaaacaaacaa

SEQ ID NO: 960096 - DNA, 120 bp, Artificial Sequence
  ENSG00000261715_0 (sequence is synthesized)
gtctctgagtctctgtctctctctgtctcctcacagtctgttactacttaatacagtgcttattggcctgagattggacattatttaaaagcaatttggagagttttctccatttcaggc

SEQ ID NO: 960097 - DNA, 120 bp, Artificial Sequence
  ENSG00000261715_1 (sequence is synthesized)
aagaaaacatgcactatttttctgatatggcatgggacatcgaaaaatagttttgaacaaaattttgaaatttttggcccaaagaaagcaaataccccctgcaacaaacaagatgtgtca

SEQ ID NO: 960098 - DNA, 120 bp, Artificial Sequence
  ENSG00000261715_2 (sequence is synthesized)
caataagtcatgatttacaatccctttcaagactgcctgttgcccttagcaatccctaaagcaaaaacaaacaaaacaaatcttttcagcatatcttcatgaaactgtctgggatgtgac

SEQ ID NO: 960099 - DNA, 120 bp, Artificial Sequence
  ENSG00000261715_3 (sequence is synthesized)
aaaactttgagaaacagttttgtgataatggttttgcactttattggtacttctccacaggaggtggtgaatggctactttcaaatacatagagctatcaaaggctaaagtcaataaaaa

SEQ ID NO: 960100 - DNA, 120 bp, Artificial Sequence
  ENSG00000261715_4 (sequence is synthesized)
acctccatagaataattggagaggaaagaaaagggggaaaaaaagaacataaaacgaatgaaaaggcaagtaggacctataaatataaaagcctaaggagtatattttgggagaacagat

SEQ ID NO: 960101 - DNA, 120 bp, Artificial Sequence
  ENSG00000261715_5 (sequence is synthesized)
attggaggatcaaggaaggcaaataaaacaataagatatatgatgcctgtcctcctgcctcaagtctagctcatcagacagtttttcattccattttgtatatatgagtttcatctgact

SEQ ID NO: 960102 - DNA, 120 bp, Artificial Sequence
  ENSG00000261715_6 (sequence is synthesized)
actgccaacagaaagtgcttggatttcctgacttttttcactgtcaaaagaaataataagctgatgagattcaaagtacttctccttcctgccaccgcgtgaagaaggatgtgtttgctt

SEQ ID NO: 960103 - DNA, 120 bp, Artificial Sequence
  ENSG00000261715_7 (sequence is synthesized)
ccccttctgccataatttcaacaggaaaagacaagacgatactgtatgaaagtctgaccaacataaagggtgctacaaggatgcccccaaggctcaggatgttggagagttgaggcacca

SEQ ID NO: 960104 - DNA, 120 bp, Artificial Sequence
  ENSG00000261715_8 (sequence is synthesized)
tgagtaaccacaatgcagaatgaagaatagttcttctggtgtgaggatccactgggttgccactgacccattgcctgagggtatgcgatgaaaccagaatcagcaactgtagatggcagc

SEQ ID NO: 960105 - DNA, 120 bp, Artificial Sequence
  ENSG00000261715_9 (sequence is synthesized)
tcagaaggggaaacgacacatctaataaccaacaggaatggctattaattagctgaaatgacaataattaacagaaatgacaagtctaataaattttcacttaagtgttgtcacatggca

SEQ ID NO: 960106 - DNA, 120 bp, Artificial Sequence
  ENSG00000269524_0 (sequence is synthesized)
ggtcagcgctcagcccctcccctgtgtgtgagaaacagattcgatccacggtggtcagacatgggcgtctgccccacaggtgagtgtgaggctggcgttggtcccatcgctgctgggcac

SEQ ID NO: 960107 - DNA, 120 bp, Artificial Sequence
  ENSG00000269524_1 (sequence is synthesized)
ggaggagccgccccacaggaatgacaaccgtatgaggacaaaatagacagttgttgaaatgcattagacagacatcgtgaaggtgaaaaactatattaaattaacgccattaaaaaggaa

SEQ ID NO: 960108 - DNA, 120 bp, Artificial Sequence
  ENSG00000228073_0 (sequence is synthesized)
ttggcctaacatatcaatagtgttaacagtgagaaaccatgctgtacattgtgagccttccgtactgtttgatgatctaggagagacatctggagacctacagcagtgtttaagctacca

SEQ ID NO: 960109 - DNA, 120 bp, Artificial Sequence
  ENSG00000228073_1 (sequence is synthesized)
atggggcatataataatctggacacaccccaagatatggccaatctcttggggcactgctttgcacctacatgcctgcaagtaacatccatagtgcagccccgtttaagaaaaagtactg

SEQ ID NO: 960110 - DNA, 120 bp, Artificial Sequence
  ENSG00000228073_2 (sequence is synthesized)
acatcacactatatatgaggtgaaatgagtagaaggataatgtagtaacaagaatgaaactagtggcaagagttcctaggcatatgatctaaaatatattttatcctcatttatatattc

SEQ ID NO: 960111 - DNA, 120 bp, Artificial Sequence
  ENSG00000228072_0 (sequence is synthesized)
gtgaactgctcattgcagtgatgtgaaaaggtgaggtcacaggacacaaacccatatctgagacctggatgcctccctccacgcactcacccactggctgtcctgagcatcaccctgcac

SEQ ID NO: 960112 - DNA, 120 bp, Artificial Sequence
  ENSG00000228072_1 (sequence is synthesized)
cctgttgtcccagcaacaagggaaaaataaggtctattgctcaggctggagtgaagtggtgcaattgtggctcactgcagccttgaatacctcagctcaaacgatcctcccacctcagcc

SEQ ID NO: 960113 - DNA, 120 bp, Artificial Sequence
  ENSG00000228072_2 (sequence is synthesized)
ccattgtcagcttctgacactgcctcttacaaggaggtgactttggaaatgtcattcagccttcctgtgcccgaaatcacctcacctgtcaaatgggaacaataaagcacttcaaagaat

SEQ ID NO: 960114 - DNA, 120 bp, Artificial Sequence
  ENSG00000261036_0 (sequence is synthesized)
cctcaaatgcacacatttttctctccacaccatgcagctgctgccagcggatgggagacgggtggcgtctgcaattcaagatagcctttcctaccttcttcagtgcctctttctgtcata

SEQ ID NO: 960115 - DNA, 120 bp, Artificial Sequence
  ENSG00000261036_1 (sequence is synthesized)
tgaagttatgaccttcatatgtttctgtgatatgaagttaaaacaagatttcgctgtcttcattatgtacctcatcacttagaaaccatctgaattagaaaccaccagaggaaaagaata

SEQ ID NO: 960116 - DNA, 120 bp, Artificial Sequence
  ENSG00000261036_2 (sequence is synthesized)
ttgaagacagttacagcacctgctagaagatacaccttgagatgctttggaacagttcttcaggagcatgaaagctctcaccagatataagcaccgtgcttttggaattctcagccccca

SEQ ID NO: 960117 - DNA, 120 bp, Artificial Sequence
  ENSG00000261036_3 (sequence is synthesized)
caacatcaccagcacagcagccttggctaacttcctgaattaggccttttctttgcagtgctataataaaaccatggtgctgatttatgatgaacgtggagatgtaccacctagatttct

SEQ ID NO: 960118 - DNA, 120 bp, Artificial Sequence
  ENSG00000261036_4 (sequence is synthesized)
cttcaaggaaggacttgtttcctctgctgatggaattcctgtcaacagagacctttcaggtgccagtgacttggagaaggcctgagctgtagagcaacatcacctaaggtcacgccctac

SEQ ID NO: 960119 - DNA, 120 bp, Artificial Sequence
  ENSG00000261036_5 (sequence is synthesized)
gtgagtcagcagaatccactgactgatggagattataaagacttagccattttgtctcaatgaggtgtacctacaatgggtcatatgagctccacagctccctgtggagtcagctcagac

SEQ ID NO: 960120 - DNA, 120 bp, Artificial Sequence
  ENSG00000261036_6 (sequence is synthesized)
tgttgttgacttacattgtacctcaacttctctctctgccaaatctagctccctttacctcacaatcataggcgttcatcccaaagacatcccttaatataaataatgcacaatatactc

SEQ ID NO: 960121 - DNA, 120 bp, Artificial Sequence
  ENSG00000261036_7 (sequence is synthesized)
ctcttttgccacgggatattgcagcatgaaagctctcaccagatataagcaccgtgcttttggaattctcagcccccaaaatgtgctataataaaaccatggtgctgatttatgatgaac

SEQ ID NO: 960122 - DNA, 120 bp, Artificial Sequence
  ENSG00000228079_0 (sequence is synthesized)
caaggcaacaagaagaaaatcgatggtgccagaatagaacaaaaggattgccctggaggaaagagaagaaatatcaatgacagccaaaaaggatgtcatccagacattcaaatttttaag

SEQ ID NO: 960123 - DNA, 120 bp, Artificial Sequence
  ENSG00000228079_1 (sequence is synthesized)
aacctattttaatgaggaaaggcacaacaagcagccaatatttaaagggaaaattaagatttcctgaagttatatcgtattactgtataactattaataaaaataataaaatataaacta

SEQ ID NO: 960124 - DNA, 120 bp, Artificial Sequence
  ENSG00000228079_2 (sequence is synthesized)
agaacttccatgcctatgtctatcctccaagactcagttatatttccacgttttgtttgttgaagcagagaactcaactgtgacaggaatccctgaatcaagtatactatgcaaagttgg

SEQ ID NO: 960125 - DNA, 120 bp, Artificial Sequence
  ENSG00000228079_3 (sequence is synthesized)
tatcttgttgcaaaggtaatacaactgtgaagtgatacttgttatgatgaaattaaagtcaaagatatgactcttgggatgtaaccttttgcagagaagcattaaaagaatgttattctg

SEQ ID NO: 960126 - DNA, 120 bp, Artificial Sequence
  ENSG00000286182_0 (sequence is synthesized)
cttggagaagagtattatgcctttataattgatgcctgaggaagtttgtttgccctttttaccacccaaggacacagcaagaaggtgtcatttatgaaacagaacgtgagcattccccaa

SEQ ID NO: 960127 - DNA, 89 bp, Artificial Sequence
  ENSG00000286182_1 (sequence is synthesized)
gaaggtgtcatttatgaaacagaacgtgagcattccccaaacaccaaatttgctggtgcctcgatgttggacttttgagcctccataac

SEQ ID NO: 960128 - DNA, 120 bp, Artificial Sequence
  ENSG00000286182_2 (sequence is synthesized)
ctcagcatcctgagtagctgggattacagataatgaaaagcatgaaattctgaagataagtgatgattcaacaagtgatagcagttacatgaatcagtgactttactgacaactatctta

SEQ ID NO: 960129 - DNA, 120 bp, Artificial Sequence
  ENSG00000286182_3 (sequence is synthesized)
gtgactttactgacaactatcttagaatgagccttccaagtgccaaggaatgtaggactatgcagaaatggatcctcaatgttttcatggggagatttttgatcaacaggggggaaatga

SEQ ID NO: 960130 - DNA, 120 bp, Artificial Sequence
  ENSG00000286182_4 (sequence is synthesized)
tgccacactcctcctgcacccacgtctagggcaattgttttgaaggaagagaaagactctctcatgttattttatattgttttatatacagtacctgttttaacaaaaaacaacaaagaa

SEQ ID NO: 960131 - DNA, 62 bp, Artificial Sequence
  ENSG00000286182_5 (sequence is synthesized)
tttatatacagtacctgttttaacaaaaaacaacaaagaagtaaaaccaaagacagacagcc

SEQ ID NO: 960132 - DNA, 120 bp, Artificial Sequence
  ENSG00000225280_0 (sequence is synthesized)
gcttttcccatcctttgcttttcccatccttcgctcctccatccgcggccgttaccccagccctcgagcaccagaaatagaaactcggaggctggcgtcgaggctagacatggactccgc

SEQ ID NO: 960133 - DNA, 120 bp, Artificial Sequence
  ENSG00000225280_1 (sequence is synthesized)
gcctggccccttccagatcccagttttctaaagtgacttcgcaccaaagtccggtcttttatgaacttgaaacacatcggctaggtcttcatcctcacctgcactggaattacctactta

SEQ ID NO: 960134 - DNA, 120 bp, Artificial Sequence
  ENSG00000225280_2 (sequence is synthesized)
agaaaaacaaactaatgatacacaaagaagcacttatgtatgtatttaaacacttgctgggatccttctgaaaactacagtttgaattttacgtttccggtttagtttaaattgtattgt

SEQ ID NO: 960135 - DNA, 120 bp, Artificial Sequence
  ENSG00000225280_3 (sequence is synthesized)
ttacttgtatgtattagcttaaataaaataatagtcatttcaaatgtttctcagagacaacagggtaagtaaaaaatagttgtgttatgacatctgtgaatataaaagttatttgtggcc

SEQ ID NO: 960136 - DNA, 120 bp, Artificial Sequence
  ENSG00000225280_4 (sequence is synthesized)
ttttttccagatgattattactctgttttcaggctataaatttcatctcatgtaattttctttgtagaactttgacatagcagttaacatcaagtggttgtactacaatttttgcttatt

SEQ ID NO: 960137 - DNA, 120 bp, Artificial Sequence
  ENSG00000225280_5 (sequence is synthesized)
ttgtttttcaactgcattgggtcctgttataagtgcatatacatctggaatgcttccatctttaaattaaaagcactttatcacatctgaaggttctctgcagagagtcactttctgact

SEQ ID NO: 960138 - DNA, 120 bp, Artificial Sequence
  ENSG00000225280_6 (sequence is synthesized)
gcttaggaacttgataagccaaatagtattccatcactgtaggtaaacagttctgggaaagaaaaatctacagtctttgacaattcttcctgtcaattgtttgtacctcattctagaaat

SEQ ID NO: 960139 - DNA, 120 bp, Artificial Sequence
  ENSG00000225280_7 (sequence is synthesized)
tacatatcttcatgccggaaacactatttggatgcgtgtggatgattctgaaaattgatatagtctgaaggatgtatatgtacatttatatatagacacaatataacccaattgatattc

SEQ ID NO: 960140 - DNA, 120 bp, Artificial Sequence
  ENSG00000225280_8 (sequence is synthesized)
cagaaaagggtgtgtggaatcgatttaagtttaacctgacagtacatgtcttgaaggtcttttatgaacttgaaacacatcggctaggtcttcatcctcacctgcactggaattacctac

SEQ ID NO: 960141 - DNA, 120 bp, Artificial Sequence
  ENSG00000225280_9 (sequence is synthesized)
tttctcaggagtgttttctcattgttttccttaaaaaacaatgctggcacccagcaaaataataaaattaaaaaataaaataaaatgcaaatactgcctaagggaatacagtgaaaagaa

SEQ ID NO: 960142 - DNA, 120 bp, Artificial Sequence
  ENSG00000225285_0 (sequence is synthesized)
gcaggctgaggctgaggagctggcggcaggaacaagggagagctgtgtccccgccggcgccccccaccccccctgccggggatcttggcagtggaggtgctggctgcgctccacagacct

SEQ ID NO: 960143 - DNA, 120 bp, Artificial Sequence
  ENSG00000225285_1 (sequence is synthesized)
cagacctcggctgggaccagaaatgcctggtgcttccgcctgggcccggtggggggactttgggtccccagagtgcaagctgtaccacttcgaggggcctcgccaggccccccagccccc

SEQ ID NO: 960144 - DNA, 120 bp, Artificial Sequence
  ENSG00000225285_2 (sequence is synthesized)
ggccgcagccgctggaggacctggggtctgaccggaagctggctgcagaccctgcggaggcacgtccaggcctctgctctccggggctacggcctcccacaggcacgttcctacatccct

SEQ ID NO: 960145 - DNA, 120 bp, Artificial Sequence
  ENSG00000225285_3 (sequence is synthesized)
ctgtgaaccgcccacaggcccccccacaggtgttcctctgtgagctggtcgggcggccggggccggggccgggcttcgctgctccgtgccttccacctccctggcggtgcggggcctcag

SEQ ID NO: 960146 - DNA, 120 bp, Artificial Sequence
  ENSG00000225285_4 (sequence is synthesized)
ggtgggcctgggaagctggaaacacctttggaaacagccgcctgaggcagctgtggacagaagaccctgcccagcagccaagggagctggcctctccgctcagcctccccacccccacca

SEQ ID NO: 960147 - DNA, 120 bp, Artificial Sequence
  ENSG00000225285_5 (sequence is synthesized)
cgtccaggcccagctgttgttttcacggctccgggaccaggcggatcctcagccaagagcttcccaggagagccctcatcttcaacccctagtggcgaccagagccagcccgggcaggag

SEQ ID NO: 960148 - DNA, 120 bp, Artificial Sequence
  ENSG00000225285_6 (sequence is synthesized)
agctgttgttttcacggctccgggaccaggcggatcctcagccaagagcttcccaggagagccctcatcttcaacccctagtggcgaccagagccagcccgggcaggaggggaaggaagg

SEQ ID NO: 960149 - DNA, 120 bp, Artificial Sequence
  ENSG00000236611_0 (sequence is synthesized)
tttcctctgattaaattaatgttccaaactcaaaagaaaaacaactcagctcaggcatcacctttcctggaaggcttccctagtcctcctgcctcccgcagacttgtctggcaccctgtg

SEQ ID NO: 960150 - DNA, 120 bp, Artificial Sequence
  ENSG00000236611_1 (sequence is synthesized)
accatgagttcctgaggcagtccgatggggctactttattccagaacaatcacagtgagacctcttctcccgataaatgccccttttctctccttaatatattatcttgcttacaaaaca

SEQ ID NO: 960151 - DNA, 120 bp, Artificial Sequence
  ENSG00000267002_0 (sequence is synthesized)
cttttccgtctctttctttttatgtcaccaggggaggactgggtggccaacccagagccccgagagatgctaggctctttctgtcccgcccttcctctgactgtgtcttgatttcctatt

SEQ ID NO: 960152 - DNA, 120 bp, Artificial Sequence
  ENSG00000267002_1 (sequence is synthesized)
ctgagaggctattgctcagcggtttccgtggcaacagtaaagcgtgggaattacagataaattaaaactgtggaacccctttcctcggctgccgccaaggtgttcggtccttccgaggaa

SEQ ID NO: 960153 - DNA, 120 bp, Artificial Sequence
  ENSG00000267002_2 (sequence is synthesized)
gctaaggccgcgttggggtgagaccctcacttcatccgttttgtctgcagctcgatttcttggttccctgactgggaagcgaggtgaatggcggatggtcaaggcagctccttaggcggc

SEQ ID NO: 960154 - DNA, 120 bp, Artificial Sequence
  ENSG00000267002_3 (sequence is synthesized)
ttaaacctgccctgtggaacatccctgcaggggactccaaccagcccgagcaacacggatcctgagggcgctcctggttaggcatttgccccactgggacgcctcgccagagcactgtat

SEQ ID NO: 960155 - DNA, 120 bp, Artificial Sequence
  ENSG00000267002_4 (sequence is synthesized)
gcagtggctgaacaccgggaaggaacgggcacttggagtctggacatctaaaacttgaatttctagtaaaccagcaccagcctgaagatcacattctcatcgaaaggtggaaagaagaaa

SEQ ID NO: 960156 - DNA, 120 bp, Artificial Sequence
  ENSG00000267002_5 (sequence is synthesized)
tcatcgaaaggtggaaagaagaaaaactcgagccagcctggaaggaccctaccttgtgttgctaaccaccaagactgctgttcgtacagcaaaaaaggatggactcgtcacaccagaatc

SEQ ID NO: 960157 - DNA, 120 bp, Artificial Sequence
  ENSG00000267002_6 (sequence is synthesized)
aagaaagtgccaccccctccagagtcatgggccacagtcccagaggaaaaccctgccaaactaaagctacgaaaaatctcttttcatctattctattactcttctttctttcctcgtgct

SEQ ID NO: 960158 - DNA, 78 bp, Artificial Sequence
  ENSG00000267002_7 (sequence is synthesized)
tgtccctcctgactctcctcagactggacattagtaaactaggaccatttaatccagcccctgatgtagagtttttat

SEQ ID NO: 960159 - DNA, 120 bp, Artificial Sequence
  ENSG00000267002_8 (sequence is synthesized)
ccagtgccaaccaggagtcttgtcccctgatgtagagtttttatgccgtagttggtccaacgttctgtggaccactaaagagcaagaatggactgccccaaccagtttttgtaatttcct

SEQ ID NO: 960160 - DNA, 120 bp, Artificial Sequence
  ENSG00000267002_9 (sequence is synthesized)
tcgttttactagaggatcatagaagttaaagagttaaaacaaactttaccaatgaagacaggataccaagatgcaaatgcctggttaaaatgcatcaaatattccatctgcacgttaaac

SEQ ID NO: 960161 - DNA, 120 bp, Artificial Sequence
  ENSG00000267002_10 (sequence is synthesized)
caagctctctctgctatatcccaaagtccagcaccctgcgggtcagcccccgagggccatccatcctccatctcccaacactaagttcacttcatgtctctcacaacagggaggaaactt

SEQ ID NO: 960162 - DNA, 75 bp, Artificial Sequence
  ENSG00000267002_11 (sequence is synthesized)
aacactaagttcacttcatgtctctcacaacagggaggaaacttagcgttccttggagacctgaaaggatgcagt

SEQ ID NO: 960163 - DNA, 67 bp, Artificial Sequence
  ENSG00000267002_12 (sequence is synthesized)
aaaaagaaagacattgtaaagcgagagaagccccttatgggtctttcgactctcatgtctatttaga

SEQ ID NO: 960164 - DNA, 120 bp, Artificial Sequence
  ENSG00000267002_13 (sequence is synthesized)
aggaaaaaaagaaagacattgtaaagcgagagaagccccttatgggtctttcgactctcatgtctatttagatgcaattggagtcccacgaagaataccagatcaatttaaagcttgaaa

SEQ ID NO: 960165 - DNA, 74 bp, Artificial Sequence
  ENSG00000267002_14 (sequence is synthesized)
ataaactacatctattacaaccaacaacaacgaggttttcatgagttaaaagaaaacctcatgttggtgtgtca

SEQ ID NO: 960166 - DNA, 71 bp, Artificial Sequence
  ENSG00000267002_15 (sequence is synthesized)
aaaaatggcagttggagttttaacccatactgtgtttccaaaggctggcccccaggtctaagggccctagc

SEQ ID NO: 960167 - DNA, 70 bp, Artificial Sequence
  ENSG00000267002_16 (sequence is synthesized)
cctatctctcaaaacaactagacaggatttccaaaggctggcccccaggtctaagggccctaaacctgaa

SEQ ID NO: 960168 - DNA, 60 bp, Artificial Sequence
  ENSG00000267002_17 (sequence is synthesized)
aaggccccccatgctgtggtaactttaatgactaccaaaggacctcattggttgaagttt

SEQ ID NO: 960169 - DNA, 75 bp, Artificial Sequence
  ENSG00000267002_18 (sequence is synthesized)
agactatccttaaacatcagtagactgtgaggggtacgtggacgggagtagcttcgccaacccctgcaaagtgac

SEQ ID NO: 960170 - DNA, 82 bp, Artificial Sequence
  ENSG00000267002_19 (sequence is synthesized)
cacccagaagctgactggtccacgcacggccgaagcatgagaaaactcattgcggaactcattttccttaaaatttggactt

SEQ ID NO: 960171 - DNA, 76 bp, Artificial Sequence
  ENSG00000267002_20 (sequence is synthesized)
aacttgtttgtataatgttattctgtacaaggtatgtagcccaggaagtgaccaacctgatgtgtgttatgaccca

SEQ ID NO: 960172 - DNA, 75 bp, Artificial Sequence
  ENSG00000267002_21 (sequence is synthesized)
gactgtgtggaaataaatgtaaatactggtcttgtgtcatttaggccacttggatttaaaaaaaatgaaaaggat

SEQ ID NO: 960173 - DNA, 75 bp, Artificial Sequence
  ENSG00000267002_22 (sequence is synthesized)
attaggactgtgtggaaataaatgtaaatactggtcttgtgtcatttaggccacttggattttggcccttcctgt

SEQ ID NO: 960174 - DNA, 120 bp, Artificial Sequence
  ENSG00000267002_23 (sequence is synthesized)
atccccttgatcctcgctggaaaaaagagtagcgtgtgaccttaggaatcaatggggctggactgaatccccgagtaaatatcttggttcgaggagaagtttacaaatgctctcttgagc

SEQ ID NO: 960175 - DNA, 67 bp, Artificial Sequence
  ENSG00000267002_24 (sequence is synthesized)
ttagccgagcatgtagcccagtctctcactgtcacttcatgttatgtatgtggaggaactgtaatag

SEQ ID NO: 960176 - DNA, 120 bp, Artificial Sequence
  ENSG00000267002_25 (sequence is synthesized)
gggtcctaaaagcctcaatcattagacaatactatatagcaagagtggagaaggacttcacccttcctgtaggaagactacatggtggagttcaaaccacacagagaaaaatccattcag

SEQ ID NO: 960177 - DNA, 120 bp, Artificial Sequence
  ENSG00000267002_26 (sequence is synthesized)
taaatttccaaagttgcagaccgtttaggcccacccagaatcccaccgggactggacagcccccactgggctatactggatatgtggacatagagcctacactaagctgcctgacaagta

SEQ ID NO: 960178 - DNA, 120 bp, Artificial Sequence
  ENSG00000267002_27 (sequence is synthesized)
tattaaaccatctttcttcctactgtccataaaaacaggagaactcctgggcttccctgtctatgcttcccgtgaaaagcatagctataagaaattgaaacaatgataaatggccccctg

SEQ ID NO: 960179 - DNA, 120 bp, Artificial Sequence
  ENSG00000267002_28 (sequence is synthesized)
gataaatggccccctgagagaatcatacagtattatgggcctgctacttaggcacaagatggctcgtggggataccggatccccatttatatgatcaactgaatcatacggttacaagct

SEQ ID NO: 960180 - DNA, 64 bp, Artificial Sequence
  ENSG00000267002_29 (sequence is synthesized)
ccccatttatatgatcaactgaatcatacggttacaagctgtcttaaaaataatcactgcaacc

SEQ ID NO: 960181 - DNA, 90 bp, Artificial Sequence
  ENSG00000267002_30 (sequence is synthesized)
aatagattagaggtctgtaggaaatttaaccttactaattgctgcctacacatagataaccaagggcaagtagttgaagacatagttaga

SEQ ID NO: 960182 - DNA, 80 bp, Artificial Sequence
  ENSG00000267002_31 (sequence is synthesized)
atggatttgatcctggggccatgtttagaaaatggttcccagcgctaggaggatctacttactgctccctcgtttgctac

SEQ ID NO: 960183 - DNA, 120 bp, Artificial Sequence
  ENSG00000267002_32 (sequence is synthesized)
gataaaaagcttcatcgctaccttagtataccaaaatgcatcagcacaagtgtactatataaatcactattgatctgtctagcaagaagacatgggtagtaaacatgaaacaactcctgc

SEQ ID NO: 960184 - DNA, 81 bp, Artificial Sequence
  ENSG00000267002_33 (sequence is synthesized)
aaatcactattgatctgtctagcaagaagacatgggtagtaaacatgaaacaactcctgctattgagtgagagtctcaaag

SEQ ID NO: 960185 - DNA, 66 bp, Artificial Sequence
  ENSG00000267002_34 (sequence is synthesized)
gcgccacaccctgggactggtagttgaaaatcaatcccggacctaatcggttatgttatctataga

SEQ ID NO: 960186 - DNA, 120 bp, Artificial Sequence
  ENSG00000267002_35 (sequence is synthesized)
attgtatagaaaagcattgtgaaaatctcattcctgttttgttccaatctaattactggtgcgtgcagcccccagtcacgtacccacgtacctcctgcttgctcaatcgatcacgaccct

SEQ ID NO: 960187 - DNA, 120 bp, Artificial Sequence
  ENSG00000267002_36 (sequence is synthesized)
ctccaaagaaagaaaaagtaaaaactaaagggcagaaatgacatccacaagcagacaccccaggtgccacaccctgggcctggtagttaaaaatcaacccctgacctgattggtatgtta

SEQ ID NO: 960188 - DNA, 74 bp, Artificial Sequence
  ENSG00000267002_37 (sequence is synthesized)
agacaccccaggtgccacaccctgggcctggtagttaaaaatcaacccctgacctgattgcaatgcctttcctg

SEQ ID NO: 960189 - DNA, 120 bp, Artificial Sequence
  ENSG00000267002_38 (sequence is synthesized)
cccgtctgggaagtgaggagcgtctcagcccggcagccaccccgtccgggagggagagtcattcttatagaagagcatcagaggaagataaaaaagaatcctcaatgtcaggcccctgag

SEQ ID NO: 960190 - DNA, 67 bp, Artificial Sequence
  ENSG00000267002_39 (sequence is synthesized)
gagcatcagaggaagataaaaaagaatcctcaatgtcaggcccctgagcccaagctaagccatcata

SEQ ID NO: 960191 - DNA, 120 bp, Artificial Sequence
  ENSG00000267002_40 (sequence is synthesized)
tccaccattgtgatttgttcctgctccaccctaactgatcaattgatcttgtgacattccttctcctggacaatgagtctcaggagctcctcaccaagcaccttgttacccccacccctg

SEQ ID NO: 960192 - DNA, 71 bp, Artificial Sequence
  ENSG00000267002_41 (sequence is synthesized)
caggagctcctcaccaagcaccttgttacccccacccctgcccacaagagaaaacgcacgttaactgtaat

SEQ ID NO: 960193 - DNA, 120 bp, Artificial Sequence
  ENSG00000267002_42 (sequence is synthesized)
ggggcggaactaggagtgcgcagatgtgggccagagcggatttccccttccccaggcaaattcggcgcccactgcgtccccgcaggccactgaccttagaggactacttgcccgagactc

SEQ ID NO: 960194 - DNA, 120 bp, Artificial Sequence
  ENSG00000267002_43 (sequence is synthesized)
gtggggctggatgggaatcgtagtcttcctaggagttgtaggtatctttttttggcctagtctctgctctcaagataggagaacataacaacactccaatccattactgttgacatgtat

SEQ ID NO: 960195 - DNA, 120 bp, Artificial Sequence
  ENSG00000267002_44 (sequence is synthesized)
aagcccgcggaggtctccaatctatccactggatttccgtgagaattgtgcccgctttggtattggatgttcctctccataagactacagtttccaaggaacagtgtggccaaggccttt

SEQ ID NO: 960196 - DNA, 120 bp, Artificial Sequence
  ENSG00000267002_45 (sequence is synthesized)
cgttccgcaatgcatgttggaaatagtagttctttccctccacctcccaacaatccttttatttacctaaactggagacctccattagggcggaaagagtggggtaatgggacctcttct

SEQ ID NO: 960197 - DNA, 120 bp, Artificial Sequence
  ENSG00000267002_46 (sequence is synthesized)
taagactgctttggacactatcttacgctgatattcaggcctcaggtggcgattctgaccttggtacagcaattactgtgacgtaataagccgcaactggaagcgtagaggcgagagggc

SEQ ID NO: 960198 - DNA, 81 bp, Artificial Sequence
  ENSG00000267002_47 (sequence is synthesized)
aggcccccgggcacttggagtctggacatctaaaacttggtaagagtagtctttgaaacttgcccactccatttgagtgga

SEQ ID NO: 960199 - DNA, 120 bp, Artificial Sequence
  ENSG00000267002_48 (sequence is synthesized)
ttggttttggtttgaattgcttgacaggattggtcttgggaacttgcctactccatttgagtggaagtgtggcctgatcacccatggtgtgcctctcctggcactttggtttttattttt

SEQ ID NO: 960200 - DNA, 82 bp, Artificial Sequence
  ENSG00000267002_49 (sequence is synthesized)
gtgcaaactgcaaaactgtgtgtgcgccctttttaccggttctttgttttgtggtgtgtttgtggtgtgagcgtggtgtttt

SEQ ID NO: 960201 - DNA, 120 bp, Artificial Sequence
  ENSG00000267002_50 (sequence is synthesized)
tttgttttgtggtgtgtttgtggtgtgagcgtggtgttttgtcttgaagaagcataggtcaggcacgaataagcccaccccactaggaactatgttgacaaatttcaaaaaagaatctga

SEQ ID NO: 960202 - DNA, 60 bp, Artificial Sequence
  ENSG00000267002_51 (sequence is synthesized)
cactaggaactatgttgacaaatttcaaaaaagaatctgagggagactatggagtggttg

SEQ ID NO: 960203 - DNA, 120 bp, Artificial Sequence
  ENSG00000267002_52 (sequence is synthesized)
gtatggcacaaggtaacctataagccaaggaacccagaccagttcccttacagagacacttgattagagctggttttagaccccccacccccaacacatagtggttgagagaacagcagc

SEQ ID NO: 960204 - DNA, 120 bp, Artificial Sequence
  ENSG00000267002_53 (sequence is synthesized)
agagacagagaggaaaagaggaaaagagagagaggaagagacaggaagagacagacagagagtcaaggatagagagagagagagagagagagacacacacacacacacacacagagagag

SEQ ID NO: 960205 - DNA, 120 bp, Artificial Sequence
  ENSG00000267002_54 (sequence is synthesized)
gcagaggcaaaaggaaagtcaaagagagagacaaagtcaaagagagaaagaaagagagaaagagagagagatacaaagttaagaaaaaaaagccatctataccaattctaatttagacaa

SEQ ID NO: 960206 - DNA, 120 bp, Artificial Sequence
  ENSG00000267002_55 (sequence is synthesized)
aaaattttttttaaaggttttcaactaaagtttgctaaaagttaacagtgtaacatgtatatagtaacttatattcttgtggcctagtccacaagacacaaaaaaggttcgctttggaaa

SEQ ID NO: 960207 - DNA, 120 bp, Artificial Sequence
  ENSG00000267002_56 (sequence is synthesized)
ctttggaagaaccttcctctgaagctggctctgtacatttaaataagaatactgcaaatcatcaaagcctttagcaagtctgactcttggagtgagcctttgtttttcttcatttataaa

SEQ ID NO: 960208 - DNA, 82 bp, Artificial Sequence
  ENSG00000267002_57 (sequence is synthesized)
tgactcttggagtgagcctttgtttttcttcatttataaaaggaaaaggggactgtactgttcacatttatttattttttta

SEQ ID NO: 960209 - DNA, 78 bp, Artificial Sequence
  ENSG00000267002_58 (sequence is synthesized)
gtcattcttatagaagagcatcagaggaagataaaaaagaatcctcaatgtcaggcccctgagcccaagctaagccat

SEQ ID NO: 960210 - DNA, 63 bp, Artificial Sequence
  ENSG00000267000_0 (sequence is synthesized)
gagccagtgataagatatggtggagtgcagtggtgcaattataactcactgcagcctcaacag

SEQ ID NO: 960211 - DNA, 120 bp, Artificial Sequence
  ENSG00000267000_1 (sequence is synthesized)
attcctgttttcagtaaaggacatcatctatgaggaaccccaaaggaaggttcaggcccagccaacctctcccgacagagctccagccaccttcccttcccgaggaaataacccgaactt

SEQ ID NO: 960212 - DNA, 120 bp, Artificial Sequence
  ENSG00000267000_2 (sequence is synthesized)
tcatatgcttgagtgaccagacatctcagttgaatgtcgccgacataatgtaaatcagcttctcagctctgtgctaaaggcccagcttttagaaattttccaactgcctgtggactgata

SEQ ID NO: 960213 - DNA, 120 bp, Artificial Sequence
  ENSG00000267000_3 (sequence is synthesized)
cttctgtgaaacacaaagatgaaccactacaaaaataagatgtaaaatgcaagcataaatttttggatttaaacaaaattcctctgtcagattgatataaaaatttttaaacactctcaa

SEQ ID NO: 960214 - DNA, 120 bp, Artificial Sequence
  ENSG00000267007_0 (sequence is synthesized)
aaaatccatacaaacatttattctgtccctgcctggaggtgagggggaagggggtccggagagccccgcagaggaggacggggctctagcgggaagacagtgtccggaggccggtgggct

SEQ ID NO: 960215 - DNA, 120 bp, Artificial Sequence
  ENSG00000267007_1 (sequence is synthesized)
gaagccggcgcccccgaagaccggccagcccctggagcacagaggcgggtccagcccacactgcgctgagtgtggccctggcccccactggggtctgtcccacccccaccccgcaggagg

SEQ ID NO: 960216 - DNA, 120 bp, Artificial Sequence
  ENSG00000267007_2 (sequence is synthesized)
gaaggcagcaggaggggcaggaggggctgcgggccgggtgggggcgggctctgtcctggtctccatcagcagcagtttctagagacgccagagggctggggggcagagggtggggaccgg

SEQ ID NO: 960217 - DNA, 120 bp, Artificial Sequence
  ENSG00000267006_0 (sequence is synthesized)
acacgctgtagagaaaaactcattattaatcttggccaagtcataaaacaaacaaaaaaagggacaataacccctggcaggagagtatcagaaataaatgctgttacaatgtattattta

SEQ ID NO: 960218 - DNA, 120 bp, Artificial Sequence
  ENSG00000267006_1 (sequence is synthesized)
aaatgtccagttttaaacaggaaagtatggcttatctagtataaaaaaaaaaatactcagtataaacagaagctatttccaagggttcccaaatgttggacttaacagacagacttcaaa

SEQ ID NO: 960219 - DNA, 120 bp, Artificial Sequence
  ENSG00000267006_2 (sequence is synthesized)
gcagccaataaaaatacatcttcaaagaacaaaagaaaaccgtgtttaatcaaagcatgaaaacaatgactaatcagagaacacttaataaagagatcaacattttttaaaaaatggaaa

SEQ ID NO: 960220 - DNA, 120 bp, Artificial Sequence
  ENSG00000267006_3 (sequence is synthesized)
ttctggagttgaaaagtaactaaagtgaaagcttcattagagggacaacagcaaacttgaatgcagaaggaagaatcagtgaactcaaagataaatcaatacaaattacacaatctgaag

SEQ ID NO: 960221 - DNA, 120 bp, Artificial Sequence
  ENSG00000267006_4 (sequence is synthesized)
gtgagggccatacaagttttgacatcttttgaagagtcatagaagtttttaatgtctgaaaacattccaaatttagtaagaagtataaatctgtatatccaagtatctcaataaaatcca

SEQ ID NO: 960222 - DNA, 120 bp, Artificial Sequence
  ENSG00000267006_5 (sequence is synthesized)
agtagaataaacattaaaatatccacaccgatacacatcaaaatcttgaaagcagcaagagaaaaatggacttatcatgcacaggggaaccccagtaaaattagcagctgacttctcaaa

SEQ ID NO: 960223 - DNA, 120 bp, Artificial Sequence
  ENSG00000267006_6 (sequence is synthesized)
agaaacaatgaaggccagaattaagtggtataacatactctactgtcaaacaagaattctaaatccagtaaaactatccttcaaaaaagaggacaaaaataaagatcttcccagatagac

SEQ ID NO: 960224 - DNA, 120 bp, Artificial Sequence
  ENSG00000267006_7 (sequence is synthesized)
aaagagaatttgttgccaccaaaattttttttacaagatatgctaaagcaagtacttcaggctgaaaggaaacaccaccagatggtaacttgaatccacataaaaaattaaagtaccagt

SEQ ID NO: 960225 - DNA, 120 bp, Artificial Sequence
  ENSG00000267006_8 (sequence is synthesized)
gtaccagtaaaagtaattatgtaggcaaatgtaaaaaatagaaaaaatactctttttaagttttcttctcttacttaaaagataattgcatggaaaaataatgaacccatatagttataa

SEQ ID NO: 960226 - DNA, 120 bp, Artificial Sequence
  ENSG00000267009_0 (sequence is synthesized)
ctgtagaccggagctgttcctattcggctatcttggctcctccccctggctgtgggtttcttatagatggcttttattacattgaggtggagccagggcgtgtgatgggagcacggggcc

SEQ ID NO: 960227 - DNA, 120 bp, Artificial Sequence
  ENSG00000267009_1 (sequence is synthesized)
ggtgcggagtaccaggctgtgctgcccgaggtcagaaaggttcttgcagacgtcctccaagacattgccaacgacaacatctccagcgcagattacactcaggacccttcagtaactccc

SEQ ID NO: 960228 - DNA, 120 bp, Artificial Sequence
  ENSG00000267009_2 (sequence is synthesized)
taactccctgctgtaatccctaccaaattgcctgccgctgtcaagccgcataacagaccaatttttattccacgaggaggagtacctggaaattaggctggagtgcagtggcgtgatctc

SEQ ID NO: 960229 - DNA, 120 bp, Artificial Sequence
  ENSG00000267009_3 (sequence is synthesized)
ccacatgctgagggcacctgacacagagcccggtgcagagcacttgcccactagaggtttgccactgagactgccagtgaagaacaaatcaatgcaagggcactgaagcttgtcgttctt

SEQ ID NO: 960230 - DNA, 120 bp, Artificial Sequence
  ENSG00000267009_4 (sequence is synthesized)
cgtgggcgtaggaccctccgagccagctggaaaagaagtgcctgctctcaactcaagaaccaatggcatcatcagtggaattcaaaggaagtcccatgattctaaatgattctcatcttg

SEQ ID NO: 960231 - DNA, 120 bp, Artificial Sequence
  ENSG00000267009_5 (sequence is synthesized)
ccctctgagttgattaatgtctcaggttacgctttccgattttcaaaaatagaaagacatcttctttgtacagcaaatgccctatgctcctacaaaagggaagcatttataccactttta

SEQ ID NO: 960232 - DNA, 120 bp, Artificial Sequence
  ENSG00000267009_6 (sequence is synthesized)
ttagcattttcaaacaagaaagaggtcttgctggggaagaaaccatgaactgttcaatgatctgcattgctgtgtggtatggaacgctccctcaatatcccataaaaggtggtcagctct

SEQ ID NO: 960233 - DNA, 120 bp, Artificial Sequence
  ENSG00000267009_7 (sequence is synthesized)
ctccgtgggcgtaggaccctccgagccagagaaccatggagtctggcagtaccgccgccagtgaggaggcacgcagccttcgagaatgtgagctctacgtccagaagcataacattcaag

SEQ ID NO: 960234 - DNA, 120 bp, Artificial Sequence
  ENSG00000267009_8 (sequence is synthesized)
gaggcaaaacagattcagaatctgcagaaagcaggcactcgtacagactcaagggaggatgagatttctcctcctccacccaacccagtggttaaaggtaggaggcgacgaggtgctatc

SEQ ID NO: 960235 - DNA, 120 bp, Artificial Sequence
  ENSG00000267009_9 (sequence is synthesized)
agcgctgaggtctacacggaggaagatgcggcatcctatgttagaaaggttataccaaaagattacaagacaatggccgctttagccaaagccattgaaaagaatgtgctgttttcacat

SEQ ID NO: 960236 - DNA, 120 bp, Artificial Sequence
  ENSG00000267009_10 (sequence is synthesized)
cttgatgataatgagagaagtgatatttttgatgccatgttttcggtctcctttatcgcaggagagactgtgattcagcaaggtgatgaaggggataacttctatgtgattgatcaagga

SEQ ID NO: 960237 - DNA, 120 bp, Artificial Sequence
  ENSG00000263711_0 (sequence is synthesized)
attacaggcgcgagccaccgcgcccgacagcagttatgaagttctaaaagcaagtcttaatcaggaagtgtccttgatcaccaacggctcgcccaggcatgctggctctcttccacttcc

SEQ ID NO: 960238 - DNA, 120 bp, Artificial Sequence
  ENSG00000263711_1 (sequence is synthesized)
tcttccacttccaccttccaccatgggatgacgcagtaagaaggccatcagtagatgccagtccctcaaccttgaactttccagacgcagaactaaaattcacaagaagagaggaaatac

SEQ ID NO: 960239 - DNA, 120 bp, Artificial Sequence
  ENSG00000263711_2 (sequence is synthesized)
tgaggagaaaatggcagattgtgtttgctgaatttgattgacgaagaagtcaccatgaaaatcacagtgaaccatttggaaagcaaactgccaaaaaataatagttagtcatgctctcag

SEQ ID NO: 960240 - DNA, 120 bp, Artificial Sequence
  ENSG00000263711_3 (sequence is synthesized)
gctggtaattgaaagttttgttcaaatcgtacttaatattcaataattgtttaaccataccactgcttatcttgggaatgctgatactatggagacaataagataaggtggctgctgaaa

SEQ ID NO: 960241 - DNA, 120 bp, Artificial Sequence
  ENSG00000263711_4 (sequence is synthesized)
atcagatttagacactactttgattataatcattttttttgtatatcccatgaaggtattatatgttagtggttgttctatgcttaatatttatatagcaacaaagagtaaataaactgc

SEQ ID NO: 960242 - DNA, 77 bp, Artificial Sequence
  ENSG00000263711_5 (sequence is synthesized)
agcaacaaagagtaaataaactgcaatttatacatgttatattgttgacctatgctaaaagttaattaccataacca

SEQ ID NO: 960243 - DNA, 120 bp, Artificial Sequence
  ENSG00000263711_6 (sequence is synthesized)
tgaacccataatccccatgtgtcctgctgctggacccagtgggaggtaattgaatcacaggggcagtgtctcccacgctgttctcatgatagagagttctcatgagatctgatggtttta

SEQ ID NO: 960244 - DNA, 82 bp, Artificial Sequence
  ENSG00000263711_7 (sequence is synthesized)
tggttttataagtgtctggcatttccctgcttgtactcaatctcttgcctgccaccctgagaaaaggtgccttctgaaaact

SEQ ID NO: 960245 - DNA, 120 bp, Artificial Sequence
  ENSG00000263711_8 (sequence is synthesized)
atgaagtatttcttcacagtagcgtgataactgaataatacatgtaacaattacatgaacaaattattacaagtttgaggtacatcaggtttaaattaaggaaaaatgtttaaagaattt

SEQ ID NO: 960246 - DNA, 120 bp, Artificial Sequence
  ENSG00000263711_9 (sequence is synthesized)
tcttagggtcgaagaggcgtttatgtttgtttatgaataggtcctcgaaggtaaaacataggctttaacattctgaggccaaggatggagctgtgtctgatttataaagtttcagacgca

SEQ ID NO: 960247 - DNA, 120 bp, Artificial Sequence
  ENSG00000263711_10 (sequence is synthesized)
gtagaacaattgacatgagaaactagtcttcctctgaggctggtgaagctgcagatcagcacacactcagacttggtacagagaaacagaccattctcccattagcctttggtatacttc

SEQ ID NO: 960248 - DNA, 120 bp, Artificial Sequence
  ENSG00000263711_11 (sequence is synthesized)
agtcacctggggtagagtgatttctgtgatttctaaaccttctgtcctactcatcttacaggccatgtccatcctcagaactcatgctttcctttattgtagcttctgttctacgactcc

SEQ ID NO: 960249 - DNA, 120 bp, Artificial Sequence
  ENSG00000263711_12 (sequence is synthesized)
tctaatacatttttcttaggagcttcattgagatataatttatatcccataacattcacatttgaaatgtggcatccagtgttttttattgtagtcacagacttatgcaactatcacatc

SEQ ID NO: 960250 - DNA, 120 bp, Artificial Sequence
  ENSG00000263711_13 (sequence is synthesized)
gaattttagaatattttcaccgccctctgaaaaaaactaaataacaattagcagtagctccccgtttcttttctctgccaaaccactagcaactattaatctattttctgtctttagcca

SEQ ID NO: 960251 - DNA, 120 bp, Artificial Sequence
  ENSG00000263711_14 (sequence is synthesized)
tttggcattccgaacatttaatacaaatacgatcatttaatatgtggtcatttgttagtttgtttctttttaaaatatgggctttttgactggcttctttcactttgcataatgctttca

SEQ ID NO: 960252 - DNA, 120 bp, Artificial Sequence
  ENSG00000263711_15 (sequence is synthesized)
aggttcatccagattttagcaggtacacatacttcattccttttttatgcctgaatgatattttgtggtattttttgctgttatgaataattcactgtttggccaccgtaaatatgcatg

SEQ ID NO: 960253 - DNA, 120 bp, Artificial Sequence
  ENSG00000263711_16 (sequence is synthesized)
tataagtcttttggggacatgattttattttggaggatagatacttagatgttgaaatattggttcatataatagatctgtgtttaaatatttgaggaacacttcttgatggtattgtga

SEQ ID NO: 960254 - DNA, 120 bp, Artificial Sequence
  ENSG00000263711_17 (sequence is synthesized)
cacaaatctattatgcatatatgtatgtatttacattgagtatgcttttggtgtaatatctatcaaaggttatgaagatttactgttatattttcttctaagaatttacaattttacctc

SEQ ID NO: 960255 - DNA, 81 bp, Artificial Sequence
  ENSG00000263711_18 (sequence is synthesized)
gagtagctggaactacaggcgcccgccatgatgcccggctcattttctgtgagtcttgatctcctgacctcgtgatcctga

SEQ ID NO: 960256 - DNA, 120 bp, Artificial Sequence
  ENSG00000263711_19 (sequence is synthesized)
cctctgctgcatggccccaggagagattttaattagctttctaaccttggtccagattgcacatgcaaatggtagaggatgcaacacccccgcttgtggagctgccgcttgtgtctggca

SEQ ID NO: 960257 - DNA, 120 bp, Artificial Sequence
  ENSG00000263711_20 (sequence is synthesized)
tgacaagtcaataaagtgaattgtagcatagaaaatattgcattgaattatcttggcacctgtatcaaaagtcagttgatcataaatgtaagaatttatttctggaaccttatttctatt

SEQ ID NO: 960258 - DNA, 120 bp, Artificial Sequence
  ENSG00000263711_21 (sequence is synthesized)
ccattagttgatatatctctccttgtgttagtaccataatgtcttaattgctatagctttgtattaagttttgaaacagggtagtatatgtccttcacctttgttctttcttgccaggtt

SEQ ID NO: 960259 - DNA, 120 bp, Artificial Sequence
  ENSG00000263711_22 (sequence is synthesized)
gttttggctgttgtgggtttcttgcatttccagatgattgcaaagagctgtttctcaatttctgcaacaagtgccagctgaaattttggtaccagtttcattaaatatgtagaacaattt

SEQ ID NO: 960260 - DNA, 120 bp, Artificial Sequence
  ENSG00000263711_23 (sequence is synthesized)
ggtaagcattgtcatctttaccccatgaacaccatattttgtagtctctaatatctcttaaaacaaacggcccccaatccatgcccccaaaattgtcaaatacagtccagcatcttcatt

SEQ ID NO: 960261 - DNA, 120 bp, Artificial Sequence
  ENSG00000263711_24 (sequence is synthesized)
tatacaaaagaaaagaaattattttgcatcatgctaagaaccggacccagctctgaatcaaactgtgatatgcaatgtaggcctgaataaaatactcagctgctcaggtcagaccatccc

SEQ ID NO: 960262 - DNA, 120 bp, Artificial Sequence
  ENSG00000263711_25 (sequence is synthesized)
caatgaggtcaacagtgacttcacagttttcctgatttcacaagcaaaatggttgtgtatgtgacttccattaatttagtacaagagtgcattcaactcgttttctcagaaaaaaaaaaa

SEQ ID NO: 960263 - DNA, 120 bp, Artificial Sequence
  ENSG00000263711_26 (sequence is synthesized)
aaagcaccaaaaaaaggttttttccccaaaataatatggaatcatctacttctagtaagacaccatgcctgacaatttttccaatttctacactttcaagatgcaaaagtttggttttat

SEQ ID NO: 960264 - DNA, 120 bp, Artificial Sequence
  ENSG00000263711_27 (sequence is synthesized)
tttaacatatacaaaaaccgtaaatgcttttaaaatatagaaaatatttttgctatgtaaggaccaataattactacatgccaatatagtaccacaaccattaaatacacatgagaaaat

SEQ ID NO: 960265 - DNA, 120 bp, Artificial Sequence
  ENSG00000263711_28 (sequence is synthesized)
tcatgatataatcattccacactcctttcctctatgtaccaccataggtagaagtacatttctttcaactagcttgatacttttatgtaaagtaaaccataaaggaaattgaaaccaaaa

SEQ ID NO: 960266 - DNA, 120 bp, Artificial Sequence
  ENSG00000263711_29 (sequence is synthesized)
ccttgaactttccagacgcagaactgtaagaatgaatctttgttcattataaattacccagttgcaagtattctgttatgatagtgtagcacaaaatagattattaagatgaatgtcaag

SEQ ID NO: 960267 - DNA, 120 bp, Artificial Sequence
  ENSG00000263711_30 (sequence is synthesized)
cattagaatgttagtcaagctgtaaatctcaaaaattttcctcctatgtgtttttctaaaagctgatggtgtacattttacatttaactccatcatccattttgagttaactttgtataa

SEQ ID NO: 960268 - DNA, 120 bp, Artificial Sequence
  ENSG00000263711_31 (sequence is synthesized)
aggaagtcactatagatatcccacgcatgtggagaggggagctatgatccacctcatgaagggcaaggtagctatatgaatttggatttattttgcacagaagatttgcctattcttcca

SEQ ID NO: 960269 - DNA, 120 bp, Artificial Sequence
  ENSG00000263711_32 (sequence is synthesized)
tatctgtttactttattcaatttttttatatcttcacggattcatgttatttcacttaatactttgggttataatccaatgctattttatttatgttgctgctcaaattgttctaccttt

SEQ ID NO: 960270 - DNA, 120 bp, Artificial Sequence
  ENSG00000263711_33 (sequence is synthesized)
gctattttatttatgttgctgctcaaattgttctacctttggttattggatgctttttcagttaactcttgtattctttgacataattcccatagtgtgtgtgtgtgtgtgtgtgtgtgt

SEQ ID NO: 960271 - DNA, 120 bp, Artificial Sequence
  ENSG00000263711_34 (sequence is synthesized)
acatgctatggctctttttattggtaaagatctcagtttgaggtttatttactgctgctaggatgttattcactgatatgaggatgttattcactgctactcccaggctttctcagttta

SEQ ID NO: 960272 - DNA, 120 bp, Artificial Sequence
  ENSG00000263711_35 (sequence is synthesized)
aagatcaaggggatatatatgtgtacactaactcatgttaatatctacacatgtctgtaaatatttctgttagcatctgtatttctattaagctgaatatgtgtttattatgatgtatac

SEQ ID NO: 960273 - DNA, 120 bp, Artificial Sequence
  ENSG00000263711_36 (sequence is synthesized)
aaatttagtccatttctatttgctgtgtatccttgtcagtaattggtaatggcagttattggattttagccattctagtaggtgcatataggtacctcattgctttattttgcaactgca

SEQ ID NO: 960274 - DNA, 120 bp, Artificial Sequence
  ENSG00000263711_37 (sequence is synthesized)
tagtgaaaaggacagggaacatcttttcatatgctcattttctatctgtatatcttatttggtgaaatgtctgttcacagatttggccagttttataattggtttgtttgatgtcttatt

SEQ ID NO: 960275 - DNA, 120 bp, Artificial Sequence
  ENSG00000263711_38 (sequence is synthesized)
gttgagattgaaacattctttgtaaattttagatacaaattttttacatatatgtgttgtgaaaacattttctctaagcttgtagttaatcgttatattcagttaacagtatctttttca

SEQ ID NO: 960276 - DNA, 120 bp, Artificial Sequence
  ENSG00000263711_39 (sequence is synthesized)
tggatgccccttctagatgttcatggctcactccctgccatgttgtcaggtatttgagctctctgttcccactcagagtagatgagcagaagaggaaatgagggccttcccagagcaact

SEQ ID NO: 960277 - DNA, 120 bp, Artificial Sequence
  ENSG00000263711_40 (sequence is synthesized)
atggatcataatgatcattaactaataagtttgccatgaggattaactgtatattaagggctgataaaattatatgttacaaagtaagtgctcaatgaatattactcataacattatgta

SEQ ID NO: 960278 - DNA, 120 bp, Artificial Sequence
  ENSG00000263711_41 (sequence is synthesized)
attaaatttttctgttaacctcaggagaaaattcttgggagaatgtgaaaaatggatttaaaagttaagtcatttaggttacaatattgaagcaattgtgtgtatatagcatatgcattg

SEQ ID NO: 960279 - DNA, 120 bp, Artificial Sequence
  ENSG00000263711_42 (sequence is synthesized)
tatatgccagggttatatttttttgcattggcacatttattttaataattcaacagtatcgatacaacactgattaccattaaaatacaaatgtatattttgctttggaaatagagccaa

SEQ ID NO: 960280 - DNA, 120 bp, Artificial Sequence
  ENSG00000263711_43 (sequence is synthesized)
tgcagttattccaataatatgcttcaattattagtcacttaaaagataaaatattaacggtgaggagggtaaagaaaaatcagtataataaaattgattcccagtaacaaatcccttcct

SEQ ID NO: 960281 - DNA, 120 bp, Artificial Sequence
  ENSG00000263711_44 (sequence is synthesized)
tttcactctgtaaccagcccagtctctctggcttcatattgttctgttttgttttgctttgtttgttcagtgctgtttatatttagatttttcacaaaataaattctctttttaaacaaa

SEQ ID NO: 960282 - DNA, 120 bp, Artificial Sequence
  ENSG00000263711_45 (sequence is synthesized)
gcccatactacctgcgattcaagccagcaaccttggaatctccctgaacaatttctatggtgtccaatcacatttgcaatcactccccacactcagactgtgtatttttggctgctctcc

SEQ ID NO: 960283 - DNA, 120 bp, Artificial Sequence
  ENSG00000263711_46 (sequence is synthesized)
aagcccttgaggaaaacacttggagtcaatctcatccttttgatgcagtgctgagtaatgaggtatttccctgtctaaagattttagaagatggaaaaaagaaaaatacattgcactctg

SEQ ID NO: 960284 - DNA, 120 bp, Artificial Sequence
  ENSG00000263711_47 (sequence is synthesized)
aaacattctacataaaaatggaatgtgtggtcattagattaactcaggctttggacctcggggcataaaacccatttcctcttacaccagtctctgaagcttaaaggattcgttatttcc

SEQ ID NO: 960285 - DNA, 120 bp, Artificial Sequence
  ENSG00000263711_48 (sequence is synthesized)
agttgcaaatgccatcagaaaaggattgtttttctttctagtaccaccaagaatgtagtttaccattgtgaataaactgtcttaagctttccccgaataaaataaatacaaatgctcctc

SEQ ID NO: 960286 - DNA, 120 bp, Artificial Sequence
  ENSG00000263711_49 (sequence is synthesized)
aactccactgtcattcttattcttgttcctctaaatgtgaggtatttttttctccttgggcttctttcaaaatttttctcattgactctggttcgcttatgacatgcctaggtgtagtcc

SEQ ID NO: 960287 - DNA, 120 bp, Artificial Sequence
  ENSG00000263711_50 (sequence is synthesized)
attttgagtattatgtaatgagacaccagatcttatttcaaccttctgttttggctggatttcctctgaaactgctctggcagcaaaggaggaagggttactcccagctagggttataat

SEQ ID NO: 960288 - DNA, 120 bp, Artificial Sequence
  ENSG00000263711_51 (sequence is synthesized)
tccaggtccctcacctggccgctggggaagaggctccgcattactgcgtgacagagatgcaagttctgaatcacctctaggcctccactgagacgctccatctgggatgactggaatttt

SEQ ID NO: 960289 - DNA, 120 bp, Artificial Sequence
  ENSG00000263711_52 (sequence is synthesized)
taattgctttagtagcatttattggaatggctttccttcctccattgaattgcctttgcatctttgaaaacagtgaattgggcatattcatgtgagtcaatttctgagctttctactgtg

SEQ ID NO: 960290 - DNA, 120 bp, Artificial Sequence
  ENSG00000263711_53 (sequence is synthesized)
ccatggatccatatgtctatctctccacaaatattaccaaatcttgactgtagctatattatgtcttgaactatggtagactaattttttctgtctttttctatctaaaaattcatctaa

SEQ ID NO: 960291 - DNA, 120 bp, Artificial Sequence
  ENSG00000263711_54 (sequence is synthesized)
ctactatagtttttttgcctttccataaaaatataaaataatctcatctgtatttacaaataatttttctctcattttgagataaattgcattaagattgtatatcaacttggggaaaat

SEQ ID NO: 960292 - DNA, 120 bp, Artificial Sequence
  ENSG00000263711_55 (sequence is synthesized)
tgtcactttactatgttgaatctttaaatccattaacacagtgtgttttttgatttctttagatctatgatttctttcatcagcattttgtaattttcaacatatatatctgtacttgtt

SEQ ID NO: 960293 - DNA, 120 bp, Artificial Sequence
  ENSG00000263711_56 (sequence is synthesized)
tcataagattatgcaaaatggagtatttttttctttgtattgattgtaaatattatgttttgattttcagtcttcacatattcaatgttagaatataaatatcttggtactgtttggata

SEQ ID NO: 960294 - DNA, 120 bp, Artificial Sequence
  ENSG00000263711_57 (sequence is synthesized)
tttgacccctccaaacatcgtgttgaaatttgatccccagtgttggaaatggggcctaatgaaaaatgtttaggtcatgggggcaaattacttatgaatggcttggtaccatcctcaggg

SEQ ID NO: 960295 - DNA, 120 bp, Artificial Sequence
  ENSG00000263711_58 (sequence is synthesized)
taatgaatgagttctccttctagtacttcccatgaaagctggttgtcaaaagaggccggcccctccctcctccctctcttacttcctctcctgttgtgtgatctttgcacatgcaaactc

SEQ ID NO: 960296 - DNA, 120 bp, Artificial Sequence
  ENSG00000263711_59 (sequence is synthesized)
ccattcaccttctgtcatgagtggaagcagcctgaagtcctcaccagaagcggatgctacacccatgcttcttacgcagcctgtggaattatgagccaaataaacctcctttcttataaa

SEQ ID NO: 960297 - DNA, 120 bp, Artificial Sequence
  ENSG00000263711_60 (sequence is synthesized)
atatgacttagttcaagccctaatcactggattattcaaagtcccttaacaggttaattcctactgtgatcaacactttaaaggaaggcaatagggccaggcatggtggctcacggctgt

SEQ ID NO: 960298 - DNA, 120 bp, Artificial Sequence
  ENSG00000263711_61 (sequence is synthesized)
aataaataaaacagaaaggcaatggctatcccaaattgctgaagcctttgctaaaagcacagacagaaaacaacaatatggtgatgtttgtgttaaacaaatgttattgattctaggaca

SEQ ID NO: 960299 - DNA, 120 bp, Artificial Sequence
  ENSG00000263711_62 (sequence is synthesized)
caggtcagatggcaaatagtcaaactcaaatgttgatcccaggggtggctgtatcatcactaaggccaaatcacaactttgactggtctcatgggaacacagatcttgggtttggaaaga

SEQ ID NO: 960300 - DNA, 120 bp, Artificial Sequence
  ENSG00000263711_63 (sequence is synthesized)
gcacaggcctggccatgggaatggacacagggtaattttaagatgactagaggttcctcaaaccctaaaagtaccactgaaccttgtttaaagctaaaatggctcctaaatgatagacac

SEQ ID NO: 960301 - DNA, 120 bp, Artificial Sequence
  ENSG00000263711_64 (sequence is synthesized)
gtttctcagttatctctgcaaactgaagatcctatcagcctgttcagggtctcacaggcctctgggtttgtacatgatgtccctacagtggcgatggggactgatgagagccaccgttcc

SEQ ID NO: 960302 - DNA, 120 bp, Artificial Sequence
  ENSG00000263711_65 (sequence is synthesized)
cattggaggagggcaagctgccactgagtgtcagctgctggagtaaacatccaatcacatgtgtacctgtatcctatggatattggcttcccctcatacaacttgttgttcctttgtttt

SEQ ID NO: 960303 - DNA, 120 bp, Artificial Sequence
  ENSG00000263711_66 (sequence is synthesized)
ccattcctgactatatttgaatctttcttggatttccaggaaacatctgactgctttcctatgccacttcatacccaagagaagctcagggagatcctttaaggtcctttatgcccatta

SEQ ID NO: 960304 - DNA, 120 bp, Artificial Sequence
  ENSG00000263711_67 (sequence is synthesized)
tgatagtacatgaataggtaaatgtaccactgctccctgtacttcttggataatgcacaaatagtaagacagtctcgcaaccagcagcctagacagcccaaatatgtgaaaccaaaacag

SEQ ID NO: 960305 - DNA, 120 bp, Artificial Sequence
  ENSG00000263711_68 (sequence is synthesized)
cttgatcttccagacctgttctgactccttgagtcttaaatctccaagcctcttgaatgtttcacccacagccttccctttgggatctggcatgggacaggaagggcagagaagggcctg

SEQ ID NO: 960306 - DNA, 120 bp, Artificial Sequence
  ENSG00000263711_69 (sequence is synthesized)
gggcttttcctcagggatccaccacagtctaggccagtgggtggcaaactttttctgcaaaggatcagctgggagatagtttcaactttgtagtctcgtcgcagctactctactcgactc

SEQ ID NO: 960307 - DNA, 120 bp, Artificial Sequence
  ENSG00000263711_70 (sequence is synthesized)
tgccactggagtgtgaatgcagtcatgaataaaagaatgaaagttttccagtgaaactttagtcacaaaaacagtctgcaggctgtgtctggcccgtgggctttggtttgctggcctgcg

SEQ ID NO: 960308 - DNA, 120 bp, Artificial Sequence
  ENSG00000263711_71 (sequence is synthesized)
ggctcctagaaggctctgactttatccctctatgagggaaagcaggttttggggtattctcccaaatctttataccttatgtctgtgtctctttttaaattaaaagtaaaatttaggcca

SEQ ID NO: 960309 - DNA, 120 bp, Artificial Sequence
  ENSG00000263717_0 (sequence is synthesized)
ttcctgcgctccgctcccgctgcaggtgcccggggccgcgaggacaggcctcgccgccacccccacccggcctgcccagtgcctggcatgaaaccagtgtttccaaaagcggtgccgggc

SEQ ID NO: 960310 - DNA, 120 bp, Artificial Sequence
  ENSG00000263717_1 (sequence is synthesized)
cctgtaccgcgcatagcagagctaggagacatgacagccgccccctttaaggacccaagagattccccacggacctcttccccttccttccgtttgagagggagcggtgtcacttggtga

SEQ ID NO: 960311 - DNA, 120 bp, Artificial Sequence
  ENSG00000263717_2 (sequence is synthesized)
gagggaggagacgggaggaaaaggagaatccttggctgggtgtggccaggcttcaaggtgcctgaaatgtagcccccactcatcttgaactcattgtcaagtcctcctcatcctccaaag

SEQ ID NO: 960312 - DNA, 120 bp, Artificial Sequence
  ENSG00000286010_0 (sequence is synthesized)
aggtactaggcgtgccatgtgcaggctcttgcagcccagctgttgccctggcagctccatgaccacacctctgtgcccagacatggatcagaactgggagaaaaagagaaggtggtacct

SEQ ID NO: 960313 - DNA, 120 bp, Artificial Sequence
  ENSG00000286010_1 (sequence is synthesized)
tctatccccttcaccctgggtctttcaggatctgccccaaggagcagaaaacgggtgcgcccagagcagcttactcaggagacgcttgctgctcacccttgctgatgctgagtaatctgc

SEQ ID NO: 960314 - DNA, 120 bp, Artificial Sequence
  ENSG00000286010_2 (sequence is synthesized)
aggctgcaatctgcccgtgaaagaactcttgcaacacattgtgtgaggatcccaggctgccctgtccttccctgggaatcaggtcaagagccctgctggcaggtgtcctagagcatgaat

SEQ ID NO: 960315 - DNA, 120 bp, Artificial Sequence
  ENSG00000286010_3 (sequence is synthesized)
caggcccctggcaaggagaaggcgggagatcttggctgagatcagatgtggaaccaattcaggattgtccttgtgattctttttcctaagtggaatactgagcctccagcttgtgtgtca

SEQ ID NO: 960316 - DNA, 120 bp, Artificial Sequence
  ENSG00000286010_4 (sequence is synthesized)
tatgtgtggacttttcagcatattcttctctggcccagaagtctggattcttcttgtctgttgcaataatataaagttattcagagctgtacatgaagagaagtcccacagggaccctgg

SEQ ID NO: 960317 - DNA, 120 bp, Artificial Sequence
  ENSG00000286010_5 (sequence is synthesized)
gatcagaagaactctgggaaatgcctggcccagccagtgctgttctaaagatcctcatcctcatggagataaccatttttaaggaagaaaagaggatctggaccctacccatctcagtct

SEQ ID NO: 960318 - DNA, 120 bp, Artificial Sequence
  ENSG00000286010_6 (sequence is synthesized)
ccatcagatcttatggatgctccaggaattggccatgattctcctcttttctaccatcttgtatgttgggctttgtagaggatagatgttttctagaagaatggcagataaggcaaggtc

SEQ ID NO: 960319 - DNA, 120 bp, Artificial Sequence
  ENSG00000286010_7 (sequence is synthesized)
tgcagcttgccattgatagtgtctttatcaacagatctgtgaggaattgtgcagctgagaggggagaagagaaatcagagagtggatggactgccacagttcaacatatactggtgcttt

SEQ ID NO: 960320 - DNA, 120 bp, Artificial Sequence
  ENSG00000286010_8 (sequence is synthesized)
caatatagaatccacaaggcaacctgcatgctgggctctgtgctaggcactaggggtatatctatgagatgccaccccagctcccacagtcttacaatctaatggggaagagagatatgt

SEQ ID NO: 960321 - DNA, 120 bp, Artificial Sequence
  ENSG00000286010_9 (sequence is synthesized)
caatagacaaacgcagcagatggcaagtgctgggatatgaaacagtaagcagaagccacagtgttctctgggacttctgagctgagtcccaaagtaattagattaatccgtcatgggagg

SEQ ID NO: 960322 - DNA, 120 bp, Artificial Sequence
  ENSG00000286010_10 (sequence is synthesized)
tggagtgggtagggggagctcctggaagcatgatcaaaagtggagagctaaggtgagggagaagaaagaaatgagattcagcaaagaggaggagagcaatgaagggccatgtatgaccag

SEQ ID NO: 960323 - DNA, 120 bp, Artificial Sequence
  ENSG00000286010_11 (sequence is synthesized)
gcgaaggcaaattgttcggaccaaacatgacagtagggtgggtttttgaggggtatccactgcacttacagaggcaagattctctatggtgacctttcagtgagggtgggcaaatacact

SEQ ID NO: 960324 - DNA, 120 bp, Artificial Sequence
  ENSG00000286010_12 (sequence is synthesized)
actttttgagtcagccatttttcactactgagcacctctggccttagcaagttctgagcatgaatactttcttctgtttctaagccattcaacaaatatcaaagtgctttcccatgtatt

SEQ ID NO: 960325 - DNA, 120 bp, Artificial Sequence
  ENSG00000286010_13 (sequence is synthesized)
ggtcatcttaggcaaactgggtggacatgtagagcaagacgtaatgaggtaagcactcactagagctaggtcatcttagaaaagtcacttagcttcactgagcctcagtcttcctatctg

SEQ ID NO: 960326 - DNA, 120 bp, Artificial Sequence
  ENSG00000286010_14 (sequence is synthesized)
tgaaatggggataatgacccttatgtcacctggtgggcaaggtctaaataaaatcattgtagttagatccatagtaggttctttctgacctaccactgtgcacctcacgccgttgctatt

SEQ ID NO: 960327 - DNA, 120 bp, Artificial Sequence
  ENSG00000286010_15 (sequence is synthesized)
ccagtgggatatatccagtggggttacgggtatgacatttcggaaccccaccatcacttgtatcagcaggtctgtcctaggttccccaactaagcttcctggatgaggcacctagtggcg

SEQ ID NO: 960328 - DNA, 120 bp, Artificial Sequence
  ENSG00000286010_16 (sequence is synthesized)
tcccctagtttgagtgtggggggtttggtaaactagtccttatgtatgcttgtcagatggagggtactgtctttaagatgggctcatagctgaatctggaaggtaagtgctccaggccag

SEQ ID NO: 960329 - DNA, 120 bp, Artificial Sequence
  ENSG00000286010_17 (sequence is synthesized)
tattgttttctgcaggattcaaagttcccttgctatttctgctgactttgcttcccctctcgtgttctatatcccaaacctattatcttcaccagcgttaatttgcctccacaactctgt

SEQ ID NO: 960330 - DNA, 120 bp, Artificial Sequence
  ENSG00000286010_18 (sequence is synthesized)
ttttgcattttgaaatggaatttcccttaacctatattcctctggttcccaaactccacctgcttcagtttttttttcaatatcatctacatttccttcactagattatagccttagtca

SEQ ID NO: 960331 - DNA, 120 bp, Artificial Sequence
  ENSG00000286010_19 (sequence is synthesized)
gtttgaaccttttcacatttgacttcagacattacccatctccttcatctgaccactttcttcacttttctcatctttccattttggttgtatgtctactgagcaaggggctctgtgcag

SEQ ID NO: 960332 - DNA, 120 bp, Artificial Sequence
  ENSG00000286010_20 (sequence is synthesized)
agcattcaaagatgactgagatgtagtcttgtgggtagagagagacaattagaatgcaccgtggagagtgttaggttgagggaagcggagattacaggagtccaaatgtcttatccgagg

SEQ ID NO: 960333 - DNA, 120 bp, Artificial Sequence
  ENSG00000286010_21 (sequence is synthesized)
atatgggataggcttgagagaagatgctgagctcatgtaggtgaggtattgtcctacgtgaaggaaaagaggcaggagatggcagcttggaggctatattactttctctggggctgccat

SEQ ID NO: 960334 - DNA, 120 bp, Artificial Sequence
  ENSG00000286010_22 (sequence is synthesized)
accaaagtaccacaaactgggtggcttaaaacatcaaaaatgtattttctcacagttctagaaggtagaagcccaaaatcaagatgttggccctacagctgtgctccttctgaaggcttt

SEQ ID NO: 960335 - DNA, 120 bp, Artificial Sequence
  ENSG00000286010_23 (sequence is synthesized)
ggggtgaatgtgtttaatgcccttttcttagcttctgcccttttcttttctggccttcacagaaggccaaagagcaatccttggccttccttggcttgtggatgcatcgtttcagtctct

SEQ ID NO: 960336 - DNA, 120 bp, Artificial Sequence
  ENSG00000286010_24 (sequence is synthesized)
gcctctgttttcacatggccctcttccctgtgtatctgtctctacgctgcttctcatcttataaggacacaagtcagattggaataaagcctattctaattcagtataatcacatcttaa

SEQ ID NO: 960337 - DNA, 120 bp, Artificial Sequence
  ENSG00000286010_25 (sequence is synthesized)
cttgattatgtatgcaaagaccatatttccaaataaggtcacattttcaggtcctcggggttagagctttcacatgtctttttgggggacatagttcaactcataatagaaacctcgcag

SEQ ID NO: 960338 - DNA, 120 bp, Artificial Sequence
  ENSG00000286010_26 (sequence is synthesized)
ataaatcattttggccggtgcacagagttaagtggtggattatcaagaatatggaattttagaattttagcttcttggttgatttttgggaattaacatacaggagagcaggtttagaag

SEQ ID NO: 960339 - DNA, 120 bp, Artificial Sequence
  ENSG00000286010_27 (sequence is synthesized)
gtgagactctgtctcataaaaaaaagaagtgacaataacaataacagaggctggtcttctgggaatgatgcgatactcttcagccagcctttctgttttgagcgaagccccaacctggag

SEQ ID NO: 960340 - DNA, 120 bp, Artificial Sequence
  ENSG00000286010_28 (sequence is synthesized)
ttcaaagagagtgagggcgcttcctgtcttcttgtctttctcctctctcctgctacttgttatgaaattcagaacaattagagattttctgtctcatccctggaatggtgtttctcctgc

SEQ ID NO: 960341 - DNA, 120 bp, Artificial Sequence
  ENSG00000286010_29 (sequence is synthesized)
tggccctatcaggctggtgtgttgatgttatcggggagaggctgtagttactaggatgaagaaggcaagagagaaatggaattcacgcagatcaaacatgtgtaatcagaagacattact

SEQ ID NO: 960342 - DNA, 120 bp, Artificial Sequence
  ENSG00000286010_30 (sequence is synthesized)
gaggcttgatgatgctgttcagggtgtatttcccttgaaacgcttcttaaaagacagcagcttaaacaaatgggcaagatgagattcacagaggtaacatttcagagagaatgtaggtac

SEQ ID NO: 960343 - DNA, 120 bp, Artificial Sequence
  ENSG00000286010_31 (sequence is synthesized)
agctaagcagagctaagcagtgacagaaggagaaagtgtgtctgaagaaaaatcttcattacagatttgaaagaaaaaaaacccatcaaatccctctgccttgtgggtctcacaggaggc

SEQ ID NO: 960344 - DNA, 120 bp, Artificial Sequence
  ENSG00000286010_32 (sequence is synthesized)
aaactttctttacaaactgtgtgtttgtgttttgagtgactaagagttcagggacaagttcaaacacacctaagttcaatttaaaagtaaatgagatgacattggaggaaatttataata

SEQ ID NO: 960345 - DNA, 120 bp, Artificial Sequence
  ENSG00000286010_33 (sequence is synthesized)
aaatgtcactctttacctaacaccattttctctggaattcaaaatatccattgtttaaaagtgacacagtaactaccatctagtttgctgaatgaccttctttatagcgtcatggtatta

SEQ ID NO: 960346 - DNA, 120 bp, Artificial Sequence
  ENSG00000286010_34 (sequence is synthesized)
gaaatggcttcagaaggaatcactcaactgcatttatctggcaggagaaaaatgcaggtagtatttattttggggtgtggtaggggatgtcccctagcaaggatcctagaagtcagtgtc

SEQ ID NO: 960347 - DNA, 120 bp, Artificial Sequence
  ENSG00000286010_35 (sequence is synthesized)
aggtatgagaacaagaaacattcatttattgcatgcatactcattgagtccctactatgtattggtattatgtggcagtatgaatattctcatttgttaaataaagatacttgagtctgc

SEQ ID NO: 960348 - DNA, 120 bp, Artificial Sequence
  ENSG00000263718_0 (sequence is synthesized)
agcaggaaccctaaatgacagatggtttcctgtccactcagcaggctgagggtccacctggaagataccaaggcgatggggcttggtgccgtcctgagtttgcaggccgaggctcacgct

SEQ ID NO: 960349 - DNA, 120 bp, Artificial Sequence
  ENSG00000263718_1 (sequence is synthesized)
gctctgccaacactcacatacagtatccgcatcaaaggctgagtgtggccaagtgaaggagaaagcccctgtgcgggcacctgcagaggcgtccaccctgcccaggggcctctggggacg

SEQ ID NO: 960350 - DNA, 120 bp, Artificial Sequence
  ENSG00000263718_2 (sequence is synthesized)
tgcacctctctgcttcagctcttcatggccagatgggaggacaatccccaccttgcaaggtggcgttaaggactgagaaagaacgagcaccaggcctggccccatgagcactgctgggtc

SEQ ID NO: 960351 - DNA, 120 bp, Artificial Sequence
  ENSG00000263718_3 (sequence is synthesized)
tggatccaggcgccgtccaccttccacccggcagcactaatgcttccctccccggctgcactggcccttatctgggggtcaggaactcacgtgctgaataaagagcaactcttttccaga

SEQ ID NO: 960352 - DNA, 120 bp, Artificial Sequence
  ENSG00000263718_4 (sequence is synthesized)
actgtaactgacagaggaggcagaagtgcctgccaagaatggagggtctggtctggggaccagctgaaggctcatcgggctcatactgctggcaccagggctgtcgaccagggcacctac

SEQ ID NO: 960353 - DNA, 120 bp, Artificial Sequence
  ENSG00000263718_5 (sequence is synthesized)
ttgggggcttccccacgcaggctgagggtccacctggaagataccaaggcgatggggcttggtgccgtcctgagtttgcaggccgaggctcacgctgctctgccaacactcacatacagt

SEQ ID NO: 960354 - DNA, 120 bp, Artificial Sequence
  ENSG00000263718_6 (sequence is synthesized)
atccgcgtaagccaaagaaaccccccgaacttgggacaggcagctccttgctgtgggccacacacgggctcgggaaggaccagtgactcaggggctttcattgtttcagatcaaaggctg

SEQ ID NO: 960355 - DNA, 120 bp, Artificial Sequence
  ENSG00000263718_7 (sequence is synthesized)
gaccccattcacccacacagacgcacagggacccaaagcacccggccgacctggaaagtcagcgattcctgcgagggtgcaaggggcgaggaagagggagcgtcccccagggcagcccct

SEQ ID NO: 960356 - DNA, 120 bp, Artificial Sequence
  ENSG00000263718_8 (sequence is synthesized)
ccgacactcgagcaagggctggagacagcgcaggggacggtcggctcaggtcgaaagcggcccgacagcggccctgtcctgggaggaactcgacctgcagtgtgcccgccgcggggactc

SEQ ID NO: 960357 - DNA, 120 bp, Artificial Sequence
  ENSG00000263718_9 (sequence is synthesized)
agctttgatagactcagcggctatgttgggaagtcctgcacaggaggagcccaaggcttgtgtcagagaaggggctgcagctgctactgtgttctctgggctccttgcattcagagcccg

SEQ ID NO: 960358 - DNA, 120 bp, Artificial Sequence
  ENSG00000263718_10 (sequence is synthesized)
gagctaccaagtgggagtcagaccacctgagccctcatgtcgtgaggatgccctagggactgtattagtcatctgtaactgtgtaacaaatgaccacagatttcatggtttaaaaccaca

SEQ ID NO: 960359 - DNA, 120 bp, Artificial Sequence
  ENSG00000259033_0 (sequence is synthesized)
cctgtctccttctgtactgtggaagctttgctcttttactctgcaataaatcttgctgctgctaactgtttgggtccacgctacctctataagctgtaacactcaccataaaggtcttac

SEQ ID NO: 960360 - DNA, 78 bp, Artificial Sequence
  ENSG00000259033_1 (sequence is synthesized)
ctacctctataagctgtaacactcaccataaaggtcttacagcttcattcctgaagccagtgagaccacgaacccagc

SEQ ID NO: 960361 - DNA, 85 bp, Artificial Sequence
  ENSG00000259033_2 (sequence is synthesized)
agccagagagaccacgaacccagcaggaggaatcgctcaccgcgaaggtctgcagcctcactcctgagccagcgagaccacgaac

SEQ ID NO: 960362 - DNA, 120 bp, Artificial Sequence
  ENSG00000259033_3 (sequence is synthesized)
ttcttgaagtcagtgagaccaagaagccaccaattccggacacaatatgaagggggaatctggaatatttcaagataaggtccaattcttccattgtctcgtaatccaatgcagagatgt

SEQ ID NO: 960363 - DNA, 120 bp, Artificial Sequence
  ENSG00000259033_4 (sequence is synthesized)
tccaatgcagagatgtgaaatgtaagatcatctgaaggagagctttggttcaagtcaaatgcatgcctcaacctagcagagccaaagagatacttgtatgatgtaagtcagattatgtca

SEQ ID NO: 960364 - DNA, 120 bp, Artificial Sequence
  ENSG00000259033_5 (sequence is synthesized)
aaatagctcaccattcccttcagagaaaagccaaaggacttaaaatggccaacaaagcctatgatctgcacccccctcctccctctacctcacttcatctttctccctgactcacttggt

SEQ ID NO: 960365 - DNA, 120 bp, Artificial Sequence
  ENSG00000259033_6 (sequence is synthesized)
ttcagtcctacttgcctgatatgttccctcaattacactcccatttcaggacatttgcactgactgtttcctctgcctggaccccacttgctccagctttgcacatggctacctccctta

SEQ ID NO: 960366 - DNA, 120 bp, Artificial Sequence
  ENSG00000259033_7 (sequence is synthesized)
ctttcttcaggtgcttgctaaaataccgtcctctcaatgaggcctaccctgagcaccctatttaaaattgtaacctgccgttccctccccctacaagctttcaaatttcgtcatcttttt

SEQ ID NO: 960367 - DNA, 120 bp, Artificial Sequence
  ENSG00000259033_8 (sequence is synthesized)
ttagtttttgctataacaattaatcactttctaatatactaattctaataagaatttacttatttatatatttattgcttaacgtctatatctgtctgtgagaatataaggcccatgaag

SEQ ID NO: 960368 - DNA, 120 bp, Artificial Sequence
  ENSG00000259033_9 (sequence is synthesized)
tcagggatctttttctgttcttaacattgttgtattccaaatgggagactgttgcttggctcatggtaatcactcagttaatagctgtcacattaattaatccttgccatctcttctgtg

SEQ ID NO: 960369 - DNA, 120 bp, Artificial Sequence
  ENSG00000259033_10 (sequence is synthesized)
ctggaatttgtccatgatagaagcctcctgatctgccagaccagtgttgtcctaatattttattcagtccagaatctgtaatgtttttattgccaataaagcatgtgaaaggaaaataaa

SEQ ID NO: 960370 - DNA, 120 bp, Artificial Sequence
  ENSG00000259033_11 (sequence is synthesized)
gatcatcatatcggatttgagaaaactcacgaagaccaaaagaacctccaacaatcagcaactaaaacaaagaaaggaaacatttaagcaaaacagaagaccagaattcaaattcagcct

SEQ ID NO: 960371 - DNA, 120 bp, Artificial Sequence
  ENSG00000259033_12 (sequence is synthesized)
atctatagattgcttttctaaacaacaatagaggcacattatacaaaaattctatagattatttttcctggtgagtcaccattcatcttttagagtaaatgcagtatatactggctagga

SEQ ID NO: 960372 - DNA, 120 bp, Artificial Sequence
  ENSG00000259033_13 (sequence is synthesized)
aatcattatagcacatcattaccaaataccaaaatcgtcaccctatacctgtatttgaccttatgatttaaatgacatcataacaagcattgtattatctgactcttacaatagacctat

SEQ ID NO: 960373 - DNA, 120 bp, Artificial Sequence
  ENSG00000259033_14 (sequence is synthesized)
ttttgttttttgctaagaaaaaaacaaaaacaaaaacaaattcaacaaatgaggaaataaaagcacagccagctaaatgacttgtccattgttaacttaaattttgcccagggatgtctc

SEQ ID NO: 960374 - DNA, 120 bp, Artificial Sequence
  ENSG00000259033_15 (sequence is synthesized)
tgtaattccattgctatgcgatcttccttagtaagtaatgaaattgaaacctgatcaactgatcagaccatgtccaaataaggcagatgcctagctataaccaaccaagctatttctgta

SEQ ID NO: 960375 - DNA, 120 bp, Artificial Sequence
  ENSG00000259033_16 (sequence is synthesized)
cttcactttcctgttttgtctatactcattgcccatattgcagaatggagctctctcaacttctggttctgagtgctgcctgattcatgaattttctttgttcaaataaactctataaca

SEQ ID NO: 960376 - DNA, 120 bp, Artificial Sequence
  ENSG00000259031_0 (sequence is synthesized)
tcctcctcctcggccgcgctgtcagtggagttctgggcccgcaggaagcccacgtcggtcacgggcgcgtccacgctaggccgccggtctcgccgccgctcctccgggcagtagagggct

SEQ ID NO: 960377 - DNA, 120 bp, Artificial Sequence
  ENSG00000259031_1 (sequence is synthesized)
gtgtcactgcagtagatgtctcccttgtaggggggccgcgggcctggtttctccaccccgtcgcagaaggccaggtcgcgggcggaggcatcggacaggcgggaggacaggctggcgggg

SEQ ID NO: 960378 - DNA, 120 bp, Artificial Sequence
  ENSG00000259031_2 (sequence is synthesized)
gctccacaaaggtcactctgccgtgtcagcgctcagtggaagcaaggacctggagcagccccccaaaggaaaccgagggcaaccagcagccggggtgggccaaagggactctggtgaggg

SEQ ID NO: 960379 - DNA, 120 bp, Artificial Sequence
  ENSG00000259031_3 (sequence is synthesized)
ccaggggctgcccggctgcgtgaggtggggtgcctttggcggcccctccaatgtcatgaccccacaggagcgagggggacagaggaggctcaggctcagctggcatcttcctcctcaaag

SEQ ID NO: 960380 - DNA, 120 bp, Artificial Sequence
  ENSG00000259037_0 (sequence is synthesized)
tgaaggaagccacggtgtgttttaataaaacagtgtctcccagttaagtggtgggacaaacaggaaccaccgggtggatggtcggccgtgcccacccgcctcaggctaacctcgaggacg

SEQ ID NO: 960381 - DNA, 120 bp, Artificial Sequence
  ENSG00000259037_1 (sequence is synthesized)
ctggtctgattgtccctgtgtctctcctgggcagttctgcctggtgtctaaccgtgggcctccctgctttgttcagccctccccccacgtagggtctggagaggggggtcagacctgggc

SEQ ID NO: 960382 - DNA, 120 bp, Artificial Sequence
  ENSG00000259037_2 (sequence is synthesized)
gggtttcgaggtctggattccccacaagccataatcgcaaaaggctgggtttgcctcctccgagcagccccttgaacacgggcagtgtgtccccctcctcaagagggtgcacacggtgat

SEQ ID NO: 960383 - DNA, 120 bp, Artificial Sequence
  ENSG00000259037_3 (sequence is synthesized)
ggccgggccaggccctagcagcagcaggagttcctgctgggacgagggaggggtctttgggtgagcctggggagcctcaactgttagcagtcgaatcctctttctaataaaatctcacat

SEQ ID NO: 960384 - DNA, 120 bp, Artificial Sequence
  ENSG00000259036_0 (sequence is synthesized)
ataaagtcaggcggggagggggtgctccaggtgggccgttgtctgtgggatctccatctctctggaccacagtttccttgtctacagagctaggagggtggactcatgtgcctcacagac

SEQ ID NO: 960385 - DNA, 120 bp, Artificial Sequence
  ENSG00000259036_1 (sequence is synthesized)
acagatcctcagagctggggacagaattctatccaagaagacttactgtaaaaacactttcttcatttactcgcacagacaccgtgggcctgggctgttagaaatcaattccacttgagc

SEQ ID NO: 960386 - DNA, 120 bp, Artificial Sequence
  ENSG00000259036_2 (sequence is synthesized)
agggccaactgtgcctcatgtggggcccgcgaccttgtagccaatgattcagggcacgctaccccaaaatgtggcagcttcgcatgttgaatattttaagtggaaagaatccaagaaaca

SEQ ID NO: 960387 - DNA, 120 bp, Artificial Sequence
  ENSG00000259036_3 (sequence is synthesized)
gcaggcgcagaaggactatgtgattgttccctgaagcaggacaccagactccacagccagaggaaaggggcaccgtccactccgagcactggggacactgagaggagccccgacaggcct

SEQ ID NO: 960388 - DNA, 120 bp, Artificial Sequence
  ENSG00000214919_0 (sequence is synthesized)
ctgcaaaagggaccagagtataatgccaatgaaaagaaacaaaggatttcccagaagaggcggtagtttttttcagttgcctcagcgttttggtcacctttggggttaaagtcttctgca

SEQ ID NO: 960389 - DNA, 120 bp, Artificial Sequence
  ENSG00000214919_1 (sequence is synthesized)
cctttggggttaaagtcttctgcagagaatgcttcaagaagccttaacagaagccagttttctcaagctggtcattttctttttctttttttcttttttgagacggagtctggctctgtc

SEQ ID NO: 960390 - DNA, 76 bp, Artificial Sequence
  ENSG00000214919_2 (sequence is synthesized)
ggggatcacaggcgtgagccaccgcgcccagcagatgagaatcattttcattttcataaaattgtgaatcttgaca

SEQ ID NO: 960391 - DNA, 120 bp, Artificial Sequence
  ENSG00000214919_3 (sequence is synthesized)
gagaatcattttcattttcataaaattgtgaatcttgacagccctatcccctcttttaaaatccgtttgtttacatacagcctagcatttggcaaaagtacacatcttaaggggtatgta

SEQ ID NO: 960392 - DNA, 120 bp, Artificial Sequence
  ENSG00000214919_4 (sequence is synthesized)
gaaggagcggtagcttcttgcttatttttcttaaactgcatcaatatttggcagcatgattggtacctagttgctatttaacattggttagaattaacataaatgctaatacaaatttaa

SEQ ID NO: 960393 - DNA, 120 bp, Artificial Sequence
  ENSG00000214919_5 (sequence is synthesized)
agtgtggcataaaataccttggatgaagtaatacgtgagtactgtctcgctacataccagtttcaagcaatttgttttcaagaatagcaagtgtttatttgtggtagatgttttaagata

SEQ ID NO: 960394 - DNA, 120 bp, Artificial Sequence
  ENSG00000214919_6 (sequence is synthesized)
atatcctcccaccatcagcaaatgaaatcaaacataccacttttcaaatgattagcgagtaacatgctgttaaagttgtctcccatctcatttgtcataaattcttaacattgtgcaatc

SEQ ID NO: 960395 - DNA, 120 bp, Artificial Sequence
  ENSG00000214919_7 (sequence is synthesized)
catctagctcaaatgtttaaaaataagtccaactgagtttttccccttttctcatgtttagcaaaatagaaaaactcttaattttcaggttcagatactttgtgaccctatttggtggct

SEQ ID NO: 960396 - DNA, 120 bp, Artificial Sequence
  ENSG00000214919_8 (sequence is synthesized)
tgtaactggctccaattccctaattctcagtgacatgtgtttctgctggttccaggaggtaaactgcagttttaacagatcatgggataatgagactgggagtacctgggggaggctggg

SEQ ID NO: 960397 - DNA, 120 bp, Artificial Sequence
  ENSG00000214919_9 (sequence is synthesized)
gagaggcaatgggaaggagacaaagagagggaaggttgatgggcagagcgaggatttatagtggcaccagatttgcaataaaatctgtttaaagttattgcttccgtttgatatattttc

SEQ ID NO: 960398 - DNA, 120 bp, Artificial Sequence
  ENSG00000214919_10 (sequence is synthesized)
ccacatcatcaacttcaattaaatttattttaaaaatcagtctttcagatatagggctagtattataaacatagaatatgataaaagtgctccttgttagggtgccataatgtaaaatac

SEQ ID NO: 960399 - DNA, 120 bp, Artificial Sequence
  ENSG00000214919_11 (sequence is synthesized)
tgtgaaaattcttaacgaaatgttttttacttaatttattcacttagtcaacaaatgtttattgagaacgtattatatataaggcaagatgaataaatccagatttctgttctgaatgaa

SEQ ID NO: 960400 - DNA, 120 bp, Artificial Sequence
  ENSG00000259039_0 (sequence is synthesized)
atcgcattgaacatgtcctaatgtttcacaatgagaagtgaagcacttcctcttacttaaaaagaaaaatatttgatttttacaggatgcctgacactaatgcttactattctgctatct

SEQ ID NO: 960401 - DNA, 120 bp, Artificial Sequence
  ENSG00000259039_1 (sequence is synthesized)
atgatgtcttcacttatggatatatttattaacaagtacttattagctatttaacatttcctctactgagtgttattaattacagatgctgtattagtttcctaaggctgctgtaacaaa

SEQ ID NO: 960402 - DNA, 120 bp, Artificial Sequence
  ENSG00000259039_2 (sequence is synthesized)
cagtccttgcctcttccagggttctgtgcctcctgttggaatgagctcactaaccagtggaaacaaactgtttatccttctatgatgttgcaactgcctgggctttctaatgcgtcttca

SEQ ID NO: 960403 - DNA, 120 bp, Artificial Sequence
  ENSG00000259039_3 (sequence is synthesized)
gatttcggtttgtactcagaacaagtgagaaaagttttacagcaactccacgaaacaaagcagacaggctctcctgaagccaaggagttatgaaaaaggcaggcatcgcgcattgaatca

SEQ ID NO: 960404 - DNA, 120 bp, Artificial Sequence
  ENSG00000259039_4 (sequence is synthesized)
agtatgccattaccctcactcccatgaacctgtctttcagcacaatccatgacagcaagaagacaaaggctttgttacaacagaacagagcggagacatccgtggccgtcagcttcttta

SEQ ID NO: 960405 - DNA, 120 bp, Artificial Sequence
  ENSG00000259039_5 (sequence is synthesized)
atttatagatgtgggcaataagagctacatttatgttgtcagtgctgtttgccctcgtttaatttctcaaatgacctaattatatgtgttctcaatatgtcttgggaggaaaataattgc

SEQ ID NO: 960406 - DNA, 120 bp, Artificial Sequence
  ENSG00000259039_6 (sequence is synthesized)
agaaaagagaagttaatatccaggtactgatggtgacacctcttgtcttatctgactcatcgcagccattttcaggttcagaccccagagaaagttgggtggaaaaaagtggaaagagga

SEQ ID NO: 960407 - DNA, 120 bp, Artificial Sequence
  ENSG00000259039_7 (sequence is synthesized)
tctggaggagtaaagaaaagacatccaatattctgtttctacaacaatgctatgatcacaaagtcaggggttagatcatatgatctcctaaccccctactagctttatgattgattgata

SEQ ID NO: 960408 - DNA, 120 bp, Artificial Sequence
  ENSG00000259039_8 (sequence is synthesized)
attcttccaaacaagctcacgtaaattatatattggccataaaactagcgctattttcaactcatcttttataagtgtgtttcttttaaagatccaagaccttttccatgactaagatat

SEQ ID NO: 960409 - DNA, 120 bp, Artificial Sequence
  ENSG00000259039_9 (sequence is synthesized)
tataatcactaaagaaatgctgaagacagaaatgtaaccctggatttttcacttgatgttggttggtagccataattattaatctgtcattttttcttacaaaaagataaaatatcaata

SEQ ID NO: 960410 - DNA, 120 bp, Artificial Sequence
  ENSG00000259039_10 (sequence is synthesized)
gtcagaccatcttcaccaaaaatccgactgcattccctaggaaagaaaagagaagttaatatccaggtactgatggtgacacctcttgtcttatctgactcatcgcagccattttcaggt

SEQ ID NO: 960411 - DNA, 120 bp, Artificial Sequence
  ENSG00000259039_11 (sequence is synthesized)
aagagcacaaacactcaatacccatccttcattgtgaagtatactgaacccagttctgaaatctgcgggcttcagggagtgtatgaggttccttggaaaatagcccacatgtgcccaagc

SEQ ID NO: 960412 - DNA, 120 bp, Artificial Sequence
  ENSG00000259039_12 (sequence is synthesized)
acagagttaggctctcttctctgagatagtctctggaggttgcctgaaaagccattctgtcgtttttgagcattctcagaagagcctgcagaaataccgaaattggtagttgctgaaatc

SEQ ID NO: 960413 - DNA, 120 bp, Artificial Sequence
  ENSG00000259039_13 (sequence is synthesized)
actagctattggaagagggtgggcaaacgagagagggtcaaggctgctactactctgtgaacgggctacagacaactcctagaacccggagggaaagggaccctcatacatctgtgcagc

SEQ ID NO: 960414 - DNA, 120 bp, Artificial Sequence
  ENSG00000259039_14 (sequence is synthesized)
acacatgtttttggattttatttctaagacactaagccactttctaatatatctgcccaattgactaattttttttcctgccagcatttttaaggcagaaaaatgaagtccctgtgataa

SEQ ID NO: 960415 - DNA, 120 bp, Artificial Sequence
  ENSG00000259038_0 (sequence is synthesized)
gagccgccggcccccaagcactgtgctgggccaggagagtgcgcatgcgcgcggcgacctgtgcgctcgggttctgtgccggcttttaccccagctgaataacctggtggtcacaagaaa

SEQ ID NO: 960416 - DNA, 120 bp, Artificial Sequence
  ENSG00000259038_1 (sequence is synthesized)
tcccttaccaaccttgacctccaggtctccatggcaactgctgctgggacatcattggcaccagattgtgtcccttaaaggccacactgcagcaagggcagataaacaatttcatggcaa

SEQ ID NO: 960417 - DNA, 120 bp, Artificial Sequence
  ENSG00000286016_0 (sequence is synthesized)
agctcagaggcggatcaatgtacaagaacaaataaaatatggaaagacagatacagtttttattattttctggggaaaagtccaatctctaggctcatagagtcagtgtttccatagcca

SEQ ID NO: 960418 - DNA, 120 bp, Artificial Sequence
  ENSG00000286016_1 (sequence is synthesized)
accaaggatggccagtcctgggggctgtacctaattagcataggatgtccggctgctgttgaccaccaaggtctcagaacagagcagccctactggagaggcagagaatagagagaggat

SEQ ID NO: 960419 - DNA, 120 bp, Artificial Sequence
  ENSG00000286016_2 (sequence is synthesized)
gaagttatgggcagctgggatatccatcttctcctgcgctgggatgtcagagttcctggtttttgggccttcagacttctggactctggaatacaacagagctctcctggttcccagact

SEQ ID NO: 960420 - DNA, 120 bp, Artificial Sequence
  ENSG00000286016_3 (sequence is synthesized)
ttcagactcagactaaatcaaagcatctgctttcttcattcttcagctcacagatcatgggacttctcagcctccataatactggatccccagttctactctggcaccccagtggtccac

SEQ ID NO: 960421 - DNA, 120 bp, Artificial Sequence
  ENSG00000286016_4 (sequence is synthesized)
ggctgaggaacatcataagaaaacacctttggcatgaccattagtgcggaaggctgactttctccaagctgaaacttctgcagagacttaatggatttttgctgaacctggacaatgtga

SEQ ID NO: 960422 - DNA, 120 bp, Artificial Sequence
  ENSG00000286016_5 (sequence is synthesized)
acaggaaagattcatctgtgctcacaggtgctgcgtctaccaactccatgtgattctggtgaagtggtgaaatgtgtggctcccttagttagtaaaaaccacgtagctcttacttcttcc

SEQ ID NO: 960423 - DNA, 120 bp, Artificial Sequence
  ENSG00000286016_6 (sequence is synthesized)
gatttccattgtttacctcatttaacaggtgagaaaatagaagcatgggtaaatgtagtgtcttaatgaaatttatacagctagtaagtgacagagctggaatttacatacagattgtta

SEQ ID NO: 960424 - DNA, 120 bp, Artificial Sequence
  ENSG00000286016_7 (sequence is synthesized)
cactcaagggtctctggttttaaatcctacagtgtgatgaacatgtgactgagactggcccattggatgactccactttctcgaatcagtgagtggttcagggttgtcatgtggattctt

SEQ ID NO: 960425 - DNA, 120 bp, Artificial Sequence
  ENSG00000286016_8 (sequence is synthesized)
acacggtgaacccagtttatggcaattattgatctgaatcctgggagagagaattttactttccttttttgtaagattgcttgttatgaagatgatgttttttaaagtggttcaccttgg

SEQ ID NO: 960426 - DNA, 120 bp, Artificial Sequence
  ENSG00000286016_9 (sequence is synthesized)
agtgttagttgctagtttgcttcatgataactgctaaaaaacttgacgaagccatgtttgagccagtctgcctggaactttccaatacacgaggcactaaattaccttttatacctaagc

SEQ ID NO: 960427 - DNA, 120 bp, Artificial Sequence
  ENSG00000286016_10 (sequence is synthesized)
tgatctgatgtgttattggaagagacctgacaaacagatatcataaagccactggtattgtctgcagcaatgttaaatagactcaatatacatctatacacccatatatgccctcatata

SEQ ID NO: 960428 - DNA, 120 bp, Artificial Sequence
  ENSG00000286016_11 (sequence is synthesized)
tgcactaaatacaccttgactttaggagttggagactaaattgatttaaactaagaagaagtcaaataaaatgccttagataatctataaattacaaataaaataaatataaaatatcta

SEQ ID NO: 960429 - DNA, 120 bp, Artificial Sequence
  ENSG00000286016_12 (sequence is synthesized)
ataagctaacagttcgagcattctgcaattaaggaaactgcctagttcactttgttcttttgttctgttttgaatttcattaatttgcgtctccatctttattattgtgttttttctcct

SEQ ID NO: 960430 - DNA, 120 bp, Artificial Sequence
  ENSG00000244383_0 (sequence is synthesized)
aaagaacacttgactgtggcatctttccagcctcctgttagcagctaggtaaggtgcccccatggcaaggagctgcgggcagcctcaagaaactgggtggcctcttaggacctgagggca

SEQ ID NO: 960431 - DNA, 120 bp, Artificial Sequence
  ENSG00000244383_1 (sequence is synthesized)
gcctccaacaagcaagcagcaaacctctggggccttctgttctacaactgcaaggaaataaattctgccaacagcctgaatgagcacggaagtgaactctttctcagtcgagcctctgaa

SEQ ID NO: 960432 - DNA, 120 bp, Artificial Sequence
  ENSG00000244383_2 (sequence is synthesized)
tgagaacacagttcaactcatgccttgactgcagcttgtgagagtctgagaagaggaccaggagcaactctagttgactctccactcccacgctgcaggaattgacggcgcacagggaac

SEQ ID NO: 960433 - DNA, 120 bp, Artificial Sequence
  ENSG00000244383_3 (sequence is synthesized)
agtttctactgctgtccttcccgttacctcctccaatggggcttcagtcaccacctctctggaaggtgatgatggtcggcagctccatatcgccagccgtgactctgccctgaaatctag

SEQ ID NO: 960434 - DNA, 120 bp, Artificial Sequence
  ENSG00000244383_4 (sequence is synthesized)
cccaagggagccaactgcctgttttgtcaggactcatgatcctgaagacaatgaagaagaaatatgacagtcggtcccgagtgtggaatgaacactctgctctcccagctggggaactcc

SEQ ID NO: 960435 - DNA, 120 bp, Artificial Sequence
  ENSG00000244383_5 (sequence is synthesized)
attctctgaagagtttctcaaggcatgttggaccagaacaacctgctcagagaagaggcaaggtccctgcctgggcctctgaggtgttggaggtggggccagcccacccccaggccgtga

SEQ ID NO: 960436 - DNA, 120 bp, Artificial Sequence
  ENSG00000244383_6 (sequence is synthesized)
ggcctggctgctggaaggaggcaggacccagaaggttgctgccatcctggggtgtctgagtccccatgtggcccagctgtgttcctgctggcccggcatccacacccttgtctctggatg

SEQ ID NO: 960437 - DNA, 120 bp, Artificial Sequence
  ENSG00000244383_7 (sequence is synthesized)
tgcggtgggagaattgtctttctccacgaacaggccaggtggttcctgggattgacctctctctcccaggtgtggacaagcagagcatcctacgtccccagctacagcgactggctgata

SEQ ID NO: 960438 - DNA, 120 bp, Artificial Sequence
  ENSG00000244383_8 (sequence is synthesized)
agtaaatctcacaagatctaatggttttataaggaggctgcacaagctctttctctgcctgctgccaaccatgtaagatgtgacttgctcctcctttgccttccaccatgattatgaggc

SEQ ID NO: 960439 - DNA, 120 bp, Artificial Sequence
  ENSG00000244383_9 (sequence is synthesized)
gaggctggtcttccgggtaggatgtgctgtgggagggttctgtttccgaggaggagaggcgcgacacagcgtgcaaggacctgcagcaccttccacgcagcaccccctgctcctcctcct

SEQ ID NO: 960440 - DNA, 120 bp, Artificial Sequence
  ENSG00000244383_10 (sequence is synthesized)
cagcccctgccgggctctgactcctaagtcaggcaggagcttcttcaggcccctggctgaggaagagccacagccaccctaaaatggcttcgggggcatgcagccctccatctccagcag

SEQ ID NO: 960441 - DNA, 120 bp, Artificial Sequence
  ENSG00000244383_11 (sequence is synthesized)
ctctggccatccctcgtatttgtttgtgtctgggctgttctttaagaactagagagagagaagacagagaaatataggcagtgagtgaggctgttcagaactcatgcccacatggacact

SEQ ID NO: 960442 - DNA, 120 bp, Artificial Sequence
  ENSG00000225903_0 (sequence is synthesized)
ttttcctgcccagactctgaccaaaataatctccagcccaactgctaacccttcttcaggttttctgcttcagaagctctcttagaatgaagacacaacgccacacatctgaacaggaat

SEQ ID NO: 960443 - DNA, 120 bp, Artificial Sequence
  ENSG00000225903_1 (sequence is synthesized)
taccccagttctgcaaggtggaaagctgatgctgtctttgattcctcctcctcctcacccccacctcatcaaaacctgcccacgctatgtctaaaatatatctcacgtctgtcctcttcc

SEQ ID NO: 960444 - DNA, 80 bp, Artificial Sequence
  ENSG00000225905_0 (sequence is synthesized)
ggcccggagcctccagcaggcgcgcggccagcagcgtgtggcccagggcagcggcccagtgcagcggcgtgaggcccgtc

SEQ ID NO: 960445 - DNA, 80 bp, Artificial Sequence
  ENSG00000225905_1 (sequence is synthesized)
cagtgcagcggcgtgaggcccgtcccggagcgagccgccgccgaggccccgcgctgcagcagcagctcggccacccgcga

SEQ ID NO: 960446 - DNA, 120 bp, Artificial Sequence
  ENSG00000225905_2 (sequence is synthesized)
ccccgcagcacggccagaaggaaagctccgtaaggctgaccgggaaagaagcgaggagctctgggggctgggtggaaagtcccgtactcatcagggccagggaggccacagaaactacct

SEQ ID NO: 960447 - DNA, 120 bp, Artificial Sequence
  ENSG00000225905_3 (sequence is synthesized)
cacgccagcttcccaggggtacagcggctagaatggacctcgaggaggcccctcccaagactcccgtctcccgggttccaccgcagtgggggcagccacagctgcctctgcaatgcttgt

SEQ ID NO: 960448 - DNA, 120 bp, Artificial Sequence
  ENSG00000286318_0 (sequence is synthesized)
tgaggcaggaggatcacttgagctcaagagtttgaggtgtcagtgggctatgattgtactattgcactccaacctgggtgatagagactgattctgtctgaaagaaaagaaagagaaaga

SEQ ID NO: 960449 - DNA, 120 bp, Artificial Sequence
  ENSG00000286318_1 (sequence is synthesized)
aaagaaaagaaagagaaagaaggaaagtaaaaggaaggacggaaggaaggaaggaagcaaagaaggaaaaggaaacgagaaaagaaaaagatgagtgaatattattgaggactaagtcat

SEQ ID NO: 960450 - DNA, 120 bp, Artificial Sequence
  ENSG00000286318_2 (sequence is synthesized)
ttcaaattaccaaaattgatgcatatttacatttaacctggctccagggaatattatttatgactaaatcatatcaagtcactgttaacagtgcatgctcatactaaatatagcatttga

SEQ ID NO: 960451 - DNA, 120 bp, Artificial Sequence
  ENSG00000286318_3 (sequence is synthesized)
cggtggtaaacacacacagacacacacacacaacctatagaattaatcacctcatctagcacagaggcattgacacataaaaaataaagaccataggtgtcttagttcattcaggattct

SEQ ID NO: 960452 - DNA, 120 bp, Artificial Sequence
  ENSG00000286318_4 (sequence is synthesized)
ttaacaaaataccataagcttggtaccttataaataacagaaaattacttctcacagtttctagaggctgggaagttcaagatcaaactggacttgatgtccaatgaggaccaatcttct

SEQ ID NO: 960453 - DNA, 120 bp, Artificial Sequence
  ENSG00000286318_5 (sequence is synthesized)
tgctgtaacctaacatggtggaaggggctagctagctctctgcagttggtgaatagtgtccccccctttttttttaataagggcacttatccccttatgggggctccgtcttcattatct

SEQ ID NO: 960454 - DNA, 120 bp, Artificial Sequence
  ENSG00000286318_6 (sequence is synthesized)
agtcacctcctaaagaccccatctcctgacaccatcagcttgaatgttagtattcaacacatggaatttcagggacacaaacatttataccttagcaacaggaataaaaataagcaaata

SEQ ID NO: 960455 - DNA, 120 bp, Artificial Sequence
  ENSG00000286318_7 (sequence is synthesized)
tatgtgctaagcaatgttctaagtactttacaaatatcaacttatttaatccattcaataatctaatgaaatacatattgtgatttttttttcatcctcactttacagataacgctttta

SEQ ID NO: 960456 - DNA, 120 bp, Artificial Sequence
  ENSG00000286318_8 (sequence is synthesized)
acattagaggaatggagaattttgcctatggttggacaggtagtaactagtagaggtaggatttatctccagagctcatgattttagccactttgctacagatggatggggtaagggtag

SEQ ID NO: 960457 - DNA, 120 bp, Artificial Sequence
  ENSG00000286318_9 (sequence is synthesized)
gagcatttgaggagcagtttgcattttttgtcttatttttttcttttactgctttgggtagaaaggattagtcataaagaatatactgtaagctgtgtgtggtggcatgcacatttagtc

SEQ ID NO: 960458 - DNA, 82 bp, Artificial Sequence
  ENSG00000286318_10 (sequence is synthesized)
atatactgtaagctgtgtgtggtggcatgcacatttagtcatagctactcaggaggccggaagatcgtgcaccagcctgggt

SEQ ID NO: 960459 - DNA, 120 bp, Artificial Sequence
  ENSG00000286318_11 (sequence is synthesized)
aggctgcagaatatacggtggcaggatgcttttgtacaattcacacatgctttccacattgttctggaacatctgagaaagacacatcattgaaacaacttccatccattgcatgggtag

SEQ ID NO: 960460 - DNA, 120 bp, Artificial Sequence
  ENSG00000286318_12 (sequence is synthesized)
aaattactctggctgctatgaagagaaagaatattcactgaaaatattttggatgtcactggatgcccctgttggatgctgccctgtggaaggagcactgtgtttcaaagctgggtgtag

SEQ ID NO: 960461 - DNA, 120 bp, Artificial Sequence
  ENSG00000286318_13 (sequence is synthesized)
ttgtagatggtaattaaaggcacaaaagagataaagctctgaaggacaaatgaattgaagaagatgcagtgattatgacaaaagtactggatgcccaattctatgcttcaacaagttcac

SEQ ID NO: 960462 - DNA, 120 bp, Artificial Sequence
  ENSG00000286318_14 (sequence is synthesized)
aattctacttctcaagatgataatagagggcaatttaattaaaagataatggaataagaatgctccggtatctttatatgccttaagagcatacattttccccacataaaagtcaaccca

SEQ ID NO: 960463 - DNA, 120 bp, Artificial Sequence
  ENSG00000286319_0 (sequence is synthesized)
ttttaacaacttatttcttcccaaggcatttactctttaagccactttagttctttgcttttctcaactcctaaaaccctttaagctaagttgtttcttttctcccttctttccaccttt

SEQ ID NO: 960464 - DNA, 120 bp, Artificial Sequence
  ENSG00000286319_1 (sequence is synthesized)
ctattgtgtgtgtcagcttttttcaattggagcaattgtgatctgtcttgcttctctcactctcttcttcacccattgttgtatttagcaaaacaaggacccagtagccagctggacaaa

SEQ ID NO: 960465 - DNA, 120 bp, Artificial Sequence
  ENSG00000286319_2 (sequence is synthesized)
ccttcctcctaaaagggacaggaatgattataatgatttattttgtattcttcccaaccggatttgaaaccagttcacttgcctgtgtgttctcaaatatgtcatatttttaccaaatat

SEQ ID NO: 960466 - DNA, 120 bp, Artificial Sequence
  ENSG00000286319_3 (sequence is synthesized)
attggtactcgtcttttccttctatcctggaagtgagtccagaattgcctacatgtgtgaatagtataagatcaaggtaatgttatttcaatctccgtaagaaaagtaattttaagaaat

SEQ ID NO: 960467 - DNA, 120 bp, Artificial Sequence
  ENSG00000286319_4 (sequence is synthesized)
ttcagaaaaccatttaaaccataagtaaatatgacaagtgagaaaaatatctcccttggggacaattatgtgctaatctacaaagtaccttctaacctattttataggttctgtagctct

SEQ ID NO: 960468 - DNA, 120 bp, Artificial Sequence
  ENSG00000286319_5 (sequence is synthesized)
agatgtcctccctccccaatagcccattttctgctcatgttggcattcaatgaaatacattcacttgatgggattccagaattattcattttaataataccaaaataacttaaaacgcta

SEQ ID NO: 960469 - DNA, 120 bp, Artificial Sequence
  ENSG00000286319_6 (sequence is synthesized)
gaataatgagagactgtctactccccaaaacaggagagtttatttataccctttttaaatcttaaatttaaaagatgtttgcataacagatcaaacactgaacaccagttagcatcagaa

SEQ ID NO: 960470 - DNA, 120 bp, Artificial Sequence
  ENSG00000286319_7 (sequence is synthesized)
acaagaatttaagtcatcatgttaacaataaaaactcccatagtatattaagatttaataatttgaaatgtctacagtttttataggaggaaaacttccaaatacctagacataataaat

SEQ ID NO: 960471 - DNA, 120 bp, Artificial Sequence
  ENSG00000286319_8 (sequence is synthesized)
tactaaaaacattaacaaattgctctctagtaattcaaatatttgttactatccaaatttatgattatatataaaaaattaactcttcatgaaacagtgttctgactctgaagtaaactt

SEQ ID NO: 960472 - DNA, 120 bp, Artificial Sequence
  ENSG00000286319_9 (sequence is synthesized)
tttttgtttttaggataaaatgcatgtagtaaactgtcacaatacattattaacatgtaattaacagtaattaattcaaacaaatcttatagtcacattagtattttccaataatcctgc

SEQ ID NO: 960473 - DNA, 120 bp, Artificial Sequence
  ENSG00000286319_10 (sequence is synthesized)
cttcctgccactactaattaccttgtagacatcaacaagatgtttagaatacatacctcttgagcaagatcttgtgcgttggagataagaggaaatggaggactggccttgttcatgtgt

SEQ ID NO: 960474 - DNA, 120 bp, Artificial Sequence
  ENSG00000286319_11 (sequence is synthesized)
actgtgatggcattgtgtatcttaaatgcattctggaaatccttattttgaacaagttgtaaaagcagtgaaatatcctcctggctctgagaatctaccaaagtatgttggatatgttta

SEQ ID NO: 960475 - DNA, 120 bp, Artificial Sequence
  ENSG00000286319_12 (sequence is synthesized)
agtgaagaaaacaagtcttctatttctagtagaagaagaaaagggaatttaaaaaatccattcagatgtaactaaatcagtcctgtcaaatacactcttccataataaaagatgaagaca

SEQ ID NO: 960476 - DNA, 120 bp, Artificial Sequence
  ENSG00000286319_13 (sequence is synthesized)
cagagacaacaaagagaagacagaggacagagagaagaaattcccttccccaatcccatacagacagacaacagacacaagaaggaaccacatggacagagaaagagagaaatgaagaac

SEQ ID NO: 960477 - DNA, 120 bp, Artificial Sequence
  ENSG00000286319_14 (sequence is synthesized)
cacaaggctagtgagaaagactgatatatgtgctaggttgggagtggacaaaaaaacgaatggaaaaacaagatgtggtatatttgtacagtggaatattaattcatccataaaaaagaa

SEQ ID NO: 960478 - DNA, 120 bp, Artificial Sequence
  ENSG00000286319_15 (sequence is synthesized)
atgaagtactgattcatgctacaatatggatgaaccctgaaaacataatgctaccgcatacatttctgaatgtgccgtaagacaacgaagcaaatcttcgcaggcagaaataagttttaa

SEQ ID NO: 960479 - DNA, 120 bp, Artificial Sequence
  ENSG00000286319_16 (sequence is synthesized)
aacctactactgcttaataagtggaatgaagtttcaacgtattgtgtcaaagactgaatgatgtagcagttacttttctatagaattatgtgtatttaataaacaaaatttacattacta

SEQ ID NO: 960480 - DNA, 120 bp, Artificial Sequence
  ENSG00000286313_0 (sequence is synthesized)
agcatctctgggattagaactattagcaaacttataattttctttcctcacttactgagctctagtattatcttgattgcaaagaaagcatccagacaacttcccatttcctccttgctt

SEQ ID NO: 960481 - DNA, 120 bp, Artificial Sequence
  ENSG00000286313_1 (sequence is synthesized)
caccccgtgaacacaactgcttctcttcagcagccccaaatggaaattattcaggttaaatcacagaatttggaaagaaaaagggcatccaacagccttaaagatgaagaaatggaagct

SEQ ID NO: 960482 - DNA, 120 bp, Artificial Sequence
  ENSG00000286313_2 (sequence is synthesized)
ccagagttgaagaaatgtgtcttcactcccacaagtaatcttgaagttccgagccaccatgagagttttcctgacactgaggtaatttcctaccatgttgacaccaccttgcgccagtgt

SEQ ID NO: 960483 - DNA, 120 bp, Artificial Sequence
  ENSG00000286313_3 (sequence is synthesized)
tcaagaccatcacagctatgaaccttgttggcttgtatcagatgcctgctgggaccttggctgcccatagtgctctctaaagactccagctttccataactcctacagttttaagttcaa

SEQ ID NO: 960484 - DNA, 120 bp, Artificial Sequence
  ENSG00000286313_4 (sequence is synthesized)
ggaatgatgaagaggacgccaatgtacggatttgatttaccaaatcaggcctgtacagcagctgaatcaacctatgggaaaattttggctctctttaacattctaatttttgagaacacc

SEQ ID NO: 960485 - DNA, 120 bp, Artificial Sequence
  ENSG00000286313_5 (sequence is synthesized)
tttgagaacaccattgcaaatacatgatttccaaaataataacaatgcacttaattaatcacattatagatcatcatataaaaataaatacctaaatagaaatacaatttatttttttct

SEQ ID NO: 960486 - DNA, 120 bp, Artificial Sequence
  ENSG00000286313_6 (sequence is synthesized)
tgcatagagctgcctcctctgcagttttccatcactgcctccttctcagacttctccttttgttttttcatttctttgtacagactccagtcatttgtttaaatattcatactcaaccag

SEQ ID NO: 960487 - DNA, 120 bp, Artificial Sequence
  ENSG00000286313_7 (sequence is synthesized)
aatacgtttcctaatgtgggaatcattgcttattcacaggcacagcccttgacatcctgaaaacatgtagtaatgatttttggaataaaggtttgacacttctacatttacatgtaaatg

SEQ ID NO: 960488 - DNA, 120 bp, Artificial Sequence
  ENSG00000286313_8 (sequence is synthesized)
tcttacaattgaggaaactgaggtcaagaatgagtgagtggctcagagtcacccagctcattagagcctgaatgaaccaccttggttcactacctctgttcaccgccctttctagtgcac

SEQ ID NO: 960489 - DNA, 120 bp, Artificial Sequence
  ENSG00000286313_9 (sequence is synthesized)
ttcatgaaatcactctctaagtacacatcaactcatttagatacttaaatgattcttgagaaagtagaaagtataaatgccttgaccacacataagaactttgacatatttcactctctg

SEQ ID NO: 960490 - DNA, 120 bp, Artificial Sequence
  ENSG00000286313_10 (sequence is synthesized)
tactgaaatttctaacaatgcctggtacataataggtattcagttgatttgggtttctacatcccttttctccttctcttcttcaagtttgcatgtaaaccacattaaagactgctaata

SEQ ID NO: 960491 - DNA, 120 bp, Artificial Sequence
  ENSG00000286313_11 (sequence is synthesized)
tataaagtaggcaccatctcatgaatcaaagaggggattcctagagccactgaggatgtctttagaagccagtggtgctgatcccacagctactctcctgtggacagtggaagtgctccc

SEQ ID NO: 960492 - DNA, 120 bp, Artificial Sequence
  ENSG00000286313_12 (sequence is synthesized)
caaagtacattcttaggggaaatggggctgccgccatgaggaggtgtcaatagagattagagatggtctttgtgctgtgagagagacctcacatttccaaatgccaagtcctttcttcct

SEQ ID NO: 960493 - DNA, 120 bp, Artificial Sequence
  ENSG00000286313_13 (sequence is synthesized)
cagtcaaatgtaccccctagaacatagatacctactaagctgtagatttttgaggggatacagagctgaatccataagatagtggattattcagataagaatttctgtagatagagagtt

SEQ ID NO: 960494 - DNA, 120 bp, Artificial Sequence
  ENSG00000286313_14 (sequence is synthesized)
tccaatcaattatgtaccccaacaatgtgaggtcaactacttagactacctcttagcttctacatttagatgtttcaaagtctgttctgatccttaaatttgacacttctctttaatata

SEQ ID NO: 960495 - DNA, 120 bp, Artificial Sequence
  ENSG00000286313_15 (sequence is synthesized)
aacaaagcccttttagtattctttgggattagcttaccacttaataaattccttccaacactatcttctgtgagtcaacaaacagcttcctcctgtgatttgggcctggctaacaacaag

SEQ ID NO: 960496 - DNA, 120 bp, Artificial Sequence
  ENSG00000286313_16 (sequence is synthesized)
ttagacttcagacgaataattactaggctgaggcattttccaggtggtacattcccactttgaggaaacttggtcattttacttttgcatttaagatgtccttaggctgaaaataaagtg

SEQ ID NO: 960497 - DNA, 120 bp, Artificial Sequence
  ENSG00000286310_0 (sequence is synthesized)
agtaaatggatggaaaaagattcatcacataaatgaaaaacaaaaaaggagaggtattgctattcttgtatcagataaaacagacattaaaccaacaacagtaaaaaaaaatacaaagaa

SEQ ID NO: 960498 - DNA, 120 bp, Artificial Sequence
  ENSG00000286310_1 (sequence is synthesized)
gggcattatataatgataaagtgttcaattcaacaagaagacttaactgtcttaaatatatatgcagccaacattggagcacccagatttttagaataaatattactagacctaagaaaa

SEQ ID NO: 960499 - DNA, 120 bp, Artificial Sequence
  ENSG00000286310_2 (sequence is synthesized)
gtggactcaaattgggctcttgaccaaacagacctaatagatatctacagaatactccacccagaaaccatagaatgtacatttttctcatttgcacatggaacattctctaaaattgac

SEQ ID NO: 960500 - DNA, 120 bp, Artificial Sequence
  ENSG00000286310_3 (sequence is synthesized)
cacatgctcagtcataaaataagcctcaataaatttttaaaaatcgcaactatattaagtatcttctcagaccactgtggaataaaattagaagtcaatatggagaactctcagaaccac

SEQ ID NO: 960501 - DNA, 120 bp, Artificial Sequence
  ENSG00000286310_4 (sequence is synthesized)
agaggtacatggaaactaaacaatctgctcatgaatgacttttgtgtaaataacagaattaaggcagaaatttaaagaaattcctgaaacaaatgaaaatagaaacataacataccaaaa

SEQ ID NO: 960502 - DNA, 120 bp, Artificial Sequence
  ENSG00000286311_0 (sequence is synthesized)
ggaagggcaatttctactgactctttacgctaccattcattcacggtggaaccagcagagaagagaaaacgagacagccacagcgattgtttgcaattttgaaacagactgcctttaacc

SEQ ID NO: 960503 - DNA, 120 bp, Artificial Sequence
  ENSG00000286311_1 (sequence is synthesized)
ctccaactttttttctgtaaaaagccttttttctttcttcctctgaaagctttgcattgtgaacaatccatggtaaacaaggctccctctacagccgcgagtgcgaagtacaaccccaca

SEQ ID NO: 960504 - DNA, 120 bp, Artificial Sequence
  ENSG00000286311_2 (sequence is synthesized)
ggttcagagcccagcgtttacccgtcagaaaaataaaatgatgacaagacatcacattagcgccacgcaggcttccttccgcacatgctcaagactctgctgtcaatagaaaactcacac

SEQ ID NO: 960505 - DNA, 120 bp, Artificial Sequence
  ENSG00000286311_3 (sequence is synthesized)
tttctttttaaaagagggtttaggcacatttactcatttgcaccttttattcctgaaatcaaatgtgttttcaaaccaattcactctccccagtttactggatcttctcatccttggtga

SEQ ID NO: 960506 - DNA, 120 bp, Artificial Sequence
  ENSG00000286311_4 (sequence is synthesized)
tgtggggcaggtgggaggctttatttatccacacatgctggtgcccaataatgatttttagaacgaactagtggccacagctcttaagttcatccaggaaatgtgtttccaaacgcggga

SEQ ID NO: 960507 - DNA, 120 bp, Artificial Sequence
  ENSG00000286311_5 (sequence is synthesized)
actgtccatcctcactctgaaaatgagataattcagactcaggatttccctttccccaccacattttcagagacctttgacttctcctggcctgaattactatttcacagcagtggtgga

SEQ ID NO: 960508 - DNA, 120 bp, Artificial Sequence
  ENSG00000286311_6 (sequence is synthesized)
tcaaaggtggaattgaacccagataacccacctcttctctgactaataaaagagagctagtaccgcccaggagggcagagcagtgattttctgtaggcatgaaacgtgaactcatttact

SEQ ID NO: 960509 - DNA, 120 bp, Artificial Sequence
  ENSG00000286311_7 (sequence is synthesized)
atccctgagataaaacagcccagccctgctcaacccacagaaaacagttgagagccctgcagaaacctggctgttgagcggcactgcaaatgagcttcccatatgaagtaagcatgtccc

SEQ ID NO: 960510 - DNA, 120 bp, Artificial Sequence
  ENSG00000286311_8 (sequence is synthesized)
acaagtggggacctggccatgggactctggtttgccattattaggacaaataggatcttagcgtgaccagagcagacactgttcaagcacgtcaaaacattaaaaaaaaaaattatcccc

SEQ ID NO: 960511 - DNA, 120 bp, Artificial Sequence
  ENSG00000286311_9 (sequence is synthesized)
acaaatgacttattaatgacagagaagaaaatgtacctgcaatggggcgatctggcagacacttcccaatcaagtcatcaaattcagcagcctccaaagtggggccaccagacatgatgt

SEQ ID NO: 960512 - DNA, 120 bp, Artificial Sequence
  ENSG00000286311_10 (sequence is synthesized)
cctcggctcctgaagggaggcactggaagacacagcatcacttgagccatgtgctcccccaacatgcttcacctgaatctgctcctcaagagacaaccagacaagaaatccagaaagaga

SEQ ID NO: 960513 - DNA, 120 bp, Artificial Sequence
  ENSG00000286311_11 (sequence is synthesized)
gagaaactccacaacacaacagtcttggactctacaaaacattcattgtcactaattgactttctaaacgataagatgaaagagaaataacagccgggtgcagtggctcacacctgtaat

SEQ ID NO: 960514 - DNA, 120 bp, Artificial Sequence
  ENSG00000286316_0 (sequence is synthesized)
atagtaaaaattaccaaattgtgcatttttaaagggtgaatatgtacatgaattatacatctcaatacaactctcattaaaaaaataaagatgacaactttgttccactctattacgtaa

SEQ ID NO: 960515 - DNA, 120 bp, Artificial Sequence
  ENSG00000286316_1 (sequence is synthesized)
acagcttggaaatcatcactcccatcctcacaagaaaaaaagcagaacaactgaaaatcaactactcttagaagcactggaaaactgagttcacaggtcacaacacctccagaaaaactg

SEQ ID NO: 960516 - DNA, 120 bp, Artificial Sequence
  ENSG00000286316_2 (sequence is synthesized)
taaaagaaatcccaatactctggcctggacttttccgtggctcctgtcttctgcttcctgactaaaacctggtgcttcccctgtgtagcatgcagtgaccctccctgagacctgtgagta

SEQ ID NO: 960517 - DNA, 120 bp, Artificial Sequence
  ENSG00000286316_3 (sequence is synthesized)
taataaaattcttccttctaagccttattctcatatccccctgcagctacccagactttaccacaccgtatccaacacctacattcttagaatagccactattaatatacaaaataaatt

SEQ ID NO: 960518 - DNA, 120 bp, Artificial Sequence
  ENSG00000286317_0 (sequence is synthesized)
gagagaggatcttccttctcctaaagcctcctaaacctcacggcccacacccagtctctccgacgtgaagggacgctgtcctaggggcgccggggagcccagtgcagtcttcctgaggca

SEQ ID NO: 960519 - DNA, 120 bp, Artificial Sequence
  ENSG00000286317_1 (sequence is synthesized)
aatgtgccgcacaaggttttccccatctgggatcggggagcaactgaaggcctggctgctggaatgctcctgaaacacattaggctctcaacattgataatacttgaatcattgtgggtg

SEQ ID NO: 960520 - DNA, 120 bp, Artificial Sequence
  ENSG00000286317_2 (sequence is synthesized)
accttgggcttctggagctttaaggaacaaagttaagtgacacatcccgttacagaaaaaggtatattctgtatatcctatattctatataactatggactagtcaccctccttattctg

SEQ ID NO: 960521 - DNA, 120 bp, Artificial Sequence
  ENSG00000286317_3 (sequence is synthesized)
attagcattcaaaagcatcaccacaatacctctcatactcttttgacgcggcatagcactggatatatctgttctgtttcattgttggacctttagcaaacacttactgatttcctccaa

SEQ ID NO: 960522 - DNA, 120 bp, Artificial Sequence
  ENSG00000286317_4 (sequence is synthesized)
tgccacgttctgtgctttctgttcttgaagccacattcagtagaagatacaaacatggaacaaataaagatggtattatgttgttaagtgttaaattaaagaaataaacagagagcaaaa

SEQ ID NO: 960523 - DNA, 120 bp, Artificial Sequence
  ENSG00000286317_5 (sequence is synthesized)
aggaggaaggtacaaactctgcccagaagagggaagagaaagtagggaaggcttccctaaggaggaagcattgggaatggctccttgcttttagggaccctgtctgggactgtaaccaca

SEQ ID NO: 960524 - DNA, 120 bp, Artificial Sequence
  ENSG00000286317_6 (sequence is synthesized)
gcttcctgaatggtctccagctcccacacttcaagcaagaggataagtaaagttctaacagtgtgctgggggacagcccttaccaccaccacagcccgccagcccacccccgccaggcct

SEQ ID NO: 960525 - DNA, 120 bp, Artificial Sequence
  ENSG00000286317_7 (sequence is synthesized)
ggagctcttcagcaggagtggggaatagccattctgattaaaagtgacagccagacctctgcaagatgtcaacaaggaccctccaacaactagtaataaaggaacacattcatttactaa

SEQ ID NO: 960526 - DNA, 63 bp, Artificial Sequence
  ENSG00000286314_0 (sequence is synthesized)
agctggagtacagtgggcgatcttggctcactgcacccttcgcctcctgggttcaagcgattc

SEQ ID NO: 960527 - DNA, 79 bp, Artificial Sequence
  ENSG00000286314_1 (sequence is synthesized)
tagctgggactacaggcatgtgctactcaggctaatcttgaacttctgagttcaagtggtttgcccacctcggcctccc

SEQ ID NO: 960528 - DNA, 79 bp, Artificial Sequence
  ENSG00000286314_2 (sequence is synthesized)
cattcttatcagatttaaccttcagtgagatttctctcgttcactctgtctgaagttgctcttcctctgattcctctcc

SEQ ID NO: 960529 - DNA, 120 bp, Artificial Sequence
  ENSG00000286314_3 (sequence is synthesized)
ttcactctgtctgaagttgctcttcctctgattcctctccccttaatgtgtttttagttcatggcacataacacaatctgaattttccttatcatttactattgttttttccttcttgga

SEQ ID NO: 960530 - DNA, 120 bp, Artificial Sequence
  ENSG00000286314_4 (sequence is synthesized)
atgtaagctcattaagcccagacatcttgtatatatttagtcatgcctgtatcctcttgataaatccatgggatcaaatagtgtcccttgaagcatcatcacatgcaaataaaatgacgg

SEQ ID NO: 960531 - DNA, 83 bp, Artificial Sequence
  ENSG00000286314_5 (sequence is synthesized)
ttccggttgtgttgttgcccctgaagaccttccagtcagacaagatatggaggtggaagacggatagtaatgatcctgaccct

SEQ ID NO: 960532 - DNA, 120 bp, Artificial Sequence
  ENSG00000286314_6 (sequence is synthesized)
gatatggaggtggaagacggatagtaatgatcctgaccctgtataggcctaggctaatgtgtgtgtttgtgttttcatttttaaccaaaaagtttaaaaagttaaaaaaaaatttctttt

SEQ ID NO: 960533 - DNA, 120 bp, Artificial Sequence
  ENSG00000286314_7 (sequence is synthesized)
aaaaaaaatttcttttaaataggaagaaaaaagcatataaaataaggatataggagctgggcctggtagtgtatgcctggtagtcccaactacttaggaggctgaggtgggaggatccct

SEQ ID NO: 960534 - DNA, 120 bp, Artificial Sequence
  ENSG00000286314_8 (sequence is synthesized)
agtccagcctgggtaacatagagagatcccatctctaagaaaaagaaaaaatattctggttagctgtacagtgtgtttgtgttttacaccatgttattacaaaagttaagatttttttaa

SEQ ID NO: 960535 - DNA, 120 bp, Artificial Sequence
  ENSG00000286314_9 (sequence is synthesized)
aaagaaaaagtttataacgttataataagctaaggtttattattaaagaaaaaaaattttaaataaatttacatagcctaagtgtttataaagtctgcagtagtgtacagtagtgtccta

SEQ ID NO: 960536 - DNA, 120 bp, Artificial Sequence
  ENSG00000286314_10 (sequence is synthesized)
gaccttcacattcactcactactcactcactgacccacagcaatttccagccctgcaagctctatttataataggtgtactagttttttttttatctttcataccatatttttgctgcac

SEQ ID NO: 960537 - DNA, 120 bp, Artificial Sequence
  ENSG00000286314_11 (sequence is synthesized)
tgtttctatgtttagatatgtttaaatacacaaatacttatcattgtgtcacagatgcctgctgtattcagtacatcagcatgcggtacgtgttcttagtctagtggcagtaggctacac

SEQ ID NO: 960538 - DNA, 120 bp, Artificial Sequence
  ENSG00000286314_12 (sequence is synthesized)
ctaggtttctgtaagtagactctgtgatgtttgtacaatgatgaaattgccaaacagtgcatttcttagaacacatcctgtcaagcaatgcacgattgtttcttccaacaaagatgcctt

SEQ ID NO: 960539 - DNA, 120 bp, Artificial Sequence
  ENSG00000286314_13 (sequence is synthesized)
tggttaatcagaccttataccaattatttattgtgaaataaaccatctgaaacttagtgatattataaaccaagaagagtcatcagtattacctatcatgggtctggggctcatcttggc

SEQ ID NO: 960540 - DNA, 120 bp, Artificial Sequence
  ENSG00000286314_14 (sequence is synthesized)
ttagctagttggttcttgctcaaattcttacgtggttgcagttagatggttgccagggccatgagccagagcacctgcgtgtgacttctcggtaagacttgagtttccttacagcaagtg

SEQ ID NO: 960541 - DNA, 120 bp, Artificial Sequence
  ENSG00000286314_15 (sequence is synthesized)
gctggtttcagagggcaagtggatgaaaggaaaagggcaaaagcctaagtggcaactgtattagcctttttatcctagccttggacgtcatgtagcatcacttctgttatattttgtttt

SEQ ID NO: 960542 - DNA, 120 bp, Artificial Sequence
  ENSG00000286314_16 (sequence is synthesized)
taagaagcgtgtcaccaagaccagctcttattccaatgacggggaagaggatttcacctcttgaggggagaagtgtaaaagaatttgtggaaaatgttatacctaccacaacctcattct

SEQ ID NO: 960543 - DNA, 120 bp, Artificial Sequence
  ENSG00000286314_17 (sequence is synthesized)
acaaaatagtggcatcttgttggttagggattaagttctaaagtcagtgtaagtagaaggtatcatgatggggagaccattatacattctctgtccggcacggtgaggattttctatagg

SEQ ID NO: 960544 - DNA, 120 bp, Artificial Sequence
  ENSG00000286314_18 (sequence is synthesized)
ttcaagaaaaagtcactgtttcttcaactgaatatcaaataagatatatttggcttgtgttcagtgcctttcttgtgtggaaaatatatttaagtactagagtagcattcagcaaggtgc

SEQ ID NO: 960545 - DNA, 120 bp, Artificial Sequence
  ENSG00000286314_19 (sequence is synthesized)
aattaccagactttgagaggctctgtggaaaagaaaattgacatcactatcaaactagttacaagacctacatttattgagtaaagaaggaaggtaggcagaattacttgcattattact

SEQ ID NO: 960546 - DNA, 87 bp, Artificial Sequence
  ENSG00000286314_20 (sequence is synthesized)
gtagctgggactacaagcgcctgccactatgccctccctgtgttggtcaggctggtctcaaaactccagacctcaggtgatccacct

SEQ ID NO: 960547 - DNA, 79 bp, Artificial Sequence
  ENSG00000286314_21 (sequence is synthesized)
gcttttatttttaaatttggagaaattatgtagctcaattcataaataagtagatgaacgaagcaactactttgttttc

SEQ ID NO: 960548 - DNA, 120 bp, Artificial Sequence
  ENSG00000286314_22 (sequence is synthesized)
tcataaataagtagatgaacgaagcaactactttgttttcccaaatctttgtttcaaataagaagggaaatatcgtgattgagaggtctcttcccttcttttagtaaaaataatgcaata

SEQ ID NO: 960549 - DNA, 120 bp, Artificial Sequence
  ENSG00000286314_23 (sequence is synthesized)
ccgcgtttaagggcatataagtgaatgagagttagtattgaccttatgctactgtgatatatgtcaattaaaaaaatgctaatgtgtcaatttcgggaggataaagcaaaaagaaaaaaa

SEQ ID NO: 960550 - DNA, 120 bp, Artificial Sequence
  ENSG00000286315_0 (sequence is synthesized)
ggcgcttccgaagctgagccgaggacgccgtgttccgccggtccggagcgccgctactccgcgacctgagcctggctcagcagctctgccaggcgtgcttccgcgcagggtggccggacg

SEQ ID NO: 960551 - DNA, 120 bp, Artificial Sequence
  ENSG00000286315_1 (sequence is synthesized)
ttctggggaagttgccccgggcccagcacaacgcctgcgggggaggggtgatgactcactctctcctgaaagaagaccacactgccccggagacacaggaggccttctgacctggcccgg

SEQ ID NO: 960552 - DNA, 120 bp, Artificial Sequence
  ENSG00000286315_2 (sequence is synthesized)
ttgcccttcctggagatgcccctccttccccagaaggcaggctcagctcatggatggtgcagtcagtaaggggaactcagtgctgcccaggtcccagtccactgtggacacctgcatgat

SEQ ID NO: 960553 - DNA, 120 bp, Artificial Sequence
  ENSG00000286315_3 (sequence is synthesized)
ctgacacttccccatgaggacttttgagaagccagatgacttgtttgaattatccagttcagctcctgagcctcctctgcaagatcctaccaagcaaacttggggtgtttcccctgctcc

SEQ ID NO: 960554 - DNA, 120 bp, Artificial Sequence
  ENSG00000286315_4 (sequence is synthesized)
cctatttctggtattaacaccttccccagaacaccagactattcctgttatgacgagtaaagacctcttagtattgtaacttaagggggtcacaccatggcaacattctatttttttcct

SEQ ID NO: 960555 - DNA, 120 bp, Artificial Sequence
  ENSG00000286315_5 (sequence is synthesized)
ttttgtgtactagctagaattactctatttatttacttcaggcatttacttgttgtaattatctgattttgtgtccctgaaatagtttttgcagaaaaatcaggataaattattgattct

SEQ ID NO: 960556 - DNA, 120 bp, Artificial Sequence
  ENSG00000286315_6 (sequence is synthesized)
gccccttttattttttatagtttttagaaggggtttattttttataatccaaatgtgcccaagtaaggtttgtttgttgagaagtgcctttccaaacccctcaatttttattttatttat

SEQ ID NO: 960557 - DNA, 88 bp, Artificial Sequence
  ENSG00000286315_7 (sequence is synthesized)
ttccaaacccctcaatttttattttatttatatttatttatttatttatttattcattggagtgcagtggcaccttgtattagtccgt

SEQ ID NO: 960558 - DNA, 120 bp, Artificial Sequence
  ENSG00000286315_8 (sequence is synthesized)
agaagaggtttagtggacttgcagttccacatgactggggaggccttacaatcgtggtggagggcaaggaagagcaagtcaggtcttacacggatggcggcaggaaaagagagagaactt

SEQ ID NO: 960559 - DNA, 120 bp, Artificial Sequence
  ENSG00000286315_9 (sequence is synthesized)
tcctctttataaaaccatcagatctcatgtgagacttattcactatcatgagaccagcacgagaaagacctgcccctgtgattcacagggacccactgggtccctcccatgacacatgga

SEQ ID NO: 960560 - DNA, 84 bp, Artificial Sequence
  ENSG00000286315_10 (sequence is synthesized)
cacatggggaaacacagccaaaccctatcaagccatctcggctctctgcaacctccacttcccaggctcaagtgattctcctgc

SEQ ID NO: 960561 - DNA, 120 bp, Artificial Sequence
  ENSG00000286315_11 (sequence is synthesized)
tgcctcagcctcccgaagtgttgggattgcaggagtgagccactgtgcctggccctcaatttttaacatgtatgtttccattcattgctgagctgtttaaccttatataatgttaaagaa

SEQ ID NO: 960562 - DNA, 120 bp, Artificial Sequence
  ENSG00000286315_12 (sequence is synthesized)
atataatgttaaagaaaacagatggcagctaggtaacaagagccctgtcaatgggcatccccttctcctatgttccgtttctgggaatcaacttaaagagaccattaaaaaccagatttg

SEQ ID NO: 960563 - DNA, 120 bp, Artificial Sequence
  ENSG00000286315_13 (sequence is synthesized)
cacaaaatcaaacaaacatattggttgaagcatttaaaagaatgaaagtttggaaataatctcattattcaatagttattcagtagttgcttaataaaatgtggcatatccatttgatgg

SEQ ID NO: 960564 - DNA, 120 bp, Artificial Sequence
  ENSG00000227508_0 (sequence is synthesized)
gcaatgggaaggcagccctttcccctccatcactccggggagctcacgtgcggacggggtcctctgtagcatctttaaattggaggtacctcactccggattctattaaaatcgtaatct

SEQ ID NO: 960565 - DNA, 120 bp, Artificial Sequence
  ENSG00000227508_1 (sequence is synthesized)
cccctgccacctccccagccctcctcagtggcaaagtgatttagctcagttgggcttctccaaaatggaaatagtcacttgtttgagcaaataaatgtaatgaaagttgttccggaaaaa

SEQ ID NO: 960566 - DNA, 120 bp, Artificial Sequence
  ENSG00000227508_2 (sequence is synthesized)
aggccagatccacgatcaggtgcatggcaggggcttgtccgcaggaccggaaccttggtacctcactccggattctattaaaatcgtaatctctagaagatggattcagcaaatgccagg

SEQ ID NO: 960567 - DNA, 120 bp, Artificial Sequence
  ENSG00000227508_3 (sequence is synthesized)
agggaagaacctggctgagacgcacctgcaactgtttggagctggtgaccttgggcccagcacaccctcgctgctggtggacacagcccctcacaagcagctgcgaggccctcgggcagt

SEQ ID NO: 960568 - DNA, 120 bp, Artificial Sequence
  ENSG00000227508_4 (sequence is synthesized)
ggcatgggcgccgtcgcttcctgctaaccccacatcctcatttcccacgcttctccttccaccttccatgatcactgggacctactgcctcaggaaccgcctcagagggacagagggaag

SEQ ID NO: 960569 - DNA, 120 bp, Artificial Sequence
  ENSG00000227508_5 (sequence is synthesized)
cagaccacccttttcttcagagagttcatggcccagggagggaacgctggctggggacgatcacaaagcctctctggtgcccggccagcgacagggaccctcggggctgcggggggagag

SEQ ID NO: 960570 - DNA, 120 bp, Artificial Sequence
  ENSG00000227508_6 (sequence is synthesized)
gacgcccctgccctggccgcacagggttgggttagaggtgagctggggccggagaagccacgggagccatgtggcgccttctcaggaggtgctcccgcagcttcgcctcctctcgtcttc

SEQ ID NO: 960571 - DNA, 120 bp, Artificial Sequence
  ENSG00000227508_7 (sequence is synthesized)
cgtgcgcagggagggaccagcccagtgacagctgggagcaaaactggtcacctcccctcgggctctgggcaactgtcaacctgcagctttgagtctctccccctggaatcttctatctgg

SEQ ID NO: 960572 - DNA, 120 bp, Artificial Sequence
  ENSG00000227508_8 (sequence is synthesized)
ggtatgataatgttattacatacgttggttatttacagcacaacatgaaaaggcaatttgtaaggactggtccgtctaatcggggcgaatcaccagtcttctgaggcatcgtattgagtt

SEQ ID NO: 960573 - DNA, 120 bp, Artificial Sequence
  ENSG00000227508_9 (sequence is synthesized)
tagtttccgactgattgctaaatgccttcacgctgcgtggatattgcccagctctgcctcccttgctgcaggtgccctgtggatgctgagcttccacggaggggctgctgccccctctgc

SEQ ID NO: 960574 - DNA, 120 bp, Artificial Sequence
  ENSG00000227508_10 (sequence is synthesized)
ccccacagctcagctcgagttcaccagtggggaaggccgagggcctgtggaacgagggctccgttcccccaccgcaaggagtgaacggcaccgaggttcccgccgccgagccgcagcgct

SEQ ID NO: 960575 - DNA, 120 bp, Artificial Sequence
  ENSG00000227508_11 (sequence is synthesized)
gtgcaagcccccgatgggcgacggacaccaggccccagcccaacgcgcttcctttggctcctcctgaactggggggggggcctcgcacccgccttgccagggccctggcatctgtctcac

SEQ ID NO: 960576 - DNA, 120 bp, Artificial Sequence
  ENSG00000227508_12 (sequence is synthesized)
tggcctttctcacctggtattccagtgaggagggtgcttcagttttactccctttgagaggcaagatcttctcaacccacaagaagaggcgaccaggtcctgggtgactgtcgaataagc

SEQ ID NO: 960577 - DNA, 120 bp, Artificial Sequence
  ENSG00000227508_13 (sequence is synthesized)
ctggtccaactgggaacaagtcttctgggccctaatttcccacatggtgttcttgtctgacaaaatcacagccttccacgttcaagaatcttcattcatctctctctttcagcgaatgtt

SEQ ID NO: 960578 - DNA, 120 bp, Artificial Sequence
  ENSG00000227508_14 (sequence is synthesized)
ccctaagctctcccatcactgagcactgctgccaacagcccagctgcatgctaccactttggtttgatggagagaagggctcagaacctcgtgcaagtgggaggcaagcacaagtacaaa

SEQ ID NO: 960579 - DNA, 120 bp, Artificial Sequence
  ENSG00000227508_15 (sequence is synthesized)
ggcatcttccggagccaaggtgggggcgcagagggcctgtctcagtgagatcccactgtcttccagggtttgccaccgcagcagtaagccctggagtggccccacaccctaagatccacg

SEQ ID NO: 960580 - DNA, 120 bp, Artificial Sequence
  ENSG00000227508_16 (sequence is synthesized)
gggtttgtaacattgttctcttaaataagcagaggatgcagaattaggagcaagcattccgaggggtggccagctgtggcttccgaggggcacctgacctcccatctgccttctgagcac

SEQ ID NO: 960581 - DNA, 120 bp, Artificial Sequence
  ENSG00000227508_17 (sequence is synthesized)
cagctgccccaggtgaggtgtgtggagttccacagctacgatgagccgtcgccatggagaacagcagctcacgattgctttgatttaaattgaattaaggtgaaaatgaatcagggcata

SEQ ID NO: 960582 - DNA, 120 bp, Artificial Sequence
  ENSG00000227508_18 (sequence is synthesized)
actctcttctttcagccagacgtctttctgaaccggtgtatatatgacttaaaaaagtcacgagggttttgggcccagggatcaggcaggaaggaaaggcagtgccgtgcaaggaggggt

SEQ ID NO: 960583 - DNA, 120 bp, Artificial Sequence
  ENSG00000227508_19 (sequence is synthesized)
gggttagaaattgtatccagaaccgctgtggcttgtactgaaggaagaaacttcgtagttctgcttctatttctaccacaacaccaaggaaggtgtgtggggtggggagcaggtacacac

SEQ ID NO: 960584 - DNA, 120 bp, Artificial Sequence
  ENSG00000227508_20 (sequence is synthesized)
aggtccttggtattaccagtggtccaggattgtataattccgcttattctacccatcccacagcctgaccctgactcaagtcctgcagccccttggtgccctgagccccctcccctgcct

SEQ ID NO: 960585 - DNA, 120 bp, Artificial Sequence
  ENSG00000227508_21 (sequence is synthesized)
gttcctaagcaatcaatcaccctaagaccccgttctaggtttcagcagatgatgacgagttaatcagacaaataagccatggggtaggcaggggttgtgggtgctgcttcctggtccctc

SEQ ID NO: 960586 - DNA, 120 bp, Artificial Sequence
  ENSG00000227508_22 (sequence is synthesized)
tggcaaaccagaagggagctgcctccctgcggtccccaccctgtctccaagcttcccagcagagccccacatccagcaactgggcccagctttaaccagacggaggagcagcctgacgtc

SEQ ID NO: 960587 - DNA, 120 bp, Artificial Sequence
  ENSG00000227508_23 (sequence is synthesized)
ctgccagccccagagacagatgtgggcacaggaagggaaggcagggaggagaggaagccaataaaaagtgttagcatccgtcagggtgaccctttgcagaacctgcgtcagcctgaggac

SEQ ID NO: 960588 - DNA, 120 bp, Artificial Sequence
  ENSG00000227508_24 (sequence is synthesized)
gcagggaaaggctgcgcgggagaagccgctgttagcatctgccagggtgaccctttacagaaactgcgtcagcctgaggacgcagggacaggctgtgcggagaagccgctgttagcatcc

SEQ ID NO: 960589 - DNA, 120 bp, Artificial Sequence
  ENSG00000227508_25 (sequence is synthesized)
gtcagggtgaccctttacagaaactgcgtcagcctgaggacgcagggacaggctgtgcggagaagccgctggcctttgccgcttgaaagctgggtccctgcggcctcctcaccccagggc

SEQ ID NO: 960590 - DNA, 120 bp, Artificial Sequence
  ENSG00000227508_26 (sequence is synthesized)
tccctcagagaaattctcatagaacccctaagcaatacgcggggaaagaacggatgccacccggaagcatgccgaggaagagtccattcatgggaacttccagagccggtcacagaggcc

SEQ ID NO: 960591 - DNA, 120 bp, Artificial Sequence
  ENSG00000227508_27 (sequence is synthesized)
agatccacgatcaggtgcatggcaggggcttgtccgcaggaccggaaccttgtggaagatactacattcaacacagacgtactgtgtgcctcctgcgtgtgaggcctggtgctcatggcg

SEQ ID NO: 960592 - DNA, 120 bp, Artificial Sequence
  ENSG00000227508_28 (sequence is synthesized)
cgtgtccttgcatgcaaaattctactcttcatcttgacgtttctagacattcagctgttcctcaggaaacgatttaccttccctctgccttttctgtaaaatgcatggactgaggaatta

SEQ ID NO: 960593 - DNA, 120 bp, Artificial Sequence
  ENSG00000227508_29 (sequence is synthesized)
ctaatgcataacactttgtttgctggataccaagtagacgcactcttaccatatacagggctgtatctaggcagccagttattagaataaaaacagaatactatgttcatccgctcagat

SEQ ID NO: 960594 - DNA, 120 bp, Artificial Sequence
  ENSG00000227509_0 (sequence is synthesized)
cagaaagaaggaacagaaggagctcttgcttgagtaaggcactggtcatgcctcaattagaacccatcaactcatcctttggaccacccaaacctgtcagaagagtgtctccgtctccat

SEQ ID NO: 960595 - DNA, 120 bp, Artificial Sequence
  ENSG00000227509_1 (sequence is synthesized)
ttttgactttccagagaggtctgaagccacctccacacagtgaggtggcagacttgtggacaggtcctgaagccataccaggagctgaccagccccagaaaatgaggacatggctgcagg

SEQ ID NO: 960596 - DNA, 120 bp, Artificial Sequence
  ENSG00000227509_2 (sequence is synthesized)
gatagaaagccaaactgtgggtcaaggggacttcagcctgtccatctgggggcacgcttaaaggtctatgatggggccaaaaagaaaggtgcaggctaaggacagaaggacagctcagcc

SEQ ID NO: 960597 - DNA, 120 bp, Artificial Sequence
  ENSG00000227509_3 (sequence is synthesized)
ccccatcctgcagcccaccccagccctgagcctctggaactctatcactgcatcctggggcacctgccccccaagcccccaccccaggaagagtatctatgctgtcagaggctgcagacg

SEQ ID NO: 960598 - DNA, 120 bp, Artificial Sequence
  ENSG00000227509_4 (sequence is synthesized)
gtgccagcagaaggtggagaggaagcttggggcctttggtgggtgggacgcatcaacacacacagccgcagcagctgcacatagatcaacaggccatccgtgcctcgaacacctacatca

SEQ ID NO: 960599 - DNA, 120 bp, Artificial Sequence
  ENSG00000227509_5 (sequence is synthesized)
acggccaaggccttggccaccctgcccagctccgtgcaccgctagttgccttggtggatcacagccgctccacgctccacaggaagaatcccaaacccggtgaccggctgccccagcatt

SEQ ID NO: 960600 - DNA, 120 bp, Artificial Sequence
  ENSG00000227502_0 (sequence is synthesized)
agccagctgccgagtgagaagtctgactatccggagatggcggtgagtatagagaatttctgctaggtctcctgtgtttcagccatcccagcccaggcaccacgacacattatcaaagga

SEQ ID NO: 960601 - DNA, 120 bp, Artificial Sequence
  ENSG00000227502_1 (sequence is synthesized)
ctatcttggaccttctcatcccagcaaacatccaatggagaagaatgaagactccaggcatatgatcccactctagccatcccaggagcccccagctatccaaacaactacagctgtggc

SEQ ID NO: 960602 - DNA, 120 bp, Artificial Sequence
  ENSG00000227502_2 (sequence is synthesized)
caaaaacatcgtgtatcagggacaaactctctgcttatggctgctctaatccttgacctacagaatcatgaaatttgtggatacggtcatgatcttgattttggcgatggtttcacagta

SEQ ID NO: 960603 - DNA, 120 bp, Artificial Sequence
  ENSG00000227502_3 (sequence is synthesized)
actcatgctttcaaaatatcaggaagcaaatgagaaaaggaaaaaaagacattcattgtatatgctgtgaagtaatcctgccaaaggacactttgggctccgcagtgagtatattttttc

SEQ ID NO: 960604 - DNA, 120 bp, Artificial Sequence
  ENSG00000227502_4 (sequence is synthesized)
cttaaaaattgccaatttcttgatctatattctatgataaaagttttaatattttgctaagttaattagtattgcctattgaccaacatgttctatttagtgtactgcttcaccaagtgc

SEQ ID NO: 960605 - DNA, 120 bp, Artificial Sequence
  ENSG00000227502_5 (sequence is synthesized)
caacatatacgtctccagtgactgctgatggctgagtctccttatgttagtaaatttctaaacatttttcttagtacatggagtaacgtgttatgttgatcaatgtttgatgacacttaa

SEQ ID NO: 960606 - DNA, 120 bp, Artificial Sequence
  ENSG00000227502_6 (sequence is synthesized)
atgtaactacaatgcagtaattcgaaggtaagaaaaagttgccatgactctcatttctttgaaattgtgtacaatgaaaggcttctcagcatgataccccaactaaaatttaggcgtatg

SEQ ID NO: 960607 - DNA, 120 bp, Artificial Sequence
  ENSG00000227502_7 (sequence is synthesized)
acagcacttataagtaaatccattttatttgagtaaatattgagtttcatttaccttttagcaaattccgaagtagcatctccataaatttaaactgattttacttattgagtcctatta

SEQ ID NO: 960608 - DNA, 120 bp, Artificial Sequence
  ENSG00000227502_8 (sequence is synthesized)
ctaactttaaaagacaatctactttggatcattttgagcatcacatattgcttacgtaaaataagtttaaatctgagtcaataatgatactaagcaaacaaataaaatcattggtcactg

SEQ ID NO: 960609 - DNA, 120 bp, Artificial Sequence
  ENSG00000227502_9 (sequence is synthesized)
actgtattaagtctgttttcatgctgttgataaagacatacccatgactgggcaatttacaaaagaaatgtttaattggacttacagttccacgtgtggctggggaagcctcacaatcat

SEQ ID NO: 960610 - DNA, 120 bp, Artificial Sequence
  ENSG00000227502_10 (sequence is synthesized)
gaaggcgaaaggcacatctcacatgatagcagacaagggaaaagagcttgtgctggggaactccttttttaaaaccatcagatctcgtgacacttatctactatcagcacgggaaagacc

SEQ ID NO: 960611 - DNA, 120 bp, Artificial Sequence
  ENSG00000227502_11 (sequence is synthesized)
agaattaactaactattctgaaaatcagtaattaaagggaaagaagcaaacattttttctgtctttccataaaaaattgtactttgaacaaccaaatgggtgataatgaaagaaagttcc

SEQ ID NO: 960612 - DNA, 65 bp, Artificial Sequence
  ENSG00000227502_12 (sequence is synthesized)
actttgaacaaccaaatgggtgataatgaaagaaagttcctctttataaaagtaactgatgggca

SEQ ID NO: 960613 - DNA, 120 bp, Artificial Sequence
  ENSG00000227502_13 (sequence is synthesized)
atatctagaccctgtctttaaaaagaaagaaaaaatttaaaacagtaactgagcatcagctattgtgggcacactgcctatgggtagccctgctccacaaggagcagttaaaaaaaaaag

SEQ ID NO: 960614 - DNA, 120 bp, Artificial Sequence
  ENSG00000227502_14 (sequence is synthesized)
taactcagtagataaatgagaaaggaatgataattacaataacaagatgtggcaatcctgatttaattaatgaatctaagcaaaaagcaatggctttgaatagaacacagaaaagaaaca

SEQ ID NO: 960615 - DNA, 120 bp, Artificial Sequence
  ENSG00000227502_15 (sequence is synthesized)
actaaatattatgtgcctcctggttgaaatatacacaattatctatgatttcatcttttgaacctgaatctgatcaagcctctagatctattcatcaatttatataaaacacaagagaca

SEQ ID NO: 960616 - DNA, 120 bp, Artificial Sequence
  ENSG00000227502_16 (sequence is synthesized)
cagaaaagacaaaggaatgtactaaactacagcatgaggtacaatcaagcaaaattcataccatggaaactatagaacaaacaatttagtttcttgcagaaataaattgcaagggaaaaa

SEQ ID NO: 960617 - DNA, 120 bp, Artificial Sequence
  ENSG00000227502_17 (sequence is synthesized)
taaagacatggttaaagacacttcggagatatgcttaccagatgcaatttatggatgtgtattagcgttctccagagaaacagaaccaagaggatatatatgggtatataagagggaatt

SEQ ID NO: 960618 - DNA, 120 bp, Artificial Sequence
  ENSG00000227502_18 (sequence is synthesized)
tgttatggaagccagctcacatgattatggagggtgagaagttccacaacatcccatctgcaagctgtacaaccaaggaagccaatgttgtaattcagtctgagtccgaaggccagagaa

SEQ ID NO: 960619 - DNA, 120 bp, Artificial Sequence
  ENSG00000227502_19 (sequence is synthesized)
actggggccattggtgtaatcttggagtctgaaagctcaatgaagtcaggagaagatggatgtcccagccccaagagggagagaatttgcccttctctttttattctattggaaccctta

SEQ ID NO: 960620 - DNA, 120 bp, Artificial Sequence
  ENSG00000227502_20 (sequence is synthesized)
acagattggatgatgcctgtccatattgatgagggtggttcttctgtactcagtttactgcttcaaatgctagtctcttctgaaaattctctcacagacccacccagaaatgttttacca

SEQ ID NO: 960621 - DNA, 120 bp, Artificial Sequence
  ENSG00000227502_21 (sequence is synthesized)
gctatctggctatcccttaacccagtcaagttgacacataaaattaaccatcacagaatgttatttggattcagattttaatcaacaaagtgtgaaaaagtaataagattattggagaaa

SEQ ID NO: 960622 - DNA, 120 bp, Artificial Sequence
  ENSG00000254254_0 (sequence is synthesized)
atgcaatagttggttatttataaaagtatggcacctcttccctctctctctcttgctcttcttgccatgtgacacctcgcccttcaccttctgccatgagtaaaacttcctggggcctta

SEQ ID NO: 960623 - DNA, 120 bp, Artificial Sequence
  ENSG00000254254_1 (sequence is synthesized)
ccagaaatcaagcagatactggcactatgcttgtagagcccgcaaaacttcatctttgcctaacccaaactgataaacaggccgtaggggaggtgtcagtgttcccggaacaacgattat

SEQ ID NO: 960624 - DNA, 120 bp, Artificial Sequence
  ENSG00000254254_2 (sequence is synthesized)
ttggcttgaggctttcaggaagctgaactgacacgaaacaaaagaagtccgttgttttggattgagttccatacttggctggcccagaggttgatctcaccaccattcagatatccaaga

SEQ ID NO: 960625 - DNA, 120 bp, Artificial Sequence
  ENSG00000254254_3 (sequence is synthesized)
agaagccacctgttggatttaagaaaacccagtaagatgttgctactacggttttttttgtatgtgtgtctctgcaggtagaaacctaattagccaataaaatgtacttttgcatgagaa

SEQ ID NO: 960626 - DNA, 120 bp, Artificial Sequence
  ENSG00000254254_4 (sequence is synthesized)
aacactcaccaggaagttgatgtcggccgggcgcactaggcggtagctgcacgtcgcgcaatcctggctgcattcggcccgcacggtcgccaggagcccggggccgagcaacagcagcca

SEQ ID NO: 960627 - DNA, 120 bp, Artificial Sequence
  ENSG00000254254_5 (sequence is synthesized)
agtgcaaagtgtcaggaaccgcgccatggactgcgaggagagagggacgcgtgcttcgagcctgcctgggcgcagaacggggtccctcggcaggaccctcgccgcgacagcctcagcagg

SEQ ID NO: 960628 - DNA, 120 bp, Artificial Sequence
  ENSG00000254254_6 (sequence is synthesized)
ggatcgtcgagcaaaagcccgcaggaatgctcctttctggggccccgccctcccggccgacagcttttaggtagacgtggaggcgactcagatcgcctcgcggttcccgggatggcgcgg

SEQ ID NO: 960629 - DNA, 120 bp, Artificial Sequence
  ENSG00000254254_7 (sequence is synthesized)
tcgcccccaacgcgaggctgcctggggcacccggctcttttcctgggcgtccgcggcccagggcaagattccggagagaacgccgcagaccaggggcgagagagcgggagccgggggagg

SEQ ID NO: 960630 - DNA, 120 bp, Artificial Sequence
  ENSG00000254254_8 (sequence is synthesized)
caggacattgactggggtcacaaagaagaaccagggaacgctgttggggaacccatgcaatgaaatgtgaagggaaagagggcgggcagacgtccccaaacccgctcagcaaagacaagc

SEQ ID NO: 960631 - DNA, 120 bp, Artificial Sequence
  ENSG00000254254_9 (sequence is synthesized)
tggaatccatttcgtggagacaagctacttttagtcaaaaattgtaaggcacggtttgtcaagatggccgatacacaacagctccagtctacgcatcccagcatgagcgatgcagaagac

SEQ ID NO: 960632 - DNA, 74 bp, Artificial Sequence
  ENSG00000254254_10 (sequence is synthesized)
actgaggtaccgggttcatctcactgaagcttgtcggacagtgggctcaggacagtgggtgaagcccactgagc

SEQ ID NO: 960633 - DNA, 120 bp, Artificial Sequence
  ENSG00000254254_11 (sequence is synthesized)
cctcacccaggaagtgcaagggatcagagaattccctttcctagccaaggaaagctgtgacagatggcacctggaaaattaggtcactcccaccttaatattgcgcttttccagtggtct

SEQ ID NO: 960634 - DNA, 120 bp, Artificial Sequence
  ENSG00000254254_12 (sequence is synthesized)
gtcttagcaaacaacacaccaggagtttatatcccgcgcctggcccagagggtcccacacccacagagtctagctcattgctagcagagcagcctgagatcgaactgcaaggcagcagca

SEQ ID NO: 960635 - DNA, 61 bp, Artificial Sequence
  ENSG00000254254_13 (sequence is synthesized)
cctgcctctgtagactccacctctgcagccagggcaggaagagagtagtggttctcccagc

SEQ ID NO: 960636 - DNA, 120 bp, Artificial Sequence
  ENSG00000254254_14 (sequence is synthesized)
agtgggtccctgacccccaagtagcctagctgggaggcattccccagtaggggcagaatgacacctcacatggccgggtacccctctgagacgaagcttccaggggaaagatcaggcagc

SEQ ID NO: 960637 - DNA, 71 bp, Artificial Sequence
  ENSG00000254254_15 (sequence is synthesized)
ctcacatggccgggtacccctctgagacgaagcttccaggggaattctgctgctgatacctaggcaaacag

SEQ ID NO: 960638 - DNA, 72 bp, Artificial Sequence
  ENSG00000254254_16 (sequence is synthesized)
cacaaaatgataaaaccacaaaaatggggaaaaaacagagcagagaagctgaaaattctaaaaatcagagtg

SEQ ID NO: 960639 - DNA, 72 bp, Artificial Sequence
  ENSG00000254254_17 (sequence is synthesized)
cagatgcagctcctcgtcaacaatggaacaaagctggatggagagtgactttgatgagttgagagaagaagg

SEQ ID NO: 960640 - DNA, 88 bp, Artificial Sequence
  ENSG00000254254_18 (sequence is synthesized)
agacgatcaaacttctccgagctaaagaaggaagatcgaacccatcccaaagaagctaaaaaacttttccagtgtagagaagtcctta

SEQ ID NO: 960641 - DNA, 89 bp, Artificial Sequence
  ENSG00000254254_19 (sequence is synthesized)
agattagacaaatggctaactagaatatccagtgtagagaagtccttaaatgatctgtcgatgcatgcacaaacttcagtagccctgca

SEQ ID NO: 960642 - DNA, 86 bp, Artificial Sequence
  ENSG00000254254_20 (sequence is synthesized)
ataacaggctctgaaattgaggctataatttgagattcacagctgaattctaccagagttacaaggaggagctggtatcattcctt

SEQ ID NO: 960643 - DNA, 87 bp, Artificial Sequence
  ENSG00000254254_21 (sequence is synthesized)
gattgatgtttttatacatattagactgttttgatgagatggccttgccaagtaggtgtttgttttgtttattttcttccttctgtg

SEQ ID NO: 960644 - DNA, 120 bp, Artificial Sequence
  ENSG00000254254_22 (sequence is synthesized)
ccaagtaggtgtttgttttgtttattttcttccttctgtgtaaagatttttaattccttgaaccatcctctagttcctatggttttctcattgttctcttaggaaagtgaaaggtaatag

SEQ ID NO: 960645 - DNA, 120 bp, Artificial Sequence
  ENSG00000254254_23 (sequence is synthesized)
gaaatatgcactctttaccctttctttgttctcggggggcattgtgatgttaccttgagtcctgtattgagttttcagtgacaatgctatgaggcatgtgagtaagcatttaataatgac

SEQ ID NO: 960646 - DNA, 120 bp, Artificial Sequence
  ENSG00000254254_24 (sequence is synthesized)
caagaactaagtcagattcaaacccagcaatacagaattctcattttaatttcaagttatggatatttgtctttgatttttatggattttcccatttttaaacaaacaagttttcaatgc

SEQ ID NO: 960647 - DNA, 120 bp, Artificial Sequence
  ENSG00000254254_25 (sequence is synthesized)
ttatcttctcagtaagagatgggaaggcctatgaacattttagcaacccaaaagatgattcctcagttttttcctaaggggaatgttttatttataggtaatcaaaggaaatgtttgttt

SEQ ID NO: 960648 - DNA, 120 bp, Artificial Sequence
  ENSG00000254254_26 (sequence is synthesized)
ccacagggaagtatggataaaatataaaatctgtttttcagtatcaactagggttcactaggcagtatgttggtacagagatgtaaatgtgaaaaggaaaaatgtgaagaagaattattt

SEQ ID NO: 960649 - DNA, 120 bp, Artificial Sequence
  ENSG00000254254_27 (sequence is synthesized)
ttaaatataagttgccacttctgtaactcccccaccccaaaaaagagattagagttgtccaagatagctgtaaacttgagttcctattaatttgcatatatattcagggaatgagattaa

SEQ ID NO: 960650 - DNA, 120 bp, Artificial Sequence
  ENSG00000254254_28 (sequence is synthesized)
attaacaaaggaggagagaaagcaactctggacctggagcacaactgctgttgtgttgatgcagaaaatgactggctcacagactttctgcagaagctgccacaattctttgagttgtgt

SEQ ID NO: 960651 - DNA, 120 bp, Artificial Sequence
  ENSG00000254254_29 (sequence is synthesized)
taagaaaaaactctggagctcaagagagtctggctttgaatctaggcttcaccatttatggattatatgaatttaagcatattacttaacctctaggttcagttaccttgtctataaagt

SEQ ID NO: 960652 - DNA, 120 bp, Artificial Sequence
  ENSG00000254254_30 (sequence is synthesized)
gggcaccaacaaaataccttgaagttttaaaaaaaaatagaactaagtaagttaatatttgtgtaactcatgctgcagtttctgacaaaataaaaattcttaagtgtttacctttttata

SEQ ID NO: 960653 - DNA, 120 bp, Artificial Sequence
  ENSG00000254254_31 (sequence is synthesized)
ttactcaactaacaagtatttaccactaatatttgacatgtaattaaaattttcaaacatttaatttttttccttgtgttaagataaaattatagtgacattaataaaaagataacaggt

SEQ ID NO: 960654 - DNA, 120 bp, Artificial Sequence
  ENSG00000254254_32 (sequence is synthesized)
aaggattgtcctttggttaacttcggttaattttaagtggtgttagtgtgatatgactttagcattactcattattggttattctatgtatcagttaggggagagaaatcatccagaaat

SEQ ID NO: 960655 - DNA, 120 bp, Artificial Sequence
  ENSG00000254254_33 (sequence is synthesized)
ttgaacagggaaagatgaacataaagaattattaactgtaacaggagactggagtaaggagtgtttggctaataagaactagaggaatattggcatagcagctggaaggagctgccattc

SEQ ID NO: 960656 - DNA, 120 bp, Artificial Sequence
  ENSG00000254254_34 (sequence is synthesized)
cccgaggcactggcaggacttgctggaaatccaccctctggaactcactggagatattccttctaaggtgacaagggaagctgtttgtgggaatgtatttcccaggaggcactgagcctt

SEQ ID NO: 960657 - DNA, 120 bp, Artificial Sequence
  ENSG00000254254_35 (sequence is synthesized)
tgcacccagtgcccaagagagactgtaggaggcagctgctgggtgccaggcacccctggctgccttgccctgcaggagcctgggagtatgggggagctgtctgccctgcaggaacctgtc

SEQ ID NO: 960658 - DNA, 120 bp, Artificial Sequence
  ENSG00000254254_36 (sequence is synthesized)
tagaacaggaagcaaaacacttgtgcagtatctcaccagtggcctttactgacaaagcttaatatcataacatttagcaaagcgaaaatactttagtggctcagaaccattttcacagag

SEQ ID NO: 960659 - DNA, 120 bp, Artificial Sequence
  ENSG00000254254_37 (sequence is synthesized)
caagcaaaaagggtgaatttggagctgagcgtgagtaagtggctaactctgctagtaggagaaacacttttccaaatatttatgtgaaatatatatggtaagacttatgaaatgagagaa

SEQ ID NO: 960660 - DNA, 120 bp, Artificial Sequence
  ENSG00000254254_38 (sequence is synthesized)
tgtaaagatacaaagtacctgagagcttacccctggtcagttacagagagcctgaactgccttgtttttgtcttttagtacatttgtttttcttgtagtgaacttggaatgtaaagcttg

SEQ ID NO: 960661 - DNA, 120 bp, Artificial Sequence
  ENSG00000254254_39 (sequence is synthesized)
aattgacagaccctacaagaagcaacattatgaaatttgggtttatggttataaaaacattgttaaaaacattattcatcatgctacatagagttttccaatgagtactctgtgaagaat

SEQ ID NO: 960662 - DNA, 120 bp, Artificial Sequence
  ENSG00000254254_40 (sequence is synthesized)
tctgtctggttgcagttctgatgagcaatagatcttgtttctcttaagacatgaaacacagcagagcagtagctatcctgaagttggggtcattaaacactagtcaacactggatattga

SEQ ID NO: 960663 - DNA, 120 bp, Artificial Sequence
  ENSG00000254254_41 (sequence is synthesized)
tttgtgcaactgatgagattaggaggcagtttaaataagaaattaatcaaaggcggagattaaaaaaacaacaggaaacatgcatgagactaatacaaacattgataatgtaaatgtact

SEQ ID NO: 960664 - DNA, 120 bp, Artificial Sequence
  ENSG00000254254_42 (sequence is synthesized)
tcctagggtagaatataaatttttccctaaagtttctttccagcagctttatgaattaattggtatttgattgattgattgacaactccagttattaactaaattgaatcagctgggaaa

SEQ ID NO: 960665 - DNA, 120 bp, Artificial Sequence
  ENSG00000254254_43 (sequence is synthesized)
cattgcctggattacttcctcagaattatttctgcacagggactatatgattgaatgtaatcaaatagactcaagaaagaattaaattctttaaagtcacttaggcttttaattttttcc

SEQ ID NO: 960666 - DNA, 120 bp, Artificial Sequence
  ENSG00000254254_44 (sequence is synthesized)
ctccttttttgtttttgtctaataattgaatactcatttaaaaaatgtgttattgatatatctaaggaattaaatgtcattgaactaatgttacctgtaacgaggaagaaattgttattg

SEQ ID NO: 960667 - DNA, 120 bp, Artificial Sequence
  ENSG00000254254_45 (sequence is synthesized)
agattttcaatgacaatgtggggaaacagaatttgtctgaactttggtgattttgaatgaagtttatataataattaaagccagggcagatttggcagtcttcttgaaaggaagtaatgc

SEQ ID NO: 960668 - DNA, 120 bp, Artificial Sequence
  ENSG00000254254_46 (sequence is synthesized)
ttattgtggtcagaagaaagagtgaggcaactcagggtctgaaaaaagagacatgaagaaagctgaggaccaatccattccaaggttcactgtggaaatggggcccaacccttaaaaggt

SEQ ID NO: 960669 - DNA, 120 bp, Artificial Sequence
  ENSG00000254251_0 (sequence is synthesized)
tgcttgtggctcagtggccacaggctagagagatctggaaaccctcccagcagctgcccagctatattcatccagaggcgggtttttgtttctctctcttccctcactgctgctggcccc

SEQ ID NO: 960670 - DNA, 120 bp, Artificial Sequence
  ENSG00000254251_1 (sequence is synthesized)
tttctctctcttccctcactgctgctggccccaaccatattcttgattacttatgaaggacaggctttgaaatttgacatctgtatccatcaaggttggagtgcagtggcacgatctcag

SEQ ID NO: 960671 - DNA, 120 bp, Artificial Sequence
  ENSG00000254251_2 (sequence is synthesized)
gattcagatgaggggccggaaagcacgcctcccgagacccattcctggaagcgggtctttaaagctgctctcagtttaaaatcaaccaaatgctcagatatcagatgcggaaactgaggc

SEQ ID NO: 960672 - DNA, 120 bp, Artificial Sequence
  ENSG00000254251_3 (sequence is synthesized)
acagggaatttgaacaacttgctcaaggtcataaagctagaaggaggcacagccaagcatgggcttgtgtgacctcaaagcctatgttctcgccactgctctaaactgtttattctgttg

SEQ ID NO: 960673 - DNA, 120 bp, Artificial Sequence
  ENSG00000254251_4 (sequence is synthesized)
gcttgtcataatgattgaagacaatgtatataaatcacagagggtaggactcagcttgtaatatgtcctccatacattttatcgaacattattaattaataaacaacagataaataacaa

SEQ ID NO: 960674 - DNA, 120 bp, Artificial Sequence
  ENSG00000245385_0 (sequence is synthesized)
gagctgtcaagagaactttattcattggaaactgggccagagacccctcacgaagctgcaagcccctgggccctgggcccttctgtatttggaccctagtgaaatgtgcacagtctgccc

SEQ ID NO: 960675 - DNA, 120 bp, Artificial Sequence
  ENSG00000245385_1 (sequence is synthesized)
tctccatgccagggagagacagagaggaatgccatttttctgtgtgatgtgggagtgacaggggaaagagcagaaatccggttatccctcctgagactcccagtgagctggggtgccaca

SEQ ID NO: 960676 - DNA, 120 bp, Artificial Sequence
  ENSG00000245385_2 (sequence is synthesized)
aatgctgtcctagcgtgagtgcctgcgtggagcatggaggggtgggcaggcagggaaggaggcttcagaggtagacattgagggtctgcaggatgccccggcggcagagcgggcaattgc

SEQ ID NO: 960677 - DNA, 120 bp, Artificial Sequence
  ENSG00000245385_3 (sequence is synthesized)
ggtggtagacggggtggcgcatcaggatttcagtgcaggcctggcacaggcacagatgccggcagggcaggagcaacactgtcttgctctggtcctggcagatgacacacttcttccgct

SEQ ID NO: 960678 - DNA, 120 bp, Artificial Sequence
  ENSG00000257781_0 (sequence is synthesized)
tgttaagatctatcaaaatgtaccgagacagctctccttgctgaaatctgatgaacaaaaaggcaagcaacgtccaggaagactgtaaaagaatggatcaaattaagagcaagaacaaat

SEQ ID NO: 960679 - DNA, 120 bp, Artificial Sequence
  ENSG00000257781_1 (sequence is synthesized)
tgggattacaggcgtgagccactgcgttttgccagttctcttcctttattaaaactacatcagatggtctccatcaatgacacgaaaggctatgtgaggacacagcagcaagaagatgcc

SEQ ID NO: 960680 - DNA, 120 bp, Artificial Sequence
  ENSG00000257781_2 (sequence is synthesized)
aggacacagcagcaagaagatgccatgtgaaagctgagaaataaggcctcaccggaaagcagccctgctggcaccttaatcttggacttctgtcctccagaactgtgagaaaataaattt

SEQ ID NO: 960681 - DNA, 120 bp, Artificial Sequence
  ENSG00000257787_0 (sequence is synthesized)
agaattcagaagaataaaggccgacctgacccagaatagaaatatccatctaagcctgggatagaggaggatttcagaagcttgtacataaatagaagtggcaaacttaattcataatct

SEQ ID NO: 960682 - DNA, 120 bp, Artificial Sequence
  ENSG00000257787_1 (sequence is synthesized)
gactcccaaatttgcaattattaacctctaggttttcagacactcaagacaaaacaaaaaaatgcacatttaaaacaacatacaactataagttcatctacagtgaacatgtgataactt

SEQ ID NO: 960683 - DNA, 120 bp, Artificial Sequence
  ENSG00000257787_2 (sequence is synthesized)
cagttctctacagacagaatcctaggaaacttcaattctcagggataaacacagaaggcaaaatcttggaagagataaatagaaggactaaccagaaagttgtgaaggaaaccaagagag

SEQ ID NO: 960684 - DNA, 120 bp, Artificial Sequence
  ENSG00000257787_3 (sequence is synthesized)
agttgcattgaaaacccaagggagtagaaaatatcaacagaagctgagtgccaagaagtacaataaattaaaggcaaaagtaaataaataaatacataaatacataaatataattgggtt

SEQ ID NO: 960685 - DNA, 120 bp, Artificial Sequence
  ENSG00000257787_4 (sequence is synthesized)
agaaagagttctacttagttgtataattttggttttggcatgtttgtctttacttagttcatgctaataaataccagactaaaaatatctttttaagctcagactaaaaaaaatcaactt

SEQ ID NO: 960686 - DNA, 120 bp, Artificial Sequence
  ENSG00000257787_5 (sequence is synthesized)
ttttagtttgaatggcaagaggttatggcagaataaagagacttaagagagaatggagggaaaattgataaagcaaaaggaatcaagctgaaaattcacaaagatagaagaagaatgaag

SEQ ID NO: 960687 - DNA, 120 bp, Artificial Sequence
  ENSG00000257787_6 (sequence is synthesized)
ttcaaaatacaaatgcctgggttggctttggacaaaagaagcactacttcatttgaagttgggcagcaacaggaatagaatattccagacaggagctgttcctttaacctggatcacaga

SEQ ID NO: 960688 - DNA, 120 bp, Artificial Sequence
  ENSG00000257787_7 (sequence is synthesized)
atggaatttcaagtgaagcagacctttagtcaacccatagacctacagcggagccacagacaaatctcaggcttcatacatgagaaataaattgatgtttatttgtgtaaaccattttaa

SEQ ID NO: 960689 - DNA, 120 bp, Artificial Sequence
  ENSG00000257784_0 (sequence is synthesized)
ggcatttgattgagagcttaaaacaagagttccacagatgaggagaagaaagaagctttcactccaggcaggaggaacagtccctgagcaagaaagggtaacaaaccagccaacaaatgg

SEQ ID NO: 960690 - DNA, 120 bp, Artificial Sequence
  ENSG00000257784_1 (sequence is synthesized)
aaagctgcagaacagaggtctgaaaacataagagaagccaggaaaatgcaagtccttcctcctgaccctagaaaatctctgctgccaaggctgggactctgctgccaacttcaggcctgg

SEQ ID NO: 960691 - DNA, 120 bp, Artificial Sequence
  ENSG00000257784_2 (sequence is synthesized)
gaaaaccaagactccaggagctctacctctaggattcttccaaacatctcaccatgtcctctgatacctctgtagtcatctgccacaacctacttctgaataaatcctacattccacctt

SEQ ID NO: 960692 - DNA, 120 bp, Artificial Sequence
  ENSG00000257784_3 (sequence is synthesized)
ggcatttgattgagagcttaaaacaagagttccacagatgaggagaagaaagaagctttcactccaggcaggaggaacagtgtgagggtgaatacagagtatggtagaggaaaacagaat

SEQ ID NO: 960693 - DNA, 120 bp, Artificial Sequence
  ENSG00000257784_4 (sequence is synthesized)
ggtctggtgtagtgtatgggagtggggaatgggaggaggggttagaaacgtggagaaatcagactagacaagtaggttagatgcaaatcatgaaggacactgattcctgaatgaaaccct

SEQ ID NO: 960694 - DNA, 120 bp, Artificial Sequence
  ENSG00000257784_5 (sequence is synthesized)
aaagagcttctacctaatgttctaaatcttagtctgctctcagggattttaaagcagggaatgagtgatctaatctgcaatttggaaaataatccctagaaaaagaaaataacataatat

SEQ ID NO: 960695 - DNA, 120 bp, Artificial Sequence
  ENSG00000257784_6 (sequence is synthesized)
cagaaatagagactctaaaggagaatagtgaagagattgttgtaatggtctagccaagagataacaaaagaggaacaaggggagggacagagagaatggagaggagggcagcatcatgga

SEQ ID NO: 960696 - DNA, 120 bp, Artificial Sequence
  ENSG00000257784_7 (sequence is synthesized)
ccactgttacatgattttcctctaacacattctgtagccctgagcaagaaagggtaacaaaccagccaacaaatgggaggtttttcctgagtgcatgatgagaaaggcaggtgctactgg

SEQ ID NO: 960697 - DNA, 120 bp, Artificial Sequence
  ENSG00000257784_8 (sequence is synthesized)
aaatcactgggttactgggactaagaacattggtgagcatgttgggtgggtgatttttcacaaatccggatgggaggaaaggaagaatctaaaggaacagcaaggactcacaagaacaga

SEQ ID NO: 960698 - DNA, 120 bp, Artificial Sequence
  ENSG00000257784_9 (sequence is synthesized)
tgtccaatgaggctaaagaatgggttacaaaaagaaaaagaaagcagaaaaaggatttcaaaattcaggatttcaaagattgagtcattttatatgtgacaaggctccagaactgccagg

SEQ ID NO: 960699 - DNA, 120 bp, Artificial Sequence
  ENSG00000257784_10 (sequence is synthesized)
acagtgggaagtacagatgactccccaggtgagacggcatttgattgagagcttaaaacaagagttccacagatgaggagaagaaagaagctttcactccaggcaggaggaacaaactgc

SEQ ID NO: 960700 - DNA, 120 bp, Artificial Sequence
  ENSG00000257784_11 (sequence is synthesized)
agtgggaagtacagatgactccccaggtgagacggcatttgattgagagcttaaaacaagagttccacagatgaggagaagaaagaagctttcactccaggcaggaggaacagtaactgc

SEQ ID NO: 960701 - DNA, 120 bp, Artificial Sequence
  ENSG00000257784_12 (sequence is synthesized)
acagtgggaagtacagatgactccccaggtgagacggcatttgattgagagcttaaaacaagagttccacagatgaggagaagaaagaagctttcactccaggcaggaggaacagtgtga

SEQ ID NO: 960702 - DNA, 120 bp, Artificial Sequence
  ENSG00000257784_13 (sequence is synthesized)
ggtgcccagcaagaggatgttgattctaaaatgtcccaaaaatgctcacctgcaaagaggaattactctctgcagaagcagcagtattgcaccatggttcttgcagaagaggcaagagtg

SEQ ID NO: 960703 - DNA, 120 bp, Artificial Sequence
  ENSG00000257784_14 (sequence is synthesized)
cccactgggcagaaagtggtgccagttggacccagaagtggcatccaaaaaaaagtcaggcacaaggctaagcctggcagacttggtaaacctgagggaggaagacagtgacagaggaag

SEQ ID NO: 960704 - DNA, 120 bp, Artificial Sequence
  ENSG00000257784_15 (sequence is synthesized)
atgaataaaacccccaagccatctggcaatatgtgagacactgtggggatgcccaggataaaaccgaaagaattttgaagaagctggagcaagagttagaggtgagaaaaatacatctca

SEQ ID NO: 960705 - DNA, 120 bp, Artificial Sequence
  ENSG00000257784_16 (sequence is synthesized)
gggtgcctcacacagggtaggcaatcaagattttccttttagaaaggtgggtttaaatgccaggagagaaggtatagaggagaatagaacagaatggaatggaacggaatggaatggaat

SEQ ID NO: 960706 - DNA, 120 bp, Artificial Sequence
  ENSG00000257784_17 (sequence is synthesized)
tgggaagtacagatgactccccaggtgagacggcatttgattgagagcttaaaacaagagttccacagatgaggagaagaaagaagctttcactccaggcaggaggaacagtgtgaggcc

SEQ ID NO: 960707 - DNA, 120 bp, Artificial Sequence
  ENSG00000254789_0 (sequence is synthesized)
cagctccagagcagcagcaaagggaagcagcgtcctcgccaatacctgggctgtccttcaaggctcagtgcaaggaaaaacacctgggttggacatcagataaggaaattgagactcaaa

SEQ ID NO: 960708 - DNA, 120 bp, Artificial Sequence
  ENSG00000254789_1 (sequence is synthesized)
gaggacccccatggagaaagtaatgaagcttgaatttagacccaagatcatgtccctttcacttcctcagcctgcccaggaagtttatagcgtgctcatgccacaaaccctggagctgga

SEQ ID NO: 960709 - DNA, 120 bp, Artificial Sequence
  ENSG00000254789_2 (sequence is synthesized)
tacgcgctcaattggcttgaagaccttgggtagtgctgacttccagaccactgaggtcacctgcataagcgagtctggcaacaaataatcgtcttccagaaaatgaccagaaactcagcc

SEQ ID NO: 960710 - DNA, 120 bp, Artificial Sequence
  ENSG00000254789_3 (sequence is synthesized)
ttcaccagccccaccatctttcctttattctagagctcctggcacacttacatgaatctcttgaaagaagagaaatgagagcattcattccatactaatacaattgtgccctatggaaag

SEQ ID NO: 960711 - DNA, 120 bp, Artificial Sequence
  ENSG00000254789_4 (sequence is synthesized)
gctttttgctggcagacatagtagacggaccatttcccaacttctttttctttgccaccttccagccaaaggtgtccatatgacacagctctggacaggataattggaagtctgttgtgg

SEQ ID NO: 960712 - DNA, 120 bp, Artificial Sequence
  ENSG00000254789_5 (sequence is synthesized)
gatttctgagaaagcttttgattttctgacagagacatttttgcttccccttaccacttcctactggattacagatgtgatggaaagagctgcagcagccataatacaaccataaaggag

SEQ ID NO: 960713 - DNA, 120 bp, Artificial Sequence
  ENSG00000254789_6 (sequence is synthesized)
aggagaagagaattgcaaaggcatcaacccacattgaattgaactgctaagttaacactagcagttacttgcctccagatatcttggtgtgtgagaacattaaatctgtatgtgtctaaa

SEQ ID NO: 960714 - DNA, 120 bp, Artificial Sequence
  ENSG00000254789_7 (sequence is synthesized)
gagacttccctaaaagctgcatttaggacctggcccgttctccccagctccagagcagcagcaaagggaagcagcgtcctcgccaatacctgggctgtccttcaaggctcagtgcaagga

SEQ ID NO: 960715 - DNA, 120 bp, Artificial Sequence
  ENSG00000254787_0 (sequence is synthesized)
attattccctctgaagaagaagaagaagaagaaaacatactgcagctcccgatttgaaacatcatatttgaaaacaaggtggggccttcatcatatgcaaccttcatattttagggcctg

SEQ ID NO: 960716 - DNA, 120 bp, Artificial Sequence
  ENSG00000254787_1 (sequence is synthesized)
agaaggccaaggcatctagaaaccatgtcttctgattcacagttgatcatatttttctatcacctttgataaggcataaaatattattttgatgagtaaataaaaagactttggacacct

SEQ ID NO: 960717 - DNA, 120 bp, Artificial Sequence
  ENSG00000251555_0 (sequence is synthesized)
cagcctcaggcttgcgcggacggtgtgcgggtccagctatgcatcaccccttcgctgatgagccttaagaaaatccaaatttataaattgctgggtccatctctcttgccatccagaaaa

SEQ ID NO: 960718 - DNA, 120 bp, Artificial Sequence
  ENSG00000251555_1 (sequence is synthesized)
ttctctaacaatggcccaaaacttcacaatatcaaaggagaaatcattgccagcaaaagcatttccgggtagtaggaaagaatacaagggaataacattagtccagaagttttaataata

SEQ ID NO: 960719 - DNA, 120 bp, Artificial Sequence
  ENSG00000251555_2 (sequence is synthesized)
ttctttgctggttgaaattcatgtttaacatgatgtaaattacttgataagcaaattaagaactatgctactacagactccaaataagatgcaagaaaaatgagaggaaatacattaaag

SEQ ID NO: 960720 - DNA, 120 bp, Artificial Sequence
  ENSG00000251556_0 (sequence is synthesized)
aatcccagcactttgggagcctgaggtatacacctaactgtggacacattcatcttactaatctgtagggagatattgctggagtatagagtaaatagaagaaaaagacttatctttggt

SEQ ID NO: 960721 - DNA, 120 bp, Artificial Sequence
  ENSG00000251556_1 (sequence is synthesized)
ggctgaaaatttctgccatgccatgtgactgagaagcagcagagacctctcttcatcccctgaactgctggtccaattcagccagatgatgcaagtcccatagccaacccaaaagcagga

SEQ ID NO: 960722 - DNA, 120 bp, Artificial Sequence
  ENSG00000251556_2 (sequence is synthesized)
gcaaaaaaaagtctttcagcgcagaactcaccaaatctacaagctactgacaaatgggagttttggggaacaacttacctttaattcctcgattcattttcattaaacgcctgattatgg

SEQ ID NO: 960723 - DNA, 120 bp, Artificial Sequence
  ENSG00000266872_0 (sequence is synthesized)
gaacaccttggtataactttattcacaaactccagacacccaggcctggcttagcacagagggcatgttcttgccagtggcaaaaaaacccgatacagcatgtttgttaatactaaccat

SEQ ID NO: 960724 - DNA, 120 bp, Artificial Sequence
  ENSG00000266872_1 (sequence is synthesized)
tttaatttaaattaatagcatgtctggaagacaaatgtagttgatagaaaatataaaaactttactgtacaaattttacatcacattcaaaaaaagcaagtgtgtggcttgtggccacag

SEQ ID NO: 960725 - DNA, 120 bp, Artificial Sequence
  ENSG00000266872_2 (sequence is synthesized)
actccaactggcttcacatttacgtctccaccctccccccacaccaaatcaacacagaataacacaggtttccagggcttgccattcctctctgtgacctcaagaggaaatgccgtagga

SEQ ID NO: 960726 - DNA, 120 bp, Artificial Sequence
  ENSG00000266872_3 (sequence is synthesized)
tgacagagggtgttttgatttggtgacatggagagatcaactttgctacacactgctcacaaccccaaactagctaggattcaagacttcgagttagacagaaacccagggggctgcggc

SEQ ID NO: 960727 - DNA, 120 bp, Artificial Sequence
  ENSG00000266872_4 (sequence is synthesized)
tctggtggttaaaggcaggcagtgcagaggtggcaggctgagagccagctgcccccagtccttcagttccacctttggggcccagtggcttctgggttccttgaagacaacagggcccca

SEQ ID NO: 960728 - DNA, 120 bp, Artificial Sequence
  ENSG00000266877_0 (sequence is synthesized)
ctcaaaacaaacaaacaaaacaaagagatggagagtatggatccagacatcagtgagcccctggatccagccatgcctgaaaccagctgcagcctggactaacctgatttttagagacgg

SEQ ID NO: 960729 - DNA, 64 bp, Artificial Sequence
  ENSG00000266877_1 (sequence is synthesized)
catgatctgccgtcaggtcttaccttggcctttccttcctggctcaaaacctgtgggttcacct

SEQ ID NO: 960730 - DNA, 120 bp, Artificial Sequence
  ENSG00000266877_2 (sequence is synthesized)
cgttctcaaggagacagaagccaagagtctgggccctgcctcttccttagctccgaccccaggctcacaaaggaattggaggcaagaatcaacaatcaatttggataccatcaagacacc

SEQ ID NO: 960731 - DNA, 74 bp, Artificial Sequence
  ENSG00000266877_3 (sequence is synthesized)
tcaacaaatgctgaggaagagattccgggggggatcccccagttgcagtcatgtcaagactgatgctgaggagg

SEQ ID NO: 960732 - DNA, 120 bp, Artificial Sequence
  ENSG00000256789_0 (sequence is synthesized)
gatttacataatcttctaacatcttcctgggttcccagctatacactgaaaaaaagcagttgctgagtctaccaacagccttgtcatgtgagacaaggtgaattacataactgcatcata

SEQ ID NO: 960733 - DNA, 120 bp, Artificial Sequence
  ENSG00000256789_1 (sequence is synthesized)
acctggtacctgtgaatgtgaccttacatatatctatagcacttggccctctacctcacacaagtgaaaacttcactccagatttgaatcccagtggtttctggatcagatccccctctc

SEQ ID NO: 960734 - DNA, 120 bp, Artificial Sequence
  ENSG00000256789_2 (sequence is synthesized)
caggaaaatcctgttaacggttcttctgggtcacccaaccaatttgaatggccactttccttctacagaagtaagaaatttctattaaatcttaaattaaaaattttatgcatcaaggat

SEQ ID NO: 960735 - DNA, 120 bp, Artificial Sequence
  ENSG00000228853_0 (sequence is synthesized)
tggcagaattcaaattttgctgaatacattgagttgctgtttgtctttaggctaaatgtagggactctctgctccaccgagtctgatattactctctaaatggtctggatcagtgatact

SEQ ID NO: 960736 - DNA, 120 bp, Artificial Sequence
  ENSG00000228853_1 (sequence is synthesized)
cttgaaaagccagtcatagcttcagggggctggcttctctacagcacgttctctcacctggctgtgctctgtttatcttgtatgaggagagagtatccagtctggaaggggtagacaatt

SEQ ID NO: 960737 - DNA, 120 bp, Artificial Sequence
  ENSG00000228853_2 (sequence is synthesized)
tattcaaaacctgtgtgtgtctgttctgtgagtgctgtgagttttgtgtgtgccagttttattctaggctgtattttttcccggcattttataattagcattgagaatttgaaaggataa

SEQ ID NO: 960738 - DNA, 120 bp, Artificial Sequence
  ENSG00000228853_3 (sequence is synthesized)
gttattctcttttatttttcttagttaggattgttcttggctactcttggtcctttactcttcaatatgagtgataggatgaattttttaattctgtaaataaaatggaatttaatgtaa

SEQ ID NO: 960739 - DNA, 120 bp, Artificial Sequence
  ENSG00000228852_0 (sequence is synthesized)
ctcaccttcactgcaacaaagaagggttgttaaagctggacacagagacatgtttcatcacattacccaagctgttttcgaactcctgagctcaagcgatctacgcacctcagcctccca

SEQ ID NO: 960740 - DNA, 120 bp, Artificial Sequence
  ENSG00000228852_1 (sequence is synthesized)
agttcctgggattacagatgtgagcaaccacaaccagccgatttccattgagttttttctgctgtttctatcttgtctcttcgtgtatccagttacctctgatcatttgcgagatactga

SEQ ID NO: 960741 - DNA, 120 bp, Artificial Sequence
  ENSG00000228852_2 (sequence is synthesized)
tagctttcttcaaagaagatttggaggatttgagagtattagaatcatccaagttgaagatttaagattttctggacccaccagaattctcaaaccttacctatagtctaggacaattgg

SEQ ID NO: 960742 - DNA, 120 bp, Artificial Sequence
  ENSG00000228852_3 (sequence is synthesized)
tttatgtacagttcacctttattaacacagtgtagtcctttgggggtcctagctcttggccccacctactttatcctccagaccccaaatttactccctacatcttcaagctgacaaaaa

SEQ ID NO: 960743 - DNA, 120 bp, Artificial Sequence
  ENSG00000228852_4 (sequence is synthesized)
cttcagcccaaaccataaggtccatctcaccttcactgcaacaaagaagggttgttaaagctggacacagatttgcttggcttcaccctctgatgtgttccacaccacttcatgccactt

SEQ ID NO: 960744 - DNA, 120 bp, Artificial Sequence
  ENSG00000228852_5 (sequence is synthesized)
gataaaacgtcaggctgagtagaacagaactgggtgcaaataaatctctctgaagctaacttgcctctctctacccctacttccctctgcacgtgcctttgctttattcccctgcatgag

SEQ ID NO: 960745 - DNA, 120 bp, Artificial Sequence
  ENSG00000228852_6 (sequence is synthesized)
agaagcagtcaaatctttcccattttcatacctggattgctgctcaacagcctcaacaactgagacctgaatgtatccccattttaaagaacctaacagaacattaaaattgtttcctga

SEQ ID NO: 960746 - DNA, 120 bp, Artificial Sequence
  ENSG00000228852_7 (sequence is synthesized)
ctcaccttcactgcaacaaagaagggttgttaaagctggacacagtcatattactaaaaaaaaagaacttccgttcatcaaaagacacaacaaaaagcaaaccacagagtgagagaagct

SEQ ID NO: 960747 - DNA, 120 bp, Artificial Sequence
  ENSG00000228852_8 (sequence is synthesized)
acaattcacaaaagaggatgtccaaatggctaacatatattagaatgtgctcaatattattaatatccagcaccactagacacacactgtaatgactaaaattaaaaagactgtcagtac

SEQ ID NO: 960748 - DNA, 120 bp, Artificial Sequence
  ENSG00000228852_9 (sequence is synthesized)
gcttcagcccaaaccataaggtccatctcaccttcactgcaacaaagaagggttgttaaagctggacacagatttgcttggcttcaccctctgatgtgttccacaccacttcatgccact

SEQ ID NO: 960749 - DNA, 120 bp, Artificial Sequence
  ENSG00000228857_0 (sequence is synthesized)
aaaataaaaagtttaaaaagcaaacaaaaaaccccaaatagagttgtatcaacgaggttttgcttgtgatttgattttgtggccgtaattgtcctgttctctttcaacacaataacccta

SEQ ID NO: 960750 - DNA, 120 bp, Artificial Sequence
  ENSG00000228857_1 (sequence is synthesized)
accctctccctgtttctttcagaaagagcgagggagtaattctagcctgtttttacaagaacacagtggctatagacagtgccagtgtgaagatgactcagcaaacgtggagaaccaaag

SEQ ID NO: 960751 - DNA, 120 bp, Artificial Sequence
  ENSG00000228857_2 (sequence is synthesized)
aatcaagtctaacaggccttcccgaaggctaggtgtgaaataccagaagccatctttgtttctggcgatgtcactaaataagtatttgttgatataaagtattacacatctgttctccca

SEQ ID NO: 960752 - DNA, 120 bp, Artificial Sequence
  ENSG00000228857_3 (sequence is synthesized)
catttcagctaaattgccaaaagttaaccctttctggagatccagaatggagcaatatacctagctctcattcattatttcccttgctgatattcttgcatagcttttagtttatgcatt

SEQ ID NO: 960753 - DNA, 120 bp, Artificial Sequence
  ENSG00000245526_0 (sequence is synthesized)
gaggcccaggcctcccggtgcacactgacacaccgccgtccgcgggctgagcttcagtgacaccgaagggcactggccaacatgtcaaaacagttttgattccatgaaccaaagggcgca

SEQ ID NO: 960754 - DNA, 120 bp, Artificial Sequence
  ENSG00000245526_1 (sequence is synthesized)
caaggtctattgcaagctcaggtgaagtcgtgggactccaaaggtagtggctttcttgctgctggtcgatttgcattacagaggccgtttactttcaattccacttttacaaaagtagtc

SEQ ID NO: 960755 - DNA, 120 bp, Artificial Sequence
  ENSG00000245526_2 (sequence is synthesized)
tgctaaggaagaatctatagcatgactgagctaacagagagtgtgttacctttccaataggtaatccctccatttgcatgccgtgttcaatgataggaaagaggagttgaatttctgtca

SEQ ID NO: 960756 - DNA, 120 bp, Artificial Sequence
  ENSG00000245526_3 (sequence is synthesized)
tttttctggacttcagcttaaaggtctatattgtcagttcaaaaatatatgaagtgaacactatttcttgttagccaatagttattgttataataaaattattttcatggtcattgaaaa

SEQ ID NO: 960757 - DNA, 120 bp, Artificial Sequence
  ENSG00000245526_4 (sequence is synthesized)
ggaaattggttgagtttcagagcacgtcctcctcggcagagggggctggactagaccttggacagcccccccaaaaacttgccaagcctcgcacacaccacttcactctccactccgagg

SEQ ID NO: 960758 - DNA, 120 bp, Artificial Sequence
  ENSG00000245526_5 (sequence is synthesized)
ctcagggagcaagtgcctggcatggggggtaaaagttggctttttttttactccttggtcttttgcgcccttctccctctccccagaagggaagacccatttaaactattttagacgcaa

SEQ ID NO: 960759 - DNA, 120 bp, Artificial Sequence
  ENSG00000245526_6 (sequence is synthesized)
tcaaccaagaatcaccatgtggaattgagcggcagttttaaatgtgttgagcaggggagaggaatgatgagaaaaacatttttttttttttttttggagacgccgaaagaagcctgtttg

SEQ ID NO: 960760 - DNA, 120 bp, Artificial Sequence
  ENSG00000245526_7 (sequence is synthesized)
tgtgctgcggccgtgctgtgactttggatcttgtctttcagccggcgcctcggttcctgcccagctggatttggggggcagcattgcctggcgcagggagatcaaatgagactgcaaaga

SEQ ID NO: 960761 - DNA, 120 bp, Artificial Sequence
  ENSG00000245526_8 (sequence is synthesized)
agcataaaatgaatagacaatccaaccaaccaaaggaaattgctttggagatgaggaaacaaactcttatggagacctaagagactgaagacatctggcgtggactactctgatggtaaa

SEQ ID NO: 960762 - DNA, 120 bp, Artificial Sequence
  ENSG00000245526_9 (sequence is synthesized)
attgaaagtacacctaaatttgctttgttacaggattctcttcagaggacaagagaagatgttacattctctgcatgaggacaattctgcagcatcaaaatcgaataatatttgttttct

SEQ ID NO: 960763 - DNA, 120 bp, Artificial Sequence
  ENSG00000245526_10 (sequence is synthesized)
ggcagcagaattttgtatcatatttctaaagacagtaagcacttgggtggacgtcaatgaatactaaacactaattgatctgatacagccgtatgcacatacacagatatacatggtggc

SEQ ID NO: 960764 - DNA, 120 bp, Artificial Sequence
  ENSG00000245526_11 (sequence is synthesized)
ttgtaatggttgaaaaattacggtttggttttattaaaagatctgtcacttttaggtcagagtgggattttggagggatagtctcccacaatagaaaactaccctgacaacagtggtgtt

SEQ ID NO: 960765 - DNA, 120 bp, Artificial Sequence
  ENSG00000245526_12 (sequence is synthesized)
ttgaggttgtttgttgtttggcttcttgatgatgcttagctaaggagacacttcctttcagattctgtcttccaaaccccagggctctgttctgggcagttcagcctaatggaattaagc

SEQ ID NO: 960766 - DNA, 120 bp, Artificial Sequence
  ENSG00000245526_13 (sequence is synthesized)
ctgacatgtttcaactctatttcttgataaaataaacataaaacaatggtttagatttcgaataaaactcttgaagcatggggtactctaactttccctgttctttacacatctgtaaat

SEQ ID NO: 960767 - DNA, 120 bp, Artificial Sequence
  ENSG00000245526_14 (sequence is synthesized)
aaagtgcataaaagaggaacacaacaggataaatcaacataaatttgaaatccactgcagcatattaaatggcgcagtctcagtcaaagagaggctgaccccgcggcttcgtgcagtttg

SEQ ID NO: 960768 - DNA, 120 bp, Artificial Sequence
  ENSG00000245526_15 (sequence is synthesized)
aagctaattgttttcgtcaggatgggaacgtctggaagtccatggctgtatcccaccagtaaggctccagtaactgagccggcccacagagaatgggcccactttgtagcgacacagcgg

SEQ ID NO: 960769 - DNA, 120 bp, Artificial Sequence
  ENSG00000245526_16 (sequence is synthesized)
gctcagacaccacctattctgctctccaaactgtcatgcataacaactttattgtgctaaattgaacttgaaagcaaccaaaggctatgagaaggagaggctatgagaaaagcgtgctgt

SEQ ID NO: 960770 - DNA, 120 bp, Artificial Sequence
  ENSG00000245526_17 (sequence is synthesized)
cagcgccggcaaaggctgacctggaaagtaggctcagagacaggggaataaaagaccaggccccatgaacacagcatattgtttcattttaaagtatgattcccataccagagaaagtag

SEQ ID NO: 960771 - DNA, 120 bp, Artificial Sequence
  ENSG00000245526_18 (sequence is synthesized)
caaatgtgatgtaaatttatttaaatagattcgaccgcttaaaagtttgccagccgctcttatccaactttcccagctctctgattcgttacttacagtgggaatataatgacatatagt

SEQ ID NO: 960772 - DNA, 120 bp, Artificial Sequence
  ENSG00000245526_19 (sequence is synthesized)
catcattgtaacagcttctttgcaggggcacaatgatgattaatagccagcagcaaattttcacatgggctctgaagcactatggcattaagcagccaaacagtcccaaatccccctttt

SEQ ID NO: 960773 - DNA, 120 bp, Artificial Sequence
  ENSG00000245526_20 (sequence is synthesized)
ctgttccgctgaaaagtcccctccttgtaccttccagataggaacaaagcctatcttaattccaatcagcttttcgtcattcaaagggaccttctctttttcataattgattcatgtgca

SEQ ID NO: 960774 - DNA, 120 bp, Artificial Sequence
  ENSG00000245526_21 (sequence is synthesized)
ttttttagtgttccactgagctgaagccacttttctcctttcctctgttctgtccccacacccacaccccctttttttgagggggtgaggagtgggaaacatttcaacaacaacaacaac

SEQ ID NO: 960775 - DNA, 120 bp, Artificial Sequence
  ENSG00000245526_22 (sequence is synthesized)
cttcttttttgttggaagtggttttggttataaaaatatgagcttactgaaatagctctggtggcagccccacaatcatgttctgtttcactgggagagtttgagtagctttccttccca

SEQ ID NO: 960776 - DNA, 120 bp, Artificial Sequence
  ENSG00000245526_23 (sequence is synthesized)
ccagagactcacagctggagtgaggatggagtctcttgcttcagacagattctttttcctcctctgtgctggtagccatcaaaaaaagaacaagtgaccaaaatgaaaggcggcaaatgc

SEQ ID NO: 960777 - DNA, 120 bp, Artificial Sequence
  ENSG00000245526_24 (sequence is synthesized)
acacctcctaacccactctgtccttcttaagtatcatttttccccatagtaatcgtacattataattattagcagaagctcctgtgctatttgtggaagtgctctctctcgtctatagtt

SEQ ID NO: 960778 - DNA, 120 bp, Artificial Sequence
  ENSG00000245526_25 (sequence is synthesized)
ttcacctcctgtgataacgacacaaacgacatcaaccagtgctgtcttggaaaaagatttccatccgcaaattcatttgtgtttctatgacaatatgatggccatagagcacagttttag

SEQ ID NO: 960779 - DNA, 120 bp, Artificial Sequence
  ENSG00000245526_26 (sequence is synthesized)
tagatatactttgcatatttgtttacattccttacaaatctgacctcatttttctatatgagtagggtgaccacacacccctgttttctcaggactagctgtatttatgcctattgtcct

SEQ ID NO: 960780 - DNA, 120 bp, Artificial Sequence
  ENSG00000245526_27 (sequence is synthesized)
tacataattattaacagtacttcctttcaccctcaaaagtatcctgatttgaacaatttgaaaaactcatgacgttttgccattaaaatggccccaaatgacttacacaaacccaaaggg

SEQ ID NO: 960781 - DNA, 120 bp, Artificial Sequence
  ENSG00000245526_28 (sequence is synthesized)
tgggctgtctcctacccaggtggctggggactgctttataccatcccagtttaggggaaagaatcaaacttggaaaccctgctgccgatgtagcagcaccgacttttgtctcgcccactt

SEQ ID NO: 960782 - DNA, 120 bp, Artificial Sequence
  ENSG00000245526_29 (sequence is synthesized)
tgaagaggtcagttgaccctatacagcttctttgatatgtgacagaaaggaggtcatttgctgaaatgaaagacacattacaaaccagattttaagtgtgactctttccttcagctgggt

SEQ ID NO: 960783 - DNA, 120 bp, Artificial Sequence
  ENSG00000245526_30 (sequence is synthesized)
cacagttcttactttgagccagagcaacacactttactggtcagataaaaatactctgccatattttagaataatgacctttcttatgctttggtgtctccaaatggttaaatggagaat

SEQ ID NO: 960784 - DNA, 120 bp, Artificial Sequence
  ENSG00000245526_31 (sequence is synthesized)
atatccaattgacaggaggaattctgttcatcatttttactcttgtgtttatatcttctcataaaaaaaaaacatgtgaaaatggcatcatgtatctctattgtatttttcattcaaaaa

SEQ ID NO: 960785 - DNA, 120 bp, Artificial Sequence
  ENSG00000245526_32 (sequence is synthesized)
tctcaaacaggtgagtgtaatccagtctttaggttataggaccaaagactctcaaagactgttacaaacccccggacagtgtccctaagggctggactttgcatgtggattaccgagtta

SEQ ID NO: 960786 - DNA, 120 bp, Artificial Sequence
  ENSG00000245526_33 (sequence is synthesized)
actgagagatgtgtaatatcatctgtagtcagaaaactccctactccctatatggagcaaccaaggacattcacatgtgttgcttactcttgaaagtatatgggataaatgggctcctga

SEQ ID NO: 960787 - DNA, 120 bp, Artificial Sequence
  ENSG00000245526_34 (sequence is synthesized)
tatgctagtttcagaataactatggcaggaccttaaaatttcccactttccataagatcatagctcatattcaattactggcaggataaacatgtaagattattaactctgccttactag

SEQ ID NO: 960788 - DNA, 120 bp, Artificial Sequence
  ENSG00000245526_35 (sequence is synthesized)
ttcttttagaggagcatagccccttgatgaaggcattgttctaagccaaatctggacctatccaatctttattcatgcattttatccgctttcttagatcattctttcagaaatgaaatg

SEQ ID NO: 960789 - DNA, 120 bp, Artificial Sequence
  ENSG00000245526_36 (sequence is synthesized)
agtgaggtacatgaaatatattttctgatgcactctttttaaaataaaatactttttatggttgtgcatttatttgtgaagtgaatgtttagaaaactttaaaaccaattctaccattct

SEQ ID NO: 960790 - DNA, 120 bp, Artificial Sequence
  ENSG00000245526_37 (sequence is synthesized)
gtccttctttcatggtgataaccaactgttctgtttaataggatgatggaattggttaccactaaagtccagcccttagaaattactctgtatttttaggccctagacgtttataagtct

SEQ ID NO: 960791 - DNA, 120 bp, Artificial Sequence
  ENSG00000245526_38 (sequence is synthesized)
atgagaatctaacaaggagaattggtttctcctaacaattctattatcttgtaggtggctgtgtccattcttaaaacttttggctcatcttaccagattttttacaaagatgcagatgtt

SEQ ID NO: 960792 - DNA, 120 bp, Artificial Sequence
  ENSG00000245526_39 (sequence is synthesized)
ccttaaaagtggctgaaagattaggagttccttaaaagtggctgaaagattagggactttgtgcctgatgtgctggaatatgcccgagttctgttaaatctgatttaaccatattaaatc

SEQ ID NO: 960793 - DNA, 120 bp, Artificial Sequence
  ENSG00000245526_40 (sequence is synthesized)
caatccaaccaaccaaagaccgggggcagcagcaggccagcaagacggcatcttctccttcccagcctagaagccctgtgaaatcgaggatcttccccctaaaacacatacacacaagat

SEQ ID NO: 960794 - DNA, 120 bp, Artificial Sequence
  ENSG00000245526_41 (sequence is synthesized)
atgtgcaatcaagctgccaccgcttggtaaaaagccatggtgcctaaccaaaaaggatcaggaacagatccttgaatcagctgtcacttctatagaatgggatttttttttccttcctcc

SEQ ID NO: 960795 - DNA, 120 bp, Artificial Sequence
  ENSG00000245526_42 (sequence is synthesized)
ttaacctgcgctggaaattgccgttggctttatacatctctatagagagaggctaaagagtcttgcgtgagaaagaagcaatttacaatgcaaatagaggcctgtgaagggacggatgct

SEQ ID NO: 960796 - DNA, 120 bp, Artificial Sequence
  ENSG00000245526_43 (sequence is synthesized)
gctgctcactcgtaacagcttgctgcaccttaatagctggttttattttctgatattaatagatgaattgttggctaacgctgccggagattacttgctgaaaggaaaaagaaaagttcg

SEQ ID NO: 960797 - DNA, 120 bp, Artificial Sequence
  ENSG00000245526_44 (sequence is synthesized)
gaataaactctgaaggcaacagatctcgtttggatgttttagccgcgcacacacacaaacagaaaccaggtcatatttacataaaaggaggaatcttaagcgcggcaagtatcctggacg

SEQ ID NO: 960798 - DNA, 120 bp, Artificial Sequence
  ENSG00000245526_45 (sequence is synthesized)
accactcttcggtactgccagaaaggatcaggacctggagtctggcaagaggaagacagaggcctgtgtgggaagcgagttgttatctttggttatctagctgtatgagtgtattggtct

SEQ ID NO: 960799 - DNA, 120 bp, Artificial Sequence
  ENSG00000245526_46 (sequence is synthesized)
tcataaagctagataaccgaaagtaaaaactccttcaagatcgccggggagcgtgtgagaatgaaagactacagccgagagacagtaaaaaccagaaaggaaattgctttggagatgagg

SEQ ID NO: 960800 - DNA, 120 bp, Artificial Sequence
  ENSG00000245526_47 (sequence is synthesized)
tatgaagaagtgtaattaagactttgatatgagccttcacagtctaaagagtgcttcagtgacaacagttttattagattatggtgatgggcctggctgtgaaattcccacattcatgaa

SEQ ID NO: 960801 - DNA, 120 bp, Artificial Sequence
  ENSG00000245526_48 (sequence is synthesized)
cgactctgctttttactggctaaaaacaggattttaaaatgcaatgacctttgggactctcagataagttgcctcttcaaccctgaggttatttgatgaattgctggggacatacagaag

SEQ ID NO: 960802 - DNA, 120 bp, Artificial Sequence
  ENSG00000245526_49 (sequence is synthesized)
gatggattaatgaatgctgtgctcatcttgtctactggcaccatctgagggactgaagatcagggtgcctctttagactttggcttgagattacaatgttacccccctctttgctctagt

SEQ ID NO: 960803 - DNA, 120 bp, Artificial Sequence
  ENSG00000245526_50 (sequence is synthesized)
aactccatcctctccactccatcactctctattatctctaggatgccgtaaagcacttacagttatttttcctcacagtggaaaatctctttatacaaactatataaactgagacccact

SEQ ID NO: 960804 - DNA, 120 bp, Artificial Sequence
  ENSG00000245526_51 (sequence is synthesized)
gtccttatacaatcagggccaacctctttcccaccaaagactaattctgcccggatgcccaggatagttattttacgtacatacactatccataccctaatcccaagccaggtaaatata

SEQ ID NO: 960805 - DNA, 120 bp, Artificial Sequence
  ENSG00000245526_52 (sequence is synthesized)
tatgtaatatccgaggtggatgtttttattacatggtgcctacatttagaagtataaaatctcttaattggttcccatcctgatttttttataaactcaagcttttcgggtctttacttt

SEQ ID NO: 960806 - DNA, 120 bp, Artificial Sequence
  ENSG00000245526_53 (sequence is synthesized)
gattttccatatttttcttttctctttgtacttgctaacagaactctggtttcttttcagataccatgcaaaaaataggctcagataaggcacacgtatgcccatgagtcataattcatc

SEQ ID NO: 960807 - DNA, 120 bp, Artificial Sequence
  ENSG00000245526_54 (sequence is synthesized)
tatccctttcatcataattccattctcctttgccagggattggtttagggacgggcatgtgactcattcaccaaatgaacataaaaagaaatctgttgggattgattttccttttgtaaa

SEQ ID NO: 960808 - DNA, 120 bp, Artificial Sequence
  ENSG00000245526_55 (sequence is synthesized)
aaataaaagagacaaactcatgaggaaaatctcatgttcctccatgtttttaaatcttatttcatgaggatgggggcttggagttgtggcaacaataacagagaagccaagagaatccta

SEQ ID NO: 960809 - DNA, 120 bp, Artificial Sequence
  ENSG00000245526_56 (sequence is synthesized)
aaaaagctgacccagagatgtgacatttgtgagatgttaattaaccaccttggaaactgtcacttctagacttcttgtcatctgaaataataaacccctattactcaagtcataccttgt

SEQ ID NO: 960810 - DNA, 120 bp, Artificial Sequence
  ENSG00000245526_57 (sequence is synthesized)
tgggaattctgttacttgcaacccaaagcacagtaactgaatccctcaccttctcttttaccagttatttcttagttcacgtatcttttctagcttctctcagtcaacttgataggataa

SEQ ID NO: 960811 - DNA, 120 bp, Artificial Sequence
  ENSG00000245526_58 (sequence is synthesized)
tagaactcagactattgcagttggcggcatgtagagatcacctcattaaatcaaatttgacatacttaatttactgtagaggaaataaacctgggaagcaacaaaaattaatctaaggtc

SEQ ID NO: 960812 - DNA, 120 bp, Artificial Sequence
  ENSG00000245526_59 (sequence is synthesized)
atacaggtagtctagtcgcaacagaattagagtaaaattctggttttctgaattgcagtcaagtctctctacaacaatttggtccaatttcccctattgctctgcactctctcaatccag

SEQ ID NO: 960813 - DNA, 120 bp, Artificial Sequence
  ENSG00000245526_60 (sequence is synthesized)
ttcccctattgctctgcactctctcaatccagccacagttcattaaagattggcatgctgtacatcttatatatgaagtacataatataggctgagctcagtggctcacgcctgtaatcc

SEQ ID NO: 960814 - DNA, 75 bp, Artificial Sequence
  ENSG00000245526_61 (sequence is synthesized)
ggcagaacagagcgagactccatttcaaaaaagtaaaagaaaaaattaataaaaataaagtacataagataaatc

SEQ ID NO: 960815 - DNA, 120 bp, Artificial Sequence
  ENSG00000245526_62 (sequence is synthesized)
aataaaaataaagtacataagataaatcacatctataaaaaatagttaaagcatacatccatacatacacccaatttgtcaaaggaatttagttatcaaaggacattttcatggactcct

SEQ ID NO: 960816 - DNA, 120 bp, Artificial Sequence
  ENSG00000245526_63 (sequence is synthesized)
aggaagatcactatgtcacagtttccctggaactaagatgtctttatttaaatattatttggtaatctccacatcattttgtgtgttttgcatattgaatttgtaaggtcctaatttcag

SEQ ID NO: 960817 - DNA, 120 bp, Artificial Sequence
  ENSG00000245526_64 (sequence is synthesized)
atatataaaatatatacaatgcactgagattatattcaaatctgatatctgggaaaaatgcacaagagatgagttgttcaaatctgtccacatcatccattctaaaatttggagatatga

SEQ ID NO: 960818 - DNA, 120 bp, Artificial Sequence
  ENSG00000245526_65 (sequence is synthesized)
tgctgaatcctaggtcagttaactatacataggtgttgtgcatactttcacattgtggtgagcaatgagggagaagggatagataagagagcaagagatgggctgctctttagcccttgc

SEQ ID NO: 960819 - DNA, 120 bp, Artificial Sequence
  ENSG00000245526_66 (sequence is synthesized)
attttgggaccaggcaggttctgggtcgtttctcattgctctttgctcacagtcccagcataacactgatttttttttaaaatgtgaggtattaatattttgggtagcgattcctcttga

SEQ ID NO: 960820 - DNA, 120 bp, Artificial Sequence
  ENSG00000245526_67 (sequence is synthesized)
tggctattacagtaaattccagcagccagtataatcagcgcaaagtgagatgggctgtttaatcaattaaattaaacatagtttaatgcgcagaagagttcattttttaaattttttttt

SEQ ID NO: 960821 - DNA, 120 bp, Artificial Sequence
  ENSG00000245526_68 (sequence is synthesized)
aaaattgtggtaagatatccataacatattgcttactattttcattatttttaagtgtacagttcaggggcattaagtacattcacattgtgcaaccatcaccaccatccatccacagaa

SEQ ID NO: 960822 - DNA, 120 bp, Artificial Sequence
  ENSG00000245526_69 (sequence is synthesized)
cttttttcatcttgcagaactgaaactctgtacccattaaacaataactctccattaacccctcccaccagcccctggtacctaccattctactatctgtttctgttatacactatttgt

SEQ ID NO: 960823 - DNA, 120 bp, Artificial Sequence
  ENSG00000245526_70 (sequence is synthesized)
ctgtgactggcttatttcacttagcataaagtcttcaagcatatatcagaattttcttcctttttaatgctgaataatatttcattgtatgtatacaccccattttgtttatctgttcct

SEQ ID NO: 960824 - DNA, 120 bp, Artificial Sequence
  ENSG00000245526_71 (sequence is synthesized)
tcctccatcaatggacacttgagttgcttccaccttttggtgattgagaataatgctgctgggagcatgagtgatgtggtctggttctgtgcccccacccaaatctcatcttgcattgta

SEQ ID NO: 960825 - DNA, 120 bp, Artificial Sequence
  ENSG00000245526_72 (sequence is synthesized)
atctgagtatgttgggggaggtacctcatgggaggtgattagatcatggggacagtccccatgctgttctcatgatagggagtgagttctcatgagatctaatggttttacaagggtctt

SEQ ID NO: 960826 - DNA, 77 bp, Artificial Sequence
  ENSG00000245526_73 (sequence is synthesized)
agtgagttctcatgagatctaatggttttacaagggtcttttctgcctttgcttggcacttctccactatgattgta

SEQ ID NO: 960827 - DNA, 120 bp, Artificial Sequence
  ENSG00000245526_74 (sequence is synthesized)
gagactgcaaagaagcataaaatgaatagacaatccaaccaaccaaagaccacaccttatctggttgctaatgaaatacaggagattgattgcagaaaatcttcaagggaatatttgctg

SEQ ID NO: 960828 - DNA, 120 bp, Artificial Sequence
  ENSG00000245526_75 (sequence is synthesized)
agagcacccggacccgcggcggcagcggcagcgacgctacccaccctcttccccaacacccacctagccagcgagtcaccgagccaccggccctcggggaaattgctttggagatgagga

SEQ ID NO: 960829 - DNA, 120 bp, Artificial Sequence
  ENSG00000245526_76 (sequence is synthesized)
tgtgcttcccagagaccaacttgaattctgggcagtgtttcagaagagtgttcaattttcaaaccttttgctatgttgtttctggggctacatgcatggacttctaagaagttttctcaa

SEQ ID NO: 960830 - DNA, 120 bp, Artificial Sequence
  ENSG00000245526_77 (sequence is synthesized)
gatttcaacagctcctttctttcattggaaggaggagtaacaccatttctttattgtatggcagagatagaagataaggctctgcccacagtctccaggctgcagcatctggtgaggaag

SEQ ID NO: 960831 - DNA, 120 bp, Artificial Sequence
  ENSG00000245526_78 (sequence is synthesized)
aaaaaaaaactggaggaaaaaagaaaaagagaagaaaaggattttaaaaaaaagaaaaaagcaaaagaagtttccaaagaaatgtgtgctttgcatcctacaataggaaaatgtagccat

SEQ ID NO: 960832 - DNA, 120 bp, Artificial Sequence
  ENSG00000245526_79 (sequence is synthesized)
tgccttccttcagacgagacatttctaatttgttccgtctgtcaggaggggactatgagaggtttgggtgcaaattcattatctctggcaacgcagaacgtagtgtggggactgaaaaag

SEQ ID NO: 960833 - DNA, 120 bp, Artificial Sequence
  ENSG00000245526_80 (sequence is synthesized)
agagaaaattaaatgacacacacatgctaaaatatcaaggttccagatatgtcttgagaggggttgttgcagctgcaaaggagaagtgtatagtgataatgagtaaagatgcatgtgcag

SEQ ID NO: 960834 - DNA, 120 bp, Artificial Sequence
  ENSG00000245526_81 (sequence is synthesized)
tttgttctattttaaggcaaaagttatatcagggatttttttcttagaaaggtgttgcagagatgtctggtacctagtttaaaaatgattccataatatgtagacttgggcagttccttt

SEQ ID NO: 960835 - DNA, 120 bp, Artificial Sequence
  ENSG00000245526_82 (sequence is synthesized)
taataatttgtatctactgaggacttagagctagcaggcaaaatgaaaaaaaaaaaaaaaaaagcaagggctgatttttattcttctattcaaaatacaaggacagatgcttctctgttc

SEQ ID NO: 960836 - DNA, 120 bp, Artificial Sequence
  ENSG00000245526_83 (sequence is synthesized)
caagagggtttccttgaggaagctactgaagcagaaagacatgatggagacgagatcgcctcccctcttgtcaaagtgttaaaaaaatgttctgtcttactctgcgcctagcattggaaa

SEQ ID NO: 960837 - DNA, 120 bp, Artificial Sequence
  ENSG00000245526_84 (sequence is synthesized)
tgaaagtgacatttacgccacaacccacgtgtgcgcctcctctctttttgtttaaggatgatcaggtctatccaggaaacagctctggcatcccaaactgaaataattaggacgtatata

SEQ ID NO: 960838 - DNA, 120 bp, Artificial Sequence
  ENSG00000245526_85 (sequence is synthesized)
gacctgacaaaaatggaaagggggtggggaatctgagggtctgtcttgcctaattgattccgctaaacggaatgcaggagatgtgaacggcaggacgctccgattcccacgctcgggggc

SEQ ID NO: 960839 - DNA, 120 bp, Artificial Sequence
  ENSG00000245526_86 (sequence is synthesized)
aagtgataaagcggggccgggcagcctatgacagacagccctgttggggggtgggggtatgaaaaaaacatcaagtgcacacaccatactcatctccatcgcttaagaaagtaaaggcat

SEQ ID NO: 960840 - DNA, 120 bp, Artificial Sequence
  ENSG00000245526_87 (sequence is synthesized)
ttcccacccacagccatctgcagcttcccaaatggcagcaccaactggtctgtagctgctacatagtctgcttctgttaattttttaaccactgtttaatctggccataattaagtttgg

SEQ ID NO: 960841 - DNA, 120 bp, Artificial Sequence
  ENSG00000245526_88 (sequence is synthesized)
ctttcttcgttgtttgagattttcagaattcaaggcaagctagtagaaagcaattccaagaaagtcccatgactgcctgcccctaatgtcaaaatctcagtccatgagattatggccttg

SEQ ID NO: 960842 - DNA, 120 bp, Artificial Sequence
  ENSG00000245526_89 (sequence is synthesized)
tgaccacatttttgcttttgttttgggtgggcaaatgtgtatagagataaaatacatatctctatataacagtcgttattataatttcatgaggctttttacctcttaacatgatacatc

SEQ ID NO: 960843 - DNA, 120 bp, Artificial Sequence
  ENSG00000245526_90 (sequence is synthesized)
taggaacttggtctaattgtgctagtagatatacactagaagtaaaactataaagtcattagcctgtagaaagttgattatgataacaatatgataaaaagtttgttttggaatagtctc

SEQ ID NO: 960844 - DNA, 120 bp, Artificial Sequence
  ENSG00000245526_91 (sequence is synthesized)
agctagatgggtctaaatagccattttaatgtaatctaaaaataacactatgcctagcagaaactttggcgctttggaggtccccattgtcgccttttcataaaagtccttaagttttcc

SEQ ID NO: 960845 - DNA, 120 bp, Artificial Sequence
  ENSG00000245526_92 (sequence is synthesized)
atatgtcaccaagcaaacatttgtataggcatttacacagaaatataaccattgcaattagaaaatatccaaaatagcctgttatcttccacgtggcctagattattgacaatcccaaat

SEQ ID NO: 960846 - DNA, 120 bp, Artificial Sequence
  ENSG00000245526_93 (sequence is synthesized)
atacaatttttctttaaaagtagtacaatttcctttgtagcttcaattccttatatgacttcagactggagaagcctgttaaaccactgttagtttcagttagaaagtctgagagacttt

SEQ ID NO: 960847 - DNA, 120 bp, Artificial Sequence
  ENSG00000245526_94 (sequence is synthesized)
atacataaattctcaatttggctgctgtacacgtgccagagttttactactgtagtgaccgttgagaagacccttgtttatttacatttgaagcactgtttgtgcaaacaacctttcatt

SEQ ID NO: 960848 - DNA, 120 bp, Artificial Sequence
  ENSG00000245526_95 (sequence is synthesized)
gttaagtgcctgtattcctttcatttacttcatgtccaggggtgctatttacctagaaccattgtctactacaattaacatttacattacaaagtgtgtggttttctttttcaaggaggt

SEQ ID NO: 960849 - DNA, 120 bp, Artificial Sequence
  ENSG00000245526_96 (sequence is synthesized)
tcaattaaggcaataagatgtttgctggagaaacctattgtttactgaaagcactcaatgaagtcaaattactgaagcttttgcctacatcttggtcttttatgtaaatatgttaaatat

SEQ ID NO: 960850 - DNA, 120 bp, Artificial Sequence
  ENSG00000245526_97 (sequence is synthesized)
aacatctaaggaaaataaacaatattataattatgtgtttgccattgtcatatcaaacttgctttgtatcatactaatgttacataacttatcgatcaataaaaatacatttcaatgtta

SEQ ID NO: 960851 - DNA, 120 bp, Artificial Sequence
  ENSG00000245526_98 (sequence is synthesized)
tggcacaacggctgggagaggaaacttgatgcttctgggccaccatttgccagggcctcgctcgagagcggtgacgacctagaagagactggagtgtggttaggtcggccccctgccatc

SEQ ID NO: 960852 - DNA, 120 bp, Artificial Sequence
  ENSG00000245526_99 (sequence is synthesized)
cattacacctgcggcagatggctcaagtggtagaatggttttgtttgccgagatcaagaaaggaggaggggaaagctagagcctcgccccactcaaaagaagtaccataaagagccaaag

SEQ ID NO: 960853 - DNA, 120 bp, Artificial Sequence
  ENSG00000245526_100 (sequence is synthesized)
aaatgaaagaagccatattcgtaccatcaaaagcaagaatgttgctgccttccaggagttaacctggacacgttagtgactttggtacctggcccgaattgataacgactgaattttaga

SEQ ID NO: 960854 - DNA, 81 bp, Artificial Sequence
  ENSG00000245526_101 (sequence is synthesized)
tttggtacctggcccgaattgataacgactgaattttagaaccaacatttttcaaatgtatttttgatgaaatgcctactt

SEQ ID NO: 960855 - DNA, 120 bp, Artificial Sequence
  ENSG00000245526_102 (sequence is synthesized)
gtctccccccacttttttcagtcggcctgctagcttccacacacaagcccctctcgcaagacaaccacctggctgaaatttagccaggtgtcaaatgtatccatctcattttcacgtgca

SEQ ID NO: 960856 - DNA, 120 bp, Artificial Sequence
  ENSG00000245526_103 (sequence is synthesized)
ataatgtgcctttctgatcaatcttcacatccttgcatccattccttcctccctgctactcaagaagcaagaaaggagcacacacatcctcccaggcagtccagaggaaaggcaggcgtg

SEQ ID NO: 960857 - DNA, 120 bp, Artificial Sequence
  ENSG00000245526_104 (sequence is synthesized)
acaaagaacacagacacagtctaatgacaatttagcctgtcttctattccttgactttcttgttaaataagaggaatgaaaagaaaaatatattgagggagacctaaacagaaagccttg

SEQ ID NO: 960858 - DNA, 120 bp, Artificial Sequence
  ENSG00000245526_105 (sequence is synthesized)
taagccttgtctcctcccttacttcacacagtcatcacgataacacccatatacaaattacctttatgaatatgcttattcacatttaatgtgaaataaaaaattattttgctggcctaa

SEQ ID NO: 960859 - DNA, 120 bp, Artificial Sequence
  ENSG00000245526_106 (sequence is synthesized)
ctgattatgcatgggctggagctgcctcctctaacctgttcttctccgagccgggcagccggcggtcctcagccgcccacagaacaggagccgaaacaaccgttctcgaaggctacagcg

SEQ ID NO: 960860 - DNA, 120 bp, Artificial Sequence
  ENSG00000245526_107 (sequence is synthesized)
tttatttttctcttttggggggttttggcggttgtttcaggggctcgccaactggcccctttaattaaaagcttcaataaaaggcgatcgcgccaggaatgcacccgctcctcttcgcgc

SEQ ID NO: 960861 - DNA, 120 bp, Artificial Sequence
  ENSG00000245526_108 (sequence is synthesized)
aggatttgcatatttttttaatgccctaatttccttgatgtatgtaaatgtagccggacgtagagggagacagggagctgacgtcaatggacgtgacctcgcagctaaaccttgaacgtg

SEQ ID NO: 960862 - DNA, 120 bp, Artificial Sequence
  ENSG00000245526_109 (sequence is synthesized)
cgggatgggggaaaacacggagcggcagccggcggagcccgagagcgcgggcggcggcggcagtagccgagcccaggccggggtgccaagggaccagtgccggccccgggggaggacaag

SEQ ID NO: 960863 - DNA, 120 bp, Artificial Sequence
  ENSG00000245526_110 (sequence is synthesized)
caagccgccgccttctttctgcaccgcgcggctctcagactcgccagccttccggccgcacacgcagactcttgccctgagcttccagccccaccacacacacgttcttttgcttccctc

SEQ ID NO: 960864 - DNA, 120 bp, Artificial Sequence
  ENSG00000245526_111 (sequence is synthesized)
agaaaagcaacactccccaaaacaacaaaccaaaatcaacagataaaacagatgttttagaccaatgctcgggtagcttatcagaaagaagactctgaccacggaacatatatatttttt

SEQ ID NO: 960865 - DNA, 120 bp, Artificial Sequence
  ENSG00000245526_112 (sequence is synthesized)
ggcttctctccacaagaagaggagcgagagaccacagacaacagcaaatcactcctaaaacacgataactacaagtgctccctgtagggagaggtaaatcgcccagccgactggtgaagt

SEQ ID NO: 960866 - DNA, 120 bp, Artificial Sequence
  ENSG00000245526_113 (sequence is synthesized)
ctcctcctcctcctcttcctcctccttctctaacaacgcccgcactaccttctgattctccacctcctcttcatcctccatcccccttttacttctctctcccccgtctctcctccctcc

SEQ ID NO: 960867 - DNA, 120 bp, Artificial Sequence
  ENSG00000245526_114 (sequence is synthesized)
ccttttacttctctctcccccgtctctcctccctcccgcctcctttctccctctccccctccctctctcctctgaataagcaagcttttgcctctaaaagtcacaagtaatcctcgtgtg

SEQ ID NO: 960868 - DNA, 120 bp, Artificial Sequence
  ENSG00000245526_115 (sequence is synthesized)
agagagagagagagagagagagaaacgagctggcggagaggagcagaaggcaggaggggaaatctggcacaacggctgggagaggaaacttgatgcttctgggccaccatttgccagggc

SEQ ID NO: 960869 - DNA, 120 bp, Artificial Sequence
  ENSG00000245526_116 (sequence is synthesized)
agagcacccggacccgcggcggcagcggcagcgacgctacccaccctcttccccaacacccacctagccagcgagtcaccgagccaccggccctcgggccggcgcctcggttcctgccca

SEQ ID NO: 960870 - DNA, 120 bp, Artificial Sequence
  ENSG00000245526_117 (sequence is synthesized)
gagatcaagtgagtatcgtggcggccctcaggctgcagctcgcccgcggcgcgaggccagcagtgcccgccgcggccccgcgcccgcactcctcacctcgcccgctagccggtgcccgca

SEQ ID NO: 960871 - DNA, 120 bp, Artificial Sequence
  ENSG00000245526_118 (sequence is synthesized)
gagtcccgctgcgggccgctccgagggccagtccggggctttgcttcagctaattgattgtgtgcctcggatgttaaacctgttgatctcatgagactgcaaagaagcataaaatgaata

SEQ ID NO: 960872 - DNA, 120 bp, Artificial Sequence
  ENSG00000245526_119 (sequence is synthesized)
agcctaatgatcagtcagttattctgttaacagaaagattagtaattgctgcctattctgctgaaatccctgtcattcttgctgtttcctccatcagaatttatgttaaatcacacattc

SEQ ID NO: 960873 - DNA, 120 bp, Artificial Sequence
  ENSG00000245526_120 (sequence is synthesized)
tgtgaagctgtcaagttctctctagttctaaagctagcccttcagtttaatcatccaccttggagcaactgtggctgctaaagggaaattttacagcagctcaaccatgaattatctcct

SEQ ID NO: 960874 - DNA, 120 bp, Artificial Sequence
  ENSG00000245526_121 (sequence is synthesized)
actgcgcgctcggctgccgggctgggacagagcacccggacccgcggcggcagcggcagcgacgctacccaccctcttccccaacacccacctagccagcgagtcaccgagccaccggcc

SEQ ID NO: 960875 - DNA, 120 bp, Artificial Sequence
  ENSG00000245526_122 (sequence is synthesized)
caaacacagctgtttgattggtgttaaaatggatctgcctgataagacctggaactgagaacccaaacagagccttaaggtaagctcccaagggaagtgctggcagtagatattcagagg

SEQ ID NO: 960876 - DNA, 120 bp, Artificial Sequence
  ENSG00000245526_123 (sequence is synthesized)
gttcctcagtacagtactccagcagggcttatatagacaaaccaaacccagccaaatcaaacctccccaaatccaacatttcctgcatgtccaaaatgggagacaggcgcctgagtaacc

SEQ ID NO: 960877 - DNA, 120 bp, Artificial Sequence
  ENSG00000245526_124 (sequence is synthesized)
ataaaatgaatagacaatccaaccaaccaaaggtaattttaaaatttacatttgataaaatccaagtgatgtacaaaatagagtattatttactaggcggtaggcatgcagtgggttgca

SEQ ID NO: 960878 - DNA, 120 bp, Artificial Sequence
  ENSG00000245526_125 (sequence is synthesized)
tatctcctaattcatgctctaagtttctatatgtgcagccttctcctctacagggagcctttgtatattatatatcaagcataatacaaatataacctgtaactgcctataaaaaagaaa

SEQ ID NO: 960879 - DNA, 120 bp, Artificial Sequence
  ENSG00000245526_126 (sequence is synthesized)
ttcaagatacagagtaaataatagaatacttttgttagaaagtaagccagtcaggtaccttgcctgaactatacaaatcactgtaaattaaatggcttttatgtagaaaatggtagtctt

SEQ ID NO: 960880 - DNA, 120 bp, Artificial Sequence
  ENSG00000245526_127 (sequence is synthesized)
gactgtactagtgcactgtggtttacatgcatttgaatcatacaaaccaaatattaaaaggggatttcagtgataggccagttcttcatgtgctttgcagtaatctgaataggattcaga

SEQ ID NO: 960881 - DNA, 120 bp, Artificial Sequence
  ENSG00000245526_128 (sequence is synthesized)
ggtgttctaaatatggtgacaaacctaatgtatttgaatttatgaaatagcataattctgatccaaataatgtggaaaacgtaacttttcacttttaactgaaatagagattgtctactc

SEQ ID NO: 960882 - DNA, 120 bp, Artificial Sequence
  ENSG00000245526_129 (sequence is synthesized)
ccaggtaaaccagaatgtttcaattcatgtttcagccatctggagatctataaaaagattagaaaacaagcatgacaatcacgtcctaatctactggccattaatgggaatttattagtg

SEQ ID NO: 960883 - DNA, 120 bp, Artificial Sequence
  ENSG00000245526_130 (sequence is synthesized)
aatatctgatataacatgtaggtgttaatagttgctcttaatatgtgacagacattgctaggaatctttagggctacacaattgtttcaacttgtctcacatcctatataataatacagt

SEQ ID NO: 960884 - DNA, 120 bp, Artificial Sequence
  ENSG00000245526_131 (sequence is synthesized)
ctttgaaatatgtataaaccatcatataaaccttggcaatattcaaaataatcagatgctctgtgttaagccttactgtgtagtttttatttctgcatatcctgagagatggtggagagt

SEQ ID NO: 960885 - DNA, 120 bp, Artificial Sequence
  ENSG00000245526_132 (sequence is synthesized)
aaaatatttagttggctatctggctaatgaacagactgctcataatcctaatgttggttcctttcacttattgggactcccatgatgagtctatgttatatatgccagacatggggacca

SEQ ID NO: 960886 - DNA, 120 bp, Artificial Sequence
  ENSG00000245526_133 (sequence is synthesized)
ggcccggagtccagttgatatgactatgtggcattgccctagaagatgctgttttaagacagtatcttctatagcttttaattgtaaaagcatctcaaatgttcagtgtcttggctttca

SEQ ID NO: 960887 - DNA, 120 bp, Artificial Sequence
  ENSG00000245526_134 (sequence is synthesized)
tgatggatactttggttctaaaaatgcatttagttgctaagtgtggaaatatagccatgttactttgcaaattcacacagatatgggggtgataaacatgcacagacaaatgcatgacat

SEQ ID NO: 960888 - DNA, 120 bp, Artificial Sequence
  ENSG00000245526_135 (sequence is synthesized)
ctctttgcttccaccagcccccacccaagtatatataaagcaaaaagatattctaaaaatacctgtcatctgaccacatgcttgctttatgtaatacatgccaaatcactaatgattctg

SEQ ID NO: 960889 - DNA, 120 bp, Artificial Sequence
  ENSG00000245526_136 (sequence is synthesized)
catctgtgtcttggaaagcaaggccacaatactctcactcttccaaggcggcagagctcattagtgttttatgtaatgtctaaggtggaatgtgcctcagtgatgtgttacatttttatt

SEQ ID NO: 960890 - DNA, 120 bp, Artificial Sequence
  ENSG00000245526_137 (sequence is synthesized)
tagtagtgtatgttgtgaccagctagttcgagaaggaacagtaacttcatggaggtgtgtttctctgagttagtttttggtttgcttgtgcattttatgtataacccaatgcagccattt

SEQ ID NO: 960891 - DNA, 120 bp, Artificial Sequence
  ENSG00000245526_138 (sequence is synthesized)
ctgattgtacctcttgtaccataatttggtaagaaaaatagatgaacaatttcaacagcttagtcttttctaaataatcagtactggaatgttcaccaaaaaaagtaaataaataaaaaa

SEQ ID NO: 960892 - DNA, 120 bp, Artificial Sequence
  ENSG00000245526_139 (sequence is synthesized)
ggcacaacggctgggagaggaaacttgatgcttctgggccaccatttgccagggcctcgctcgaggtaagcacactggggtcccgcggagtccgtacctgtcagggtccagcccccgccc

SEQ ID NO: 960893 - DNA, 120 bp, Artificial Sequence
  ENSG00000245526_140 (sequence is synthesized)
atagccgagagatgggcacccttacctgggctattcaaataatgatcaaaatggaacggggatgggatgcgggtgagggagtgctccagccggagggcccggggcccagaggatgatgtg

SEQ ID NO: 960894 - DNA, 120 bp, Artificial Sequence
  ENSG00000245526_141 (sequence is synthesized)
cgcctggaagcttggaccccgggctcttgcccctgggcaccttgtgcctccagccaaggttccgagcgactgcgtggggctccagctatccgatttcccttcctaagtcgcgcgttcgac

SEQ ID NO: 960895 - DNA, 120 bp, Artificial Sequence
  ENSG00000245526_142 (sequence is synthesized)
agctccctcctttacacacccgcgtgcaaatgagccgctgctctgtcatgaagtgagaatgtgagcctctttcaaaccctagaaaaggaaagtttggtaaggcgggggctgcgcagatct

SEQ ID NO: 960896 - DNA, 120 bp, Artificial Sequence
  ENSG00000245526_143 (sequence is synthesized)
gctgttctctggaacctaaactgggaaccctagacttgcgcagaaaattaatagttttccatttttctttaaaaaaattaacttcaacgaaaaattgtgtgtattcaaaaaaattattgg

SEQ ID NO: 960897 - DNA, 120 bp, Artificial Sequence
  ENSG00000245526_144 (sequence is synthesized)
attaccatgtctgatcagctgctgatgacctaccaataagcgttttaaacacacatgcacattcacgcgtgcgcgcgcgcgcgtacacacacacacgcgcgcatacacacacacacacac

SEQ ID NO: 960898 - DNA, 120 bp, Artificial Sequence
  ENSG00000245526_145 (sequence is synthesized)
acacacacacacacacaccccaggggctatgtgcagtgaggaaggccgtcataagtaactaagaattcagagggagtcgcaagggcttttaagtgtgtaaaggctgtgtacgtgtcctcc

SEQ ID NO: 960899 - DNA, 120 bp, Artificial Sequence
  ENSG00000245526_146 (sequence is synthesized)
ttgttacagagagcagagggagggggcagagggaatgagcgtcggctcggcgttttcgctgtgcctgtgtgtttcgcgtgttgtcagctggctctggtttctaagggctgagcgctgcca

SEQ ID NO: 960900 - DNA, 120 bp, Artificial Sequence
  ENSG00000245526_147 (sequence is synthesized)
ggggcgggggccagcatccaccatccacctcggcaccctagtggtgaaacaggactcatttgtttggtgcagagcggtgacgacctagaagagactggagtgtggttaggtcggccccct

SEQ ID NO: 960901 - DNA, 120 bp, Artificial Sequence
  ENSG00000245526_148 (sequence is synthesized)
aacattccttctactagagtttaatacactaatgctttggggatgactagcatgaagagaaattccacaatttttgaaacagaaattctatttttctatcttctttaatgtcaaatcaac

SEQ ID NO: 960902 - DNA, 120 bp, Artificial Sequence
  ENSG00000245526_149 (sequence is synthesized)
attttttagttagtaaaaccaaagaatatcaaacaatgagagtcctttctagctaagattttggagtcacaaataaagctacatcctaaaaagccaaaaggaaaggaaaaaaaaatcaac

SEQ ID NO: 960903 - DNA, 120 bp, Artificial Sequence
  ENSG00000245526_150 (sequence is synthesized)
ccctgcatttatcaaggtgctttaaatacccaaagacacctctgaactgggttttgttgatgggtgcttgttgtgtgcccagtgtaattttttaataaatattttcctgtgctatgaatg

SEQ ID NO: 960904 - DNA, 120 bp, Artificial Sequence
  ENSG00000245526_151 (sequence is synthesized)
tttccatttttataaggagaaagctgactttgaaatgcagtgggaaacaggatttgccaagaaaaaatgccagtaggataaagcccaattttattattaataatataggtttatttgtat

SEQ ID NO: 960905 - DNA, 120 bp, Artificial Sequence
  ENSG00000245526_152 (sequence is synthesized)
atcatacaaactgctaagagtctcttcttcgatgtgaattcctgtattatcaggacacagtcaaatccacttgtaagaaaatttaaaaagaaaaaaaatacttgcagaacagagttgaaa

SEQ ID NO: 960906 - DNA, 120 bp, Artificial Sequence
  ENSG00000245526_153 (sequence is synthesized)
tacaggtttcctgggccttttagtgatttctttttaagagggagagagagggggacctgacctaaaactcctggctttagagacactaaaagcttccaattgtatttaaataaaacagaa

SEQ ID NO: 960907 - DNA, 120 bp, Artificial Sequence
  ENSG00000245522_0 (sequence is synthesized)
ctctccactcctgcctcctggagactcagcgagctcgtccctcattgactctacatcacccctcacccaccggtcccaggtgcacacacgagaccaggcccagaggttgtctgcagagtg

SEQ ID NO: 960908 - DNA, 120 bp, Artificial Sequence
  ENSG00000245522_1 (sequence is synthesized)
agattatggcgaagcattttattctttttacaaacctgctttttctcagttttccacattggatttgccagctacctgcctttgcaggacacctcagaagttacagacttgcctgtggaa

SEQ ID NO: 960909 - DNA, 120 bp, Artificial Sequence
  ENSG00000245522_2 (sequence is synthesized)
atgcagagagcacctgaggtatttcccggactctccagtagtagccttgaatggctgaccaaccgcagtcacctgccagatcttctcagaaccggccagcccaccagcgacaggcccatt

SEQ ID NO: 960910 - DNA, 120 bp, Artificial Sequence
  ENSG00000245522_3 (sequence is synthesized)
aagtggcctggcccagcccagatggaaaaccccctccacgtgactttctaaagaacatgcatgaagacaaaacaccaggtgcctcaggtgtgacaccctgaggacacatcacctgtacag

SEQ ID NO: 960911 - DNA, 120 bp, Artificial Sequence
  ENSG00000245522_4 (sequence is synthesized)
tatcctaacccacccaagatgacacagtaaggtaaaaccacagtagagcccaggcctgtttgactctgaagtccaggctcctttccaacttagtgccctaaaggcctgattggggtgggg

SEQ ID NO: 960912 - DNA, 120 bp, Artificial Sequence
  ENSG00000245522_5 (sequence is synthesized)
gtaggcaggaagattcaagcactgattgtttgtagcccaggctgggagggcaacagctctagaaaaaaagtcactcactgctttaaccatcttccagctaactgcagtgaggtgtacagg

SEQ ID NO: 960913 - DNA, 120 bp, Artificial Sequence
  ENSG00000245522_6 (sequence is synthesized)
gccatggggctctgggatgaactcttccacctctacaccttgtaaacaaggattccagacacaccctccaaatgggaatggagacacacgtttggcagagttggacagtaacgctgctct

SEQ ID NO: 960914 - DNA, 120 bp, Artificial Sequence
  ENSG00000245522_7 (sequence is synthesized)
cctatcagcctggactttgaggggagtggaaaacatgagtgtggaggtgcagcagtcctggtatcccctgaaaccagcctgtggggggaacagtcttcccaggggagctgctcaggatcg

SEQ ID NO: 960915 - DNA, 120 bp, Artificial Sequence
  ENSG00000245522_8 (sequence is synthesized)
tcctggtcccatgcatcaggaagaaaagggaacctgagagcagagggaaaatgcagaaagtggggcagggagactgctccctgaaacccccatgggctgctggtccaagcagaaagtgtt

SEQ ID NO: 960916 - DNA, 120 bp, Artificial Sequence
  ENSG00000245522_9 (sequence is synthesized)
acaggaaacgaggacttccgatgaggaggaggagggggcagtgggctgcgggtcttggggactgaacagaatggggtttgctagacagagctttcgtctacccactcctgaagtcctgct

SEQ ID NO: 960917 - DNA, 120 bp, Artificial Sequence
  ENSG00000245522_10 (sequence is synthesized)
ggacctcagctggcccttgtgaactgttgagggggatataaacacaaaggcctgcattcctgtgggtgcacaatcctaagagaccatggactgcctgtgtgtggtgggaacaggaaaagg

SEQ ID NO: 960918 - DNA, 120 bp, Artificial Sequence
  ENSG00000245522_11 (sequence is synthesized)
aggctgagtgtagccctgcttggaatttagtgtccaccacagatgtatccactacccagggccaaagactcggcagcctcagaagactcaatggaagctgagcacaggactagaaagggt

SEQ ID NO: 960919 - DNA, 120 bp, Artificial Sequence
  ENSG00000245522_12 (sequence is synthesized)
cagggccctcctctgtatgtaggggtggcacatggccactagctgggtgatggggcactgagaaattaaatgtttgacataaaaatgtaatcaggacccgagaggaggtgggtggtgtaa

SEQ ID NO: 960920 - DNA, 120 bp, Artificial Sequence
  ENSG00000245522_13 (sequence is synthesized)
gaggtgggtggtgtaatgaacagcatcctagaagtccggtacagatttcacgtgtcaccttctagttccttatctgaaattgaaaggtgaggtcaggtgcagtggctcaggcctgtaatc

SEQ ID NO: 960921 - DNA, 71 bp, Artificial Sequence
  ENSG00000245522_14 (sequence is synthesized)
ggcatatcactaaaaatacgaaaattagccggctgtgctgcacacgcctgtcgtcccagctacttgggagg

SEQ ID NO: 960922 - DNA, 74 bp, Artificial Sequence
  ENSG00000245522_15 (sequence is synthesized)
gcatcacagcgagacttcttaaaaaaaaaaaaaaaatttaaaggtgagccagttcaggcttctagaggcactgc

SEQ ID NO: 960923 - DNA, 120 bp, Artificial Sequence
  ENSG00000245522_16 (sequence is synthesized)
aatttaaaggtgagccagttcaggcttctagaggcactgcagttacagacggtaaactgcacaaatcctgggtgtgaagctgttttttcctgtgtaaccaccacccattgacagcatccc

SEQ ID NO: 960924 - DNA, 120 bp, Artificial Sequence
  ENSG00000245522_17 (sequence is synthesized)
agaaagttcaagtgtgtcccttcccagtttacagccacccgcctcccaccctcacttctaaatccaccgattagcagtgtgtcttggaaattaatatacaaggaatcatatagtatgtgc

SEQ ID NO: 960925 - DNA, 120 bp, Artificial Sequence
  ENSG00000245522_18 (sequence is synthesized)
tcttttgtgtttggcttctttgctcaagatgtccgtgagattcagccgggttgcctctctctgtaatatgttaatttaggtgtagtatccattgtctggaaatacaattgtctattctct

SEQ ID NO: 960926 - DNA, 120 bp, Artificial Sequence
  ENSG00000245522_19 (sequence is synthesized)
cagggacttcctaggccacgccacgccgctccaccagctcagggaacccccttggccgtgcagacctgcgccacagggtcgtttcctcccctccttccctcgaaagcgtatgcatttcgt

SEQ ID NO: 960927 - DNA, 120 bp, Artificial Sequence
  ENSG00000245522_20 (sequence is synthesized)
tgcccctggaactggggtcatttcaggacctcccaaggagggtcaggatggtggtattggccttaggggacgcgggctcaggttggcggttgaaccgcatgttcctgtttcaaacaaacc

SEQ ID NO: 960928 - DNA, 120 bp, Artificial Sequence
  ENSG00000231310_0 (sequence is synthesized)
ataaacatacttacttcaactttacattactcctaggatgtacgagaaattagtatgattaacagccaagaagcctgagagaattctgaaaactagaagcaaagatgaaaaggaagcaca

SEQ ID NO: 960929 - DNA, 120 bp, Artificial Sequence
  ENSG00000231310_1 (sequence is synthesized)
ctacttgtgagtgccactaaaggcctatgaaacccttccactgtgtgacactaatgttgtatgggggccttatatccaaagttcaacaactgacagtgattgctctggaccaggatctac

SEQ ID NO: 960930 - DNA, 120 bp, Artificial Sequence
  ENSG00000231310_2 (sequence is synthesized)
atcaccccacctcatgcatgccaaaagtattctcacagactcacacaactaagaatgaaggtagagtggtggactgggaagaacatcaaattcatagtcttacaatgatttattagaagt

SEQ ID NO: 960931 - DNA, 120 bp, Artificial Sequence
  ENSG00000231310_3 (sequence is synthesized)
ggtgagacattatttccggctgtgtctgagggtgttcccagttgagacaggcatttaacttagctgactgagaaaagcagactgccaccctccccaatgggcggcggggggggcatcact

SEQ ID NO: 960932 - DNA, 120 bp, Artificial Sequence
  ENSG00000231310_4 (sequence is synthesized)
cagtccagtgaggctctaaacagaacaaaaccgccaaggaagcaagaattctctgcctcagcctgactgctgagttggtatattggtcttctgctcttggactgggacttacaccattgg

SEQ ID NO: 960933 - DNA, 120 bp, Artificial Sequence
  ENSG00000231310_5 (sequence is synthesized)
cactccttctctggccctggaatggaaccacacctccatctttcatgggtctccagcttgtagacagcagactgtgggacttctcagcctctataatcacacatgaatgcacatatctgt

SEQ ID NO: 960934 - DNA, 120 bp, Artificial Sequence
  ENSG00000231310_6 (sequence is synthesized)
ggatgtacgagaaattagtatgattaacagccaagaagcctgagagaattctgaaaactagaagcaaagatgaaaaggaagcacaacaggtgaacaaaaatgtacagaagagaatgaaga

SEQ ID NO: 960935 - DNA, 120 bp, Artificial Sequence
  ENSG00000231312_0 (sequence is synthesized)
ggagggagcgcgccaggcctggcgcgcacccgaccccttgcgcgttccggctccgcgcgcctgccaggccggggccggcggcggaacagcttgggacccgaaacgcctcggcttttctgc

SEQ ID NO: 960936 - DNA, 120 bp, Artificial Sequence
  ENSG00000231312_1 (sequence is synthesized)
gcttgggacccgaaacgcctcggcttttctgcggacccgcgcccggccgctgccgccggacgcttgaaaagaggcagagtcttgctttgttgtccaggctggtcttgaacttctgagctc

SEQ ID NO: 960937 - DNA, 120 bp, Artificial Sequence
  ENSG00000231312_2 (sequence is synthesized)
ctgagactacagagagagaatgctaacgagctgtgaaatgaccaaagatctggcagcagaagggaaaagaaaaaataatgggaagaagaggatttatctgactcaactggagatggctcc

SEQ ID NO: 960938 - DNA, 120 bp, Artificial Sequence
  ENSG00000231312_3 (sequence is synthesized)
cttcccttatttattgttgcatcctgaagcttcccccatgctgggctcagtgtgaacaaacagcgcgggagaatgcaaccactgcagaggcatatgtttgagatacctggccactggagg

SEQ ID NO: 960939 - DNA, 120 bp, Artificial Sequence
  ENSG00000231312_4 (sequence is synthesized)
tcatctcgtctactatattcaccgcagataaagaatgaaaagagaatacacaaccttgtgattgctagcagtgaaagctcagagttatgacataacagcaccctgtctcagcactctccc

SEQ ID NO: 960940 - DNA, 120 bp, Artificial Sequence
  ENSG00000231312_5 (sequence is synthesized)
aactttgtccccaggcagtgagtgcttcatggccagagagagataggactgaaccctcgtaccttcaaacatatctaaatctctggtgcagttcagagtggttgatcatactgtaaaact

SEQ ID NO: 960941 - DNA, 120 bp, Artificial Sequence
  ENSG00000231312_6 (sequence is synthesized)
caaatgtgaagggaaggctggaacctactggaaactgaagatctaacgaaaagaaggaacttttaggaactagcagagacttcaaaatgttgagaactctcttttttcataagagaagat

SEQ ID NO: 960942 - DNA, 120 bp, Artificial Sequence
  ENSG00000231312_7 (sequence is synthesized)
aaaaactctgatggtcacactcataaagacaaaaaacaaataaaaaacaaacaaaaactcagaatcacaagagcaaagaaaatgtaggtaaaacaataacagaagaggtaaagaaattta

SEQ ID NO: 960943 - DNA, 120 bp, Artificial Sequence
  ENSG00000231312_8 (sequence is synthesized)
tgtgaattgggacactctggggcacagaacagaagaggagaagaaacatgaaagtaatgctctgcacaaggatgtctgactgtccttgattccaagggcatttaaaattagccactggat

SEQ ID NO: 960944 - DNA, 120 bp, Artificial Sequence
  ENSG00000231312_9 (sequence is synthesized)
gagaaccatgaaatgccatgactcttacagctcccatgaaagacattggatggaacttatcctaactggaccaaattctaaaaaattttacatgatattataatgagttgaaagttgaaa

SEQ ID NO: 960945 - DNA, 120 bp, Artificial Sequence
  ENSG00000231312_10 (sequence is synthesized)
aaaaaaagctcttctagattaccaagaataaaacacaaatttctagctgactgaattaattctcatctctctatagaaagatcatagaaattttttttatcatgcaaagaaatagctaaa

SEQ ID NO: 960946 - DNA, 120 bp, Artificial Sequence
  ENSG00000231312_11 (sequence is synthesized)
tgtgatgtttatggtacttttcggcttttaaaattttgtatttaatcaggatttattacttcattgtaagtaaatattaaatttgtactccatctttgtttgtaattttgtatatttttc

SEQ ID NO: 960947 - DNA, 120 bp, Artificial Sequence
  ENSG00000231312_12 (sequence is synthesized)
agtaaaaaggactccccagattatgtaagctttaggccccacaaaatctaggcctgttgctgtatcctttctagagcagtgtttctcaaacttcaatgtgcatttgaatctcctggggct

SEQ ID NO: 960948 - DNA, 120 bp, Artificial Sequence
  ENSG00000231312_13 (sequence is synthesized)
cctgttaaaatatagcttctgagatgatgcatttctaacagactcccagggctgacactgcccatctggggaccacactttgagaatcaaatatctagaacaatggttcttacctggctg

SEQ ID NO: 960949 - DNA, 120 bp, Artificial Sequence
  ENSG00000231312_14 (sequence is synthesized)
tgcattgggatcatttatagtgcttttggaaaatacattgtgtccaggtcccacccagttctcagtaggcttggaatggggtcctacactttttttttttaactccacagtttgggaaag

SEQ ID NO: 960950 - DNA, 120 bp, Artificial Sequence
  ENSG00000231312_15 (sequence is synthesized)
aagccttttcatatattgttggtgggaatacaaattgatacagccatttttgagcttgatttggcaatatcttccttggagaaatcaaaagccagttggcaagccagtctggaaaaggca

SEQ ID NO: 960951 - DNA, 120 bp, Artificial Sequence
  ENSG00000231312_16 (sequence is synthesized)
gtttactgattcccacccgagggtcacaaagcaggtatagaaggatgggctttggctgaaatatatgatgggtacaggtatattctctataatccagtatttccactgctgaaaacgtat

SEQ ID NO: 960952 - DNA, 120 bp, Artificial Sequence
  ENSG00000231312_17 (sequence is synthesized)
cctagtaacattatacatatcaagcctacatataaagttggtcaattccatattatttgtagtaggggaaaactgaaagcagtctacatgcccatcaatagattattcaaattatggaac

SEQ ID NO: 960953 - DNA, 120 bp, Artificial Sequence
  ENSG00000231312_18 (sequence is synthesized)
agttttccaatgacaaaacaatagctaatcttagttaagcaattattatgttatgtaaggtagacattgttctaccttatttataagtattaagttagtttttataactatcatatttcc

SEQ ID NO: 960954 - DNA, 120 bp, Artificial Sequence
  ENSG00000231312_19 (sequence is synthesized)
attttacaaatgacataatttatattattgacatgggaagatgtccaaggatataataagcaaaaagcaagtagcaaaacattatgtatattatgcattaccattataatatactaaaaa

SEQ ID NO: 960955 - DNA, 120 bp, Artificial Sequence
  ENSG00000231312_20 (sequence is synthesized)
attaccattataatatactaaaaagtaatgcacttgattctgatgcacactccccagtaggtaacaacttatctagtgtaaaaatgaaagaacattctgggccgggcacggtggctcatg

SEQ ID NO: 960956 - DNA, 120 bp, Artificial Sequence
  ENSG00000231312_21 (sequence is synthesized)
cggattccttcaaactgctacagcttctgtgtctatccctgtcttccatgtgcttgacagctttgaagagtacaggtccttcattcagtagaatgaccaccaagccaggtccaccagatg

SEQ ID NO: 960957 - DNA, 120 bp, Artificial Sequence
  ENSG00000231312_22 (sequence is synthesized)
tttcatcatggttttagtgaggttataaattctgggcagtaattctacagaagtgctgctttgtttttctcagtgcctcacacccagtggcacatatcatcaccactggtgatgctaacc

SEQ ID NO: 960958 - DNA, 120 bp, Artificial Sequence
  ENSG00000231312_23 (sequence is synthesized)
tcgattgctcaaccacattgtctgccagctcccgcctacttaaattcaacattttgccttttgcaatttatttgtgttttgtgggaacatattttcatttctgaaattagtcaatatcct

SEQ ID NO: 960959 - DNA, 120 bp, Artificial Sequence
  ENSG00000231312_24 (sequence is synthesized)
gttccttatcaaacttccaactctggtcttagcatccattgactgaatcaagtgcctttgtgtaagtttccacatgatgagtgtctatttccatcattggttctatttttatgagctggt

SEQ ID NO: 960960 - DNA, 120 bp, Artificial Sequence
  ENSG00000231312_25 (sequence is synthesized)
attttactataagaaatagcatattattttctatgcttaaaccactgcaagtttgaccctttcaagctggtttttgtgtccttttgacatattcccattgttcattgagcatttccttat

SEQ ID NO: 960961 - DNA, 120 bp, Artificial Sequence
  ENSG00000231312_26 (sequence is synthesized)
tttctggcataagaagatgttccaagtgcaacttgtatattacctgtttcagccctggaatcagacattttcctaaggatccttggtttctttgaataaaggatactatttagaagccaa

SEQ ID NO: 960962 - DNA, 120 bp, Artificial Sequence
  ENSG00000231312_27 (sequence is synthesized)
ctgctgtccggttcgtcgcgctgaccctgccaacgcaacaaacgcccagaccttctctgcactatggatgagcagtgtggcctgctctcgttctgcccttccctggaaatgcgcgcaaga

SEQ ID NO: 960963 - DNA, 120 bp, Artificial Sequence
  ENSG00000231312_28 (sequence is synthesized)
ttgaagtcagtggctggagtagttgtgggccagaaacatcctcctcagcccaggagaagtggcagctgatgtattttaattactgggagtcaagaagttgtagggataagaaatgagttc

SEQ ID NO: 960964 - DNA, 120 bp, Artificial Sequence
  ENSG00000231312_29 (sequence is synthesized)
agctgagcgatcagctggaggtcagggatggaggaaagacccagggtgtgtgagattctgaagtagagtggtgaacaggtgtgggatggatgtcagggagaggtgagggtatctggaggg

SEQ ID NO: 960965 - DNA, 120 bp, Artificial Sequence
  ENSG00000231312_30 (sequence is synthesized)
tttccaaacagccaggccttcaggatggccacagcaaaacttccagttctgaatggttttgtggaaagaacatggcacctggatcttggaagacatgaactgaaatttcagttcaagcat

SEQ ID NO: 960966 - DNA, 120 bp, Artificial Sequence
  ENSG00000231312_31 (sequence is synthesized)
tctatagccatgagacctgggggaattggggcaagttatttcacatctttgatcttcaattctctcatcttcaaaaggagactaatgatactagggttaagtgagaatttaaaaaataat

SEQ ID NO: 960967 - DNA, 120 bp, Artificial Sequence
  ENSG00000231312_32 (sequence is synthesized)
gcatataatgcactacataaatagaatcttcttcctttccctttctcctacttggaaatggctgagagcaaagatgcagttcttgcatcccatgaccacagagttctaggactgcagccc

SEQ ID NO: 960968 - DNA, 120 bp, Artificial Sequence
  ENSG00000231312_33 (sequence is synthesized)
tgggcaagaggttccaccttggctgctggagttttctgcaacgaagaacttcagtgagtgttcagggcatgcctgcagaaccctggtccttctgtttggaccagtgctccaaatctgtag

SEQ ID NO: 960969 - DNA, 120 bp, Artificial Sequence
  ENSG00000231312_34 (sequence is synthesized)
gcctttgggccgtaatttagaagctatttctaaatttttgaaggtcttctgtctagtcctgaggcctttagtctcagagaattaaattgtcttacccagggtcggtcatacagactgcca

SEQ ID NO: 960970 - DNA, 120 bp, Artificial Sequence
  ENSG00000231312_35 (sequence is synthesized)
gtctgagccacagaccacctgtactagtagcagccggtgggcttgataaaaatgcagattcctggctccctgacagtcccgtgctatcagattctgtaaagtttaaaagtaatgatttat

SEQ ID NO: 960971 - DNA, 120 bp, Artificial Sequence
  ENSG00000231312_36 (sequence is synthesized)
aaatttcccagacccgggttatacttttatatggaaacataatgcctgaatctgacagagcgctttttcatggaggaaagttgggactcttgggcagacttcctgttgctttcgtactct

SEQ ID NO: 960972 - DNA, 120 bp, Artificial Sequence
  ENSG00000231312_37 (sequence is synthesized)
gatttgtcagagagccagaactgcaggcaaatagacgccagagaaatcaaccaatcttttaagccagcagtaattgttcctcctgtcggctggctaaatgacttgtatctggaggagacg

SEQ ID NO: 960973 - DNA, 120 bp, Artificial Sequence
  ENSG00000231312_38 (sequence is synthesized)
acagaaacacagagcattccaaagtgggctgtaacagagtgagtgtttcttcatgtcttacaagagtttggtttcatgttttttcccctttccctcttattctgtctcctggggctagtg

SEQ ID NO: 960974 - DNA, 120 bp, Artificial Sequence
  ENSG00000231312_39 (sequence is synthesized)
ttatctggcagagaccaagctgaagcatgtatataatagcaaggaatagtagtttgtgtggggatgaggggaggtgagtactagtatttaattctagaatatacttacctgtatctcagt

SEQ ID NO: 960975 - DNA, 120 bp, Artificial Sequence
  ENSG00000231312_40 (sequence is synthesized)
ttacctgtatctcagtcattaaacccaggaagtccctatagaataggtaccacccaagagggggtaaaatccctttgctggtgagctgtccatcatttttttttttttttgagacagagt

SEQ ID NO: 960976 - DNA, 72 bp, Artificial Sequence
  ENSG00000231312_41 (sequence is synthesized)
ggctgcagggtcccgcactcagagccctgctggccccaggcagtggggggcttagcacccgggccagcagct

SEQ ID NO: 960977 - DNA, 79 bp, Artificial Sequence
  ENSG00000231312_42 (sequence is synthesized)
ttttatgagctgtaacacgcacggcgaagattgggaggaaggaagaactccagacgcactaccttaagagctgtaacat

SEQ ID NO: 960978 - DNA, 88 bp, Artificial Sequence
  ENSG00000231312_43 (sequence is synthesized)
cctgagcccagcgagaccacgagcccactgggaggaaggaagaactccagacgcactaccttaagagctgtaacattcaccgccaagg

SEQ ID NO: 960979 - DNA, 120 bp, Artificial Sequence
  ENSG00000231312_44 (sequence is synthesized)
aactgcaaaatataatttacactcatgtacaaactacctagatttaagaggtactatcttgtcatattagcattggttctctttttttttcttccttcttccctctctccctcttttctt

SEQ ID NO: 960980 - DNA, 120 bp, Artificial Sequence
  ENSG00000231312_45 (sequence is synthesized)
ccctcctttccttcttttgaaacaaaatgttgcagtatagctaaatgtccattcttttatcacattgttttatttatttgtcttcctttccagagggagctgatatcataaggttagaat

SEQ ID NO: 960981 - DNA, 120 bp, Artificial Sequence
  ENSG00000231312_46 (sequence is synthesized)
ttatctttcttgttcattaaaattaccttatatatatgcagaaataatatgcagtgctctttgggggttggtttttaatattaacttatttggtgtattttatatgtgttcttttacatc

SEQ ID NO: 960982 - DNA, 120 bp, Artificial Sequence
  ENSG00000231312_47 (sequence is synthesized)
ttttttacatatgatgttttgttgggatttttccatgctgatactaataggtctagtacgattgttttaactgctgcattgaattgctttatatgactaaacccaactttatttaacttt

SEQ ID NO: 960983 - DNA, 120 bp, Artificial Sequence
  ENSG00000231312_48 (sequence is synthesized)
aagttcacatctcaacaagcatgtgagcctggtgtttgtgtctcttatttccaattctccagaaagagaatgccagaatattaattggttcctcatatcaatcagccaaagtcaacttgt

SEQ ID NO: 960984 - DNA, 120 bp, Artificial Sequence
  ENSG00000231312_49 (sequence is synthesized)
gcaggcatggccaaatattttatatttaaaccataatgtttaaatataaaagatagatcacatattttataactatctttagcttaatattttgccaacatacttttttgtcaagataat

SEQ ID NO: 960985 - DNA, 120 bp, Artificial Sequence
  ENSG00000231312_50 (sequence is synthesized)
ttttttgtgacagtgtagtatccatcgtatgtacttgcctcagtttgctcaaccaattgctattgatggatattctttcgtccaggtatttgccagtacaatcaatgttgttacgaacaa

SEQ ID NO: 960986 - DNA, 120 bp, Artificial Sequence
  ENSG00000231312_51 (sequence is synthesized)
ccatcataaatatttgtgcctagccttaattattttttagggcaaattattatttttggaacttttattttaggtttgggggtacaggtgcaggtttgttatatagtaaacttgtgtcac

SEQ ID NO: 960987 - DNA, 120 bp, Artificial Sequence
  ENSG00000231312_52 (sequence is synthesized)
agcctagtacccaatagttattttttctgctcttctccctcctcacacccttcaccctcaagtagaccccagtgtctgttttcccttctttgtgttcgtgagttctcatcatttagctct

SEQ ID NO: 960988 - DNA, 120 bp, Artificial Sequence
  ENSG00000231312_53 (sequence is synthesized)
ttcccttctttgtgttcgtgagttctcatcatttagctctcataaaaaagaacaggatcgtgtcttttgcaggaacatggatgaagttggagtctattacccttagcaaactagtgcaga

SEQ ID NO: 960989 - DNA, 120 bp, Artificial Sequence
  ENSG00000231312_54 (sequence is synthesized)
aacagaaaaccaagtatcgcatgttctcacttataagtatggtaaattattaaaagcaaaattgttaggttaagaagtatgaacagttttaagactttagaaatatgtaccccaattttc

SEQ ID NO: 960990 - DNA, 120 bp, Artificial Sequence
  ENSG00000231312_55 (sequence is synthesized)
ttctggaaaaactgcacccgttcatattcccacgagccatgtggtaaagtgcctgcctttccacaccctcaccagcactggggattattctcttatcgttgccagtttgatagccaaaaa

SEQ ID NO: 960991 - DNA, 120 bp, Artificial Sequence
  ENSG00000231312_56 (sequence is synthesized)
catcccgagaaggctctgaagagtgggctggttaacaggagcattttcactgcaggcagactcggttgccttggtgaagtccccgtgcatctgaagagtggctcatctgttcctgcctgg

SEQ ID NO: 960992 - DNA, 120 bp, Artificial Sequence
  ENSG00000231312_57 (sequence is synthesized)
ggatcacttgtgctcatccaggcatggcccccaccagaaatctgggagaatggcgagctggtgccagctgaactgtgaacctctaagaataagtgaataaaacgattttatgcactacaa

SEQ ID NO: 960993 - DNA, 120 bp, Artificial Sequence
  ENSG00000231312_58 (sequence is synthesized)
agataaagaatgaaaagagaatacacaaccttgtgattgctagcagtgaaagctcagagttatgacataacaattggttggaaagaacccaaggggacatgggcacagcatcccttcctg

SEQ ID NO: 960994 - DNA, 120 bp, Artificial Sequence
  ENSG00000231312_59 (sequence is synthesized)
agagaatgcttagaggctaagcgatgggcaagtgagagggaaagagccgcgacagatagagctggctgcctaggggtctcagaggcttcatcctgcaggcggcaggcggcaggacaaagg

SEQ ID NO: 960995 - DNA, 120 bp, Artificial Sequence
  ENSG00000231312_60 (sequence is synthesized)
gaccttcggactccagatcaagattccaaggagttaaacgctaccacgcagcccgacctggatgggatttgctcctgggtacaaaacgggacactgatcaaaatcaacttggacaagtga

SEQ ID NO: 960996 - DNA, 120 bp, Artificial Sequence
  ENSG00000231312_61 (sequence is synthesized)
acaaggagaggagaaccctcgcagcccctcgctcggggtgaaactccaacatggcttccgctttcgccgctcctccccctccccttactccggctcctccaacctcctccccttttcccg

SEQ ID NO: 960997 - DNA, 120 bp, Artificial Sequence
  ENSG00000231312_62 (sequence is synthesized)
agaacattctgttacctcaaacacgctgttttcatgcaatttagttaactggtagcactttcagaagaagacaaagtaaaaatggttaggtcaatttggtggcatagagtattctatcga

SEQ ID NO: 960998 - DNA, 120 bp, Artificial Sequence
  ENSG00000231312_63 (sequence is synthesized)
tcagtggtcaaaagagtagtcattctgagtgatctctaacattagggttgatggaagagatgacccatagatgtccctacatctcatttctcttaggacacacacttgggagaaatcgtc

SEQ ID NO: 960999 - DNA, 120 bp, Artificial Sequence
  ENSG00000231312_64 (sequence is synthesized)
cagtgcactttgtccaggccttttacttgtaccaactactttgctttatgctgttttcactttagtggttctgccttctagtccacagaaaagttttttcttaacgtatttttttcccaa

SEQ ID NO: 961000 - DNA, 120 bp, Artificial Sequence
  ENSG00000231312_65 (sequence is synthesized)
cactttattatgggaattttcaaacatacagaaaagataaaagaaatttacagagaatactcgtgtctctatcagctagattctacagttaacattttactatagtagttttattgcata

SEQ ID NO: 961001 - DNA, 120 bp, Artificial Sequence
  ENSG00000231312_66 (sequence is synthesized)
tctgtttatctccctgtgcatccatggatccaattcatctttaggatgcatttcaaagcaagttgctgacgtcagtacacttccctctcaatactttagtatgtggatcaataaccctag

SEQ ID NO: 961002 - DNA, 120 bp, Artificial Sequence
  ENSG00000231312_67 (sequence is synthesized)
cttaagatttgttgattgtttttctttccttttgaagtaaaatttacacacaaggaaatgcacacatcttaagtggaccatttgatgagttttgagtaatgcccacattgtgtaactcaa

SEQ ID NO: 961003 - DNA, 120 bp, Artificial Sequence
  ENSG00000231312_68 (sequence is synthesized)
acgtctatcaagaaagaacattaccatacctgagagtatcctcatgctcctcccctggggtactccctgcctctccacaccaatccccccaggtaacaactgttctgatatccccctcac

SEQ ID NO: 961004 - DNA, 120 bp, Artificial Sequence
  ENSG00000231312_69 (sequence is synthesized)
catatatacctgctctagaacatcatataaatggaatgatacaatatgtcttttgtataagctttattccactcagcataatgtttttgccattcacccatattattgatcatattagta

SEQ ID NO: 961005 - DNA, 120 bp, Artificial Sequence
  ENSG00000231312_70 (sequence is synthesized)
ccttgctccttcttattactgagtagtattagatagtataaacatagcgtagtctattttcctattttgatggatatgtgggcttgttctgatttttgcttattatgaataaaacttctg

SEQ ID NO: 961006 - DNA, 120 bp, Artificial Sequence
  ENSG00000231312_71 (sequence is synthesized)
tctggcagcagaagggaaaagaaaaaataatggaatattttctgtctacaattggttgaatctgtggatgtggaaactgcagatacagatggagagccgactatactagctttttgtttc

SEQ ID NO: 961007 - DNA, 120 bp, Artificial Sequence
  ENSG00000231312_72 (sequence is synthesized)
gtgtgtgtgtgtgtatctgtgtgtgtgttttattaatctctgtgcctgcatgttagtttcttcctctttatttggattttcactaacattcttttcagcttcttcagttggatacttgtt

SEQ ID NO: 961008 - DNA, 120 bp, Artificial Sequence
  ENSG00000231312_73 (sequence is synthesized)
cctctttatttggattttcactaacattcttttcagcttcttcagttggatacttgttgccaatatattttttttcattctaagaattaaataaatgggccaggcgtggtggctcatgcc

SEQ ID NO: 961009 - DNA, 62 bp, Artificial Sequence
  ENSG00000231312_74 (sequence is synthesized)
caagatgggtggatcacaaggtcaggtgtttgagaccagcttggccaaagtctataatccca

SEQ ID NO: 961010 - DNA, 120 bp, Artificial Sequence
  ENSG00000231312_75 (sequence is synthesized)
aaaaaaaagaataaatgaatgtattaatcaccaaactgctcttcatcagaaactcttagcagtggtatgttgaggtctccctgcctaccgtatatgtctcttaactctgcgggtgcaata

SEQ ID NO: 961011 - DNA, 120 bp, Artificial Sequence
  ENSG00000231312_76 (sequence is synthesized)
ttttgtcatgggtcagtttagcaatattgtactatttcccaattttctaagtgtgttcatttcagagtttatcctattcattgttctttctttcttttaaaaatttctatgactgagctg

SEQ ID NO: 961012 - DNA, 120 bp, Artificial Sequence
  ENSG00000231312_77 (sequence is synthesized)
aaccactgcagaggtacaagttcacagaggcagagccgcccctcgactgggccagaggcaaagacaaaccccaaactctttcttgtcattcattgaattttgctgaacctggaaaggaaa

SEQ ID NO: 961013 - DNA, 120 bp, Artificial Sequence
  ENSG00000231312_78 (sequence is synthesized)
taaattccaaaggcaggaagtgacccagagaccataacaatatgtgaaaagcttagccggtgcttccgcccctttgtttcaaactattctaatctgtgtcccaggaagcctagcccatgg

SEQ ID NO: 961014 - DNA, 120 bp, Artificial Sequence
  ENSG00000231312_79 (sequence is synthesized)
gaggtgtagcaccaggaaagtccttgggtctctggctgtcagcaccaaccagctgatttgcttcatctgcagctgaactgctgctggactccagcctagaacactagtgcacaccgggtc

SEQ ID NO: 961015 - DNA, 120 bp, Artificial Sequence
  ENSG00000231312_80 (sequence is synthesized)
tgttcttgaagatttgcagattctgaaatcaaaatgccctgtgttgccagaaaaggctggctcccttgcctgcttcataatcccttctcaccaggctttcctaaagaaactcaatgagtc

SEQ ID NO: 961016 - DNA, 120 bp, Artificial Sequence
  ENSG00000179577_0 (sequence is synthesized)
caggcatgagccaccgcgcccagctgttttgcatttttgtatgatttccatccttcactttatgaaggacattatttatcacattaatgatcaaatatatttatcacaataatgataata

SEQ ID NO: 961017 - DNA, 120 bp, Artificial Sequence
  ENSG00000179577_1 (sequence is synthesized)
aatagaaaattaaatatttacatttttgtatgtgtgtcttttgggagaaagatacatattctgcattatcttactagtatgaagccttctttatctatgtctgctgattgtgtacacctc

SEQ ID NO: 961018 - DNA, 120 bp, Artificial Sequence
  ENSG00000179577_2 (sequence is synthesized)
ggtgccagacataaggaaaaccagcataggccccagagcctgatgtgtaagttctggtcccagatccatcgaaggccatttaaagtctctgaaaatccactctttcatatgtaaaatgtg

SEQ ID NO: 961019 - DNA, 120 bp, Artificial Sequence
  ENSG00000179577_3 (sequence is synthesized)
atcattaagaattgttatgcctacctcataaagttttggttagaatcacatgagatacatgtgaaaatgctttgtcaactaagaacgtgttacacaaagacaagatatgtattattatgg

SEQ ID NO: 961020 - DNA, 120 bp, Artificial Sequence
  ENSG00000179577_4 (sequence is synthesized)
ttattttctatttctctagtttgactagtttcattctttgcaggacattttcatttttagatgttcttagctattttgcctgtggtgatcagaaggcagatgaaccatggggttctattt

SEQ ID NO: 961021 - DNA, 87 bp, Artificial Sequence
  ENSG00000179577_5 (sequence is synthesized)
tgtggtgatcagaaggcagatgaaccatggggttctatttctctgactctagatccttttaaaaagctggtgacctttttgtctttc

SEQ ID NO: 961022 - DNA, 120 bp, Artificial Sequence
  ENSG00000179577_6 (sequence is synthesized)
gagcctcccttggatttctttgacttatttgacttactctatatcttgcttctttactcctctaatttaacattttcctctaaaccatcatcagaatgtttttgcactatcattattcat

SEQ ID NO: 961023 - DNA, 120 bp, Artificial Sequence
  ENSG00000179577_7 (sequence is synthesized)
tgaatctggaagaattcaaggagaaagcgtgtttgttgtggttcacgttaaaagagagagatcgttgcagaaactgtatgctgagcccttgtctgggtcgatcacagcaccagctttctc

SEQ ID NO: 961024 - DNA, 120 bp, Artificial Sequence
  ENSG00000179577_8 (sequence is synthesized)
tattcttggcctggttgttatgagaaagttgctcatctgggctggctgttcccgaccaaaatttatgctgatgacctcaactaggacctttctgaagtgcaataatatttttagcctttt

SEQ ID NO: 961025 - DNA, 120 bp, Artificial Sequence
  ENSG00000179577_9 (sequence is synthesized)
ctaactgtccatgaatcatccatagctttccactgtccttagacactacccctaccatcgtcactgtctgcctcttctcaccttgcagcccgagttctactgaatccagaaaacccactt

SEQ ID NO: 961026 - DNA, 120 bp, Artificial Sequence
  ENSG00000179577_10 (sequence is synthesized)
acaatcctgtaccacaatctgtcttccttttctttctcattaatattcttgagtctagttccatttttaaaaataaatgttttattttagaatattttagatttacagaaaagttacaaa

SEQ ID NO: 961027 - DNA, 120 bp, Artificial Sequence
  ENSG00000179577_11 (sequence is synthesized)
gatagtacaagacactcctatgtaccccacagctggttgccactattattatcttacattagtatggtacacttgtcacaattaatgatccaatattgatatgctattattaactagaat

SEQ ID NO: 961028 - DNA, 120 bp, Artificial Sequence
  ENSG00000179577_12 (sequence is synthesized)
ccatgctttatcatatttccttagtttttgcctgttttttcccttccgggatttaatattacatttagtggtcatgtgtccttaggctcccctgacttgtgacaatttctctgactctgt

SEQ ID NO: 961029 - DNA, 120 bp, Artificial Sequence
  ENSG00000179577_13 (sequence is synthesized)
ttttgatgaccatgacagttttgaggaatatcgatcaggtattttgtagaatggcctctgttgtgattttcctgatgtttttctaattataagcttcgggttgtgggtttgcgggaggaa

SEQ ID NO: 961030 - DNA, 120 bp, Artificial Sequence
  ENSG00000179577_14 (sequence is synthesized)
gatcacaaaagtaaagaaccattttcatcaaaagacatacggtgagcacgacttaccactactggtgttgacctggatgaactggctgaggtcgtacttgccaagtttctccaccataca

SEQ ID NO: 961031 - DNA, 120 bp, Artificial Sequence
  ENSG00000257259_0 (sequence is synthesized)
agttgcagtgagatgtgaggcacttgcagagactcagtccaccaccctgggcagctttcaccaccctgggcagcttttccgagacgtagggactggcttgccgtaattcatagcttctgc

SEQ ID NO: 961032 - DNA, 90 bp, Artificial Sequence
  ENSG00000257259_1 (sequence is synthesized)
ctgctgtcccttgctacatacctttgagtagcaaggagcccaatgttaatcctcaagaccatagggaaaatgtctccaggccatgtcaga

SEQ ID NO: 961033 - DNA, 120 bp, Artificial Sequence
  ENSG00000257259_2 (sequence is synthesized)
caggaggaaaaagtggtttcatgggccaggtccagggtccttgtgctgtgtgcagccttaggacttggtgccctgtgtcccagccattccagccgtggctgaaggggccaatgtagagct

SEQ ID NO: 961034 - DNA, 89 bp, Artificial Sequence
  ENSG00000257259_3 (sequence is synthesized)
agctcaggccatggcttcagagggtggaagccccaaaccttgacagcttccacgtggtgttgagccttaggtactccaactggatttca

SEQ ID NO: 961035 - DNA, 66 bp, Artificial Sequence
  ENSG00000257259_4 (sequence is synthesized)
tgctagagcaaactggaaggaaggaaaatgtgggtttggagcccccacacagagttcctagtgggc

SEQ ID NO: 961036 - DNA, 120 bp, Artificial Sequence
  ENSG00000257259_5 (sequence is synthesized)
aactggaaggaaggaaaatgtgggtttggagcccccacacagagttcctagtgggcactgcctagtgcagctatgagaagagggccaccatctttcagaccccagaatggtagatccact

SEQ ID NO: 961037 - DNA, 87 bp, Artificial Sequence
  ENSG00000257259_6 (sequence is synthesized)
caatgccagcctgtgaaagcagctgggtgagggctgaatcctacaaagccattctcttgcatcagtgtgatgtggctgtgagacctg

SEQ ID NO: 961038 - DNA, 89 bp, Artificial Sequence
  ENSG00000257259_7 (sequence is synthesized)
cactgaacttcagacttgcatgggccctataacccctttgttttggcctatctctctttcggaatggctgtatttacccaatacctgta

SEQ ID NO: 961039 - DNA, 60 bp, Artificial Sequence
  ENSG00000257259_8 (sequence is synthesized)
ttacccaatacctgtacttccattgtatctaggaagtaactagcttgactggatttttgg

SEQ ID NO: 961040 - DNA, 83 bp, Artificial Sequence
  ENSG00000257259_9 (sequence is synthesized)
aagggatggagaaaaatcgaccaagcaaatggaaaacagaaaagagcaacttgcttcctgaaaattcacgactctcactctat

SEQ ID NO: 961041 - DNA, 120 bp, Artificial Sequence
  ENSG00000257259_10 (sequence is synthesized)
ttctgcctcagcctcccaaatagctggaactacagcaaggccaacttttctaccagataaccctgacctcatcctgtcagaattgaatggaccaagaattgagctaccctaaaaggccag

SEQ ID NO: 961042 - DNA, 120 bp, Artificial Sequence
  ENSG00000257259_11 (sequence is synthesized)
ttttctggaaatagtttgaagataccgactcatggttaaatgtttcacatttaccctcagaaatgagtgctactgttcagaaacggaggtgcccactttgcttgtgggatttaggaggaa

SEQ ID NO: 961043 - DNA, 85 bp, Artificial Sequence
  ENSG00000257259_12 (sequence is synthesized)
gcctcatcctcccaaaatgcattatctcttcccaaaatgcattatctatttcattaagaaaaaggagaaagcaaccatgctaagc

SEQ ID NO: 961044 - DNA, 120 bp, Artificial Sequence
  ENSG00000257259_13 (sequence is synthesized)
ctatttcattaagaaaaaggagaaagcaaccatgctaagcttcaaataaaagcatgtgagcacacctgatgacgctagacccactggaatctcgcataactcatcctgaacgtgttggga

SEQ ID NO: 961045 - DNA, 120 bp, Artificial Sequence
  ENSG00000257259_14 (sequence is synthesized)
atcaagtctctcaggattagccctggtaatctgaaagtcaccagtcatcaagaagtggcatctctaccatgtggtgcaatcatagccctgaactcaaatttctgtctgatatatttgatg

SEQ ID NO: 961046 - DNA, 120 bp, Artificial Sequence
  ENSG00000257259_15 (sequence is synthesized)
tgatccctccttttatacccttttaacttctgcttggagagacccactgaccttgtagctgactgtcagaacttttccttgccaggccagcaataaatttggcattgttttggacattga

SEQ ID NO: 961047 - DNA, 120 bp, Artificial Sequence
  ENSG00000257259_16 (sequence is synthesized)
cacagatctccactaaacacaaatgaaagttctgaaatggggaaataatggttgatgtactcaattgcttgctgggatgtgcttccctgaggcttgccagtgtgctgacaaccacagaaa

SEQ ID NO: 961048 - DNA, 120 bp, Artificial Sequence
  ENSG00000257259_17 (sequence is synthesized)
cacattcattcattaacatatggaacgtatgtggcacctctgctagacagttgtgccaggtaccaaggatcccccaaaagcagtaacaacctgatcctgccttcattgccacttacatcc

SEQ ID NO: 961049 - DNA, 120 bp, Artificial Sequence
  ENSG00000257259_18 (sequence is synthesized)
acccatgggaaacagatttaacgaaagagcaattggaattcatgtgctctgatgtgggaagtacatgatactatggaagcccagagaaagggtacctaacccagattttgaagaaatgag

SEQ ID NO: 961050 - DNA, 120 bp, Artificial Sequence
  ENSG00000257259_19 (sequence is synthesized)
aaatgcttcctggaagatgagacaactaccctaagacctgcaaaatcaataggagtatgacctatgaagtgagagaagaaagataaaaataatggacatgaggaaaactctactactatt

SEQ ID NO: 961051 - DNA, 120 bp, Artificial Sequence
  ENSG00000257259_20 (sequence is synthesized)
tagccattttctgtcgtacattttaaataagaattagaaattaagcaagcattttacagattactccagaaactgctcttctaaaggcaagctccactgaatttttctagaaaaaaggaa

SEQ ID NO: 961052 - DNA, 120 bp, Artificial Sequence
  ENSG00000257259_21 (sequence is synthesized)
gcctcctgaattctcaccaaataaatgcctgatactctacctgcttgctccagctgacacagtcaagagaaacctaagtccacatctgcagaccatggagttccctgaacaaaaacctct

SEQ ID NO: 961053 - DNA, 120 bp, Artificial Sequence
  ENSG00000257259_22 (sequence is synthesized)
tgtcccttgctacataccttatgtttcaggcttcgtattaagtgtcaaagatcccatgacaagacagctcccctgcttgctgggaggacgtggtgaggacagggtacatctgaaacctct

SEQ ID NO: 961054 - DNA, 120 bp, Artificial Sequence
  ENSG00000257259_23 (sequence is synthesized)
ggtgtgtctggcagagttgcaaacgactagattccatccaagatcaaatgaatcagaatctgtggcatttcattcaagggccctgatgtatctgaaggagagattttgccaaaaggagtt

SEQ ID NO: 961055 - DNA, 120 bp, Artificial Sequence
  ENSG00000257259_24 (sequence is synthesized)
ggcaaggaggaaaaaaagaagaggaggcaaagaaataaatgttaaagatggagcaaaaataagaaaaaaaaacattctatgagagggaagaagaaaaaggaaaaagagtggaagcaagaa

SEQ ID NO: 961056 - DNA, 120 bp, Artificial Sequence
  ENSG00000257259_25 (sequence is synthesized)
ttggaggaatgaagaatcttgctagagagaaaaaaaaatgttatttcctaatagtttctattaggacatttgcttaaacatatcagtatctcagactctgccacttcaaagtgtatttta

SEQ ID NO: 961057 - DNA, 120 bp, Artificial Sequence
  ENSG00000257259_26 (sequence is synthesized)
cttcagatcagtgaattttattgtctataaatataaacaaatttcagtttaaaaagcatatttaaaaatattttaagtattactgttgagaattttttaataaacaacttccactggcca

SEQ ID NO: 961058 - DNA, 120 bp, Artificial Sequence
  ENSG00000257259_27 (sequence is synthesized)
tccctgccattggacattgggaagatgttgatgattttaactgacaccctggctaaaccatttcaggacaaccatggttaggtctctttgttgctcttttcacaggtgcccactttgctt

SEQ ID NO: 961059 - DNA, 120 bp, Artificial Sequence
  ENSG00000257258_0 (sequence is synthesized)
tgactacactgcacatcccgtgggagggatgctcttgtatctgctaaagacattgcggaggcgccctgcagtgacccacgaacgcagtggctttttaaaacccaagggcgtgagggtgga

SEQ ID NO: 961060 - DNA, 120 bp, Artificial Sequence
  ENSG00000257258_1 (sequence is synthesized)
gggtgatgcgaggacttcaggagaggccctaaggtaacttctgagggcatgggacttggcggtaaaaacagagaaggtgctgtggaccccattttcggaagaaaactgttttcctcacag

SEQ ID NO: 961061 - DNA, 120 bp, Artificial Sequence
  ENSG00000257258_2 (sequence is synthesized)
gcctccatcctgaggccaataatccaattatgagattggcaaatgaaaaatcttacaattactgtatcttcttctatctgtctgtatagttatatatgtgttatatgtgtgatatttata

SEQ ID NO: 961062 - DNA, 120 bp, Artificial Sequence
  ENSG00000257258_3 (sequence is synthesized)
aaaaagagctctaattgattagcctaaagaaaaacaagtgcttagaccaaatattttgaaggaaaaataaaagctgtaatgccttttagttcacgtgactttaatctttgagaaataaaa

SEQ ID NO: 961063 - DNA, 120 bp, Artificial Sequence
  ENSG00000257258_4 (sequence is synthesized)
aaaatagcagaaggaaaagaaggaagaggcaatgtcacacttctgctaagaagagagttatggcaagtacaagttgctgagaaagaagcaaactgctcatttggatgaaggaaattaatt

SEQ ID NO: 961064 - DNA, 120 bp, Artificial Sequence
  ENSG00000257258_5 (sequence is synthesized)
ctttgaagccatcaaagattcctgcagctttgagaatagtttggaaatattattcttgcctcctatggtcatcctgttattcatcagcagatgctactgatccaacagcttcccagctaa

SEQ ID NO: 961065 - DNA, 120 bp, Artificial Sequence
  ENSG00000257258_6 (sequence is synthesized)
actacttctttgttatttgagaactttttgacctgcctgctttacaatttggtaaggctgaggacatatggaattaaccacacccttaactatactggaaagagtcagatcttatctgtg

SEQ ID NO: 961066 - DNA, 120 bp, Artificial Sequence
  ENSG00000250208_0 (sequence is synthesized)
gtcgcccgccagccccgggacagcccgcctggcgcgcggggctctgcgcgctgcgaccctccccggcagtcccgcccgcctctcctcgccctctctctgcctggcctccaactttgcctc

SEQ ID NO: 961067 - DNA, 120 bp, Artificial Sequence
  ENSG00000250208_1 (sequence is synthesized)
caactttgcctctcgctatcctctccgccggcgccccctttcccggcggtccccgggatggtccccggcaccccgaggacgccgaggttacgggaagttcggggactggcgggagaaggg

SEQ ID NO: 961068 - DNA, 120 bp, Artificial Sequence
  ENSG00000250208_2 (sequence is synthesized)
ggtgcatcttctcttccttttatgctgagtgggtcagctcatcacaggcctgcggcccctgcatgggtgacagaggaggcaaagatgacacagagaaactatcccttcagggacagagtg

SEQ ID NO: 961069 - DNA, 120 bp, Artificial Sequence
  ENSG00000250208_3 (sequence is synthesized)
gggacacccacgagcttggctctgccttacaaagaaatgagaaggaaccccgttcctgcttttcaccttagggctgccacacttgtgtatcccttcttccttgaatttaaccaggagtga

SEQ ID NO: 961070 - DNA, 120 bp, Artificial Sequence
  ENSG00000250208_4 (sequence is synthesized)
tcagcggcagacaccacccggagccctgcgggagcctttccctgttcttccagcatggatctgaaactcccttcccactttctgcagcctcccagagatagttcaggctccagcctcatg

SEQ ID NO: 961071 - DNA, 120 bp, Artificial Sequence
  ENSG00000250208_5 (sequence is synthesized)
tgatagcatgaagagaaactggttccaacagctgtgtgctctgctgccctcatcccaaacaacagtttaaatgcacaattacgcttttctctaaggcccaaaataggataggaaagatcg

SEQ ID NO: 961072 - DNA, 120 bp, Artificial Sequence
  ENSG00000250208_6 (sequence is synthesized)
ttttgctatccctgaatgcctgtcacccttgtttcgtaaggtaagattgggaagggcttggccattgcccttgcagctgagaaaccaactttaggaataaagacactctctccatgtctg

SEQ ID NO: 961073 - DNA, 120 bp, Artificial Sequence
  ENSG00000250208_7 (sequence is synthesized)
tgcatcttctcttccttttatgggctgccacacttgtgtatcccttcttccttgaatttaaccaggagtgagcagtggacagcttcttccctatgagaaggaggtgaagcaggacctgaa

SEQ ID NO: 961074 - DNA, 120 bp, Artificial Sequence
  ENSG00000250208_8 (sequence is synthesized)
ctccctcccttctaataagtgctgcgctgagtgtgcttgctttgccagatggttaaaacagagcaggggatagaaggacagatgtcttcaccctcatggagttcaccttccagtaggagg

SEQ ID NO: 961075 - DNA, 120 bp, Artificial Sequence
  ENSG00000250208_9 (sequence is synthesized)
tccagtaggaggaggcgataggccggggtctgcacatgtgcgtgctacagcctgttccacggtgcgtggcgtgcggggcagtagagacaggatttcaccatgttggctaggatggtctcg

SEQ ID NO: 961076 - DNA, 120 bp, Artificial Sequence
  ENSG00000250208_10 (sequence is synthesized)
tacaggcgtgagccactgcaccctgccagaaaactcattcttctactccatcctacagttttccctaagagagaaacaataaaacgccaccacgaccaatggcaaaaagctggcacccac

SEQ ID NO: 961077 - DNA, 120 bp, Artificial Sequence
  ENSG00000250208_11 (sequence is synthesized)
aaaacgccaccacgaccaatggcaaaaagctggcacccactccacgacttttcatatctacacgtttgtacagctttatttttaagcattctgaaattctatgcaggagagaccccagct

SEQ ID NO: 961078 - DNA, 120 bp, Artificial Sequence
  ENSG00000250208_12 (sequence is synthesized)
aggtttagggagtcctagggtttgtggagtaaatgaagtttctccctagaattagggagggtagagacaggcagagaactgacaatcctaacagctgctgtcctcagagccactgtttct

SEQ ID NO: 961079 - DNA, 120 bp, Artificial Sequence
  ENSG00000250208_13 (sequence is synthesized)
gagagctgctcgctgagtgcttctagcgagttaaatggtgttcgcccaaaagacctgttcacgtcctgatcctgggaacctgtggctgtgatcttatttggaaaaagctctacattacgt

SEQ ID NO: 961080 - DNA, 120 bp, Artificial Sequence
  ENSG00000250208_14 (sequence is synthesized)
ctttgcagaagtaatcatgttaaggatcttgagaggacgtgaccctgaattatccggctgtgcttgacatccaatgactggtgatgttgtaagagaaagacggagggagatgtaagatat

SEQ ID NO: 961081 - DNA, 120 bp, Artificial Sequence
  ENSG00000250208_15 (sequence is synthesized)
gagagaaggccacgccgagactggagtgatgtggccgtgagccgaggaatgcctggagccaccagaagctggcaaaggcagaaggagcctcctctggaccctgtggtgggtacgcagcct

SEQ ID NO: 961082 - DNA, 120 bp, Artificial Sequence
  ENSG00000250208_16 (sequence is synthesized)
ggcagatatattcattttggacttctggcctccagggctgtgagagaatacatttctgcagttttaagccacgcaatctgtgtccctgggaagcccaaatagggcgagaccttttgccaa

SEQ ID NO: 961083 - DNA, 120 bp, Artificial Sequence
  ENSG00000250208_17 (sequence is synthesized)
gtggtctccaagtgtcacgtcatcgaatccttctcccgggcttgtgccatagtctttccactttagagaggaggaaacggaggctctggggcacaaagccagtcagtggcggggcctgac

SEQ ID NO: 961084 - DNA, 120 bp, Artificial Sequence
  ENSG00000250208_18 (sequence is synthesized)
tttcaacccagcctgcatggggtcagagaacccactttccccgtggggcctgcggcctatgctaaggatgcttgttcatctctcctgggcccgggagtggttcttctggcctagaaggca

SEQ ID NO: 961085 - DNA, 120 bp, Artificial Sequence
  ENSG00000250208_19 (sequence is synthesized)
agagaagccagtctttcggtttcaaggtttcccattagtggagtcaagcaaaaatggtgtgttgcgcttcttcctgagctcagcctgggagcacggccttaacatgctcagtggatccca

SEQ ID NO: 961086 - DNA, 120 bp, Artificial Sequence
  ENSG00000250208_20 (sequence is synthesized)
agacggcagcatggcggtgccagcctggcagccttagctccttgcagctgtgcttgtgaagggagcagtgagtggcttccctctgtgaccaccttgggtcctaagtttcactggggctgg

SEQ ID NO: 961087 - DNA, 120 bp, Artificial Sequence
  ENSG00000250208_21 (sequence is synthesized)
gatccatgcgtcttgcaattggctaggaatttcccgggctttccctcccttccctgttcagggcactgggtgtgaggcattgcatccgttcttctgctcacctgcttccccctaagagtg

SEQ ID NO: 961088 - DNA, 120 bp, Artificial Sequence
  ENSG00000250208_22 (sequence is synthesized)
tgagctgtataaaggcaggaaccaaacaggagcctccacgtgttcccagttcaagggcagtgtcccttgtgtgtttcttcaataattcagtggatgacttattctgcacggacactgcac

SEQ ID NO: 961089 - DNA, 120 bp, Artificial Sequence
  ENSG00000250208_23 (sequence is synthesized)
acactcggccctgccgtctccggagctgggaggtgtggagctggctcctgacctatttacacactgaggagggatgtggaaaacaggaggagtcccagggctccaatgcaaagaggagcc

SEQ ID NO: 961090 - DNA, 120 bp, Artificial Sequence
  ENSG00000250208_24 (sequence is synthesized)
ctccaatgcaaagaggagcctcttcattccctctgccgtggccgtgcaagggacagcgccttgtgggattgtgtcctccacccaattatccttagcattagtttgctaaggataatggcc

SEQ ID NO: 961091 - DNA, 120 bp, Artificial Sequence
  ENSG00000250208_25 (sequence is synthesized)
atagtattccatggtgtatatgtaccgcgttttctttatcgagtctatcattgatgggcgcttcagttgattccatgtctttgctactgtgactcgtgctgcaatgagcattcgcgtgca

SEQ ID NO: 961092 - DNA, 120 bp, Artificial Sequence
  ENSG00000250208_26 (sequence is synthesized)
gtctttgctactgtgactcgtgctgcaatgagcattcgcgtgcatgcctttatggtggaattatttctattcctttgggtgcatacccagtcatgggattgctgggtcaaatggcatttc

SEQ ID NO: 961093 - DNA, 120 bp, Artificial Sequence
  ENSG00000250208_27 (sequence is synthesized)
ggtctttaaggaattgccacgctgtcttccacaatgcaagcaagacgttattgaaagtgtaaagggggctgctaattacgctggggcaggcggggcaaaccaggaccctgccaggcgagt

SEQ ID NO: 961094 - DNA, 120 bp, Artificial Sequence
  ENSG00000250208_28 (sequence is synthesized)
ctaggccatggccccacaccagaagatgagggctggagactcctggagaggaatctgagtggcgagaccacctgcattcattatgtgtcaactctgccaggtgacagtccccagtgagcc

SEQ ID NO: 961095 - DNA, 120 bp, Artificial Sequence
  ENSG00000250208_29 (sequence is synthesized)
catcaaacatgaacctaggtgctgttgggaaggtctttggatgccattaacatctacaatcagttggttttcagtagaggagattatcctcaagaatgtgggcgggcctcatccagtgag

SEQ ID NO: 961096 - DNA, 120 bp, Artificial Sequence
  ENSG00000250208_30 (sequence is synthesized)
ctgaaaggccttgagagcagaactaggattttggaggaggatgaagtgttgcctccggaccgcagcgtcacctcttgcctgggaatttccagcttccttttcagacttcggacttgcctc

SEQ ID NO: 961097 - DNA, 120 bp, Artificial Sequence
  ENSG00000250208_31 (sequence is synthesized)
caagctccctgaatcttttcatatatttatgtcctattgcagattgtgtttctctggctggactgtaactgatgaggaggactgaaattccaggcttggttgtatagcatataagtgagg

SEQ ID NO: 961098 - DNA, 120 bp, Artificial Sequence
  ENSG00000250208_32 (sequence is synthesized)
tcatttgggtctggggagctggggggggggtccttcagctgcatgagtgtgacctgcaccaaggtgcctggctacctggggcgagggggctgccatctagcccacaccccactcctaggc

SEQ ID NO: 961099 - DNA, 120 bp, Artificial Sequence
  ENSG00000250208_33 (sequence is synthesized)
cgtgcaccctggcatgggtctatgtctggctcaaggaagggttccctcctccctccaatgtgcacagagaccttgagatcccatccacctaaccctgtgccctcagaagcctcctctgag

SEQ ID NO: 961100 - DNA, 120 bp, Artificial Sequence
  ENSG00000250208_34 (sequence is synthesized)
agggggcaccttttcctaattctcacaaaggctagtggctaccttgtagatagccttggatgtgttaggacacttttctgaacatcagttccttatctgtaagatgggagttgtgtcctc

SEQ ID NO: 961101 - DNA, 120 bp, Artificial Sequence
  ENSG00000250208_35 (sequence is synthesized)
aatgggtaattagagattattcatgggaaatcctatcacggtatctaccacggggagactcacaagtgctgatctttgctggtgttgctgcatttgttattgaatgcattcgttaggagt

SEQ ID NO: 961102 - DNA, 120 bp, Artificial Sequence
  ENSG00000250208_36 (sequence is synthesized)
cttgttagtaagtgacaaaaatccaactcaaattggcttacactaaacaagtttcctgcatctgggagtataaagggtgacgctttggcagaggctggctctggaaaacgaggacgcaca

SEQ ID NO: 961103 - DNA, 120 bp, Artificial Sequence
  ENSG00000250208_37 (sequence is synthesized)
tttgtgcccccactttcctctgtgcggcgtccttctcttcaaggcttcccccagtttggcaaacacggccccagcaatgtcaagctgagagcaccttttaagaaagacccttccttccat

SEQ ID NO: 961104 - DNA, 120 bp, Artificial Sequence
  ENSG00000250208_38 (sequence is synthesized)
gtgttttggcaaaagtcccatgaagcagtatgagtggcccggtttgggtcatgggctcacccctaaaccagccgctctggatggattagttccaattggacaggccatggtcttggactc

SEQ ID NO: 961105 - DNA, 120 bp, Artificial Sequence
  ENSG00000250208_39 (sequence is synthesized)
tttgggtgagtgtgggagggtgtgggagggaagattcattgaacctcatctctactacatggtacagctccctggaagaaagaggggctccattaccagaaggaaacaaggaattttatg

SEQ ID NO: 961106 - DNA, 120 bp, Artificial Sequence
  ENSG00000250208_40 (sequence is synthesized)
gggaaccacattatcactaccacaatctaccatgctatacataagaaatgcaccttggtcttaatgcacggtcttgagggggtgcaagctgaatccaattcccagcgtctgggtcagtgt

SEQ ID NO: 961107 - DNA, 120 bp, Artificial Sequence
  ENSG00000250208_41 (sequence is synthesized)
ccctcatgggggagctgcctcacttaagattcctttggataggtaaggtagaacaccaagctgcgcgggattatgaaaagaaagggagaaattcactggctcgcagaattgaaaagctga

SEQ ID NO: 961108 - DNA, 120 bp, Artificial Sequence
  ENSG00000250208_42 (sequence is synthesized)
gatccagctgtacttttaagcctgagccattctccagctcctggccctgcctctcgctgtcttggcttcacccttcacagactgccctgcaaggaccgaggtggagtctcattggactgg

SEQ ID NO: 961109 - DNA, 120 bp, Artificial Sequence
  ENSG00000250208_43 (sequence is synthesized)
ctcaggtcgtgtgcctagttctgaaccatccactgtttccagagggatggggtatcctgattagccaggaagaagtcagacgtctctgagctaactttactgagaattgggtagaggagg

SEQ ID NO: 961110 - DNA, 120 bp, Artificial Sequence
  ENSG00000250208_44 (sequence is synthesized)
gacaagtggcactcggaaattaaatgcagtgcatccagtgctcaagctcctgggcttcgtctgctccacactttttcctctgccctttgggctaaagccgttgggtttgggacaagagaa

SEQ ID NO: 961111 - DNA, 120 bp, Artificial Sequence
  ENSG00000250208_45 (sequence is synthesized)
ggggagagctggtacctcttcccttttttgcccaggaaagttgtttctccatcatttcatggctcaaagtcattaaatctgagtaattcttacaaaccagatccaggaagaatctaggag

SEQ ID NO: 961112 - DNA, 120 bp, Artificial Sequence
  ENSG00000250208_46 (sequence is synthesized)
tgggctctctgtagattagaatgcttcaggctgcaggtaacagaagacttgactggaaatgccttcaacagagaagggatgtatcattttctagaaggagaaattctgcagctgggacgg

SEQ ID NO: 961113 - DNA, 120 bp, Artificial Sequence
  ENSG00000250208_47 (sequence is synthesized)
ttccagggttggtttctttggaaactcagaacttcatcgaggctctggattcatttcttctttctgctgtgccatttccagcctgttgacttggcctgggccagctgtcctctcacgctc

SEQ ID NO: 961114 - DNA, 120 bp, Artificial Sequence
  ENSG00000250208_48 (sequence is synthesized)
atgattgctgcctctgctcctgccatcacatacacaagcagtgcctgttcagtggaacaaaaggaaatcaaaaagaggaatcacattgtcctgtgtctctacaatgttttttttttttta

SEQ ID NO: 961115 - DNA, 120 bp, Artificial Sequence
  ENSG00000250208_49 (sequence is synthesized)
aatcatgaaaaccgttcccagaaaccccacaacagactttctgtttcatctcattggccagaacagtatcacaggagactactgggattggcatagactagctaggatgcacccttagag

SEQ ID NO: 961116 - DNA, 120 bp, Artificial Sequence
  ENSG00000250208_50 (sequence is synthesized)
cccgtggaggacggcagacatctgagcagagctgggcctcagcgggcaggggatgacagggactggcaggcatccttttggtcactcagaggacttccttcaatccacccagggctggtt

SEQ ID NO: 961117 - DNA, 120 bp, Artificial Sequence
  ENSG00000250208_51 (sequence is synthesized)
ggcatcataaactcaggatggcagcacttggatggctgtggttgctttgtctccagtgagtgccccaggaaaccatctcttctggtcgccacacggctatttggtgagctgcttgctggg

SEQ ID NO: 961118 - DNA, 120 bp, Artificial Sequence
  ENSG00000250208_52 (sequence is synthesized)
gtgagctgctgctgaatgggtgtggttgaaactggaagggtgaggtcccaaagccactgtctgcccctgggtgactgcaacaggtagcccccccaccaacttccaggcaaatccgtggga

SEQ ID NO: 961119 - DNA, 120 bp, Artificial Sequence
  ENSG00000250208_53 (sequence is synthesized)
aatggaacaaggtatcaaggggaacaggggagtcaggccaccagggccccactgaggaaggcacctgttgcaccatattttgacgtcttgaatgtgtatccactggcccagggagtggct

SEQ ID NO: 961120 - DNA, 120 bp, Artificial Sequence
  ENSG00000250208_54 (sequence is synthesized)
taattaccagtgtaatagcaggtccacttacagcttcaggtttcgtagaggaaaaagcatcattgcaaaatgcttttgatgtggttaagcggtgaggccacagtgaattttaagtgcttg

SEQ ID NO: 961121 - DNA, 120 bp, Artificial Sequence
  ENSG00000250208_55 (sequence is synthesized)
gtaaagcgcatggaaaaagaaaagcacaagtcatacttggtaaaggacatttcccttcctagatgccaggtgtgaaaggatgccaggaatattctctgctctttcctcctgcttcctgaa

SEQ ID NO: 961122 - DNA, 120 bp, Artificial Sequence
  ENSG00000250208_56 (sequence is synthesized)
ggactgagtccacactaactattatcaaacaaacaaacttccaggggaaaagactgcagaacctatacattctttataattggaatcacagctatacattctttataatcagaataacag

SEQ ID NO: 961123 - DNA, 90 bp, Artificial Sequence
  ENSG00000250208_57 (sequence is synthesized)
tggaatcacagctatacattctttataatcagaataacagctctacattctttatcatcgcagctatacgttctttataatcagaaagtg

SEQ ID NO: 961124 - DNA, 61 bp, Artificial Sequence
  ENSG00000250208_58 (sequence is synthesized)
ctttgggaggccaagccaggtggatcaccagagtttaggagttcgagacccccagtgtggt

SEQ ID NO: 961125 - DNA, 120 bp, Artificial Sequence
  ENSG00000250208_59 (sequence is synthesized)
gcggaggttgccgtgagccaagatcacatcactgcattctaacctgggcaacaacagtgagactccatctcaaaaaaagagaaaagtgctttctgctgtcttactgaggtccctgctgct

SEQ ID NO: 961126 - DNA, 120 bp, Artificial Sequence
  ENSG00000250208_60 (sequence is synthesized)
agtgctttctgctgtcttactgaggtccctgctgctctgctaactccttctcaagctgagaggtaaagcaggtgctttacttctgtgtggtcatgtgttgggtgcctgctacatcaaaac

SEQ ID NO: 961127 - DNA, 120 bp, Artificial Sequence
  ENSG00000250208_61 (sequence is synthesized)
gctcttccatatgcagagaaaatcagaaggaagggagcactgagtggctagtgggcaaaggggagagacagcgagaccaacacatgccacagagctgccttttatatgaattcaaattct

SEQ ID NO: 961128 - DNA, 120 bp, Artificial Sequence
  ENSG00000250208_62 (sequence is synthesized)
gggatttcggactagggcaatatgacaaatattcatggactttcactagaccaaaattggaataaatgctacacacaccccaatttttaaaattagtaaaaacatgtgactttaaagcag

SEQ ID NO: 961129 - DNA, 120 bp, Artificial Sequence
  ENSG00000250208_63 (sequence is synthesized)
gctgcctacgttgataataaaccacattttccctaacgtgaaaagtcagtgccattcgagcttgtcgacagaaatacagaacaattcctcagtgatgtgtgcttctttgcaaaaatcagc

SEQ ID NO: 961130 - DNA, 120 bp, Artificial Sequence
  ENSG00000250208_64 (sequence is synthesized)
cttgaattatgcaggtttgaaataggcaaaatcttcctaaacaaatactttgcatacaatacctccaacctctattccagtataatgtttaaactctgtgctagatgtccacttagttct

SEQ ID NO: 961131 - DNA, 120 bp, Artificial Sequence
  ENSG00000250208_65 (sequence is synthesized)
ttcattgatgtgaagctatttcattaggagtcagcaactatgccctgtgatctgacccaatgcctgtttttgtaaataaagttttattggcacacagccacacccattcatttacaattc

SEQ ID NO: 961132 - DNA, 120 bp, Artificial Sequence
  ENSG00000250208_66 (sequence is synthesized)
gcagatggtcactttctcactccaatggagtggtggccacagaaaccgtctggcccagatgtctaaaacatttattatctggatctttataggaaatgtttgctggctttagagcgagga

SEQ ID NO: 961133 - DNA, 120 bp, Artificial Sequence
  ENSG00000250208_67 (sequence is synthesized)
gtttcatcactaggataagcgactccattttcttttacctatggagatttctcagccttgctgcaccttattgctataactctgtgacatattggtggcctctacgccacctctcagctg

SEQ ID NO: 961134 - DNA, 120 bp, Artificial Sequence
  ENSG00000250208_68 (sequence is synthesized)
tctggcctgagagctctgtccagacggattgacagaggccagtacctggtgaagaaggcagcatctgagaggagccagggatgcattcattcaccctttcattcagtcattcagcgaggg

SEQ ID NO: 961135 - DNA, 120 bp, Artificial Sequence
  ENSG00000250208_69 (sequence is synthesized)
agggtgcagcacgcatcagctctgtgcaggcactgtgttaggaactgcagatacagccacggccagtagaaagggcacctgttctccttttgtttgtttttgtttttgtttttgagacag

SEQ ID NO: 961136 - DNA, 77 bp, Artificial Sequence
  ENSG00000250208_70 (sequence is synthesized)
accccaacctcccaaaggctgggattacaggcatgaatcatcgcgctcagctggcacctgttctcactaggatagat

SEQ ID NO: 961137 - DNA, 120 bp, Artificial Sequence
  ENSG00000250208_71 (sequence is synthesized)
tcatcgcgctcagctggcacctgttctcactaggatagatatcatagcgggggagacgttggatggacaaattggcaagggggataagttcaggcactgccgtgtgctgtggagataata

SEQ ID NO: 961138 - DNA, 120 bp, Artificial Sequence
  ENSG00000250208_72 (sequence is synthesized)
aaaggaaagtgggacagacagtggggcgtggggaggctgcctgcttagctgaggcggtcagggctggctctgaggaggtgacgcatccctgagagctgaaggaggagagcaaggcagcca

SEQ ID NO: 961139 - DNA, 120 bp, Artificial Sequence
  ENSG00000250208_73 (sequence is synthesized)
ggcaaaggtctggccgtgaggctctgactgtgccttcgtgctgttgttctttgtcgatgcactcacccaggaagcacttgtaccccgtcatggcgctagaatattaacaaatcatggtcc

SEQ ID NO: 961140 - DNA, 120 bp, Artificial Sequence
  ENSG00000250208_74 (sequence is synthesized)
ctgtcaccatgcaggaattcagagttggcctaacagaatgcttagatttcttgggtttgaatcctggcttcactgctcaggagctgtgtgactgtagacaagttgatgagcctctctgag

SEQ ID NO: 961141 - DNA, 120 bp, Artificial Sequence
  ENSG00000250208_75 (sequence is synthesized)
tcttggtttccttaacagcaaaagggggataataattgtagctgcgttataaggttgttatgaggactctgtgaacaacagcacgtaaaggctataataccccaccacatacacaggttt

SEQ ID NO: 961142 - DNA, 120 bp, Artificial Sequence
  ENSG00000250208_76 (sequence is synthesized)
tgcaccacagcccacagggggcagttcacgtagacctcagaggtacagtgacagtgcagagcacgcgctcagataaccctgactcagaggcgtagagggagtgcatgtgagccaagccca

SEQ ID NO: 961143 - DNA, 120 bp, Artificial Sequence
  ENSG00000250208_77 (sequence is synthesized)
ggactgcacagcaggtgttccagtggaaggtctagaacgcaaggggggattcgttttgctgtgtggggcaggaaaaggttatttgggaagaactcccagaagaggcaacatttaacagtc

SEQ ID NO: 961144 - DNA, 120 bp, Artificial Sequence
  ENSG00000250208_78 (sequence is synthesized)
tgtagataggtggttaggaattcctcagcctgagcaaaggtggtgggggtgccaggtgagggaacggtatgcacaaaggcgcggtgtcttgaagcttcgtggcacccctagggagggaag

SEQ ID NO: 961145 - DNA, 120 bp, Artificial Sequence
  ENSG00000250208_79 (sequence is synthesized)
aggatctgcaggggtgccattggtgtgtggcaagatcagatgcgggtcccaaagattacactggtagctttgggaggagaggaggtgaaggtggagagaaggccgagaagccacgtgggt

SEQ ID NO: 961146 - DNA, 120 bp, Artificial Sequence
  ENSG00000250208_80 (sequence is synthesized)
atcactgaaacagttctggccaacaagggtgatggcaacgactttggaaatgaagaaagaaaagaatgatgaagaaaaaaagatgcatcaatccagtcgggccagccctgctcagagcct

SEQ ID NO: 961147 - DNA, 120 bp, Artificial Sequence
  ENSG00000250208_81 (sequence is synthesized)
gctgcaaacagccctgtttgtgttggctggtctgtgcctctattggtcagggtaactcacctgcatttagcttgaagcaagaacctaaggccaagtccttttttctgacctctaatgcaa

SEQ ID NO: 961148 - DNA, 120 bp, Artificial Sequence
  ENSG00000250208_82 (sequence is synthesized)
atgccccatatagatgtagcattttctgactttccttagaagctagaatgatgctgggcccaaatctgtacccttggatgtttcgaactctcagccatgggcccttcaccaaaactgtaa

SEQ ID NO: 961149 - DNA, 120 bp, Artificial Sequence
  ENSG00000250208_83 (sequence is synthesized)
tgttaatcaacttcgcacttccaacatccctctcctttaagacccccactaatcagcgagttctcccagcatggccagaagtcccaggcattcaagggacatttgaaaatgttctccacc

SEQ ID NO: 961150 - DNA, 120 bp, Artificial Sequence
  ENSG00000250208_84 (sequence is synthesized)
tggtaggtgagattcaggtttggtgaatggagttctggtgtgagccgggtgccccgcctgctggatctgatggtatctctggctggcctgtgtgatggccccggcagtcgctcagcacct

SEQ ID NO: 961151 - DNA, 120 bp, Artificial Sequence
  ENSG00000250208_85 (sequence is synthesized)
gaaatgtggccggcccaaatggagatgcgaggcggggagaaacagtaatcttcatatggatcctgcattgaaatgagcatcgtttggatcatcgagttaaataaaatgttatcacaattc

SEQ ID NO: 961152 - DNA, 120 bp, Artificial Sequence
  ENSG00000250208_86 (sequence is synthesized)
tttgaacaccgcctcccaccccgcgggaagtgcgggcttggtttgtaccgcggtgacccccgccccctccgaagccgcagagccggggcctcgcgccagcagggctggagatgccttctt

SEQ ID NO: 961153 - DNA, 120 bp, Artificial Sequence
  ENSG00000250208_87 (sequence is synthesized)
ggcggctgagtttatttattataggaagtcattcgctcgtggggtatttatgtgatttggcgagtgatgtgcccggccagcgccctccttggctgcagccccgcaggaggacccggagta

SEQ ID NO: 961154 - DNA, 120 bp, Artificial Sequence
  ENSG00000250208_88 (sequence is synthesized)
gggtgggatggagtgggtcgtgggaggagcgcgtcagcgcctgcccggggacccccagctcccgcgaggacacggaggcgcgcacgccgctcggttttcctggaaagtggagaaggagcg

SEQ ID NO: 961155 - DNA, 120 bp, Artificial Sequence
  ENSG00000250208_89 (sequence is synthesized)
tcctgggcaggtcctctgagctcatcccccctcggattggggcgggtctgtgacggggtcacttaggacacgacgtccccccgccattcccttcccccgcccagggcgttcgcggtgggc

SEQ ID NO: 961156 - DNA, 120 bp, Artificial Sequence
  ENSG00000250208_90 (sequence is synthesized)
gcccaccgccaagccccactgttcccaaggatgcgccaggtgcttcccgtagcgtcctgggttgacccttaaaaaaacagcacccctaggaggtggccggccctctcctcccagggtctc

SEQ ID NO: 961157 - DNA, 120 bp, Artificial Sequence
  ENSG00000250208_91 (sequence is synthesized)
tccgggtcacgatcttccaaagttcggaaactcgcaggatcgcgtgtgcaatctcccgctacctcccggggggccggggagaggtcagaggagcgagtcccgcgtccaccggcctcgctt

SEQ ID NO: 961158 - DNA, 120 bp, Artificial Sequence
  ENSG00000250208_92 (sequence is synthesized)
gccccctgcccgtttgaggatagttccagggagcagggtggagtgtgcggacatctttggaggcagtgctggggcttcccgcgttggcggcgctccacccggcgtggggggcggctgcac

SEQ ID NO: 961159 - DNA, 120 bp, Artificial Sequence
  ENSG00000250208_93 (sequence is synthesized)
gggcccccgcggtggggacgctgcgcacggggcaaggtctccctaggaagcgcccgggaaggagatggggcccgccaggaacccccctcactgaccagctttctgcacgccgtgcaggag

SEQ ID NO: 961160 - DNA, 120 bp, Artificial Sequence
  ENSG00000257256_0 (sequence is synthesized)
cattaagtgacaaatcaggaaattaaaaatggcacacacaaaaagcaatgaaacctagaagcccaggtgaatcttatgtctcttccatcttcttgtttttaagggacagggatcttactg

SEQ ID NO: 961161 - DNA, 120 bp, Artificial Sequence
  ENSG00000257256_1 (sequence is synthesized)
ccgcacaagcggttccttctgcctgactcttctccctggctcatgtcttcaaatctctgctcaaacgtttcctcaccacaggccttcattgaccaccctagactctatcctccttacctg

SEQ ID NO: 961162 - DNA, 120 bp, Artificial Sequence
  ENSG00000257253_0 (sequence is synthesized)
cggctggccgccccatccgggagattccagtaatgtttcgctcaactttccctggagccttcgcccgcagtctcctcaaggccctgccagctttcacgcacggtctcactgagggtgtca

SEQ ID NO: 961163 - DNA, 120 bp, Artificial Sequence
  ENSG00000257253_1 (sequence is synthesized)
ggcgcctcccacacacgttaggttctgctacggcagtgcctcacttccaggaggacggagagggagcttcaagacacagagacacagaggagaaggccatatgaagatggaggcagagac

SEQ ID NO: 961164 - DNA, 120 bp, Artificial Sequence
  ENSG00000257253_2 (sequence is synthesized)
tggaggcgccattgccaagcaacactgcggatcacctgcagctgccagaggcttggaaagtgcttgccacaggccctccctcagagcctccagcaggaacccaccctgctgacaccttgg

SEQ ID NO: 961165 - DNA, 120 bp, Artificial Sequence
  ENSG00000257253_3 (sequence is synthesized)
tcaggcttccagcctccacagctgtggtgaaatgaatcactgttgttttgagccacccagtttgtggcaatttgtatggcagtcctaggaaagctaacaggcagtccagcccctgcccct

SEQ ID NO: 961166 - DNA, 120 bp, Artificial Sequence
  ENSG00000257253_4 (sequence is synthesized)
caacattttgcacactttgagccctgatccagggatcttccctttccccggcgacacggctcagcactgcttccccggtggggctgcatcttctcaggacccacggctgcacggtctcga

SEQ ID NO: 961167 - DNA, 120 bp, Artificial Sequence
  ENSG00000257253_5 (sequence is synthesized)
gccacagtgcctggtttctctcttgcaccaccgttggtatcttctccctgtcctatctctcacaatctgtggaagtgctttgtatgcagtgagcgcttaataaaagtcacttttctctcc

SEQ ID NO: 961168 - DNA, 120 bp, Artificial Sequence
  ENSG00000257252_0 (sequence is synthesized)
gggctggagttcggcgaggccttgggactggcgctggagcccagcgtgggatgaccgtgccccgaaaacatgccagtgaatggaaagaagccaaggtcccctccctccctgcttataccc

SEQ ID NO: 961169 - DNA, 120 bp, Artificial Sequence
  ENSG00000257252_1 (sequence is synthesized)
tcaactttgccaatgaggaccctaaataccagctgcactacaggggatgtaactacatacaccgtcaccaaagttgcagcctggccaagaaatgccaggggacgtcgcggcgattgcaga

SEQ ID NO: 961170 - DNA, 120 bp, Artificial Sequence
  ENSG00000257252_2 (sequence is synthesized)
ctccgcggtgactgtgtagatacgtccagaattcgcccttgtagcgcggggagaggcgagagtgaaggcctagaaaaaaagaagaataaatgggacattacacaagttcctttaaagatt

SEQ ID NO: 961171 - DNA, 120 bp, Artificial Sequence
  ENSG00000257252_3 (sequence is synthesized)
cttcacgttgatataaggagcctgcttcctcattgccatttgggtgcagagttcttcctgtcagcccactcatcatgctcatcataccttgctgccaggcctctctatgctgatgactcg

SEQ ID NO: 961172 - DNA, 120 bp, Artificial Sequence
  ENSG00000257252_4 (sequence is synthesized)
ggtcattggactgtaaacctgacacaggtttaaccttctgatggagcttggtttttgtcctagaaaaactataaagagaaaaacagcggcacataaagaacagtatatggtgtaaagaga

SEQ ID NO: 961173 - DNA, 120 bp, Artificial Sequence
  ENSG00000257252_5 (sequence is synthesized)
agcgggagtcctgggtcgatgttagaagacatgaatgcaaatccctggctggctattaacttagtttgatttggataaatctctgtatttgagcctcagtttctctatcagatgcctgta

SEQ ID NO: 961174 - DNA, 120 bp, Artificial Sequence
  ENSG00000257252_6 (sequence is synthesized)
ttctctatcagatgcctgtaaaatgaactcaaaaacgctttcttcagaaaattgctcaagtatcaaatgagataacatataagaaagtaattgtgggctgggcatggtggctcacaccta

SEQ ID NO: 961175 - DNA, 62 bp, Artificial Sequence
  ENSG00000257252_7 (sequence is synthesized)
tgagaaaaacctagcccagcatggtggcatgtgattgtggtcccagctacttgggaggctga

SEQ ID NO: 961176 - DNA, 120 bp, Artificial Sequence
  ENSG00000257252_8 (sequence is synthesized)
ccagctacttgggaggctgagatgagagtatcacttgagcccaggaggttgaagctactgtgaaccacatgccacttcacttcactcctgccttccagcctgggagacagattgataccc

SEQ ID NO: 961177 - DNA, 79 bp, Artificial Sequence
  ENSG00000257252_9 (sequence is synthesized)
agactccgcggtgactgtgtagatacgtccagaattcgcccttgtagcgcggggagaggcgagagtgaaggcctagaaa

SEQ ID NO: 961178 - DNA, 120 bp, Artificial Sequence
  ENSG00000256124_0 (sequence is synthesized)
agtgaaggaattggttactctcccagagccctcccgggcatcgcccccttcctcacttcctcctcttcctgcccccagcctctacccctccagcctcctgtggcttcacaggcaagtgcc

SEQ ID NO: 961179 - DNA, 120 bp, Artificial Sequence
  ENSG00000256124_1 (sequence is synthesized)
gcatcccaggaagaaggagttggagctccgtgatgttctggaagctgagaagtctaaggtcaagactccagtggattacgcatctggcgagagcctacttcctggtttgtagacatacct

SEQ ID NO: 961180 - DNA, 120 bp, Artificial Sequence
  ENSG00000256124_2 (sequence is synthesized)
catctggcgagagcctacttcctggtttgtagacatacctgagactgggcaatctacaaaagaaagaagtttaatggacttacaggttcacgtagctggggaagcctcacaatcatggca

SEQ ID NO: 961181 - DNA, 120 bp, Artificial Sequence
  ENSG00000256124_3 (sequence is synthesized)
agcagcagccattcaaaaacagatgagatggggacagatttaacccaaaggacatagttcaactcctggtcttgacagaggagaagccctcaaagatggagtctcactctgttgccaggc

SEQ ID NO: 961182 - DNA, 62 bp, Artificial Sequence
  ENSG00000256124_4 (sequence is synthesized)
atacaatggcagtcctgagttgctgggactacgggcacacaccatcatgcccagctaatttt

SEQ ID NO: 961183 - DNA, 89 bp, Artificial Sequence
  ENSG00000256124_5 (sequence is synthesized)
gtgcgcctagcaaacgacagctttttgagcctctgtttaacaatctcttaaaccttataggtaggcagttctgagacagctcctaatca

SEQ ID NO: 961184 - DNA, 120 bp, Artificial Sequence
  ENSG00000256124_6 (sequence is synthesized)
aaaccttataggtaggcagttctgagacagctcctaatcatctcccctcctggtattcaagccctgatggaatactctcttcttcaatgtgagctggacttagtggttttcttctaatcc

SEQ ID NO: 961185 - DNA, 120 bp, Artificial Sequence
  ENSG00000256124_7 (sequence is synthesized)
attgaatacacacaagtgatgagctgtcatttccaaaattagttcacacaaagctgtaacttttgttttgttcacagcctctctcaattgccttctcagcttgtatgctttgaagaagca

SEQ ID NO: 961186 - DNA, 120 bp, Artificial Sequence
  ENSG00000256124_8 (sequence is synthesized)
agctgcagtgttggagaggcccatgtggcaaggaaatgagggtggcctccagtcaatggctggtgagaaactgagaccttccttccaacaattgtcaagtaactgaatactcccaacaat

SEQ ID NO: 961187 - DNA, 120 bp, Artificial Sequence
  ENSG00000256124_9 (sequence is synthesized)
catatgggttaggttagaagtgaacctttctctagttgaggtttcagataagaccacagatattatactaacaccttgattgcaggcttatgagaaaccttgaaatgagaagactaagta

SEQ ID NO: 961188 - DNA, 120 bp, Artificial Sequence
  ENSG00000256124_10 (sequence is synthesized)
aaaccatatctggattcctgacttgcagaaactgtgtgatgataaatgtgtgttatcttaagccacaaagtttttggggtgatttgttctacagcaattgataatgaatacttcaaccta

SEQ ID NO: 961189 - DNA, 120 bp, Artificial Sequence
  ENSG00000256124_11 (sequence is synthesized)
tcatcctgctacctctcacagcccataatatacaacctgacccataaaacatgattaatcaatgtttgttaaattaacatgtattttgagtttcattgaaatcagttagttgaagtgata

SEQ ID NO: 961190 - DNA, 120 bp, Artificial Sequence
  ENSG00000256124_12 (sequence is synthesized)
ataacatttaaatgtgcatgagcagtaggacaaggcagatagctggttaggatagaaagtttttgaaaattgtgaggggaaaaattatttctatttgtaccctgttgtacccagcttagg

SEQ ID NO: 961191 - DNA, 120 bp, Artificial Sequence
  ENSG00000256124_13 (sequence is synthesized)
tttcaaaaactttcagggggtttttattcatttaccaaagacttcaaagttggtgcctccccaccactctaaagaggtctttgcccttattgacccaaccatactgatttgcctggtgca

SEQ ID NO: 961192 - DNA, 120 bp, Artificial Sequence
  ENSG00000256124_14 (sequence is synthesized)
cagtgggagctattataaggagaggggagaagaaggaaatagaaacaactgtgaaaaaggttgaaaaaaatagcgaaaaggatagaaaaagagcagaggaaagagaagaagtagtcaaca

SEQ ID NO: 961193 - DNA, 120 bp, Artificial Sequence
  ENSG00000256124_15 (sequence is synthesized)
agtcaacatccaacccagatgcagagaaatgattcaaaagaaaaagtctgattttcctgtcggaaatatttttaaaaggaggtaggcatttatcaaaaaggaaaaaaaaaaaaaaagaat

SEQ ID NO: 961194 - DNA, 120 bp, Artificial Sequence
  ENSG00000256124_16 (sequence is synthesized)
gctgctcctcgcaatcaaccgctaggggaaggagggaagcaggcaggagggagagcgggagacttccggaaatccctttcctcccttcccttcacaggttgccccatagtgaccctggag

SEQ ID NO: 961195 - DNA, 120 bp, Artificial Sequence
  ENSG00000256124_17 (sequence is synthesized)
atgacctaattctgtgtatggttgcagtgtggagattgcctcttgtctgattctcatggcattgagacctctgatttctcaacagcacatgccacagcactatcagaagtcaggaataaa

SEQ ID NO: 961196 - DNA, 120 bp, Artificial Sequence
  ENSG00000256124_18 (sequence is synthesized)
gaacagagggtgtggggggcagtctagatattatgctcagcaaacatatttttaaatcagtgtaaattctatcttgctggttgcttatcttagcagttaaatcaacttttcgttactttt

SEQ ID NO: 961197 - DNA, 120 bp, Artificial Sequence
  ENSG00000256124_19 (sequence is synthesized)
gtagacattatataatatcttctccccgcagctccagccaccagctgttagtcagcagaatgggagagggactgggtcagcttaagctgaataacttccatggtgacatttgagggaacc

SEQ ID NO: 961198 - DNA, 120 bp, Artificial Sequence
  ENSG00000256124_20 (sequence is synthesized)
aattcccagccactgaacaaacctaaatgttctgctatggccatagaaccaaatagatcttaacaaagaaacctgagagcattcaaaggtcaaaacaattggagctagttccttcaagct

SEQ ID NO: 961199 - DNA, 120 bp, Artificial Sequence
  ENSG00000256124_21 (sequence is synthesized)
taaatatgctcatctgtaaagtggggacaataactgtgtgtcttatagggttattttgaaggctaaatatgtgtaaaagcctcagtctactgaaaggttgctcaactgtaacactctttt

SEQ ID NO: 961200 - DNA, 120 bp, Artificial Sequence
  ENSG00000256124_22 (sequence is synthesized)
cattttgtgagggatcattctttgttggaggttagggacactgtctcgtgcattacaggatgtttagcaacatcctcagcttctatccatcagatgttagcaccccccccacggaccacc

SEQ ID NO: 961201 - DNA, 120 bp, Artificial Sequence
  ENSG00000256124_23 (sequence is synthesized)
atcttctccatcatcaccatcaaatatgtctccagacatttccaagtgtcccctgggaggctaaaactgcccctggttgagaaccactgttctagtacttggcattgttccataaacatc

SEQ ID NO: 961202 - DNA, 120 bp, Artificial Sequence
  ENSG00000256124_24 (sequence is synthesized)
agatgatatttttatcattataattattactaaaggcaacatcaccctgctatggagacaggtccttggtctcacggaatccctgcaatagttgctgcatttctgcatctttctgagagt

SEQ ID NO: 961203 - DNA, 120 bp, Artificial Sequence
  ENSG00000256124_25 (sequence is synthesized)
aagggttgaaaagagataaggtcaattcatctgacaacaatccaatgggaaacctactgtctccgtagaaattcttttcatggaaagaaaaggggctaccattttgatctgctgcaggaa

SEQ ID NO: 961204 - DNA, 120 bp, Artificial Sequence
  ENSG00000256124_26 (sequence is synthesized)
ctaggtctattcctcagcctcacagtttgcaaaacgctacagacttttccatgggcataaattctccagctttagggattgctggtatagttgactcttgaagctgctcttggatttcca

SEQ ID NO: 961205 - DNA, 120 bp, Artificial Sequence
  ENSG00000256124_27 (sequence is synthesized)
agggtagcaccatttttacctgagaaaagaaggaaaaagatattcaagaaggagaacttttcaacagaagttactccatttgctgtttttgtggttttgtgcttgtttaggtttgcaagt

SEQ ID NO: 961206 - DNA, 120 bp, Artificial Sequence
  ENSG00000256124_28 (sequence is synthesized)
gtgttttctgcccaaattgttcttgcatattctaacagtgtttgctttacgtgttttgatgccacgctgttttgaaggtacaaatgtttttcatggcatgtcttgtgttaagtgtacaaa

SEQ ID NO: 961207 - DNA, 120 bp, Artificial Sequence
  ENSG00000256124_29 (sequence is synthesized)
ctgagacgtgaatgtcagtgactgaatagagtacagtattcctcaaagtttgtaactaaataaaccctaagagaaaagtgaagcgagatttctggaggtctggaagtggccagctgacaa

SEQ ID NO: 961208 - DNA, 120 bp, Artificial Sequence
  ENSG00000256124_30 (sequence is synthesized)
tatacatctctgtatctcctatttttatctttatgctaaatgcaaattttactttctgtgctaaaataatgtttcattagtttcaaggtaaaaatgtgtaaatagactttccgtactggc

SEQ ID NO: 961209 - DNA, 120 bp, Artificial Sequence
  ENSG00000256124_31 (sequence is synthesized)
ccgcaaccaacaccaccaccagtccaggacctgatgtaatattgccacagactgattcccgttgcctttgatatgcaacctgtgcctacagtcagctctcagggctaaagaaaacagtca

SEQ ID NO: 961210 - DNA, 120 bp, Artificial Sequence
  ENSG00000256124_32 (sequence is synthesized)
gctcctgcggcatctgatttgcctcctgccctcgctgctgttaatctgcaacacgccacagcctctagatcgctgccgttcagagtcggatgtcatgggggcgactggcaggggttcttt

SEQ ID NO: 961211 - DNA, 120 bp, Artificial Sequence
  ENSG00000256120_0 (sequence is synthesized)
aatgctcatcacataaacatgaagtttcctccaaaaggaatgatgactaatgctttgaggaaacagcagacgtcagacagcaagcccagaaaaacctgccagcaccaagagggtgtcctc

SEQ ID NO: 961212 - DNA, 120 bp, Artificial Sequence
  ENSG00000256120_1 (sequence is synthesized)
aacaggcgcctgggggacatattattctaactaaagagaccagagcttccccaggaagggaagaggagagaaatgaagaacgtctgtgttcatgtttgccaaaaacaaaagtctgagaaa

SEQ ID NO: 961213 - DNA, 120 bp, Artificial Sequence
  ENSG00000256120_2 (sequence is synthesized)
tctctgagagactctacatgggagggcactaatcgaagcacctcatttaaagtgagaaaagctttgctaagggcagatgattcagcacggtatccttcgatgagtactgtcatctcaaat

SEQ ID NO: 961214 - DNA, 120 bp, Artificial Sequence
  ENSG00000256120_3 (sequence is synthesized)
cctttttaagaagaaaagtgcaacccactggagaaagagagggactccgaggaaggagagagagaagagcatcaagcacaaatgatgatctcctaggacagtggcagcttctgagaatgc

SEQ ID NO: 961215 - DNA, 120 bp, Artificial Sequence
  ENSG00000256120_4 (sequence is synthesized)
aagcagatacagtggtccctatgttggcaacctcagctgaagaggaacaactctctctataatcaagacttaatcttggcctggtgtgcctcatttttataggacttctgaaaccagaaa

SEQ ID NO: 961216 - DNA, 120 bp, Artificial Sequence
  ENSG00000256120_5 (sequence is synthesized)
tcaccagcgtggggagagaacattaaaggcagaggtgtctcttataagcacaacgtgtgaccagaacttggattactgtcagcttctagtgtctccatcattcataattgcactgtgttg

SEQ ID NO: 961217 - DNA, 120 bp, Artificial Sequence
  ENSG00000256120_6 (sequence is synthesized)
gtccacccactttactcctaaagaagaggtactattatctcaattttagagatggaaaaactaagcaacaagtagttacagaagttgtccaggatcgcacagttagacaacggcagtcaa

SEQ ID NO: 961218 - DNA, 120 bp, Artificial Sequence
  ENSG00000256120_7 (sequence is synthesized)
gttctggtgagcccaaaggctccatcttaaccactcttctaggctacctctccaggatggaagacactatcttttcaggtttccattcaatagaaaagtcatcttgaagaagtttgatgt

SEQ ID NO: 961219 - DNA, 120 bp, Artificial Sequence
  ENSG00000256120_8 (sequence is synthesized)
tggatttgattttgaaagacgaattggagattaagaagtggtaataagagtaaagaaaaaaacccaaatagaattacaagcacaaagagatgtagaaataaatatttcttggaaagataa

SEQ ID NO: 961220 - DNA, 120 bp, Artificial Sequence
  ENSG00000256120_9 (sequence is synthesized)
tgaaatttaccttttctaagaccattgttgattttccttttacccttgaagtggactgaaatatcactaatggtgagaggaaagctcagaggttctattaaagaatgtgaaataggttaa

SEQ ID NO: 961221 - DNA, 120 bp, Artificial Sequence
  ENSG00000256120_10 (sequence is synthesized)
gaagaggaacaactctctctataatcaaggacttctgaaaccagaaatcaccagcgtggggagagaacattaaaggcagaggtgtctcttataagcacaacgtgtgaccagaacttggat

SEQ ID NO: 961222 - DNA, 120 bp, Artificial Sequence
  ENSG00000256120_11 (sequence is synthesized)
ataccacagacttcaataacaaatgaagagaaacaagaaaagaaagcaatgcaaaaagaacggtactgccctctttctctcctgaaccatcaataaatcaagggtagataatagcctaaa

SEQ ID NO: 961223 - DNA, 120 bp, Artificial Sequence
  ENSG00000256120_12 (sequence is synthesized)
ctgccagtttacacccagaagtgaaagtggaattcacttgttaaagacaagaaaacaaaagttttctgccaggaagagtctcatcttagaaccagtatagggtctgaagacatttctgca

SEQ ID NO: 961224 - DNA, 120 bp, Artificial Sequence
  ENSG00000256120_13 (sequence is synthesized)
atttatgtttatgccattctttcacttttatttaaaaaggagatttaacctgaccattctctttgaagccgatgtcccaagtatatatgtttgatgagggtacagaagacataaggaata

SEQ ID NO: 961225 - DNA, 120 bp, Artificial Sequence
  ENSG00000256120_14 (sequence is synthesized)
aaactgcattgccacagagggaatacacggctccagatacaaggctttatgctaattttagcaaaatgtatgtatctttttacatacataaagttatggcactatataaagagatcctta

SEQ ID NO: 961226 - DNA, 120 bp, Artificial Sequence
  ENSG00000256120_15 (sequence is synthesized)
aatgtgacatacactgaagtcctatttactgcctgagtattccttttaaaaaataaaaactacaagtagtggttgtattaatattaaactatctccaaaattcactttagttctttaact

SEQ ID NO: 961227 - DNA, 120 bp, Artificial Sequence
  ENSG00000256120_16 (sequence is synthesized)
tgtaagatatagccaaatcatatgctcaaaattaaaaccctgattttagtaccagattacagttatttaatggtagatcaaaagcagctaatctttggctccaaattaggacctctctac

SEQ ID NO: 961228 - DNA, 120 bp, Artificial Sequence
  ENSG00000256120_17 (sequence is synthesized)
tctgtctgttgtaacgcctcacttgcctctgtttcctgttcttcatttgtcaatactgatgctgaaaattcattgtgtcaggttgcaatatattctgtaaaaccacatttcccaaaacaa

SEQ ID NO: 961229 - DNA, 120 bp, Artificial Sequence
  ENSG00000256120_18 (sequence is synthesized)
caactacttttccgtacaaagatgcaatttatggcaatttggctatgctgtatcttgaagtcgaatatcaagatttccagaaaacaaaattaaattcttaaacatgtacaagtattaaaa

SEQ ID NO: 961230 - DNA, 120 bp, Artificial Sequence
  ENSG00000256120_19 (sequence is synthesized)
tgaaagaaaatggacaatctgtcaggctgaacttttacacttaagatcagggttcaaactagaagatgataaaaacaaaggaaaacaaagccgacaccgtcccaggagtaacataccctc

SEQ ID NO: 961231 - DNA, 120 bp, Artificial Sequence
  ENSG00000256120_20 (sequence is synthesized)
catgtcaaagcaaaagcacacagtcatgatattgacttcttattcttccctgcttcttgacaagataaatctaaaaagtggcactgaaaattgagagaacagctgaataacaaaacctga

SEQ ID NO: 961232 - DNA, 120 bp, Artificial Sequence
  ENSG00000256120_21 (sequence is synthesized)
ctagtaaagtacttggtcctcattttgcattccccgtttttgaagaattcaaatcaggaaatttccgttatctaaatcacaggtttcaataggattaagagaagaaataagagaagcaac

SEQ ID NO: 961233 - DNA, 120 bp, Artificial Sequence
  ENSG00000256120_22 (sequence is synthesized)
aaggtgcacagaaagccagctctgacctttgttatttcatattgaagctcttactttgagatggaccagtagatgaagagagccattattcagaggagctgctcttgctcttcaaatttc

SEQ ID NO: 961234 - DNA, 120 bp, Artificial Sequence
  ENSG00000256120_23 (sequence is synthesized)
agttaatatgaccacattagaattattttatttttaaacttcagtaacaaggctctctttcctgttttcaacacacatgtttagaataatcagtggaaactctgcaaatggatgaaacaa

SEQ ID NO: 961235 - DNA, 120 bp, Artificial Sequence
  ENSG00000256120_24 (sequence is synthesized)
gcaaatcccccaggactgttttgtgactgattttcttacttctcacctatctaatatgaacggtttagattttgctaagctcaatcataaactcaactctagggggaagaaagtctcaag

SEQ ID NO: 961236 - DNA, 120 bp, Artificial Sequence
  ENSG00000256120_25 (sequence is synthesized)
catatggttcaaccaactgaaaatgctatacaatcaaaaggaagtataggctagaggtttaccattggctgcttgtacattctaaccagtattaaagattaactccacaacaaagtgaaa

SEQ ID NO: 961237 - DNA, 120 bp, Artificial Sequence
  ENSG00000253574_0 (sequence is synthesized)
agacgtgacttgctcctccttgccttcatcatgattgtgaggcttctccagcaacgtggaactgaagtgacggcagccctgtgactgttaacccggaaaactgcgagaggctttcccatg

SEQ ID NO: 961238 - DNA, 120 bp, Artificial Sequence
  ENSG00000253574_1 (sequence is synthesized)
cctggccggctgccctgatggagagaccaaggagctgaggcgctaaggagatgacctaaggttgcaaagtgaaaagcaaggccaaggaggggcttcatttcaaataccagatgcggggcc

SEQ ID NO: 961239 - DNA, 120 bp, Artificial Sequence
  ENSG00000253574_2 (sequence is synthesized)
ggccctccatccactcctcggaacgcggcactccgcggcctcccgggtagacggtctccaccactacttgcttctgttcatctctgacggcagagttaaataaaattaatactattattg

SEQ ID NO: 961240 - DNA, 120 bp, Artificial Sequence
  ENSG00000253576_0 (sequence is synthesized)
ctttcttccagatctcctctggcacgtatccagacgcaggcctgtgaaggaattcccgatgcgcgtctatgaaaaggatgggaagggggtggagagaggaggagagtactgtaagcacac

SEQ ID NO: 961241 - DNA, 120 bp, Artificial Sequence
  ENSG00000253576_1 (sequence is synthesized)
cattagattttctcaactattctgaattagcaaaaatttactacagcttggtgaggaatatatggaaactatatcatctttgcaattttttaatctaaaattattccaaatatttaaaag

SEQ ID NO: 961242 - DNA, 120 bp, Artificial Sequence
  ENSG00000253576_2 (sequence is synthesized)
tttattttcaaaagtttacactgtgatgtcatgactacttaataataggatggactggaaatatctatgcattctcctgtgtatattcatttctataaagtaaatgacaaaaataaaaac

SEQ ID NO: 961243 - DNA, 120 bp, Artificial Sequence
  ENSG00000253577_0 (sequence is synthesized)
ctggggatgatggtgagtggtgtcacttccacttccatccctttaatcctggagccgtgagtcctggctatgggagaaacagtgccatatatgggatgctgattcagagcatacacagtc

SEQ ID NO: 961244 - DNA, 120 bp, Artificial Sequence
  ENSG00000253577_1 (sequence is synthesized)
tccatcattttatcaattcagctgcttcaggatgacagataacatgcagactacctggtcatgtggccacgttctcatggtgatgtcagagggaagagtgccagcagaagtactctgctt

SEQ ID NO: 961245 - DNA, 120 bp, Artificial Sequence
  ENSG00000253577_2 (sequence is synthesized)
agatcacatcttctatcatccccttgtccaaaatgctattcttggttcctgatctggtgttgccatcaacatgctaattgttcctgtacacttgcaaactcattaaacctgagaaagaca

SEQ ID NO: 961246 - DNA, 120 bp, Artificial Sequence
  ENSG00000253577_3 (sequence is synthesized)
tgtccaaagaaaggactccagcttatgaaagaaaacgcaaagaaagaagagaccattccactgattttgggaacaagacaatataatgatcacatctatgctttacaaagaaaactctgc

SEQ ID NO: 961247 - DNA, 120 bp, Artificial Sequence
  ENSG00000253577_4 (sequence is synthesized)
atctatatgaagaataaatgatggagctaggctggagaagtacactacttgaagtcaacaagaaagcagctggtgaaagatgatgagacacttattagaggaagaagcagtgaggatgga

SEQ ID NO: 961248 - DNA, 120 bp, Artificial Sequence
  ENSG00000253577_5 (sequence is synthesized)
agggagagaaatatacactagaggcactggaaagtgcatcacccaccttattgagtcatcagatatgatattctgaatttcctgggttaggtaaaaattaaaatggaaattgtaagaaaa

SEQ ID NO: 961249 - DNA, 120 bp, Artificial Sequence
  ENSG00000253577_6 (sequence is synthesized)
aagtaagtcatgtgatcaaaccctgagccagaagtgaggagacattccagttatacagtaatgggtgtagctacaggcagcatggcagatttggccattaatgtaatcaatcttccacca

SEQ ID NO: 961250 - DNA, 120 bp, Artificial Sequence
  ENSG00000253577_7 (sequence is synthesized)
tattgaaaacatttttagttttctctatttttagatgctattcttggttcctgatctggtgttgccatcaacatgctaattgttcctgtacacttgcaaactcattaaacctgagaaaga

SEQ ID NO: 961251 - DNA, 120 bp, Artificial Sequence
  ENSG00000253573_0 (sequence is synthesized)
ggccctcagcccttggcccagctgttctaggcctgctttcagggatccaggaagaaagtgaccaacccatgcaaacttagggcaaaactaaccatatttaacagtagaaatgcctgttaa

SEQ ID NO: 961252 - DNA, 120 bp, Artificial Sequence
  ENSG00000253573_1 (sequence is synthesized)
ctatacaatacacatggaattaattggagccttgcggaattttggaaagaataaccagcctcatctatatctctacttggagaaatggcttcttggcctgggctaatggtgttacttgac

SEQ ID NO: 961253 - DNA, 120 bp, Artificial Sequence
  ENSG00000253573_2 (sequence is synthesized)
aatcagaaggggaaaaagtcataacttcactcccttttcctcaggccaaaatgcgaatttgaaactcattccgaatgcctttccagggaggtggccacagctgatgaaagacctcacgct

SEQ ID NO: 961254 - DNA, 120 bp, Artificial Sequence
  ENSG00000253573_3 (sequence is synthesized)
tgttccaacaggccctgggagctgaattgtatccctgaaactggcctagcttccttcagctcaacagagcagctgaaagcaatcctcagcagccactgggagaatcatccctggcaaccg

SEQ ID NO: 961255 - DNA, 120 bp, Artificial Sequence
  ENSG00000253573_4 (sequence is synthesized)
acagagagagacttcaggagtacaactgacccagagaaatgaaagaaaggagacacctgctccattttcccttaacaacatttacagaacttctagaggctgcctgggtgccttagattg

SEQ ID NO: 961256 - DNA, 120 bp, Artificial Sequence
  ENSG00000253573_5 (sequence is synthesized)
tgccctcttcctccatcttcaaagccagcaatgacagacttttgagtttgccacatctgcgtcacaacttaattcttgaaaaggccgtataaaatgctgcttcctcaggatgcctgctct

SEQ ID NO: 961257 - DNA, 120 bp, Artificial Sequence
  ENSG00000253573_6 (sequence is synthesized)
ttatcagcatccctgtctccatggtgatagccttcttgccgtaatcagagggatgacctacttaaccatggaaatattggcttcattcgagttaactttgctggtaatatgcacccagtg

SEQ ID NO: 961258 - DNA, 120 bp, Artificial Sequence
  ENSG00000253573_7 (sequence is synthesized)
ttccatcttcatgaccctgtttctagcctctatccaaacatcagctgttctgtttgtgtgtgtatgtgtgtgtgggtttcatttgcactatacttcaatataaaaattatgtgatcataa

SEQ ID NO: 961259 - DNA, 120 bp, Artificial Sequence
  ENSG00000253578_0 (sequence is synthesized)
atggacatgagggtccccactcagctccaggggctcctgctgctctggctcccagggagtcagatgtaatttccagatgactcagtctccatcctccctgactgcatctgtaggagagag

SEQ ID NO: 961260 - DNA, 120 bp, Artificial Sequence
  ENSG00000253578_1 (sequence is synthesized)
tgatctatgctgcatccagtttgcaatctggggtcccgtcacggttcagtggcagtaggtctgggacacatttcacacattctcaccatcaggagcctgcaacctgaagatgttataact

SEQ ID NO: 961261 - DNA, 120 bp, Artificial Sequence
  ENSG00000198685_0 (sequence is synthesized)
agcaattgggaacagaaagtgcttcctgtcccggcctgagacaatggacaataaacccagcctgctgggccccggcccctgaccccaaggcttcaggaagaggctcccacacgcacacac

SEQ ID NO: 961262 - DNA, 120 bp, Artificial Sequence
  ENSG00000198685_1 (sequence is synthesized)
ctgcggtgtgtgaagctcgcattgttctgggctcatggccgagtagggccccttgctctcaggagcctccagctctttctggacctgagccctgggagccttcactctgcccagatgtgc

SEQ ID NO: 961263 - DNA, 68 bp, Artificial Sequence
  ENSG00000198685_2 (sequence is synthesized)
ggacctgagccctgggagccttcactctgcccagatgtgcttcctgtggaaggagacccccagatgac

SEQ ID NO: 961264 - DNA, 120 bp, Artificial Sequence
  ENSG00000198685_3 (sequence is synthesized)
gcctcctgagtagctgggattacagaaaatctgagcagtgggtgaggccgagggactgcccagagccccagagcacggcagtgggcaagcagtcgtccctgtcctgggcatccctgtggc

SEQ ID NO: 961265 - DNA, 120 bp, Artificial Sequence
  ENSG00000198685_4 (sequence is synthesized)
cctgtggccatggagctcctgggtgagcagctgctctgagacaagtctggtgaagaatacagcaggactcctgaacattcttccttaaatgcttatctgtggaaaccagaactgcccttg

SEQ ID NO: 961266 - DNA, 120 bp, Artificial Sequence
  ENSG00000198685_5 (sequence is synthesized)
gcgcgtggctcgtggacgtgctgggtggctgggtggggcgggtgcacgggtggagcctcagctctgtttctttctctgggtagtgtccccactgctgggcttctcccgctctcagctctc

SEQ ID NO: 961267 - DNA, 120 bp, Artificial Sequence
  ENSG00000198685_6 (sequence is synthesized)
tggggaggtcccctgtgaagggcctgtctttcctgtcccctccctcggatcattaatgaaccactctctctctctttttccttttcagtgattgggctgtcggaatcaaagaggccctcc

SEQ ID NO: 961268 - DNA, 120 bp, Artificial Sequence
  ENSG00000198685_7 (sequence is synthesized)
ggtgactcaggcgtttcccattgccctattctagcatcctctactcttagcactgagagtttttcacgtcctatttggaactgataggaaaccctttcattgtttcgctacatggatatt

SEQ ID NO: 961269 - DNA, 120 bp, Artificial Sequence
  ENSG00000198685_8 (sequence is synthesized)
agcactgatgaaggaagcgctccatcagatagtggtccgctgcagtgagctggtttccagcacgagcctgcctagactcagcgtctcccgcctccagggacccccagactctcagcccct

SEQ ID NO: 961270 - DNA, 120 bp, Artificial Sequence
  ENSG00000198685_9 (sequence is synthesized)
aggcaccctgggccagggtggttggaagcttctaggcattgtggggtctctggcaccagagacactcgggggtctggggaccgagtttgggccctgtacccacccactaccatttgacat

SEQ ID NO: 961271 - DNA, 120 bp, Artificial Sequence
  ENSG00000198685_10 (sequence is synthesized)
ggtgagagagagagagagagatgacgagctcaggcagggatggcttctccagtgcccacaatgtgccaggactctgctgtgccactgtgggcctttcctcacccctccctcccagacatc

SEQ ID NO: 961272 - DNA, 120 bp, Artificial Sequence
  ENSG00000198685_11 (sequence is synthesized)
agagcctctgagcaactttgctttcagctattttccatgacccagtcctgggtaaggcttcatttgaatgaagggttctgctgctaaaaaaaaaaaaaaagtcggaaaaaccacctgatc

SEQ ID NO: 961273 - DNA, 120 bp, Artificial Sequence
  ENSG00000198685_12 (sequence is synthesized)
acaactttctaaggcagctattttgttttgcaatgagatatttgcagtggtttcactaaagcctgatcttcccactggactgtcggcctgtgaggatgaggacgtgtctatcacagtcag

SEQ ID NO: 961274 - DNA, 120 bp, Artificial Sequence
  ENSG00000198685_13 (sequence is synthesized)
tatgccctgaatgaatgggtgtcaccctcctccccctagtgagagataaggacctcaggctcagagaggttatgtggttttctcaaagccacacagcaagatttggcaggtgagccttac

SEQ ID NO: 961275 - DNA, 120 bp, Artificial Sequence
  ENSG00000198685_14 (sequence is synthesized)
ttctcttcctgggctagcctgcggtcaggggcaaggcttttggatgataagagtgaggtgcagtcagctctagattgggggtggcagagggaaaaggagggggggttcccaaagcaccat

SEQ ID NO: 961276 - DNA, 120 bp, Artificial Sequence
  ENSG00000198685_15 (sequence is synthesized)
tctgctttctgtgagaagggatttcccctcaacaacttctgtcccatttttcagagctaaagtgacaagccacatccacgtccctggttaaaggtgctccccctgcaggaaacacatgtg

SEQ ID NO: 961277 - DNA, 120 bp, Artificial Sequence
  ENSG00000198685_16 (sequence is synthesized)
cacttgggatggagccctctgtgcgggagcggcttgctcacctctcagccagtgccagctgggtgggtctctcccagctctcgaatcctaactgcagccaccatttattcagcacctgtt

SEQ ID NO: 961278 - DNA, 120 bp, Artificial Sequence
  ENSG00000198685_17 (sequence is synthesized)
atgcaccaggcactttatgtatcttattgctaaccctcaaaacaagcccttcccaacataagcgcttttgtgccaaacccataggtctgaaactgagacccagagaggctgaatgacatg

SEQ ID NO: 961279 - DNA, 120 bp, Artificial Sequence
  ENSG00000198685_18 (sequence is synthesized)
ctcacagtcacacagcaggcagtggcaggcagtagtgaagtcggctctatggattgtatacctgggctcctccaggcctctgcgctgcccggcctgataccctagcaggttgggtattca

SEQ ID NO: 961280 - DNA, 120 bp, Artificial Sequence
  ENSG00000198685_19 (sequence is synthesized)
gaggtgcctggggagcttgttaaaagtgtagattccaggcctccttacccttagagactgtgactcagtatccggggcagggcccaggcatcttcattttgacaggccgtcccggtggct

SEQ ID NO: 961281 - DNA, 120 bp, Artificial Sequence
  ENSG00000198685_20 (sequence is synthesized)
gccatgcgcaggcaggttttaggaacatcatgggtggatgattcctggtctccccagccctcttgacctggccacagagagctgcctttccagcgaggtcagccgagatgacgctgccgg

SEQ ID NO: 961282 - DNA, 120 bp, Artificial Sequence
  ENSG00000198685_21 (sequence is synthesized)
gagagcagtcttctctgtagtccccggaggggactcctcggaggaaggatgagtctgagggttccggttgtcttggcctgagaccacccaaggtcttttaacagaaaaaaactttaccca

SEQ ID NO: 961283 - DNA, 120 bp, Artificial Sequence
  ENSG00000273447_0 (sequence is synthesized)
tcaccctatacacgaatacagccagccaataagattctgttgtagcattataaatgcatcaatcagttctgaaatggttaaagaattatgagcatcaaaagaaagtcctgaatgatttca

SEQ ID NO: 961284 - DNA, 120 bp, Artificial Sequence
  ENSG00000273447_1 (sequence is synthesized)
aatcataaaataaatagaaaatccctactatcccgtttttataggcagattttaatcttcgtatcagcaggcttattttcaggccttttttctactgtccttcctaaatataacagaaca

SEQ ID NO: 961285 - DNA, 120 bp, Artificial Sequence
  ENSG00000273447_2 (sequence is synthesized)
ttgcattcattaaatcagtcaggtgattttgcccacacaaccaccccatgaggcaggtgctctttttaccaagaatctaaggcatagagagagaaagtaacttggaaaacgatttcattt

SEQ ID NO: 961286 - DNA, 120 bp, Artificial Sequence
  ENSG00000273447_3 (sequence is synthesized)
gtggctttcttcccacagtagctcattagttatttccaattctcttgtgtttgacagtgttggccactccccttttcacaaaacaatcatgtcattatttgtttcttgtttctctcctgg

SEQ ID NO: 961287 - DNA, 120 bp, Artificial Sequence
  ENSG00000273447_4 (sequence is synthesized)
tgtccatcctcctcagtatcttccctcttcagcccattcctcatgggtgcccctcggttttgttttatgctcctttttcaggctgtattcaacacgagtaaactcatctaatcccatggc

SEQ ID NO: 961288 - DNA, 120 bp, Artificial Sequence
  ENSG00000176754_0 (sequence is synthesized)
actccgcccgattccaaaagcccagggggtgggcctcgcccttcctctccctccaggtttaattatctgaagagtcttggactttcatttcttgttttttgcttgtttgcttgtttgttt

SEQ ID NO: 961289 - DNA, 120 bp, Artificial Sequence
  ENSG00000176754_1 (sequence is synthesized)
gcacctggttgatgtataagtcttggactttgggagacccaaaagagaaggaaggtgttggcaatatccttgaagagactaaaagaactcagaacaacactgaacaagccagcagagcca

SEQ ID NO: 961290 - DNA, 120 bp, Artificial Sequence
  ENSG00000176754_2 (sequence is synthesized)
tcaactcacccctacagtctccatacacagactccatgaaagcattggccatcagctctcactggtttctgccccaaattcacacactccctcctatcaccaaagccacccgccaccgct

SEQ ID NO: 961291 - DNA, 120 bp, Artificial Sequence
  ENSG00000176754_3 (sequence is synthesized)
ggcctcctgcatgctgtgggaggagaggagggcagacaacgttgcctcccctgactcccatcgcgcgggcttgtgagtccatggagcgcagttgtccagggaactatccgatgcagcatg

SEQ ID NO: 961292 - DNA, 120 bp, Artificial Sequence
  ENSG00000176754_4 (sequence is synthesized)
agaggaaggtgatgcagcggcatcccaccttgagatgagagaaagctgttctgggcttccagtgattggcagctgaggtcactcctttgcccatacccccgccccgagactgtttccagt

SEQ ID NO: 961293 - DNA, 120 bp, Artificial Sequence
  ENSG00000176754_5 (sequence is synthesized)
gccccaagttcacctcaaggatcattgcacagcagaagtgagttttacttaggttgagacactcacatatagggaatgcagaataaatcccatcccttcctcagccagcaggggcaaggc

SEQ ID NO: 961294 - DNA, 120 bp, Artificial Sequence
  ENSG00000176754_6 (sequence is synthesized)
cctgagaaggagaacatcgtgtaggtacaggccaaccccaggggcctctcacagggccctcctcatcatcactcacctctctattcagcaaacactcagtgagacaaccatggaccctag

SEQ ID NO: 961295 - DNA, 120 bp, Artificial Sequence
  ENSG00000176754_7 (sequence is synthesized)
gaggccaccagccaagaaatgctgtcagtgcctggaagctggaaaggcaatgaaatggattttccccagaacctccagggagaatatggcacagcttctaccttgattttcacccagtga

SEQ ID NO: 961296 - DNA, 120 bp, Artificial Sequence
  ENSG00000176754_8 (sequence is synthesized)
gacacattttggatttctgacctaaagaattgtaaggctgcctggatccccagagtttgtctggaaagcctcttgagatggggttatgtgctccgaggatcccaggaggaaggatggggc

SEQ ID NO: 961297 - DNA, 120 bp, Artificial Sequence
  ENSG00000176754_9 (sequence is synthesized)
aagagcagacaaacctatgcctctacagcagctgtaccgttgtcctgggagtgagccccagccgtggctcaaggcacacgtgcctccagaggacaatctgggatgctcaggggacagaga

SEQ ID NO: 961298 - DNA, 120 bp, Artificial Sequence
  ENSG00000176754_10 (sequence is synthesized)
ggcagagggactatcagggtgaagctgtctttttcacttgtttggcactcagcccagggcctggatttatcctgcacaaaatgaacagtgcagggcccttcatctggggaaagcctaaca

SEQ ID NO: 961299 - DNA, 120 bp, Artificial Sequence
  ENSG00000176754_11 (sequence is synthesized)
gtggcacccaagcagagctaggaggtccaggtcctccagtggcagggagggagggagctcctttccaggtactttctttcctagatagaggatcttggtgactcatctcccagttcaact

SEQ ID NO: 961300 - DNA, 120 bp, Artificial Sequence
  ENSG00000176754_12 (sequence is synthesized)
gtaaaggctaagggcctccttgaagtttccttccttatgaaaatgtccatagcaagtttgtcacttaggaatgtttttcaatgataggaaacagaaaagccaactagtaggagatgaaat

SEQ ID NO: 961301 - DNA, 120 bp, Artificial Sequence
  ENSG00000176754_13 (sequence is synthesized)
aagttgagatttttttttttaatagcaagaagtctggatattgtcagtagccggcattggtttaggacacaataatattggggatgatgtcctgtatttttcttggcctttttcttacag

SEQ ID NO: 961302 - DNA, 120 bp, Artificial Sequence
  ENSG00000176754_14 (sequence is synthesized)
tcacaatgtggatgccatggctcaaggtatcacatccctattcaaggcaggatataggaggaagggatggtgccagatacatctgtcccatttattaaaaagcaagcttctccaaaaccc

SEQ ID NO: 961303 - DNA, 120 bp, Artificial Sequence
  ENSG00000176754_15 (sequence is synthesized)
agcattggccatcagctctcactggtgtggatatgtcaccagtggggtagagttgttcctctctctgacactgtattagtccattctcacactgctattaaaaaacaaacaaacaaactt

SEQ ID NO: 961304 - DNA, 120 bp, Artificial Sequence
  ENSG00000230046_0 (sequence is synthesized)
agtaaaggaagcctggaatgctggaagatctacaaacaatattatctgaacaacagttacagctgtgattaaagtacaaagagaaaaaaaacagtagatttaacagtaaactaggtggag

SEQ ID NO: 961305 - DNA, 120 bp, Artificial Sequence
  ENSG00000230046_1 (sequence is synthesized)
gaagggatagaagctaaacagcatttcactgtagtaggaaaaacactgacttgagagttaataagtgttcaagtattttattgtaattctttaattgtttgttaaacctaaacatagttt

SEQ ID NO: 961306 - DNA, 120 bp, Artificial Sequence
  ENSG00000230046_2 (sequence is synthesized)
aaagtttctacttgttcaaatcaagtagaactaattaattctctatccaaagattttagacatgcctccagacccaaatactctgatgagaaaaagacagcttctctgtttttggaactc

SEQ ID NO: 961307 - DNA, 120 bp, Artificial Sequence
  ENSG00000230046_3 (sequence is synthesized)
aaactttcagcaacatgctttcaatattaacatataatagactactgttatatgacactaaatgtaaaatctaagtgaatatactttattggacatacttttttgataactttcataaca

SEQ ID NO: 961308 - DNA, 120 bp, Artificial Sequence
  ENSG00000230046_4 (sequence is synthesized)
agttagcatgaacacaaataatatctcactttattatagaacacaacataatcttttacattctatttaaggtccttcctacaccctactgcataatcatccacaaatataactttatcc

SEQ ID NO: 961309 - DNA, 120 bp, Artificial Sequence
  ENSG00000253110_0 (sequence is synthesized)
agatgccctcaagaccaggcaggcatagtgtccagtagccagcaagagcagccaggccccatctaaaggaagctaggctgcccagcttcaggcaagtgttggcatgcaggaacataggtc

SEQ ID NO: 961310 - DNA, 120 bp, Artificial Sequence
  ENSG00000253110_1 (sequence is synthesized)
attgtggccagatcgctcattcttcaagaaaagccgtgaaatctagattgtatgagaaagctcctaatttttaagacaacttattttaaaaaattaaacatctgtctgcagtccagatgg

SEQ ID NO: 961311 - DNA, 120 bp, Artificial Sequence
  ENSG00000253110_2 (sequence is synthesized)
cacgcagggttacacaggcagttagcagaaacaatatgggaacccaggtctgctcggctgcacagctcaccgtcggacctctcccccaatccccatgggccttgcacctcggatggccga

SEQ ID NO: 961312 - DNA, 120 bp, Artificial Sequence
  ENSG00000253110_3 (sequence is synthesized)
ggggatcctggatttcagcagtcccacgccccttgtgggtttgaagttccttgcgggtttatcttgcgtaggcccatggcacactgtccctaccctgccctgccccaccccaccccaccc

SEQ ID NO: 961313 - DNA, 120 bp, Artificial Sequence
  ENSG00000253110_4 (sequence is synthesized)
tccaattccttcacaggctcctttgaacttggtctcaaggctcgcccacaaatcccaggaagtgtcttggatgcagaagagtttcatggtgttccttataaaagcacaacctgacatgca

SEQ ID NO: 961314 - DNA, 120 bp, Artificial Sequence
  ENSG00000230040_0 (sequence is synthesized)
gtaaaagatgtgagttctatgattaggagctcattgtcacacctcttttgccacaaaattgatcctctgttatgacgtaatgaagtatagaaccctatgccattaaatcagggattctct

SEQ ID NO: 961315 - DNA, 120 bp, Artificial Sequence
  ENSG00000230040_1 (sequence is synthesized)
ttgtcctaagatagtaatgcttgcagaggcactgcagcaggcaaagaagataaacccctatctgagactccagtttcttcagctttggccctcttgggccttcgaacacagactgaagac

SEQ ID NO: 961316 - DNA, 120 bp, Artificial Sequence
  ENSG00000230040_2 (sequence is synthesized)
tgcgctgttggcttcacgactttggaggttttggaactccaactggcttccttgttcttcagcttgcagacggcctactgtgggacgtcaccttgagatcgttgatatggacaggagacg

SEQ ID NO: 961317 - DNA, 120 bp, Artificial Sequence
  ENSG00000230040_3 (sequence is synthesized)
cttaaacgaaaacgaaaacaggcatttctgtgttcatgctccaaaagttatcttttggcctgccacaccccctatcctgcacccatatgaatcccgaaccccagactccagaagcagacc

SEQ ID NO: 961318 - DNA, 120 bp, Artificial Sequence
  ENSG00000230040_4 (sequence is synthesized)
agcaagcccgcagaccagcagaaggatggcagaacgatgtggcagagaaagggagaagaggaggaacatctgaatgccaaaatgagttcagctgggggcagtcagagaggagtccagcca

SEQ ID NO: 961319 - DNA, 120 bp, Artificial Sequence
  ENSG00000230040_5 (sequence is synthesized)
ctgggcagccagaatccaggggaggatcacctttccacttcatccccttcctctgcctccccatccatcctgctgaaagccacctccaccactcaataaaacctgccattcatccttgga

SEQ ID NO: 961320 - DNA, 120 bp, Artificial Sequence
  ENSG00000230040_6 (sequence is synthesized)
cagggcaaagccaagaagtgattttcccccctccctgccacgggaactgtgacctaattctcattcctaatcacagaatcaaaggagaaatttatttcaatgagctagtctgaaagagct

SEQ ID NO: 961321 - DNA, 120 bp, Artificial Sequence
  ENSG00000230040_7 (sequence is synthesized)
atttgccaaatggctttctttccaatacttaatgaaaagatgcattttgtactactttcaaaaagtgatatggacaggagacggaaatactgggtagaaaagggcagttccctggcaaag

SEQ ID NO: 961322 - DNA, 120 bp, Artificial Sequence
  ENSG00000261025_0 (sequence is synthesized)
ggtgagaacagtgaggttctgatagccccggacactagcacgcccttaggtggtgccagagctgggatctgaatctggctcatccatccaactctatggcctcagcaccttcaccccctt

SEQ ID NO: 961323 - DNA, 120 bp, Artificial Sequence
  ENSG00000261025_1 (sequence is synthesized)
ggaagggactttagggagacacggggagtggaggggtatcctggggacacgacgggatgtggctgcagcagacctgccggtgaatccttctgactcaccgtgtgaccgtatgtgaggcct

SEQ ID NO: 961324 - DNA, 120 bp, Artificial Sequence
  ENSG00000261025_2 (sequence is synthesized)
tccccggtgagcctcagttcctgggctggacgctggggagagccgtctccaccctgtctgcctcccgaacagcttgctctggaaactcccataggaggcatttgtgcgtaggtggctgtg

SEQ ID NO: 961325 - DNA, 120 bp, Artificial Sequence
  ENSG00000261025_3 (sequence is synthesized)
gggtgagaggagcattgctgatcattatttaagcaaagatgacactgggcagaagggggcagcgagcccattcctggggaaacaggatgcatcccagcctgcgctctcccccctcagtca

SEQ ID NO: 961326 - DNA, 120 bp, Artificial Sequence
  ENSG00000261025_4 (sequence is synthesized)
gctaatctccccaggccgacgctgctcctcctcccgattccatctgcctcttaaacgcgggacttctcactgaaacgtattcaaacccgaacatgcactaagggaacttcagacaggagg

SEQ ID NO: 961327 - DNA, 120 bp, Artificial Sequence
  ENSG00000261025_5 (sequence is synthesized)
agaggcagcaggttgagctcttggggtccctggcgaggcagacgctgcgggtggagacagtccttagtttgtcctcggtgccaccacccctgtggtacaagagacactgaagcagctgta

SEQ ID NO: 961328 - DNA, 120 bp, Artificial Sequence
  ENSG00000261025_6 (sequence is synthesized)
tggggtggcagctccaggctcggccaagagcagggcccgaggcaggaggtgaggactggtggttctcgttctgaagtgggcaccgagagcagtttttcaaaacaacaggaaagagagaag

SEQ ID NO: 961329 - DNA, 120 bp, Artificial Sequence
  ENSG00000261025_7 (sequence is synthesized)
cggagggcgggctgggtttgaatcctgcttcctccaccagcaagctgggggaccttgggcaggtctctccacctctctggctctcccccagagactatcagactgcttaggcgcgtggtg

SEQ ID NO: 961330 - DNA, 120 bp, Artificial Sequence
  ENSG00000261025_8 (sequence is synthesized)
ccgtcctcagagcccacccctggagggatcatgcctaaagctctcagcatgtgcgccccaggtggtaggtcctcagctgatgatcccttggcttggcctgggtgttctggtcctgggtgg

SEQ ID NO: 961331 - DNA, 120 bp, Artificial Sequence
  ENSG00000261025_9 (sequence is synthesized)
gttgcacagctctgcaggccccattctccacccccggagaggggctgatctggctgagtggcggcatcttagtgtctctgtgctagccctcgaaagggaagtgccccacccccacaccca

SEQ ID NO: 961332 - DNA, 120 bp, Artificial Sequence
  ENSG00000261025_10 (sequence is synthesized)
tcacaccaggatctgctgatgaaaggccagaatttgaactccaaggccagtgtccacctcgaatctgctacctgcccggtccaagctggcagtgcgactcctggaggctaaatcttgggg

SEQ ID NO: 961333 - DNA, 120 bp, Artificial Sequence
  ENSG00000261025_11 (sequence is synthesized)
ttaatccctgtattagttttttcctcctctgaaaagtgaggagggccaccctgtcctgtaggttgttgggaggatctggtggtttgaggtgtgctgtcatcgaaatcataacgttcagag

SEQ ID NO: 961334 - DNA, 120 bp, Artificial Sequence
  ENSG00000261025_12 (sequence is synthesized)
gcagggtctgcatccagtgctcatcgtggtgacataacctcagccctgcacacaggttagggaaatgaatttcatcaccattcacaggagacaccttcttaattgacccccgggtatctc

SEQ ID NO: 961335 - DNA, 120 bp, Artificial Sequence
  ENSG00000261025_13 (sequence is synthesized)
ccaggattcacctgtacttctcgtataaaataccaatggatgccctcagctggcaggcccttctctggaatgccacatctcctcccaccagccactgaaccgtcagcttaccagacgtga

SEQ ID NO: 961336 - DNA, 120 bp, Artificial Sequence
  ENSG00000261025_14 (sequence is synthesized)
gttggaatgtgtcccaaccagttggtgccagctgggtttgcatggctatagaacgtcattggagattatgccagtcctgggccagtttgcccacagatcagctctgctcattcccctgtt

SEQ ID NO: 961337 - DNA, 120 bp, Artificial Sequence
  ENSG00000261025_15 (sequence is synthesized)
tggctctgtcacacaagggtttgatggcacgggctgcattccccgagctccttggccagctggtccccgctacattcaaccaatgggaggcaccaagagaagatgaaaaacaaaagcaag

SEQ ID NO: 961338 - DNA, 120 bp, Artificial Sequence
  ENSG00000261025_16 (sequence is synthesized)
ggagaagccagggtgtttctcccctctattctttgtctcaggtgatgtctccatgtggctaagtctcctctgtgactctagcaaatgccggactggcccactaagttcctgcttctgctg

SEQ ID NO: 961339 - DNA, 120 bp, Artificial Sequence
  ENSG00000261025_17 (sequence is synthesized)
ggggccctggtaaccccacctctctccgtgtccctcttacccaaagggtgtcagtggctgaactgatgctcacactgggactcctcactgtctctgtttggctcctcaggttgtccctca

SEQ ID NO: 961340 - DNA, 120 bp, Artificial Sequence
  ENSG00000261025_18 (sequence is synthesized)
cctgtgttgctaacactccctgaattaacttccaggactcaatatggctcctgttttcctggttggactccgactgatgataatgccatgaggtcaatcgtgtgatgccgaacaggagcc

SEQ ID NO: 961341 - DNA, 120 bp, Artificial Sequence
  ENSG00000261025_19 (sequence is synthesized)
tctgcttctatgaaaattgggaagattcaatgaaggcaaattgctaaaaaataaattgaatttggtatgggtgggacattgtaaaggatggaaagaaatagtaaaatctagatgatgcca

SEQ ID NO: 961342 - DNA, 120 bp, Artificial Sequence
  ENSG00000284882_0 (sequence is synthesized)
gtcaaagctggtttcggcgcccacggcacctctccttagggctccgttctaccctaacttctcttcgtgccctgaagcccagacctagaggagcagaggaaggcgctgacctcgaaatct

SEQ ID NO: 961343 - DNA, 120 bp, Artificial Sequence
  ENSG00000284882_1 (sequence is synthesized)
ggatggtggcgaatcgggcggcagagctcaggctccgggcatgggcagtcggtcccggccgcgagccgcagcgccagcagcgccagcagcgccagcagcgctagacccgggacgccgctc

SEQ ID NO: 961344 - DNA, 120 bp, Artificial Sequence
  ENSG00000284882_2 (sequence is synthesized)
ggcgggctagagacgaggcgccagcgtcgaagctgcggccgggacatagcagcagacagggtctctgtcacccaggctagagtgcagtgacttgatcaagctcacagcagcctccatctc

SEQ ID NO: 961345 - DNA, 120 bp, Artificial Sequence
  ENSG00000284882_3 (sequence is synthesized)
cctcctgagtagctaggactacagataatcaagctaagcacacaggatgactgcccaagaagcaagtgaccgcaatggtgaagctgggcctccaccctgccgtctggctgacttcaaggc

SEQ ID NO: 961346 - DNA, 120 bp, Artificial Sequence
  ENSG00000284882_4 (sequence is synthesized)
ggctgacttcaaggcctgcacagcctcttaagccgcatcctgcttgctgcctccaagctttcctgactgcagccttttctccagtcacttttgatagaggagttaagaagaaattactta

SEQ ID NO: 961347 - DNA, 88 bp, Artificial Sequence
  ENSG00000284882_5 (sequence is synthesized)
ctttctaacaaacagcagcctgtaaaatcaagctgcagacatagatgccggcagttgtgccaatcatgttcagaatggtggctccctt

SEQ ID NO: 961348 - DNA, 120 bp, Artificial Sequence
  ENSG00000284882_6 (sequence is synthesized)
cggcagttgtgccaatcatgttcagaatggtggctcccttctcccttctctgccagccatatgtacagtaaggagcagacaacatggctcgggccaagggtaaagttgatttgcataata

SEQ ID NO: 961349 - DNA, 120 bp, Artificial Sequence
  ENSG00000284882_7 (sequence is synthesized)
tggctcgggccaagggtaaagttgatttgcataataagattagggtggggcccaccagccttcccctgcactatgtaaacatcacgcctgactgaaccaatctgtgagccctatgtaaat

SEQ ID NO: 961350 - DNA, 120 bp, Artificial Sequence
  ENSG00000284882_8 (sequence is synthesized)
gtgagtccactgccagccagtctttcctctgggaagcccctctctctccctagagagagctggtttcctttctcctttctttttcttttgcatattaaacttccactcctaaactcctca

SEQ ID NO: 961351 - DNA, 120 bp, Artificial Sequence
  ENSG00000284882_9 (sequence is synthesized)
acaggtgggtgaagttaagtggctgctggagcgtctcgggggacagccagtgtctgcggcgccgagagggccgttcgtggactcaaatggacagggtctctgtcacccaggctagagtgc

SEQ ID NO: 961352 - DNA, 120 bp, Artificial Sequence
  ENSG00000273443_0 (sequence is synthesized)
caagtcctcgtgtccaggaagctgcccaccggtcctccaggaggccttcaaccagaccctgtccatgcccagccagggcccacccacctgacggacagcgtgaagccccccgggctgctc

SEQ ID NO: 961353 - DNA, 120 bp, Artificial Sequence
  ENSG00000273443_1 (sequence is synthesized)
tcactgggcctggcaaggaagtccccacgctgacctctggataggaacagcttctccgcctccaccctgctgatgttggggtgaaaccacctggagtggggagagcagcctccacggcca

SEQ ID NO: 961354 - DNA, 120 bp, Artificial Sequence
  ENSG00000273443_2 (sequence is synthesized)
ggatctcggacttccagcctccagagctgagggaaggagcgcctgcccgcccagcttatggtcactgtttcagcagcccagctgcctgacgacgggttcttatctcccagagggcagaag

SEQ ID NO: 961355 - DNA, 120 bp, Artificial Sequence
  ENSG00000273443_3 (sequence is synthesized)
ggccagcgggtgcctgtgcggcccctgggagccgtgctccgtgtccggggcaggtcaggaagctcgggggatgtcactgcaaacctcgcggccccatgcaggcagaggctggtgctgccg

SEQ ID NO: 961356 - DNA, 120 bp, Artificial Sequence
  ENSG00000273443_4 (sequence is synthesized)
gcatctggaggggaggctgaggctgcagccctgccccttcctggtgaacagcccccccgtcccaggaccttcctagtctgcagccccccatgaggtcagggctgccccggagcccacgtc

SEQ ID NO: 961357 - DNA, 120 bp, Artificial Sequence
  ENSG00000273443_5 (sequence is synthesized)
cgagatcacaactgctccttacttttgtggcactggactccggagctcaggactacattgtactcaggcggcagccccagagcccagaatgtcagcaaaaaagagccacacccgtgagtg

SEQ ID NO: 961358 - DNA, 120 bp, Artificial Sequence
  ENSG00000261020_0 (sequence is synthesized)
cactcctgtgttgaagatgcatcgactcacgtactgcattaatgttttagattttactgtgaagcaaacaattcactcctcagaccctcagtcacccaagtccacatctggacttgaggt

SEQ ID NO: 961359 - DNA, 120 bp, Artificial Sequence
  ENSG00000261020_1 (sequence is synthesized)
ttggcttctctggtcctaactgggacttatctgaccctgacaggagataacttcagtagggactttccctaatagcaaacatgcacacttcaacttggcttgccctgaaggtaacattta

SEQ ID NO: 961360 - DNA, 120 bp, Artificial Sequence
  ENSG00000261020_2 (sequence is synthesized)
ctcattataatggtaaaaaaaaaacacacccctgggtggagatttcagacattactaagacgtgtgatatatgtactagcgtgtatgaccatacagcatgtgcacccaggagaccaccca

SEQ ID NO: 961361 - DNA, 120 bp, Artificial Sequence
  ENSG00000261020_3 (sequence is synthesized)
aaacatgtttgctagtaacaccccttcacaacccctttcatgaataatcatataagaccctcataagggagcttccccagtgccgatcaacgctgtttctttttccaagcagcccgctct

SEQ ID NO: 961362 - DNA, 120 bp, Artificial Sequence
  ENSG00000261020_4 (sequence is synthesized)
gacttggcttttagagggtactctctctttaaataaactctgcagctgcttcactgtcactgattacttcttggctgaattctttccttcaagaagacaagaactgaagaccccacacct

SEQ ID NO: 961363 - DNA, 120 bp, Artificial Sequence
  ENSG00000261020_5 (sequence is synthesized)
tccggtaacattaccaactctttctcctttttctctggagctggtgctcagatggtgagagccctgagctaatagtcccagggtgggagcctgtttgcccctgtctggtcctcagcaatg

SEQ ID NO: 961364 - DNA, 120 bp, Artificial Sequence
  ENSG00000261020_6 (sequence is synthesized)
tccttggtcagcttcctggcaagagctgtcgattaccagagggaacaagtgatcagcaccagagtcgatcacttcacagaggagctgaagtggacagggtcagctcaggcctcacggact

SEQ ID NO: 961365 - DNA, 120 bp, Artificial Sequence
  ENSG00000261020_7 (sequence is synthesized)
agggcgggaatgtcccgtgacggcaggtcagtgtcttagcttcctttgaggcacctcttcatagactgcagggatcatttaggtaagaatatagcctgctgacttttacaccttgctgaa

SEQ ID NO: 961366 - DNA, 120 bp, Artificial Sequence
  ENSG00000261020_8 (sequence is synthesized)
aatctttgctaatagcaatctgttagctgtgaaaattaccattgttttttatttttcgttttgttccttattactgaagatattctatggagcgttaaagcctcctgcggtaagaaacta

SEQ ID NO: 961367 - DNA, 120 bp, Artificial Sequence
  ENSG00000261020_9 (sequence is synthesized)
gtaaagaaacatactgtttgcaggaaggaaaattacccacaattcttgttctctaaggtgcgtggttatcattccaacagccattctcagcaatgaactgaagaccctcagatgtgtttc

SEQ ID NO: 961368 - DNA, 120 bp, Artificial Sequence
  ENSG00000261020_10 (sequence is synthesized)
attcccttagtattttaatcctctcctccactctcaattgccacttctcccgtgaatgaggggagaggggttgggagggacatctcctgtcttgggcccacagattttaaagttcaagtc

SEQ ID NO: 961369 - DNA, 120 bp, Artificial Sequence
  ENSG00000261020_11 (sequence is synthesized)
agaagctccagtgatttcctgtatgtagtagtcaggggcaagacagatctgtggttggtagtctttccttctctgtacatctgccagcctctctcctcaagctggggcttcatggagtcc

SEQ ID NO: 961370 - DNA, 120 bp, Artificial Sequence
  ENSG00000261020_12 (sequence is synthesized)
cagaactttgaacctgaagtagtgtcagcagccatgttgcagctggagtcaggccaattgttggtcttgctccctcgtgactgggacacttggaagagccaaatgggcaggcttggagag

SEQ ID NO: 961371 - DNA, 120 bp, Artificial Sequence
  ENSG00000261020_13 (sequence is synthesized)
cgtgtacttttggaactgaagtgtatcttaaaccatttcattgcaactacgtgtgtgtgttgggaggatgcataacagcctcactgaggggtgactgacatataatagaaggacttgtgc

SEQ ID NO: 961372 - DNA, 120 bp, Artificial Sequence
  ENSG00000261020_14 (sequence is synthesized)
acccgtgaaaccatcactgttatcaagacagcgagcatgtccatcccccataggttttcttgtgctcctttgtgatcccttcctcctgcctctcctgccatgctccaccccaagcaacca

SEQ ID NO: 961373 - DNA, 120 bp, Artificial Sequence
  ENSG00000261020_15 (sequence is synthesized)
ctgatctgctttctgtcacaatatatagattggaaaactacttataataccagttctaacctcatcaagcaaatactttctttttgtcagttgaacttttcattgtgtgttcaacattct

SEQ ID NO: 961374 - DNA, 120 bp, Artificial Sequence
  ENSG00000261020_16 (sequence is synthesized)
tgattcagaaagagtgagagagaaaggctggtgtgggcccttcctgggaggcctggccctatccacagctccagtgtggctcacgtgccctggagcccctgcccacaggacagtcctgac

SEQ ID NO: 961375 - DNA, 120 bp, Artificial Sequence
  ENSG00000261020_17 (sequence is synthesized)
tgctcatccacaagctttgtggtatcctctaccattcctaggcaggctctgtacagtgcagaactttctcccagtccttgcaccaaaataacaaatgtcagagatagtacatttggagcc

SEQ ID NO: 961376 - DNA, 120 bp, Artificial Sequence
  ENSG00000261020_18 (sequence is synthesized)
agtggctgtgcctcacctctagatgcctgtaatactgagctgctaagcaagaggtccctcccttcttgcccttttcttggggcctcatcccttgtgctctgctcttcctcacacaggata

SEQ ID NO: 961377 - DNA, 120 bp, Artificial Sequence
  ENSG00000261020_19 (sequence is synthesized)
gcagtccctggacccccatggcaatacaaacagactcttctatatcctcagtccattgcaggaccacagctctgacctggctgtcctctgttttccaagccctgcacctgtggagttggg

SEQ ID NO: 961378 - DNA, 120 bp, Artificial Sequence
  ENSG00000261020_20 (sequence is synthesized)
aattagcacccacttgaccccattgtggcatcaggcccaccctccccaatgcaggaagagttccagatgttggggagctatggcattatcctgcacacatatcatgtcctggcctgggaa

SEQ ID NO: 961379 - DNA, 120 bp, Artificial Sequence
  ENSG00000261020_21 (sequence is synthesized)
agtgatgatgatgatattttcccacaaaatagacaataacatcatgaaagtgccttgttcattttctagcataaaatatatatcaaagcagtggggtttagtaggcatacgtagatttaa

SEQ ID NO: 961380 - DNA, 120 bp, Artificial Sequence
  ENSG00000261020_22 (sequence is synthesized)
aagctcctcagaaggcagggaatgatttcttcaacagaaaaaaaaactaccccaaaaggagaatctcaatactttggttgatagtaaattaagaatccctcaagaaattcagtaggagag

SEQ ID NO: 961381 - DNA, 120 bp, Artificial Sequence
  ENSG00000261020_23 (sequence is synthesized)
ggaaaagataagtcaccaatgggaaatatatttgtcacaatataacaggcaaaggactcatgtccagagtgcatgaaggatttctacaaataaaataaagaatccaacagaaaaatgaag

SEQ ID NO: 961382 - DNA, 120 bp, Artificial Sequence
  ENSG00000261020_24 (sequence is synthesized)
aagagaaaggaataggaacttcatttttaaaaaagagaaaagaaaaaggaagtaaggaaaaacaaatgaacatccaaatggccagaaagcatataaaaatgcccaacctcataaaccatc

SEQ ID NO: 961383 - DNA, 120 bp, Artificial Sequence
  ENSG00000261020_25 (sequence is synthesized)
agacaaatgtgatccacaatgagaagccaatacacaccgaccagcacggctaaaattaagaagactgttaataccaagtgttggtgagaatgtgaagtaactgaaacatttatacactgc

SEQ ID NO: 961384 - DNA, 120 bp, Artificial Sequence
  ENSG00000261020_26 (sequence is synthesized)
tggtggaaatgtgaaatagcacaactactttggaaaattatttgggaatactgctaaaggtgagcacccctatgatcctgaaatcccactccaatatgaaaacccaaaagaaatgcatcc

SEQ ID NO: 961385 - DNA, 120 bp, Artificial Sequence
  ENSG00000261020_27 (sequence is synthesized)
tgatagaggcactcttcatagtagcccaatgttaatcatggaagaatggacaagtatatatcatatcatggaatttttatggtaatgaaaatagattaataactgccatgcacagttggt

SEQ ID NO: 961386 - DNA, 120 bp, Artificial Sequence
  ENSG00000261020_28 (sequence is synthesized)
gaatcccaccaacataatgttgagtgaaagaaacctgatacaaatgaatgtatactacactatttcatttctgtgaagctccaaaataagcaaaacgaacctatagtgttataagtcagt

SEQ ID NO: 961387 - DNA, 120 bp, Artificial Sequence
  ENSG00000261020_29 (sequence is synthesized)
agagtgattatcttagtatttgcatgggagctctggtaatgttttatttcttgatctaagggctggtgtcccagatgtgttcactttgtgataattcatcaatctgttttcttgggagct

SEQ ID NO: 961388 - DNA, 120 bp, Artificial Sequence
  ENSG00000261020_30 (sequence is synthesized)
gtggcttatctgtgcagatatactccaattaaaaaaatcattcaactcaatgacaacaacaacaaaaaaaactcgattttttaacattttgtggagtgtttattatgatccagtcagcgt

SEQ ID NO: 961389 - DNA, 120 bp, Artificial Sequence
  ENSG00000261020_31 (sequence is synthesized)
actaaatacactattttatttgatccttaaaataacttaaacaacttgatttaaatatgggcaaaggacttgagaagacatttctccaaagaagatatacaaaaagcacatggaaaaccc

SEQ ID NO: 961390 - DNA, 120 bp, Artificial Sequence
  ENSG00000261020_32 (sequence is synthesized)
ttgacataattagtaatctgggaatgcaaatgtaaaccacggtgggataccacttcacacatgttagaatgactattatccaaaaataaaacaaacagaaaataacaagcattggcaagg

SEQ ID NO: 961391 - DNA, 120 bp, Artificial Sequence
  ENSG00000261020_33 (sequence is synthesized)
atgtggagaaattgaaacccccatgcattgttggtgggaatgtaaaatggtgcagccgctgtggaaaacagtttgatggctcctcagaaaaccatacacagaattaacatatgatccagc

SEQ ID NO: 961392 - DNA, 120 bp, Artificial Sequence
  ENSG00000261020_34 (sequence is synthesized)
attgccactttcaggtatatacccaaaacaatagcatgaaacacataaagagacatgttcatagcagtattattcagaataactaaaaggtggaagccatgttaagtgttcattgacaga

SEQ ID NO: 961393 - DNA, 120 bp, Artificial Sequence
  ENSG00000261020_35 (sequence is synthesized)
tgaatggataagcaaaatgtggtatatccatacaatgaaatattattcagcttttaaaaggaaggaaatttgatacatgcaacaacatggatgaatcttcaggacattgcgttcagtgaa

SEQ ID NO: 961394 - DNA, 120 bp, Artificial Sequence
  ENSG00000261020_36 (sequence is synthesized)
ataaaccagtcacaaaaagacaaatactacaagattgcaattacatggatacctagaacagtcaaattcatacagacagaaagtagaatggtggttgccatgtcccaaagccaacataaa

SEQ ID NO: 961395 - DNA, 120 bp, Artificial Sequence
  ENSG00000261020_37 (sequence is synthesized)
gcagcagttgtggacagcttcagtttcagctgaacttgactgtatgttgtgctgaaaccagggtaatctgatgtccaacactcagagccagttaagacttttgtttctggtgacctgggg

SEQ ID NO: 961396 - DNA, 120 bp, Artificial Sequence
  ENSG00000261020_38 (sequence is synthesized)
agctgacagtgcttttcaggcacacctggggtaactcttatttcccaaatgggttggcagattgttgtgggtgccaggtctttgatggactggatctagacacgaataaatagcctgctg

SEQ ID NO: 961397 - DNA, 120 bp, Artificial Sequence
  ENSG00000230590_0 (sequence is synthesized)
gggtaattaaggttgcaaaatggcgaggggggaggtaagctgtctttgcttggccatcttgggctagcaggccttgcagagaactacctttttagctgagtgaagggatcaacctgagtt

SEQ ID NO: 961398 - DNA, 120 bp, Artificial Sequence
  ENSG00000230590_1 (sequence is synthesized)
ggagttctcctatgctgtggccagatccactagaaattaacccagaatcttagcctctcagtggcctatcggtgatgccacactcaatcagaaactatgctactgctgaagaggtatatt

SEQ ID NO: 961399 - DNA, 120 bp, Artificial Sequence
  ENSG00000230590_2 (sequence is synthesized)
gagccctgcctggttaacctccagtgaggttattagagaattgggagaggctcaaatcagcatcctgcacctagttatcaaaccattgtgaagtcttgattcctggatggccagaaaact

SEQ ID NO: 961400 - DNA, 120 bp, Artificial Sequence
  ENSG00000230590_3 (sequence is synthesized)
gatctgcctgttactcatactgatgcttcctgcccagcaagttcatcagagggcgaggatgaattacggttgccatgaatgtccttgtgaggcagttgggaagccttggctggattgtga

SEQ ID NO: 961401 - DNA, 120 bp, Artificial Sequence
  ENSG00000230590_4 (sequence is synthesized)
aggatatttgaaaagtattttagagtccaccagatcatccatgtgagtgaccatgcagcaaaagaaggagggtcctctcagtgattaaggattatgaagtattaattcttccactgatat

SEQ ID NO: 961402 - DNA, 120 bp, Artificial Sequence
  ENSG00000230590_5 (sequence is synthesized)
ctcaaaaggtgatctggacaaaggaacaggtatctcaggtaagcaattgttgaatatgaaagtaaatattcttctttgatcgtttgttgtatttgttatgtttaatagctttcctaataa

SEQ ID NO: 961403 - DNA, 120 bp, Artificial Sequence
  ENSG00000230590_6 (sequence is synthesized)
gcggctcgaggcaaagctggtcctgtgcctgctgtccattgccgctaaggcctgctgctgccattcaggcgtgtctctctctctctctctctttcatgccgctctctccaccccatcttg

SEQ ID NO: 961404 - DNA, 120 bp, Artificial Sequence
  ENSG00000230590_7 (sequence is synthesized)
aatgctgctgcatgtggtcaaacctccactcccagtctacccagaccaggacttggcttccaggatccaggggtgtctgtgtgaaatgatcagcctgggcccccaagcaggtcactccca

SEQ ID NO: 961405 - DNA, 120 bp, Artificial Sequence
  ENSG00000230590_8 (sequence is synthesized)
gcacagagatgtcattgattgtaccaccgtcatcaggctgtcttccgccctcagggaaaagtagcatgtcttccagcaccatatgacaactgctcagcacttatttcttgtcattgctcc

SEQ ID NO: 961406 - DNA, 120 bp, Artificial Sequence
  ENSG00000230590_9 (sequence is synthesized)
cttctgactgcagctccgtgggatcacaggagattatggtggtggtggactcccaggcattgctattctcctgacaccagaacaccatcatggtcatctctgaggcatcagtagtgtttc

SEQ ID NO: 961407 - DNA, 86 bp, Artificial Sequence
  ENSG00000230590_10 (sequence is synthesized)
aacaccatcatggtcatctctgaggcatcagtagtgtttctatatgccaacagtgaacaatctgaaaaagatattaaaaagtaatc

SEQ ID NO: 961408 - DNA, 86 bp, Artificial Sequence
  ENSG00000230590_11 (sequence is synthesized)
taggaattaaccaaagaagttaaatatctctataatgaaaactataaaacactgatgaatgaaattgatgagatcaccaaaaatga

SEQ ID NO: 961409 - DNA, 120 bp, Artificial Sequence
  ENSG00000230590_12 (sequence is synthesized)
tatgaaagacaatggtcttattatgaagtcggcatatttatagcttgataaaaactgaaaaatctgtagcctatttttaatagtgatatataaggaaataacataaataaaaatttggca

SEQ ID NO: 961410 - DNA, 120 bp, Artificial Sequence
  ENSG00000230590_13 (sequence is synthesized)
acaagaatccaggagcaaatttatgatcaatacacaattgggcaagtggtgttcataccaaccatgcaaaaatggttcaattttaggaaatctttgaatatagcttttagtaggtcagag

SEQ ID NO: 961411 - DNA, 120 bp, Artificial Sequence
  ENSG00000230590_14 (sequence is synthesized)
gaaatcagtatctcaaagtactttcatgatttagttatttttaagttattgatcattttggattttattttgaggttgatagccatataatgatttcacattttattttaaatggctagc

SEQ ID NO: 961412 - DNA, 120 bp, Artificial Sequence
  ENSG00000230590_15 (sequence is synthesized)
aatgatttcacattttattttaaatggctagctgttgtcccaatactatttactgaaaaatctacattttgctcactctttttttttttttttaagagacagggttttaccatgttgccc

SEQ ID NO: 961413 - DNA, 120 bp, Artificial Sequence
  ENSG00000230590_16 (sequence is synthesized)
cctctcgacccagcctcctgagtatctgtgactgcaggcaagtacccctgtgcctgctcacttatttaaagttctacacatcaaatactaaattctcatctatttgacttctggactcac

SEQ ID NO: 961414 - DNA, 120 bp, Artificial Sequence
  ENSG00000230590_17 (sequence is synthesized)
tggttggtgtcattgactgtcttttcctgtgatagcatagaattattttgattgtggaagtactataaatgttgctatttattgtgcctcttgctgcctatctatatttagactcattta

SEQ ID NO: 961415 - DNA, 120 bp, Artificial Sequence
  ENSG00000230590_18 (sequence is synthesized)
gggaggcacgcatgcgcaaggcttgaatggcgtcggggttggagggttggaaggtcgggaagtgaaggactcgcaggcatatttaacaacgcaaagttgctaggagttggtaccagcgtt

SEQ ID NO: 961416 - DNA, 120 bp, Artificial Sequence
  ENSG00000230590_19 (sequence is synthesized)
agacatggacttcagagagttcttggtagaagactcaaagagccacctgtcatgagacatcccacttccttccccaggttacttccaagactgagcagccaggtttttggtagatgagaa

SEQ ID NO: 961417 - DNA, 120 bp, Artificial Sequence
  ENSG00000230590_20 (sequence is synthesized)
caaatgtttcttcctgaagccctggggcttcaggtaggaagaaggactgctatacttgttctcacccttggcttctggctgctccagttaaacatggttcccattgatacagacattaga

SEQ ID NO: 961418 - DNA, 120 bp, Artificial Sequence
  ENSG00000230590_21 (sequence is synthesized)
accctcaaaggaaagtccttccattttgggaagggtgacattgatttcgtttagctgcttaagatatgtacttgctgttgtcttgtgagacatgacatctgaagctgaagaggagtccct

SEQ ID NO: 961419 - DNA, 120 bp, Artificial Sequence
  ENSG00000230590_22 (sequence is synthesized)
ctcattgttgtcattgtcccaccgggactgaaagtctcccagttgaggcagcattttagctttgatgtctacagggcaatcatggatcaggaaatttctgcaaattagacttggaaaaca

SEQ ID NO: 961420 - DNA, 120 bp, Artificial Sequence
  ENSG00000230590_23 (sequence is synthesized)
aggtcttgatccttcttgtctttggacgaagactaatcatcacttttgactgaaggtgtagtgctggagactatgttggaggcagcacctgatgcactatccatattcttccccttgatc

SEQ ID NO: 961421 - DNA, 120 bp, Artificial Sequence
  ENSG00000230590_24 (sequence is synthesized)
ttgtcttaaagttttccaaatggattccgaggcttgtctttgatgaaaaggtcaaacatactggcagtcatgttgtttctcataagctggatgtcaacctcaatttctcctctttatcct

SEQ ID NO: 961422 - DNA, 120 bp, Artificial Sequence
  ENSG00000230590_25 (sequence is synthesized)
tctctcctggtttggatttcaaggtataccaccgcatcttcctgctcccctagtctgggtgcaggtcctgcaggtacacctcggcgaagcccaagtacagtagcagcagcacctcaaagg

SEQ ID NO: 961423 - DNA, 120 bp, Artificial Sequence
  ENSG00000230590_26 (sequence is synthesized)
tggcctcctcctctgacactgaggtggcatacttctccttacccacctgaatcaccgagtacatgttgcttgtaccgtcaggctcttggttcttggcccctggccctatgcctgcaacac

SEQ ID NO: 961424 - DNA, 120 bp, Artificial Sequence
  ENSG00000230590_27 (sequence is synthesized)
tgtcacctgcacgtggattgggaaccacatagcccccggacctgctaaggccattaaggacaggatggtgatgcctcggctgactgacgtgagaagattgtcatgacccatggcctctac

SEQ ID NO: 961425 - DNA, 120 bp, Artificial Sequence
  ENSG00000230590_28 (sequence is synthesized)
tgctgtcctaccaacagaaacttcataatgttgtgcaggcgttaccactacctagttccagaacattgccatcacccccaaaataaatcttgcattcattaagcagtcacccctattttc

SEQ ID NO: 961426 - DNA, 120 bp, Artificial Sequence
  ENSG00000230590_29 (sequence is synthesized)
ccaaaacagcatggtactggcataaaagcagacacacagaccaatggaacagtacagacaacccagaaacaaatccacacacaaacagtgaacccatttgtgacaaaggtgccaagaata

SEQ ID NO: 961427 - DNA, 120 bp, Artificial Sequence
  ENSG00000230590_30 (sequence is synthesized)
acaaatccacacacaaacagtgaacccatttgtgacaaaggtgccaagaatatgcactcgggaaaacacagtctttactccacaagcacaagcaaccaaagcaaaaatggacaaatggga

SEQ ID NO: 961428 - DNA, 77 bp, Artificial Sequence
  ENSG00000230590_31 (sequence is synthesized)
ggacaaatgggattacgtcaagtttaaaagcttctacacagcaaaagatactatcaaccaagtgaatagacacccca

SEQ ID NO: 961429 - DNA, 120 bp, Artificial Sequence
  ENSG00000230590_32 (sequence is synthesized)
tggagaaaatctagtaattccagtcaaaaatgggcaaaatatttgaataggcatttctcaagagaagacatacgtattgcaaagaggcatatgaaaatgtgctcaacatcattgatcatt

SEQ ID NO: 961430 - DNA, 120 bp, Artificial Sequence
  ENSG00000230590_33 (sequence is synthesized)
aaatgcaaatcaaaactacaatgagatcatctcacccagttaaaatggcttatatgcaaaagtcaagtaataacaaatgctggctaggatgtgtacactgtttggtgggaatgtaaatta

SEQ ID NO: 961431 - DNA, 120 bp, Artificial Sequence
  ENSG00000230590_34 (sequence is synthesized)
attagtacaacctctatggagaacagttttcaggttcctaagaagacaaaaaatattgaactactatatgatccagaaatcccagtgcttggtatatacccaaaagaaagaaaatcagta

SEQ ID NO: 961432 - DNA, 120 bp, Artificial Sequence
  ENSG00000230590_35 (sequence is synthesized)
tatcaaagagatatctgtgtgcctatgtttgttgcagcagtgtttacaagagctaagatttggaagcaacgtaagtgttcatcaacagatgaatgggtaaagaacgtgtggtacatatac

SEQ ID NO: 961433 - DNA, 90 bp, Artificial Sequence
  ENSG00000230590_36 (sequence is synthesized)
agtcatttgcaacaacatggatggaactgtagatcattacattaagtgaaataagccaggcacagaaaaacaaacatttcatgttctcat

SEQ ID NO: 961434 - DNA, 120 bp, Artificial Sequence
  ENSG00000230590_37 (sequence is synthesized)
aatcaaaacaattgaactcatggagataaagagtagaggaatggttatcagaggctgggaagggtagtgggggcatgtgggggcagtggggatgttctatgggtacaagtaataatcaga

SEQ ID NO: 961435 - DNA, 82 bp, Artificial Sequence
  ENSG00000230590_38 (sequence is synthesized)
ggctgggaagggtagtgggggcatgtgggggcagtggggatgttctatgggtacaagtaataatcagaaagaatgaataaga

SEQ ID NO: 961436 - DNA, 71 bp, Artificial Sequence
  ENSG00000230590_39 (sequence is synthesized)
tttcattcttcattatgtgcttatttcacattgtatgcctgtatcacatctcatgtacccaataaatacat

SEQ ID NO: 961437 - DNA, 120 bp, Artificial Sequence
  ENSG00000230590_40 (sequence is synthesized)
acatagtgattaaggtaagtagggaaagagaggcttactttgccctgattcttgtcagggaggctcttagagatgccatttccagagcataagtgacaggccagcattttcaaagcttgc

SEQ ID NO: 961438 - DNA, 120 bp, Artificial Sequence
  ENSG00000230590_41 (sequence is synthesized)
aacttattctataatatatccttcttaaaacaattcatgtagattatatgctcacccagtctgggatcactcctgcagaagatcagaagaactgaaatataggtgacataagctcctgct

SEQ ID NO: 961439 - DNA, 120 bp, Artificial Sequence
  ENSG00000230590_42 (sequence is synthesized)
tttgtaaatgttttgttgaaacacagttgtgttcatccattattgtcgatggcagctttcatgctacagcagagttgagtagttgggagagaaaccaaatggaccatagagtttgaaata

SEQ ID NO: 961440 - DNA, 120 bp, Artificial Sequence
  ENSG00000230590_43 (sequence is synthesized)
ttactgtctggcccttcacagaaagtttgccaattcctggcataggttaaataaatgtactatatccacaaatcctcctctccccattttcctttcaatgggacttgcatttacagttga

SEQ ID NO: 961441 - DNA, 120 bp, Artificial Sequence
  ENSG00000230590_44 (sequence is synthesized)
tcctagaatgtatggaatctcatagtaatcagcttgcttctgaatttcttcccactcaaattaagctcactcagaaagcacattcacaaattgggctacatatacagaaggagctatgtt

SEQ ID NO: 961442 - DNA, 120 bp, Artificial Sequence
  ENSG00000230590_45 (sequence is synthesized)
ttatatgcctcactgtagtcaactcatttatcctatatgtatggttcccccattttttccttcttttcaggggtaacttttaaacttgagccattcatgagtatccaaaaagttacaact

SEQ ID NO: 961443 - DNA, 120 bp, Artificial Sequence
  ENSG00000230590_46 (sequence is synthesized)
cttcatccttattttagtatacttcccctctctggcttttttgcatatttctgcagatgtcttgacctttctggggagtaagcccccttagaagattaattttctgtagttctctattga

SEQ ID NO: 961444 - DNA, 120 bp, Artificial Sequence
  ENSG00000230590_47 (sequence is synthesized)
ggaaatacatgacatttagctttttaataatttgatgccattcattgagtacctactgtgtgctttatgtaccctgtctcgttgaatttttacaaaaaactgaaagagttagttttgtgt

SEQ ID NO: 961445 - DNA, 120 bp, Artificial Sequence
  ENSG00000230590_48 (sequence is synthesized)
tattactacctccatctcaaagatgagtcttggaaagcttaagtaactttaggtcacattgtaatcagtggcagaactgggacttaagaacataattcatgactgcattttcttttcttt

SEQ ID NO: 961446 - DNA, 88 bp, Artificial Sequence
  ENSG00000230590_49 (sequence is synthesized)
cttttttttttttttttaaagagatagcatctcattgggctcaagcaattcttccacctccgcctcccaaagtgttaggattataggc

SEQ ID NO: 961447 - DNA, 120 bp, Artificial Sequence
  ENSG00000230590_50 (sequence is synthesized)
aaagtgttaggattataggcatgagccctcatgcctgccccttgcattttctatttaagtgatcttgaagtttttttttttcttttttaaatctcggaatttggcctttagtaagcatag

SEQ ID NO: 961448 - DNA, 120 bp, Artificial Sequence
  ENSG00000230590_51 (sequence is synthesized)
atagaatagcaaagtgtaatacctgagctgggggaaaaagtccttgaattctttaggaaagacttaattggtgggtacaaagtgaaatgctcactggaatcaggaatcagaaaccagttc

SEQ ID NO: 961449 - DNA, 120 bp, Artificial Sequence
  ENSG00000230590_52 (sequence is synthesized)
tgatcacctatccctacatatccttcttcactctgccctggcatatcatggttgatgtacatagcaatgatcatcccttctgtaatcccacttgacagtttagaagtggattgataatac

SEQ ID NO: 961450 - DNA, 120 bp, Artificial Sequence
  ENSG00000230590_53 (sequence is synthesized)
atactcttctggcttaaaacccttcttctctgggcaggtgtggtggctcctacattatcccagcaccttgggaggccgagatgggaggattgtgtgagcccaggagtttgagaccagcct

SEQ ID NO: 961451 - DNA, 88 bp, Artificial Sequence
  ENSG00000230590_54 (sequence is synthesized)
gcctgggtaacatagcaagaccctgtctccacaaaaaaataaaaaattaactgggcacggtggtgctcacgcctgtaatcccagcacc

SEQ ID NO: 961452 - DNA, 73 bp, Artificial Sequence
  ENSG00000230590_55 (sequence is synthesized)
aggcgcctgtagttccagctatgggaggctgaggcaggagaatcagatgaacctgggagacggaggttgcagt

SEQ ID NO: 961453 - DNA, 120 bp, Artificial Sequence
  ENSG00000230590_56 (sequence is synthesized)
actgcactccagcctggtgacagagtgacactccgtctcaaaaaaaaaaagaaacgatcacatccagatgtcctgttactggaagggcaccatagtttatcctgcacctaacactaatac

SEQ ID NO: 961454 - DNA, 120 bp, Artificial Sequence
  ENSG00000230590_57 (sequence is synthesized)
ggaagggcaccatagtttatcctgcacctaacactaatacacctactctgggaattcttctacctacaactatttatttatctgatcccatctggtattaaagttctaaaagttaacaga

SEQ ID NO: 961455 - DNA, 63 bp, Artificial Sequence
  ENSG00000230590_58 (sequence is synthesized)
gattatgaagtattaattcttccactgatatctcaaaaggtgatctggacaaaggaacaggta

SEQ ID NO: 961456 - DNA, 120 bp, Artificial Sequence
  ENSG00000230590_59 (sequence is synthesized)
caggcgtgagccaccgcacctagcgatgcttaaatcttctagtccacaaatatgagatgtctttccacatatgtagatattcctcaactcctctgacaaatattttgtgttattcacagt

SEQ ID NO: 961457 - DNA, 120 bp, Artificial Sequence
  ENSG00000230590_60 (sequence is synthesized)
tcatgctgaatttcactttatcccacagtattttgccttaataatattgtaaataaaaatgtttcaatgatgtcacttttgacttctttaataatatatagaaatacaactgatttttgg

SEQ ID NO: 961458 - DNA, 120 bp, Artificial Sequence
  ENSG00000230590_61 (sequence is synthesized)
attgtaatcttaaatcacaaaaacttgctgagatgatcttgttattggaatccaaatttattggatccactggggttgtgtatgtacaaaaccatgtcatctgcaaaaggttttgctgct

SEQ ID NO: 961459 - DNA, 120 bp, Artificial Sequence
  ENSG00000230590_62 (sequence is synthesized)
tcctatttaaaaaattttatttccttccatatgcaatgcaattaatgtcacagatacttccagtacactgttgaacagaactggcaagaatgttttatcctgtccttgctcctcttctta

SEQ ID NO: 961460 - DNA, 120 bp, Artificial Sequence
  ENSG00000230590_63 (sequence is synthesized)
cagagaaagcattctttaaatactaagtgtaacattagttttgagggttttgggttttctgttttgttttgctttttagagacagggtctcactctgttgttcagtcaggagtacagtgg

SEQ ID NO: 961461 - DNA, 120 bp, Artificial Sequence
  ENSG00000230590_64 (sequence is synthesized)
catcatcatagctcattgtaaacatgaacctcagcttcccaagtagctaggcgtacaggcatgtgtcatcacatctggattttttttttttttttaagatacagagtatccttatattgc

SEQ ID NO: 961462 - DNA, 120 bp, Artificial Sequence
  ENSG00000230590_65 (sequence is synthesized)
ctaggctgatctcagacttctggcctcaagtaatcctgctttggcttccccaagtgctgggattacagccacggcaccaggttctagttgtgaattcttaaaatatgccctttactaggt

SEQ ID NO: 961463 - DNA, 120 bp, Artificial Sequence
  ENSG00000230590_66 (sequence is synthesized)
tgtggtttacttcttagtttaccaaatactttttccaccttctattttttttttctctctctttttttttaaacatagtcttgctgtgtcagccaggtccaagtgcagtggcacaatctc

SEQ ID NO: 961464 - DNA, 85 bp, Artificial Sequence
  ENSG00000230590_67 (sequence is synthesized)
ccagtgctaggattacaggcgtgagtcactgagcccagcccatggctattacaaagtcaaaaacaaacaaacaaacaaacaaaaa

SEQ ID NO: 961465 - DNA, 120 bp, Artificial Sequence
  ENSG00000230590_68 (sequence is synthesized)
aacaaacaaacaaacaaacaaaaaaacagattctggtgaagttacagagaaaaaggaatgcttatacactgttggtaggagtattaggattacaggcgtgagcctccacttccagccgtc

SEQ ID NO: 961466 - DNA, 120 bp, Artificial Sequence
  ENSG00000230590_69 (sequence is synthesized)
cttccagccgtccacaatctattgagatgaccatgttgttttcttccttcagtctgttgcactaatcatttccagctgatgaaataacgttgcattccagggatacactgtactgggtac

SEQ ID NO: 961467 - DNA, 120 bp, Artificial Sequence
  ENSG00000230590_70 (sequence is synthesized)
tggtgtacattcctgtttatatgttactgtatttggtttgccaaaatttactaggaaatttcacagatccactcataagcgatattatcagagttttccctgtgtatgatgtttcacttt

SEQ ID NO: 961468 - DNA, 120 bp, Artificial Sequence
  ENSG00000230590_71 (sequence is synthesized)
ggtatctagataacaatagcatcatagaaccagtaaaaaatattacatgctcttccaagtttttaagacatttttatcgaattggtaattttcatgtgtttggtataatatacaaaagaa

SEQ ID NO: 961469 - DNA, 120 bp, Artificial Sequence
  ENSG00000230590_72 (sequence is synthesized)
tacatttgaactgggaatttacatgtgtgtcaggggcaggggtgagagtttttaaattaccaatttattgtcttcactttgttcttgaatgagttgtggtagtcagtgtctttctaggaa

SEQ ID NO: 961470 - DNA, 120 bp, Artificial Sequence
  ENSG00000230590_73 (sequence is synthesized)
tttgtctacttccacaaagatatttgtcaaaatactaatcccttgtatggaataaggtcattaggaacatcacgttttacatttctcattttaataaagctttattttatgaataagtca

SEQ ID NO: 961471 - DNA, 120 bp, Artificial Sequence
  ENSG00000230590_74 (sequence is synthesized)
acgaagtgctgtgtttctcaattatttttaattctctatttccacactaaactttatatcctttctgctttgattttaatttgttctttttttactgtattttctaaagttggaaagtta

SEQ ID NO: 961472 - DNA, 120 bp, Artificial Sequence
  ENSG00000230590_75 (sequence is synthesized)
ggttagtaatttgaagtacttctcatttcattacaatgttcatagctattaatttcactgtaagcgttgctttcacacatctcacagaatttgatatgttgtttctgtattttcattcac

SEQ ID NO: 961473 - DNA, 120 bp, Artificial Sequence
  ENSG00000230590_76 (sequence is synthesized)
ctcaaagtattttctgatttccttataaattctcctttgacttgttggttacgtaactttttttttttttttttttttttgacagtctttgtcgcccaggctgcagtgcagtggtgtgat

SEQ ID NO: 961474 - DNA, 73 bp, Artificial Sequence
  ENSG00000230590_77 (sequence is synthesized)
ctcggctcactgccacctctgcctcctaggctcaagtgattctagtctggctaattttctgtatttttagtag

SEQ ID NO: 961475 - DNA, 67 bp, Artificial Sequence
  ENSG00000230590_78 (sequence is synthesized)
cctgacttcaagtgatccaccctaactttttaaatttgcacaaatatgtatagttcctatctctgtg

SEQ ID NO: 961476 - DNA, 120 bp, Artificial Sequence
  ENSG00000230590_79 (sequence is synthesized)
ttttaaatttgcacaaatatgtatagttcctatctctgtgttatttctaatttcattaaattttagtcatagaacatattttgtataatttcaatatttttaaccttcatttggtttgtt

SEQ ID NO: 961477 - DNA, 120 bp, Artificial Sequence
  ENSG00000230590_80 (sequence is synthesized)
ttgtatgatgttagtgcagacattccagtttttttgtggttgctacttggatatttctatttccatcctatttctttcaacacttttgtattttataaactgcctacaacagacacctta

SEQ ID NO: 961478 - DNA, 120 bp, Artificial Sequence
  ENSG00000230590_81 (sequence is synthesized)
tagtttgattgttttttaaatatccacttggtcaatcagactggtttggattgcttgatccatcagtacagctggatttaaattttccattatacattttaaaattctatgtctatcttc

SEQ ID NO: 961479 - DNA, 120 bp, Artificial Sequence
  ENSG00000230590_82 (sequence is synthesized)
ttttacagaatccctcctatactactttttataagttaatattttctaaaataatgtattattatctttaacgatttttccctctattatatgaaaatcctttttagtggttgcagtagg

SEQ ID NO: 961480 - DNA, 120 bp, Artificial Sequence
  ENSG00000230590_83 (sequence is synthesized)
gcttttttttataattgacaagtaataattgtatataattccagggaactatctgatgtttttgtatgtatacatagtgtaataactaaatcaagcacattaacatatccataacttcac

SEQ ID NO: 961481 - DNA, 120 bp, Artificial Sequence
  ENSG00000230590_84 (sequence is synthesized)
ctacttttgttgtgacaactttaatatctacttataacaattttaaaatatacagtcagtgacaatggtcaccatgctgtgaaatatgtctaaaacttattcctcctaacagaaaattgg

SEQ ID NO: 961482 - DNA, 120 bp, Artificial Sequence
  ENSG00000230590_85 (sequence is synthesized)
tactctttgaccaacgtcttgcctttgcccatctctccaacacccacatcctggaaaccataacatccaactttctacttgtatgagttagcctttcttagattccacatacaaatataa

SEQ ID NO: 961483 - DNA, 120 bp, Artificial Sequence
  ENSG00000230590_86 (sequence is synthesized)
tgtagtatttgcctctctgtgcctgtcttacaacacttagcatagtatactacagattcatccatgttgtcacaaatgacaattttccttcttttccaaggataaaaaatattccaatat

SEQ ID NO: 961484 - DNA, 120 bp, Artificial Sequence
  ENSG00000230590_87 (sequence is synthesized)
gtatatacaacacatcttctatgtccattcatctgttatgaaaacttaagtcttttccatttattagctttgtaaataatttcaaaataagggagtgcaagatctcaacatactgcttca

SEQ ID NO: 961485 - DNA, 120 bp, Artificial Sequence
  ENSG00000230590_88 (sequence is synthesized)
attcctttggatatatacctaagtagagattgctagatcatatagtaattgtacttttagtttcttaaggaaccaccatatagtttcctaaattggctatactaatttatattcccacta

SEQ ID NO: 961486 - DNA, 120 bp, Artificial Sequence
  ENSG00000230590_89 (sequence is synthesized)
acagaatgttgggacttccttttatccacatccttgccagcacctgtctttcatccttttaataatagccattctaaaaggtgtaaggtaatatcttgcagttttgatttgcaactcact

SEQ ID NO: 961487 - DNA, 120 bp, Artificial Sequence
  ENSG00000230590_90 (sequence is synthesized)
aatgattagagatgttgagcatttttttcatgtatcaatcaattggccactcatgtcttcctctgaaaaatttaagttgaggtccttttcccccttttaaagacagttgttttcttgcta

SEQ ID NO: 961488 - DNA, 120 bp, Artificial Sequence
  ENSG00000230590_91 (sequence is synthesized)
ttgggcttgggtttcttaatacattttggatattagccccttatcagatatatgatttgaaaatggtttctcaaaacccgtgtcttcattctgttaactgtaccctttgcagtgcagatg

SEQ ID NO: 961489 - DNA, 120 bp, Artificial Sequence
  ENSG00000230590_92 (sequence is synthesized)
ccgaggaggacgtatgtcgcctcaggaccctgtgataattgtgttaagtgcagaaattgtagagcatgtgtgtttaaacaatatgaaatctaggcaccttgaaaaaagaacaggataaca

SEQ ID NO: 961490 - DNA, 88 bp, Artificial Sequence
  ENSG00000230590_93 (sequence is synthesized)
aagcacgtgatctctgtgacccacctcctattcgtatactccctcccctttgaaaatccctaataaaaacttactggttttacggctc

SEQ ID NO: 961491 - DNA, 120 bp, Artificial Sequence
  ENSG00000230590_94 (sequence is synthesized)
tactctgtccctttatttctcaacccggccaatgcttagggaaaatagaaaagaacctatgtgactatctgggcaggttccctgatagttgtctggctgtttttgctgcccatgctttta

SEQ ID NO: 961492 - DNA, 120 bp, Artificial Sequence
  ENSG00000230590_95 (sequence is synthesized)
aggatgtatccaagaaatcattgcccagaacaacatcatagagcttttcccctatattttctactagtagttttacagtttcaaaggcaacatttcaggctttaatccattttgagttga

SEQ ID NO: 961493 - DNA, 120 bp, Artificial Sequence
  ENSG00000230590_96 (sequence is synthesized)
tttttctatatgctatgagaaaatggttcaatttcacatatagatatacagatatctcaaaacaatttatttatttatttgtcctctccccattctgtgtgccacttttgtcaaaaatca

SEQ ID NO: 961494 - DNA, 120 bp, Artificial Sequence
  ENSG00000230590_97 (sequence is synthesized)
attggatggaaatgtatgagttatgtctgggctttcctgttccactggtcagtgaatctgtttttatgctggtaccacagttttttgataatggattacaaaatcaggtagagtgatgcc

SEQ ID NO: 961495 - DNA, 120 bp, Artificial Sequence
  ENSG00000230590_98 (sequence is synthesized)
tccagctgtgtccttgttgctcaagattactttgattatttaatgtcttttgtagttccatacaagttttagaattttttttgtatttctgtaaaaaaaataaaaataaaaaggacattg

SEQ ID NO: 961496 - DNA, 120 bp, Artificial Sequence
  ENSG00000230590_99 (sequence is synthesized)
aaatattgattacacagaatctgtatgtttcttttggcagtatgaaaattataacaatataaatttcccaatccatgtacaaagaaaaatttctatttttgtaatcttcaattcgtttca

SEQ ID NO: 961497 - DNA, 120 bp, Artificial Sequence
  ENSG00000230590_100 (sequence is synthesized)
tcaatgttttcactatacagatctttaacctacttggttaaattcattcataagtttgtttacttagtaaatagtgtaaatgtgattagtttcctgattacttttttggatagattgttg

SEQ ID NO: 961498 - DNA, 120 bp, Artificial Sequence
  ENSG00000230590_101 (sequence is synthesized)
tttgttagtgtatagaaatgctacagacttaattgtcaattttgtacgtagcactttttatggaattcattttattagttctatagtttttttttttttaatggagtctttaaggttttc

SEQ ID NO: 961499 - DNA, 120 bp, Artificial Sequence
  ENSG00000230590_102 (sequence is synthesized)
tagctataagataagataatcaggagaggcaagttttttcttcttttcctacttagatgtcttttatttctcttgcctaaatgctcttgctatgacttccagtacaacactgaacagaag

SEQ ID NO: 961500 - DNA, 120 bp, Artificial Sequence
  ENSG00000230590_103 (sequence is synthesized)
gagaaaaaatggcatccatgtcttgttcctgatcttagagaaaaagccttcaactcttcggtgttaagatttcagctctgggccggtcatatagggcctttaatgtgttgagacatcttc

SEQ ID NO: 961501 - DNA, 120 bp, Artificial Sequence
  ENSG00000230590_104 (sequence is synthesized)
atatagggcctttaatgtgttgagacatcttccttttatacctaacttgttcaggtttttatcatgcaaagatgttaagtattgggccggggactgtggctcatgcctgtaatcccagca

SEQ ID NO: 961502 - DNA, 64 bp, Artificial Sequence
  ENSG00000230590_105 (sequence is synthesized)
ctttgggaggtcaaggagggtggatcacctgaggttaggggttagctaggcatggtggcagatg

SEQ ID NO: 961503 - DNA, 63 bp, Artificial Sequence
  ENSG00000230590_106 (sequence is synthesized)
aggtgatgtgcctatgtacttacttttatcagcgagttttatactcacgttttcatgtttcta

SEQ ID NO: 961504 - DNA, 120 bp, Artificial Sequence
  ENSG00000230590_107 (sequence is synthesized)
ttttatcagcgagttttatactcacgttttcatgtttctaattagcactcttttactacagcttgaaggactccctttagcaattcttcccgtgcaggtctagtggtggtaaactcccac

SEQ ID NO: 961505 - DNA, 120 bp, Artificial Sequence
  ENSG00000230590_108 (sequence is synthesized)
atcttttgtttgagaactttatatttctccttaatttttgaaacacaggatagttggagatagtattcctggatggcagtgttttcctttcagctttttgtatatatcacgactgccttc

SEQ ID NO: 961506 - DNA, 120 bp, Artificial Sequence
  ENSG00000230590_109 (sequence is synthesized)
tggcgtgaaagttttctggtgaagtctgctgacagtcttccgtggatcattttgtatgtaagaagagactattcccttgctgctctgaagattgtctttaacctttatttaattacaata

SEQ ID NO: 961507 - DNA, 120 bp, Artificial Sequence
  ENSG00000230590_110 (sequence is synthesized)
tggtttggtgtgagtctccttggattcatcatacctgatgttcgagattcttagatctaaatttctatttccttgccagaattatgaggttttctgacattatttcttcaaatatgtttt

SEQ ID NO: 961508 - DNA, 120 bp, Artificial Sequence
  ENSG00000230590_111 (sequence is synthesized)
ctgtccttttccctctatcttctccatctggtaatgtataaattattcccctttgaggatgtctcaaaagtctcttaaactatcttcaatcttttttcttttttctcctcacattacatg

SEQ ID NO: 961509 - DNA, 120 bp, Artificial Sequence
  ENSG00000230590_112 (sequence is synthesized)
atttccaatggcctatctacaagtttgatagccctttcttctgcttcatcgattcttctgttggacacattaaatttttgagtccagttattgtattcttcaactttatactttttgtta

SEQ ID NO: 961510 - DNA, 120 bp, Artificial Sequence
  ENSG00000230590_113 (sequence is synthesized)
tcttttatttctttatgaaaattctcagtttgttcatgcattgctcccatgagactctttatggttgctctttttaatttcctgtcaggttaatcacatatcttcatttcattagggttg

SEQ ID NO: 961511 - DNA, 120 bp, Artificial Sequence
  ENSG00000230590_114 (sequence is synthesized)
gtttctgaagacttatcttcttttatttagagtgtttctgtgtttcatttttcttgactcaatgtgttgatttctgtgaattagataagataacctcctctaccagtcttgttaaactgg

SEQ ID NO: 961512 - DNA, 120 bp, Artificial Sequence
  ENSG00000230590_115 (sequence is synthesized)
ccttcggtaggagatgtttctctccaaataacccagtgaaagatctagatgcctctttgttcttctataacccacttttactggcctccagaggtgaggatgaactaagtcataattttg

SEQ ID NO: 961513 - DNA, 120 bp, Artificial Sequence
  ENSG00000230590_116 (sequence is synthesized)
ccttgagacaggtactggtccctcataatgcagctggaagggttagtgttatatgtgtgttccagttgcttctttcctttgaagaaactgagagacaaagtttacatcatactgattttg

SEQ ID NO: 961514 - DNA, 120 bp, Artificial Sequence
  ENSG00000230590_117 (sequence is synthesized)
caccacaccaagtagagaatttgtggtagatgtctgtaatctctttgagactactcaatctgaaactgaggcgataacttctgaatgtttccaagtttgaaaatcacctattcttgctgg

SEQ ID NO: 961515 - DNA, 75 bp, Artificial Sequence
  ENSG00000230590_118 (sequence is synthesized)
caacatggagaaaccccgtctctagtgaaaatacaaaattagacgggcgtggtggtgcatgcttgtaatctcagg

SEQ ID NO: 961516 - DNA, 75 bp, Artificial Sequence
  ENSG00000230590_119 (sequence is synthesized)
agaaaagaaaaaagaaaagaaaaggaaactacctattctcagtggtacaggagactcaggaatgaagagctcttt

SEQ ID NO: 961517 - DNA, 120 bp, Artificial Sequence
  ENSG00000230590_120 (sequence is synthesized)
ttctcagtggtacaggagactcaggaatgaagagctctttcaactccagagctgggtgatacaggagccagtaccttgaatgagggatgtaaaatatggggcagtcagtatgtgtacaaa

SEQ ID NO: 961518 - DNA, 120 bp, Artificial Sequence
  ENSG00000230590_121 (sequence is synthesized)
ttactcccagggaaagtctgcagaaacgaattcatcaccagagcaggccaagtaggaaagcatgggaagtacccaatctcacaataaggcacagtaagtcacacaacctcctgccagtaa

SEQ ID NO: 961519 - DNA, 120 bp, Artificial Sequence
  ENSG00000230590_122 (sequence is synthesized)
ggatttggaagcctggacttattgctggagcaatctgaagaagaaattgcgaagaacattcatctccctttaaggcttcctgaagtctcacaaactcacttcacacagaatctccaggcc

SEQ ID NO: 961520 - DNA, 120 bp, Artificial Sequence
  ENSG00000230590_123 (sequence is synthesized)
aatatgttgttggaacaagactggtacataggaaggcaggtgaagtacagttcctcacatatagcataagagaggtctgtctcccagtctccttccagggagagattacaaggttataca

SEQ ID NO: 961521 - DNA, 120 bp, Artificial Sequence
  ENSG00000230590_124 (sequence is synthesized)
tatctggagaaagctgggaaaaggcatggtgggttttgacccttccatttttgctcactgaggcctcaaatctctttcaagggaaactatagacctggattaatcactagagcaatccag

SEQ ID NO: 961522 - DNA, 120 bp, Artificial Sequence
  ENSG00000230590_125 (sequence is synthesized)
acaggtatctcagctagacagaaggtactggataaaaagaaccctgaagcatgggatgattttttcccaatattcactgtgagaatctgtcagataatcagcaactgctgtgatgagatg

SEQ ID NO: 961523 - DNA, 120 bp, Artificial Sequence
  ENSG00000230590_126 (sequence is synthesized)
atcagctctggtgtgcttacctttttcaccaacgtgtcttctaccctacttacctcataagtgaatctaatacagaggttattttggatataatcattatcttaacaggcaagatagtgg

SEQ ID NO: 961524 - DNA, 120 bp, Artificial Sequence
  ENSG00000230590_127 (sequence is synthesized)
gctgtgctatttcaaaccctaaatttggctttcaggattatgaagtattaattcttccactgatatctcaaaaggtgatctggacaaaggaacaggtatctcagatcttgggacacccag

SEQ ID NO: 961525 - DNA, 120 bp, Artificial Sequence
  ENSG00000230590_128 (sequence is synthesized)
cacgtgacaaaaacaacagcagaccctggtgcctgggaggacttcatggatccagcagcaacctggagtggtgctcctctgaagaaatcctactcggatggatataatacaacctgctaa

SEQ ID NO: 961526 - DNA, 120 bp, Artificial Sequence
  ENSG00000230590_129 (sequence is synthesized)
gtgtcctagcacttagcaggttgtattatcattgtccgtgtctatggctctcgtctaccagactttaaattccttaagggcaaggacagtgccttactcatctttgtattcacagtgcct

SEQ ID NO: 961527 - DNA, 120 bp, Artificial Sequence
  ENSG00000230590_130 (sequence is synthesized)
aatccggtgcacattgtaggcctcattaaatgtttgttgaatgaaaaaatgaatcatcaacagacattaattgggcgcctgctctgtgatctccatgggctcagcttgtccccgccagtt

SEQ ID NO: 961528 - DNA, 120 bp, Artificial Sequence
  ENSG00000230590_131 (sequence is synthesized)
tcttttgttgaggacttttctgtgtagtgcaatgatagcaaatacacttcatctcaagtaccatctccaattgattgataatgcctgccctgattatgttttataacaagattctgaaac

SEQ ID NO: 961529 - DNA, 120 bp, Artificial Sequence
  ENSG00000230590_132 (sequence is synthesized)
caggtcttatctcagtgtgaaagacatttataactatttagtgatgtctgctgagggtcggagaagggggagtagcagcacaagtgcctcatatgtcatatttgctactctgttttctat

SEQ ID NO: 961530 - DNA, 120 bp, Artificial Sequence
  ENSG00000230590_133 (sequence is synthesized)
gaaatacttcatttctatgcctgcattttggtcttagctacttgctgatgttgcatggctgttgctgctactgtaattgctgctaattgctccctgggttggaccagagtgctcattgtc

SEQ ID NO: 961531 - DNA, 120 bp, Artificial Sequence
  ENSG00000230590_134 (sequence is synthesized)
tgaacagaaacctcatcctcacagtctgaggtttgctcctgtggctgatatttaaagttttcccctttcaactttactccagctatccccttacctgcactgacaggtaatcctccaccg

SEQ ID NO: 961532 - DNA, 120 bp, Artificial Sequence
  ENSG00000230590_135 (sequence is synthesized)
tcctgttcacctctcaccaggttcatattttctttatcttatttattgtacttaatcattattttgtgagaagcttttctgattgtagatgtgacaaccagaatacaagttaaaaccact

SEQ ID NO: 961533 - DNA, 120 bp, Artificial Sequence
  ENSG00000230590_136 (sequence is synthesized)
tccatcttgaatgtttttattaatctattttgtgttaattctacccaggttttttgtttttccttgctactattatatatatttctgccagatgtcacatggtataaatgcctatatgga

SEQ ID NO: 961534 - DNA, 120 bp, Artificial Sequence
  ENSG00000230590_137 (sequence is synthesized)
cttttgtaacagaaaatttacttactagaattaatgtagggggctttttaataagagtgcatgtaacatagtaacagtagcagagctatatcagaaacagttctgataatatttcatgat

SEQ ID NO: 961535 - DNA, 120 bp, Artificial Sequence
  ENSG00000230590_138 (sequence is synthesized)
ctatagtttgttgcatgcccattgcttcatactgcttgtgttcttggttgagtcataagtaatttttatggggtgtgtcatgactgtcatattcatagagagttgtctgccttgccccat

SEQ ID NO: 961536 - DNA, 120 bp, Artificial Sequence
  ENSG00000230590_139 (sequence is synthesized)
ggtctttgcatggcttaaacaggaccccttttcatacacaagtcattcaattttatgtttttaatagcatcaattttagtgtttaacatgtgtctctggactatgcatcagaatacttga

SEQ ID NO: 961537 - DNA, 120 bp, Artificial Sequence
  ENSG00000230590_140 (sequence is synthesized)
ctgttagtgtgaaatgaaaattcatggatatcataatttatgtaacataatttaacatttctttattaataagactttagattgtccctttcacaaaaaaatggtgcggttaaaacttaa

SEQ ID NO: 961538 - DNA, 120 bp, Artificial Sequence
  ENSG00000230590_141 (sequence is synthesized)
agtgaggttattagagaattgggagaggctcaaatcagcatcctgcacctagttatcaaaccattgtgaagtcttggtaagtggccagtggctttggtgggcttgcccagttagtgggat

SEQ ID NO: 961539 - DNA, 120 bp, Artificial Sequence
  ENSG00000230590_142 (sequence is synthesized)
ggggtagggtaagagtgcttaataggcactaagcaattactggatattttcacattatgatatgaaaaaaaagtcttaaaatattcaggctgtactacagaataaagagtctaacctctt

SEQ ID NO: 961540 - DNA, 120 bp, Artificial Sequence
  ENSG00000230590_143 (sequence is synthesized)
ttttccctattctcccatttttatagatgggggaattagaaattgcccaagattatatgagaccacagtagatggcacaaattgcccaagattatagctagttggcatagaaaatggatt

SEQ ID NO: 961541 - DNA, 120 bp, Artificial Sequence
  ENSG00000230590_144 (sequence is synthesized)
tgagtccaagccagtactgtgtcttctactcagtgcttcatctaggttctatcaaatccaaggaagccatgtgagacaaaaatgtttttatttcacagtaaaagatttttttttcttttt

SEQ ID NO: 961542 - DNA, 120 bp, Artificial Sequence
  ENSG00000230590_145 (sequence is synthesized)
cttttttttaaattagagatgggggtcttaaactatgttgcccaggctgttcttgaacacctgggctcaagtgatccacacaccttggactcatttcacactaaaagattctgtaatagc

SEQ ID NO: 961543 - DNA, 120 bp, Artificial Sequence
  ENSG00000230590_146 (sequence is synthesized)
tcctgagattttactcctctgatgttggaaatttccatagtgtgaagttttgttatgcataaaatcacctggggtgcttgttaaacatgcagattcctggatggccagaaaacttgtcat

SEQ ID NO: 961544 - DNA, 120 bp, Artificial Sequence
  ENSG00000230590_147 (sequence is synthesized)
acatttgggcagtacgcattcggagggctctctggctttccgatcttgggtcgctgtacttggctctgaatacagtcaccccatcagagtagcaaaacactgtggttgtagtgtgagaat

SEQ ID NO: 961545 - DNA, 120 bp, Artificial Sequence
  ENSG00000230590_148 (sequence is synthesized)
ccaatgttaatgttggccgaaagctcttgattttcttccctgagaacataggcgtgaggatttggatgtgtttccaaatgcttgttactctttgccgtaaacctggaatttggacctatg

SEQ ID NO: 961546 - DNA, 120 bp, Artificial Sequence
  ENSG00000230590_149 (sequence is synthesized)
gctgcctgggactcatactgtcgtggagaaagattgaaaagtagttaatggcagtggtggtatgaagtcagcatgaataccagcacagcccaactatgtgtaagcagatctgtgcaggaa

SEQ ID NO: 961547 - DNA, 120 bp, Artificial Sequence
  ENSG00000230590_150 (sequence is synthesized)
tgagagtcccagggagagaatccacgttgtttctgaaagaaaatggctatagctcactgttgtttactggaaatagtagggggaaggaaagatggaagtccaggtccagtgtcatatact

SEQ ID NO: 961548 - DNA, 120 bp, Artificial Sequence
  ENSG00000230590_151 (sequence is synthesized)
tgcagtcagtcagttataccctgcccttcaacatcaagctttgaacctctactctagaaataccttttattatattcaaacttgaagcacgtggacatagcatgctttggtgccttcgtc

SEQ ID NO: 961549 - DNA, 120 bp, Artificial Sequence
  ENSG00000230590_152 (sequence is synthesized)
cttgcccccctccttcctacacagttctttgcaatgagaatatgggaaataaggacttaatgtgagataaggcagaaaggtgatgccacactcaatcagaaactatgctactgctgaaga

SEQ ID NO: 961550 - DNA, 120 bp, Artificial Sequence
  ENSG00000230590_153 (sequence is synthesized)
ctcaaacacagcagacaaagacatcaaggaagctaatacaaacatgttcagagaactaaagaaaaccacacttaaagaagtaatgtgccaggcgcaatggctcacgcctgtaatctcagc

SEQ ID NO: 961551 - DNA, 120 bp, Artificial Sequence
  ENSG00000230590_154 (sequence is synthesized)
gagcaaggctccatctcaatcaaacaaaaaaaaccccaagaccctagcaggcagagacacaagcagctggacgttgaaaggaacacagcagcagcagaagacacaagcggctggacgtca

SEQ ID NO: 961552 - DNA, 120 bp, Artificial Sequence
  ENSG00000230590_155 (sequence is synthesized)
tgatctggacaaaggaacaggtatctcagacaaggtctctctgtcacccagactggaacatggtggagcaatcatagctgatggcagctttgaactcctgggctcaagccatcctcccgc

SEQ ID NO: 961553 - DNA, 120 bp, Artificial Sequence
  ENSG00000230590_156 (sequence is synthesized)
gaaggtactggataaaaagaaccctgaagcatgggatgattttttcccaatattcactgtgagaatctgtcagtgcagatgctttttagtttgatgcaactcaagttgtctgttgcggga

SEQ ID NO: 961554 - DNA, 66 bp, Artificial Sequence
  ENSG00000230590_157 (sequence is synthesized)
tttagtttgatgcaactcaagttggaagaacgtggatcgtgaagatttcatggacatttattagtt

SEQ ID NO: 961555 - DNA, 120 bp, Artificial Sequence
  ENSG00000230590_158 (sequence is synthesized)
tacttcccatgttttaagctattaacagcttttcaacaagagaagccaagatggtgaagaagctgtgtgccaaaatctcacatttatcccatgttgaactggtgaatgtcgataaaattt

SEQ ID NO: 961556 - DNA, 120 bp, Artificial Sequence
  ENSG00000230590_159 (sequence is synthesized)
tccacacatgatggcaggcacataggagtctcataaatacagaagaagccttttatcatctgctccaagtttttcacttctctgtagtctgaggaaatgtctcagcctcggatttcagtt

SEQ ID NO: 961557 - DNA, 120 bp, Artificial Sequence
  ENSG00000230590_160 (sequence is synthesized)
ctgggatataacttgtgataatattggtgctggatatattactgaggttctatgggggtgagtaaaaccagagtgtttttactctgagattttggtgacccattatgttcttgatgtcac

SEQ ID NO: 961558 - DNA, 120 bp, Artificial Sequence
  ENSG00000230590_161 (sequence is synthesized)
accttacatatatttatatcacatatggctaaacaaattgttgtaattattaatagttttgtagatggacatcatggcaggtgcccataataccgtctaatcagaaggctgaggggggaa

SEQ ID NO: 961559 - DNA, 120 bp, Artificial Sequence
  ENSG00000230590_162 (sequence is synthesized)
aattgcttgagcccagaagtttcagaccagcctgagcaacatagcaacagccatctcattaaaaaagttttgtgtattaaccttaacaataaagatatacgttatttgtacaccaccatt

SEQ ID NO: 961560 - DNA, 120 bp, Artificial Sequence
  ENSG00000230590_163 (sequence is synthesized)
acagtataccagtactgtgaatttgagttacttaccttttaccagtcagttttatacattcatgtttttgtgttatgcatgagctgcttctttcaatttgaagaattccctataacattt

SEQ ID NO: 961561 - DNA, 120 bp, Artificial Sequence
  ENSG00000230590_164 (sequence is synthesized)
cacttgttttaatgaataatgagataaaaaaggttaagtcttcaatatctgtggatccgttaatattttcagtttattttccagatatattaaaattctgtatagttccatccaaatatt

SEQ ID NO: 961562 - DNA, 120 bp, Artificial Sequence
  ENSG00000230590_165 (sequence is synthesized)
ggaatttaggaatcatcccagataattttccctgtcctttatttctctgttccacccttcctttggtaagtgttcacattatttatcatttttctttctcttgcttataagctgttactc

SEQ ID NO: 961563 - DNA, 120 bp, Artificial Sequence
  ENSG00000230590_166 (sequence is synthesized)
tcctgtattaaaaccattcttctagttgctttacatatttacatattatgttaaaataaagactcacaaaatgctgcaaatatagtaccgtttacacataccactcaattttccccagtg

SEQ ID NO: 961564 - DNA, 120 bp, Artificial Sequence
  ENSG00000230590_167 (sequence is synthesized)
gtgatattttccattaacattgtacaatatcacaaccagcacattgtcattggtgaaatgtgcacatttacatgacattttatcacatgtatacatttttgtaaccactgcatgaatcag

SEQ ID NO: 961565 - DNA, 120 bp, Artificial Sequence
  ENSG00000230590_168 (sequence is synthesized)
aatgcagaactcatccatcattaaaaacgtatcccttccactagtcttataatcacatacaaccctaacttctaccatccctaacagatgaatacgaacaatgttctctaaactatttaa

SEQ ID NO: 961566 - DNA, 120 bp, Artificial Sequence
  ENSG00000230590_169 (sequence is synthesized)
cttcatcacattaagatacataaaaataagcattatgttacaacttgaaatgggtttttccttcagaattgagaatcatctaaggcttatttgtatagtagtagtttattccttttaatt

SEQ ID NO: 961567 - DNA, 120 bp, Artificial Sequence
  ENSG00000230590_170 (sequence is synthesized)
tttgagttgtattacacaatacggaaataacagacttatttaactgtttacctggtgaataacatgtgagttgtttccaggttctgactattacaaataaaatttctgtgaacagtcaag

SEQ ID NO: 961568 - DNA, 120 bp, Artificial Sequence
  ENSG00000230590_171 (sequence is synthesized)
tgcaggtttggtctacacataaattttcatttctatgaaataggccatgacagcaattgctaagcctaactaactgtatgtgtgtgtttagctttaaaagaaattgccaaattattttcc

SEQ ID NO: 961569 - DNA, 120 bp, Artificial Sequence
  ENSG00000230590_172 (sequence is synthesized)
aatgtggtatacagttttatattcccatcagcaataaagattcaattttttctgcatgcttctcagcctttggaatcattatgttttaactatttcagctactgaaataaatctgctgta

SEQ ID NO: 961570 - DNA, 66 bp, Artificial Sequence
  ENSG00000230590_173 (sequence is synthesized)
atgttttaactatttcagctactgaaataaatctgctgtaggccaggtgtggtggctcacacctct

SEQ ID NO: 961571 - DNA, 120 bp, Artificial Sequence
  ENSG00000230590_174 (sequence is synthesized)
cactgcactccagcctcggtgacagaggcagactccgcctcaaagaaaaataaatcttctgtaatatctcatcatagtattaatttccatcatgtccttattgacatttccctatcctca

SEQ ID NO: 961572 - DNA, 120 bp, Artificial Sequence
  ENSG00000230590_175 (sequence is synthesized)
ttgacatttccctatcctcaggggaatgttctttcatgacttttgcccattttctaatttaaagctttggatttttaatactatcttttgagaattatgtaaatattctagccataagtc

SEQ ID NO: 961573 - DNA, 77 bp, Artificial Sequence
  ENSG00000230590_176 (sequence is synthesized)
ctatcttttgagaattatgtaaatattctagccataagtccaatgttggatatgagatttgaaaacaaagggccaga

SEQ ID NO: 961574 - DNA, 79 bp, Artificial Sequence
  ENSG00000230590_177 (sequence is synthesized)
gaacaggtatctcaggattcctccttggtcacttttcagcagcagcctgctcttcttttgcactcccacgggtgttcac

SEQ ID NO: 961575 - DNA, 61 bp, Artificial Sequence
  ENSG00000230590_178 (sequence is synthesized)
gttgttgcatgggatggcaatgtccacgtatcacagaggagaatctgtgttacacagagca

SEQ ID NO: 961576 - DNA, 62 bp, Artificial Sequence
  ENSG00000230590_179 (sequence is synthesized)
gagagtgtattttctacacataagttcaggtcatctccacacagacccagtttgcctccctc

SEQ ID NO: 961577 - DNA, 120 bp, Artificial Sequence
  ENSG00000230590_180 (sequence is synthesized)
aactgtactggctagaacatcccgaactaggttgaatgaggtgctgagagtgggcataattggcttctttacctccgaagaaaatatttcatgttttcttcattgattatgatgttagtt

SEQ ID NO: 961578 - DNA, 120 bp, Artificial Sequence
  ENSG00000230590_181 (sequence is synthesized)
gtgggtatttcatttactgcctatatggtataaagatacattccttctatgcctaattggttgacagcttttattatatcaaattctataaaactgttttatttttaaatctattgagat

SEQ ID NO: 961579 - DNA, 120 bp, Artificial Sequence
  ENSG00000230590_182 (sequence is synthesized)
gatcaaatggcggtgtccctcctcctttataagactatttaaaacatccttgcctcagagggacaaatcccatttgaacatggcaagtaatcctcttaatataaagtggaattaggtttg

SEQ ID NO: 961580 - DNA, 120 bp, Artificial Sequence
  ENSG00000230590_183 (sequence is synthesized)
acagaaattaccagtgaagcactatgggcatatatttgataggagatttttattatggatacaatttacttgttattggtctcttcagatattctttctcatgactggatttgcgtacgt

SEQ ID NO: 961581 - DNA, 120 bp, Artificial Sequence
  ENSG00000230590_184 (sequence is synthesized)
tgtatgagtacaaattttttcatttattctacgctgctctttattatatgcttccttctgtaaaatttggactgtttgttcttcccattatattaatagttgcttcaggtgtaacataag

SEQ ID NO: 961582 - DNA, 120 bp, Artificial Sequence
  ENSG00000230590_185 (sequence is synthesized)
gttattttttaagtacttttctggtatcacaaatattggtgttttgtgtttcatctttcatttgtcaaaatattttttaacttccatttggatttaatgattcacccattcattattcaa

SEQ ID NO: 961583 - DNA, 120 bp, Artificial Sequence
  ENSG00000230590_186 (sequence is synthesized)
aagcatattgtttaatttctatgtgtttgtgaacattctaatgttcattctactaatagttcctaggttcatgcaatgtgcttaaaaatgtggtataatttctgtattattaaatgtaaa

SEQ ID NO: 961584 - DNA, 120 bp, Artificial Sequence
  ENSG00000230590_187 (sequence is synthesized)
actagtcttgattcgtaacataaggcctacgcaaagatccatcttctgcagagaagaatgtagattgtgccgctgttagacgaagtattctgtatacgtcagtttgctttatttggcata

SEQ ID NO: 961585 - DNA, 120 bp, Artificial Sequence
  ENSG00000230590_188 (sequence is synthesized)
aagtgtagtgtaagccagatgtagtgtaagtcagatccagatgatctgcccattgctgaaacttcagtacttaagtcccctattattattgtatggcaatctatctgtccactcagaagt

SEQ ID NO: 961586 - DNA, 120 bp, Artificial Sequence
  ENSG00000230590_189 (sequence is synthesized)
tattatatttgttttatatgattgagcacttctgttttgggtatatatgtatttacaattactataacctcttgctgaattaaccccttttaccattatgtaataaacttatttcccaaa

SEQ ID NO: 961587 - DNA, 120 bp, Artificial Sequence
  ENSG00000230590_190 (sequence is synthesized)
cattttctttatccattcatccattgatgaatacataagttgattccatacattggctattgtgagtagtgccacaataaacatggaagtacaaatagttatttgatatactgatttcct

SEQ ID NO: 961588 - DNA, 120 bp, Artificial Sequence
  ENSG00000230590_191 (sequence is synthesized)
tactgatttcctttcctttggataaatacccagtacttggattgctgtatcatatgcaaaaaactaaaagttttacttttagttttttgagaagtctgcatactgttttccataatggct

SEQ ID NO: 961589 - DNA, 120 bp, Artificial Sequence
  ENSG00000230590_192 (sequence is synthesized)
gtactatttacactcctaccaacagtgtataagagttccctttactcatcatccttgccagcattgctaatttttgtctttctgataatagctattttttttttttttgagactgagttt

SEQ ID NO: 961590 - DNA, 120 bp, Artificial Sequence
  ENSG00000230590_193 (sequence is synthesized)
gcccaggctagatttgaactcctgggctcaagtgatcctctcgacccagcctcctgagtatctgtgactgcagcttccaagtttgctggagccatgttttctctaatgtccccacagaac

SEQ ID NO: 961591 - DNA, 120 bp, Artificial Sequence
  ENSG00000230590_194 (sequence is synthesized)
gttcctaagtactccactggcttaccaagtataggattaccctttgattactttatctggctaccaggacagagagattcttgggagccaaccagccatcaggtcaactattttgctaca

SEQ ID NO: 961592 - DNA, 120 bp, Artificial Sequence
  ENSG00000230590_195 (sequence is synthesized)
taaatggaataacacaatagatgccttttatcatgggtttctttcacttaggatgttttgtagggtaatccatatagcatgtatcaggacttcattttttttttttttttttttgagatg

SEQ ID NO: 961593 - DNA, 120 bp, Artificial Sequence
  ENSG00000230590_196 (sequence is synthesized)
gtgcagtggtgcagtctcagctcacttcaacctctgccttctaggttcaagcgattctcctgtcttggcttcccaagtagccaggattacaggcgcctggcaccatgcccagctactttt

SEQ ID NO: 961594 - DNA, 120 bp, Artificial Sequence
  ENSG00000230590_197 (sequence is synthesized)
taccacattttgtttatccatttatccattgattggttgtttctacttttttttagctattatgaataatattgctgtgaacatttgtgtacaaggttttagtggacacaagtttttatt

SEQ ID NO: 961595 - DNA, 120 bp, Artificial Sequence
  ENSG00000230590_198 (sequence is synthesized)
tttcttgggtatatatctaggagtggaattgctgggtcatattgtaattctgttcaactttttgaagaacttcccaactgttctccatggtggctgtgccattgtatattcctaccagca

SEQ ID NO: 961596 - DNA, 120 bp, Artificial Sequence
  ENSG00000230590_199 (sequence is synthesized)
gtgtatgaagttacaaatttctccacatcctgagaacccctttattattttctgtttttctttttgattatagccatcctagtaggtgtaaagtggtatctcattgtgattttattttgc

SEQ ID NO: 961597 - DNA, 120 bp, Artificial Sequence
  ENSG00000230590_200 (sequence is synthesized)
atttccctaaatgattaatgatattgagcatcttttcatgtgcttcttggccactagtatatcttctttgaagaaatgtctattcaagtctttggcagtttctaaatgagttattgtctt

SEQ ID NO: 961598 - DNA, 120 bp, Artificial Sequence
  ENSG00000230590_201 (sequence is synthesized)
tttgttgttaggttgtaagagttataatctggataacagatccttattagatatgtaatttgcacatattttctcccattttgtgggttgtcttttgtcttttttattttttattgcttg

SEQ ID NO: 961599 - DNA, 120 bp, Artificial Sequence
  ENSG00000230590_202 (sequence is synthesized)
tgttttggtatcattattgataattcattgttaaattaaaggtcatgaagagttactcttactttttcttctataatttttagttttagctcttgtattcatgtctgtaatcaattgaag

SEQ ID NO: 961600 - DNA, 120 bp, Artificial Sequence
  ENSG00000230590_203 (sequence is synthesized)
ttaatttttaatatagtatgtgttaggagtccagcttcattgttttgcatgtatctatgcaattgacccaaagtgatttgttgaaaaatattattttctgatggtatggtcctgacaccc

SEQ ID NO: 961601 - DNA, 120 bp, Artificial Sequence
  ENSG00000230590_204 (sequence is synthesized)
ttgtagaaattcaattgaagatatatgtatgagtttacttctgcagtctcaattctattctattggtctaaatgtttatctttatgccagtaccagcctgttttggttattttagttttg

SEQ ID NO: 961602 - DNA, 120 bp, Artificial Sequence
  ENSG00000230590_205 (sequence is synthesized)
taataaaatagacaaacatttggccgattaatcaagacaaaaagaaaagtatatagaaataatattatgaaagaaaagggggagcatattgaaaaacaccataaagattaaaaagattaa

SEQ ID NO: 961603 - DNA, 120 bp, Artificial Sequence
  ENSG00000230590_206 (sequence is synthesized)
gggacagtgttaacaatttatgccaatagggtttgaaagtttagagaaaatagacaaattcctagcaaaatataaattatcaaaacctactcaagaaaaaatagaaatcttatatagtca

SEQ ID NO: 961604 - DNA, 120 bp, Artificial Sequence
  ENSG00000230590_207 (sequence is synthesized)
caaggtattaaatattcaattcttcctagagacccaaatatatgctttctacccgtaactcactgtaaataaaaagaaagggataatatattgtgcaaactctagtcaaaaaaaagttgg

SEQ ID NO: 961605 - DNA, 120 bp, Artificial Sequence
  ENSG00000230590_208 (sequence is synthesized)
aatgacaatattaatataaacaaaagtggacttcaaaagaagcaatattatcagagagaaagagggcactgcttggtgaattgccccctgataaagacataacaataccggaagtaaaaa

SEQ ID NO: 961606 - DNA, 120 bp, Artificial Sequence
  ENSG00000230590_209 (sequence is synthesized)
ttgacataactgcaaggggaaattgacaaatccacaattatatttgggatttaaatgctttactcttaataattaataaaagttagctaaaaaattaattttagctaaataaattagcta

SEQ ID NO: 961607 - DNA, 120 bp, Artificial Sequence
  ENSG00000230590_210 (sequence is synthesized)
aaaagttaacaaggatagatctgaacaacactaggataaacttgtcctaatggacatttatagaccactataaccaaaagtggtagaattcacaatttttgcaagtacacatggaatatt

SEQ ID NO: 961608 - DNA, 120 bp, Artificial Sequence
  ENSG00000230590_211 (sequence is synthesized)
caccaaaataaaccatatcctgatttataaaataaactaacaaactggcttctctcacttagcaatatgaatttaaatttcccccatatctcttcatggctttatacctcatttcctttt

SEQ ID NO: 961609 - DNA, 120 bp, Artificial Sequence
  ENSG00000230590_212 (sequence is synthesized)
attgctgaataatgtttcattttatggatgggccataaaatgtttatctatgcacctatagagggacatcttggttgcttccaagttttggccaatattaataaagctgttataaacatt

SEQ ID NO: 961610 - DNA, 63 bp, Artificial Sequence
  ENSG00000230590_213 (sequence is synthesized)
caggtcagccttcattcattttcatggagaaaaatatttcattgtatgagtataccacatttt

SEQ ID NO: 961611 - DNA, 120 bp, Artificial Sequence
  ENSG00000230590_214 (sequence is synthesized)
tttggttaaatacctaggaatataattgctagatagtatagcaattctgtttagttttgtaggaaactgcaaactgtcttccaaagtggctgtatcattttgcatttccactaacagtga

SEQ ID NO: 961612 - DNA, 120 bp, Artificial Sequence
  ENSG00000230590_215 (sequence is synthesized)
ctgggagttccttatgctaaacatcctctacagtatttggtgtggtcagtgttatagattttggctattctttcaggtgcatagtggcatcttattgttgttttaatttgcaattccctg

SEQ ID NO: 961613 - DNA, 120 bp, Artificial Sequence
  ENSG00000230590_216 (sequence is synthesized)
atgatgtatgaggggacttcaaaaatttatggaaaaattgaactaaaaggtaaaagtaaaaaatataaacttcttaacataagctccatcgagttcaagatactttgtaagcaatgatac

SEQ ID NO: 961614 - DNA, 120 bp, Artificial Sequence
  ENSG00000230590_217 (sequence is synthesized)
cagccatttggttcatccctaaggaactgagggttctgagaatttaatcaggtcaatgaagtcttttttacgttatgaactgaagaaaaatgtgtgcaatttaaaggtttgttaagactt

SEQ ID NO: 961615 - DNA, 120 bp, Artificial Sequence
  ENSG00000230590_218 (sequence is synthesized)
tgaaacaaaaagaagtcagaaggagccaaatcaggactgtaaggtggatgaatgcctaatgatttcccatcaaagctctcacaaaattgcccttgtttgatgagaggaataagcagaagc

SEQ ID NO: 961616 - DNA, 120 bp, Artificial Sequence
  ENSG00000230590_219 (sequence is synthesized)
attgtgatggggaaggactctctaatgaagctttcccaggtgtttttctgctaaagctttggctttctcaaaacactttcataataagcagatgttgttgttctttggccctccagaaaa

SEQ ID NO: 961617 - DNA, 120 bp, Artificial Sequence
  ENSG00000230590_220 (sequence is synthesized)
ccaactagaaaaattcctttaacattccaaaagactattgccatgagctttgttcttgaccagtccagttttgctttgactagaccgcttccacttcttggtagccattgctttgattgt

SEQ ID NO: 961618 - DNA, 120 bp, Artificial Sequence
  ENSG00000230590_221 (sequence is synthesized)
gctttatctttaggatcatactggtaaagccatgttttgtctcctgttaaaattcttcaagaaattgctacaggatcttgatcctacttgttaaaatttccattgaaagctcagctcttg

SEQ ID NO: 961619 - DNA, 120 bp, Artificial Sequence
  ENSG00000230590_222 (sequence is synthesized)
tctgcagctgatctgggcacaacagttttggtacccattgagtggaaagtttgctcaactttaatttttcagtcagaatagtgtaagctaagccaatttagatatctatggtgttgacta

SEQ ID NO: 961620 - DNA, 120 bp, Artificial Sequence
  ENSG00000230590_223 (sequence is synthesized)
ttgtttgtgctgttaattcttgttcttcttcaattaaggcatggacataatttttttcaatttttttttcaaacgatgtggaaggcttgctgctatgtgcttcatcttcagcatcatctc

SEQ ID NO: 961621 - DNA, 120 bp, Artificial Sequence
  ENSG00000230590_224 (sequence is synthesized)
atcccttcttaaaatgagttatctgtttgcaaactgctgatttcttttggagaatcatccccataaacttctcataaagcatcaatgattttaccattcttccacccaagcttcacacta

SEQ ID NO: 961622 - DNA, 120 bp, Artificial Sequence
  ENSG00000230590_225 (sequence is synthesized)
aatttgatgtttggttttgcttcaattttagtagaatttatgttgctctgacaggtgctcttttcaaacttacgtcttacctttttagtgcctcaaactacatcctgttcaggcatgtta

SEQ ID NO: 961623 - DNA, 120 bp, Artificial Sequence
  ENSG00000230590_226 (sequence is synthesized)
taacaagttagtatgagcttattttggtataaaaaatttggactccataattttttcataatatgcatttttcattaccttttggaagacaactcatatcaccttgagcttcttttcata

SEQ ID NO: 961624 - DNA, 120 bp, Artificial Sequence
  ENSG00000230590_227 (sequence is synthesized)
ttttcatatgcctattttccatatgtatatcttctttggtgaggtgtccttttcagatgtttgtacatttaaaaatcagttattacccactcccaccacttctattcaacatagtactgg

SEQ ID NO: 961625 - DNA, 120 bp, Artificial Sequence
  ENSG00000230590_228 (sequence is synthesized)
tcaagagagagcaattagacaagaaaaagaaattaaagatatctaaattggaaaggaagaagtaaaatgatctctctttgcacatcatatgatcctatgtgtagaaaactccaaagactc

SEQ ID NO: 961626 - DNA, 120 bp, Artificial Sequence
  ENSG00000230590_229 (sequence is synthesized)
caccaaaaaaacctattagatctaataaatgaattcagtaaagttgcaggatataaaattaatatacaaaaatccatggccattttattcacaaataacaacctagctgagaaatcaaga

SEQ ID NO: 961627 - DNA, 120 bp, Artificial Sequence
  ENSG00000230590_230 (sequence is synthesized)
aaacaatcccatttatgataacataaaacacttaagaatacatttgaccaagaagatgaaagtgcatcagtatagcctgcacactgaaaaccacaaaacattgatgaaatacattgaaga

SEQ ID NO: 961628 - DNA, 120 bp, Artificial Sequence
  ENSG00000230590_231 (sequence is synthesized)
ggacacaaataaataaaacgatattccatgctcatagattggaagaattaatgttgttaaagtgtccatactacccaaagcaatatatagattcaatgcaatccctatcaaaatctcatc

SEQ ID NO: 961629 - DNA, 120 bp, Artificial Sequence
  ENSG00000230590_232 (sequence is synthesized)
agcattcttcacagaaatagaaaaaaatcatacaatttctgtggatccacaaaagatcccaaataaccaaagcaattctgagaaaaaaaaatcctggaggcatcatacttcccaatttaa

SEQ ID NO: 961630 - DNA, 120 bp, Artificial Sequence
  ENSG00000230590_233 (sequence is synthesized)
atttatattacaaaacgagagtaatcaaaacaatacagtattggcataagagatacacaggacagtgaaatagccagaaataaatccaaacatgtatggttaatgaatttttgacaagag

SEQ ID NO: 961631 - DNA, 120 bp, Artificial Sequence
  ENSG00000230590_234 (sequence is synthesized)
caccaaaaagacaaaatgagaaaagggtagtctcttcaataaataggtgctggaatttccacatgcaaaagaatgaaattagactcttacattacaccatacacaaaaatcaatccaaaa

SEQ ID NO: 961632 - DNA, 120 bp, Artificial Sequence
  ENSG00000230590_235 (sequence is synthesized)
tggataaaagatctgaatgtaagacctgaagccataaatctagaagaaaacataagggaaaagctccttgacactggctttggcaatgtttccttggatatcacaccaaaacctcaggct

SEQ ID NO: 961633 - DNA, 120 bp, Artificial Sequence
  ENSG00000230590_236 (sequence is synthesized)
acaaaagcaacaataaataaatgaaattatatcaatctaaaaaacttctacacagaacgaaaacaatcaacaaaatgaaaaggcaatgtacagataaggagaaaatatttgcaaaccata

SEQ ID NO: 961634 - DNA, 120 bp, Artificial Sequence
  ENSG00000230590_237 (sequence is synthesized)
tatcaggcaaggttttaatattcaggatttaggaagaactcatacaactcaatagcaagacaacatataacctgattaaaaaaaagtggggaaaggacttgaatagacatttcttcaaag

SEQ ID NO: 961635 - DNA, 120 bp, Artificial Sequence
  ENSG00000230590_238 (sequence is synthesized)
atgacagaaaatgaccaacaggtatatgaaatggtgctcaatatcaccagtcatcaggaaaatgcaaatcaaaactactttgagataccacctcatacatgttaggatagctattatcaa

SEQ ID NO: 961636 - DNA, 120 bp, Artificial Sequence
  ENSG00000230590_239 (sequence is synthesized)
aaagacaagagctaacaagtgttggtgagggtgtggagaagagggagcacttgtacactgttagtgggaatgtattatatattggtgcagccattatggaagacagtatggaggttccta

SEQ ID NO: 961637 - DNA, 120 bp, Artificial Sequence
  ENSG00000230590_240 (sequence is synthesized)
agtaaattaaaaatagaactaccatatgacccagcaatccctcttctgggtatatccccaaagggaatgagattatctctgcactcccaagtttattgcagcacaattcacaatagtcaa

SEQ ID NO: 961638 - DNA, 120 bp, Artificial Sequence
  ENSG00000230590_241 (sequence is synthesized)
gatacagacacaacctaggtgttcatcaatgggcaaatggataaagaaactgtgatatagagagatcaatagatagataattagaatattatttagcctttaaaaagaaggcagtcctgt

SEQ ID NO: 961639 - DNA, 90 bp, Artificial Sequence
  ENSG00000230590_242 (sequence is synthesized)
aaattgcgtgatctcacttatatgtggaatcaagaaaaaaaaggttaaatatatagagatagagaataaaacagtaattactaaggtcag

SEQ ID NO: 961640 - DNA, 120 bp, Artificial Sequence
  ENSG00000230590_243 (sequence is synthesized)
atatagagatagagaataaaacagtaattactaaggtcaggataaggtggaggaaatgagatgtaggtcaaaggatgcaaagtagtaaatatgcaggatgaacaagtgaaaagatcaaag

SEQ ID NO: 961641 - DNA, 120 bp, Artificial Sequence
  ENSG00000230590_244 (sequence is synthesized)
atcaaatgtacaacatgaggactatagttaatacatattgtatattgtgttcaggactttttgctaaatgagtagattatacctgctcttgccaatgggggaataatcagtaactatgtg

SEQ ID NO: 961642 - DNA, 120 bp, Artificial Sequence
  ENSG00000230590_245 (sequence is synthesized)
aatcagtaactatgtgagatgatgggtatgttcattgttccactatagttttactatatatatatatatgtttcatttaacattgtgttgtataccttaatatagacaataaaatttatt

SEQ ID NO: 961643 - DNA, 120 bp, Artificial Sequence
  ENSG00000230590_246 (sequence is synthesized)
cagtgattaaggaggagctggtagaagacttaatgtgagggagaagaaaaggaaagaagtagcgggggatgactacaacctctcttcatctcagcttcacaaagcatcattcaacaaatg

SEQ ID NO: 961644 - DNA, 120 bp, Artificial Sequence
  ENSG00000230590_247 (sequence is synthesized)
aggtgatctggacaaaggaacaggtatctcaggaggcggaggcaggagtattgctgagcccaggagttgaagactgcaatgagctatgatcgcgtcactgcaccccaacttgggtgatag

SEQ ID NO: 961645 - DNA, 66 bp, Artificial Sequence
  ENSG00000230590_248 (sequence is synthesized)
gccagccagcaatttttgccaattttttaaaattcatattacttttttcttgctattgaattacgt

SEQ ID NO: 961646 - DNA, 120 bp, Artificial Sequence
  ENSG00000230590_249 (sequence is synthesized)
ttaaaattcatattacttttttcttgctattgaattacgttggttatatcttcttaactctttgtcacatatactgtttgcaaatattttctccaatactgtaaattgactcctcactct

SEQ ID NO: 961647 - DNA, 120 bp, Artificial Sequence
  ENSG00000230590_250 (sequence is synthesized)
gaagcgatgactcctcactcttttaatactctttcgctgtgcaaaagctttaaactttgatatactctcatttggttatttttccttttattccctgaaaagttcaggtctcatttctaa

SEQ ID NO: 961648 - DNA, 120 bp, Artificial Sequence
  ENSG00000230590_251 (sequence is synthesized)
atccttgcccagcaaaatatcatgaatcatttcccccattttcttcaagaagtttcatagtttccaattttacatttaattctttattcaattgggagttaatttttgtgtatttttaga

SEQ ID NO: 961649 - DNA, 120 bp, Artificial Sequence
  ENSG00000230590_252 (sequence is synthesized)
tgtagacttctaatctaattcttttgcatgtaattatcaaattttcccagtaccatttacacggtaaatgttttattttccctgaagtgtgctcctggcaactttgtgaagaatcagtta

SEQ ID NO: 961650 - DNA, 120 bp, Artificial Sequence
  ENSG00000230590_253 (sequence is synthesized)
tctggttactataattttgtagtctatattaaagccagatacttcaattaccctggatctcctcattttctttaatattttttcatttaagatttttgttgctccatacaatttcagaat

SEQ ID NO: 961651 - DNA, 120 bp, Artificial Sequence
  ENSG00000230590_254 (sequence is synthesized)
tattttcttctgtttatagacaaaactaacataacatcagaaatttaatagggatgcacagatcaatagattgctttgagtagtatatatattttaagatataaattattctaacacata

SEQ ID NO: 961652 - DNA, 120 bp, Artificial Sequence
  ENSG00000230590_255 (sequence is synthesized)
aatataaaatatatttctactcatttgtgtcgtcaatttcttccttcaatgcttttattacaaaatgaattattttttaaagagttttcattacagaaatctttggcttgttcagatctc

SEQ ID NO: 961653 - DNA, 120 bp, Artificial Sequence
  ENSG00000230590_256 (sequence is synthesized)
ttcctcggtacttttgtaagctattgtcaatgagactcatttcttgttttctttttgaaattacccactggtgggatatagaaatgctacaggtttttgtatggctgttttgtattatgc

SEQ ID NO: 961654 - DNA, 90 bp, Artificial Sequence
  ENSG00000230590_257 (sequence is synthesized)
gaaatgctacaggtttttgtatggctgttttgtattatgcaattttactgaatttctttatcacttccaaaaggttttaaggggagagtg

SEQ ID NO: 961655 - DNA, 120 bp, Artificial Sequence
  ENSG00000230590_258 (sequence is synthesized)
gggagaagattagagtttctattttaaaggcagatgtactgtcatgactctctgaagacttgctgttaatcgctaaaactagtaagttagcacttagatacagacatagttagaaggagc

SEQ ID NO: 961656 - DNA, 120 bp, Artificial Sequence
  ENSG00000230590_259 (sequence is synthesized)
acaggattaaaaactgaaaaaaacatcttttcccagtaatcctagctattatttcatggtggtccttttccttctctgggcctatttctctctctcgctcatttatttatttacttttag

SEQ ID NO: 961657 - DNA, 82 bp, Artificial Sequence
  ENSG00000230590_260 (sequence is synthesized)
gcgcgatctcaatatatctcagcctcccaagtagtagctggggttacaggtgcgcgcacgcccggctaatttttgtgttttt

SEQ ID NO: 961658 - DNA, 120 bp, Artificial Sequence
  ENSG00000230590_261 (sequence is synthesized)
gcccggctgctgggcctatttctctatctgtaataatgattaaacgtcaatagcacttactacgttcgaggttctggtctgcgtgcttttacataggccgtaactcatttggtactctcg

SEQ ID NO: 961659 - DNA, 120 bp, Artificial Sequence
  ENSG00000230590_262 (sequence is synthesized)
acaatcttacgaaacacagtactgttattaagtttatacaaatgagaaatttgagggacacgagactaatttgttcaaggctttacagccagttgaatggctgagactgggtttttatcc

SEQ ID NO: 961660 - DNA, 120 bp, Artificial Sequence
  ENSG00000230590_263 (sequence is synthesized)
aggtgggatggctccagaagcatgtgcttttaagcattatgctttattccctaaaaagagggggcgaatttaaaggaaccttcttttatgatttcaaaatttgtttgtaactaaccaaaa

SEQ ID NO: 961661 - DNA, 67 bp, Artificial Sequence
  ENSG00000230590_264 (sequence is synthesized)
gcttcccgattatctttgagttatgcatttcgaccagtatgctacttcacataattatttacttatt

SEQ ID NO: 961662 - DNA, 120 bp, Artificial Sequence
  ENSG00000230590_265 (sequence is synthesized)
tttcgaccagtatgctacttcacataattatttacttattagcaccctttaaatgtccactctgttctggttctgctgcttcactttccctaacccccaatcagcccatatcaatctctt

SEQ ID NO: 961663 - DNA, 120 bp, Artificial Sequence
  ENSG00000230590_266 (sequence is synthesized)
cattgctaaaacagtacaacatcaacagcactggaacacagtatctagctacgtaagaaaacttacatttaccctgctgcaaaatatggagaggaatccataagagctaagtttcttttc

SEQ ID NO: 961664 - DNA, 120 bp, Artificial Sequence
  ENSG00000230590_267 (sequence is synthesized)
tgtccagtgtgtatggcattaactaatcaccattttccttttttcttttaagttaatgtgtcaaacatagaaataacctgaagtactatgaattatttttaaaaagttatgttgataatt

SEQ ID NO: 961665 - DNA, 120 bp, Artificial Sequence
  ENSG00000230590_268 (sequence is synthesized)
agttatgttgataattattttacctggaaagtattagtttgcttttaaatgttattcaaagatatactccacaagtataattttattatacctcaagaatattttataagaactcatctt

SEQ ID NO: 961666 - DNA, 120 bp, Artificial Sequence
  ENSG00000230590_269 (sequence is synthesized)
acctcttaaatctgtgtaagacattctatttaatgcaactccttataaaaatcatatcccacaaattatctttaacgacaaaaatctaagtctagcttgtcaagtttttctctgtaacat

SEQ ID NO: 961667 - DNA, 120 bp, Artificial Sequence
  ENSG00000230590_270 (sequence is synthesized)
attctcttaacaatttgtatccttgattactaatagtcagttcctgcaaatgaaccaatcaataatcaattaaaaaaacctaaaaaaattaaatgatgtccaacattgttctcataaaaa

SEQ ID NO: 961668 - DNA, 120 bp, Artificial Sequence
  ENSG00000230590_271 (sequence is synthesized)
tatatacaaaattaacataccagtcgtcaatgcaatttcaaacaaacaatgcaaaattggtaaaatgttttagtctttatgtagatttcatcaagtgttttgccttctcccaagggttag

SEQ ID NO: 961669 - DNA, 120 bp, Artificial Sequence
  ENSG00000230590_272 (sequence is synthesized)
actccaacctgggcaacaagagcaaaaatccgtctcaaaaaataaataaaacataaataaaataaaattattaatgttctaaccactgtttacagggttgttgcactaataaattccacg

SEQ ID NO: 961670 - DNA, 120 bp, Artificial Sequence
  ENSG00000230590_273 (sequence is synthesized)
cagggttgttgcactaataaattccacgtcctggacctaaatgattgctaaaatgttttgcacacagcagctaaatgtaatcacactaacatgatgccagaaacaactgattcatctaca

SEQ ID NO: 961671 - DNA, 120 bp, Artificial Sequence
  ENSG00000230590_274 (sequence is synthesized)
tgcaacctcatttccctcagatgcctccaaggcaactgaagttcatagattttgtctaattacaagtgcaggctcaaatcaccttggatttgagttaggatccacggattgttttttgtt

SEQ ID NO: 961672 - DNA, 120 bp, Artificial Sequence
  ENSG00000230590_275 (sequence is synthesized)
tggttagttggttttgttctgtttttcaattcaggcatcttgttcatggaacattcattatttgcttgagattgctttcactgccagctgcttactttctttaccactgtagtataatct

SEQ ID NO: 961673 - DNA, 120 bp, Artificial Sequence
  ENSG00000230590_276 (sequence is synthesized)
ctgaatttgctgaccaatatcagcatcaccataaactacacaaggatgaactctaggctgccttcaaagcttttcctggaccatctatatatatctgactcagtacgggtaaaagaaatg

SEQ ID NO: 961674 - DNA, 120 bp, Artificial Sequence
  ENSG00000230590_277 (sequence is synthesized)
ctgcagttttcccagaccctgcttgggcacaagacattaagtctctttttttcccctaataataggaatggcatgttttgcagtggagtaggatgagtatagtaagtaagctctgtaagg

SEQ ID NO: 961675 - DNA, 120 bp, Artificial Sequence
  ENSG00000230590_278 (sequence is synthesized)
tcctctgagctggccgcaccatggtcaagccatcgtgacattcccccgcccttgtgataatgtactttgtgatattccccatccttgtgaaggtagtttgtaacattccccgcccttgtg

SEQ ID NO: 961676 - DNA, 120 bp, Artificial Sequence
  ENSG00000230590_279 (sequence is synthesized)
taacattccccgcccttgtgacaatacaccctccccgcccttgttaatgtatttgtaacatccatcccctgcctgcaaaaaattgcttctgactccactgcctatcccaaacctataaga

SEQ ID NO: 961677 - DNA, 120 bp, Artificial Sequence
  ENSG00000230590_280 (sequence is synthesized)
agttcttctcaaattgctcttccaaaacattttagtttatactgcaatgttaaccattttacacttgcttaagtaattttcttcaaatacacacgagtccaggctatttaaccttatttt

SEQ ID NO: 961678 - DNA, 120 bp, Artificial Sequence
  ENSG00000230590_281 (sequence is synthesized)
accgctatagcacaaaacaggttttccaaaattgtccttgcacacctgggattttacaaggatattataatcttggttcagtttgacttactgaatttgtagtaagtatattttagcaca

SEQ ID NO: 961679 - DNA, 120 bp, Artificial Sequence
  ENSG00000230590_282 (sequence is synthesized)
tagaaaattcaaaatatgtgttaatctgtttatagggtaaatttttatgagggtggatgtcatcctgttttttttttttttaataaatgttttgtttcagaatgttttttatttacagaa

SEQ ID NO: 961680 - DNA, 120 bp, Artificial Sequence
  ENSG00000230590_283 (sequence is synthesized)
taataaatgttttgtttcagaatgttttttatttacagaaaagttacaaacatagtacagagagttcccaaatgctccacaccgagttttccctattgtttttttttttttttttgagat

SEQ ID NO: 961681 - DNA, 120 bp, Artificial Sequence
  ENSG00000230590_284 (sequence is synthesized)
ttccctattgttaatatcttgaattagtatagtacatttgtctccttctcctttttgcccttggtaacctctaatctactttcagtctctgaatttgcctattccaaatattttgtataa

SEQ ID NO: 961682 - DNA, 120 bp, Artificial Sequence
  ENSG00000230590_285 (sequence is synthesized)
gtggaatcatacaatatttgtccttttgcttctggcgtatttcacttagcacaatgccttcaaggttcatccatgttatagcatatgtcagaactttattcttttttatagctgaataat

SEQ ID NO: 961683 - DNA, 120 bp, Artificial Sequence
  ENSG00000230590_286 (sequence is synthesized)
atttcattgtgtgtatatgccacattttgtttatcattcattttgtttatgtaccatgttttgtttatatacatctattagtatgtatttgtttagatatacaatttgcttgtataccac

SEQ ID NO: 961684 - DNA, 120 bp, Artificial Sequence
  ENSG00000230590_287 (sequence is synthesized)
attttgtttttctgctatctaatggattatgctgctctggaacattcatgtgatgcttttgttaattgcttatacattttattaagctaatgagcttggtcatagtaacatataaaatca

SEQ ID NO: 961685 - DNA, 120 bp, Artificial Sequence
  ENSG00000230590_288 (sequence is synthesized)
gaaggagggtcctctcagtgattaaggaataactcatatccatgagtacaattatacgccagtcctgtgggtccttgcaaatcactgaaactacccttgtgctggggctcgccaacgcaa

SEQ ID NO: 961686 - DNA, 120 bp, Artificial Sequence
  ENSG00000230590_289 (sequence is synthesized)
tacaggcgtgagccaccgcacctggcctttgtatagatttttaaatgctagacttctttgatattattgagcatatattttatctaattatgacacctgttttgattctgtgcttaatta

SEQ ID NO: 961687 - DNA, 120 bp, Artificial Sequence
  ENSG00000230590_290 (sequence is synthesized)
agcaattttatgattataatttggctataggaaaagaatgtatgctttatatggaaacaagtattctggttacattgatgggtatattgtagtaaattaataaactggcacattgaagat

SEQ ID NO: 961688 - DNA, 120 bp, Artificial Sequence
  ENSG00000230590_291 (sequence is synthesized)
tattcatcttcttatgtcagctgtgctgattgtccttataatttatctttgcacagttgactaattgtttccttaccaaatgtaattttagtcatagaaggtgcagtgaatactctcagg

SEQ ID NO: 961689 - DNA, 120 bp, Artificial Sequence
  ENSG00000230590_292 (sequence is synthesized)
actctgaaatatggttcatacccatggaaaaaagcctaacaaaaatactgatagcatggttccaaagcgggcatgaggaggaatatgcatttggaggtgttagagaagataatatgataa

SEQ ID NO: 961690 - DNA, 120 bp, Artificial Sequence
  ENSG00000230590_293 (sequence is synthesized)
taatcagttactatagttttgttaggagaacctccctcattttttaactgtacctagataacgaactttgtcagtttatttattttttttaatttcttaattttttgagatagggtctct

SEQ ID NO: 961691 - DNA, 120 bp, Artificial Sequence
  ENSG00000230590_294 (sequence is synthesized)
ggagtgcagtggcatgatcatggctcactatcctcaacttttcagtctcaagtaattctcccacctcagtcttctgagtagccaggactacagacatgtaccaccatgcctggctaattt

SEQ ID NO: 961692 - DNA, 120 bp, Artificial Sequence
  ENSG00000230590_295 (sequence is synthesized)
catgcctggctaattttttggatttttttttgtagagacggggtttctgccatgtatcacaggccgatctcaaactaggctggtctcaaactcctgggctaaaacagatcacccgcctga

SEQ ID NO: 961693 - DNA, 120 bp, Artificial Sequence
  ENSG00000230590_296 (sequence is synthesized)
gcctcccaaagtgctggggttagaggtctgagccaccgcacccagccaactttgtcattttagagatagcagcatatgctttatcttggtcctgaggcatggttgctggaggtcaagtct

SEQ ID NO: 961694 - DNA, 120 bp, Artificial Sequence
  ENSG00000230590_297 (sequence is synthesized)
atgcagttagctacgatgggccacggaaagattctaaacttcttgtagtcatccaagtaggtggattgcatgcactatttgtaattgaaaagtatgagttcctgtttttttgttgttgtt

SEQ ID NO: 961695 - DNA, 120 bp, Artificial Sequence
  ENSG00000230590_298 (sequence is synthesized)
agaaggaagggagaagacagaaggaagaagctccccctatacagaggcagagggaggggggatacaaagccgaaagaggaggtccctacctgctaaccataccagccagaacagtggttg

SEQ ID NO: 961696 - DNA, 120 bp, Artificial Sequence
  ENSG00000230590_299 (sequence is synthesized)
tgtaatcccaccactgtgccagctttctcaccacttctagtcaacgctgtactaggagttctaggcagtaaataaggaaaaaaaattaaagacaatgagattggagaagaaataaaattg

SEQ ID NO: 961697 - DNA, 120 bp, Artificial Sequence
  ENSG00000230590_300 (sequence is synthesized)
tccttatttgcatatgaaatgatcctatttgtagttctattatgaaatccttattcttaacctaagaatttcacagtaaaactactataacaaagtttaaggaagtaatcggatacaaga

SEQ ID NO: 961698 - DNA, 120 bp, Artificial Sequence
  ENSG00000230590_301 (sequence is synthesized)
ggaagtaatcggatacaagattaaaatcaactatatatctatatactagcaataaactgaaattaagagaactctattctgaatagcatcaaaaagagtaaaatacttaagaataaattt

SEQ ID NO: 961699 - DNA, 120 bp, Artificial Sequence
  ENSG00000230590_302 (sequence is synthesized)
tatacattaaaaactgcaaaatattgcatggagaaattgaagtagatatataaatggatgaaaatatatgaaaatccttgttcatggatttgacaatgcaatatataattatgaaggcac

SEQ ID NO: 961700 - DNA, 120 bp, Artificial Sequence
  ENSG00000230590_303 (sequence is synthesized)
gtctcatcatgttgatctataaattcaatacaatccctatcaaaatcccagaaggctttttttgtagaaaattgcaagctcattttaaatgcaaagaatgtggatcacctgaaataattt

SEQ ID NO: 961701 - DNA, 120 bp, Artificial Sequence
  ENSG00000230590_304 (sequence is synthesized)
tgaaaaacaacaaagtaggagatctgtcactacccaactttaaaacttactttaaaactaatcaacagagtataaaacttatgaaaaatgagacacagaaaataactgatgtaatggact

SEQ ID NO: 961702 - DNA, 68 bp, Artificial Sequence
  ENSG00000230590_305 (sequence is synthesized)
cctcatctctactagaaataacaaaaaaattaggcgggcgtactggcacatgcctgtaatcccatcta

SEQ ID NO: 961703 - DNA, 120 bp, Artificial Sequence
  ENSG00000230590_306 (sequence is synthesized)
ggcccacaaagcctttgtagaaaaagatctgtgcccactctggatcatcactcgacagtgatggtttcatttctcattccattcaccagaccagaaattcatatttatttacttcatttg

SEQ ID NO: 961704 - DNA, 120 bp, Artificial Sequence
  ENSG00000260930_0 (sequence is synthesized)
gatttgcttctgagcactagaaagctcaactagctcagcagctctttatgacctctggcacagacagcaaattccttccagctcagctcgtggagctgggctctgtactgccttaaaacc

SEQ ID NO: 961705 - DNA, 120 bp, Artificial Sequence
  ENSG00000260930_1 (sequence is synthesized)
agccccggctcctcaattaccttctgcccttattcatgccctgccaattcctttttgctggaatctgaatgaagccactgcatatgccaaggctgagaatcgcttgagaggacttatggg

SEQ ID NO: 961706 - DNA, 120 bp, Artificial Sequence
  ENSG00000260930_2 (sequence is synthesized)
ccttttccttgaaggaaaagatggcacttggaacttggccggtggaagcatcattcagatatgattcattacaggtaagagaaagaagacaggaatctgcagaagaaatcttcccataag

SEQ ID NO: 961707 - DNA, 120 bp, Artificial Sequence
  ENSG00000260930_3 (sequence is synthesized)
tctgatatttctggaaaaggggacagagttgtctgctctttgtgacttagactgggccagtgccgaaatcacaagtccacagagtatgcctgaaggaagatggttctcaatgcacccact

SEQ ID NO: 961708 - DNA, 120 bp, Artificial Sequence
  ENSG00000260930_4 (sequence is synthesized)
gggaaaatgcactcatcctcaaatgactgaggccgttgtttccttgccttttaagatctcatcccaggagggattcttctcactttctttcagtcctgaactcagaggattgtgctgctt

SEQ ID NO: 961709 - DNA, 120 bp, Artificial Sequence
  ENSG00000260930_5 (sequence is synthesized)
agggaagccacctcattaggacaactcattttcccttctctctagtagaggttactgccacaagctgaacacagtgaaaaataaactgtgaacttgaagagggaggagggaaggtggagg

SEQ ID NO: 961710 - DNA, 120 bp, Artificial Sequence
  ENSG00000260930_6 (sequence is synthesized)
tgtttatctcaagcttaagagaagttctgcaaaaggcgttttttagtttgcccagtttcatttctttaatccctggtttctctgtggttttgctgtatgcttgcccagacacgtcacatg

SEQ ID NO: 961711 - DNA, 120 bp, Artificial Sequence
  ENSG00000260930_7 (sequence is synthesized)
caccagccttataactagaaaagtctctggcctcacaagaagagggagatctccctgaaaataatctccgaagggttggtctggagcaggaaatgagagtgaaaggcacatctgtaggag

SEQ ID NO: 961712 - DNA, 120 bp, Artificial Sequence
  ENSG00000260930_8 (sequence is synthesized)
gggttccgcttgctcacactcggaatgtgctcgccctctcctcctctctttgatgacaggaagtgcacatactccaagctccatttcctcaatgtcccaggtgaaattatccccggagag

SEQ ID NO: 961713 - DNA, 120 bp, Artificial Sequence
  ENSG00000260930_9 (sequence is synthesized)
agggataaccctaactattaaaaagatgtatgcttgattcaatgttccaaataatattcagcacaaacgaatctctggacacctaagctgtaatagaccatgagatttggaagaggatga

SEQ ID NO: 961714 - DNA, 120 bp, Artificial Sequence
  ENSG00000260930_10 (sequence is synthesized)
ggaagagtactatccaaggaaccggctatcatcacaaattctgcagactcagacacctctcgacagcatgtctccaacaaccccgccccccattcagagccactcttccggaaatcaact

SEQ ID NO: 961715 - DNA, 120 bp, Artificial Sequence
  ENSG00000260930_11 (sequence is synthesized)
cacagttcacctcctgtctaaattctggtgtagaaatggaaacctcttgtaagatgtcatagatattttggctgaatcatcagcagaagttcttgtccatcccttagacttaggatggcc

SEQ ID NO: 961716 - DNA, 120 bp, Artificial Sequence
  ENSG00000260930_12 (sequence is synthesized)
tggttagtatggtttgatgggacaaagcttgaataccatgaccagaagcatttctgtgttctcctgtctaagggtatttgttatgtctcaggaaagctggatgactatctcattctctga

SEQ ID NO: 961717 - DNA, 120 bp, Artificial Sequence
  ENSG00000260930_13 (sequence is synthesized)
atggagaagaatactcacaacctgctccccacctcccactgtgaaatgccaatatggtggaaacagaagggagaagaaagaacagcggagacactgatcattcgaaaccaaagaagcagc

SEQ ID NO: 961718 - DNA, 120 bp, Artificial Sequence
  ENSG00000260930_14 (sequence is synthesized)
tcatgcataatggagagctatctgcatgcaaattgctaggagtacttcctacttttctgggatattgtatttagccctctgtactctattcagaagagttctgttccccaggccaagaag

SEQ ID NO: 961719 - DNA, 120 bp, Artificial Sequence
  ENSG00000260930_15 (sequence is synthesized)
gagtcactacagtgtcatttaactccttgctgctcctggaagcaagagtttccctacggacccaatgtgacttcgtctagtgccgctgccacttttgccagattatgtctctcaaacttt

SEQ ID NO: 961720 - DNA, 120 bp, Artificial Sequence
  ENSG00000260930_16 (sequence is synthesized)
cagatgttataggagaaagctgcttaatttctgagcatcaattttcaagaattttttttgaagagtgagaaaaaattccggaagcatgatttctgaaatgccccagagacagctgagata

SEQ ID NO: 961721 - DNA, 120 bp, Artificial Sequence
  ENSG00000260930_17 (sequence is synthesized)
atcctgtcatcattgagcctgagtgattcatcaatgattcaaatgaccaatcaaccaaaaacaaagaggcaaaagactttcatgatgttcatttgctagaatcaagatcatctagaaaat

SEQ ID NO: 961722 - DNA, 120 bp, Artificial Sequence
  ENSG00000260930_18 (sequence is synthesized)
aaatgactgatgtagaaaatgtaggatacagtttcataattagcctttagggggaataaaacctacagaagtaacgcctaccagaaataatcactgttgatcttatttatcatgtgtttt

SEQ ID NO: 961723 - DNA, 120 bp, Artificial Sequence
  ENSG00000260930_19 (sequence is synthesized)
actaggtaatggaaaaatacatctacttatggattacctagtaggttaaacactacaaccattttttaagttacaaactattttttaaactgagaaacactagtaaaaacataaaaaaag

SEQ ID NO: 961724 - DNA, 120 bp, Artificial Sequence
  ENSG00000260930_20 (sequence is synthesized)
caagccacagtctgggagaaaagatatatatctttgataaggaatttatgtccagaatacataaataactcccataaattgatactaagaggataatcagtaataaaaatataaaaaaca

SEQ ID NO: 961725 - DNA, 120 bp, Artificial Sequence
  ENSG00000260930_21 (sequence is synthesized)
aatttttaaagtgaacaaaatacatgaataggcacttcaccaaagaagacatctaaatggtccataaagacatgaaaagacactccaaagcactagtaatcagcaaattaaactagcgaa

SEQ ID NO: 961726 - DNA, 120 bp, Artificial Sequence
  ENSG00000260930_22 (sequence is synthesized)
ttaaaaccacaatgagatgctactacacacgtagtataatgccaaaaagtaaaaagtaaaagcacaaagttctggtgtgcttatccttgatgagagtgtaaaatggtaccaccactttgg

SEQ ID NO: 961727 - DNA, 120 bp, Artificial Sequence
  ENSG00000260930_23 (sequence is synthesized)
aaaattgtgtggcatttcctaatgcagttaaactattacatatgttccatcctaggtgtatactgaggataaataaatgcatatgttaataaaagactgcgggaataagaatgttctaag

SEQ ID NO: 961728 - DNA, 120 bp, Artificial Sequence
  ENSG00000260930_24 (sequence is synthesized)
cagctgtgttcataatagccaaaaagcagaaatatcacaaatgtctatctgcaagagagtacatatcagtggacatctatgttgttgaatgtatcaatagcacattcccttttattgctg

SEQ ID NO: 961729 - DNA, 120 bp, Artificial Sequence
  ENSG00000260930_25 (sequence is synthesized)
agtgttaatctactgtgtgaatacaagaaaaactcctcaacttccaagtaggtgccagaacctgtattagtatcctacagctactaccacaatctgtaacttgctttttcaataaaatat

SEQ ID NO: 961730 - DNA, 120 bp, Artificial Sequence
  ENSG00000260930_26 (sequence is synthesized)
tcccattacagagaaaagacacactcttgcccacttatggcctctgttctttatcacatgctttctccctagctgcagaagcctagaagaaccttgttcaatggattgtcacagagagag

SEQ ID NO: 961731 - DNA, 120 bp, Artificial Sequence
  ENSG00000260930_27 (sequence is synthesized)
ccgaaggcatggccacagaaagtagggcacagggagaagctaactccctaatttctttttcttttttcagttgagatatacatgatgctttcttgatcttttgctctgtttccaccagtt

SEQ ID NO: 961732 - DNA, 120 bp, Artificial Sequence
  ENSG00000260930_28 (sequence is synthesized)
gaactaaatgcacaagaatcaggagcatcttaacgccatggcctgaacatgataggtactgaagaactatggattaattatttttgattgattgattgattgaaaatgtgtcactataaa

SEQ ID NO: 961733 - DNA, 120 bp, Artificial Sequence
  ENSG00000260930_29 (sequence is synthesized)
aaagcaaatgtgaagcttacagagggatagtggtgcagttaaatgctaaagttaaatctccttttctggcagctgcagaaagattcctattctgcctcctatacttgctctgaggatatt

SEQ ID NO: 961734 - DNA, 120 bp, Artificial Sequence
  ENSG00000260930_30 (sequence is synthesized)
taaattgtagagctctaagtggctgccctcaatttgcttcaaagataataacgtcaccttacagtttataaagcaccttgttacatccctttggagacctacagcaatcccgtatgaatc

SEQ ID NO: 961735 - DNA, 120 bp, Artificial Sequence
  ENSG00000260930_31 (sequence is synthesized)
tggggattatttattctttttttcaaataagaaaactgaagcacagaggaaggagttacacattaaaagccagggaacttgtacattagttaaggtaatgctagcagctataacaaataa

SEQ ID NO: 961736 - DNA, 120 bp, Artificial Sequence
  ENSG00000260930_32 (sequence is synthesized)
atgcccaaatctcagaacttaatacaataaatcttactttttgattatcctatggcaccatacggtgttctgggtagatgaagagtcttccacaaggtatttcagggatctgtggctcta

SEQ ID NO: 961737 - DNA, 120 bp, Artificial Sequence
  ENSG00000260930_33 (sequence is synthesized)
ccttcctctagtcttcaaatcttctgcatccaacaagcagatggagaatgaggaattggaataggcattccttagtttaagctctttggtccagaactgaaacacataacatctgctgat

SEQ ID NO: 961738 - DNA, 120 bp, Artificial Sequence
  ENSG00000260930_34 (sequence is synthesized)
atctggatacaagacgatggtactgagaaataattgcagcctgggcagatgcttttcagtgcaattctattctaaagaaaaggcagactgaatgctacatgccagtaagtagaatctcca

SEQ ID NO: 961739 - DNA, 120 bp, Artificial Sequence
  ENSG00000260930_35 (sequence is synthesized)
ggactcaaaaacagacacatgacattaaatgcagtgctcttgctactacaacacactgcctctgtattcagagttgcctcagcctagatcatagttttggagtgagttagaacctgatcc

SEQ ID NO: 961740 - DNA, 120 bp, Artificial Sequence
  ENSG00000260930_36 (sequence is synthesized)
taacacttgacagtattaaaagggggactgtcaccagtgggacgaacccttgaactaagcatgaggagaacctggcttatgccctggctctgccctatctgactgattgagtaaatcatg

SEQ ID NO: 961741 - DNA, 120 bp, Artificial Sequence
  ENSG00000260930_37 (sequence is synthesized)
aaatcactctgcatttctttttttcaaagtcattgatacaaacctatacttctcaacttttcccaattaagctactagaatcttacattatttttccctaagatgctcagacattcctat

SEQ ID NO: 961742 - DNA, 120 bp, Artificial Sequence
  ENSG00000260930_38 (sequence is synthesized)
aatgttatacgagtccgtgttataagagcccctcaacaataagcggtagctgatgaaaccatatcaatacataattctatacaaaggtaagaaactggaaacattatttggccttcatag

SEQ ID NO: 961743 - DNA, 120 bp, Artificial Sequence
  ENSG00000260930_39 (sequence is synthesized)
accttgcttggataactgctcaatttctatgaaggtatcggaattattgggaggtgaaattggccactcccgtaactatttctgccgatctccaattgggaaccatagagcttcatgacc

SEQ ID NO: 961744 - DNA, 120 bp, Artificial Sequence
  ENSG00000260930_40 (sequence is synthesized)
taaggctcctaccagttaccatctgaaaatgtcttttgtctctgtaatcttgacaagtgaattccagtcacacccatcctaagaagagtgtgcctggaaatactggttttcttcttctca

SEQ ID NO: 961745 - DNA, 120 bp, Artificial Sequence
  ENSG00000260930_41 (sequence is synthesized)
agctgtctgaatccagaagtatatattaatctggaagtggctggaggtgatggaaaagagaggatgttgaaaaaagcacccttggtgaagtggagcagcaactcgctcagaagcctcatg

SEQ ID NO: 961746 - DNA, 120 bp, Artificial Sequence
  ENSG00000260930_42 (sequence is synthesized)
agtctgtaacatcgtttgaactccaaagctttcttcatcactcataaatccataatcatcactccacctcggaaaaatctcactctgctcttctctatcttctacatgaaatgtatcagg

SEQ ID NO: 961747 - DNA, 120 bp, Artificial Sequence
  ENSG00000260930_43 (sequence is synthesized)
aagaaaaattaacataaggaactttcaccagctttataaaatcttaacccttttgtacacttgtttctgataattttaagaactaatatcaataatcattaaaacgttgaaccgtgccca

SEQ ID NO: 961748 - DNA, 120 bp, Artificial Sequence
  ENSG00000230597_0 (sequence is synthesized)
gtggtaaacaggatagaaaatgtctctgctctagtggatcttaattcaaattaggcaggagatgatggtaactttgatgtgagcattggaggcagaagagaggagaatggatgcaggatg

SEQ ID NO: 961749 - DNA, 120 bp, Artificial Sequence
  ENSG00000230597_1 (sequence is synthesized)
ttactgagatgaggaagactccatttctcccagcagccctttaagttgggttcacctatcccaccctattcctgtatctattttattctatatctatacatctaacctttatctatattg

SEQ ID NO: 961750 - DNA, 120 bp, Artificial Sequence
  ENSG00000230599_0 (sequence is synthesized)
agatggaccatccccatagaagtggttcccaaacctggctgcccactggaatcatgaggaggatgtggagagcttttagaaaatgcccatgcttgttctgcccacagagatggttcctgg

SEQ ID NO: 961751 - DNA, 120 bp, Artificial Sequence
  ENSG00000230599_1 (sequence is synthesized)
tcagtcttcttatccagaaaacaggaaatctggactcttcaatgtcacagtccctttcggctttcatattcaggagttttcaggctttgttaaaagcaaaatgcccaggcccatcccctg

SEQ ID NO: 961752 - DNA, 120 bp, Artificial Sequence
  ENSG00000230599_2 (sequence is synthesized)
tagattcaggatgtggtgcaggctcaggccaggtttgggacttctgcaggtttcaacatcatccctgaggagttgtctgatgcctattaaagtgcaccctctatgacagtgtgtaccgaa

SEQ ID NO: 961753 - DNA, 120 bp, Artificial Sequence
  ENSG00000261327_0 (sequence is synthesized)
gggtccagtgtctccggcgtgtcctgcatctcggcagccagctcctctgcagctcaggccccgtgagtcacagccgcttcctcaaatgctttggctgaccgcatccccccgccccgccag

SEQ ID NO: 961754 - DNA, 120 bp, Artificial Sequence
  ENSG00000261327_1 (sequence is synthesized)
aaccctggatgccggagccctcccagcgagagccgtgtttattttactttacatacattttccaacacggagcggcttgcacacatgcagctcttaggcccgggccgcacgtctcagaag

SEQ ID NO: 961755 - DNA, 120 bp, Artificial Sequence
  ENSG00000261327_2 (sequence is synthesized)
ccccgtgtgcgactttgaccgccgcacgatcctctgccgggggaggtgggcccgctgcgctttgggagcacccgcgcccgacactgaggtctcggtgctgtgttcggcctcttcgtccct

SEQ ID NO: 961756 - DNA, 120 bp, Artificial Sequence
  ENSG00000261327_3 (sequence is synthesized)
gcgggtcccctctgggagcagaggcggtcggaaaaccctggggctgaagtgcaggcttcgggaggacgcgacctgccaagatcagctcccggcacgtgatgggagcctggctcaccttcc

SEQ ID NO: 961757 - DNA, 120 bp, Artificial Sequence
  ENSG00000261327_4 (sequence is synthesized)
cccagcgcacgatgggccgcagcctccccggtcggcctggcctgctggaaaggagcagctctgtttccagaggcttctggcgaagcccacggcctcccattgttggctgatttataagga

SEQ ID NO: 961758 - DNA, 120 bp, Artificial Sequence
  ENSG00000261327_5 (sequence is synthesized)
aagaggggaaaggccaagtgtggatgccattagcataacctaatccagaccccatgacaagtccaggatcctgcagggagagggcatccttgaacgtgaaggactggctttggaaacttg

SEQ ID NO: 961759 - DNA, 120 bp, Artificial Sequence
  ENSG00000261327_6 (sequence is synthesized)
acactccacaggaagacggaccacaaacagcagcagcctccggtgtcggcccagtgatccgggagctcagagttggctctgcagaaacccatgaaagaggatcctgaaagagcaagggcg

SEQ ID NO: 961760 - DNA, 120 bp, Artificial Sequence
  ENSG00000261327_7 (sequence is synthesized)
gcctccaggtgaaggtggtgggcggcctccaggtgaaggcggcctccaggtgaaggtggtcagcaccctccctttggccaagaggagactgcagtttcaactcaaagattattcctgaat

SEQ ID NO: 961761 - DNA, 120 bp, Artificial Sequence
  ENSG00000261327_8 (sequence is synthesized)
gatgcagcaagcttaaacttccttaaaaacaaacctctgggaagaggaaaacgaggcaagatgctgagaaaaagtcatctcccactctgcccttctctggcaaatcgaagtgtcctcttg

SEQ ID NO: 961762 - DNA, 120 bp, Artificial Sequence
  ENSG00000261327_9 (sequence is synthesized)
tgggaggcggtgggcagcgacactcctgttggacgtcagtgctctcgggatgggcccggccaccccggagcagaactcacttagggcctggtgcccctgtgcccagttctcagaacgtcg

SEQ ID NO: 961763 - DNA, 120 bp, Artificial Sequence
  ENSG00000261327_10 (sequence is synthesized)
gagtgctcagttctcagaacgccggagtgccccattcataacctgcagccccgttcatagcctgcagctcccctccttcctctcctcccggtcgtcagggagcacccccagctcccctcc

SEQ ID NO: 961764 - DNA, 120 bp, Artificial Sequence
  ENSG00000261327_11 (sequence is synthesized)
ccactctcaaaccctcctcctccctcccctctctcatttccctgtttgcaggatctcctcctgcccactctccagcccaggtcctcccctctcatctccaattctgcttcatgggccatg

SEQ ID NO: 961765 - DNA, 120 bp, Artificial Sequence
  ENSG00000261327_12 (sequence is synthesized)
acagcaggcaggccatggcctgctctcagcagtttgatcgatggactaaggagatcactcctatgagagtgaaaaagtcaaatgtgcctgagattcggatggggagctctcaaagctacg

SEQ ID NO: 961766 - DNA, 69 bp, Artificial Sequence
  ENSG00000261327_13 (sequence is synthesized)
aatcccgtctctattaaaaatacaaaaaagattagccggggagcacttgaacccgggaggtggaggttg

SEQ ID NO: 961767 - DNA, 120 bp, Artificial Sequence
  ENSG00000261327_14 (sequence is synthesized)
acagagtgagaccctgcctcaaaaaaataaaaaaataaaagtacgaggcccggtttaaatgcaggaggaatctggtgagcgagtttcactctgatgcaacagaaaagccaagccaagcct

SEQ ID NO: 961768 - DNA, 120 bp, Artificial Sequence
  ENSG00000261327_15 (sequence is synthesized)
ctctgatgcaacagaaaagccaagccaagccttggctgtgcctggtcttggccggggagccacaggcagggtctgctggtttcggtgtcaggggcacatccccaggaccacgtctgagat

SEQ ID NO: 961769 - DNA, 120 bp, Artificial Sequence
  ENSG00000261327_16 (sequence is synthesized)
gggaagtgccttgatggaaaactgatacctttttctttccgagtaactttagaacatgtcgcttcaaatataactaatatcctgatttcagtggacttgcatggaaggaaacgcaagttc

SEQ ID NO: 961770 - DNA, 120 bp, Artificial Sequence
  ENSG00000261327_17 (sequence is synthesized)
atttgccagtggggggtgaggactgggagagtggggagcagggtggggaagaggggagcattccacaagccgcaagagcctggacacctccagccttcaataaatagcatttgaatttgc

SEQ ID NO: 961771 - DNA, 60 bp, Artificial Sequence
  ENSG00000261327_18 (sequence is synthesized)
ggatggggagctctcaaagctacggattgcaagagtcaacaccgcctcaaaagtacaagg

SEQ ID NO: 961772 - DNA, 120 bp, Artificial Sequence
  ENSG00000248719_0 (sequence is synthesized)
gggccaggcgctccctccggcgccgcctgcctcgcagctttttcccccggcctgcccgcgccccgcagatcctgagcgcctaccccgggtggcaacgcctctcagagagcgtcccggccc

SEQ ID NO: 961773 - DNA, 120 bp, Artificial Sequence
  ENSG00000248719_1 (sequence is synthesized)
gcctcctcctaaagctcgggccctctgggactgctaggaggggaaaatcgtttcaggattggaaaggaaggtaccaaaatgattggagagggcctttccccgtttcactaggcacttgga

SEQ ID NO: 961774 - DNA, 120 bp, Artificial Sequence
  ENSG00000248719_2 (sequence is synthesized)
gaagctgtgacagagagctggacacccagcgcgtgcggaccccgtgcgtatttccccggagtccgcgttccgtgaaagggagaggggtgcggttagctccagggattctctagccctgga

SEQ ID NO: 961775 - DNA, 120 bp, Artificial Sequence
  ENSG00000248719_3 (sequence is synthesized)
gccaccgctgatttgcgcagctagttgcctgggggtgataaacgggcgtcgtctctcttcaggagcgccaacactaccaagcttccccctgcaaaattcagaaaggatgcgctttggtga

SEQ ID NO: 961776 - DNA, 120 bp, Artificial Sequence
  ENSG00000248719_4 (sequence is synthesized)
gaacttggctcagccttcccgtggcttgggagatgaggttggagtgagaatgtcaccagacctcggaaggggacataacggtacctcctagtcccaggacacggctggtcgcctgatctc

SEQ ID NO: 961777 - DNA, 120 bp, Artificial Sequence
  ENSG00000248719_5 (sequence is synthesized)
gtttagcagggcaggagcctgtgttcccatttcttactagctgggctgccgatgacctagctcagccttggttttcctccggttgaacaaaagctggcaagagctgcctcccggatcgca

SEQ ID NO: 961778 - DNA, 120 bp, Artificial Sequence
  ENSG00000248719_6 (sequence is synthesized)
ccacaggggaaccaggactgcatggcttcgaatcccagccctccccactcaggaaacattgctccccaaacggcacggatttctggacgcctccaccttaagacagctacttcagccaga

SEQ ID NO: 961779 - DNA, 120 bp, Artificial Sequence
  ENSG00000248719_7 (sequence is synthesized)
acgtgggacaggcactaacgggatatcacccttggggataaacacgctccagtttcctgtggacggtggaagaggaaagaacaggagaagctgccaaagggatggggtgtaggaagctca

SEQ ID NO: 961780 - DNA, 120 bp, Artificial Sequence
  ENSG00000248719_8 (sequence is synthesized)
tccttgcacgtttagactagggaagaagagaatattagggatgggggaggggggaggatgggaagtgtagtttttccccttccttcctttcatttcagatcccatttagtgcttttattt

SEQ ID NO: 961781 - DNA, 120 bp, Artificial Sequence
  ENSG00000248719_9 (sequence is synthesized)
ctttaattttgaaaactatttccctttcctgaatctggatgcgggcagggagcgaactcaaggaaatgatgagcatggatgagagccaggggacaggagatatgtcctgggaactcaaac

SEQ ID NO: 961782 - DNA, 120 bp, Artificial Sequence
  ENSG00000248719_10 (sequence is synthesized)
tctgctgcttcgccactgtctccgagatgccctgagccttagcccaatgtaaagggagctgattgggtgtatgggcagtggcgggtggtctgagtaagaaataaaatgagggcaagccag

SEQ ID NO: 961783 - DNA, 120 bp, Artificial Sequence
  ENSG00000248719_11 (sequence is synthesized)
atctactcccatcccaaagcattaaaagacacacctccccacccctcagctgtcttgtgtccggcagaatggcattatgtaaaagatctggcatgtcacccagtggcacatctggtaggt

SEQ ID NO: 961784 - DNA, 120 bp, Artificial Sequence
  ENSG00000248719_12 (sequence is synthesized)
gtagatggcattcattagcacggggcttctactctgcagcatgccaaagctctgacagagatgcccgctgccaatcattcattggctgccaatccccaagcgcggccgggcgggatggct

SEQ ID NO: 961785 - DNA, 120 bp, Artificial Sequence
  ENSG00000248714_0 (sequence is synthesized)
atgcgcagccctcgggccggcccgggcgcaccttttctgtctcctgccacattgtgagcgctccgccgcccagataaccgccggctccccgcgccgcccccgccttctcccactccgccc

SEQ ID NO: 961786 - DNA, 120 bp, Artificial Sequence
  ENSG00000248714_1 (sequence is synthesized)
actgccgggagcccaggggatgatgcagcaagaagacccacaccagatgagggcgccttgatattggatttcccagcctccagaactaagcctgggacttgcctctgtgatctggtgctt

SEQ ID NO: 961787 - DNA, 120 bp, Artificial Sequence
  ENSG00000248714_2 (sequence is synthesized)
tggagggccttgggcctcagggctagcaaggtccctttctggagattccagttcctctgcccgccctcctttacctctttctcctcacacatctgtctgagggatggggatgagggctgc

SEQ ID NO: 961788 - DNA, 120 bp, Artificial Sequence
  ENSG00000248714_3 (sequence is synthesized)
caaccaatgttaccacttgacagaccacaagagggctggttccagtgcctcccttgttcagctgctgacactgcagcttggcagtcattgaaggcaatatttagctcctacatctgacct

SEQ ID NO: 961789 - DNA, 120 bp, Artificial Sequence
  ENSG00000248714_4 (sequence is synthesized)
gattggaagatcaggcttctgtcgtcctggtttcctggccttggatagttcttcactaacttttattcattaaggcagtgggcagaaagcagcagaaccctgttttttctttttttgggg

SEQ ID NO: 961790 - DNA, 120 bp, Artificial Sequence
  ENSG00000248714_5 (sequence is synthesized)
tttttgttgttgttgttgttgttgttttgtttttttttgaaacagggtctccctctgtcacccatgctggagtgcagaggttctgtcataactcactatagcctcgacctcctgggctca

SEQ ID NO: 961791 - DNA, 71 bp, Artificial Sequence
  ENSG00000248714_6 (sequence is synthesized)
tcactatagcctagggaccacaggtgcatgccactatgcctaactaatttttgtatttttttgtagagatg

SEQ ID NO: 961792 - DNA, 65 bp, Artificial Sequence
  ENSG00000248714_7 (sequence is synthesized)
gaacctgttttttgtttgtttgtttttgttttgtttgtttgaggcggagttttgctcttgttgcc

SEQ ID NO: 961793 - DNA, 120 bp, Artificial Sequence
  ENSG00000248714_8 (sequence is synthesized)
aaaattcttatttaaaagttctgtacattttgagaattcttaaaaccttcacacatttaatttaaatagcagcagagatatctggttcctggtaatgtgaacaggatggcttgatacaag

SEQ ID NO: 961794 - DNA, 120 bp, Artificial Sequence
  ENSG00000248714_9 (sequence is synthesized)
ctccctgctcactgcatttcctcacttcctaaattcctagggatgtacctccagtgaataatagtttttaccacctgtacatatacagggtcagcggccatggctccttgctcacccatt

SEQ ID NO: 961795 - DNA, 120 bp, Artificial Sequence
  ENSG00000248714_10 (sequence is synthesized)
aactaagatcacatcctacatacagtaccagacttagagccagagccctggtcatggcctcctaggttctcacacttgacttttactcaatcatttcaccatttaggctttataaaaagg

SEQ ID NO: 961796 - DNA, 66 bp, Artificial Sequence
  ENSG00000248714_11 (sequence is synthesized)
ttttactcaatcatttcaccatttaggctttataaaaaggggagacaggtggatgacctgaggtca

SEQ ID NO: 961797 - DNA, 120 bp, Artificial Sequence
  ENSG00000248714_12 (sequence is synthesized)
tgaaactccatctcaaataaataaataaataaaatgggggaattatatgactgttagggtcctccagatctgatacccaggactgtaatctaaagacttgattatgttcattaatacatg

SEQ ID NO: 961798 - DNA, 120 bp, Artificial Sequence
  ENSG00000248714_13 (sequence is synthesized)
tctaaagacttgattatgttcattaatacatggcaatttcattcctttcctaagaattactatccaaagatcatccctaagcccttcctacaagaaactgccccttttacagaatgaata

SEQ ID NO: 961799 - DNA, 120 bp, Artificial Sequence
  ENSG00000248714_14 (sequence is synthesized)
agaaggtctcgaatcctgaagacagacttcgaggggatgatgcagcaagaagacccacaccagatgagggcgccttgatattggatttcccagcctccagaactcaaataaaaatgcagt

SEQ ID NO: 961800 - DNA, 120 bp, Artificial Sequence
  ENSG00000248714_15 (sequence is synthesized)
acttctctatgacaccctactgcagccctttgctggataccatacaaagcaaattgagcagatgtgttctctgccctctgaaagtttggactcaaatggacagccacaattctggcaaac

SEQ ID NO: 961801 - DNA, 120 bp, Artificial Sequence
  ENSG00000240541_0 (sequence is synthesized)
gcaggatggatttcagtgttcagcgtccctggacatctgcctctaaaacaaatctgcaccacaacagaggtggcatcagtcaacacaaagggctcagatcacagctgcctttggggagaa

SEQ ID NO: 961802 - DNA, 120 bp, Artificial Sequence
  ENSG00000240541_1 (sequence is synthesized)
tgacaaaaactgttcagggttcctgggtaatacgtatccagtttctgtgcattcaggggaagaggagcgtggagcagaaggagagtgggcacatgcaagtcactctgatgccgtcattta

SEQ ID NO: 961803 - DNA, 120 bp, Artificial Sequence
  ENSG00000240541_2 (sequence is synthesized)
gctccgttgtgcaaagctgtttacagaaaggttggggtgaaactctccactcctgctttcataccatttgaagttcagaccagtgagatttccatcagttgggagttgaagatgccacaa

SEQ ID NO: 961804 - DNA, 120 bp, Artificial Sequence
  ENSG00000240541_3 (sequence is synthesized)
ggacaagaactgaggatggtttgctcagagctgatttttagacaccattttccagggatccctggtgacagaggagcattttttttgtggttgagttctgaattaaaaagtgtcgtacta

SEQ ID NO: 961805 - DNA, 120 bp, Artificial Sequence
  ENSG00000240541_4 (sequence is synthesized)
gagatgcagataggatgatggaactcacggacaggggaacaaaggtctggaaattcggaatgtcatactccacattttgcatttttgactctttctatccatatactttattcttcttag

SEQ ID NO: 961806 - DNA, 120 bp, Artificial Sequence
  ENSG00000240541_5 (sequence is synthesized)
tgcagtctcattgtctctggttctcagttcacacacaaaaaatatggctactgacagttctgaagtttatagttttttcagttcaagagattcatcccaagtccagattgtgagagaagg

SEQ ID NO: 961807 - DNA, 120 bp, Artificial Sequence
  ENSG00000240541_6 (sequence is synthesized)
gacatgcattggacaagaccaggccaggtgcccatgcctgtggggtcaggtgcccatgcctgtggggcctgcataaacatggctgctgggagccatccctgcaaccaggtacatgcagga

SEQ ID NO: 961808 - DNA, 120 bp, Artificial Sequence
  ENSG00000240541_7 (sequence is synthesized)
gaagtcattctcaggaaaaggtgagtgtgggaccaggcagggaagccagtttctgtcctttatttggaaccataatcaaggcagacaaccacagtaaagagatgcagaggcagggagtag

SEQ ID NO: 961809 - DNA, 120 bp, Artificial Sequence
  ENSG00000240541_8 (sequence is synthesized)
tgtaaaaccaccttacacacagcttcctggctttcccttcactttaggttgtagctcaagttattcttgggctaaaaaataagctctgttggcccaattaaaccagaattaatcaccaat

SEQ ID NO: 961810 - DNA, 120 bp, Artificial Sequence
  ENSG00000240541_9 (sequence is synthesized)
tccccatctttatctggtaattttagttcaacattgctcagctgatggctcattaagccaagaactctcccaggtctcagttaccattttcagacaagacacctcctggggtgcctgccc

SEQ ID NO: 961811 - DNA, 120 bp, Artificial Sequence
  ENSG00000240541_10 (sequence is synthesized)
tgtggtctgaagctcaagatgtggctctgggtctcccttcctgagggctagctacccagaagggctggtgtgacttcctcttgaatgggtgagctgaaggcatccagggcacctagggca

SEQ ID NO: 961812 - DNA, 120 bp, Artificial Sequence
  ENSG00000240541_11 (sequence is synthesized)
gaccatttgattttcaacagaaaacggtctatggttttctaaaacgacacaccctgattcagcccaagggaaacagaatgtctgtgggtgaggccaggaatctgcattttaagtaagtcc

SEQ ID NO: 961813 - DNA, 120 bp, Artificial Sequence
  ENSG00000240541_12 (sequence is synthesized)
tccaaatgactccagtgcccaagcagagttgaagtccactgatgtaggtggcccaactttctagttttatacatgaggctacgcaagtccagcaaggttcatttcagttgagaagaaaaa

SEQ ID NO: 961814 - DNA, 120 bp, Artificial Sequence
  ENSG00000240541_13 (sequence is synthesized)
ccattgattaaaataaaaaaaaaaaaccctaaaaactttaaactgatgaattcatgtgtttgcaccttttgaacccggttcaccaagtggttctctttgtgaggcaggagaagtagcagg

SEQ ID NO: 961815 - DNA, 120 bp, Artificial Sequence
  ENSG00000240541_14 (sequence is synthesized)
ccttcagacgaaatccttgggacaggcaaaaccaggggcaggatgtgagaaacagcctcagtcataggcaacagggaaaatgattaatcttgaacaaggcattgactgtgcaactcctcc

SEQ ID NO: 961816 - DNA, 120 bp, Artificial Sequence
  ENSG00000240541_15 (sequence is synthesized)
acaagataaagaatcaacaggaaagcctaacatgactttccagtaactgccaagtgtccgagatgcaacagccctggttgaggctttgaaagacagtgagctgtgcccctgctccatgca

SEQ ID NO: 961817 - DNA, 120 bp, Artificial Sequence
  ENSG00000240541_16 (sequence is synthesized)
gctgtctggacagcttccaatctgagagctctgtgttcatttctacctttgtgctgatttaatttacaacctggggcaaatctcctgagctcatttccttgtctattaaatacaaggtgt

SEQ ID NO: 961818 - DNA, 120 bp, Artificial Sequence
  ENSG00000240541_17 (sequence is synthesized)
gggaaaactacagagcaaacttctttactctgcctacagcaagctctgcaggatggatttcagtgttcagcgtccctggacatctgcctctaaaacaaatctgcaccacaacagaggtgg

SEQ ID NO: 961819 - DNA, 120 bp, Artificial Sequence
  ENSG00000240549_0 (sequence is synthesized)
ttaattaatgtactagactttatcctcctgcattttgaggatcaccccacttctgacttccctttatttttcctaatctcaatgttctttttgtcttgttttctaatccgtttaattttt

SEQ ID NO: 961820 - DNA, 120 bp, Artificial Sequence
  ENSG00000240549_1 (sequence is synthesized)
atattttctcattacagtgaactgccttaaatgttttctagcataaggcatataaataacgtattaagggtgacagcagcaatatgcataaaataatatggctagtaggcagaaggtcaa

SEQ ID NO: 961821 - DNA, 120 bp, Artificial Sequence
  ENSG00000240549_2 (sequence is synthesized)
aaggcaggaaaaggcaacctgtgcagattaagagagaagtcctcattgtctctcaccagggccactgcagaagtagcagacacaggacgcataatagtgaagagcaggaactcggcaggt

SEQ ID NO: 961822 - DNA, 120 bp, Artificial Sequence
  ENSG00000240549_3 (sequence is synthesized)
ggtctccctgcctttgaccctctataactactatctgtgcgaccttaggcaagctaacctgtgtctgtttcatctgtaaaatggggataacaattagaataatacctaacagcactacgt

SEQ ID NO: 961823 - DNA, 120 bp, Artificial Sequence
  ENSG00000240549_4 (sequence is synthesized)
aaacgttagtaagtggcgaggaaacttagctcctcattttctcttcctctaatcattctgcacataacagagacagtgtgtatgtgtgtgtgtgttttttttttttttaatgagacacgg

SEQ ID NO: 961824 - DNA, 120 bp, Artificial Sequence
  ENSG00000241636_0 (sequence is synthesized)
agagactcacattgacaatctaaggcttgtaaagaagcaccataacattacagaaacagacatgagatacgacgctgtagtgaagaacctccatattccatcaatccagattggaagaag

SEQ ID NO: 961825 - DNA, 120 bp, Artificial Sequence
  ENSG00000241636_1 (sequence is synthesized)
acaaagaacacaagaccgaaactgaatccttgggtatgttctggaataaacctggattcctagggagaaaagagatccctgaaatgaaaattgccgtaaggagccctgaaaaaatgggat

SEQ ID NO: 961826 - DNA, 120 bp, Artificial Sequence
  ENSG00000241636_2 (sequence is synthesized)
aacattttaccagcgatcggagcatcccttagcccagtcaaattgacccattaaataagccctcacactctgctataaggcatctgcactacacataaattgatattgttatatgaaggt

SEQ ID NO: 961827 - DNA, 120 bp, Artificial Sequence
  ENSG00000241636_3 (sequence is synthesized)
aggcttatatttgttaaaaatgtacaaaatttacattatagatttgatggtaaataccaaaagatttaataaggaaacaaaactgattaaagaaacaacataaaatcaaatgaaatggtc

SEQ ID NO: 961828 - DNA, 120 bp, Artificial Sequence
  ENSG00000272347_0 (sequence is synthesized)
cggccgcacctcctcctccatccggagaccaggcccctgccccgcccgcggctgaggagataaggagaggctgatttgaaaagctgcgaggacgcgcattttaacctccagggacggctt

SEQ ID NO: 961829 - DNA, 120 bp, Artificial Sequence
  ENSG00000272347_1 (sequence is synthesized)
gagccccgccctgcctttcgaaagtgctgggaacggattttatcagcaggcgaaactgtcctcaaagctccgtggcccagcaaaaggcagggcggggacgcccatggcccccgggccggc

SEQ ID NO: 961830 - DNA, 120 bp, Artificial Sequence
  ENSG00000272347_2 (sequence is synthesized)
cccctacgggctcagcctccgagtccccggactggacggcgcgggcgtcgggggtccaggctgctccggccgccccgctgtgagcccgagctgcgctgcagccgctggtcacgtatgggg

SEQ ID NO: 961831 - DNA, 120 bp, Artificial Sequence
  ENSG00000272347_3 (sequence is synthesized)
gtcccccgcgtcctttcctccaggccggcagtgggctggggccgcaagtgtccccgcgtacactggccgtcccccagggacaaggacagttgccctgaaaagctgcggctcccgccagaa

SEQ ID NO: 961832 - DNA, 120 bp, Artificial Sequence
  ENSG00000272347_4 (sequence is synthesized)
ggtcccagctcgggctgccccgggcagacgcagagcgaaaggcgaggcaggacgggcctgaggaacctggaagtccctgcagggcccctggaagaggcaggcagggggctgccccacaga

SEQ ID NO: 961833 - DNA, 120 bp, Artificial Sequence
  ENSG00000272347_5 (sequence is synthesized)
cgggcccaggagaggacacgccgggctggcatcacgtgaggagagcgtccagcaaaccacactggtcccgaggcctccacgaaaagtagatgggcatctcgcggcagccaccactgaggc

SEQ ID NO: 961834 - DNA, 120 bp, Artificial Sequence
  ENSG00000272347_6 (sequence is synthesized)
ccactggccccgcagagggcaaaggcatgcacacgccagaagggaacgtcaaggggagcaaagagaaccccttcctcctggaatggctgaggggaccaggccgctctgtgatgcagacat

SEQ ID NO: 961835 - DNA, 120 bp, Artificial Sequence
  ENSG00000272347_7 (sequence is synthesized)
ctcaaggggctctcccttgcactaccccatgtggactttaactcccaatttggaaagtaatgatgtcatcttctgtggtctcagggtcctagtgagtgtgtgaggataatagtgttacat

SEQ ID NO: 961836 - DNA, 120 bp, Artificial Sequence
  ENSG00000272347_8 (sequence is synthesized)
gttatgcaaagggattgtgaactggcatgggggtcaggtttgcagggcctggagctggtgactccagctctagaacaaccccaggccggctctgccctacccaggagagatggtcatagg

SEQ ID NO: 961837 - DNA, 120 bp, Artificial Sequence
  ENSG00000272347_9 (sequence is synthesized)
ggaaagagtccagtgggcattggaggcgtaggggccacttagggttgccctttgagctgacagtggggtacagattcagctctgcagtgcccctaacccccactgcggatccacccgggg

SEQ ID NO: 961838 - DNA, 120 bp, Artificial Sequence
  ENSG00000272347_10 (sequence is synthesized)
gaatgccctgaggacacgcgaggtgagggtcaggcgtgtcctgctgggtgggaactccggaccctctgggaaggaatgggtgaatcggctgctctcactctccagctcccactcagagga

SEQ ID NO: 961839 - DNA, 120 bp, Artificial Sequence
  ENSG00000272347_11 (sequence is synthesized)
gccctgggggatcccattcctctacctcagaggactcccaggacactgtctgagcccagtgggaggaggacacacagccctgatctgccagtcagtggggctgagggtcaagctgtgcgc

SEQ ID NO: 961840 - DNA, 120 bp, Artificial Sequence
  ENSG00000272347_12 (sequence is synthesized)
cttgtgtgctggcggcgtcccgcctgggatggatggagatggtctgtactttcatgggtgaattgtagggcccctgaattgtatgtatctcaataaagctgctaaagaataaatgtaaaa

SEQ ID NO: 961841 - DNA, 120 bp, Artificial Sequence
  ENSG00000272342_0 (sequence is synthesized)
ctggctgggccgcgccccctcgccaggctctgagggaagatcttcactgcctctcccgccctcctggctgggccacgccccctcgccaggctctgagggaacatcctcgctgcctctcca

SEQ ID NO: 961842 - DNA, 120 bp, Artificial Sequence
  ENSG00000272342_1 (sequence is synthesized)
gctctcctggctgggccgcgccccctcgctaggctctgagggaagatcctggctgccttcctggctgggccgcgccccctcactaggctctaacccaagatcctcgctgcctctccagct

SEQ ID NO: 961843 - DNA, 120 bp, Artificial Sequence
  ENSG00000272342_2 (sequence is synthesized)
agtcagctcccatcttcaggcccttcgctgagcccacctgcagggtccgtggaagggacattcacaggctccgccgactgcaacatgggtatctgtaggaggccattatttagtctacaa

SEQ ID NO: 961844 - DNA, 120 bp, Artificial Sequence
  ENSG00000272342_3 (sequence is synthesized)
tagggccactaactactctctagtttacattcaaaatttttcttacttacatgttttttttttctgtgactgctgcatggggacatgaaagtaatgaataaataaaaagctcattcctcc

SEQ ID NO: 961845 - DNA, 120 bp, Artificial Sequence
  ENSG00000272343_0 (sequence is synthesized)
tcttgggtctttgtgcgtgtttttatctgtaaaattgctaagagtggaatttctaggttaaagctttttgcgtttaaaaatgtgtagatactgcaaatcaattgccctccaaaaaggacc

SEQ ID NO: 961846 - DNA, 120 bp, Artificial Sequence
  ENSG00000272343_1 (sequence is synthesized)
acaccaatttatacgcttataaacaaagcctgtgagtgtttcttacctgacaccctcagtcccactggatactttaaaactctttcatccttaccaatctaatcagtgaaaaatggaact

SEQ ID NO: 961847 - DNA, 120 bp, Artificial Sequence
  ENSG00000272343_2 (sequence is synthesized)
tattggttttcccttgctcatttaaaaaatgttggtgtgaatgatttggggacccttggtctatcaaagaaattacctttttgtcgtatgtattctatgtgtattccctagtttgtcttt

SEQ ID NO: 961848 - DNA, 120 bp, Artificial Sequence
  ENSG00000272343_3 (sequence is synthesized)
taactttaatttctgcttgtaaagatatttctgtacagtgttttacatttcaatgtaattaagtggatcagtttttttatttatgatttctggagctcaataaatattaagtgaatccaa

SEQ ID NO: 961849 - DNA, 120 bp, Artificial Sequence
  ENSG00000272341_0 (sequence is synthesized)
catattacacccttacttaaagtgtagttttcaaagtcgccacagcagcacttgggagctttttagacattcagagtcaagggttctaccccagacataccaaatcagaatctgcctttg

SEQ ID NO: 961850 - DNA, 120 bp, Artificial Sequence
  ENSG00000272341_1 (sequence is synthesized)
aaccaggcccctgggtgatttctaaacacattatcatgtgaagaacactggtctataccacagggatcaacctaaataaatttgggcacaagtgcagaagttaattcctctatttatttc

SEQ ID NO: 961851 - DNA, 120 bp, Artificial Sequence
  ENSG00000272341_2 (sequence is synthesized)
ttttttgctcctttttagtaagtacagcccttattaatttgtgcttttcaatgaaaaattattatgttatatgctttggataaatactactgcactgtaagtgcacacatctgcatcatt

SEQ ID NO: 961852 - DNA, 120 bp, Artificial Sequence
  ENSG00000272341_3 (sequence is synthesized)
attgccaaaaaagaatgctctgctgaggaatgtactggggtcttgaacatgaacattttcttcatggcagcagagggagcacaagagtgcttaataaaaccagtgcacaggtctctccaa

SEQ ID NO: 961853 - DNA, 120 bp, Artificial Sequence
  ENSG00000272341_4 (sequence is synthesized)
atcatgacagattttacattgtagtatatgttttcattggaagtagcctgttatgtagttcaaaatgaagcaaatcaactgagcaaacacagataggcttaccaggtcataacaactatg

SEQ ID NO: 961854 - DNA, 120 bp, Artificial Sequence
  ENSG00000272341_5 (sequence is synthesized)
taactgaacagattgaaagttgaataaaataaagataaacttctttagagttttaggcttgaattcttaaaagaaagtggacctcaaaagtgaaaaagatgccttagctttgctcaaaaa

SEQ ID NO: 961855 - DNA, 120 bp, Artificial Sequence
  ENSG00000272341_6 (sequence is synthesized)
caaagataacacaacacagaatcaggcaaccctaagatgccttagctttactcaaaaacaaagataacacagaatcaggcaaccctaatagtagctcctgtttatctaaaaacagagtca

SEQ ID NO: 961856 - DNA, 120 bp, Artificial Sequence
  ENSG00000272341_7 (sequence is synthesized)
gttcactggaccctacatcaggtaacttaatttcatttggtgtcatacatgttggttaaggtccatgcgccttttgctgtgtttacactcagaataattttaggggtttctccttaatgc

SEQ ID NO: 961857 - DNA, 120 bp, Artificial Sequence
  ENSG00000272341_8 (sequence is synthesized)
ttgcagtggtgaggatttaggtttcagttatacctacgtagtatttcatacttttcactactcttccatattgcatcctcaaaaactcccttgaagcagataacatacttggtaaaagcc

SEQ ID NO: 961858 - DNA, 120 bp, Artificial Sequence
  ENSG00000272341_9 (sequence is synthesized)
aagtatccaaaaagttatggaaccacatcgtgctttcataacattgagtcatttaattgtttcagtagtgctttgaggtattcataaatgagggaaattatacagactaaagatccagag

SEQ ID NO: 961859 - DNA, 120 bp, Artificial Sequence
  ENSG00000272341_10 (sequence is synthesized)
aggtttttcaaagttattcttagataatatgtttatatatttattatttatttacaagcagtcacttactctgcatctacaataactaagacttgagaatataaaattgagtaagacatc

SEQ ID NO: 961860 - DNA, 120 bp, Artificial Sequence
  ENSG00000272341_11 (sequence is synthesized)
ttagtgtgcaaggagatcagagcagaacagatcttacctttggaaaactgttaatttttaccacgttgaaacacaaagattcatagttgatgcgatccagcacctgccagaatcatagca

SEQ ID NO: 961861 - DNA, 120 bp, Artificial Sequence
  ENSG00000272341_12 (sequence is synthesized)
atcagacttccaaatatgagaatcaaacattagaatcattaaaaatttgagaggcgggggggacagttgtacaactcttgagcaaaagttgacttataagctaatattaatatttcaaat

SEQ ID NO: 961862 - DNA, 120 bp, Artificial Sequence
  ENSG00000272341_13 (sequence is synthesized)
ttgtacgacaaacaaatgtgaagatataatgtgtattttatttgaatgtcttccctatcacaaaatcacatgagtaagttgagttggtaaacatttatttatttttatcttttctaaaat

SEQ ID NO: 961863 - DNA, 120 bp, Artificial Sequence
  ENSG00000272341_14 (sequence is synthesized)
gctgaaaagaatttttctcccacactaaagagggtttgccaagtttctgcctggagcaatttgttatggctgtgtaataaatcccagaaagtttgaatttttaatggaaacactgacaga

SEQ ID NO: 961864 - DNA, 120 bp, Artificial Sequence
  ENSG00000272341_15 (sequence is synthesized)
ataaagagggtgtaatcctacatatgtcatttaaaaatctgagcaaaccatagtgtgcttgcaaaacaaatatactttccttagattgcactcacaaataaggctggggagaccacaaaa

SEQ ID NO: 961865 - DNA, 120 bp, Artificial Sequence
  ENSG00000272341_16 (sequence is synthesized)
gtaaaacaaactcaaaagtgaaaaacactcacacaatagactctgaggtcagctcaccacacccagactaaagtcactgggctctgtgcgtgtcaccaagactcttaaaagacatacttc

SEQ ID NO: 961866 - DNA, 120 bp, Artificial Sequence
  ENSG00000272341_17 (sequence is synthesized)
tgaatcatctttcttgaccctccaccaaactgtagcaagacaggcttcctgggaatgaaaatgacattagcattagtcaagagtgaaattaaagtcattgtactcaaacatctgccaaca

SEQ ID NO: 961867 - DNA, 120 bp, Artificial Sequence
  ENSG00000272341_18 (sequence is synthesized)
gtctgtgatttcatagtacccacctctgaaataagactctgtctacaattaaaaacaaagaaaaaaaggtactttaggtcttcactatccactatgtctactgagcacttgaaatgtgtg

SEQ ID NO: 961868 - DNA, 120 bp, Artificial Sequence
  ENSG00000272341_19 (sequence is synthesized)
ttgaaatgtgtgattagtccaaattaacatgtgctgtaagtgtgaaatattcctcagattttaaaaacttggtataaaaaatacatattttacatataatatatattattcattattcct

SEQ ID NO: 961869 - DNA, 80 bp, Artificial Sequence
  ENSG00000272341_20 (sequence is synthesized)
cacacatgtaatatctccatttttacattgattaaatgttgaaaatattgggttattttttaatagtgtacattgggtta

SEQ ID NO: 961870 - DNA, 120 bp, Artificial Sequence; identical to SEQ ID NO: 109973
  ENSG00000277196_0 (sequence is synthesized)

SEQ ID NO: 961871 - DNA, 120 bp, Artificial Sequence
  ENSG00000277196_1 (sequence is synthesized)
ttgtgaagtctaagcccttgtctggcatttgtcaggaatataggcgcacacttaagcggcccgggcgggtaccgccgtcccgccatggctctgaggcgcgccctgcccgcgctgcgcccc

SEQ ID NO: 961872 - DNA, 80 bp, Artificial Sequence
  ENSG00000277196_2 (sequence is synthesized)
tgcattccccgcttcgtcccgctgtccacggcgccggcctcccgcgagcagcccgcagcgggcccagcggccgtgccagg

SEQ ID NO: 961873 - DNA, 120 bp, Artificial Sequence
  ENSG00000277196_3 (sequence is synthesized)
gtggacttcggcaacgcgcaggaggcgtaccgcagccggcgaacctgggagctggcgcggagcctgctggtgctgcgcttgtgcgcctggcccgcgctgctggcgcgccacgagcagctg

SEQ ID NO: 961874 - DNA, 120 bp, Artificial Sequence
  ENSG00000277196_4 (sequence is synthesized)
ctgtatgtttccaggaaacttctaggacagaggctattcaacaagctcatgaagatgaccttctatgggcattttgtagccggggaggaccaggagtccatccagcccctgcttcggcac

SEQ ID NO: 961875 - DNA, 120 bp, Artificial Sequence
  ENSG00000277196_5 (sequence is synthesized)
tacagggccttcggtgtcagcgccatcctggactatggagtggaggaggacctgagccccgaggaggcagagcacaaggagatggagtcctgcacctcagctgcggagagggatggcagt

SEQ ID NO: 961876 - DNA, 120 bp, Artificial Sequence
  ENSG00000277196_6 (sequence is synthesized)
ggcacgaataagcgggacaagcaataccaggcccactgggccttcggggaccgcaggaatggtgtcatcagtgcccgcacctacttctacgccaatgaggccaagtgcgacagccacatg

SEQ ID NO: 961877 - DNA, 120 bp, Artificial Sequence
  ENSG00000277196_7 (sequence is synthesized)
gagacattcttgcgctgcatcgaagcctcaggtagagtcagcgatgacggcttcatagccattaagctcacagcactggggagaccccagtttctgctgcagttctcagaggtgctggcc

SEQ ID NO: 961878 - DNA, 120 bp, Artificial Sequence
  ENSG00000277196_8 (sequence is synthesized)
aagtggaggtgcttctttcaccaaatggctgtggagcaagggcaggcgggcctggctgccatggacaccaagctggaggtggcggtgctgcaggaaagtgtcgcaaagttgggcatcgca

SEQ ID NO: 961879 - DNA, 120 bp, Artificial Sequence
  ENSG00000277196_9 (sequence is synthesized)
tccagggctgagattgaggactggttcacggcagagaccctgggagtgtctggcaccatggacctgctggactggagcagcctcatcgacagcaggaccaagctgtccaagcacttggta

SEQ ID NO: 961880 - DNA, 120 bp, Artificial Sequence
  ENSG00000277196_10 (sequence is synthesized)
caacgcacagacaggacagctggagcccctgctgtcccggttcactgaggaggaggagctacagatgaccaggatgctacagcggatggatgtcctggccaagaaagccacagagatggg

SEQ ID NO: 961881 - DNA, 120 bp, Artificial Sequence
  ENSG00000277196_11 (sequence is synthesized)
cgtgcggctgatggtggatgccgagcagacctacttccagccggccatcagccgcctgacgctggagatgcagcggaagttcaatgtggagaagccgctcatcttcaacacataccagtg

SEQ ID NO: 961882 - DNA, 120 bp, Artificial Sequence
  ENSG00000277196_12 (sequence is synthesized)
ctacctcaaggatgcctatgacaatgtgaccctggacgtggagctggctcgccgtgagggctggtgttttggggccaagctggtgcggggcgcatacctggcccaggagcgagcccgtgc

SEQ ID NO: 961883 - DNA, 120 bp, Artificial Sequence
  ENSG00000277196_13 (sequence is synthesized)
ggcagagatcggctatgaggaccccatcaaccccacgtacgaggccaccaacgccatgtaccacaggtgcctggactacgtgttggaggagctgaagcacaacgccaaggccaaggtgat

SEQ ID NO: 961884 - DNA, 120 bp, Artificial Sequence
  ENSG00000277196_14 (sequence is synthesized)
ggtggcctcccacaatgaggacacagtgcgcttcgcactgcgcaggatggaggagctgggcctgcatcctgctgaccaccaggtgtactttggacagctgctaggcatgtgtgaccagat

SEQ ID NO: 961885 - DNA, 120 bp, Artificial Sequence
  ENSG00000277196_15 (sequence is synthesized)
cagcttcccgctgggccaggccggctaccccgtgtacaagtacgtgccctatggccccgtgatggaggtgctgccctacttgtcccgccgtgccctggagaacagcagcctcatgaaggg

SEQ ID NO: 961886 - DNA, 120 bp, Artificial Sequence
  ENSG00000277196_16 (sequence is synthesized)
cacccatcgggagcggcagttgctgtggctggagctcttgaggcggctccgaactggcaacctcttccatcgccctgcctagcacccgccagcacaccctcagcctccagcaccccccgc

SEQ ID NO: 961887 - DNA, 120 bp, Artificial Sequence
  ENSG00000277196_17 (sequence is synthesized)
ccccgcccaggccatcaccacagctgcagccaaccccatcctcacacagattcaccttttttcaccccacacttgcagagctgctggaggtgaggtcaggtgcctcccagccctgcccag

SEQ ID NO: 961888 - DNA, 120 bp, Artificial Sequence
  ENSG00000277196_18 (sequence is synthesized)
agtatgggcactcaggtgtgggccgaacctgatacctgcctgggacagccactggaaacttttgggaactctcctcgaatgtgtgggcccaaggcccccacctctgtgacccccatgtcc

SEQ ID NO: 961889 - DNA, 120 bp, Artificial Sequence
  ENSG00000277196_19 (sequence is synthesized)
ttggacctagaggattgtccaccttctgccaaggccagcccacacagcccgagccccttggggagcagtggccgggctggggaggcctgcctggtcaataaaccactgttcctgcagctg

SEQ ID NO: 961890 - DNA, 60 bp, Artificial Sequence
  ENSG00000277199_0 (sequence is synthesized)
ggctgtgcaccaagtgcgctgtgtccaacgacctcacccagcaggagatacagaccccgg

SEQ ID NO: 961891 - DNA, 120 bp, Artificial Sequence
  ENSG00000277199_1 (sequence is synthesized)
tttttgtccccgccgccacggctctgagggcgggagcggcagactcggctgccagctctactggcgtcctggcaagggcagcgctgaggggtgctcctggtccagctctcctggctcagg

SEQ ID NO: 961892 - DNA, 120 bp, Artificial Sequence
  ENSG00000277199_2 (sequence is synthesized)
gattccttgcctaggcgccggcgccccaggctccttgcctaggcccctgtggcctgcatagagtggcgctgcctgtggaggcgatgggagagaagaaggagggcggtggtgggggtgatg

SEQ ID NO: 961893 - DNA, 120 bp, Artificial Sequence
  ENSG00000277199_3 (sequence is synthesized)
tgcgctgtgtccaacgacctcacccagcaggagatacagaccccggagattcttttcaatatgccccatcatggttgaactcaaaaatcattgtttatttaaaatctacaactgctgacg

SEQ ID NO: 961894 - DNA, 120 bp, Artificial Sequence
  ENSG00000268926_0 (sequence is synthesized)
tgctcctgaaaacagcccgggacagctcttcccagcctccgcccgctgcactgagcactccactctctctgccctccggctgctagctccgatggcagcccccggcctctcagtaatcct

SEQ ID NO: 961895 - DNA, 120 bp, Artificial Sequence
  ENSG00000268926_1 (sequence is synthesized)
cagcaactcaagctttcgctggagtcctcggcaggggttcattacaactaagaacctaccgggagttactcttcccctacaagatccagaatgccttttggtttcctttaatgaagcagc

SEQ ID NO: 961896 - DNA, 120 bp, Artificial Sequence
  ENSG00000268926_2 (sequence is synthesized)
agcctgaccaagtcctacccactgctctaatactgagatctccagctgcagtgcacaaaaggaaagtgaacacagggaaagctgggactttgttgagggtcatggaggagtggttccgcg

SEQ ID NO: 961897 - DNA, 120 bp, Artificial Sequence
  ENSG00000268926_3 (sequence is synthesized)
ggatgccaggggtgtgggagcagagccttggcatttggagcaggtagcctgcatggtgaaaagtgatgggaatagtgctgcattcagatacaggacggactgcaatagcaaagagactca

SEQ ID NO: 961898 - DNA, 120 bp, Artificial Sequence
  ENSG00000268926_4 (sequence is synthesized)
atgtggtggctgagaaccaagtttatttatcttactcaaggatggagcaggtgacccagcactacagcggtggcttgatggcggcaaggagccaggctctccaccctgttactccacctt

SEQ ID NO: 961899 - DNA, 120 bp, Artificial Sequence
  ENSG00000268926_5 (sequence is synthesized)
ctcctaggggattcctttggtccaggtggctccctgacatgaacaatgccttcacagtccagcaggcaggaaggagaaaagagtgagggaaggcgcaaccactcttttgaaggacatggc

SEQ ID NO: 961900 - DNA, 120 bp, Artificial Sequence
  ENSG00000268926_6 (sequence is synthesized)
caaaaatgcggggatttcattattaaaggcagaaagagagaatgtttgggggacaacaaggcaatcaaagggatagattaggagggacggccatatcgtcatccacacagcagaggaaga

SEQ ID NO: 961901 - DNA, 120 bp, Artificial Sequence
  ENSG00000268926_7 (sequence is synthesized)
cagtgttgggcacataagggagagtggaaaatgtgaaggcagaaatcacagctgatggcggtggggacgaagccgctgaccactgaggaccctgtgatctggatggtaaagagggtagtg

SEQ ID NO: 961902 - DNA, 120 bp, Artificial Sequence
  ENSG00000268926_8 (sequence is synthesized)
tgataagaggccagcaaagacagggacctggggttcactgggacgttttgcagggtgctgcagcatggtgggcacactgactatgtgggattgtagaagaaagtacggtttggggactgg

SEQ ID NO: 961903 - DNA, 120 bp, Artificial Sequence
  ENSG00000268926_9 (sequence is synthesized)
cacatcagcacctcagtgtcttttctgggaaaatctggttctgtctgggatttttctctgctatgtgaattccttgctcattcattatggggtcacttcattgattttccactcttgttt

SEQ ID NO: 961904 - DNA, 120 bp, Artificial Sequence
  ENSG00000268926_10 (sequence is synthesized)
ctatttttttatatgacctcttctcactaatctctactgccaattgtctcaatgtaacagtattaccaagaggtaccattggactacggactttctgaggtgttttagttgtgaccttga

SEQ ID NO: 961905 - DNA, 120 bp, Artificial Sequence
  ENSG00000268926_11 (sequence is synthesized)
cttggttaaaaaggatgggtgcaatcaccttccaaaatctccaaatttatcatcctaaaacctccatttgggtggttgaaaactgcaatataaagtcagacagatttaaactggcatgaa

SEQ ID NO: 961906 - DNA, 120 bp, Artificial Sequence
  ENSG00000268926_12 (sequence is synthesized)
acaatgtagggaaggcatatcagtacacttaaaaaacacttttatagttttcatctccatcctcaatttgatagccccaagctaaaaatgattcttataaacatctgcttcttgtgttta

SEQ ID NO: 961907 - DNA, 120 bp, Artificial Sequence
  ENSG00000268926_13 (sequence is synthesized)
cacacacacacaccatgccccccgccaccaccaccacgcacacagacgcaggttcctggaactgtttcccccagttctctgcctcagacatcttcaccccatgtcctgccctgatctggt

SEQ ID NO: 961908 - DNA, 120 bp, Artificial Sequence
  ENSG00000268926_14 (sequence is synthesized)
gttctgggcatggctccttttattgctttttaaaaggagtctgtggttttatgagggctgtttggccggcagaggttgggctaggccgggttttcgatgcctgtggccctgtcagcccag

SEQ ID NO: 961909 - DNA, 120 bp, Artificial Sequence
  ENSG00000268926_15 (sequence is synthesized)
gcagtacccatggtccaggaaataaacacccagtacaaaaactccctgttcgtatctggtaaattttcaactaaaaagttcagcgttcaggtgagtgggctcgagatccagccggtttga

SEQ ID NO: 961910 - DNA, 120 bp, Artificial Sequence
  ENSG00000268926_16 (sequence is synthesized)
agagagaggaataaaggacagggtgttgggcgtgggactggcacccgctgaaaccctcatcctgtgggtgcccggtgtgggtccccgctggcgtcacaacgtgcagcccacctgctctgc

SEQ ID NO: 961911 - DNA, 120 bp, Artificial Sequence
  ENSG00000268926_17 (sequence is synthesized)
cagcttccgcgaccttgatctcagccaatcctgttttgggccccatcacagtctttctgtctgtggagctgggcaagcaggaggtttctcagggcccaagatggtttttcagatgtgaat

SEQ ID NO: 961912 - DNA, 120 bp, Artificial Sequence
  ENSG00000268926_18 (sequence is synthesized)
attggccaactcccgaagttgctagaaaaatgtaggcagcttggccaccgaagtaaaagccatcgatggcatttttcccagcctcagctgaattcaaaccactaaactcttgtggtttat

SEQ ID NO: 961913 - DNA, 120 bp, Artificial Sequence
  ENSG00000268926_19 (sequence is synthesized)
tttttttacagctttcttagctaacaggactggatgcctttaaaaaacttttcaaaataatattttggaacctagcattatttggttttccctctgtaaaggctaatctatcataatttc

SEQ ID NO: 961914 - DNA, 120 bp, Artificial Sequence
  ENSG00000268926_20 (sequence is synthesized)
cccatagcttgctttgcggaagagggtgggtgagggacaaaggaaaggtaacatgctaaccaagacaagcgtagtgtgaaggaagggcgggccctgttcggcctctgcccagcagagtca

SEQ ID NO: 961915 - DNA, 120 bp, Artificial Sequence
  ENSG00000268926_21 (sequence is synthesized)
gcctcagtgtcctcctctggagaacaggaagaataatacgacagcccaactaccttacaagacagttctgtgattaggctgatgttcgtcagaacatttagtcaccgtaaaatgctacac

SEQ ID NO: 961916 - DNA, 120 bp, Artificial Sequence
  ENSG00000268926_22 (sequence is synthesized)
aatgtgaattattgtgctttaacaaataatttgaaagcagtataaagtgcttctagacttgcagatatcaagaaagctggatatctgggttattcattctcggttggcaaaaggtggtcc

SEQ ID NO: 961917 - DNA, 120 bp, Artificial Sequence
  ENSG00000268926_23 (sequence is synthesized)
ctgcatgatcagccctacgggccccacatattcttttaagggctcaggcttttggaaggcttctcagtgcagcaagcatgaatagtaagggctacgctgcgctctttacttacttgtttt

SEQ ID NO: 961918 - DNA, 120 bp, Artificial Sequence
  ENSG00000268926_24 (sequence is synthesized)
tgccttaaaccatcacagttaccacaagggttaaggatgcaggtagcattgcagacagactgacagagctttgtgttctggcttggccaattagcttagcttctctgagcccagtttcct

SEQ ID NO: 961919 - DNA, 120 bp, Artificial Sequence
  ENSG00000268926_25 (sequence is synthesized)
catctgtaaaacaggtataacaacaacaacaacaacaacaataatagtaatcagctgatacaattcttgtgagattaaaagacaacattcacaaattgcttaccagtatgatatcttgca

SEQ ID NO: 961920 - DNA, 120 bp, Artificial Sequence
  ENSG00000268926_26 (sequence is synthesized)
cattgattaaatgaatgtaagataatgatgttgataattattttaaggaatttgagggagaaaattcccacctacgagttcctgtgcacctagtggtgggactttctcttggtcatgcat

SEQ ID NO: 961921 - DNA, 120 bp, Artificial Sequence
  ENSG00000268926_27 (sequence is synthesized)
tcatttgacaagcatttactgaataccttctgtgagctcttaggagatcagaatatgccatcctcaaatacgaaggattgttcagctgaagacgattaagaagcagatgcaggaaccctt

SEQ ID NO: 961922 - DNA, 120 bp, Artificial Sequence
  ENSG00000268926_28 (sequence is synthesized)
tagacttccctctatttgcctaaaagcaggacatagatttacagagacaaagagtattcctgcccaggagagcaaaggttaaccaatgaagactgctttagactctcatcagcctggagg

SEQ ID NO: 961923 - DNA, 120 bp, Artificial Sequence
  ENSG00000268926_29 (sequence is synthesized)
tgatacagaggactctacttcaccagctgtctagccagcctttgtccgccatggatttgccttcccacaagttgcctgcagagacttacagtccttttcctttgtcccttctctaaaaat

SEQ ID NO: 961924 - DNA, 120 bp, Artificial Sequence
  ENSG00000268926_30 (sequence is synthesized)
gtgctattctttgttgaggatcttatataagctgggagtcaaggccacttcttggagaatgattctggatacttctctgggtatctcccatgtatttataaaatacacatgttaatcaac

SEQ ID NO: 961925 - DNA, 120 bp, Artificial Sequence
  ENSG00000267919_0 (sequence is synthesized)
ccaaagctttcattatccccggacaagtgcaggcccacttcaggccctgaggagtgctagctcattcttttactttgggcaaagagggcggctgtcactttcttgttcatgctgaggatt

SEQ ID NO: 961926 - DNA, 120 bp, Artificial Sequence
  ENSG00000267919_1 (sequence is synthesized)
cggctcactcaagatatctgatgcccttgtgacagcgtctggctgtcagagctcatagaccatctgctgggactgccctaggcccctcctttagggcacagaacgtggcaataatgtgtc

SEQ ID NO: 961927 - DNA, 120 bp, Artificial Sequence
  ENSG00000267919_2 (sequence is synthesized)
tgcctgttgacacttggagctctcaaagggaattctgagcagcaaaggaaaggtgacacagaactcaagggcactggcgctgagcgctgcccatgcagctggcaattaagccattgccga

SEQ ID NO: 961928 - DNA, 120 bp, Artificial Sequence
  ENSG00000267919_3 (sequence is synthesized)
aaacaacaataaaacagattttgggcaagtagggaatggtggattgaatccagtgtggcaaaaaaggaaatgcaaagtgaggaatgtagtttccagataaataaattatataattgtgat

SEQ ID NO: 961929 - DNA, 120 bp, Artificial Sequence
  ENSG00000225822_0 (sequence is synthesized)
gagagaaacaagacagagagaattcatagaatggctttagggcctttcctccaggcggagggaggacggcagctgtgggtaaagcccgaaggaggaatgcctgaaggtaaggggaagccc

SEQ ID NO: 961930 - DNA, 120 bp, Artificial Sequence
  ENSG00000225822_1 (sequence is synthesized)
ccccactctccaccttccggtaaccgcgtctcttaccggtaatggtggtgaactgttgaattaaccccttcagcgccgaggacgccgcggagcccccgtgggcagccatcttaccgccgc

SEQ ID NO: 961931 - DNA, 120 bp, Artificial Sequence
  ENSG00000225822_2 (sequence is synthesized)
cgccgccgccgaacaacaacacagacacacacggactgccctcccccacttcgccgtgcggtgtgcgcaggcgcattgaccgcccctcgagccccgcccctcccgtccccagcggtctgc

SEQ ID NO: 961932 - DNA, 120 bp, Artificial Sequence
  ENSG00000259345_0 (sequence is synthesized)
ccgtgggcgtaggaccctccgagccagacatcttctgtaaccagaagcactccaagaacaacactttcattcatggacttaacaactacattagatcataccagcctgtcacttcaaagt

SEQ ID NO: 961933 - DNA, 120 bp, Artificial Sequence
  ENSG00000259345_1 (sequence is synthesized)
aacaactacattagatcataccagcctgtcacttcaaagtcaccagtgtcaaggaacatttcaaattggcttaaagcattgttttggaggtgtgaataatgaagccaaggacattagcaa

SEQ ID NO: 961934 - DNA, 120 bp, Artificial Sequence
  ENSG00000259345_2 (sequence is synthesized)
attgccactggattgcctctatcaaatacacaagagtttcatgagtgagaaataaccttctgttgctttaaatcttgggttgtgcaatacatcagtgagcctaccatgactaatacattc

SEQ ID NO: 961935 - DNA, 120 bp, Artificial Sequence
  ENSG00000259345_3 (sequence is synthesized)
tatggatgcagatttctcttctctggccattgacatgagtgtgctttctggatgcaggttggtgtatattgctatcattttctgccttctcatgtttgatctggctcttaaccagttatt

SEQ ID NO: 961936 - DNA, 120 bp, Artificial Sequence
  ENSG00000259345_4 (sequence is synthesized)
atagtctgctctgagaaaagagccaagttcagggcagagactaccttcctgggtaccccccaagaaggagtcttgatcacttctctaaacatgccctggatgttcccagagctcatgaaa

SEQ ID NO: 961937 - DNA, 120 bp, Artificial Sequence
  ENSG00000259345_5 (sequence is synthesized)
acgctgctctccagtggtgctagcagctctgatgaaggctaagtccaagctctgaattcaggagagcagagctgcctcctgctcccaccaccgtggttctcaggcagtaatggttctatt

SEQ ID NO: 961938 - DNA, 120 bp, Artificial Sequence
  ENSG00000259345_6 (sequence is synthesized)
attggccatgtcaattggagcaaccatttggaaagtcatttggcaacatctcccaaagctgaatatacatgaagcctaggagccaggaattccacttccaggatatgcccaatagaaatg

SEQ ID NO: 961939 - DNA, 120 bp, Artificial Sequence
  ENSG00000259345_7 (sequence is synthesized)
aatacatatgttcaccaaaaggcgtgtcctagaatgtttataattgtgaacagaccaaagctagaaactatccaagtgtccatcaacaatggagtgggaaataaaatgtctcttcgtaca

SEQ ID NO: 961940 - DNA, 120 bp, Artificial Sequence
  ENSG00000259345_8 (sequence is synthesized)
atggaatctacatagcaatgagaacaaagaacttacaaaagtacacagcaacatggatgaaattcacaagcataattccgaacaaaaaatgccatgtaccaaaaagcttatagcatatga

SEQ ID NO: 961941 - DNA, 120 bp, Artificial Sequence
  ENSG00000259345_9 (sequence is synthesized)
ctccatttatgtacagtagaaaaacaggcaaaacagctagcctgttagaagtcagaatggtggttaccctttgaggggctgttcctagatggggactcatggggtaatgttcattccatg

SEQ ID NO: 961942 - DNA, 120 bp, Artificial Sequence
  ENSG00000259345_10 (sequence is synthesized)
tcttgaactgtgcactgattacactggtgtgtttagcttgtgaaatgtatccacctatacacttatgtggttttctgtatgtacattatatttcaataacattttaagaaagtgttttgc

SEQ ID NO: 961943 - DNA, 120 bp, Artificial Sequence
  ENSG00000259345_11 (sequence is synthesized)
cacttattagttcatttgacccacacaacagttctaggagataagaaggccaggtaacttttcttcagatttatagaaagaaaacagactcaaagtttggtccaaggtctcagtgctaat

SEQ ID NO: 961944 - DNA, 120 bp, Artificial Sequence
  ENSG00000259345_12 (sequence is synthesized)
agaaagatagtctctgttggagcaccttgcacagtgcttgatgcatagtaggtgctcaataaatttcatctgaagctggatcatagaatggtggccttctaatcccacaaggctgttatc

SEQ ID NO: 961945 - DNA, 120 bp, Artificial Sequence
  ENSG00000259345_13 (sequence is synthesized)
ctgctgtgggagtaaccatcttctctggtggtctaatgtcccttatagaatgtgcgtattctctcctaagagaagagtggagatgaggcctgagtcaaatatcctaagaagctgccaaaa

SEQ ID NO: 961946 - DNA, 120 bp, Artificial Sequence
  ENSG00000259345_14 (sequence is synthesized)
tacctgtggagaattgcataaccttgtccctctagggcttagaaaagaatgagtcagacagtcagttctcagacacggtgcccaggaaaacaggaagaaggttcacttaggcagaaatcc

SEQ ID NO: 961947 - DNA, 120 bp, Artificial Sequence
  ENSG00000259345_15 (sequence is synthesized)
atgtatgtgaccttggatacatcactgaacttcttcaggggcaacaatttgaaagacacatttgagacactctgcctaggatgacgtgatccttctgtagctgatcttctgagacccgtg

SEQ ID NO: 961948 - DNA, 120 bp, Artificial Sequence
  ENSG00000259345_16 (sequence is synthesized)
aattttatgtactattttctaattatattctcattattttcaagggcatcagactgcatttcaaacttgacaattcctttgctataatttcagctcaaattttgactaatttatacttta

SEQ ID NO: 961949 - DNA, 120 bp, Artificial Sequence
  ENSG00000259345_17 (sequence is synthesized)
aatacaaatatgccccattttctgcttgtcatcatagttcagaaagaagttataccgaccatgttatataaagtaatgaggggtcctattcagcttgttaaccatgtttcttaaaaaaaa

SEQ ID NO: 961950 - DNA, 120 bp, Artificial Sequence
  ENSG00000259345_18 (sequence is synthesized)
aaagtacaatagaactttctttgtcaatataaaattcgagttatttatgatgtggctaaagatatgataagaagtctcaggaatggaatctgttattgcttggaaaataaaatctcaaga

SEQ ID NO: 961951 - DNA, 120 bp, Artificial Sequence
  ENSG00000259345_19 (sequence is synthesized)
ccttctttggaaaaaaatggagagtgataaaatgctttcatttagggcttggctgtgatgtcaaggtcagccaatgagcttagagggaatctgagaaaaataaagagaaaaatagaaaca

SEQ ID NO: 961952 - DNA, 120 bp, Artificial Sequence
  ENSG00000259345_20 (sequence is synthesized)
actgaatggccattgacttcttttgaaaaagaaaaagaaaaatgacatcttctgtaaccagaagcactccaagaacaacactttcattcatggacttaacaactacattagatcatacca

SEQ ID NO: 961953 - DNA, 120 bp, Artificial Sequence
  ENSG00000259345_21 (sequence is synthesized)
gcctgtcacttcaaagtcaccagtgtcaagaacgtcatgagcaccaggctcttcataggctactgaaatgaggaaagctctgaccctccactcaagaagttgctacgctggaacatttca

SEQ ID NO: 961954 - DNA, 120 bp, Artificial Sequence
  ENSG00000259345_22 (sequence is synthesized)
ggagccaactcagcctgatctgctggcatctctcaagtatcagaagtcaacaaaatggtttgccttgaagacttggccagagcagcagccaaagttcataaggctttcgtagagagattg

SEQ ID NO: 961955 - DNA, 120 bp, Artificial Sequence
  ENSG00000259345_23 (sequence is synthesized)
aagcatagtgcttagtgttgctcccttagaaattcttccctcaaagcatcctgggggtcagctcagcctcaagtcactttgggacctcagggacagattttggggggtggtaagaaatgg

SEQ ID NO: 961956 - DNA, 120 bp, Artificial Sequence
  ENSG00000259345_24 (sequence is synthesized)
caaccaggttgggtgtaggatgacccctgagaaaagcagtcagaagtccagaatattatatcccaaagcactggaaatcaggctgacttcactgtttttgttcctggactatggtcaggt

SEQ ID NO: 961957 - DNA, 120 bp, Artificial Sequence
  ENSG00000259345_25 (sequence is synthesized)
aagtagggattggtggaaagggttcttgcagcaagaatactgaaaattaaatgaattatggctttgtggatctatatagatagaactccaattggagatccaggtgaggggtctgccata

SEQ ID NO: 961958 - DNA, 120 bp, Artificial Sequence
  ENSG00000259345_26 (sequence is synthesized)
aaccaaggtatctgacaaacaggcaaggccctaggcgagactctggactcagcagggaaaaccagagcctgaagcaggtacaccaggctgaaatcaaaccgacaaggagaacacaatagg

SEQ ID NO: 961959 - DNA, 120 bp, Artificial Sequence
  ENSG00000259345_27 (sequence is synthesized)
gcagtaaaggaaagcttgactcagtttgtgcatgggttcccatgcctcatccctgggactaggtagagtagggctcctcaaactcagcgctgtgaacagctggggctggacagtactctg

SEQ ID NO: 961960 - DNA, 120 bp, Artificial Sequence
  ENSG00000259345_28 (sequence is synthesized)
ttggtggggggttaccctctgcattgtagggtatttaatgacattcctcacctttacccactaggtgctattaattaatattccctcagctgtgacaaccatagatgtctccagacattg

SEQ ID NO: 961961 - DNA, 120 bp, Artificial Sequence
  ENSG00000259345_29 (sequence is synthesized)
acaaatatctctgggtggaaaaagttgccctaattggaaaccattagttgacagcaaaagactaattcctgtcagcactgactggtgggaccactttcttgatcagaattggttcaggaa

SEQ ID NO: 961962 - DNA, 120 bp, Artificial Sequence
  ENSG00000259345_30 (sequence is synthesized)
taggcacagttgaatctgtcaattaaggctctctggatctgcagacaagcagggctagtacttgacagaaactgtccaaagacctttagcactaaaatgagaaaaaccattaagtgttgg

SEQ ID NO: 961963 - DNA, 120 bp, Artificial Sequence
  ENSG00000259345_31 (sequence is synthesized)
gccaagttgagagcttatggtagaggccacgcctgctccattgggcttgtctagaccaagacctattattcagaacccccagtccttgccatttggtgcactttggtatccaaatcctac

SEQ ID NO: 961964 - DNA, 120 bp, Artificial Sequence
  ENSG00000259345_32 (sequence is synthesized)
attttgatagagcactgagcaaaggcctaggtggatctttgatgatgaagtccgtgcttgtcactccaacttgatgatccactctcttccatatggctgtctggttcattatgagaaggc

SEQ ID NO: 961965 - DNA, 120 bp, Artificial Sequence
  ENSG00000259345_33 (sequence is synthesized)
ttacaggaggctacaatggcaactttccagcaatatgaatgctttgaaggctcagatgaactctgttaagagaagaatgcccagcaaggtccaggataatgtttatgctgaatcttgtcc

SEQ ID NO: 961966 - DNA, 120 bp, Artificial Sequence
  ENSG00000259345_34 (sequence is synthesized)
aagtttctcttcctgggaaagatattagctgactctggagctaagtctaagttgaggccagtgagacctgtcctgtagcttcatccccataacaatggttgatactggctttattcatgg

SEQ ID NO: 961967 - DNA, 120 bp, Artificial Sequence
  ENSG00000259345_35 (sequence is synthesized)
cttcctatctactgtttccagagatgatctttcacagtcttcaataagccttcaactctcaggaattttaccatttctaaattcaggatttctgctatttcctgtggttatattggccct

SEQ ID NO: 961968 - DNA, 120 bp, Artificial Sequence
  ENSG00000259345_36 (sequence is synthesized)
ctgacccccattttacatcttctgtaaccagaagcactccaagaacaacactttcattcatggacttaacaactacattagatcataccagcctgtcacttcaaagtcaccagtgtcaag

SEQ ID NO: 961969 - DNA, 77 bp, Artificial Sequence
  ENSG00000259345_37 (sequence is synthesized)
cggagctgttcctattcggccatcttgggtctggattcggcattacatgtcttaacttgaaactataaaaattctag

SEQ ID NO: 961970 - DNA, 72 bp, Artificial Sequence
  ENSG00000259345_38 (sequence is synthesized)
actaggacctaactgaactaagagcttttgtgcagcaaaaagaacagtcagcagagtaaacagacaacctac

SEQ ID NO: 961971 - DNA, 63 bp, Artificial Sequence
  ENSG00000259345_39 (sequence is synthesized)
catctgacaaaggactaatattcagaatccacaacaaacacaaatcagtgaaaaaatccgtcc

SEQ ID NO: 961972 - DNA, 90 bp, Artificial Sequence
  ENSG00000259345_40 (sequence is synthesized)
atgcaaatcaaaaccacaatgtgatatcactttgtgaaaaacagtagatgttggcgtgggtgtggtgataagggaacacttctacactgc

SEQ ID NO: 961973 - DNA, 61 bp, Artificial Sequence
  ENSG00000259345_41 (sequence is synthesized)
caagaatggccataatcaaaaaattgaaaaacagtagatgttggcgtgggtgtggtgatgg

SEQ ID NO: 961974 - DNA, 120 bp, Artificial Sequence
  ENSG00000259345_42 (sequence is synthesized)
ccaaccagtggtttactttgatgcttaccagggaacactagggaaatttgccagtacatggatcctgtttggaagaatcagatcaaaggaagaaatatacagtgtcagaccctggcacct

SEQ ID NO: 961975 - DNA, 120 bp, Artificial Sequence
  ENSG00000259345_43 (sequence is synthesized)
gccgtagagagcaaccagaatgggcagagcagagacttagagcccagaggactggaagacgctgccacagccgcacgcactctagcctgatgctacaggcagaacacgtgtgatggactt

SEQ ID NO: 961976 - DNA, 120 bp, Artificial Sequence
  ENSG00000259345_44 (sequence is synthesized)
ctcagagaaagccgaaatcagtattcacagcttctaacagtaaattgaacatgaaaaaactccactaactactgatcattggacctgattgcttgtggttctgggagagagaagagacat

SEQ ID NO: 961977 - DNA, 120 bp, Artificial Sequence
  ENSG00000259345_45 (sequence is synthesized)
aattggagccaggccctgccgcatgcagccatcagcctcaatgtgacactatgagctttggctgggaataagacactacatcttggcttggggacacaaacctggagtactaccagagta

SEQ ID NO: 961978 - DNA, 120 bp, Artificial Sequence
  ENSG00000259345_46 (sequence is synthesized)
aggcaaccaacccaaaagctacttgacagggagaggagtctaccaaaaagaaacaaaacaaacaaattccctcccaaacaagacatcttctgtaaccagaagcactccaagaacaacact

SEQ ID NO: 961979 - DNA, 120 bp, Artificial Sequence
  ENSG00000259345_47 (sequence is synthesized)
ctctgaaccctccagtgagacatcagcccatcagactcacagagaacagcaggaaggccaaagactcaagatttatctatccttgaagtgagcaaaattccttgttattcagtgatgctg

SEQ ID NO: 961980 - DNA, 120 bp, Artificial Sequence
  ENSG00000259345_48 (sequence is synthesized)
attacaacaggcctccgttatacgaagggaaaacatcccagaccccccagtgaatgcctgaaactggattctactgaaccctgagatggtactaagtgactaacgggtgaatagcgtgta

SEQ ID NO: 961981 - DNA, 120 bp, Artificial Sequence
  ENSG00000259345_49 (sequence is synthesized)
cagcatggatacactagacaaagggaggattcgcatcccgggctggtcagcaagaggtttcatcaccccactcaaaatggcaggaccgtatgaacctgaatccagagaaacggctcatca

SEQ ID NO: 961982 - DNA, 120 bp, Artificial Sequence
  ENSG00000259345_50 (sequence is synthesized)
gtctccaatcctctgattttctaaaccaggactacattatattaaaaccagaaaaagcaatacctcttttcacagaatggactttctggtggaaatgggaggaaccaaaagaaggctgac

SEQ ID NO: 961983 - DNA, 120 bp, Artificial Sequence
  ENSG00000259345_51 (sequence is synthesized)
ttcttcattttgacaccctgccctgactgcagaacgtgatttccctaaaagactgaatgttaacctcaaagcctggtcaaccaacatgcaggagaaatcttgaccaaggctctgagcatg

SEQ ID NO: 961984 - DNA, 120 bp, Artificial Sequence
  ENSG00000259345_52 (sequence is synthesized)
ctgtggtcccagtggtgagggtgtgatatgcactgtctgttcctggagtcacagtgctcatcttgtggtaaagacctcttggaagaatgtcttcaaaggcacatctccagctgggagtcc

SEQ ID NO: 961985 - DNA, 120 bp, Artificial Sequence
  ENSG00000261803_0 (sequence is synthesized)
atggaggggcgggaggggggtgagggggacacatattccctgatatccgggcaaccagagtcggtccataggagtgagtctgccctagacaccaagcttcaatggcaatgattccaaaac

SEQ ID NO: 961986 - DNA, 120 bp, Artificial Sequence
  ENSG00000261803_1 (sequence is synthesized)
ctgactttaaaacaccctagggtgtcgccaacgaacaaaggctgcctcaaaaccaaattaagttccctttaattaaagatcataacatacgccacagaacactctgtcacggtaggggga

SEQ ID NO: 961987 - DNA, 120 bp, Artificial Sequence
  ENSG00000261803_2 (sequence is synthesized)
aggaagagactgtcacataaaataaatagggttccacaactcacaaaaattaagcatctcacagaaagagctctgcactttgctgatttgtgaacagccatcctcattgccaccttggaa

SEQ ID NO: 961988 - DNA, 120 bp, Artificial Sequence
  ENSG00000261803_3 (sequence is synthesized)
accgcttgtgagaggcagagtggaggccaccatttagtgccaataaacagaaggcctggtttcttcaaaagaaacacaagaaattgtttcctggttttgccacagagattgggtcacaga

SEQ ID NO: 961989 - DNA, 120 bp, Artificial Sequence
  ENSG00000261803_4 (sequence is synthesized)
gtgccacctaaatggtattaccatatttgtgttgtcgcctcttggtttgaaatttattcctggtatgacttgtgtctccccttgttccatctctgacacccaagcccatgggatgacaac

SEQ ID NO: 961990 - DNA, 120 bp, Artificial Sequence
  ENSG00000261803_5 (sequence is synthesized)
ccaggctgagatgtcccatgtgtcacaaaggagtccttcagtatttccaggaatagttggaaccagcactccatcccctacctggacctggcaccctctctactcttgtcaattctacac

SEQ ID NO: 961991 - DNA, 120 bp, Artificial Sequence
  ENSG00000261803_6 (sequence is synthesized)
taatcacaggaagaaggtggaattagtccaagctgggttttcagaaataacttgtagacatgcaacagatgtttataaccctcagaagcggaaggaaacttggaaaccctctctttcggt

SEQ ID NO: 961992 - DNA, 120 bp, Artificial Sequence
  ENSG00000261803_7 (sequence is synthesized)
gactttttttctaatgattgtctctgccatgaaattctaacttcaaatgaaatctttggcaggaacccagggctgttctgtcaaggttcagctgcaggaccagagccccttccacctaac

SEQ ID NO: 961993 - DNA, 120 bp, Artificial Sequence
  ENSG00000261803_8 (sequence is synthesized)
tatcctgatgcttcctgaggcacatctgctgtggtttctcaccagagaacagtctgcaaaatcactgcaccttgtccaactccattttccaactgagaagacttggcccagagaagtgca

SEQ ID NO: 961994 - DNA, 120 bp, Artificial Sequence
  ENSG00000261803_9 (sequence is synthesized)
cagacttgagggaagtaacacagcaatcggacagacagacatccccagatatacctgctacggtcctgggagaaaatagagacccatccccaaataccatcatcctcatcattctctgta

SEQ ID NO: 961995 - DNA, 120 bp, Artificial Sequence
  ENSG00000261803_10 (sequence is synthesized)
gcccaatcaaatgatgctccaggcctgagattttatccaatgaacactctgtacatctttaaaagagatatgtacttgtcttattcctcctttcctttctttaaaaaaaaacacaggccc

SEQ ID NO: 961996 - DNA, 120 bp, Artificial Sequence
  ENSG00000261803_11 (sequence is synthesized)
cagatccagtcattctaaataggaaggaaaaacataacccactgaggcaatggatgctgtttctctccctgctctgtgactttagtttgcctttaaagcccattttcaccatttattgat

SEQ ID NO: 961997 - DNA, 120 bp, Artificial Sequence
  ENSG00000261803_12 (sequence is synthesized)
tttagttttctacttgtctatgaatgacaacttgaattaagacaacgcaggctgaaaagccgctaggcagtgctaaatggacaagctacacttcgtggcaggatgtctcatgaccgtgcc

SEQ ID NO: 961998 - DNA, 120 bp, Artificial Sequence
  ENSG00000261803_13 (sequence is synthesized)
accttctgcctagccccattctctggaggagctgtgggcagaccgaccccagcctggccgcctggcatggggactggttgcgtcagatcggagctctgagataagggtgggccagggcat

SEQ ID NO: 961999 - DNA, 120 bp, Artificial Sequence
  ENSG00000261803_14 (sequence is synthesized)
gatcatcaccactgccagcctcgaagcctctttgctgacctggaggtgatctgtgtatcaaagggggctgtgtattcaacagcacttccagaagaggccaaagatctgtctctacttcag

SEQ ID NO: 962000 - DNA, 120 bp, Artificial Sequence
  ENSG00000261803_15 (sequence is synthesized)
cctccactgggcagaaaactaagcctatttgctctaggcccttcagacttgcacttggagaaagaaaactcactaagtcagcccttatgtaactccactctcctctcttccaaacctcct

SEQ ID NO: 962001 - DNA, 120 bp, Artificial Sequence
  ENSG00000261803_16 (sequence is synthesized)
tgctttggacaaatatttgacagaaaatgcccttttgcaacgccttaaaagttacaaaaatggtgcaccctatcctttaatctgtactgtaaataaaaaatattaacacaaaccctttaa

SEQ ID NO: 962002 - DNA, 120 bp, Artificial Sequence
  ENSG00000261803_17 (sequence is synthesized)
aatgagcgccgtgtttaaacaagtgtatagaacacatctgtccgggccttgggactcgaggctgtgtgaccaatttcagcatctgaaagttaaattaatggtaaagggtttaattgtgag

SEQ ID NO: 962003 - DNA, 120 bp, Artificial Sequence
  ENSG00000261803_18 (sequence is synthesized)
taaacaataccacattaaggagcagtaaacacagcagtggggacccaccgacccgctctgccatcacagatgcggcggcctccatgtgaccgttaatagtccccgccgcctggaagttct

SEQ ID NO: 962004 - DNA, 120 bp, Artificial Sequence
  ENSG00000261803_19 (sequence is synthesized)
gacagcgccctgaagcccatttgtcatctaaatggtccgtccccttcttaaacatcattttggcccaaggtccattcatggggcctgccgggtgttcctgggaagatgggcagaaaatcc

SEQ ID NO: 962005 - DNA, 120 bp, Artificial Sequence
  ENSG00000261803_20 (sequence is synthesized)
actcaggatccgaggggggaagagtgacagcagcagctgaccgcccctcccgccgcctcctgagaggcccccatgataaagcatcctgctttgtggtgtaatcaacttgccatacatgca

SEQ ID NO: 962006 - DNA, 120 bp, Artificial Sequence
  ENSG00000237061_0 (sequence is synthesized)
gagtctctgtgattaaccaaggagacactgctacatgaaaacaagaacaaggcctcacctcgaaggaaaaatagtccaaactctctttataaaatgaatggctctggctgtcggctcatt

SEQ ID NO: 962007 - DNA, 120 bp, Artificial Sequence
  ENSG00000237061_1 (sequence is synthesized)
ttgttgtctctgtgtgcatgtatttgacatcacctagaaaagcatttgaaaaaatatatatatttttaaatgaccctttggtacctaaaggctgagaatagggtgtcttgctctggctgg

SEQ ID NO: 962008 - DNA, 120 bp, Artificial Sequence
  ENSG00000237061_2 (sequence is synthesized)
cacaactcctcgagctgcgaacagacctggagaaagtccagtggtaactccgagatgagaagtgcctagaaagatgggtccaaaagcagaagacatgaccttggagagtctggctgggag

SEQ ID NO: 962009 - DNA, 120 bp, Artificial Sequence
  ENSG00000237061_3 (sequence is synthesized)
gaaaggagacctccccaaaccatgagtggcacagaccatgtcagaccatgagtggcatagaaaaggggtggatgatgtcatcaaatcctaactctgaagcaactgagaagctgtgacaaa

SEQ ID NO: 962010 - DNA, 120 bp, Artificial Sequence
  ENSG00000277448_0 (sequence is synthesized)
atcaatgttcggtagcagacctgtaatttgcaaattgaatgacaggcagcattgaaaatgcactgcagtggccttttctagatatgaagtgcatttactctgctcacatttccatggcct

SEQ ID NO: 962011 - DNA, 120 bp, Artificial Sequence
  ENSG00000277448_1 (sequence is synthesized)
gagctaattacttggtctcatctaaatggaaaaatatgataaaatatagttttctatgtgtaaaggatggaggaatataaaacaatttggaacagagtctcgctgtgcctcccaggctgg

SEQ ID NO: 962012 - DNA, 72 bp, Artificial Sequence
  ENSG00000277448_2 (sequence is synthesized)
aacaatttggaacagagtctcgctgtgcctcccaggctggagtgcagtggcacgttcgcggctcagtgcaac

SEQ ID NO: 962013 - DNA, 120 bp, Artificial Sequence
  ENSG00000277448_3 (sequence is synthesized)
tgccgggccacatgtcttctttgtgctaggcactgttccaacactgagggtttcacagtggggacaaaatttaagagtactatggaatttacatttatagcaacagaaagacaaaaaata

SEQ ID NO: 962014 - DNA, 120 bp, Artificial Sequence
  ENSG00000277448_4 (sequence is synthesized)
aatgagaaaaaaatcaataaaatagaatgctcaaagtgtgaatgaaagaagtaaaaccggtaacagaagtgcaagggtggtagagggaggaaatttaatgttaaatagtttgacaagaga

SEQ ID NO: 962015 - DNA, 120 bp, Artificial Sequence
  ENSG00000277448_5 (sequence is synthesized)
aggtctttccattaaattgatttctgagtaaagaatttataaggaagtctgaaatgtagatgtctctagggagaccattccagacagagaaaccaacaagaaaaagaaatatcctgaagc

SEQ ID NO: 962016 - DNA, 120 bp, Artificial Sequence
  ENSG00000277448_6 (sequence is synthesized)
tgaacacaggcgaatgttctgggagtaggaatgaagccagtgaggccagagggaagaaagtctagaattagaaatcagcgaggtcaagcatatggcaatgtattctctgagatctttcaa

SEQ ID NO: 962017 - DNA, 120 bp, Artificial Sequence
  ENSG00000277448_7 (sequence is synthesized)
gccagagcagtgagtttggcgtttcatgaaggaaagtcatgggagtgattgaagcagaaaaagagataatatatagtctactgagtcactctggctgctgtgtggaaatgtatgttaaag

SEQ ID NO: 962018 - DNA, 120 bp, Artificial Sequence
  ENSG00000277448_8 (sequence is synthesized)
agggccaagaacagaagtagatcattttgaggcaagaattgatataagagatgatgctcgctccaactagaatagtagcaacagagatggtgagaaattgtcaagttattgatccatttt

SEQ ID NO: 962019 - DNA, 120 bp, Artificial Sequence
  ENSG00000277448_9 (sequence is synthesized)
gaagggaaagtcaaaagaatttgctgatagaacaaatttagaatgtgaaagtaagaatggaactcccctttacctagaagagaatttgaggagagatttgagacataaaatcaagaggca

SEQ ID NO: 962020 - DNA, 120 bp, Artificial Sequence
  ENSG00000277448_10 (sequence is synthesized)
aataatatccattcatgcttcttttgtatttattataccctaggaactgttttctctactatatgtatgagtttttaatttatacaaaattcccataggtactattattatcaacatttt

SEQ ID NO: 962021 - DNA, 120 bp, Artificial Sequence
  ENSG00000277448_11 (sequence is synthesized)
accatgagaaggctaagacataaagaaattaagtatttgtgccaaagacaaagagttactaactgatagagcaaatgtctgtgtgtctgttaaccctgcttattgtctctcttggtaatt

SEQ ID NO: 962022 - DNA, 120 bp, Artificial Sequence
  ENSG00000277448_12 (sequence is synthesized)
aattatcatacagctaacatttaaagccatgaaattaggtgaaatccccaggggagagtcagggagaatggaagagttccaaggaggggtgaaaaataacatcttatgagaaagaaaaca

SEQ ID NO: 962023 - DNA, 120 bp, Artificial Sequence
  ENSG00000277448_13 (sequence is synthesized)
agccaggttgtgctgtcttggaagcaaagacagtatttcaagaaggatttgatcatgtgtataaaattatgctgataggctaaattagaaaggcttctggttggctttggggcttaactg

SEQ ID NO: 962024 - DNA, 120 bp, Artificial Sequence
  ENSG00000277448_14 (sequence is synthesized)
catggaggatttggggaaccttgatgaaatcagcccagtgaagggacaagtgtgaacttcagagagacaaaaaatgatgacaagaaatagagataatttttgaagagttattttggaagc

SEQ ID NO: 962025 - DNA, 120 bp, Artificial Sequence
  ENSG00000277448_15 (sequence is synthesized)
agaacaatggcaaagaagggtggttggatcaaaaaaggattttttgtttgcatacattttaagttagaaaaacacggcactgtctctgcactttgctgacgtagagtatataagcacaag

SEQ ID NO: 962026 - DNA, 120 bp, Artificial Sequence
  ENSG00000277448_16 (sequence is synthesized)
tgtaaagaggtgttgggagtagagaaaattatcatgctatttggtttattaattcagtgaatgagaaaaactcatcagcttagggtaagtcaaagttctgaagctacaggaaggaaaatg

SEQ ID NO: 962027 - DNA, 89 bp, Artificial Sequence
  ENSG00000277448_17 (sequence is synthesized)
tagggtaagtcaaagttctgaagctacaggaaggaaaatgaataggagagatagtatataactactgtcaatgaaaagagtcaaactat

SEQ ID NO: 962028 - DNA, 89 bp, Artificial Sequence
  ENSG00000277448_18 (sequence is synthesized)
ggtccgtagaggtacagcttcgttttatatattttaaggaggcatgagacatcaatcaaacacatttaagaaatacattggtttggttc

SEQ ID NO: 962029 - DNA, 120 bp, Artificial Sequence
  ENSG00000277448_19 (sequence is synthesized)
taaatttaaacattttctggttgacagttgagtttatctgaagacctgggatcaatagaaaggagatgttcaggttaagataaaggttatgggacatgaagttttattgtgcagaggaat

SEQ ID NO: 962030 - DNA, 120 bp, Artificial Sequence
  ENSG00000277448_20 (sequence is synthesized)
gttttattgtgcagaggaatatctcacatagcagacttcagagagagagcaggtgacaaaatgtttcttattggacctaaaagggtgcctggttcttagttggttatctcatggatctgg

SEQ ID NO: 962031 - DNA, 120 bp, Artificial Sequence
  ENSG00000277449_0 (sequence is synthesized)
gccggggtgcagcgcgcccttggcggcccccaggcgccccaggctcacgtagccgtactcggccggcttcttgcagttcttgcccccgtagtcgtcggagaagaggtcggagaggaagtc

SEQ ID NO: 962032 - DNA, 120 bp, Artificial Sequence
  ENSG00000277449_1 (sequence is synthesized)
cgcgggggcgggcgcgggcggagccgcctcgaaggtgtccgtggccgtggcgggcgccggggcctgcggcgcgcccagcggctccaggtccccggctttagaaagaagacttgacgcctg

SEQ ID NO: 962033 - DNA, 120 bp, Artificial Sequence
  ENSG00000277449_2 (sequence is synthesized)
tttagaaagaagacttgacgcctgtgacgactcccctcttaagccacagacaatatgaggaccccgggggtcggcgcgaccgggcaggatcgcgccccgcttggggctggaccctggtcc

SEQ ID NO: 962034 - DNA, 120 bp, Artificial Sequence
  ENSG00000277449_3 (sequence is synthesized)
acggagccccgcccctagccccgcccaccacacctgccgcctgctcgaggcttggacacgcccgggtcttctcttgccccgcgctgcgccacccgacctgggccctgggatggggcaggg

SEQ ID NO: 962035 - DNA, 120 bp, Artificial Sequence
  ENSG00000277449_4 (sequence is synthesized)
gcggggggtgctcggccctgccacactgtgtgaccttgggaagatgcttttgctgctgccatttcacagacgggaaagcgacaacggcccgcctggacttgaacacaggcccaaggcctt

SEQ ID NO: 962036 - DNA, 120 bp, Artificial Sequence
  ENSG00000277449_5 (sequence is synthesized)
ctgaccacttgcccgcctctgctggtcttgctgtctgtccccacggccttcactactgtgtccctggtgcctagaacagagcctggtacatagaaggtgctcgatgaatgcttttcccta

SEQ ID NO: 962037 - DNA, 120 bp, Artificial Sequence
  ENSG00000277449_6 (sequence is synthesized)
tcccattttcaagaggagaaaactgaggcgatttgccaaggggagatccacgtggctgctttgacagagagtgttctgcaaaagggcttagaaatcagccagcaggtggcaggttctggg

SEQ ID NO: 962038 - DNA, 120 bp, Artificial Sequence
  ENSG00000277449_7 (sequence is synthesized)
actgcaggagccattcacatgcgtgaagatccgctgggcgcccttgctctgggatcaggaaaggccggtgccatggatgtgatagatgcacacagggcatcagcaggccgccgagaggaa

SEQ ID NO: 962039 - DNA, 120 bp, Artificial Sequence
  ENSG00000277449_8 (sequence is synthesized)
ccagagtgtccaacgaacagaaaacagtgctcaaccttcacatttatcgaatgttccttggcacatgctgtaattctggccctaaagacacattcatggacaagacaagcaattcctgtt

SEQ ID NO: 962040 - DNA, 120 bp, Artificial Sequence
  ENSG00000277449_9 (sequence is synthesized)
ctcgtggagctgaaattctcctgggggaagacaagcactaaacaagatcaatgattaaagtatagattgtattagattctggtcagcactatggaggaaaatacagcaggggagcagagc

SEQ ID NO: 962041 - DNA, 89 bp, Artificial Sequence
  ENSG00000277449_10 (sequence is synthesized)
ggtcagcactatggaggaaaatacagcaggggagcagagcaggagttctgggagatttgattttttgttttctggggtttactgctgga

SEQ ID NO: 962042 - DNA, 120 bp, Artificial Sequence
  ENSG00000277449_11 (sequence is synthesized)
tcaacctcccaagtagctgggaccacaggggcatgccaccacacccagctgattttttaatgttttgtagagatcaggtctcattatattgcccaagctgggggagttgattttaacttt

SEQ ID NO: 962043 - DNA, 120 bp, Artificial Sequence
  ENSG00000277449_12 (sequence is synthesized)
agttgattttaactttatgttagagtagtcagggaagacctcactgaggtgacatttaagcaaaaacctgaatgtggtgaagcaggtatctgggggaccttggaccacacaaagggaaca

SEQ ID NO: 962044 - DNA, 120 bp, Artificial Sequence
  ENSG00000277449_13 (sequence is synthesized)
gcaagtgcaaaggccctgaggtaggagcacgtagttgtggtgatgacggagagtagcaggaatttgtgtcatagaaatagtgggggctggccaggcacagcggctcatgcctgcaatcct

SEQ ID NO: 962045 - DNA, 64 bp, Artificial Sequence
  ENSG00000277449_14 (sequence is synthesized)
tctgcactccaacctgggtgacaaagcaagactctgcctccaaaaaaaaaaaaatggaacatgg

SEQ ID NO: 962046 - DNA, 86 bp, Artificial Sequence
  ENSG00000277449_15 (sequence is synthesized)
gagccgaaattgtgcctctgcactccaacctgggtgacaaagcaagactctgcctccaaaaaaaaaaaaatggaacatggaaacat

SEQ ID NO: 962047 - DNA, 120 bp, Artificial Sequence
  ENSG00000277449_16 (sequence is synthesized)
aactcaacagcaataaaaacaactcaattaaaaatgggcaaaggacttgaataaacatttctccagagaaaactgtgaatggctaataatcacatgataagatactcaacatcactaacc

SEQ ID NO: 962048 - DNA, 84 bp, Artificial Sequence
  ENSG00000277449_17 (sequence is synthesized)
ggctaataatcacatgataagatactcaacatcactaaccattaaggaaatacaaaccaaaactgcaatgaggcgcaacacttt

SEQ ID NO: 962049 - DNA, 120 bp, Artificial Sequence
  ENSG00000277449_18 (sequence is synthesized)
ccagcctgggcaactgagtgagactccatctaaaaaacaaacaaaacgcaatgagaagagaggattttgaatgttcccgacacaaagaaatgataaacgcttgaggtaatggatatccta

SEQ ID NO: 962050 - DNA, 120 bp, Artificial Sequence
  ENSG00000277449_19 (sequence is synthesized)
attacccagatttgattattacacgttgtatacatgtattgaaatatcattttgtaacccatgaacatgtacaattatgtgtcaactaaaaataaaaggaataaaacacaatgagatacc

SEQ ID NO: 962051 - DNA, 120 bp, Artificial Sequence
  ENSG00000277440_0 (sequence is synthesized)
cactgccctccagcctgggcaacaagagccaaactccctgtcaaaaaaaaaaaaaaagaaagcagttgttggacagtgggttggccattcttagaacgacttggaggcttattttattct

SEQ ID NO: 962052 - DNA, 120 bp, Artificial Sequence
  ENSG00000277440_1 (sequence is synthesized)
gggttgttctaaaaaggacaggacatttactggtcatatgtgataaaataaatagtctattaaatgaaatctaattattgttaatcattgatgccctatggataatgtcaaaagtcatca

SEQ ID NO: 962053 - DNA, 82 bp, Artificial Sequence
  ENSG00000277440_2 (sequence is synthesized)
aaattagccaggtgtggtggtgtgcgcctatagtcctggctacttgagaggctaaagcagaagaatcgctcgaacctgggag

SEQ ID NO: 962054 - DNA, 120 bp, Artificial Sequence
  ENSG00000261802_0 (sequence is synthesized)
agtgtggatggcatgcagtgggatggtgaaggatggggccagaggaaggaaggacatgcccgcccagctgtgtttgggatgctgcctccctggagaggggtcatgaagcctagcaggcag

SEQ ID NO: 962055 - DNA, 120 bp, Artificial Sequence
  ENSG00000261802_1 (sequence is synthesized)
agacctgctgtgtagactactcctgaaagactttcatgaaggcacaaaagcaacaggtttgctgagtggtgctgcccgtgccccataaggagaacggtgtatactgtttccacacgatgc

SEQ ID NO: 962056 - DNA, 120 bp, Artificial Sequence
  ENSG00000249441_0 (sequence is synthesized)
aagctagtagtctccaagagagaaagaaagccttcaccagatacagagacctgccagagccatgatcttggactttccaccttccagactgtgagaaataaaagcctattgcttaagcca

SEQ ID NO: 962057 - DNA, 120 bp, Artificial Sequence
  ENSG00000274184_0 (sequence is synthesized)
gttgtggagagtgtcaaataccaggctcaggtgttagaaatgcattgaatcatcagtgcagggtattcacatataacatggctggaacagtgttcagggcggtgtctgtaccgtatagag

SEQ ID NO: 962058 - DNA, 120 bp, Artificial Sequence
  ENSG00000274184_1 (sequence is synthesized)
tggattaaaggacaaaagagatgaaagaatacaggtgacccatgaatttagcaaaatgtaataatctgtgaaagtatgattgaaaatagggcaagggatgacatcgccaagggaggtctt

SEQ ID NO: 962059 - DNA, 120 bp, Artificial Sequence
  ENSG00000274184_2 (sequence is synthesized)
ttggaaaataaacgggattgtgaaataccaacgttttggaatggggaagaaaaggagttcgagaagaggagctacttagggagcgcccagatggttcaaacatcataaaaacaacagtgt

SEQ ID NO: 962060 - DNA, 120 bp, Artificial Sequence
  ENSG00000274184_3 (sequence is synthesized)
ttcaggagacggaacactgttgctttgctgcagagagccgaaagagggtgagaactaagctgatggtggaatttgggggaatgacagaggagggcaagagagagagatgttacctgtgga

SEQ ID NO: 962061 - DNA, 120 bp, Artificial Sequence
  ENSG00000274184_4 (sequence is synthesized)
ctgtcctttcgagtggttcagaagagttggtaagactaaaaatagacaataatctcttttgagaattgtgatactgcaagaaaagaaaaagaatattggttgaactaagcaaccggattt

SEQ ID NO: 962062 - DNA, 120 bp, Artificial Sequence
  ENSG00000274184_5 (sequence is synthesized)
aaagtattcttattttcaagggtagtggaaagctaatttgtagaaaagaaaaggtaaagtttagtaggcacaagaaattgaagatggaagaaaagagatacagctgatggggaggaaatg

SEQ ID NO: 962063 - DNA, 120 bp, Artificial Sequence
  ENSG00000274184_6 (sequence is synthesized)
agaccagatgggctggtgaagtagtttgtctcagaaaagaaggaagtgatttgttcctgaataggaggaaagtggagggtgagtgcaagagaaaagggagaagttgaagatgtttatgtc

SEQ ID NO: 962064 - DNA, 120 bp, Artificial Sequence
  ENSG00000274184_7 (sequence is synthesized)
agatgactctgaccacaaaggtgttaatcagaagatgttacagttgagccagactttgaagaatgttacaacggccaatgactggaagagacgacttcaagtgatgttctgtatctacta

SEQ ID NO: 962065 - DNA, 120 bp, Artificial Sequence
  ENSG00000274184_8 (sequence is synthesized)
gtgtttgactcttgcataccaaggcattcccccagcaaggtgaagaaacaatgcctataacatagataacccctcataaagaaacaatacctgtagcatagaaaacccctcataaagatc

SEQ ID NO: 962066 - DNA, 120 bp, Artificial Sequence
  ENSG00000274184_9 (sequence is synthesized)
cttatctaattttcccactggtcagagttttgcaagagggtctcagacatgacaagctgcacgttttaccaaaaaaaaaaaaaaagcttgcaatagaaagaataatatctgcagggcagg

SEQ ID NO: 962067 - DNA, 120 bp, Artificial Sequence
  ENSG00000274184_10 (sequence is synthesized)
tatggggatccaccatcttaagtccttttatccctaccaaatgtttccttctgagaaactgcatttgtcagctcagctctctcaacctctgggagtaggtttacatatatttgctcactt

SEQ ID NO: 962068 - DNA, 120 bp, Artificial Sequence
  ENSG00000274184_11 (sequence is synthesized)
gatatatggctgataggaactgagcaagtaaaattttcatttcattgaattttaattaatttacatttaaattgctacatgggattagtggttccatactagacagtgaagctagcctgt

SEQ ID NO: 962069 - DNA, 120 bp, Artificial Sequence
  ENSG00000274184_12 (sequence is synthesized)
acttgttaaaaagaacccaatgagtgaaatgaacaaagtaaacatagcacatttctaatgaagcacataaaataatgagtggccaaaaaaaaaaaaaaagactgtaaagttgtcttctat

SEQ ID NO: 962070 - DNA, 120 bp, Artificial Sequence
  ENSG00000274184_13 (sequence is synthesized)
gtaaaaagtccataaggtttatacacagaacatactcaatttgttcattcccttaaaggatctagcaacacactttttaatgtaagtacccaatttccccatttttaatgaacagatgaa

SEQ ID NO: 962071 - DNA, 120 bp, Artificial Sequence
  ENSG00000274184_14 (sequence is synthesized)
taccagtatctgctaacactgtggggtggggaggggagagtgatatatacctaagaaaattagcaacttcatcaataataaacacttctctatcatttatttattttcttttaaaaaatg

SEQ ID NO: 962072 - DNA, 120 bp, Artificial Sequence
  ENSG00000274184_15 (sequence is synthesized)
tattaacacctgaataatgcatggattttagataatgaagtatcaattttggtcaactaattttgacaaatatgtcacatcagtgaaagatgttaataaaaagaaatgaatgcgaaagta

SEQ ID NO: 962073 - DNA, 73 bp, Artificial Sequence
  ENSG00000270871_0 (sequence is synthesized)
tttgttttttgagatggtgtcttgctattttgcctagtctggtcacgaactcctgagcatcgcgtcacagccc

SEQ ID NO: 962074 - DNA, 71 bp, Artificial Sequence
  ENSG00000270871_1 (sequence is synthesized)
cctcctaagtagctgggactacaggtacgcgtcacagcccccagctagttgcatacttttttttttttttc

SEQ ID NO: 962075 - DNA, 72 bp, Artificial Sequence
  ENSG00000270871_2 (sequence is synthesized)
ccaactcccgggttcaagcgattctctcacgtcagcctcccgaaggctgaggtggatcacctgatccagggg

SEQ ID NO: 962076 - DNA, 120 bp, Artificial Sequence
  ENSG00000270871_3 (sequence is synthesized)
aaaaaaaaaaaaaaaaaaaaagtgggggtggggtgggggtggtaacataaaaaataaagaatttgaactatgagcttttctcaatacttcaaaatgtcaatcatatcaaaaattactgaa

SEQ ID NO: 962077 - DNA, 120 bp, Artificial Sequence
  ENSG00000270876_0 (sequence is synthesized)
ctcgaagctggggcgtctgacacctgaggcccgaagtaggtggccagcttcttagagggccaacccagggcattaacacaccaggatagtggccgcagttgtattatcttgtgcatttgt

SEQ ID NO: 962078 - DNA, 120 bp, Artificial Sequence
  ENSG00000270876_1 (sequence is synthesized)
caagagaggtcatccgaacgctgagataaaggcttgggattccattgtctcatctctttctgggagtgattttcctctcatctggaagtgcagagacagagtcttcatagggaactgaga

SEQ ID NO: 962079 - DNA, 120 bp, Artificial Sequence
  ENSG00000270876_2 (sequence is synthesized)
tgagcaattcctagaaggctgttaatgttgattaatgaaattatacaaaaagaatcataagatagctggagaagaaaattatctgtgatgcctggaaaagatacgtcccagtgggaggta

SEQ ID NO: 962080 - DNA, 120 bp, Artificial Sequence
  ENSG00000270876_3 (sequence is synthesized)
agtacagaatcctgagttctgagatgtgaggaattcagttgaggtaatggttctactataattgtggctaccattaaatttttgtttcttcaaattatgatttatttctcttcctgataa

SEQ ID NO: 962081 - DNA, 120 bp, Artificial Sequence
  ENSG00000270876_4 (sequence is synthesized)
cattgaacaatcataaatgtggagggaaaggaatcattgagggttgatttagagagagtaaacaggtgtaaagccatggttcctgtgtgttttaacaaatactaactgagcacccgccct

SEQ ID NO: 962082 - DNA, 120 bp, Artificial Sequence
  ENSG00000249196_0 (sequence is synthesized)
ccacgtgagaagtgcctttcgcctcccgccatgattctgaggcctccctagccatggggacctgtcgtcgctgccctcagcctccagatgcagcccccctgccaccttcaggacccctgg

SEQ ID NO: 962083 - DNA, 120 bp, Artificial Sequence
  ENSG00000249196_1 (sequence is synthesized)
gcagaggaaagtcttctttctgaaaccagcccaacttttctcccagagagtatcatggaactgaactttcaagatcatggcatctggacatcgagaaaacagaaccctcatctggccacc

SEQ ID NO: 962084 - DNA, 120 bp, Artificial Sequence
  ENSG00000249196_2 (sequence is synthesized)
tgctgctttttgaccaattcccatataaaccgctaacttcagtcagttggagggatggatttgagatttgccttctgtctctcaggtgatgtcaccagcaataaagccttcttccctggc

SEQ ID NO: 962085 - DNA, 120 bp, Artificial Sequence
  ENSG00000249196_3 (sequence is synthesized)
gcatagaatgccatagtgcagaggaaacagccccagaaaatggaacagctgctaagtgagactcctcagccaggccagagaatgtgcattctgacggactgcttctcatttgcactgatc

SEQ ID NO: 962086 - DNA, 120 bp, Artificial Sequence
  ENSG00000249196_4 (sequence is synthesized)
cggcgcccagagaaggagttgctctattatcctggcactccataaagaacaggtagaaataagcgcttcttaccaagatgaaatccacccatcatttctgaatggctcagttttgatttc

SEQ ID NO: 962087 - DNA, 120 bp, Artificial Sequence
  ENSG00000249196_5 (sequence is synthesized)
acgagatctgatgggtttatccggtgtttctgcttttgcttcctcctcatttttctcttgctgccaccacgtgagaagtgcctttcgcctcccgccatgattctgaggcctccctagcca

SEQ ID NO: 962088 - DNA, 82 bp, Artificial Sequence
  ENSG00000249196_6 (sequence is synthesized)
cctttcgcctcccgccatgattctgaggcctccctagccatggggacctgtaagtccaatgaaacctctttttgttccccgt

SEQ ID NO: 962089 - DNA, 120 bp, Artificial Sequence
  ENSG00000249196_7 (sequence is synthesized)
ctatgcggcagcgttgggtggcagccatggaggaatgctgttgaaatgtcccttctgtcctcaggggccttcagaagccacctggtcagtgtccgagcatggccaaggtgcagggtggct

SEQ ID NO: 962090 - DNA, 120 bp, Artificial Sequence
  ENSG00000249196_8 (sequence is synthesized)
gctgggactccatgcaaggctcctctatgggcaacctctgcggcagcatttcctgcttggctgcccaaggattcccagtgcttcctgcagtcaggcacttcctgcccggttctccctcct

SEQ ID NO: 962091 - DNA, 120 bp, Artificial Sequence
  ENSG00000249196_9 (sequence is synthesized)
tcccatcctcctttcccagggaccagacctgcatcgcatcctgaagctcagcctgcctactccttctccatcttttctttatccttcacaactgcagtcctcaattaatctctggtgcac

SEQ ID NO: 962092 - DNA, 120 bp, Artificial Sequence
  ENSG00000249196_10 (sequence is synthesized)
ttaactctgtctgcttcctgaagatgctcatagattctgaggattccccatgtgctgtgatgtgagagttaggggcgagggaggaaaacagccagctccactacctgtctaccctccctc

SEQ ID NO: 962093 - DNA, 120 bp, Artificial Sequence
  ENSG00000249196_11 (sequence is synthesized)
ccgaccattgagaaagttccctgttagagattcattcctttggaccatgaagccttttgattcctattaaccttgagtgagtcacgcttaagccttttaaaaaattttctgagtttttgt

SEQ ID NO: 962094 - DNA, 120 bp, Artificial Sequence
  ENSG00000249196_12 (sequence is synthesized)
ttgtgaaatataacatatataccaatgaacatgagatatataaatgcgttgtatgaataattagaaagcaaactatattccagcaagcgaaaacataacacactgccccagaagcaccca

SEQ ID NO: 962095 - DNA, 120 bp, Artificial Sequence
  ENSG00000249196_13 (sequence is synthesized)
caatccacgagtaagcacctccctccccctgaggtgcataagtaaggagaggaggggcagaggagctgccaggggaaggaccaaggatgtgctctataggtcagccccctggctctgcct

SEQ ID NO: 962096 - DNA, 120 bp, Artificial Sequence
  ENSG00000249196_14 (sequence is synthesized)
ttacaacacagctatgaaaagaagccagccggtgctctccctacccatatggagagattgccaggcagattccaaagtggaaaagtcagaggcaatacaggagggcctgtgtgcccagct

SEQ ID NO: 962097 - DNA, 120 bp, Artificial Sequence
  ENSG00000249196_15 (sequence is synthesized)
gactcagtagcgaaagggtttatgtgctcggagggagaccttcaggaatctgtgcatagaatgccatagtgcagaggaaagtaagactatgcagttgtatttgacttaaaacctccggaa

SEQ ID NO: 962098 - DNA, 120 bp, Artificial Sequence
  ENSG00000249196_16 (sequence is synthesized)
agataaatagggaagcaacaaaacctacagggaacaggggaggaagagggatggggctgcaagccaggggatgcctgcagccaccaggagatggggggaggcagggaggatcctttccca

SEQ ID NO: 962099 - DNA, 120 bp, Artificial Sequence
  ENSG00000249196_17 (sequence is synthesized)
gagcctctggaaggagtatggccctgcctacaccttgatttggatttctggcctctgaaactgtgagagaacaactgtctgctgtggaaagtaacctaggtttgtgggaattcgttacag

SEQ ID NO: 962100 - DNA, 120 bp, Artificial Sequence
  ENSG00000249199_0 (sequence is synthesized)
ccatctaggagccctgcgggaggcatgcaggtatttctctggaggtcatgcctggcaggcgtccactgttagagccagaggacccggagcattatctgaatgaactaatgaccaacaggc

SEQ ID NO: 962101 - DNA, 120 bp, Artificial Sequence
  ENSG00000249199_1 (sequence is synthesized)
gggcagaaatgagtgctgcggattgataacagggacagccagaccccctcccatccccacgaggcagaggcaccaggccacctggctttcccacacatcaacctcgtgctcacaccccac

SEQ ID NO: 962102 - DNA, 120 bp, Artificial Sequence
  ENSG00000249199_2 (sequence is synthesized)
tctggagaccaccagcttcgaggcaaaaagagagaacgacgtacaatgggcatcttccctcatccaccccatttcaaagagggttctgcttgcaggaactcaaagctcagagcttttagc

SEQ ID NO: 962103 - DNA, 120 bp, Artificial Sequence
  ENSG00000249199_3 (sequence is synthesized)
ttcccaaagccctatttccaaactaaagcaaaggtcctttagaatttgcacggcgggctgtgcaaaatgagagagaaggaaatcgctggcagaaatatccccgaagaagggatttctccc

SEQ ID NO: 962104 - DNA, 120 bp, Artificial Sequence
  ENSG00000249199_4 (sequence is synthesized)
ccaaagaccagaaagcaattcttctaggttaggggaatgaggagacatacagagaaaacaagaggcttgggagttcctcatgaaaggactggacctggagtggccatgcaggagaggtgc

SEQ ID NO: 962105 - DNA, 120 bp, Artificial Sequence
  ENSG00000249199_5 (sequence is synthesized)
cctgtgtccagaaacagtgctgctgtccttgacctcgtcactctgcaaggacttcgcttccccagcaggcagttcacctctggatacccctccctgatgcaaactttgctcatgtcatgt

SEQ ID NO: 962106 - DNA, 120 bp, Artificial Sequence
  ENSG00000249199_6 (sequence is synthesized)
ctatcaagatcaagaaaatggagcccataactgagatcagcacatgggtaaggaaactgctgaatggaaggagctccaagacctggaactgagaccgaagctggcaacatggcgggatgt

SEQ ID NO: 962107 - DNA, 120 bp, Artificial Sequence
  ENSG00000249199_7 (sequence is synthesized)
tgcaccccccacacacacgctcacacgtggttttcattccttctttcatattacggcgggcgtggaattaccagtcaatttgacatttataaatacattaactagcgcttccaattcttc

SEQ ID NO: 962108 - DNA, 120 bp, Artificial Sequence
  ENSG00000249199_8 (sequence is synthesized)
tcctgcttccaagtttgttctcaccacctcacagaaaatgctggggacagaattaaatgcagagtaatctaaacaagctttgatatgtcatatgtctttcctactgaataagctaaacca

SEQ ID NO: 962109 - DNA, 120 bp, Artificial Sequence
  ENSG00000249199_9 (sequence is synthesized)
accagggtaatttagtgatacttgggcaagaaaactaggaattacgcacactttccttttccaaattccccacatggaagtctgtgaattctactgcaattacagtggtataataaaaaa

SEQ ID NO: 962110 - DNA, 120 bp, Artificial Sequence
  ENSG00000249199_10 (sequence is synthesized)
ctggagaccaccagcttcgaggcaaaaagagagaacgacgtacaatggggtaaagcctccatgtgtaggcgatgttgtgaggaaagggtggccggttggaagggaacatttttaaattga

SEQ ID NO: 962111 - DNA, 88 bp, Artificial Sequence
  ENSG00000249198_0 (sequence is synthesized)
atgagattcttctagcacaccacgacacccagataaattttgtatttttagtagagacgagattttatcatgttggccaggctggtct

SEQ ID NO: 962112 - DNA, 120 bp, Artificial Sequence
  ENSG00000249198_1 (sequence is synthesized)
tggtacttttaaggaaatgacacccttcgcaatctttaatcccatctctttacacatcctaatgggctgtaattttctattgttctgtgcttcctgtgaagacattactctaagtgccaa

SEQ ID NO: 962113 - DNA, 120 bp, Artificial Sequence
  ENSG00000249198_2 (sequence is synthesized)
ttataaacaaacaaataaataaatcttcaaagttttaaaatatttttcacccctcatgaacatccagtatgttcattatttctgtacttccagagttagtaatggatgaagtgacagtga

SEQ ID NO: 962114 - DNA, 120 bp, Artificial Sequence
  ENSG00000276317_0 (sequence is synthesized)
gggctgggccagaacatgaagggaaggagcctcaacagggccaaggaacagcctgacgcaggcgggagagtgctcagaggttccgcctagctgcacgtgctggcacggggaggggggccg

SEQ ID NO: 962115 - DNA, 120 bp, Artificial Sequence
  ENSG00000276317_1 (sequence is synthesized)
agcgggggtggggggtgtggggcggggcagggtgggggaggcgggggcagggggagtgggtcggattcggcagcacttctgcaaaggatctgatggggtccctgggatgctcaatggtgg

SEQ ID NO: 962116 - DNA, 120 bp, Artificial Sequence
  ENSG00000276317_2 (sequence is synthesized)
accattgcgaaccaagacgctggctgccgtgaaacacccgctcaacgcccgggcactgggcttgcctcatacaggcagtttgttcagccctggcctcaggaccagacgctggggccaaag

SEQ ID NO: 962117 - DNA, 120 bp, Artificial Sequence
  ENSG00000276317_3 (sequence is synthesized)
cagatgcccatcagacggccgcagacgatgagaattacatggcaccactcagctcaccagctgtgcacctccaggggcttccgttggggcctcgttctgacgtctttctgagatccagca

SEQ ID NO: 962118 - DNA, 120 bp, Artificial Sequence
  ENSG00000276317_4 (sequence is synthesized)
gcgacctggcttcgggccagcctcccttatctgaatctcacgcaagcagcatgtgtgtgacagtacccattccatcttcatcatgcccaagagtttcagctccgggttctcttctgaagc

SEQ ID NO: 962119 - DNA, 120 bp, Artificial Sequence
  ENSG00000224509_0 (sequence is synthesized)
agcagccaaatgaaggaggaggtcgctccacttctaccttcagaaggctgtctcctgcgaggaccagaagttgagccaaggcacatggaacttacaatagcagatggtaagaaccagggc

SEQ ID NO: 962120 - DNA, 120 bp, Artificial Sequence
  ENSG00000224509_1 (sequence is synthesized)
agaaggagaactcctgaagcctccgaaggaaggaaatcattacagggccctacagaagtaggtcatgtgctacagctgctcatagtttaagaggaagaaacatgggatctcaaacctgga

SEQ ID NO: 962121 - DNA, 120 bp, Artificial Sequence
  ENSG00000224509_2 (sequence is synthesized)
atcctcctgaggcttatctaataaccatgatctctaatcgtctcaatgtgtgctcatgtttccttaggagtttgcacccacttctcagagctaacgagatgccgaaacagaacacagaaa

SEQ ID NO: 962122 - DNA, 120 bp, Artificial Sequence
  ENSG00000224509_3 (sequence is synthesized)
aaagtaatgaaggagatttaatagtttgtgttaaagctaatatggtccattaggggctgtcatttttataaacagtgaggatacgttaccctcttctttggtgtaaagtcattccgtgca

SEQ ID NO: 962123 - DNA, 120 bp, Artificial Sequence
  ENSG00000224509_4 (sequence is synthesized)
ggacctgtaaacattcagtaatgatctgtagaacatgcatgaacgacaattaaagcaccacttgaaaagtctgttttcctcacatatttgttttcttgctaaataaacttgtaaagttca

SEQ ID NO: 962124 - DNA, 120 bp, Artificial Sequence
  ENSG00000270252_0 (sequence is synthesized)
gaaattacgttgaccaatctcccacctctctgtctttgtctccagggcaaagagcctccctcatctgcaggatcattcagagcactggctgctctgactgaccagcagaaacctgggcag

SEQ ID NO: 962125 - DNA, 120 bp, Artificial Sequence
  ENSG00000270252_1 (sequence is synthesized)
tgacatcccagtggggctcagtagctgtgaatctgggatgtactttactctcaccaacagtaacctggaacctgaagattttgcacttgattactcttatctgtatagtagttggaattt

SEQ ID NO: 962126 - DNA, 120 bp, Artificial Sequence
  ENSG00000224500_0 (sequence is synthesized)
ttgcaacctattagtggaccatgagatcagtttcatgagtcctgaccgtcattttataaatgaaatgagaatggaatgaaatgaagtggagtggagtgggatggaatgagatggaactag

SEQ ID NO: 962127 - DNA, 120 bp, Artificial Sequence
  ENSG00000224500_1 (sequence is synthesized)
ggattagaaagcaaaagcaatctgaagattgaaagtcagaagcaaagttagaatggtgatttttttcccccaacccaacttggaagaatttgtctttggagaaccaacctaatcaaataa

SEQ ID NO: 962128 - DNA, 120 bp, Artificial Sequence
  ENSG00000224500_2 (sequence is synthesized)
agtagcatcaatttactggagacataatccaacttgcataattgtcctggctggtttacaccacagctgttcatatgacatggttcattaaataataaagtcttcatcaggctctcctgc

SEQ ID NO: 962129 - DNA, 120 bp, Artificial Sequence
  ENSG00000224506_0 (sequence is synthesized)
gacagttgccttcattagaaacagtgcttaaagcaggaattccagctgggtgtcctgtttcgaagttcacttactttctctcctttcccttccttaagaactcaaagtaaggagaaggct

SEQ ID NO: 962130 - DNA, 120 bp, Artificial Sequence
  ENSG00000224506_1 (sequence is synthesized)
aattttgctaaggtttcagaaaacaacacccaactggtaatttattgaaacaaagtgacttatttactcctagagacaagtatagaactataaaaagaatgaaagaactccgaatatgtc

SEQ ID NO: 962131 - DNA, 120 bp, Artificial Sequence
  ENSG00000224506_2 (sequence is synthesized)
aaaatgctcatagtactactgtctcatcctcctctgcaaatccaacagaaaggacacagtagagtgggcaagaatgcaaagaaggtctgtggtttggaactggcccaagccgaactaaac

SEQ ID NO: 962132 - DNA, 120 bp, Artificial Sequence
  ENSG00000224506_3 (sequence is synthesized)
ttttctaaatatacattaaactgtcaacaaagagcaccgtgacccacagcctgaataaagggagagccccaaggccctctgaagccactagttctgtgagttgttttagggagaagacag

SEQ ID NO: 962133 - DNA, 120 bp, Artificial Sequence
  ENSG00000224506_4 (sequence is synthesized)
tgtgaattccccagagaaacttggctttgagagcactagctggacatataggggtccatttccaatctgctctgagaagggccctgtcttcatcctaaaggaaggctttagaaaactgtt

SEQ ID NO: 962134 - DNA, 120 bp, Artificial Sequence
  ENSG00000224506_5 (sequence is synthesized)
atctaagatctaggattgaagatggtgagaacctgaggctgagcaattggccccaattcttcctgaagcattatctgagagagagagcctagcctgtggtttttgacccctggcagaagg

SEQ ID NO: 962135 - DNA, 120 bp, Artificial Sequence
  ENSG00000224506_6 (sequence is synthesized)
gtggagagagggaagaagaaagaaggaagatgaagacaacttcctgctcaagaccaacccatctcccctcattctggggtgaccaattgagaaaacaatgatatctcccttactctcatc

SEQ ID NO: 962136 - DNA, 120 bp, Artificial Sequence
  ENSG00000224506_7 (sequence is synthesized)
tgtttccaaaggctttgcttcatctaccaaaaaaccaactctctccaaaggatatggtcatattcatcatatagataagtaaactaaggctcaggaaaaatgacttcctcaagggcaaac

SEQ ID NO: 962137 - DNA, 120 bp, Artificial Sequence
  ENSG00000224506_8 (sequence is synthesized)
ccaggtgttgatccctaatgaatatccggcaccccgcattccatctcggtgactgcttccagaaaacacaagctgtgacatgcccattatgtactcaataaatctttaataattgagtgg

SEQ ID NO: 962138 - DNA, 120 bp, Artificial Sequence
  ENSG00000224506_9 (sequence is synthesized)
acaggggccttggtccttccattgattcataagtacaacaccctacttcttggatacagagccatcgcggaatgttcgctggagtgaggcagcgtatggagcacatgggacatgcagacc

SEQ ID NO: 962139 - DNA, 120 bp, Artificial Sequence
  ENSG00000224506_10 (sequence is synthesized)
ttattaagctcttagagtcattctctggtgactatattgattcatttatttgtactctaggaacataaaacaatatggcattattgacacagaaaacaaagaatagacagatagcataca

SEQ ID NO: 962140 - DNA, 120 bp, Artificial Sequence
  ENSG00000224506_11 (sequence is synthesized)
gctgaacaactttaattaccagggttccagtgtctgtttaactagctgtgtaaatatgagtatttgaattaatttttctaggatcaatttccttacttctaaatgagaaagacgaggcca

SEQ ID NO: 962141 - DNA, 120 bp, Artificial Sequence
  ENSG00000224506_12 (sequence is synthesized)
cgaggccaaaagttcttaaccttacttctggctttacaactgaatggttctctgttcctaataatgagttccttttttttttttttttctgagacgaagtctcgctctgtcaccaggctg

SEQ ID NO: 962142 - DNA, 120 bp, Artificial Sequence
  ENSG00000224506_13 (sequence is synthesized)
caggcgtgagccaccgcgcctggccctaataatgagttcttatgaatggtatatgtacgccaaatagaaagcatgctaatagctaagaaggaatcgtgaaggataatgagaatttgctgc

SEQ ID NO: 962143 - DNA, 120 bp, Artificial Sequence
  ENSG00000224506_14 (sequence is synthesized)
agaatttgctgccttttctagtcattctagaggaatttataaataaataaaatggtttgatatgtaagaatatctgctgagccaaacagtgcacacttcttagacataagttgtagccaa

SEQ ID NO: 962144 - DNA, 120 bp, Artificial Sequence
  ENSG00000224506_15 (sequence is synthesized)
ggcaataaagcttaaggatggaatagaagcattaaggaaaattttcctagaaaggaaaaaaatggaggcagaaagggtgggaaaggcagacagaagtcaactcataggaagcagagagat

SEQ ID NO: 962145 - DNA, 120 bp, Artificial Sequence
  ENSG00000224506_16 (sequence is synthesized)
aaagagctttgaaatataatgtgaggacctagacatatttgagaagagaggtactggtcaaaacaaaggacagagatggcagaagcccacaggaaacttatggccaatggtagcagtcag

SEQ ID NO: 962146 - DNA, 120 bp, Artificial Sequence
  ENSG00000224506_17 (sequence is synthesized)
tgaggatgagtagggtagtaataatatattataactaattactgccatttattgatcacttactaagtattaaaattatttgttaggaaatttataaataccttgtctcctttctagaac

SEQ ID NO: 962147 - DNA, 120 bp, Artificial Sequence
  ENSG00000224506_18 (sequence is synthesized)
tctctccaaaggatatggtcatattcatcatatagataagtaaactaaggctcaggaaaaatgacttcctcaagggcaaacccaggtctgtctgtgctatttttactataccgttgctat

SEQ ID NO: 962148 - DNA, 120 bp, Artificial Sequence
  ENSG00000224506_19 (sequence is synthesized)
ttgtccatgaacaggaaaaaccctcaactagggccttgagcaatcaagaattattggaaggaaaaatcgttacaggtaaccactgataaatcagatggaacaatcactttttgagcaaag

SEQ ID NO: 962149 - DNA, 120 bp, Artificial Sequence
  ENSG00000224506_20 (sequence is synthesized)
ggattgtgtcctctttatctgcgtgttccctgcatttagcccagggtctagcaacttgtgatagacaaagatgtgttagatcccccttcaaaaaaggacttgctgctcagctgctggggt

SEQ ID NO: 962150 - DNA, 120 bp, Artificial Sequence
  ENSG00000224506_21 (sequence is synthesized)
gcagtcagcctccagcctccaatcagctctgtaagagctggcctcagctgtaaataaaaactgcttcatttcaggtcatgctggtatccaataactgagaaaggagttgggggtaggggc

SEQ ID NO: 962151 - DNA, 120 bp, Artificial Sequence
  ENSG00000224506_22 (sequence is synthesized)
aaagaggggagagtgaaggggacaaaggcctgaagctaatcagggacccctctgatggccaattctgactccagagctccctatcaagtgggccaagttcttctcagccctactctggat

SEQ ID NO: 962152 - DNA, 120 bp, Artificial Sequence
  ENSG00000224506_23 (sequence is synthesized)
agtgacttctcccttggcccaattctgtctctacccactccttttcacaggtgttgatccctaatgaatatccggcaccccgcattccatctcggtgactgcttccagaaaacacaagct

SEQ ID NO: 962153 - DNA, 120 bp, Artificial Sequence
  ENSG00000224506_24 (sequence is synthesized)
gtgacatgcccattatgtactcaataaatctttaataattgagtggatagagtgatgtgagttgagaagcattattaaagattattttcccaaaaataaacaaaaaaaatgtgcccattg

SEQ ID NO: 962154 - DNA, 120 bp, Artificial Sequence
  ENSG00000224505_0 (sequence is synthesized)
gactagggtcctcaatccaaaactggaaccacttactcctaactgaagcttcagtacacttgatgcctactgtggtttgattttttacctacatatgacatgttcgctctacactgatca

SEQ ID NO: 962155 - DNA, 120 bp, Artificial Sequence
  ENSG00000224505_1 (sequence is synthesized)
tcttaaattttgcctgaactgtatattgtagcatacttaaacccattcaaggaaaaaattggcaaattgaaaattctcccattaaagattgatatttttgcaaactgacaaatttaacga

SEQ ID NO: 962156 - DNA, 120 bp, Artificial Sequence
  ENSG00000224505_2 (sequence is synthesized)
tttcggtacccctccccaaaaatgcagtcacataaaatatatcaatactattttgaattagctctagaaatcacactgaaactatgttacatttacaaatattaaatttattataactaa

SEQ ID NO: 962157 - DNA, 120 bp, Artificial Sequence
  ENSG00000224505_3 (sequence is synthesized)
ttcacattaaggaaaaaaacttctaaaaaggaaaacaagaaaagcaactcttcagtttcacataattaaaagaacaggagaaagcacgcaagctacatatagctaaatttacgaaaccaa

SEQ ID NO: 962158 - DNA, 120 bp, Artificial Sequence
  ENSG00000224504_0 (sequence is synthesized)
gaagaaaagccaccctgggagcaaagcaagttagggttgtaagagacatttctgagattaaagcagccagatctatgatggggtgggtacgggtggttaaagagaaacagaacgtgagaa

SEQ ID NO: 962159 - DNA, 120 bp, Artificial Sequence
  ENSG00000224504_1 (sequence is synthesized)
tgactcatgagactattaaactgacttaactgaaattttaaaaaagggggaaataccaactacgatgcaccccccccacccccaccacaccatgttttaatgctactcaaggtctatggc

SEQ ID NO: 962160 - DNA, 120 bp, Artificial Sequence
  ENSG00000224504_2 (sequence is synthesized)
tgggaaaggccacttgtttttcttcagttaatgctgagactgtttgtctgccagagacaccccatagaggatccatccttagacctcagttaacggcctggatctggaaagtggtggctt

SEQ ID NO: 962161 - DNA, 120 bp, Artificial Sequence
  ENSG00000224504_3 (sequence is synthesized)
caaacaaatccagcccctgcatcctccagagatcacagctgacatagaatgtatgtgtctgcggcaggcagccatgtgtgcatcagccagcagcctccccatcagcaccctacagtggaa

SEQ ID NO: 962162 - DNA, 120 bp, Artificial Sequence
  ENSG00000224504_4 (sequence is synthesized)
ttgtggggcttcccccaacagcaccctccaaaatcaagaaaatatttcaaggaaatgacacgtggagaggacatgcaggacaagtgatgagaataatcttgttctgaaaaacccttgttc

SEQ ID NO: 962163 - DNA, 120 bp, Artificial Sequence
  ENSG00000224504_5 (sequence is synthesized)
tgaagacaagcttgctaaatgcttggaaacctggtttccaaacagcacctctgactgatgtctggaaatcatcctaccctctctgaatcttgcaataggcttctccaactgacatctttc

SEQ ID NO: 962164 - DNA, 120 bp, Artificial Sequence
  ENSG00000224504_6 (sequence is synthesized)
actgcatcatgaggtagtagctcctctgagtcacttcccagctgggactgggtttgctcagcccagccactctgcctctcccacccctcctgcagcaccaccattacccacttttttttt

SEQ ID NO: 962165 - DNA, 120 bp, Artificial Sequence
  ENSG00000224504_7 (sequence is synthesized)
ttttctggtttctgtagagcagcctggtccctcatagactcgaattctctcaccaccaagacactgggctaagcaagctctctcctggcctgcagcaccttggtattctcagcctcacac

SEQ ID NO: 962166 - DNA, 120 bp, Artificial Sequence
  ENSG00000224504_8 (sequence is synthesized)
ttgagggcatttttattcttttctttgcagtcattttgtcttttcactggaacttatcttccctgcttctcaagtcaagagtggtaccataagaaaaccatgccttgtttctgccagcct

SEQ ID NO: 962167 - DNA, 120 bp, Artificial Sequence
  ENSG00000224504_9 (sequence is synthesized)
cagctctaagcaactcccacctgaaccgctgcaagaacctcccaaccatcccctccacacctaggcatgcactttctaatctattttctatacctcagctacaaccaaagccacagaaca

SEQ ID NO: 962168 - DNA, 120 bp, Artificial Sequence
  ENSG00000224504_10 (sequence is synthesized)
cagcagctaaaggtgcagccttcagaatcaccccaagttctagctatttcgcttctttcagccttcctatctgcaaagtagggatgatcattagatttaccttgttcaatggttgtgatt

SEQ ID NO: 962169 - DNA, 120 bp, Artificial Sequence
  ENSG00000224504_11 (sequence is synthesized)
aagttgctaccacagtgcaagtgctccatatattttacctatcattatcatcatcttcaacatcattaccattgcagaccccatgtgcttagaattggcccagcttctcctggcaactgg

SEQ ID NO: 962170 - DNA, 120 bp, Artificial Sequence
  ENSG00000224504_12 (sequence is synthesized)
acagagaacagcatgaaccaccatggcttcttgcaccacacttcgaaaaaggaaatattattgctccaagatcctgcccacaagacccacactggcatgtcagtgagactgtgatcatca

SEQ ID NO: 962171 - DNA, 120 bp, Artificial Sequence
  ENSG00000224504_13 (sequence is synthesized)
ttgtgggcaccatcatagttgcataacaacaattggccattggattgcacaatatggcacagagagccacctctagggagtctgaaaccccatgtccatgattgaaggtgattttgagat

SEQ ID NO: 962172 - DNA, 120 bp, Artificial Sequence
  ENSG00000224504_14 (sequence is synthesized)
gtgggaagagcaagcaggtatcaatgatgaaatctaggtgctcagaaacagggcaggcaaaacaattgcatgaacccacaaacctccacagtgtctgtaatgtgtagtccacttttgtgg

SEQ ID NO: 962173 - DNA, 120 bp, Artificial Sequence
  ENSG00000224504_15 (sequence is synthesized)
cactacattttatctcagagatacaactaatctcagtctctttatctgccaagtttcctgaatccttctttccaggatgaataaatttcctggcaaaacaagacccaggggaaagttttg

SEQ ID NO: 962174 - DNA, 120 bp, Artificial Sequence
  ENSG00000224504_16 (sequence is synthesized)
aatccatataataatatatcactgcatttgtcacgaactcttgattcaacagaactgattttgtgcgcttagtccttgccctggggatagaacatgaacaagagagaaaggggcctgctc

SEQ ID NO: 962175 - DNA, 120 bp, Artificial Sequence
  ENSG00000224504_17 (sequence is synthesized)
tcatggtcttatcctttagcaagagagataataaacaggtaaagacataaataaataatagaccttcggaggatggtaagatctacagataaaaatataacagggtaatgagctagagaa

SEQ ID NO: 962176 - DNA, 120 bp, Artificial Sequence
  ENSG00000224504_18 (sequence is synthesized)
ggttagagaaagggaggattgctgggaagatggaaggggctgcatgtggccactgggaagatgtaaacatttgtaaccaggtctgttgtgcatggaacaaggacacacaaacagggtagt

SEQ ID NO: 962177 - DNA, 120 bp, Artificial Sequence
  ENSG00000224504_19 (sequence is synthesized)
atggagaaaggacaaagtgacatgtgctggcaccaagaaggagctccagaaatgatgggtgttatgttagaatctactgggtgtcatcaagggtgacccaggtacagatcctctggactc

SEQ ID NO: 962178 - DNA, 120 bp, Artificial Sequence
  ENSG00000224504_20 (sequence is synthesized)
ggggggaaaaagagccagacaattagacaaattggaggcaccccttcccaggagacggcccttttgagcaagctgccagtgactgtcccctacattcagagatgctgctgcctgagctgc

SEQ ID NO: 962179 - DNA, 120 bp, Artificial Sequence
  ENSG00000224504_21 (sequence is synthesized)
caggtttcaaatgcaaagggctggctgggaatcaagaggcccttcttctcacgttaaagcgtagcagtctgttctgttctcctgtcatgtcataaataaaggagccttgatctcataaaa

SEQ ID NO: 962180 - DNA, 120 bp, Artificial Sequence
  ENSG00000264125_0 (sequence is synthesized)
ggtaataaaatgggaaattgctaaacacacatccatcttctgagcggtgctatcttaagtctaggtggaagccttcaaaacaggaacctggtcaattgcaaaccttcctcctaacccagg

SEQ ID NO: 962181 - DNA, 120 bp, Artificial Sequence
  ENSG00000264125_1 (sequence is synthesized)
ctcctcatccccagagccggctatgaagaaagatggtttgggaacagggaaagaagatctggttaggagccatcccggctgcttgtctcttaatgtcagtaaagacagggtttcgccatg

SEQ ID NO: 962182 - DNA, 120 bp, Artificial Sequence
  ENSG00000264125_2 (sequence is synthesized)
gttttgaaaggggacacagaacagctggatgccaaagagatgtcctaaaacaaaatgggatagcccatatactcctaataggctggaggtggactgaaggaagaatctaacaacatttct

SEQ ID NO: 962183 - DNA, 120 bp, Artificial Sequence
  ENSG00000264125_3 (sequence is synthesized)
aaaaaaaaaacacaaaaaaaacaaagttacagataaatgaaagaactgaagaatagtgcctgctggtgtgcatgacatcagtttaccccaggctacttcagcacacacttggcaggccag

SEQ ID NO: 962184 - DNA, 120 bp, Artificial Sequence
  ENSG00000264125_4 (sequence is synthesized)
gcacacacttggcaggccagcaggctgttatccatcttggacaggggcacgtgaaccaaggacaaagtgaatattgaacacatctcaacacgtggacaacccttgggactcaactttctc

SEQ ID NO: 962185 - DNA, 120 bp, Artificial Sequence
  ENSG00000278408_0 (sequence is synthesized)
gaaaactgactgtaaactgcttcccagagtgtgccgcttggcttccagccccacgtggagaacacagccctccaagcgcccccaggtgtatgacgctttcttacccattcttccttctcc

SEQ ID NO: 962186 - DNA, 120 bp, Artificial Sequence
  ENSG00000278408_1 (sequence is synthesized)
tcatgtgtttttaggaacatccaaagggaagataattaaaacctgcaagaaaaccagctggcagagaaaaggaaaatcctggtgacttagtgacgacgccacatgtttatggcaggagaa

SEQ ID NO: 962187 - DNA, 120 bp, Artificial Sequence
  ENSG00000278408_2 (sequence is synthesized)
agaagaaaagaagtcttcatataagaaaaggcaagagaagcctacaaaagtcttgctaacactgctgtttgaacgtggagcaatgttaatatcaggtagctgacaaacattattacccaa

SEQ ID NO: 962188 - DNA, 120 bp, Artificial Sequence
  ENSG00000278408_3 (sequence is synthesized)
agttagaactaccctagaggagaactccgtctgccaagtgctaacagctagcagatgcacttgtgtctcgggattccagccctggagttccgctaggcaccgcgctggttccctcggctc

SEQ ID NO: 962189 - DNA, 120 bp, Artificial Sequence
  ENSG00000261498_0 (sequence is synthesized)
ataattgctgccaaaatcatcacaagctgtacgtcatcaaggctccctttgcactcccaagaagaactgttcattttaaacaaaagtgatgagaattcctccagaggtgggaacagagaa

SEQ ID NO: 962190 - DNA, 120 bp, Artificial Sequence
  ENSG00000261498_1 (sequence is synthesized)
aacttcatgcttggtaaagcacctgaggcacccattacaatctgggacaagatgaggacatcaacactcatgctgtattccacatgggaggccaagtcaacgcaagatgatttttaagag

SEQ ID NO: 962191 - DNA, 120 bp, Artificial Sequence
  ENSG00000261498_2 (sequence is synthesized)
accagcctaaccaacaaagcaagaccaagaccccttctctacaaaaaaataagaaaattagcctggcgtggcggtgcacacctgtggttccagctacactagaagctgaagggggaggtt

SEQ ID NO: 962192 - DNA, 120 bp, Artificial Sequence
  ENSG00000261498_3 (sequence is synthesized)
cacttgagccccgagtttgaggctgcagtgagccacattagcgccaccgcactacagcctgggtgacagagcaaaagcctgtctccaaaaaaataaaataaaagctataaatactgcaaa

SEQ ID NO: 962193 - DNA, 120 bp, Artificial Sequence
  ENSG00000235337_0 (sequence is synthesized)
tgggttgcttcactggttttgcttcttagctctccagttacgtgttacaaattccctaattaatttcctctgcttaaaatacctagagaggagaggtttctgcttcctggctgggtcttg

SEQ ID NO: 962194 - DNA, 120 bp, Artificial Sequence
  ENSG00000235337_1 (sequence is synthesized)
gaaatttcagcatggagagaaagaaagttttaccaccaatttgtgcctgaaacacaagatgaacagacgtcttctgcattaaaaaaggacataggcatgcattaaatcccttatgtctta

SEQ ID NO: 962195 - DNA, 120 bp, Artificial Sequence
  ENSG00000235335_0 (sequence is synthesized)
aggcctccccagccatgtggaactgtcctctcagatctaccatgtgagtgcacacatccttccagtcaaccagagattctgtgcatttcttctggagagatctgatgcacagtgataact

SEQ ID NO: 962196 - DNA, 120 bp, Artificial Sequence
  ENSG00000235335_1 (sequence is synthesized)
acagtgataactcggcgatacctacacaaactgtaggccattttccagtgattgaagccactgttctggaaaggatgtatgcccagctttcgaagacacagtcccacatatacgtcttca

SEQ ID NO: 962197 - DNA, 120 bp, Artificial Sequence
  ENSG00000235335_2 (sequence is synthesized)
cagctacatcggctgaaaagatgtagccagtccccgaacagaaaggaagttagtggggcagaattttcaatttaagaagcacgtatttctcctagaaactgcatggtagattgtctgtta

SEQ ID NO: 962198 - DNA, 120 bp, Artificial Sequence
  ENSG00000235335_3 (sequence is synthesized)
ttctgaataatttatttcaagaaacccacagaattgctgaaattcttttgtacagccagaggtggggtcgctttgggactctgagattctcacgcaggaagtttactggagcatgttctt

SEQ ID NO: 962199 - DNA, 120 bp, Artificial Sequence
  ENSG00000235335_4 (sequence is synthesized)
aggaacaacacctgtctctaatgtgagaggagaaagaagaaggcaaagggagagtctgaaccttgatgcagtcacagcacagacctgagctgaccctgcagggagctctggggctgggat

SEQ ID NO: 962200 - DNA, 90 bp, Artificial Sequence
  ENSG00000235335_5 (sequence is synthesized)
gccatctttctcctctcttttaacaaagcaccctcgctgttggtccctgcaagcttcaaagaataaaaggcaatgcagagaaggctggag

SEQ ID NO: 962201 - DNA, 120 bp, Artificial Sequence
  ENSG00000235335_6 (sequence is synthesized)
agagctgctggtatatttatgcccaaaggccaataaactcaagacccaggaaaagccgatgtttccatttgagtccaaagttctggaagctaaaagtccaagatcaaggtgttggcagag

SEQ ID NO: 962202 - DNA, 120 bp, Artificial Sequence
  ENSG00000235335_7 (sequence is synthesized)
ttgattccttccaaggactgagggagaatttgttccacgcctctgtcctggtttcttgtggtttgctggcaatctttggcattccttggcttatagatacatcatcccaatatttgccta

SEQ ID NO: 962203 - DNA, 120 bp, Artificial Sequence
  ENSG00000235335_8 (sequence is synthesized)
gtggtgcgcacttcttcccaacttcacattcaatgacatcatgttgatatcttgaaactggtggcacatacgtttataacacaaaaataggcaatgctagaaaccaggggttctcccact

SEQ ID NO: 962204 - DNA, 120 bp, Artificial Sequence
  ENSG00000235335_9 (sequence is synthesized)
tcccttgcctagaaagctggtttgccagaaaagccacagtgaagaaagattgcttccatatctatctctgtgcccaaattcatgcaataaattcttcgctgttgtttgttgttgtttttg

SEQ ID NO: 962205 - DNA, 120 bp, Artificial Sequence
  ENSG00000235335_10 (sequence is synthesized)
ctcattttctcttgctgccgccaggtaagaagtgcccttcaccttctgaggcctccccagccatgtggaactcaccctcgctgttggtccctgcaagcttcaaagaataaaaggcaatgc

SEQ ID NO: 962206 - DNA, 120 bp, Artificial Sequence
  ENSG00000275759_0 (sequence is synthesized)
ggatttttaaggatggcaattatgtggcacacttgccactactcttcccccttgtacccatggcagacattaataattaatcatggccctcatttcctctaggctcagatgtgagatctc

SEQ ID NO: 962207 - DNA, 120 bp, Artificial Sequence
  ENSG00000275759_1 (sequence is synthesized)
agaatccttttccatgcatgttcctggaagccactgagaattgactgggaagtggggagcacaccagatgaaacatacacgccatttctggttgggtcttttatccccagcctcagttga

SEQ ID NO: 962208 - DNA, 120 bp, Artificial Sequence
  ENSG00000275759_2 (sequence is synthesized)
attttgtttttgttttggtaactcaggacaactcacaccccctggttgtcttgattttttatttaaatgctgagtttaagtgcttgtgcagttggtttcttgaactgaacagcacacttt

SEQ ID NO: 962209 - DNA, 120 bp, Artificial Sequence
  ENSG00000275759_3 (sequence is synthesized)
cacactttatgtttattctattgcatgtcattgtctttttattctaagcaagaggtcagcaaattatggcccacaggccaaatctggctcaccctctgtttttgtaaataaagttttatt

SEQ ID NO: 962210 - DNA, 120 bp, Artificial Sequence
  ENSG00000287210_0 (sequence is synthesized)
agtaacgggccctagagagaattgaagtgacatgaaaatatcagaaattcagagaacaacaacataaaaaggaagtttcatcttcactgaatcacgctgcccagttaagaaagacattat

SEQ ID NO: 962211 - DNA, 120 bp, Artificial Sequence
  ENSG00000287210_1 (sequence is synthesized)
aggaggaagggcaaaagaagatggatttggaggaagatgctacattctgaatcattcaaggaaggaccttgactgaacaatatatctgcaaactaagaaaaaaggaaaaaagaaaaataa

SEQ ID NO: 962212 - DNA, 120 bp, Artificial Sequence
  ENSG00000287211_0 (sequence is synthesized)
aggcataaccgcagtatataaatgatgctgaagcgtgatcacgttttttcaggttcctgtatcttcctgtcgagttgctggctgcccgatgtagaggactaggaatcaggagtcagtggc

SEQ ID NO: 962213 - DNA, 120 bp, Artificial Sequence
  ENSG00000287211_1 (sequence is synthesized)
cgtatgctggaggctggagccgagggagcgtggctcccctcgctgtggttgttggcagcaacggagagatagcagcgcggctggaacggcaagagaaatagtatcaacagaggaatggaa

SEQ ID NO: 962214 - DNA, 120 bp, Artificial Sequence
  ENSG00000287211_2 (sequence is synthesized)
ttataactagaaattttattttggtgaataagctgaggacttcctagagaagctgtatgatgtgaaatagttgcaaataatgacaaagtaactcgtagataagttactttaaggctttat

SEQ ID NO: 962215 - DNA, 120 bp, Artificial Sequence
  ENSG00000287211_3 (sequence is synthesized)
ttgttaagttactgcatagagttgcaaaagcatcgacaacatatttcctcaaaatgtagagtttacaagttttctgagctccctgaagtttgcaatctattccagtctcagtgtcctcta

SEQ ID NO: 962216 - DNA, 120 bp, Artificial Sequence
  ENSG00000287211_4 (sequence is synthesized)
attttacatcaatcttctaatgatctagattgcccattgcatgcagctatcttttcatgtttgatttggttaaaggaaaatcagctttacattgtgaaaatgcatattgttagcgaattg

SEQ ID NO: 962217 - DNA, 120 bp, Artificial Sequence
  ENSG00000287211_5 (sequence is synthesized)
tgaaattgtgaggaattgggctgtaattactgaatattggctctccatgaacatgttgctaaaatgtgggaagatgtgccagagaaattgtctctctcctcagtagtccatcgttacagc

SEQ ID NO: 962218 - DNA, 120 bp, Artificial Sequence
  ENSG00000287211_6 (sequence is synthesized)
caagaatctatgcttctatgtaaattgaaaaagggaaatgaaacagtctgtggatgtggactctctcaggttgaacgtaggtggatcagcttgtactcaacatctgttcaggctggaaat

SEQ ID NO: 962219 - DNA, 120 bp, Artificial Sequence
  ENSG00000287211_7 (sequence is synthesized)
gcagaggaagtttaatatgtttactcaatcatactggtttcctgggtgccaaggcagaaaatctaaaacatatgacttctgttcacactatgtgggagctatttagaacaaaggtgatga

SEQ ID NO: 962220 - DNA, 120 bp, Artificial Sequence
  ENSG00000287211_8 (sequence is synthesized)
tcctggaagaaaatgtggagacgctatctcgggtaccagcacagttggacttctttgctgccagcaatcaacagcccttaaacatcaacatttcaaggttttgtcgaccagtgtaccaag

SEQ ID NO: 962221 - DNA, 120 bp, Artificial Sequence
  ENSG00000287211_9 (sequence is synthesized)
taacctctaaaaacatttgagaagaaatagaaaataacactagattatttcttaacatatcaaaagattatcaacatatggccttggatgcttttcattccccatccttatatgtccata

SEQ ID NO: 962222 - DNA, 120 bp, Artificial Sequence
  ENSG00000287211_10 (sequence is synthesized)
caaaattataatacatttaatgtagcattccaatccagatagtagtttgtggagttaaatttcaaactccctttttgaaaatttccttgcattcataaacacgttagctatccaggacag

SEQ ID NO: 962223 - DNA, 120 bp, Artificial Sequence
  ENSG00000287211_11 (sequence is synthesized)
cgtgttgctctaggaacaaaagtggggacttacaaagaaggcaaattataagaaatatatttctgtcaaaattttatgaaacaaggaaaatcataaaataaaaattaatattagaagaaa

SEQ ID NO: 962224 - DNA, 120 bp, Artificial Sequence
  ENSG00000287212_0 (sequence is synthesized)
caaaagtgtttaactcacatgaggaatcactgaaattatggtttgtgttatgtggctcgagcatgcatgtgtatttcatttctaccataacagcgacaatgctgctgaaaagtagctcaa

SEQ ID NO: 962225 - DNA, 120 bp, Artificial Sequence
  ENSG00000287212_1 (sequence is synthesized)
ctgtttgtattttacttcttgctacatgcacgtgcgccagcaccctcttatcttcagctgactaatgagggagaaagcactgaaggacaggaactctgggttgccctgtcctcatctttc

SEQ ID NO: 962226 - DNA, 120 bp, Artificial Sequence
  ENSG00000287212_2 (sequence is synthesized)
ctcgtatgtcatcattttcaaagttcgtggttgtcgaatactggaagtagcccagatcgtgtgtggctttgtacggcttccatatgcccctccttctgtggtagagcacgattaccttct

SEQ ID NO: 962227 - DNA, 120 bp, Artificial Sequence
  ENSG00000287212_3 (sequence is synthesized)
atgggccttgggagcgtgaatggagcagcaaggaacggggacacatatatcacctgtgtctctgcacatgcacacggtttgtggctccgtcggacttcacttacaaaacccaagttcaaa

SEQ ID NO: 962228 - DNA, 120 bp, Artificial Sequence
  ENSG00000287212_4 (sequence is synthesized)
gatcaaattatgaagcatttcaagatggcaacagatgagaatcagacaagcatagagtccttctgagcttagagccttacgtgaccacaagggccacatatccaggaagctggccctgct

SEQ ID NO: 962229 - DNA, 120 bp, Artificial Sequence
  ENSG00000287212_5 (sequence is synthesized)
tttgaactggaaaagttctgatcaattttcttctatcagttatttaattattttcctccctcaagtctctctgttctctcctcctggaactcctagtaaatacataaagaaacgtctagc

SEQ ID NO: 962230 - DNA, 120 bp, Artificial Sequence
  ENSG00000287213_0 (sequence is synthesized)
agaaacctcaaggccaagaggacgtggtggaggccaacttgggggttgcaggacatcacccacctacccacgagatgatctattaatagctcagtggttctcacacctgggcaggcattg

SEQ ID NO: 962231 - DNA, 120 bp, Artificial Sequence
  ENSG00000287213_1 (sequence is synthesized)
gcattacctgaagctgagatgaaacccaaatggctgagtcccgcacccacagtgtctgattcagcgagtctggggcggggcctgactgaatttcctgcaatacagaaaaatctctctggc

SEQ ID NO: 962232 - DNA, 120 bp, Artificial Sequence
  ENSG00000287213_2 (sequence is synthesized)
tgctgccaggaggctgctgtgtaggagactgagcatggaagccccagcccagccctgcccagttaggaagcaactattgtattcagcaaaccctgctggctctaacgagaagtatcatcc

SEQ ID NO: 962233 - DNA, 120 bp, Artificial Sequence
  ENSG00000287213_3 (sequence is synthesized)
gccaaatgggtcttttcaaaggttccctgtgctccagcccctcatcacctgggatggggttgtctgcaccgctgtccttgtgcctgatgtccccacacgctcgctcctcctccaccttcc

SEQ ID NO: 962234 - DNA, 120 bp, Artificial Sequence
  ENSG00000287213_4 (sequence is synthesized)
ggtagtcccagcttgaaagttctgacctcatccccttccccaacacacccctactccctgtcacatcactcgaatctgctgcctacaattggtgggagtgaaaccacttagtttgccaac

SEQ ID NO: 962235 - DNA, 120 bp, Artificial Sequence
  ENSG00000287213_5 (sequence is synthesized)
tttgaaggaatcctgtgaaatgctcaggtaactggcaccaatttcccatttgttcccttgacatttcagtgctgcttatggattagtgctttgggcagctgcacagataacccacctttt

SEQ ID NO: 962236 - DNA, 120 bp, Artificial Sequence
  ENSG00000287213_6 (sequence is synthesized)
gatctgggtccgcttggcacaagatacaataaatgtcatgataaatgtcagccaggattacaatgcttccttcacaaaccttagcacagacggtttcaataaagattgcttgattaactt

SEQ ID NO: 962237 - DNA, 120 bp, Artificial Sequence
  ENSG00000287214_0 (sequence is synthesized)
ttccacccaccctggcccccaaatactctgggaggcggaaagcctcaggcaagttttcaagctccttttgcgcttcacctggaaacagacttggggctgttgcagggggcaaggtgggag

SEQ ID NO: 962238 - DNA, 120 bp, Artificial Sequence
  ENSG00000287214_1 (sequence is synthesized)
tgagactgacccttcagttttcatgggagctgggtgagacctgtgactgctggctttcccccacttcgctgacaacctggatgactcagcagaggcagccataatcctcctagatacaca

SEQ ID NO: 962239 - DNA, 120 bp, Artificial Sequence
  ENSG00000287214_2 (sequence is synthesized)
cagcagccacagcaagacccacccaagaagagtctgagctcagacccacctagccctgcctccacctgatggtccttccctacccaccctgatagtgtaaaacaaagggtgaggtgtata

SEQ ID NO: 962240 - DNA, 120 bp, Artificial Sequence
  ENSG00000287214_3 (sequence is synthesized)
tccacctgatggtccttccctacccaccctgatagtgtaaaacaaagggtgaggtgtataatcttgggagttctagggccctgtctactgcaggtccctctccacactactacagctgat

SEQ ID NO: 962241 - DNA, 120 bp, Artificial Sequence
  ENSG00000287214_4 (sequence is synthesized)
ccgccacctctaccagaactggcactggtatccatggctgatcacagaactttgttcagacaagcctcagtaccaagcctggagctgggtagactcgctgggtggctagacccagaagag

SEQ ID NO: 962242 - DNA, 88 bp, Artificial Sequence
  ENSG00000287214_5 (sequence is synthesized)
agttcggctcacaggaagccacatccatgggaaaagggggagagtactgcatcaagggaacaccctgtgggacagaaatcttctgacc

SEQ ID NO: 962243 - DNA, 76 bp, Artificial Sequence
  ENSG00000287214_6 (sequence is synthesized)
aaaccaaccctggtaatatgacaaaactaggcctgtcagcatcccgcaaaaatcacactagtttaccagcagttca

SEQ ID NO: 962244 - DNA, 90 bp, Artificial Sequence
  ENSG00000287214_7 (sequence is synthesized)
agaaatccctgatttacctgaaaaagagttcaggaggttaattcttaagctaatcagggaaggaccagataaaggtgactcctgggctca

SEQ ID NO: 962245 - DNA, 89 bp, Artificial Sequence
  ENSG00000287214_8 (sequence is synthesized)
acactatcgcacccagctaaatgtcttctaattgttgtgcttggaccttttatatttaatgtaatatttgtatataagggcataagtct

SEQ ID NO: 962246 - DNA, 120 bp, Artificial Sequence
  ENSG00000287215_0 (sequence is synthesized)
gctattctctggagtcagatggataaagcttcagtttcccaggtaaccaaccatggatctgagctgagtgacccagtgccgatgtgaagaagaatgttgccaagacaacggaatccatac

SEQ ID NO: 962247 - DNA, 120 bp, Artificial Sequence
  ENSG00000287215_1 (sequence is synthesized)
ccctttccagcactgaggccttcctccctctcactacctgcttggatctcaggctttaccccataaagacaaagaaactggctgaggagacaagagaaagaaagtagcagaagatgggaa

SEQ ID NO: 962248 - DNA, 120 bp, Artificial Sequence
  ENSG00000287215_2 (sequence is synthesized)
ggaaacagacggagtctcacttgtgttgccaagagagcttgagcatcaactggcagtgaggatggcaggaaagcaactgacttatcccctctcaccagaccttccaactgtctgcaacac

SEQ ID NO: 962249 - DNA, 120 bp, Artificial Sequence
  ENSG00000287215_3 (sequence is synthesized)
tggcattgccacgtatcccggcacgttgttgatcccattgtggcattgtggtcagagaatatacaaatcgctgaagaatccattgtttatggacattcctgggatagtattcatttaaat

SEQ ID NO: 962250 - DNA, 120 bp, Artificial Sequence
  ENSG00000287215_4 (sequence is synthesized)
atctctatgtacactgtaatggaatataatacaaaaatggagttgcacgcaaaatgagggtaccactcagtaaatggttccacagggacgtctgatcccctacgatctgggttaagaaat

SEQ ID NO: 962251 - DNA, 120 bp, Artificial Sequence
  ENSG00000287215_5 (sequence is synthesized)
ggtgtagtgtattgccggcagctcaaaagcactctcatgccagtcactcttgtcttccacctcagcaaatctaaccactcttgtgacttttaacacttgacgataatcctgcctgtttgt

SEQ ID NO: 962252 - DNA, 120 bp, Artificial Sequence
  ENSG00000287215_6 (sequence is synthesized)
gaacgcattacacatgagtagactcagtacagtacgtattttataatccgggtttctcttggcaacattaggtttttctccttgctattcacttttgtcgtgctgtgtagctgaatttcg

SEQ ID NO: 962253 - DNA, 120 bp, Artificial Sequence
  ENSG00000287215_7 (sequence is synthesized)
tttctttgcattcctgcgcagtgttttgaattgtatgacgatgccacaatttattcatgccttttatttctaatgggctcttcagtagtttccagcgctggagtgttagtgttattattg

SEQ ID NO: 962254 - DNA, 120 bp, Artificial Sequence
  ENSG00000287215_8 (sequence is synthesized)
tggtgcacgttcacaaggatgtcctttggttaacatgcgtatgcatttaaggctgtgcttgcaggactgctttgattactttttcttccttcatggcactgtaagtggtgacagtggatg

SEQ ID NO: 962255 - DNA, 120 bp, Artificial Sequence
  ENSG00000287215_9 (sequence is synthesized)
gagggaaagctgtcaacatgtcacccgtaagtatcgttgtttttgtaggcttttaaaatatattccaacggaatcaagagacttcccttttgttcgtagttggctaagaggttttatcat

SEQ ID NO: 962256 - DNA, 120 bp, Artificial Sequence
  ENSG00000287215_10 (sequence is synthesized)
aagtgcatggtcatttaaaaaaaatcaaacccatgaaatacccttcctgcgtctgtagggaatatcatattttttctccttcatacattacttctgagagatagatttttcaagcgctga

SEQ ID NO: 962257 - DNA, 120 bp, Artificial Sequence
  ENSG00000287215_11 (sequence is synthesized)
accgcttcatttctagaatactcttgacttgtttgtgatacgttttcctttttggagatttaactgatttgttttgctaatgctttattcaagatttcttcttctgtgcttatgtaaaag

SEQ ID NO: 962258 - DNA, 120 bp, Artificial Sequence
  ENSG00000287215_12 (sequence is synthesized)
ataggcctgtgcatttcatttcttaccatgccctttaaggtttttccctcataaaacgggatgggaagcatttcccgttttttatgttacttggcaagaaggtaagattgatattccttc

SEQ ID NO: 962259 - DNA, 120 bp, Artificial Sequence
  ENSG00000287215_13 (sequence is synthesized)
cttcacaaacgttttgtagaattaatcggtggcagcatcagagtccgtaggttcttgtggctgttgctgttgtttccttcagattccgcccgtttagaatttgtaggacaattcagatgt

SEQ ID NO: 962260 - DNA, 120 bp, Artificial Sequence
  ENSG00000287215_14 (sequence is synthesized)
ttagtctgttttctgtcattttgttgtattttcttgaaatgtgtaaattatatccaaagtttcacgtttgtgggcataaagttgctcatggttttgaataatgatctctttaatgccttc

SEQ ID NO: 962261 - DNA, 120 bp, Artificial Sequence
  ENSG00000287215_15 (sequence is synthesized)
attgcccatagtgatgtctccttagccactccagacacgggttgcttcatgatttctctcctttttgttcaggcctacacaaggcatgtcttaatcacatcatcttttcaaaaaaccacc

SEQ ID NO: 962262 - DNA, 120 bp, Artificial Sequence
  ENSG00000287215_16 (sequence is synthesized)
tctggctgtgttgttttatctttaactgatttgtacttttatcgttatttcatttcttctgctttcttcaggtttaatctgttgttcaacatggttaagaaagatgcaaatgttgtgcct

SEQ ID NO: 962263 - DNA, 120 bp, Artificial Sequence
  ENSG00000287215_17 (sequence is synthesized)
ttctttttcatgcaatctagacaattaaaatatatcccataagatttcatcaggttcaaaatactttgcgatttcattggtgatgttttccttgagctatgggttatttagaaaatagga

SEQ ID NO: 962264 - DNA, 120 bp, Artificial Sequence
  ENSG00000287215_18 (sequence is synthesized)
gtgggtaggcatcagctgagttgatggctgtgttttcctttctgctctaacaggacagcattcagttcaatgccttgcagttgctgtgctctccttccaccagcgtgcaaaagtgctctc

SEQ ID NO: 962265 - DNA, 120 bp, Artificial Sequence
  ENSG00000287215_19 (sequence is synthesized)
cacaccacaccactgctgttgggaggtgtgggatgggtcatgtcagcaattcaagacagtcccttttacatcttaagtgcatctttcagtgatacaaagtgaaaaccaggctttacccca

SEQ ID NO: 962266 - DNA, 120 bp, Artificial Sequence
  ENSG00000287215_20 (sequence is synthesized)
tatttcattttcttgcttaattgccctctgaacttccgggactatgttgagaagaagtagcaaaagcgggcatctctgtcttgctcctgatcttagaggaaaagctttcactctttcgcc

SEQ ID NO: 962267 - DNA, 120 bp, Artificial Sequence
  ENSG00000287215_21 (sequence is synthesized)
atcgtgtacagtgttcacaatgagtattttatataggacttttgtgacgttgaggttgtttccttctgtttcaaggagtttgagtgtttttatcacgaagggggttgacttttgtcagat

SEQ ID NO: 962268 - DNA, 120 bp, Artificial Sequence
  ENSG00000287215_22 (sequence is synthesized)
gcttttagtgcatcaattgagccgatcatgtggttttgtccttcattttgttgatgccgtacactaaattagttgattttcattgatcgaaacttccttgcattccacgaataaatccca

SEQ ID NO: 962269 - DNA, 120 bp, Artificial Sequence
  ENSG00000287215_23 (sequence is synthesized)
gaataaatcccacgtggtcatgggcctttcatgtgttgttgaactcggtgtgctagacttttgttgaatatgtatgcacaaacattcttttgggaagtgtgtgtgtgtgtgtgtgtgtgt

SEQ ID NO: 962270 - DNA, 120 bp, Artificial Sequence
  ENSG00000287215_24 (sequence is synthesized)
ttctggtcctagttcttctctaactgtttagtagaattctccactgaagccatctagtcctgcggttttctctgttgggaggttgatgaatactggttaagtctccttatgagttgtcga

SEQ ID NO: 962271 - DNA, 120 bp, Artificial Sequence
  ENSG00000287215_25 (sequence is synthesized)
gatctgctgagattttttatttcttcaggagtcagtcttggcagcgtgtacgtttctcagaatttatccatttcttctaaagtatcaaatttgttggggtatagttgttcctggtcttct

SEQ ID NO: 962272 - DNA, 120 bp, Artificial Sequence
  ENSG00000287215_26 (sequence is synthesized)
ccttataatcttttttatttctgtagtaacaattgtaatgcccctctgtcattctgattttagttatttgacccttctctgtttttttcttaatctgcttaacctatgttgaccttttca

SEQ ID NO: 962273 - DNA, 120 bp, Artificial Sequence
  ENSG00000287215_27 (sequence is synthesized)
tggcattgccacgtatcccggcacgttgttggtaatggtgggggctgtaaattgcacgattgctctagaaagtgtatttacaaatcacttagacgcccagatcccctctcagctcctcgt

SEQ ID NO: 962274 - DNA, 120 bp, Artificial Sequence
  ENSG00000287215_28 (sequence is synthesized)
agcatgacaaatcgctctccccccactctgggagatggcggacaaatgtactctctgcagagcatgaaccagcagatttatgggctttggaacttcaggctcacttcaaggcatacatcc

SEQ ID NO: 962275 - DNA, 120 bp, Artificial Sequence
  ENSG00000287215_29 (sequence is synthesized)
caacccggcgtagggatttcagttgctgtctacagcaatcttcagtccctcacctccgctggagtttggcgtccagattgctggcatcttgccccttctcagagatgcaggagagtcttc

SEQ ID NO: 962276 - DNA, 120 bp, Artificial Sequence
  ENSG00000287215_30 (sequence is synthesized)
ctgtgtaatctaaacttccccagagaggagacttagtaatattggcaggcaaagacctctggagtttgcttcattagtaagctcaaaatattttcttatttcaacgttagtttttcttag

SEQ ID NO: 962277 - DNA, 120 bp, Artificial Sequence
  ENSG00000287216_0 (sequence is synthesized)
gtcgtcagggagtgaacatcagacatctccttcccaagcctgtgttccttctaccagctaagtgaagggcctgccatgtgcatgttgccaggcaccacccaagggcagagaagttaagga

SEQ ID NO: 962278 - DNA, 120 bp, Artificial Sequence
  ENSG00000287216_1 (sequence is synthesized)
cataataggaagcaggccaatgtttctatttcacatgggacttgactgcctaaaaagaagagcgagcagctaaagccccggcttcccaatggatacccaacaatgttacatctacatgga

SEQ ID NO: 962279 - DNA, 120 bp, Artificial Sequence
  ENSG00000287216_2 (sequence is synthesized)
tccaaatgacctagttctacctaactggaaggactaaatggattagggttatttttgaagcccccagacacccaaaattgagggctttttgagggtcatataaaattatatatggcatca

SEQ ID NO: 962280 - DNA, 120 bp, Artificial Sequence
  ENSG00000287216_3 (sequence is synthesized)
gtgcacaactggatccacatgaagccattcggcagtctactgcaagctcattctcaaagtctgctcgctgttaaaaggattcttcttagtccacacacttcctgctttgaccttctaaga

SEQ ID NO: 962281 - DNA, 120 bp, Artificial Sequence
  ENSG00000287216_4 (sequence is synthesized)
agagcccttaccttctggaaaggcattgtaatcgttcaattccaatggacagtatgcgctggaaaactggccttcgcatgttgcactccaatcaatgaaactgccacaaaaaacaagtgg

SEQ ID NO: 962282 - DNA, 120 bp, Artificial Sequence
  ENSG00000287216_5 (sequence is synthesized)
tctaatcagaaacaggatgtcaagacatcaagtaaagaaaatggaaaatgattttactgcctagcatcctaatcactgtgaattccccaattttggaaaataaaagatgtactttctcaa

SEQ ID NO: 962283 - DNA, 120 bp, Artificial Sequence
  ENSG00000287216_6 (sequence is synthesized)
gtcacagaatcaaaggcttactaaatgctgatcactagtgacatgccatctgcaggatggacggctggactaggagcacacttgtttttaactatgcttgttaagtctaactagagacag

SEQ ID NO: 962284 - DNA, 120 bp, Artificial Sequence
  ENSG00000287216_7 (sequence is synthesized)
aatagagagccgtggctttatcagcactgtgaaagaacagctggaatacctttaagtgtctttgtgcacatctgaaggacttaaacatgttccattaaaaacgtccactcagagcaagac

SEQ ID NO: 962285 - DNA, 120 bp, Artificial Sequence
  ENSG00000287216_8 (sequence is synthesized)
cagcattcatcttagacaagcataactataaagactatacttcattatactttgatccctattgcaacctagattcttattatagaaatgagataggaaatactgttgtaataagctgaa

SEQ ID NO: 962286 - DNA, 120 bp, Artificial Sequence
  ENSG00000287217_0 (sequence is synthesized)
gcaggcaacccactcagatttttttccgtggtgtggaagcttgttctttcattcttggcaataaatctcgctgttgttcgctctttgggtccgcgctgcccttatgagctgtaacactca

SEQ ID NO: 962287 - DNA, 120 bp, Artificial Sequence
  ENSG00000287217_1 (sequence is synthesized)
ccgtgaaggtctgcagcttcacctctgaagccagcaagaccacaaactcactggaaagaacaaacaactctggatgtactgcctttaagagctgtaacactcactgcagaggtctgcagc

SEQ ID NO: 962288 - DNA, 80 bp, Artificial Sequence
  ENSG00000287217_2 (sequence is synthesized)
gaaggaagaaactctggacacatgtgagctgcaacactcaccacgagggtcagcggcttcattcttgaagtcagcgagac

SEQ ID NO: 962289 - DNA, 120 bp, Artificial Sequence
  ENSG00000287217_3 (sequence is synthesized)
cttcattcttgaagtcagcgagaccaggaacccaccaattctggacacaatatggatgaatctcagaaacatgatgttcagcaaaagaagccagacatatagggcgcttgctgtacaaat

SEQ ID NO: 962290 - DNA, 120 bp, Artificial Sequence
  ENSG00000287217_4 (sequence is synthesized)
tgctgtacaaattttatttacaaaaacaggtgaaagtggtagtgaccagaagttggcatgagggggcttttgggtgctggccgtgttcgtttgagttctgttcacgaggaggttccatat

SEQ ID NO: 962291 - DNA, 120 bp, Artificial Sequence
  ENSG00000287217_5 (sequence is synthesized)
ctagaccttctgattgtcaactccttgttccattgtgtccaaacctacatgtctgaactcctctcatcaaagacttctcaaagttattaataactggggatcacgtattcagtaattaca

SEQ ID NO: 962292 - DNA, 120 bp, Artificial Sequence
  ENSG00000287217_6 (sequence is synthesized)
cacatcaggctccatgctttctgtgcagtatgtaaattgattcattgtcatactaattataaatggctagtattattgctgctttacaaatgaggcatatgacacacagggagctaaata

SEQ ID NO: 962293 - DNA, 120 bp, Artificial Sequence
  ENSG00000287217_7 (sequence is synthesized)
atttgcctaaggtcaccccacttgtaaatgatgaagccaggactcaaggccaggtctggccacccctgaatttaatagctttatcctctatatctctgttttctcccagaccaaggtgtc

SEQ ID NO: 962294 - DNA, 120 bp, Artificial Sequence
  ENSG00000287217_8 (sequence is synthesized)
tgtacctctctgccaacagagaaaagggttcattcattcatcaaatgtttgttgagcatctattgtgactcaggcaatatcctagatcaaggattgtcaaactttttctataaaggacaa

SEQ ID NO: 962295 - DNA, 120 bp, Artificial Sequence
  ENSG00000287217_9 (sequence is synthesized)
gagagcaaacattttaggtctcctgggtcatacggtcagtcactgtgattcaactctgctgttgtagtacaagattgtgaaagcagccatagatgatatgtcaatgaatgagcatggttg

SEQ ID NO: 962296 - DNA, 120 bp, Artificial Sequence
  ENSG00000287217_10 (sequence is synthesized)
tgttccaataaaatgtcacttgcgaaagcaggctgtgggctgggtttgggccaagagttctatccctgctctaggcactggagttacaatagcaaaaaattaaaataaagtaaaataaaa

SEQ ID NO: 962297 - DNA, 120 bp, Artificial Sequence
  ENSG00000287218_0 (sequence is synthesized)
ataggtgaatatttcgctgggattttaaagagacgagcttcagcctgctaagccgcgctcacgccgcctctccgccctggcctccccgcgtccggcttggggccgggtccctcccgggtc

SEQ ID NO: 962298 - DNA, 120 bp, Artificial Sequence
  ENSG00000287218_1 (sequence is synthesized)
aaagctacgccgggtgcactgcgggctgggcagctctcccactacgcccaaagcccaggcggccgggaccgccgtcccaaagtcacaaaccacacccgtgaaggacgccctccgcaagac

SEQ ID NO: 962299 - DNA, 120 bp, Artificial Sequence
  ENSG00000287218_2 (sequence is synthesized)
agagaggaggctgggcctgggaaggaacctccggcccttcctcaccatgcagccaagccctgctttctctacctccagtcgttttctgaggaccggcttggtgggtgctgatgcctgcct

SEQ ID NO: 962300 - DNA, 120 bp, Artificial Sequence
  ENSG00000287218_3 (sequence is synthesized)
ggaagacctcacacccacagtgtcttagaagattctgaaagcagtgtgaggtaccagcctgctttagcgctaggagctggcatggtgggggtctcaggctgcatccgcacattctcagcg

SEQ ID NO: 962301 - DNA, 120 bp, Artificial Sequence
  ENSG00000287218_4 (sequence is synthesized)
gtgcttttgctcctggaatggagccacaagctgctctgggccatttagagactctaagtggtttgctcagggctatatggaagtgggaggtgggggacctgggcgctctgtagcatgctt

SEQ ID NO: 962302 - DNA, 120 bp, Artificial Sequence
  ENSG00000287218_5 (sequence is synthesized)
agtccccctggcagggttagaggttagttgaccagagacaacgagtccaattcccaaacagaccagaatgaccagcaaaggagaaaagaacaaggacacattgcagccaaaatggagcta

SEQ ID NO: 962303 - DNA, 120 bp, Artificial Sequence
  ENSG00000287218_6 (sequence is synthesized)
gaatcttgcctctgtccatccttcactggagttatcctggatggagaaggaaccatatcacctgcaaagcctggaaggggagccctgctgtgaggtgagccagtaagtctgtgagttcag

SEQ ID NO: 962304 - DNA, 120 bp, Artificial Sequence
  ENSG00000287218_7 (sequence is synthesized)
gagggagcacacgcttgtctgtccatctgttcatgagcaggcgctcttgagtcttcctaaatattgcccagagctctccatccagatactgtcctttcccttcctctccattgatggtct

SEQ ID NO: 962305 - DNA, 120 bp, Artificial Sequence
  ENSG00000287218_8 (sequence is synthesized)
catcttcccctaaggattccttctcccaaagctccagcccattccaatgtcaactgcattcgttgtttttgttactctcattgtgtcaaatgggttctttcctatgcaactagattgtag

SEQ ID NO: 962306 - DNA, 120 bp, Artificial Sequence
  ENSG00000287218_9 (sequence is synthesized)
gttgctccaaggtaaacaccgtgatttctagttcctttgtttctaccactgcaggactgtaggaagcccagttgtaggcatcactaggactcagtaattacataattgctcagataattg

SEQ ID NO: 962307 - DNA, 120 bp, Artificial Sequence
  ENSG00000287218_10 (sequence is synthesized)
agagaatgattgattgattagtggtcattaatgccataaaatgaaggaatttcgcccctcacattttcaagaacctatgagttcgaagagacctgaaagaacatttttatgggagcctac

SEQ ID NO: 962308 - DNA, 120 bp, Artificial Sequence
  ENSG00000287218_11 (sequence is synthesized)
accagtgctatcacctaaagtgcgtgaccttagggaagttgcttcaccccttgtttctgtgcctccaaaatactggtgttaatacagtaatttctgattccttccacctgtgccctgctc

SEQ ID NO: 962309 - DNA, 120 bp, Artificial Sequence
  ENSG00000287218_12 (sequence is synthesized)
agcgatccagtgttcaagctggtcatcaggagaaagctacttatgatttcctaacaagccaccacagaacatcacattcccaaacatgctcttcaccgtccctgctgtccccacgtgcct

SEQ ID NO: 962310 - DNA, 120 bp, Artificial Sequence
  ENSG00000287218_13 (sequence is synthesized)
agccctggtgtgggcaggaatgagtgggattgggatgttttctcacaggtctttctcaggtgaggccccaggctgtgaccaggcccctgccctgcatgtgactcaggcctagcccctgct

SEQ ID NO: 962311 - DNA, 120 bp, Artificial Sequence
  ENSG00000287218_14 (sequence is synthesized)
ggggcaggaatgccacccagcacagcatcctactggtgcctgaataaagaatggactggaggttcacctgaaaggggctgccaggtttctgcgggggccagccaacggctcacaatgacc

SEQ ID NO: 962312 - DNA, 120 bp, Artificial Sequence
  ENSG00000287218_15 (sequence is synthesized)
ctgtgttcgactcatcttacgatgaaatttttcagcttgacgaacttttactcatctttcaaggctcggctcaaatgttatttccctgggaaaactgcgctactttcagcaaaatgcatt

SEQ ID NO: 962313 - DNA, 120 bp, Artificial Sequence
  ENSG00000287219_0 (sequence is synthesized)
gggttgcagccaggaaccctaaacatcctgtggtaggaggggcagttctgcagtgaagaaggaatttcttttgagtgagcggggaagcaaaagccattgttatgagcagataaatgctat

SEQ ID NO: 962314 - DNA, 120 bp, Artificial Sequence
  ENSG00000287219_1 (sequence is synthesized)
gatccaactgcacttttaaaaggcgctgggcgtggtggcccatatctgtaatcccagcactgtgggaagctgaggacagaaacaagcaaggtggaaatcttgggctcgagagatggggag

SEQ ID NO: 962315 - DNA, 120 bp, Artificial Sequence
  ENSG00000287219_2 (sequence is synthesized)
gagctaagagcccagcgttcttgaacctgcctctcccatccgatggcagtcacctgggctcctagcatggggcattgccactcacttgctgacacccttgtccactgatgcgacctccat

SEQ ID NO: 962316 - DNA, 120 bp, Artificial Sequence
  ENSG00000287219_3 (sequence is synthesized)
cctggcaccagtctcaccatgtcatctctgctgctgagccttcctcttgaagacttcagcaattcctcagccctctggtttccctctctccccaatctttaaatgtctgattccacagga

SEQ ID NO: 962317 - DNA, 120 bp, Artificial Sequence
  ENSG00000269729_0 (sequence is synthesized)
tcagcttgcagatgcctattgtgggacttcaccttacagtcatacccgatgtgaagcctgactgagcagagtggagaccagcagctgcacgtcaagtggccttcccaggacttgactcca

SEQ ID NO: 962318 - DNA, 120 bp, Artificial Sequence
  ENSG00000269729_1 (sequence is synthesized)
tatgcatgttctcgtccatgggctcatacccagtccaaaggactttaccccagctccatctttgcccagacacacttgaggctgcagggttttggtgactgtaaattggtcttgaccctc

SEQ ID NO: 962319 - DNA, 120 bp, Artificial Sequence
  ENSG00000269729_2 (sequence is synthesized)
gatgctgcagaagacactggctaaattgataaaatgagatttgtaaccaccctgggacagagctcccagagggagagacgggccactatctttgccatttagatgacttagctgttccag

SEQ ID NO: 962320 - DNA, 120 bp, Artificial Sequence
  ENSG00000269729_3 (sequence is synthesized)
ccttcaggcctcagagtatctgaggaaccaggggctgacatggacccccagcacagcacagctgctctaccaaaacatggccagactgtttctttaagcaggtccctgatcccattcctc

SEQ ID NO: 962321 - DNA, 120 bp, Artificial Sequence
  ENSG00000269729_4 (sequence is synthesized)
ctcactgggcaggacctcccaaatggggtcttcagccacctcctacaggtgcctttgcattggcaacaagcctgtaccatcctgggatgaagcttcagggagggactgctgctatttttg

SEQ ID NO: 962322 - DNA, 120 bp, Artificial Sequence
  ENSG00000269729_5 (sequence is synthesized)
catatgcatgttctcgtccatgggctcatacccagtccaaaggactttaccccagctccatctttgcccagacacacttgaggctgcagggttttgtttggatgtgtgtcccctccaact

SEQ ID NO: 962323 - DNA, 120 bp, Artificial Sequence
  ENSG00000269729_6 (sequence is synthesized)
tcctcacagtaataagtgagttctcaccctgttactttgtgcaagagctggtgacttgagtctgacatctctcctgttctctgtcttgccatgtgacgtgactgctcctcctttgccttc

SEQ ID NO: 962324 - DNA, 120 bp, Artificial Sequence
  ENSG00000265656_0 (sequence is synthesized)
ctctgtcacccaggctggagtgcaggataatgggggctatacttacctaaattgttgggctgtttctatttctgaagattaaataggaaaagacataactgatacattctacggattaca

SEQ ID NO: 962325 - DNA, 120 bp, Artificial Sequence
  ENSG00000265656_1 (sequence is synthesized)
ggtctttgcgctgagagagcctctctccccgctttggaggttcaataccacagccttcaagatccaactcagaacgctacctcctctctaagctctcccacctcccccaggcgctttgtt

SEQ ID NO: 962326 - DNA, 120 bp, Artificial Sequence
  ENSG00000265656_2 (sequence is synthesized)
actctttccctttgtgctctgtagccttaacaaaggctactgttaaacacttagcactgtgtatattttaatggacttgactgtctctcccacaactaaagtttgagctcctaaagatta

SEQ ID NO: 962327 - DNA, 120 bp, Artificial Sequence
  ENSG00000269898_0 (sequence is synthesized)
ctttatcatcatcgtcatgacaatatcagctgatagatatccagctgttttcagtgtgccaaattctgggccaagtttgctataaaaacgatgccactgaaccctaacaatgccctaaga

SEQ ID NO: 962328 - DNA, 120 bp, Artificial Sequence
  ENSG00000269898_1 (sequence is synthesized)
gataaacattatcaccatcctgttttataaatgaggagctggggctcacagctgtccagcgactcccagcacccagggctagcaagctacagctctgggctgccagacactaaagccaag

SEQ ID NO: 962329 - DNA, 120 bp, Artificial Sequence
  ENSG00000269898_2 (sequence is synthesized)
gttgcagtgttctattccacacgccagaattctagattgtttgagtttgttacaaacacacgtatctttgtaactagaaaataaagatttaaggccggacgcagtggctcaagcctgtaa

SEQ ID NO: 962330 - DNA, 120 bp, Artificial Sequence
  ENSG00000269894_0 (sequence is synthesized)
tagattttgggcctgagcaactgggtgagtagtgcagctgttttctaagatggtgagatgcgaaaccgagaaggtttaggggaggggtgggatgtggtgttctttgaacgtattgggctg

SEQ ID NO: 962331 - DNA, 120 bp, Artificial Sequence
  ENSG00000269894_1 (sequence is synthesized)
aaatgtccattagacatccaggtagactccatacaaatctggaattcagaaaagagtaggaattggaaacaggaatttgagagttgtcattatatagtcagtatgtaaagaaagccatgg

SEQ ID NO: 962332 - DNA, 120 bp, Artificial Sequence
  ENSG00000269894_2 (sequence is synthesized)
aaaggcatgggaaggatacagaaaggcgagccctgagccctccagcttttcaaagtcagatggaagaggagtcagcaaaggctcagagttagacctggttgtcggttcttaacctctcag

SEQ ID NO: 962333 - DNA, 120 bp, Artificial Sequence
  ENSG00000269894_3 (sequence is synthesized)
agccacagtttcttcacctgtaaaatggggatattaatacctggtttgcctatttcatagaagtgtggaaaaggcttaactgggatgcccactagaaataaaggttttgttattatgtaa

SEQ ID NO: 962334 - DNA, 69 bp, Artificial Sequence
  ENSG00000269895_0 (sequence is synthesized)
cagatggctacaaaccggtcataggccctcacactcaggagcatgtctttcttccatgcctccaaaaac

SEQ ID NO: 962335 - DNA, 72 bp, Artificial Sequence
  ENSG00000269895_1 (sequence is synthesized)
ggatgtccacaatcatcttggggaccgtgttggaggtgaaaccgatgtcagagtcagagctgacggccagga

SEQ ID NO: 962336 - DNA, 120 bp, Artificial Sequence
  ENSG00000269895_2 (sequence is synthesized)
gagctgacggccaggataatgagcagattctccagcaccatgactaggtacatgaacaggaacagcccagcgagggccagctgcagttttggatcctctgagagttctaggaggaggaat

SEQ ID NO: 962337 - DNA, 120 bp, Artificial Sequence
  ENSG00000269895_3 (sequence is synthesized)
tttgaagcatctgttagattctgtgggtctgtataagtttggacatattttgagtagaaaagaggattgaaaaatagaaaacaagtaaaccaacacccagaactgtgtctgcattttgga

SEQ ID NO: 962338 - DNA, 120 bp, Artificial Sequence
  ENSG00000269895_4 (sequence is synthesized)
tattcacttcttgctgtacacacctgccttagagacactagattcaagaatgttccaagaaccagatcatcatatataacaaattcataattgctagaaaatacagcctatcttttccaa

SEQ ID NO: 962339 - DNA, 120 bp, Artificial Sequence
  ENSG00000269895_5 (sequence is synthesized)
agaaaaatatgtaataaaatcattctctttgctttaagaaaaagtttatcctaattaaaagaaattaagaactcaaatgtattattttattctaatagattgccacaagttcccttgatt

SEQ ID NO: 962340 - DNA, 120 bp, Artificial Sequence
  ENSG00000269895_6 (sequence is synthesized)
tagaacatttataaacactgtgtaacagctgagaccaggtcatctggaaataaaattatagttgatagttcataatcagaaaatatttccagatgccagttatgttctctgacttttctc

SEQ ID NO: 962341 - DNA, 120 bp, Artificial Sequence
  ENSG00000269895_7 (sequence is synthesized)
cttcaagagagtaattgcttactcgagtaggtgggccttgttttaaaattcatgtaagatataacttctgtccctagcttaggcggacttagagatttcataagaaagtttggccagaca

SEQ ID NO: 962342 - DNA, 120 bp, Artificial Sequence
  ENSG00000269892_0 (sequence is synthesized)
tttgatgatatctggaatgactgataaggggcatctgaatcatctccaaccctgacattcggctttagtatgtctgaaagcagacctactgccacatttgggaatttccagagcagatga

SEQ ID NO: 962343 - DNA, 120 bp, Artificial Sequence
  ENSG00000269892_1 (sequence is synthesized)
tctctaaggtctctttttaagtctgaaattgtcatttatgacatatttgggcttgctgaaattaagattcatctgtattgggaatcggcttctgttcttccctgccatattccttgtgaa

SEQ ID NO: 962344 - DNA, 120 bp, Artificial Sequence
  ENSG00000269892_2 (sequence is synthesized)
ataacatctttatctgaagtcaccagtggtgctctaggaacacagctttgtttactttcaccaaagcatttcccatctgatatggtttggccgtgtctccacccaaatctcaccttgaat

SEQ ID NO: 962345 - DNA, 120 bp, Artificial Sequence
  ENSG00000269892_3 (sequence is synthesized)
gggacccggtgggaggtaattgaatcataggggtggtttcccccatactattctcgtggtagtgaataaatctcacaagatctgatggctctataaggggaaaccccttttgctttgttt

SEQ ID NO: 962346 - DNA, 86 bp, Artificial Sequence
  ENSG00000269892_4 (sequence is synthesized)
tctgatggctctataaggggaaaccccttttgctttgttttcattctgtctcttgcctgctgccatgtaagacgtgccttttgcct

SEQ ID NO: 962347 - DNA, 120 bp, Artificial Sequence
  ENSG00000269893_0 (sequence is synthesized)
ggcctttcacattcgggaagcgtcgggattaggtgaaacaccccgagaaccgtcagtttgagccagatggaagctgagctgaacacattacgatggatgatggaaacataagactatcaa

SEQ ID NO: 962348 - DNA, 120 bp, Artificial Sequence
  ENSG00000269893_1 (sequence is synthesized)
ggtgttccgaataatatcctggaagttatcaggacacctattttaaatataggcctgaattttgtaaagtaatatttaaggtggtccgtgataattaaataaaatgcttaattcatgtgg

SEQ ID NO: 962349 - DNA, 120 bp, Artificial Sequence
  ENSG00000269893_2 (sequence is synthesized)
tcatcagttctataagagagcgtgtgccgaaggcctcggcctttcacattcgggaagcgtcgggattaggtgaaagtacgtagttgtctttcgtaagttaaaatgataattgggccgaaa

SEQ ID NO: 962350 - DNA, 120 bp, Artificial Sequence
  ENSG00000269893_3 (sequence is synthesized)
cttactgccttacctaaaaggcagcgcagtcaggatattggtaggtcgggggcggctttggaaacccttaagtttacaagcatgcgcggacttgagtgctcattaggtcgccgggcgtcc

SEQ ID NO: 962351 - DNA, 120 bp, Artificial Sequence
  ENSG00000269893_4 (sequence is synthesized)
acgtgcagccctggaccctgaaccccggcgtgcgtgggccgtgggccctcggggaaaggttccgtgcactcggggactccggtgaagcctgttcagccgtctgtgtcatgtggccatctt

SEQ ID NO: 962352 - DNA, 120 bp, Artificial Sequence
  ENSG00000269893_5 (sequence is synthesized)
gagtctactctgtcgctcttgtgccctagcaccccgagaaccgtcagtttgagccagatggtgagtaataacctgtagcagtttggttgctggttaattctggattgtgaatctccatgt

SEQ ID NO: 962353 - DNA, 120 bp, Artificial Sequence
  ENSG00000269893_6 (sequence is synthesized)
agtctcccttcctagccatggaagagcatatccttgtttattggcaaagctgtcaccatttaattggtatcagattctgacttgcacaagtaacattcactgttaaaaacctagagggtg

SEQ ID NO: 962354 - DNA, 120 bp, Artificial Sequence
  ENSG00000269893_7 (sequence is synthesized)
ccgggttattgggcaaaatttctaaaccgttgttcaatgtttctaggaagctgagctgaacacattacgatggatgatggaaacataaggtacatttcttttttgatatttctgagttaa

SEQ ID NO: 962355 - DNA, 120 bp, Artificial Sequence
  ENSG00000269893_8 (sequence is synthesized)
tctgaaacgccttagcggcaggacgttggaaagctaaagttggcccgttttgctggcttttgtagtttgagttaacaaccaactgaattagctgataagatctcaaaacagtgaggtaag

SEQ ID NO: 962356 - DNA, 120 bp, Artificial Sequence
  ENSG00000269893_9 (sequence is synthesized)
ggaatagcgtcatcagttctataagagagcgtgtgccgaaggcctcggcctttcacattcgggaagcgtcgggattaggtgaaagaagctgagctgaacacattacgatggatgatggaa

SEQ ID NO: 962357 - DNA, 120 bp, Artificial Sequence
  ENSG00000269893_10 (sequence is synthesized)
gcataatacctcctatttagtgttacacgctcatgtggaagtagtgtgagtacagttctaaggtaattgcagcctttgtgaaaaatgtaaaatataaaaattaccaggctacccccaagg

SEQ ID NO: 962358 - DNA, 120 bp, Artificial Sequence
  ENSG00000269893_11 (sequence is synthesized)
gagacagcagactctttttaaaccatacaaaaatttaaggcagttatacaaggtggaaaattatgtatttatttacacaaatatgcacagaacacttgtatctttcaaaagtcacactta

SEQ ID NO: 962359 - DNA, 120 bp, Artificial Sequence
  ENSG00000269893_12 (sequence is synthesized)
agacatagtaaaagcatgttgtatgaaccatgtattcttaaggattgagcaaactgcaggctgcttgctgccttttaggtttgctagtccctgatctacttgaaacagatgttgcttgcc

SEQ ID NO: 962360 - DNA, 120 bp, Artificial Sequence
  ENSG00000269893_13 (sequence is synthesized)
ccaacactagtttaattataagggcagcctgtgagaaagtttcaatagacatttttctcacctatattgcacgtttttctgaagcccttgtgcaagtgtgtgtgccatgtgtagttctat

SEQ ID NO: 962361 - DNA, 120 bp, Artificial Sequence
  ENSG00000269893_14 (sequence is synthesized)
ttacatataaacgctactttaaaagtttatcaaaatcatgagtttttacaaaagtttttaatgctcttctgcattatatgcagcattgcaaatctgcaaagtagtaaaactataaagcac

SEQ ID NO: 962362 - DNA, 120 bp, Artificial Sequence
  ENSG00000269893_15 (sequence is synthesized)
ctttaggtttgcaccagttattacagaaatggggatttgtgaaaaggatgtaatttgatgtagaagggcaaagtcctttaatgactggcattcaagaggattacttaaaacaatttgtaa

SEQ ID NO: 962363 - DNA, 120 bp, Artificial Sequence
  ENSG00000269893_16 (sequence is synthesized)
gttcatgctaacctcttccctatatttatactactgggacctggggaaggatccatgacatggaagtatcttgagtgtgccttttaaatttgagcattactgctaagaatgttctgtaaa

SEQ ID NO: 962364 - DNA, 120 bp, Artificial Sequence
  ENSG00000269893_17 (sequence is synthesized)
ggtgcatagttaagcagctatcccttaactcttggagaaatagccatagggaaaccaatcatttaggtaggagaaccatggggaaaaaaatcagcattttttctggagtttggaatcagt

SEQ ID NO: 962365 - DNA, 120 bp, Artificial Sequence
  ENSG00000269893_18 (sequence is synthesized)
ttcaccaactggtctcactttgaggcaagcctgttttcccccatttgaaaacaagggctactaccataagatttactggccttttgcaaattgtcagtgatgtgcaaagctgcctaatgc

SEQ ID NO: 962366 - DNA, 120 bp, Artificial Sequence
  ENSG00000269893_19 (sequence is synthesized)
agtgcctggcatatgttataactgctgtatgtattagaacttttcaatgtgtaggccaggaaagcattttgactagtatattttaagattggattgtatcaggttgggcttgggaaaacc

SEQ ID NO: 962367 - DNA, 120 bp, Artificial Sequence
  ENSG00000269893_20 (sequence is synthesized)
tgcaggtataagtcagttacagggaagtgtcagtgggtggcactcttacatcatggtcggggaacgtggactatgatgaggtgcttgttaaaagcaaatatagtagatatgttaatgtgt

SEQ ID NO: 962368 - DNA, 120 bp, Artificial Sequence
  ENSG00000269893_21 (sequence is synthesized)
tggataaaataggttgtatgtccagctggcatttagttaccagaaatcctttcaaattttgctagtttatacgctgtaggtagaaagtatttttatcttatggtttctgtagcacttggt

SEQ ID NO: 962369 - DNA, 120 bp, Artificial Sequence
  ENSG00000269893_22 (sequence is synthesized)
actcaacaaggatacttgtttccaaatatcagatcactttgagaatatattgtgacaggcagatgtccttgaggctttactactcctattcaggcctaaaagtttatagtggaattcttt

SEQ ID NO: 962370 - DNA, 120 bp, Artificial Sequence
  ENSG00000269893_23 (sequence is synthesized)
aaccactgatttcctcacttgacaaaggctacagagaatatgaagatttcttgtcaagtcttttgaaaagacctaagcataaatatgccactcatgagtgtagtaaagggtaccgcattt

SEQ ID NO: 962371 - DNA, 120 bp, Artificial Sequence
  ENSG00000269893_24 (sequence is synthesized)
atgtcaaatgtgggtatttaatatgatttcagacaccactgattcaattaaaaggggttctcagttcaaatgtaaaaatgatcttttgtaaaatcagcatagaatgattttgagaaatag

SEQ ID NO: 962372 - DNA, 120 bp, Artificial Sequence
  ENSG00000269893_25 (sequence is synthesized)
gtaggggatagatgaggcttagaataagtcactccagtgaaattagggtagaaaatgttcatttaaggattatcacttccactacactgaggcctctgaaaatgttcacaaatttctcaa

SEQ ID NO: 962373 - DNA, 120 bp, Artificial Sequence
  ENSG00000269893_26 (sequence is synthesized)
aagcagcagggggtacacaattttttaccacaacacaaagcaaaaacagatcttgccatttgttgtcatctctgctgagtgctaatagtgggggttcaaagttttccatttgtttaaatg

SEQ ID NO: 962374 - DNA, 120 bp, Artificial Sequence
  ENSG00000269893_27 (sequence is synthesized)
ctgctttgaagtttccatgaagaattacagtttggtgacactttttatccaaggtacaaaggctgagactttggtataaacaccaggagaatccttgactccacagccatacccccagga

SEQ ID NO: 962375 - DNA, 120 bp, Artificial Sequence
  ENSG00000269893_28 (sequence is synthesized)
ggtcaccccatacaccacccagctctctccgggccgttcacacatgagtggtcctccgctgtctccctggcagctgtccacgcgtttgtgttcatggaggtttccagcacaaagcattct

SEQ ID NO: 962376 - DNA, 120 bp, Artificial Sequence
  ENSG00000269893_29 (sequence is synthesized)
aagtaagggaatggctgcttgttgtagtgttcttgaataggctcgtcctactcagaccaaacatctgattagtggcattccagataaccatcgcaacatttaacagttactgagcatgta

SEQ ID NO: 962377 - DNA, 120 bp, Artificial Sequence
  ENSG00000269893_30 (sequence is synthesized)
atagttatgaaaataaaatccctgttgtggcattagtgtagtttaaaatgagcaatgactaactggtatgtactattgttagctgccttttttaatgttgacacaatcttaaccttcaca

SEQ ID NO: 962378 - DNA, 120 bp, Artificial Sequence
  ENSG00000269893_31 (sequence is synthesized)
aatttctcagtactgaattgtctgaggaataatgaataacatttatggatttgtagagtaaggtgacctaagaaagcatatttgtgcaggctttcgtatttgaattctgtatattaaaaa

SEQ ID NO: 962379 - DNA, 120 bp, Artificial Sequence
  ENSG00000269893_32 (sequence is synthesized)
gcatagaatgcattaatgctggtttcgcattagcacatcaattcatatctacttcactgaattaaactgagttctcagtttatgctaaagttctcattagaaccaacaatacctccagaa

SEQ ID NO: 962380 - DNA, 120 bp, Artificial Sequence
  ENSG00000269893_33 (sequence is synthesized)
tataagtctcaattacatgcatgcatttcacactaagcaaaatttctccaaataagtctgaatccatttaagatcttattgcccattgcacacccaaatatatggataataccagacaca

SEQ ID NO: 962381 - DNA, 120 bp, Artificial Sequence
  ENSG00000269893_34 (sequence is synthesized)
aaaaggtgccctgctttttttgattatgccttacctgtgtcaccccatcctgttatgtaacagttggatgctgttttctgtggcctctctctccagagtggtaaacaggctggcaaaaca

SEQ ID NO: 962382 - DNA, 120 bp, Artificial Sequence
  ENSG00000269893_35 (sequence is synthesized)
tggctgctgaatctggcacattgctcttctggtccttgtaatctaaccagggctatgtcataatcactgcggtcgggtcgatactcccgatgaatcacaatctgttgaactccaatttct

SEQ ID NO: 962383 - DNA, 120 bp, Artificial Sequence
  ENSG00000269893_36 (sequence is synthesized)
tcctcaaactcctctggtaccagagtatgataatctccaaccctaacagcatagctcctagtgctgttgccatacctgagaggcagagagtactaatgagagacttgcttcagatactga

SEQ ID NO: 962384 - DNA, 120 bp, Artificial Sequence
  ENSG00000269893_37 (sequence is synthesized)
aaattattgtcaagaaggaagactaatgaagatacaagcctttcttccaaatcatcagccccttttgtaaattcaacctttctttccatttatctgacccaccattcctgatcctctact

SEQ ID NO: 962385 - DNA, 120 bp, Artificial Sequence
  ENSG00000269893_38 (sequence is synthesized)
gcaaacccattgtcataacctcatcttcatttcattatgtaatctgttctccaagaaggagcaaatgtggaggatgagtggaaaataaagactaatcattaatctgtcatttcccaaatg

SEQ ID NO: 962386 - DNA, 120 bp, Artificial Sequence
  ENSG00000269893_39 (sequence is synthesized)
aaaagcgatcaaaacaggaataggtcaaaattattgtcctgtgttgttgccctgttatttccaagaattgttagtttgtcatgaagctctgtgagggcagaaactaactttgtgtccctc

SEQ ID NO: 962387 - DNA, 120 bp, Artificial Sequence
  ENSG00000269893_40 (sequence is synthesized)
aaagtacttagtacaatcgacttcactcttgcaaggtggacttaaactacttccctttcctctaaagtgaatgcaaacccaaactatactttcagataaacatatattccttctatcctt

SEQ ID NO: 962388 - DNA, 120 bp, Artificial Sequence
  ENSG00000269893_41 (sequence is synthesized)
tcccctcttttaaatctttattcagatgtcacctcaatgaagcctactttgacaccctcgtatttaaaattgcaacccatctttctttttcctcccatcatcaaacactcccaatatcat

SEQ ID NO: 962389 - DNA, 120 bp, Artificial Sequence
  ENSG00000269893_42 (sequence is synthesized)
tcatctctacttttcctcgtttttaagcatcactttgtaacaaaactatctaatttacaatttattgcatttatcctcctccctgcttgagtcaaagctattccaggtcagagatatctt

SEQ ID NO: 962390 - DNA, 120 bp, Artificial Sequence
  ENSG00000269893_43 (sequence is synthesized)
tgttgtgttcactgattaatctaaaacacctaaaatagtgttgtgccattaattaggaatgcaaaaaattgattaagttagtgaatgcttattattaatgtatactttctatagtccatt

SEQ ID NO: 962391 - DNA, 120 bp, Artificial Sequence
  ENSG00000269893_44 (sequence is synthesized)
aaaatagaagcaatatttaccagatggatagttctcagcccatttttcagccatcatactaaagtatgatgattctgataccaaacccacctaaagcagggtttctcaatctcagaacct

SEQ ID NO: 962392 - DNA, 120 bp, Artificial Sequence
  ENSG00000269893_45 (sequence is synthesized)
attaacattttggaccaggtaattatctgttgtgagggctgtcctgtgcattatagtgtgtttagaagcatccctggcccctattcactagacgccactggtacatggtacacaaaccct

SEQ ID NO: 962393 - DNA, 120 bp, Artificial Sequence
  ENSG00000269893_46 (sequence is synthesized)
ccatccccagttgcgattaccaaaaatgtctccagacatagtcacgtgttccctgttaggcaaactgcccccagttgagaacctctgacctagaatgcatgacacaacccatctcctagt

SEQ ID NO: 962394 - DNA, 120 bp, Artificial Sequence
  ENSG00000269893_47 (sequence is synthesized)
tacttcctctttttcacagaagactagagctccatgctcattgcattccactacttataacattcttaagacttaatttccaataacttttcctttgtagttccctgacttactcatctg

SEQ ID NO: 962395 - DNA, 120 bp, Artificial Sequence
  ENSG00000269893_48 (sequence is synthesized)
caatgagtgtattctccacctcatctcagccacacacttacaatgtaaaacctagaccttgtattcaccaggtaaccacacacctctgaaatcttgatttcacacataccgttatttctg

SEQ ID NO: 962396 - DNA, 120 bp, Artificial Sequence
  ENSG00000269893_49 (sequence is synthesized)
ccttctgtttttacagctctaaaatccttcaaacccattggacttctatcctttggccctactattttttcattttagtcttttatgacttcccttattatctggcttgggttctaccgt

SEQ ID NO: 962397 - DNA, 120 bp, Artificial Sequence
  ENSG00000269893_50 (sequence is synthesized)
ctgcccattacaacaatcactcgaaaaactaccctgcttgtcttttacctgccaaaactccagccctggtttcatcagctctacctattttgtgccggcatctaactgttaaagtgggga

SEQ ID NO: 962398 - DNA, 120 bp, Artificial Sequence
  ENSG00000269893_51 (sequence is synthesized)
agcacgcatgtaacaactttcaccttaaattttttttaaccaaaacttgggtcttttattgtttacaagacctgtacttgaatgtgaacttagaactgagttggtattcaaaagcttggc

SEQ ID NO: 962399 - DNA, 120 bp, Artificial Sequence
  ENSG00000269893_52 (sequence is synthesized)
attttctagtgtctatttaaaataaaacttcccacttctataaaattactggaggttatgagatgcctgaatattctaatccttaagtagggctctgaccatctcgtatatatgattaac

SEQ ID NO: 962400 - DNA, 120 bp, Artificial Sequence
  ENSG00000269893_53 (sequence is synthesized)
tgtcagcgctcaaaaactaaacagtgcaataaagatgatttggcttatatagccacctactgttgatctttaatattaatagttaatctgtgatttcttgagactcaatcttaaatcatc

SEQ ID NO: 962401 - DNA, 120 bp, Artificial Sequence
  ENSG00000269893_54 (sequence is synthesized)
acatatctttaaagttcagaggctttttaatatattgtgcctaaagtatatgctcttatagcttccttgaaaatttaagtaaaatttaggattatttcacatactgaactaaaaagtaat

SEQ ID NO: 962402 - DNA, 120 bp, Artificial Sequence
  ENSG00000231057_0 (sequence is synthesized)
gatgtgaggacacatagagcatgccatctatgagaaacgggctctcatcagacactgaatctgctggcacgttgaccttggactttccagcctccagaactgttcccatagaagaaatgg

SEQ ID NO: 962403 - DNA, 120 bp, Artificial Sequence
  ENSG00000231057_1 (sequence is synthesized)
tttccagaatgcagaagtggtccatgatgccagatgttgcagaaagagcaaataaggagaaaaagaatcctgcccaggaggcctcccaccccgacataggagggcaccacccacatggca

SEQ ID NO: 962404 - DNA, 120 bp, Artificial Sequence
  ENSG00000231057_2 (sequence is synthesized)
tcagcctgcagctgatttcatattccatgctcatgacatagtaccttataggacatgtcacaactcacgccttccccttatccgccatcggggatagaacagaaagacataagcaccggc

SEQ ID NO: 962405 - DNA, 120 bp, Artificial Sequence
  ENSG00000231057_3 (sequence is synthesized)
atgggcctattccacagccaaggcaggcaatgagctctcaggtacttgcaacaaactcgagtgtgcattcggtccaggaggaagagcccgcacccttttttgttgctgttcagtgttaat

SEQ ID NO: 962406 - DNA, 120 bp, Artificial Sequence
  ENSG00000231057_4 (sequence is synthesized)
ccttcggtggaacccaccaggacagcagtctcagtgctgttgtttttgacagggagaacatcccagggcagaaaggaaagcctaaagctacagcctgttcctctagttcttagaacagct

SEQ ID NO: 962407 - DNA, 120 bp, Artificial Sequence
  ENSG00000231057_5 (sequence is synthesized)
ggttactgagctctcaggccagacactggatcccggagagcttgtccactgcaacagtgcaacacgctaagggctgtgtggcggcacaggggctctgagctcctgacctgagtcatgggg

SEQ ID NO: 962408 - DNA, 120 bp, Artificial Sequence
  ENSG00000231057_6 (sequence is synthesized)
acctgaaggctgacacccagccctatacctacaagctgggtgagacccctggcagttgcctacacccctgctgagacccagtacctccctgtaaaatgggggaaataatgcctgcctcac

SEQ ID NO: 962409 - DNA, 120 bp, Artificial Sequence
  ENSG00000231057_7 (sequence is synthesized)
tgccacatggcctccagtgaactgtagactcctgcatagccttccaaagttcttcatttggtgaatattatgagaaatgacacgtatgactttctcccaaatacgtggcttaaacccaaa

SEQ ID NO: 962410 - DNA, 120 bp, Artificial Sequence
  ENSG00000231057_8 (sequence is synthesized)
gtacagtgaaatcagaactgaccacacagagtaattggggcaagggagttatttgtgacacaaagccctcatcactttataaaagtacttgctactgattacattgaaaaccagtcttcc

SEQ ID NO: 962411 - DNA, 82 bp, Artificial Sequence
  ENSG00000231057_9 (sequence is synthesized)
aaaagtacttgctactgattacattgaaaaccagtcttcctgagtaaaacatgttttttgttttgtatcttgacccaggctg

SEQ ID NO: 962412 - DNA, 120 bp, Artificial Sequence
  ENSG00000231057_10 (sequence is synthesized)
gcgaggttttgccatgttggccaggttgatcttgaactcctgacctcagatgatccacatgcctgggcctcccaaagtgctggggttagaggcattaagggaggagaccacccctcatat

SEQ ID NO: 962413 - DNA, 79 bp, Artificial Sequence
  ENSG00000231057_11 (sequence is synthesized)
ctgggcagatcgacccctgacctaatcggttatgttatcgattacagacattggatagaaaagcactgtgaaaatccct

SEQ ID NO: 962414 - DNA, 80 bp, Artificial Sequence
  ENSG00000231057_12 (sequence is synthesized)
acagacattgagatcgaattaccggtgcatgcagcccccagacacgtaccctctgcttgctcaatcgatcacgaccctct

SEQ ID NO: 962415 - DNA, 120 bp, Artificial Sequence
  ENSG00000231057_13 (sequence is synthesized)
tgtagactcctgcatagccttccaaagttcttcatttggtgaatattatgagaaatgacaccgaggtgactggcacatggtcgaggcagctgcttaggcagcttaagcatgccctgtgaa

SEQ ID NO: 962416 - DNA, 120 bp, Artificial Sequence
  ENSG00000231057_14 (sequence is synthesized)
gtggcaggcccccgtggaggaccaacacagtggctgaacaccgggaaggaacaggatcttggagtctggacatctaaaacttgcacatgtaccacccctagaatttctggtaaaccagca

SEQ ID NO: 962417 - DNA, 88 bp, Artificial Sequence
  ENSG00000231057_15 (sequence is synthesized)
ccagcctgaagatcacgttctcatcaaacggtggaaagaagaaaaactcgagccaacctaggaaggacccctgtacagaaaaaaaaaa

SEQ ID NO: 962418 - DNA, 120 bp, Artificial Sequence
  ENSG00000231057_16 (sequence is synthesized)
aacctgtgggagaacccggcgagctaagccaaacggagggcgggagagaggaagcggcagctggcgcctctcggcaactctaaccctctgatagagatcgccaagattggtatccataga

SEQ ID NO: 962419 - DNA, 120 bp, Artificial Sequence
  ENSG00000231057_17 (sequence is synthesized)
ggcgtctgcttttaacctgtgggagaacccggcgagctaagccaaacggagggcgggagagaggaagcggcagctggcgcctctcggcaactctaaccctctgatagagatcgccaagga

SEQ ID NO: 962420 - DNA, 120 bp, Artificial Sequence
  ENSG00000231056_0 (sequence is synthesized)
actagccccgtgtttctgattcagtatcactgaaatactttggaaccatataaagggcaaagtacattccacatgttgaaggacagtgcctggccctgtggggtgtcatccccaagctgt

SEQ ID NO: 962421 - DNA, 120 bp, Artificial Sequence
  ENSG00000231056_1 (sequence is synthesized)
caggggttcatctcaactcccatcagagttcaaacattgaattagttgtgcaatggaaggagtattaccaggacccagatgcagcccaaggaaaaaagaaaacaaaaggagacacacaca

SEQ ID NO: 962422 - DNA, 120 bp, Artificial Sequence
  ENSG00000231054_0 (sequence is synthesized)
cttccaccaataaattcaagtttttattcttgtttataaccggcatttccaggtccggccaggtccaaaaaaaaaaaaaaggaattgagggtttgcatcgtttttcaatataactggaag

SEQ ID NO: 962423 - DNA, 120 bp, Artificial Sequence
  ENSG00000231054_1 (sequence is synthesized)
ctgttttatcactttgtattttgagaaccgctccctttcccgcacacgcattgctgcctcctctcgggcttggttaatgagtctgtgcgccaagccaggtcgctccgggcagttcgcgct

SEQ ID NO: 962424 - DNA, 120 bp, Artificial Sequence
  ENSG00000231054_2 (sequence is synthesized)
aaaccatggcagcattgcggctccggcgggcgggctctgcgcggggccccaccgagctttccgggagcctctcccgcagccgatgggcatctaggggcgcagaacgaagagtgggcgccg

SEQ ID NO: 962425 - DNA, 120 bp, Artificial Sequence
  ENSG00000231054_3 (sequence is synthesized)
aaacgggtgtaggcgctggaggccgacggggaggcccggggcggtcaggcttctcggtagagagggccgtgcacctcgcggcctgcgggctaaggcggggagccgctcctgcggcggccg

SEQ ID NO: 962426 - DNA, 120 bp, Artificial Sequence
  ENSG00000265380_0 (sequence is synthesized)
tggatcacagttcggtgtgcggctggctctgctcacatcctcgtccttggcattacagcgtttcttcacaaatgactcttgaccgacaagcaaacaccaccaggcatctggatgagcggc

SEQ ID NO: 962427 - DNA, 120 bp, Artificial Sequence
  ENSG00000265380_1 (sequence is synthesized)
gtgtcctgctgctgattattttgaaatagcagcgatgttttgaaacaggcatgtctccgttggcagataagaaagacgaagtgaagtgaggcaccagcacaccacagtgctccgtcaagc

SEQ ID NO: 962428 - DNA, 120 bp, Artificial Sequence
  ENSG00000265380_2 (sequence is synthesized)
tctcagagtaaatatatataccatcctatcccaatccatcttgctctaaatactgctttttctgaggctgtcaaaagcacaagctgccatggtaatgacaggaagatatgggtgaaatgc

SEQ ID NO: 962429 - DNA, 120 bp, Artificial Sequence
  ENSG00000265380_3 (sequence is synthesized)
cagccctaattagagacttgattgctctgtaataacaaggcctgtatttgatttggacggttctgggttgtcaggtaaaatgaattaaatatgtctgcactttcatttcaaaatgtgaaa

SEQ ID NO: 962430 - DNA, 120 bp, Artificial Sequence
  ENSG00000231050_0 (sequence is synthesized)
ggtccctccggggacggggcgggtgggggcaccgcgggcgagatcgcttcctgcagaggaggcaacaggccccgctagcaggtcagggtcccgggcaggcgcaggtgccccccggcctct

SEQ ID NO: 962431 - DNA, 120 bp, Artificial Sequence
  ENSG00000231050_1 (sequence is synthesized)
aggcgcaggtgccccccggcctctcaagcagggactgcggcgagctcagacgcggctgacgggcagagactcgcgcttgggctcagtgcgtgtgaagtgggcctcgggctgcggaggagg

SEQ ID NO: 962432 - DNA, 120 bp, Artificial Sequence
  ENSG00000231050_2 (sequence is synthesized)
gcagcaccccgtggctcctcgcgctgctgcgagcagggccgcctggcaggggcgggggccggtgggcgggagtgtcggggtaaggccgcggactcctcccatgccgctgagcagtggaca

SEQ ID NO: 962433 - DNA, 120 bp, Artificial Sequence
  ENSG00000231050_3 (sequence is synthesized)
actgggcctcccctcaaccagggccacaacctcaaggggccatgccacctccaacacctatttcccaccttctactctctccacaccctgggacaccacccgcctctctcagctgacgtt

SEQ ID NO: 962434 - DNA, 120 bp, Artificial Sequence
  ENSG00000231050_4 (sequence is synthesized)
ttccttcttgttttgtgtgcatggtgcttgtgtgagaaagtggacacacagtaagtgcggcttccagatgcgtccgccacctgccctccgtgccacgcgcttccccctacctaggggagc

SEQ ID NO: 962435 - DNA, 120 bp, Artificial Sequence
  ENSG00000231050_5 (sequence is synthesized)
ctccaccagacagggaacccacgccttgccacccttctctctccctcccacttcacctgtccgcatcatttctggagccctttctttctggcacgagatgctccagggccctgttgtatt

SEQ ID NO: 962436 - DNA, 120 bp, Artificial Sequence
  ENSG00000231050_6 (sequence is synthesized)
ctccctgccccagcctgaacccagctatttctgctgcagcctggttcattgtgggagaatgtcatgcagagcccgggatctggctccggatgtgctcattgctactggggtgtcattgca

SEQ ID NO: 962437 - DNA, 120 bp, Artificial Sequence
  ENSG00000274403_0 (sequence is synthesized)
acagccaggggaagcaaccatgtggacaacaaaagagggaacagatggaggtcagctgagggacagtaggctgccatagcatgggaaacgtcactcaacttgggaccaaactgtagctaa

SEQ ID NO: 962438 - DNA, 120 bp, Artificial Sequence
  ENSG00000274403_1 (sequence is synthesized)
ccaactcccatagggcatcttattcttgaagcatgtaaggaaaccggcctatcagataccgtcttagtatcgtctgtctctcaagcctctctgttcatcttctctggagagctgagcttt

SEQ ID NO: 962439 - DNA, 120 bp, Artificial Sequence
  ENSG00000274403_2 (sequence is synthesized)
ccagtatcaaatggccactaagcctcttcctctccctcctacataatctccattttttagtcattgtaccttatagtccctattccaatctctattcctagatcattaccctagaccaga

SEQ ID NO: 962440 - DNA, 120 bp, Artificial Sequence
  ENSG00000274403_3 (sequence is synthesized)
accagacagtaaatattttaggctttgcaggccataaagtctgtgtcccaactatgcaactctgctgttcagtagttgcacaaaagcagccataggcagctcgtacacaaattaatatgg

SEQ ID NO: 962441 - DNA, 120 bp, Artificial Sequence
  ENSG00000274403_4 (sequence is synthesized)
ctgcattccactaaaacttcactcacaaaacaaggggctggctcgcttcagtccatgggctgtttcttgactcctgctctagagagtctttgagttttaaaataaagttaggagaactga

SEQ ID NO: 962442 - DNA, 120 bp, Artificial Sequence
  ENSG00000274400_0 (sequence is synthesized)
aaggaaagcaaagctgaggagaaaatccattgatccctggaggaccctcacgtggcattggtactttggatcacaagactgccccacgggcagaccccccaactctgagccagaccccat

SEQ ID NO: 962443 - DNA, 120 bp, Artificial Sequence
  ENSG00000274400_1 (sequence is synthesized)
tttttctctcaattcactggaaaaaaaaaatgtttaactttttagcttccaagttttaatttctaaaacaggtttcttgtggtattttgcaacgattttatcatcaagcctggtgataaa

SEQ ID NO: 962444 - DNA, 120 bp, Artificial Sequence
  ENSG00000274400_2 (sequence is synthesized)
ttgtttttaaagggtaatgatgtattaatgtacctttgaatttacgattctcagtaggaaactaacccaagacctaaatgttttcttttctagagaataaaaaagttaagtacatgtttc

SEQ ID NO: 962445 - DNA, 120 bp, Artificial Sequence
  ENSG00000230908_0 (sequence is synthesized)
atgtgagctagacttttaaggaggcgaaagagccagctgcagaaagccaacaagaggggtgtttaatgcaaagaaaatcataaaccgatccctagctggaaatgatcctaacctgtggaa

SEQ ID NO: 962446 - DNA, 120 bp, Artificial Sequence
  ENSG00000230908_1 (sequence is synthesized)
ctgtggaagctcctgaattgagtgagggaccggccggcaggagaggctgctgtgcagtggtgcaatctcagctaaatacaacctccacctcctagattcaagcaattctcctgcctcagc

SEQ ID NO: 962447 - DNA, 120 bp, Artificial Sequence
  ENSG00000230908_2 (sequence is synthesized)
tagctgggaacacagcataacccagctcatcctgactgatgccaccatttccagataagagaaatgcgactgagaaagattaagatattttcttaagattggacattatgttcctaccca

SEQ ID NO: 962448 - DNA, 120 bp, Artificial Sequence
  ENSG00000230908_3 (sequence is synthesized)
ctgtgcttgccttatagttgaaagagagtttatttaagcacagagatcaagcaagagtggagcacaggacacactttcaggttgccttggggactgctctgtagaacaaaaaatcaaact

SEQ ID NO: 962449 - DNA, 120 bp, Artificial Sequence
  ENSG00000230908_4 (sequence is synthesized)
agaaggcatgattaccaaagttgttgatctaattctcattgatttacagaaataacagtggctaacgatcagctatacattgttgaattataggatgtatggcatttaaaaatgtattta

SEQ ID NO: 962450 - DNA, 120 bp, Artificial Sequence
  ENSG00000230908_5 (sequence is synthesized)
tttaaaactaattttttttagatttttgatggatttaggggtacaggtgcagttgtgttacatggatatattttgtagagatgaaatctgggcttttatgtacaactacccaaataagat

SEQ ID NO: 962451 - DNA, 120 bp, Artificial Sequence
  ENSG00000230908_6 (sequence is synthesized)
acattgtacccaataggcagcatttcactttcaccctcattctatcctcccactgtttggagcctccaatgtctatcattccactcagtaagtccatgtccatggtttagcacccatgta

SEQ ID NO: 962452 - DNA, 120 bp, Artificial Sequence
  ENSG00000230908_7 (sequence is synthesized)
taagtgggaacatgcagttcttgattttctgtttctgagtcatttcactaagggtaatggcctccagttccatacacattgctgcaaaagtcataatttcattcacttttatggctgaat

SEQ ID NO: 962453 - DNA, 120 bp, Artificial Sequence
  ENSG00000230908_8 (sequence is synthesized)
agtattccatggtgtatatctaccagattgttttattcaatgaagtgttgatggacacttaggttgatttcacaactttgctattctgaactgtgctacaataaacatacaaatgcagaa

SEQ ID NO: 962454 - DNA, 120 bp, Artificial Sequence
  ENSG00000230908_9 (sequence is synthesized)
acttcaccacactgaccaccagagggaagcactcacccactgatgtccagtccctcaggtccctctactccagcttcaccctggggagcaggctctgcaggtggccctggggtcgacata

SEQ ID NO: 962455 - DNA, 120 bp, Artificial Sequence
  ENSG00000230908_10 (sequence is synthesized)
gggtctgccttgaaggaagaagctctacaaactaaacactccctgagtgctgtatgggttctgcagaggcccctctgcttggctctgtccttgctgctctgggttacctgggtgtgcagg

SEQ ID NO: 962456 - DNA, 120 bp, Artificial Sequence
  ENSG00000230908_11 (sequence is synthesized)
gttttattgctcagagccatggccagtagatggcatagcctcctgttcctgcagctgtccccacagcccctgctggacaggcccagaatggaccctctcagaagacaaggactctctcag

SEQ ID NO: 962457 - DNA, 120 bp, Artificial Sequence
  ENSG00000284748_0 (sequence is synthesized)
aacctgaacgcgcggccagagctcccagttgggtccacctccgaataaagaagcttcttcccaggccagtggcacaagcttaagtttgtcttctgaatttgtcttctaagtccttccaaa

SEQ ID NO: 962458 - DNA, 120 bp, Artificial Sequence
  ENSG00000284748_1 (sequence is synthesized)
agttgccgaccacacagcagccaaatatccgttaggaggtgtcattctcttccttacaactccagtggcttatcatcactcttagaatgagagggaagcattctggcgggaggcccaccg

SEQ ID NO: 962459 - DNA, 120 bp, Artificial Sequence
  ENSG00000284748_2 (sequence is synthesized)
cagctccttgaagaagacagccaggcgagggccaagactgggtgccaggggccttggaactgccaaaatgcctcccattttatggacaggcctggctcaccctgaagacattccaagtat

SEQ ID NO: 962460 - DNA, 120 bp, Artificial Sequence
  ENSG00000284748_3 (sequence is synthesized)
ttaatcagcagtccatggtacatattgggttgcagagggagccctcagaagctggacttttaggagacaaaactcagccagaggaaggagctggccttctacatggaccaggctgatgct

SEQ ID NO: 962461 - DNA, 120 bp, Artificial Sequence
  ENSG00000284748_4 (sequence is synthesized)
caacagatggaaaaagtgcatcccaataacaaggatcaataaccgaaggctgacagctgcagagacctggcctgagaggcccctaaggactcagttctgcctctttcccacaccagactg

SEQ ID NO: 962462 - DNA, 120 bp, Artificial Sequence
  ENSG00000284748_5 (sequence is synthesized)
gccaggaatccatctcacccacctccctgcaccaagctccgggagagcgaacaagcgagggaggaaccatttttcacatactttctctttcaaaatgtagccctgtttcgcaatttccta

SEQ ID NO: 962463 - DNA, 120 bp, Artificial Sequence
  ENSG00000284748_6 (sequence is synthesized)
cttaagttctggaaggctctagggcagaacccaagacaccttctctagccactggcctgggtctctcgtcaccaagaacctggtaggctagcggtgacggagaaaggaaggggcccagat

SEQ ID NO: 962464 - DNA, 120 bp, Artificial Sequence
  ENSG00000284748_7 (sequence is synthesized)
ttacgaactctcccactgtccccatccatgccagctcacccaagggtctatttagtgcaggtcactctctctctgtctttttgtagagacagggtctcagtatgttgcccagactggtct

SEQ ID NO: 962465 - DNA, 120 bp, Artificial Sequence
  ENSG00000284748_8 (sequence is synthesized)
caaagtgctgggattagaggcatgagccgccacgcccggcctcacattcttgatgctaaaggagcttcaaccaagcctccagccaaaacctgtttattgttccccgtgtgttggctttct

SEQ ID NO: 962466 - DNA, 120 bp, Artificial Sequence
  ENSG00000284748_9 (sequence is synthesized)
agccaaaacctgtttattgttccccgtgtgttggctttctcttgggagagccagaaggtgcgccacaccaaagcaggtgcacccaaccctggtatgctcacgtctcagcaacccctgagg

SEQ ID NO: 962467 - DNA, 120 bp, Artificial Sequence
  ENSG00000284748_10 (sequence is synthesized)
acctaatcttcagatcttctctactcccctataactaggcttttgttctggctcacttttactggcagtactagacagtattccagaccttttgcaatgaatccatttagtccttaaaaa

SEQ ID NO: 962468 - DNA, 120 bp, Artificial Sequence
  ENSG00000284747_0 (sequence is synthesized)
aaactcctgggctcaagccatcctccttgccttgaccttgggatataggcgcaactcaccacacccagcccctaaatttttcaatgaccagaattaatcaattctatcctttcctccaaa

SEQ ID NO: 962469 - DNA, 120 bp, Artificial Sequence
  ENSG00000284747_1 (sequence is synthesized)
atcaattctatcctttcctccaaaaagataaaaaccttagtctgttctcacttcagtcctcattcttcttctccttgaattaagcatccttgaacttctccttgcaatcccagatcttag

SEQ ID NO: 962470 - DNA, 120 bp, Artificial Sequence
  ENSG00000284747_2 (sequence is synthesized)
ttctctattattattaattttttagttatacataaaaattacttaaacttctctgactcaaaaaaaaaaccttctccgtgatgtgattattatgcactgcatgcctatatcaaaatattt

SEQ ID NO: 962471 - DNA, 120 bp, Artificial Sequence
  ENSG00000284747_3 (sequence is synthesized)
ccataaatatatacacctactatgtacccgcaaaaattaaaaattaaaaaaaattttaaaattacttaaacttaactataagttataatggctgctttgcttataattgcccactggata

SEQ ID NO: 962472 - DNA, 120 bp, Artificial Sequence
  ENSG00000284747_4 (sequence is synthesized)
tgctttgcttataattgcccactggataccacattttcctattttttggatttgtttttttgagacacagtcttactctgtcgcccaggcatgagtgcagtggcgtgatctcagctcact

SEQ ID NO: 962473 - DNA, 61 bp, Artificial Sequence
  ENSG00000284747_5 (sequence is synthesized)
tggcgtgatctcagctcactacaatctccgcctccccggttcaagtgattctccttttatt

SEQ ID NO: 962474 - DNA, 120 bp, Artificial Sequence
  ENSG00000284747_6 (sequence is synthesized)
cccaaagtgctgggattataggtgtgagtttctgtgtgcgacctaacttttttcttagaactttgattacagccgtgagccactgcacccagcgcctggattctcttagtcttattaggt

SEQ ID NO: 962475 - DNA, 120 bp, Artificial Sequence
  ENSG00000284747_7 (sequence is synthesized)
cactgcacccagcgcctggattctcttagtcttattaggttgcaatctttgagcaattctttcagagagcaaatctgaatgtgacaaacttcctgaggttttgtatacccccaggtattt

SEQ ID NO: 962476 - DNA, 120 bp, Artificial Sequence
  ENSG00000284747_8 (sequence is synthesized)
ttgtatacccccaggtattttattttgacctttcatttgaatagtaatttggctgagtagagagtacaggacttgggttcaaaataacgtgtttttgtttgtttgttttttgttttgttt

SEQ ID NO: 962477 - DNA, 82 bp, Artificial Sequence
  ENSG00000284747_9 (sequence is synthesized)
gactgcctcagcctcccaaatagctgggattgcagatggagtctctgttgcctgggctggagtacagtggcgcaatctcggc

SEQ ID NO: 962478 - DNA, 120 bp, Artificial Sequence
  ENSG00000284747_10 (sequence is synthesized)
ttgtgatctgcccgccttggcttcccaaaatgcagggattacaggtaggggccaccgtgcccagcctaacagcctgttcttatttcacgaatataatgttctgtctaatctccaaggatt

SEQ ID NO: 962479 - DNA, 120 bp, Artificial Sequence
  ENSG00000284747_11 (sequence is synthesized)
gttttaacatgtttgctttgtgaaatgtttgcatggggagttgcatgtttattgagttttgtacttttcttgatattaattttcctcaaatgcttcgcaatttaaattttgggctcatat

SEQ ID NO: 962480 - DNA, 120 bp, Artificial Sequence
  ENSG00000284747_12 (sequence is synthesized)
ttcaaaattcctattctcctgtctgttgaaccaggttctgatgacatgagtttgcctctgataaccacagcagaggaaacacagggcagtgtgaggaaggctgagtcctctcagtcagga

SEQ ID NO: 962481 - DNA, 120 bp, Artificial Sequence
  ENSG00000284747_13 (sequence is synthesized)
gggcctttctagcccacctagaaatagtgcagatttcttgctacccagggtcttgctgtgcctcttgtcaccagtgctctggcctgtgtgcacatactcactgtgacacagtttagcatg

SEQ ID NO: 962482 - DNA, 120 bp, Artificial Sequence
  ENSG00000284747_14 (sequence is synthesized)
agagaggtggggaagggggcgaaggcagctggctgatcctccaaaagcccccagataatcaccctgactcctgccccagggctccttcctgttccctatttccataaagggcagagcttt

SEQ ID NO: 962483 - DNA, 83 bp, Artificial Sequence
  ENSG00000284747_15 (sequence is synthesized)
gctccttcctgttccctatttccataaagggcagagctttctcagaactcacagccaccttcacagaagtcatctcctataga

SEQ ID NO: 962484 - DNA, 120 bp, Artificial Sequence
  ENSG00000284747_16 (sequence is synthesized)
ttacaggcgtgagctaccgcgcccggcaagtattttgtttttaaattcagcctgctcctggaggtttttacttggcttaaaaataacatgagacttgaaagttcattgtcttaaaaaata

SEQ ID NO: 962485 - DNA, 120 bp, Artificial Sequence
  ENSG00000284747_17 (sequence is synthesized)
gttcattgtcttaaaaaataaagaagaaaagacaaaattgtggctaatggaggtgcaacctccagacacaaaacttggattgatgatggtaaaatctgagagcctgtgttggaagacagc

SEQ ID NO: 962486 - DNA, 120 bp, Artificial Sequence
  ENSG00000284747_18 (sequence is synthesized)
agccaggagcgagatgttgccctctttagatttcacatctttgcttcagtggttttctttaaaggcaagcaaagagtctcactctgtctcccagactggagtgcaatggcgcgatctcag

SEQ ID NO: 962487 - DNA, 120 bp, Artificial Sequence
  ENSG00000284747_19 (sequence is synthesized)
tcagctcactgtaacctccacctcccgagttcaagcgattatcccacctcagcctcccatgtaactgggattacagatggagtctcactctgttccccaggcttgagtgcagtggtgcaa

SEQ ID NO: 962488 - DNA, 88 bp, Artificial Sequence
  ENSG00000284747_20 (sequence is synthesized)
tcgtgccattctcctgcctcagcctaccggagtagctgggactacaggcattctccgcctccccggttcaagtgattctccttcctca

SEQ ID NO: 962489 - DNA, 120 bp, Artificial Sequence
  ENSG00000284747_21 (sequence is synthesized)
cctaccgggttcaagcaattcgactgcctcagcctcccaaatagctgggattgcaggtttgtggactcttacaaaaggaacagtcgaattgattcagcatcagctaagcatggaagaaaa

SEQ ID NO: 962490 - DNA, 120 bp, Artificial Sequence
  ENSG00000284747_22 (sequence is synthesized)
aaaaatatgtaactgtgaaaacaaaaacaaaacagatttctggctgctgtcctcagaagcctcccgcacagacgatgttcctgacaggatcaacaaacgtcgcatttcactgtcccacag

SEQ ID NO: 962491 - DNA, 120 bp, Artificial Sequence
  ENSG00000284747_23 (sequence is synthesized)
agtgacttccttgccctgctctgaatgagtgtcctttctgtgaaagtaggtctcatggttctagggctgatcccagcgccatcccacaacatttcagtgtgcccgacagcgtgcctggca

SEQ ID NO: 962492 - DNA, 120 bp, Artificial Sequence
  ENSG00000284747_24 (sequence is synthesized)
agcagcgagctcctgacaattggaagctgctaatgctgttacagacatctgcaagcaagtcagatcagccagcttccatcacgtgagacaccttggaggacaaagccacattgtgtggag

SEQ ID NO: 962493 - DNA, 120 bp, Artificial Sequence
  ENSG00000284747_25 (sequence is synthesized)
gaaaacacaccaccattcaggcccatcgtcatcctgctttctcctatactcagtctcccacagtgccaggtagttttctgcctgtactaagaagggtgaatggaaaggtgagatgtaaaa

SEQ ID NO: 962494 - DNA, 120 bp, Artificial Sequence
  ENSG00000284747_26 (sequence is synthesized)
acaaacaaacaaacaagggctcgaaatgtctatgggaagataaaattgtagcagtgctttagaaaacaagaagcgcatgattaaatggactgttgttttctttagaatgcgggtattatc

SEQ ID NO: 962495 - DNA, 120 bp, Artificial Sequence
  ENSG00000284747_27 (sequence is synthesized)
attggtattgaggtgacgcattaggactttgaggtgcctcccccaccctggcctctgcgctggcagtgagaacccagcccgtgctatcttcacagttctcagcccatggaagcacaggcc

SEQ ID NO: 962496 - DNA, 120 bp, Artificial Sequence
  ENSG00000284747_28 (sequence is synthesized)
acctgggctcctgcaaacaccagacgtgtaattagaggctcctgggctgggatgatgtggtgtgcagacaagtcttatcacgcgtctgagccgctgtgggtgcctggagttgcctctgca

SEQ ID NO: 962497 - DNA, 120 bp, Artificial Sequence
  ENSG00000284747_29 (sequence is synthesized)
gcccggagcggatgagcggaggctcccgtgactcacccaactgcaggaactgtcaactggcttctgcccagccaagaacttttatcaatcactaagtagagacactgtgtacaaggacac

SEQ ID NO: 962498 - DNA, 120 bp, Artificial Sequence
  ENSG00000284747_30 (sequence is synthesized)
cggttcatccaagaacatcaggacagccaggaattcaaaacacaaaacacagcttcctgcatgttgcaccccaggcggctctgaggctcagcccaaggaaggtttggggctcgggccaga

SEQ ID NO: 962499 - DNA, 120 bp, Artificial Sequence
  ENSG00000284747_31 (sequence is synthesized)
aagacacgattcactctgacttacacaagaggggagtgtacaaaagtcatgcagtctcaggggaaggcactgggctaaaccctcatgactgtaaaatgaagaaataggcatgaagcatga

SEQ ID NO: 962500 - DNA, 120 bp, Artificial Sequence
  ENSG00000284745_0 (sequence is synthesized)
ggctggccccttgtgtgctcattctacaagcaactttcaggatttgatagactgtagtcatattcccctcacatttctactttcctggctgagatgaacatcatttgtgtgtggggtttc

SEQ ID NO: 962501 - DNA, 120 bp, Artificial Sequence
  ENSG00000284745_1 (sequence is synthesized)
ttcagcaatggcgcctaacaaagctcccccagttacttggaaggaataaacacacccctgcacaccgaggcacagaagcctggccttcccagctcagagagtccttggtggcaatttgag

SEQ ID NO: 962502 - DNA, 120 bp, Artificial Sequence
  ENSG00000284745_2 (sequence is synthesized)
atgaaacggccgtgatcgaagagagaaagtggaggcgaggcttagcgtcccacagagcagaggccgctggttccccgggatggaggggccaggagtgaagacagccataccaggcctgaa

SEQ ID NO: 962503 - DNA, 120 bp, Artificial Sequence
  ENSG00000284745_3 (sequence is synthesized)
tcgccggctcaggagacagaggccagggcccataggagaggaagctcccgggtaagctcttcacagtgcctaggcattctgtctttgtgctcctacaaaaccaggcttatgtttgcaaag

SEQ ID NO: 962504 - DNA, 120 bp, Artificial Sequence
  ENSG00000284745_4 (sequence is synthesized)
cgttgggagaagtcggagttccctgggaacatcgtgtataccaaacagggacgccttggaggagggcccacaggatgggagatccccaggcatctccccagaaagctgagaattcaaaga

SEQ ID NO: 962505 - DNA, 120 bp, Artificial Sequence
  ENSG00000284745_5 (sequence is synthesized)
aggaccgaggcagatttctgaatgtttccttgctctgtcttctcatccacactttgttctggggttgaggagggtgtggagttgggaatccaacccaaggctcctggcctctctgcagac

SEQ ID NO: 962506 - DNA, 120 bp, Artificial Sequence
  ENSG00000284745_6 (sequence is synthesized)
tcaggaggaacggaaggcctgctccccacggctcggctccaggccatcttccttcttgatggggacacctcctgccttggagagaggtgggaaccagcatctgggagacccagctggtgg

SEQ ID NO: 962507 - DNA, 120 bp, Artificial Sequence
  ENSG00000284745_7 (sequence is synthesized)
ggcaaccagtgaggatggggaagtcatgttcatttggctcatagtgacaagccggccatggcatatactctgctgcttgcaacgattccagaggccagcacgattcctccctccacccca

SEQ ID NO: 962508 - DNA, 120 bp, Artificial Sequence
  ENSG00000284745_8 (sequence is synthesized)
ggtttcgccacagaaatgcctgatctgcccaaggccaccctgccagggacagtggttactgatgttgcctgctctgcatccaccgtagcacagggggaaggatgcctgcccaatccatgg

SEQ ID NO: 962509 - DNA, 120 bp, Artificial Sequence
  ENSG00000284745_9 (sequence is synthesized)
caccctctcctgtgtgccagcatgcacaggcttcctccatgcacaggccagggatggctggccaaatactgtcaccaggggaggctgtgggaactcccagaggggatagccttggcctct

SEQ ID NO: 962510 - DNA, 120 bp, Artificial Sequence
  ENSG00000284745_10 (sequence is synthesized)
gtgtggtcagaccataagggctagccttggcctctgtgtggtcagaccagaagggctaaccttgacttctgtgtgatcacatcagaaaggctagccttgtcctctgtgtgatcagaccag

SEQ ID NO: 962511 - DNA, 120 bp, Artificial Sequence
  ENSG00000284745_11 (sequence is synthesized)
aagggccaaccttggcctctctgtggtcagatagaagggctagccttggcctctgtgtgatcagaccagaagggctagccttgacttctgcgtgatcagatcagaagggctagccttgac

SEQ ID NO: 962512 - DNA, 120 bp, Artificial Sequence
  ENSG00000284745_12 (sequence is synthesized)
gccctcgctcgggctgggccagggcggcgattgcgtccacaataccgtgcattcattacgctccttaaaaacagtgttgtgtgtctggagaacaggaagtggccgtaagtcccccgtgta

SEQ ID NO: 962513 - DNA, 120 bp, Artificial Sequence
  ENSG00000284744_0 (sequence is synthesized)
tttttttttttttttttttccactttgtgctagatcctggcaattgttccatgagcacatggagggcagcctcatgtgtcttcatagataaccagcactgctccaactttcctatcaaag

SEQ ID NO: 962514 - DNA, 120 bp, Artificial Sequence
  ENSG00000284744_1 (sequence is synthesized)
aaagcacctggaatgagagaagcacacagattgcagcaaggacattaatttgaaatcttcaattttatttgcatttcatgccaactttctattccgcttcccaatgcatttgtgcttatt

SEQ ID NO: 962515 - DNA, 120 bp, Artificial Sequence
  ENSG00000284744_2 (sequence is synthesized)
ttaatataaaaatcatagtttaaaacagatgctctaggcaggtgcaccttgtttatcctgaggcttacacccctctgcaggcacgtgcaccctgatttaagaaggacagacacgtgaact

SEQ ID NO: 962516 - DNA, 120 bp, Artificial Sequence
  ENSG00000284744_3 (sequence is synthesized)
gatgagattattccagtgatacggtgaggaaggcaggataggaatcatcagccccttctaaagatgaagaacctggtgatcagcaatgctgagtgccctgccccgggtgccacagcttgt

SEQ ID NO: 962517 - DNA, 120 bp, Artificial Sequence
  ENSG00000284744_4 (sequence is synthesized)
actgctgctctgtcctgataattggtcacactgcctctcaggatacagactcataaatgccgtgcccatacatgcaaactaaagaagacagaaatgcaggagcttgaaggactaactgca

SEQ ID NO: 962518 - DNA, 120 bp, Artificial Sequence
  ENSG00000284744_5 (sequence is synthesized)
gcagggtttacatggaagagatacttgcattaaatatttcgctgatggtcagaaccttcatgggtgtgtaaccttcatgggtgtggcaggaaatggaattggtactcttttgttttaaaa

SEQ ID NO: 962519 - DNA, 120 bp, Artificial Sequence
  ENSG00000284743_0 (sequence is synthesized)
agcgaatgccggatcctctgcttgggaagacagtcctcctttccgaaggactccattcagcaaaaaggaatataaatcttttaaatacactatagcatcaggcagagtcaagaggagtct

SEQ ID NO: 962520 - DNA, 120 bp, Artificial Sequence
  ENSG00000284743_1 (sequence is synthesized)
ctacccgcttctaatcagattgccagaagtcttccttttctggatggagactaagaggtacttacttctcgccctgggaagggaagatcttggctttctgcttggatcacttccttcaag

SEQ ID NO: 962521 - DNA, 120 bp, Artificial Sequence
  ENSG00000284743_2 (sequence is synthesized)
tatctgggtataccatggtgaacaaaatggatgtttttcctgagcttgaaaatgatgattcttcctatggaaatgaggttgggatctaggggcttggataccccccacatcagaagctca

SEQ ID NO: 962522 - DNA, 120 bp, Artificial Sequence
  ENSG00000284743_3 (sequence is synthesized)
aatccttcataaatggcaaaaaaggggaatcaaagatagctaggttttgaggattacctaaagcccagacagatgactcactgtttaaaatgtaaacttttagaatagttttagacttac

SEQ ID NO: 962523 - DNA, 120 bp, Artificial Sequence
  ENSG00000284743_4 (sequence is synthesized)
agaaaagttttgcagatagtacagaattgccatataccccaacccagtttctcctattgttaacacctgacattgctgcggtacattttccacaacactggtatgttattgttaactaaa

SEQ ID NO: 962524 - DNA, 120 bp, Artificial Sequence
  ENSG00000280800_0 (sequence is synthesized)
atcaacgcaagcttatgacccgcacttactgggaattcctcgttcatggggaataattgcaatccccgatccccatcacgaatggggttcaacgggttacccgcgcctgccggcgtaggg

SEQ ID NO: 962525 - DNA, 120 bp, Artificial Sequence
  ENSG00000280800_1 (sequence is synthesized)
gcgtagggtaggcacacgctgagccagtcagtgtagcgcgcgtgcagccccggacatctaagggcatcacagacctgttattgctcaatctcgggtggctgaacgccacttgtccctcta

SEQ ID NO: 962526 - DNA, 120 bp, Artificial Sequence; identical to SEQ ID NO: 878226
  ENSG00000280800_2 (sequence is synthesized)

SEQ ID NO: 962527 - DNA, 87 bp, Artificial Sequence; identical to SEQ ID NO: 878227
  ENSG00000280800_3 (sequence is synthesized)

SEQ ID NO: 962528 - DNA, 120 bp, Artificial Sequence; identical to SEQ ID NO: 878228
  ENSG00000280800_4 (sequence is synthesized)

SEQ ID NO: 962529 - DNA, 120 bp, Artificial Sequence; identical to SEQ ID NO: 878229
  ENSG00000280800_5 (sequence is synthesized)

SEQ ID NO: 962530 - DNA, 71 bp, Artificial Sequence; identical to SEQ ID NO: 878230
  ENSG00000280800_6 (sequence is synthesized)

SEQ ID NO: 962531 - DNA, 120 bp, Artificial Sequence
  ENSG00000263551_0 (sequence is synthesized)
ggcaactcggtctggtccccttccagagtgtgggagcttagttctttcggtctttgcaataaatcttgctgctgcttactctttgggtccacaccgcctttatgagctgtaacactcact

SEQ ID NO: 962532 - DNA, 120 bp, Artificial Sequence
  ENSG00000263551_1 (sequence is synthesized)
ttgaagtcagtgagaccaagaacccaccgattccggacacactttcagaatgtgacgaggacctgagggtctggaaataactgggaaagaaaagccttgtggaaagaagacatctccagg

SEQ ID NO: 962533 - DNA, 120 bp, Artificial Sequence
  ENSG00000263551_2 (sequence is synthesized)
gaaagaaaagccttgtggaaagaagacatctccaggtttgtttccttcttgcaccctgtaaaagaatgtggatcttccctcaaataagtaaagggaaaacatgctgcttcttcaaagact

SEQ ID NO: 962534 - DNA, 120 bp, Artificial Sequence
  ENSG00000263551_3 (sequence is synthesized)
acacagcccggtcctcccacagcctacatccaatcctctgaggaagctgagtggcactgcctttattcaccacagatgctacagaatcagcaggaaggaagactgtgaaaaggaaaaatg

SEQ ID NO: 962535 - DNA, 64 bp, Artificial Sequence
  ENSG00000263551_4 (sequence is synthesized)
tcccagtggtgaagacaaagtaagaagacaggccgtttgtgaacgaagaagcagtccctcacca

SEQ ID NO: 962536 - DNA, 120 bp, Artificial Sequence
  ENSG00000263551_5 (sequence is synthesized)
aagacaggccgtttgtgaacgaagaagcagtccctcaccagacaccggatctgccagtgcctggatcttgaatctgctggtgccttgatcttggatttcccattctccagaattgtaagt

SEQ ID NO: 962537 - DNA, 120 bp, Artificial Sequence
  ENSG00000263551_6 (sequence is synthesized)
aatacatttctgtttataagccatctggtattttgaactgggtggtattttgttaaagcaacccgaacaagtctaagacaattgtattcttttctttaaaagtataaaattcaaccagta

SEQ ID NO: 962538 - DNA, 120 bp, Artificial Sequence
  ENSG00000263551_7 (sequence is synthesized)
tgggaaagaaaagccttgtggaaagaagacatctccaggtttgtttccttcttgcaccctgtaaaagaatgtggatcttccctcaaataagtaaagttcttgaggctgggaagtccaaga

SEQ ID NO: 962539 - DNA, 82 bp, Artificial Sequence
  ENSG00000263551_8 (sequence is synthesized)
gttgctggaactatataggtgcacaccactgtgtccggctaaatttgtgtatttccatggatgtataatatatttacatatc

SEQ ID NO: 962540 - DNA, 120 bp, Artificial Sequence
  ENSG00000263551_9 (sequence is synthesized)
gcaatttagttcacatttgctttgatttatttcctcagggaaaacatgctgcttcttcaaagactccaatttcagatggcaaaatgcatggaagctgagatggaccttctggagttttcg

SEQ ID NO: 962541 - DNA, 120 bp, Artificial Sequence
  ENSG00000263551_10 (sequence is synthesized)
tgttcctattcggccatcttggctcccagttgtgtggttttaaaactttgaatatatcatctcattccttcctggcccacaaggtttttgctgagaagtctcctgacatccttatgggtc

SEQ ID NO: 962542 - DNA, 120 bp, Artificial Sequence
  ENSG00000263551_11 (sequence is synthesized)
tatgggtctggaaataactgggaaagaaaagccttgtggaaagaagacatctccagttcttgaggctgggaagtccaagatcaagatactggcagttctaatatctgggaaaacatgctg

SEQ ID NO: 962543 - DNA, 120 bp, Artificial Sequence
  ENSG00000263551_12 (sequence is synthesized)
ctcctcgtcaccttacgtcaatactaacctaagggtgaatcttaccactcgacccagggctccctccaccaccatatctcaggttctaaagtacagtagaggctgtgtcttccccagact

SEQ ID NO: 962544 - DNA, 120 bp, Artificial Sequence
  ENSG00000263551_13 (sequence is synthesized)
gcaaatctgaagaagagatccctcttgtcttcagcaggtggtcttcagccagagttagaaggccagaaaggcttcaggaaaaggaactggaatgtggggaagtggtgaagcctttccaac

SEQ ID NO: 962545 - DNA, 120 bp, Artificial Sequence
  ENSG00000263551_14 (sequence is synthesized)
cctccctgcaagcaataagtcacttcctcttttatcctgcataattttgttgacatgcactacggccaactcaatacagcaacttctagaaagaaacttgattccaccactgggaactgt

SEQ ID NO: 962546 - DNA, 120 bp, Artificial Sequence
  ENSG00000263551_15 (sequence is synthesized)
ggtctcaaaccttcatgccctgtgaacagctcaacttcttcgaactgccaacatattcaccaacagaaaccaggatcttccaaagggagtccatgtctttctatctagatctaactaaag

SEQ ID NO: 962547 - DNA, 120 bp, Artificial Sequence
  ENSG00000263551_16 (sequence is synthesized)
gaccaattcaccgaaaaagtaataatctactttacacatggtgactatagttaatatcaatacattgtgtacttgaaacttgctgcaagagtaacctgacaggttctcactacaaaaaaa

SEQ ID NO: 962548 - DNA, 120 bp, Artificial Sequence
  ENSG00000286345_0 (sequence is synthesized)
gcatatggcctgagacaagagcaagcatgtacatcttccgggaaccactaggagcccagcgtgagtggagtggaatgagcaaggagatcagtagaagataccaaccaggaaaaagtaagc

SEQ ID NO: 962549 - DNA, 120 bp, Artificial Sequence
  ENSG00000286345_1 (sequence is synthesized)
cctatgaaacagatgatgatcaaaataccttttcaggtatttgttattggcaaagctcatctggtaatcacagtggaacctcctacctcactccaaaaacttaaaccttcaaaagctagt

SEQ ID NO: 962550 - DNA, 120 bp, Artificial Sequence
  ENSG00000286345_2 (sequence is synthesized)
agaaggaggaatcaagaatatacacggtccctgagcaaaggcaggactgacatgaagcaagagccatgtcctacatattgcccacaaaccagaagaatggtcccacgtttggacttgtat

SEQ ID NO: 962551 - DNA, 120 bp, Artificial Sequence
  ENSG00000286345_3 (sequence is synthesized)
gatcaactgggtgccagtcactcctcccaagcagaggaacaagcgagagccaaatgtcactgcttatatttgagaagagtggaaaaccttcatgaaatgagaacaaggagtacagattgc

SEQ ID NO: 962552 - DNA, 120 bp, Artificial Sequence
  ENSG00000286345_4 (sequence is synthesized)
tcacaacagttttcactgtactaatagccatgtatccagcttctgtagactatcgcaagcctttataatagagcccgaagttaacatcatgctgcatagatgatagaagcagcatagaac

SEQ ID NO: 962553 - DNA, 120 bp, Artificial Sequence
  ENSG00000286602_0 (sequence is synthesized)
tgtctgaaaagaattgcataactactggaaaacagattatcctactgttattcaaagtgaatttctctttcaatttcttactggtgttaattcagtctacctgaagaccacagtgcacct

SEQ ID NO: 962554 - DNA, 120 bp, Artificial Sequence
  ENSG00000286602_1 (sequence is synthesized)
ccagatggcctgaacacctaactgtcttatgcatgcaggttcatgggagtggaggaggagaaagtaaagaaaagcaaggaaggagggagaatgaaaaagtgctgggaggaagaaggagaa

SEQ ID NO: 962555 - DNA, 120 bp, Artificial Sequence
  ENSG00000286602_2 (sequence is synthesized)
aaatctgactcttgttgaactatgctgttgttggacagattatctaaaggagttattacatatttaatcaagcatggctaatttgactatgctgtttatgtcttgtcaaatgtctccact

SEQ ID NO: 962556 - DNA, 120 bp, Artificial Sequence
  ENSG00000286602_3 (sequence is synthesized)
gtgtttcatgtctcactttatgattgggagattctgaagttggcaatgtctacaattccagtaatgttgaatgtctaaatgcttagcatctgagttccttggccatctctgaactgcgag

SEQ ID NO: 962557 - DNA, 120 bp, Artificial Sequence
  ENSG00000286602_4 (sequence is synthesized)
ttgcctgagaaaatgtgaacatttttgtctgagaatgaataatgttaatttgactctcagaggaaacataattctaaaaagattgaggactattcatctaaatgtgtgtattcaatttag

SEQ ID NO: 962558 - DNA, 120 bp, Artificial Sequence
  ENSG00000286604_0 (sequence is synthesized)
agtctaagcaaggctctaagaaaagtcactgaaaatgtcagcccagccaacagagaaaggctcggagagcagctaagacatggcatatacattttcatctattcaatctgaccctgggcc

SEQ ID NO: 962559 - DNA, 120 bp, Artificial Sequence
  ENSG00000286604_1 (sequence is synthesized)
ggataagtggaatgcagctgcacaaaagcaagataaagctggaccatcaagatgatgaacaatctggatgaagagccttcgagacgcacacaaaagctggagaagtgcagttgatgtagg

SEQ ID NO: 962560 - DNA, 120 bp, Artificial Sequence
  ENSG00000286604_2 (sequence is synthesized)
cctggacagctgaagaatgctgcggtctaacgatgaatagccctcatttgtgaatatacagattttccacgatgaataaaaactgagtggaggtcacaataaataaactttttcccccct

SEQ ID NO: 962561 - DNA, 120 bp, Artificial Sequence
  ENSG00000286605_0 (sequence is synthesized)
atacagaagaaactttaaatataattaagatagcagcagaggaacatggaagagaggaacataggtttataaaatatattgtgcaaaagagcttactgcacttataagaaatgagagagc

SEQ ID NO: 962562 - DNA, 120 bp, Artificial Sequence
  ENSG00000286605_1 (sequence is synthesized)
tttataggggatgatcacacagccttgaagaatgcattagtaataacagataacaaggatgagaagatatttgaggaaataacagcaagtgcaacatcatggagatgagagagaaaatgg

SEQ ID NO: 962563 - DNA, 120 bp, Artificial Sequence
  ENSG00000286605_2 (sequence is synthesized)
tatcaggacaaaaagcagttcgggcttttgcaatcaccataggaagaagattccacagtagcctgtgattccagaagaatgaaagacatgtggagcagctatggaccaagttaactagaa

SEQ ID NO: 962564 - DNA, 120 bp, Artificial Sequence
  ENSG00000286605_3 (sequence is synthesized)
gccaacttagattagccattcttcagccacagacatgcagcacgtggttgggtgcagcttgcaatcacaaatcaaaacggaagaggaagaggacaactgtataaagcagcgtgatttaag

SEQ ID NO: 962565 - DNA, 120 bp, Artificial Sequence
  ENSG00000286605_4 (sequence is synthesized)
ttgatctgtgggacaaagagttaagccacaaatatttggggagagagggttttcaacgtataagatcatgatatctgcaaacagagacaaattgacttcctccttccaaatttggatgag

SEQ ID NO: 962566 - DNA, 120 bp, Artificial Sequence
  ENSG00000286605_5 (sequence is synthesized)
taaagagacaacctacagaatgagaagaaatatttgcaaatgatatatctgacaattggttaatattcagactatataaggaatttaaacaattcagtggaaacaaaagccaaataatat

SEQ ID NO: 962567 - DNA, 120 bp, Artificial Sequence
  ENSG00000286605_6 (sequence is synthesized)
atttctcaaaagaagacatacaaatggacatgagtatatgaacaaatgtacaacatcactaatcatcaggaaattgcaaattaaaccataatgaaaaaccacctcactccaattacaatg

SEQ ID NO: 962568 - DNA, 120 bp, Artificial Sequence
  ENSG00000286605_7 (sequence is synthesized)
taatgaaaaaccacctcactccaattacaatggctattattaaaaagacaaaagaaaacaagtgttgacgatatgaagaaaagacaactcctgtatactattggtgggaatgtaaattag

SEQ ID NO: 962569 - DNA, 120 bp, Artificial Sequence
  ENSG00000286605_8 (sequence is synthesized)
aacagaactaatacatgaaccaggaattccactgctggatatatatatacaaaggaaatgaaattagtatattggagcaatgtctgtattcccatgtttattgcagcactgtttacaata

SEQ ID NO: 962570 - DNA, 120 bp, Artificial Sequence
  ENSG00000286605_9 (sequence is synthesized)
gttgaatcagcctaagtgtccaacagcagatgagtggataaagaaaatgtagtatatatacacaattgaaaactattcagccattaaaagaataaaatcccatctttgtgacagcaaaga

SEQ ID NO: 962571 - DNA, 120 bp, Artificial Sequence
  ENSG00000286605_10 (sequence is synthesized)
tgaacctggaggacatcgtgttaagtcaaacaagccagagacagaaagacaaatactgcatgatctcatttatgtgtgaaactttttttaaaagttgatatcatgtaagcagagactaga

SEQ ID NO: 962572 - DNA, 120 bp, Artificial Sequence
  ENSG00000286605_11 (sequence is synthesized)
aaatgattaccagagactggggagggaggagaaagggaggatggaaaaaggttggtcattgggtacaaaactaaaattagatatgaagaatacattcttgtgttctattgctcagtagga

SEQ ID NO: 962573 - DNA, 120 bp, Artificial Sequence
  ENSG00000286605_12 (sequence is synthesized)
tgactatagttaacagaaaaatattgtatattacaaacagaagagaggattttgaatgttctcaccagaaagaaatgatacatgcatgaagtgatgaatattctaaaaatgcagattgaa

SEQ ID NO: 962574 - DNA, 120 bp, Artificial Sequence
  ENSG00000286605_13 (sequence is synthesized)
ccagcatgcaatatatatgcactaaaacatcaaattgtaccccataacatgcacacttacaatgtgtcaattctttaaaaagtgtattttctaatgtaaatattagccataggaattact

SEQ ID NO: 962575 - DNA, 120 bp, Artificial Sequence
  ENSG00000286605_14 (sequence is synthesized)
caaacctccttgagtttgtgacaaatatataaatctttattaatgtaaattattaaaactaaacattcttgttttctcatgcatgtcattttatatttcagtaacttacaataatgctgt

SEQ ID NO: 962576 - DNA, 120 bp, Artificial Sequence
  ENSG00000286605_15 (sequence is synthesized)
ctatctgacagtttatgttttaaagctgtgataaatgtaaaggctaagtacaaaaaattatgcaacgttgtaacaaagtttttatgtggtgctttactggtaccaaaaattggtaataaa

SEQ ID NO: 962577 - DNA, 120 bp, Artificial Sequence
  ENSG00000286606_0 (sequence is synthesized)
gactccacggtaacagtctcttggtgaatgattcccagggcaagcatgctgggttgtccacctctgttcaagtcaatcattttccttcctaaatcgaagaaactgtttttcctccttcta

SEQ ID NO: 962578 - DNA, 120 bp, Artificial Sequence
  ENSG00000286606_1 (sequence is synthesized)
gaactgttaccttcttcttgggcttttaacaccttatacttcatttgactgaccacttccccaacagaatggtgtcactctgacttctactgttgattttttgaaaagtgttgaatatct

SEQ ID NO: 962579 - DNA, 120 bp, Artificial Sequence
  ENSG00000286606_2 (sequence is synthesized)
aatgtaatttactgaatactatactgcaagtgaaaaacagaatgattgtacgggcactcaaagtacggcttctactgaatacagatggcttttgcaccatcatcgagtcaaaaaattcaa

SEQ ID NO: 962580 - DNA, 120 bp, Artificial Sequence
  ENSG00000286606_3 (sequence is synthesized)
aaggcagagaagactcctcactaggacacccagcttgtgaggcgactgacttcgagtttgtacttggctgtcatgcacccgggatgcaccaggcacaagtcacagccacactgtttttgg

SEQ ID NO: 962581 - DNA, 120 bp, Artificial Sequence
  ENSG00000286606_4 (sequence is synthesized)
aggtgtcaccagtcaacgaggtgaagtacagtgaggccccagttcctgcactatggactagtgaacagtcaaagtgtgtgtgcatttttagggattgacaaatgaaaatagcagaactgt

SEQ ID NO: 962582 - DNA, 120 bp, Artificial Sequence
  ENSG00000286606_5 (sequence is synthesized)
cagggtttctcacctagggtgctctgtgatgactcagggactggcctggctcctttgggtcattcatcaaagccattttgaagcaaggactgcttagtaggagctgagctttccaccaga

SEQ ID NO: 962583 - DNA, 120 bp, Artificial Sequence
  ENSG00000286606_6 (sequence is synthesized)
aagacaacttaggaaatagctcctggctgtgagaacctaagaggtatgcatggttctggatgggaatctcaaagatgatggcggtcatcaaatggaactgaagcaggtagagaaagtggt

SEQ ID NO: 962584 - DNA, 120 bp, Artificial Sequence
  ENSG00000286606_7 (sequence is synthesized)
ttcaaaaggatctaaagatgacggaaaacatttcaacagttaaaccacttagataactaataggaagaattcactgggaagaaaaatccccacgggaagctccagagaatgggctatatt

SEQ ID NO: 962585 - DNA, 120 bp, Artificial Sequence
  ENSG00000286606_8 (sequence is synthesized)
gctgaccaggaagggagatataggaagcctataaagttggcttaaacctcatgttgattaaacctcatggtgttcacagacttgagctgcaagtgagaaaatccaatgggaaaacattcc

SEQ ID NO: 962586 - DNA, 120 bp, Artificial Sequence
  ENSG00000286606_9 (sequence is synthesized)
agattgctataaagcaattcaagggaatggcactggcttgtaggaaatgtattgggaatgagatagagaaatccacattcaacaagaaacaggaatcattaaacatgcattaactcaaat

SEQ ID NO: 962587 - DNA, 120 bp, Artificial Sequence
  ENSG00000248458_0 (sequence is synthesized)
atatctcaggctgatctaaaagaactggaaacaaaaaagaagatttcccaggtgatctgggcagcctctaccaatgtgatgcgaatgatgagaatgtgatggcgaagatgaggagcccct

SEQ ID NO: 962588 - DNA, 120 bp, Artificial Sequence
  ENSG00000248458_1 (sequence is synthesized)
gacaaacgtagtcgggaatgacgaaaactgtccagcagcaacagaaccctggtggaccagatgaccttagaaaacacaaaatcaatgtgcaaaaatcatgagcattcctatacacaaata

SEQ ID NO: 962589 - DNA, 120 bp, Artificial Sequence
  ENSG00000248457_0 (sequence is synthesized)
gagctgcatggatttggagtcttatcctcactagaagagaggaatgcacccaatggaaaagaggagagcaaccaaagtctaagctaagagcatagtttcataaagtatttcctctggcat

SEQ ID NO: 962590 - DNA, 120 bp, Artificial Sequence
  ENSG00000248457_1 (sequence is synthesized)
gaaaaaaacaatctgaatatccaaaacatcattcactgttaaatccaggaaacatccttggatttggaaattatggaaggagaaattattattggaactgtactgaacctttagctcaat

SEQ ID NO: 962591 - DNA, 120 bp, Artificial Sequence
  ENSG00000248456_0 (sequence is synthesized)
agtacaagcaactcttcctgtcttcttatccagagtcacaagaggatgggagaggagcagtctgcaagcagccgtaggagcaagaccttgagacgtgtccatcaatgctacacagagtct

SEQ ID NO: 962592 - DNA, 73 bp, Artificial Sequence
  ENSG00000248456_1 (sequence is synthesized)
ggctggaatgtaatggcacaatctcggctcactttgagtatctgagactacagatgcccaccaccatgcctgg

SEQ ID NO: 962593 - DNA, 120 bp, Artificial Sequence
  ENSG00000248456_2 (sequence is synthesized)
acacaactttaaatgctaagaaaaatagcagaatttgtaaatggggaagactgtgacaaatatttagacttccatgattgtaaggggctgaaagtctgaaagtaggtgaagaatacagac

SEQ ID NO: 962594 - DNA, 120 bp, Artificial Sequence
  ENSG00000248456_3 (sequence is synthesized)
aacaagcactatacgatgggtagcccatggcttaagcctcaaaaaaaaatttttccagagtcacaagaggatgggagaggagcagtctgcaagcagccgtaggagcaagaccttgagacg

SEQ ID NO: 962595 - DNA, 120 bp, Artificial Sequence
  ENSG00000248456_4 (sequence is synthesized)
tgtccatcaatgctacgatagattctgctttggagatcaacatgctgtatatcacaataatgatgggactcacggcatggaggatggacagaggagctttctcctggagtggtatttctg

SEQ ID NO: 962596 - DNA, 120 bp, Artificial Sequence
  ENSG00000248456_5 (sequence is synthesized)
atccctctgccttttaatgttctgggaatagaaagaataaaggagactgaggtgaatccaccaaggagtatagcaatttctatttgtctccttaatagtccaacacttcactcacacaac

SEQ ID NO: 962597 - DNA, 120 bp, Artificial Sequence
  ENSG00000248456_6 (sequence is synthesized)
aatgttacgtagtttcatcaaatgatgagtccagcccctttcttctgcagaaaatgtcagttcactgctccttgcctacaaaatagaaattagagagataccagcttttctagccagact

SEQ ID NO: 962598 - DNA, 120 bp, Artificial Sequence
  ENSG00000248456_7 (sequence is synthesized)
acaaaattactttgactaaatcgctaaaaattcagcctctctaccaatttccacaatacgtctcaaatggtaactttaatctctgtttgtgcctttcaggaatccaatgagcaaacaatt

SEQ ID NO: 962599 - DNA, 120 bp, Artificial Sequence
  ENSG00000248455_0 (sequence is synthesized)
ggaagctcaaagccgcactggaaacacagtctttcaggatgtctgaaaggggcaagtctgtttgtgtgggatatacagggagtccacggagcctcccctgcaagcatcagtacagaagtc

SEQ ID NO: 962600 - DNA, 120 bp, Artificial Sequence
  ENSG00000248455_1 (sequence is synthesized)
catctaaggaattggctgttcttatccttaagaatgatgactgtgtttccaattccagtagaccctttgatgcgttctgaataaatattccttttggaattgaacttctagagcccttaa

SEQ ID NO: 962601 - DNA, 120 bp, Artificial Sequence
  ENSG00000248455_2 (sequence is synthesized)
acagtctttcaggatgtctgaaaggggcaagtctgtttgtgtggggtaagaaatgcggggagacaaacggacagtggacagattgcagagagctctgtgtgctgagaggagggtgcagac

SEQ ID NO: 962602 - DNA, 120 bp, Artificial Sequence
  ENSG00000248455_3 (sequence is synthesized)
cagatttttaaattgagaatgcaacagtgaaggatttcaagcttggagtgagaggggagactacgagcctgcagtgataaggcaaagctgaagatttcagagccaaggccacaccctaca

SEQ ID NO: 962603 - DNA, 120 bp, Artificial Sequence
  ENSG00000248455_4 (sequence is synthesized)
aaatcttccacaaatgtcagggagagagtcaggcagttggtagaagagacctgtaaagctgggtaccataagcctcaacacaggtgtttttatttcaaggctggggagctgtgctttgga

SEQ ID NO: 962604 - DNA, 120 bp, Artificial Sequence
  ENSG00000248455_5 (sequence is synthesized)
gttgccatggaatggggtggcacagtgggctttggaggtaaagtctgcagttgagaagttcaagggtagtaagtacttaatgccaggtcaatcatcccttttaagacacagatatcatct

SEQ ID NO: 962605 - DNA, 120 bp, Artificial Sequence
  ENSG00000248455_6 (sequence is synthesized)
tctgaagtttccacctaaatgattctgaaagaatcaggttaagaagcaaatctgttccgatgtgatgccaactaagtacatgatctgattgttccagttatcctgtgccaaaaagaagca

SEQ ID NO: 962606 - DNA, 120 bp, Artificial Sequence
  ENSG00000248455_7 (sequence is synthesized)
agtgcaaagacacagaggtggcgatgagccccatctggttgggacagagtgaaaaaggggttcagctggaggggcctgagaggtgagggtggcagaacgtgtggaggtgtaagctcagca

SEQ ID NO: 962607 - DNA, 120 bp, Artificial Sequence
  ENSG00000248455_8 (sequence is synthesized)
agactgcacagatggaacatggaaaggcttttaacagaaatgaatactttcagactaggtttgaaggactgagtaggagtaaactaaaagagaaaaagcaggacaaaagaagcaccactt

SEQ ID NO: 962608 - DNA, 85 bp, Artificial Sequence
  ENSG00000248455_9 (sequence is synthesized)
attccttttggaattgaacttctagagcccttaactttggcccactctagttttctgaagataaggtcttgctttgttgcccagg

SEQ ID NO: 962609 - DNA, 120 bp, Artificial Sequence
  ENSG00000248455_10 (sequence is synthesized)
aaagtgctgggattataggtgtgaaccattgtgtccgatcgctctctggtttttctaatatcatgatcccaactctgttctttatgtaaatttccctgatcacatggttgtatcttggca

SEQ ID NO: 962610 - DNA, 120 bp, Artificial Sequence
  ENSG00000248455_11 (sequence is synthesized)
ttggcatttcaaaatccttgacagactttgttttgtttgaattttacaatgaacttacatgactaggcacggtccccagttcagttttatagacaaggattctgtaggtcaagaagtgaa

SEQ ID NO: 962611 - DNA, 120 bp, Artificial Sequence
  ENSG00000248455_12 (sequence is synthesized)
acacaaccaataacagcaggtgacaggatttaaacctgggtcactttacttatttttttctactctatcattatgtgaatctatcctacctctgcaatgacagatggccctagagcaaga

SEQ ID NO: 962612 - DNA, 120 bp, Artificial Sequence
  ENSG00000248455_13 (sequence is synthesized)
acacttccttacatctggtatacagtcaaaaagtaaaaattccacacaaataaatatggaaagaatttttacctgctcctatagcttcctttcagggacctggcacccacaaatgttggg

SEQ ID NO: 962613 - DNA, 120 bp, Artificial Sequence
  ENSG00000248455_14 (sequence is synthesized)
taacagaaagaggacttatgtaacttaactcaaagcagaaaagttacagagactgtcttagcataatagagcatggagtggtcatgcttggatgtgcaaactgtctgatagtcttgcaca

SEQ ID NO: 962614 - DNA, 120 bp, Artificial Sequence
  ENSG00000248455_15 (sequence is synthesized)
tggcttgaccccgaattacactagtggggcaagttgcctggggcaaagcaaacttattggacccaaagctctcatttgagaattttgttgactaaaagttataaaatatcagcaatttca

SEQ ID NO: 962615 - DNA, 120 bp, Artificial Sequence
  ENSG00000248455_16 (sequence is synthesized)
caggaatcaaagctggaggagcggaagtcaaatacttcatgttgatctgtctttgggatcactgagccaatcttcagctatactgttcagctcatctggtgaggtcttcatttcaagtat

SEQ ID NO: 962616 - DNA, 120 bp, Artificial Sequence
  ENSG00000248455_17 (sequence is synthesized)
tgtatttttcagtcttagagcaattactttttacagattttgattcaatgattgaaccccacatcttttcatcactttcattcatattgtctttcaatctctttactatattgatcattg

SEQ ID NO: 962617 - DNA, 120 bp, Artificial Sequence
  ENSG00000248455_18 (sequence is synthesized)
tatcaaaatgtaattttaagatgctaaataaaatatcattttctttctttgcatctgcttatgttgtttgtatgtttcacctggtaattgatcacaatctcttgcctctttttatgttag

SEQ ID NO: 962618 - DNA, 120 bp, Artificial Sequence
  ENSG00000248455_19 (sequence is synthesized)
taatatgtgactgtatgccagatattgtggacaaagcacatgtcaaagctctgtatgatgctacttcgaccagataggaatctgtgctttctctgtggggcagataaggtgaggaggtga

SEQ ID NO: 962619 - DNA, 120 bp, Artificial Sequence
  ENSG00000248455_20 (sequence is synthesized)
tcaccccaatccaagaggctgaactaggtcaagactgggttgacattttagtaaaatcctctccacttctagctatgtttttattcctcaggcctgtctcttccacactgttgattgaca

SEQ ID NO: 962620 - DNA, 120 bp, Artificial Sequence
  ENSG00000248455_21 (sequence is synthesized)
agtttcgggctgtgtagtatcctgccgtatgctccatccaaatttgatgagaatcttggggagaccagccaccttctgagcagactcctttcctccagtggaacttttcctcccaattat

SEQ ID NO: 962621 - DNA, 120 bp, Artificial Sequence
  ENSG00000248455_22 (sequence is synthesized)
tatgggacttctgaagattttaacttactttgcagaaactcctaaccttttactcagcctcaatttagcaagggtactatgaggaaaattggcaaggcatttggggatacttttgtttcc

SEQ ID NO: 962622 - DNA, 120 bp, Artificial Sequence
  ENSG00000248455_23 (sequence is synthesized)
aaattgttgtggttgcttctatgaatgccacaagctttgctggcttctctttccttcctacagtgcttctgcatgaaccagatctgatctgtgtttcaaatcagcaaacatcccaagaaa

SEQ ID NO: 962623 - DNA, 120 bp, Artificial Sequence
  ENSG00000248455_24 (sequence is synthesized)
gaaaatagcctgtgaaagtccccttagggtcaacttttaagaagccttgggcagctatgttcttccaacctaacagtccataagatcttcccctatttttccagaagcttcagatgagac

SEQ ID NO: 962624 - DNA, 120 bp, Artificial Sequence
  ENSG00000248455_25 (sequence is synthesized)
gtggatatttcaagaagtaaatgttcagcatgtcttcacccccacttgaagacataatgtatgtattaggctgttctggcattgctataaagaaatacctgagactgtgtaatttataag

SEQ ID NO: 962625 - DNA, 120 bp, Artificial Sequence
  ENSG00000248455_26 (sequence is synthesized)
gctcacggttctgcaggctgtacaggaaacatattgggtctacttctgtggaggcttcagggaactttgactcatggtggaaggtgaaatgagagcaggcacctcatgtgactgaagcag

SEQ ID NO: 962626 - DNA, 120 bp, Artificial Sequence
  ENSG00000248455_27 (sequence is synthesized)
catgtgactgaagcaggagcaagaaagagagagcgagcaaggtgccacacactcttaaacaaccagaactctctcttgagaattcactcactgtcttgccgtcagcaccaaagggatggt

SEQ ID NO: 962627 - DNA, 120 bp, Artificial Sequence
  ENSG00000248455_28 (sequence is synthesized)
cctaaaccattcatgagaaatcctcctccatgatccaatcacctctcaccaggccctacccccaacactgggattacaattcaacgtgagatttgggcctggacacagatccaaacccta

SEQ ID NO: 962628 - DNA, 120 bp, Artificial Sequence
  ENSG00000248455_29 (sequence is synthesized)
tcaatatattagccagatacttgcagctgtatgaagaataccctggttacccagctacaaatgcagatgttattgataagggaggggggcagggaagtgctgggaggagaaagcaggtct

SEQ ID NO: 962629 - DNA, 120 bp, Artificial Sequence
  ENSG00000248455_30 (sequence is synthesized)
gtgctgggaggagaaagcaggtctctggcgagggcttcaccccggtgcctgtgcccacagacctaggtaagggcaggcactcctgcctttgcgcccaaatgttgcatttcccaagaccac

SEQ ID NO: 962630 - DNA, 120 bp, Artificial Sequence
  ENSG00000248455_31 (sequence is synthesized)
gtgcctataaaaaccccgaaacactagtgggcactcacacaagcggctggacgtccagaggacgtcaacaagagcacgccgacaggcagaccctggcaggccatcgactggcggaaggac

SEQ ID NO: 962631 - DNA, 120 bp, Artificial Sequence
  ENSG00000248455_32 (sequence is synthesized)
atggagtttggctgcgtggttggaggagagccaggccgctaggtggcctgactccaggaaactacaccttcccactccatctcccttctgtctcccctgtctgctcacagctacttcctc

SEQ ID NO: 962632 - DNA, 120 bp, Artificial Sequence
  ENSG00000248455_33 (sequence is synthesized)
ctcctcttgagagggagttacatacaagtttaagggaaaagagtctgaagtttccacctaaatgattctgaaagaatcagtggtggagcaagaagagtgatcccatttaggcaaggaatc

SEQ ID NO: 962633 - DNA, 120 bp, Artificial Sequence
  ENSG00000248455_34 (sequence is synthesized)
gttgcagaacaacaatccggaaagcccttggaggagggaggagactgtcattcaccagcaaacccctgccccctcactttttcttttttgtaattggaagttcaggttgaactgctctgt

SEQ ID NO: 962634 - DNA, 120 bp, Artificial Sequence
  ENSG00000248455_35 (sequence is synthesized)
agttattcacccacttctgctggtcaaaggcccatgaggatttaaatgactaaataggccataaaatgccaaccttttagacgtctaaaaagtgtctgctggatcaaacagtcatcacga

SEQ ID NO: 962635 - DNA, 120 bp, Artificial Sequence
  ENSG00000248455_36 (sequence is synthesized)
accacccttagattcctctgccactcactctgctccctgtgtctgggacaccctgagtccacagtgactctttgccaaagtataaagaaaccaccatgtaccttttcaaaaatgtccact

SEQ ID NO: 962636 - DNA, 120 bp, Artificial Sequence
  ENSG00000248455_37 (sequence is synthesized)
tgtccttaaagtcatgaataaaggaagagatggcttccagatatgcaactggacttctgacagccatcatcctctaaaatttccctgtgttttgactgaagttatccacccacttctgct

SEQ ID NO: 962637 - DNA, 120 bp, Artificial Sequence
  ENSG00000248455_38 (sequence is synthesized)
ggttcctggctcacataaacattgagcaagtaactttccattagacccagaggatagactaggatagagttccgagtgtctgaaaattcctggtccccaacaaaactgtgttctgctcaa

SEQ ID NO: 962638 - DNA, 120 bp, Artificial Sequence
  ENSG00000248455_39 (sequence is synthesized)
taatttatttcgtaagaagttataataagtctagtcattaaatcaaaagagaaaaaccttaatgaagtataatattgcttggtacttgtttttgtcagttccatttcttcattaactttt

SEQ ID NO: 962639 - DNA, 120 bp, Artificial Sequence
  ENSG00000248455_40 (sequence is synthesized)
tttttgattgggaaaataaagataattacacaaatctattctcaaatttagccatggatgatttgatttctctttctgtctcttctgtgcctgtgcatacacacacacacacacacacac

SEQ ID NO: 962640 - DNA, 120 bp, Artificial Sequence
  ENSG00000248455_41 (sequence is synthesized)
gaggcctgacatctcccggcagtcacagtgatgtcttccttagatggattcaataatggggaagaacagatgaaaagtggtgaaagttgctaactgctgtgttcctctgcttgcttttca

SEQ ID NO: 962641 - DNA, 120 bp, Artificial Sequence
  ENSG00000248455_42 (sequence is synthesized)
tgctgtgtgccaggaatcaaagctggaggagcggaagtcaaatacttcatgttgatctgtctttgggatcactgagccaatcttcagctatactgttcagctcatctgtgcttctgcatg

SEQ ID NO: 962642 - DNA, 120 bp, Artificial Sequence
  ENSG00000248455_43 (sequence is synthesized)
ttctaggcaatttgaatcaggttgctgagctttgaaaaacattctacagccaagtgtaggagacccaagaacttggagaacatacacgctctgagctatttcaaaaaatacagcacttaa

SEQ ID NO: 962643 - DNA, 120 bp, Artificial Sequence
  ENSG00000248455_44 (sequence is synthesized)
gccaattgagctgtagtcagggcaacacaggcatgaataacatgaaggtagattttagtagaagagaagaacaggcaagggatgcagtcatgtgcatttgaaacacaggacaaacataag

SEQ ID NO: 962644 - DNA, 120 bp, Artificial Sequence
  ENSG00000248455_45 (sequence is synthesized)
ccctttttatctcaataaagtaagcgcagtttgggggcattctgcggggtgagataatttgttggaatttagacgaggcccagaatcatccattggatattaaatccacacataagcctc

SEQ ID NO: 962645 - DNA, 120 bp, Artificial Sequence
  ENSG00000248455_46 (sequence is synthesized)
tgctagaattgtgccagagtaagggcaatcctggaattcctccaggcagtcctaccacatcacccagatgtctggtttctaggtgaatgaattgaagaaagatcaagaaatatatggtgg

SEQ ID NO: 962646 - DNA, 120 bp, Artificial Sequence
  ENSG00000248455_47 (sequence is synthesized)
gtaagaggtaggagagaaagcctgtgtaaattaaatcagatctcctcatacataaacctactcaattacttctaaagcctccttttatttctaacatacaataattgagttaaagaaata

SEQ ID NO: 962647 - DNA, 120 bp, Artificial Sequence
  ENSG00000248455_48 (sequence is synthesized)
taatattcttgtttcaggaataggaattattttctcaggcaaagaatgaaaggtaaaaagtactacagtgtgcctacgtcatgtgctgctaatgctattttcttctcgaggtgctgaatt

SEQ ID NO: 962648 - DNA, 120 bp, Artificial Sequence
  ENSG00000248455_49 (sequence is synthesized)
gtttgttttcctgggaaagctctagggcagagctagcaaaatatcaagatagcagatatgcatgtagagccatgaggcgccttgctcagctctcccttcaagagaacttgcttcaaggtg

SEQ ID NO: 962649 - DNA, 120 bp, Artificial Sequence
  ENSG00000248455_50 (sequence is synthesized)
cttcaaatgcactggggcattcatgcagaggctatgttttcccggggctgctcccagcctgtgactgagcaaggcagaagtgctagcatcatgccattcctgcagaaggtgggtttcctc

SEQ ID NO: 962650 - DNA, 120 bp, Artificial Sequence
  ENSG00000248455_51 (sequence is synthesized)
taatgggtaaacttggctccagggttcgccatcagcatggacataacacacgcagagcttgccagaggctgaggcccctcctaccacatcctgcaattttgtctcttctgtcacaggtgt

SEQ ID NO: 962651 - DNA, 120 bp, Artificial Sequence
  ENSG00000248455_52 (sequence is synthesized)
cagaactgctctcagtccaaggatcgtcccccacatattcctcctcctctcccctttatccttcccaggtcccccaccccaaactctcaaatctacttccatcttcaaatctgcttcttg

SEQ ID NO: 962652 - DNA, 120 bp, Artificial Sequence
  ENSG00000248455_53 (sequence is synthesized)
gagattatgaacaaaagaggatttgcatttgataagatcccaaagagagaggaaggggataatccatataattctgacactggtcaccaggcgcttttttgttttcttttgactgaacac

SEQ ID NO: 962653 - DNA, 120 bp, Artificial Sequence
  ENSG00000248455_54 (sequence is synthesized)
ctgatggagctgttagaattaagtcacatacgaggtgacacagactggcttccccttttggggcagtgcctgggagggacagatgactcatcatattgtggacgggggagtggaagatcc

SEQ ID NO: 962654 - DNA, 120 bp, Artificial Sequence
  ENSG00000248455_55 (sequence is synthesized)
tggctccatcttggaacataggctaattaggggtgagaaggaacagacaggtccacacaaacaacctcccccacctccaagtttctcaactgagactgaggtgagaaatcagctcagcag

SEQ ID NO: 962655 - DNA, 120 bp, Artificial Sequence
  ENSG00000248455_56 (sequence is synthesized)
agacagacaaaggttgtgtgctcaattcatgccagttcactttgcactttccattcaggtttcagggtttacttctgggactcctcatgtctttcagggttgtcctgaatgttcatttgt

SEQ ID NO: 962656 - DNA, 120 bp, Artificial Sequence
  ENSG00000248455_57 (sequence is synthesized)
ccaggatccttggagggaaaaaatgggggactgtgcctggtttcgtatctctcaaatggaatatgagagcttcagaccgttcccttgtttgcagctgagaaagtgtcagtgctaaaagca

SEQ ID NO: 962657 - DNA, 120 bp, Artificial Sequence
  ENSG00000248455_58 (sequence is synthesized)
aagggaggtggggcagagggaccatggatagtacccaaatgtgagtcacacctacaccatcagctttagaacctgtgaactagaaatctcagaaaataatcataaaattatactggcttt

SEQ ID NO: 962658 - DNA, 120 bp, Artificial Sequence
  ENSG00000248455_59 (sequence is synthesized)
tctgccctgtagaaggactgtagagacagattcttgcagaaatcttgccttgctcccacccagcccatgacttttctcgccacaaggaaagcactggttaaggaggtgattcagaggtag

SEQ ID NO: 962659 - DNA, 120 bp, Artificial Sequence
  ENSG00000248455_60 (sequence is synthesized)
gttccccaggtgcgtccatcgatgagtgacctctcctctgcaacagggaaatactttcatcattcaggaggaatactgagttaggaggcagaagctctgggtcctgcttttaacgcttgc

SEQ ID NO: 962660 - DNA, 120 bp, Artificial Sequence
  ENSG00000248455_61 (sequence is synthesized)
acaaacttactgtgtagctttaagcaaggcatccagcctctcgctctcagtgtcctgtgcagccaaactgattgatctatgaggcaatgtgtggcccagctctgccgttcactatattac

SEQ ID NO: 962661 - DNA, 120 bp, Artificial Sequence
  ENSG00000248455_62 (sequence is synthesized)
catgtattcgcctaataaaaaactggcacacggaatgtaacaatgcgattgcatatttgacattggggttgtccttataagtctaggtagccatctttgcagcactggttctttcaaaag

SEQ ID NO: 962662 - DNA, 120 bp, Artificial Sequence
  ENSG00000248455_63 (sequence is synthesized)
aaaactattttcataaatatttcatttggaaatccccatttatctggaagacttagtaaagcatcttctgtagacacagaagcacattatcgcctgcttacttcagagttaggttaccag

SEQ ID NO: 962663 - DNA, 120 bp, Artificial Sequence
  ENSG00000248455_64 (sequence is synthesized)
gcatgttcataaaaaaataacaaagcatattactttagtcaaactttacagagaggatagattgcctacaaagaggttattgtaatatagctcataattttttcaggagtatgctaaata

SEQ ID NO: 962664 - DNA, 120 bp, Artificial Sequence
  ENSG00000248455_65 (sequence is synthesized)
taccactgaactgtttaatattctagaatttatgttacacagtaaaagatagacaactctgtctgcagttctgggactgggatatgcctgtgcatacacgcatctgctctgttttggttt

SEQ ID NO: 962665 - DNA, 120 bp, Artificial Sequence
  ENSG00000248455_66 (sequence is synthesized)
cacttcactttagttatttgatttggtgtctgcaaaaccctgtgtgcacatttttatgatccttgggacaatttactgccaaccttgcttgaactctaaaatatgcctccagtttcggaa

SEQ ID NO: 962666 - DNA, 89 bp, Artificial Sequence
  ENSG00000254337_0 (sequence is synthesized)
tcgcactgctttttgctataaatcttgctgcagctcactctctgggtggggctgcctttatgagctgtgagttgtaacactcaccgcag

SEQ ID NO: 962667 - DNA, 120 bp, Artificial Sequence
  ENSG00000254337_1 (sequence is synthesized)
ggctgcctttatgagctgtgagttgtaacactcaccgcagaggtctgcagcttcactcctgaggccagtgagaccatgaacccaccggagggaatgagcaactccagacacactgccttt

SEQ ID NO: 962668 - DNA, 120 bp, Artificial Sequence
  ENSG00000254337_2 (sequence is synthesized)
cttgaagtcagcaagaccaagaacccacaaattccagacacataatgaccatagcaacttaatcagaactcatcagttccacagattccataaaagttaactccagagcagagaatgatg

SEQ ID NO: 962669 - DNA, 84 bp, Artificial Sequence
  ENSG00000254337_3 (sequence is synthesized)
aattattcttttcgtgttaagcaatggtaaaagaactgactgaaaataagaatattaaaaagtttctctgctaaaaacagaaaa

SEQ ID NO: 962670 - DNA, 120 bp, Artificial Sequence
  ENSG00000254337_4 (sequence is synthesized)
tgtacccgggaggaagaaatgctacacagagaagccaagatgaatctgaacagacagcctttgtcagttccacagattccataaaagttaactccagagcagagaatgatgccacagtcg

SEQ ID NO: 962671 - DNA, 89 bp, Artificial Sequence
  ENSG00000254337_5 (sequence is synthesized)
ataaaagttaactccagagcagagaatgatgccacagtcgggataacatccaatatttgcaatcagaagaaatatgagagtcttgctcc

SEQ ID NO: 962672 - DNA, 120 bp, Artificial Sequence
  ENSG00000227070_0 (sequence is synthesized)
aggcaagagggaagctcgagaacaggttttgctgaggattccccccaagaaaagtgctccccgggaggccgttcctggcaccaagactggcggagccaccacacccgttaaagggatcca

SEQ ID NO: 962673 - DNA, 120 bp, Artificial Sequence
  ENSG00000227070_1 (sequence is synthesized)
ggcgtgagccccccgaggggaagttgaagtggaagcagacaagcacctccaaggatcacgtaggaccagcagaagcagcgtaaagtattggaactttgaatctgacatcagaaagacctg

SEQ ID NO: 962674 - DNA, 120 bp, Artificial Sequence
  ENSG00000227070_2 (sequence is synthesized)
ctggcaccaagactggcggagccaccacacccgttaaagggatccacctggacagcgatcaggccacctccaaggatcacgtaggaccagcagaagcagcgtaaagtattggaactttga

SEQ ID NO: 962675 - DNA, 120 bp, Artificial Sequence
  ENSG00000227070_3 (sequence is synthesized)
ctgacatcagaaagacctgcactcagccgggcacggtggctcacgattgtaatcccaggccgaggcggtggatcacttgagattcactgattctaggtaaatcagaggaacaagcaacat

SEQ ID NO: 962676 - DNA, 120 bp, Artificial Sequence
  ENSG00000227070_4 (sequence is synthesized)
gaacagaaaaaatgtagaaaatgcaattatgctgaagtacaattgttgtttcagaagtccagcatctggtgtacttaacaatagagaatatattaaatttttccaaaataaaaaaaacaa

SEQ ID NO: 962677 - DNA, 120 bp, Artificial Sequence
  ENSG00000227076_0 (sequence is synthesized)
agcaccgggaagcaggggccgagccttccccgctctgtgcctgggggctctgggcactgtctacacctgggaggtggtcagcatatgtgcgtgggaacttgctggaaggaaggaatgacc

SEQ ID NO: 962678 - DNA, 120 bp, Artificial Sequence
  ENSG00000227076_1 (sequence is synthesized)
ggaacggtggtcatccgtgagccacggcctcaggaggtgccttcctaatgtgcaggtgacgattgcctctgagctcaggcatgcagcttctgggatgcactctcctttcacggcaaagca

SEQ ID NO: 962679 - DNA, 120 bp, Artificial Sequence
  ENSG00000227076_2 (sequence is synthesized)
ttctgcataggaaaaaccgtctctgcgtctccaagctgtggcctagcccttcattcatcaaatgggatacaactttcatttcttattaaaatctggaagtcactctccatttgtaagata

SEQ ID NO: 962680 - DNA, 120 bp, Artificial Sequence
  ENSG00000227075_0 (sequence is synthesized)
atttggctctgtgtccctacccaagtctcccgttgtcttatgatcttcagtgttggagaaagagcctgttgggaagctattggatcacgggggcagattttccccttgctgccctcatga

SEQ ID NO: 962681 - DNA, 120 bp, Artificial Sequence
  ENSG00000227075_1 (sequence is synthesized)
taattctgtgttcagtcaaaataggagatagtttgctgtataatgttaaaattcctgtcttcgttgaatgatgccccaaatgttgatatgaattacatagtgtgtcctgctgtgagcatc

SEQ ID NO: 962682 - DNA, 120 bp, Artificial Sequence
  ENSG00000227075_2 (sequence is synthesized)
cttacaatcatggcagaaggcaaagaaaaggaaggcaagtcttacgtggctggagaaggaggaagagggaaagagaagaggtactacagatttttaaacaaccagatctgtgagaactcc

SEQ ID NO: 962683 - DNA, 120 bp, Artificial Sequence
  ENSG00000227075_3 (sequence is synthesized)
tgtgagaactccatcatgagaatagcaccaaagggatggtgccaagccattcatgaaggattcatccccataatccaattaccttctagaaggttccacccccaacaccggggattatga

SEQ ID NO: 962684 - DNA, 120 bp, Artificial Sequence
  ENSG00000259548_0 (sequence is synthesized)
ttaacagctcgcacagcattcctgttgatgtgttgttgctgagagcactttccagtaatctttctgcacacaaatcaccagctcaatctgtttcctggggaacttgaactacaacagaat

SEQ ID NO: 962685 - DNA, 120 bp, Artificial Sequence
  ENSG00000259548_1 (sequence is synthesized)
gatactggggagtttgcaaaatcaaactaaacataggcagcaggaaggacacaaagcaggggagccccagaaatcttagtggtagaaacttttaaacctcttagggtaccaccagggtat

SEQ ID NO: 962686 - DNA, 120 bp, Artificial Sequence
  ENSG00000259548_2 (sequence is synthesized)
aatcagggccctgtgattagaactacctggggtagtggagaggaaagagaagcaacctgtgtcttccagaccatggtatctgaagttttcttggaggaagtcaaataaatatgtgggttg

SEQ ID NO: 962687 - DNA, 120 bp, Artificial Sequence
  ENSG00000259548_3 (sequence is synthesized)
aggatgggagctctaagcagaggatgtggtggctcatttaagatcacacattgacaaagagcagagtggtgtcaagattctgggacagaggcaagttagaaataaaactcttgtttttcc

SEQ ID NO: 962688 - DNA, 120 bp, Artificial Sequence
  ENSG00000258803_0 (sequence is synthesized)
ttggaaaatcctggaaccttgggaaggacgaaatgaggcccgcaaactgtgtctggggacctgtggggtggtcttcatgaaacgcccgccatggaaggctttcagctccaagaaaggcac

SEQ ID NO: 962689 - DNA, 120 bp, Artificial Sequence
  ENSG00000258803_1 (sequence is synthesized)
cggcactcacacttggggggctgatgattgccactgtccaggaggctaaaggaagaaaggcaaccaccatctcttatgaacaggacatacatttccaagacaatgggtccagaccagaag

SEQ ID NO: 962690 - DNA, 120 bp, Artificial Sequence
  ENSG00000258803_2 (sequence is synthesized)
tgcaggctgtgcccccagaacacatggaagttgcatacaaacgcagaattagaccacatttaaaacgcggtggaacttggctgatttgctccctcttggccgtccatttgaagtgtgcag

SEQ ID NO: 962691 - DNA, 120 bp, Artificial Sequence
  ENSG00000258803_3 (sequence is synthesized)
tgaggaccccaagtcctgatctcatcattcaagagatgttaaaatgcctgcggtgaatctgactttaatttaccacgactgctaaaacagaggctttggaaacgaaagcagtagcaagtc

SEQ ID NO: 962692 - DNA, 120 bp, Artificial Sequence
  ENSG00000258803_4 (sequence is synthesized)
tcccatgtgaggccagagctctcgaggggcatttagcagcagcagattttacgtgtatgaatccaaaaaaattaatgtgtcttaaatatttctagcaaccttccaggttcccagttcatg

SEQ ID NO: 962693 - DNA, 120 bp, Artificial Sequence
  ENSG00000258803_5 (sequence is synthesized)
gctcagcaggagaaaggcaaggggctcgttcattcattcattcactataaaaggattaaaatagacctcggtttttctggcttcaacccttgcctcctttttcctttttcttttttcacc

SEQ ID NO: 962694 - DNA, 120 bp, Artificial Sequence
  ENSG00000258803_6 (sequence is synthesized)
cctgccccaccccctacttttttttgttacctccccttccgtgaaccctgactaacagacaacccacatgcttataaaaacagctcttgaaagaacagttctgacagttactggaatgag

SEQ ID NO: 962695 - DNA, 120 bp, Artificial Sequence
  ENSG00000258803_7 (sequence is synthesized)
attgctccagtgctcccaagcaggaggcataaaaaacccagagcaatctccagctgttccaaaggcagattgtacagcagttagagatacagaaaattgcaacctccaccagaccacaag

SEQ ID NO: 962696 - DNA, 120 bp, Artificial Sequence
  ENSG00000258803_8 (sequence is synthesized)
gacaggcccccactcttctcaatctttgagacccccaatactgcttcatcttggggagtttctaggtcttcagatctagattcccatcagttgaatgaagcctttaacctgagtttggat

SEQ ID NO: 962697 - DNA, 120 bp, Artificial Sequence
  ENSG00000258803_9 (sequence is synthesized)
ttatccaggtgcttcgggtatgttggggctcagataacaatatgccaaagtgaaaaactcagaagcagcctcagaagcaaacatttatctctgaccttctcctgctctcttatccctcag

SEQ ID NO: 962698 - DNA, 120 bp, Artificial Sequence
  ENSG00000258803_10 (sequence is synthesized)
ttcctttctcccgcaaggcaggtcatagaaaccagaaccccctttccccaaagccagccataaaacctaaaaaagccttactctaactttccctctgcctttctatgtaaaaactggcca

SEQ ID NO: 962699 - DNA, 120 bp, Artificial Sequence
  ENSG00000258803_11 (sequence is synthesized)
taaagaaattatctgacttaccttgtttaggtcattaggctgccattccagagaaggaggaaatgcattctcagagaagccaagaagaatctaaacaggccttgctgggcttcccagctc

SEQ ID NO: 962700 - DNA, 120 bp, Artificial Sequence
  ENSG00000258803_12 (sequence is synthesized)
agtctatagctagcattagatgttaccctttctgcccaatcatatttcgacacaattgtccagactttgttgaacctaagcataaaaatggacagttcctctgttatccttgagtcttca

SEQ ID NO: 962701 - DNA, 120 bp, Artificial Sequence
  ENSG00000258803_13 (sequence is synthesized)
ttctgaaggctcctgtgtatacacattaaagaaatttgcatgccttttctctagtctgccttttgtgagttgatttttccacaaactttcagagggccaaagggaaagctctctcttggc

SEQ ID NO: 962702 - DNA, 120 bp, Artificial Sequence
  ENSG00000258803_14 (sequence is synthesized)
ccccacagctctatcagtgagcagagtaaagaaaagacttcctgctctcatgcagtctacaacctggccatccacaaaaccacgggctgcctgcttttggttgggacagtggttttatgt

SEQ ID NO: 962703 - DNA, 120 bp, Artificial Sequence
  ENSG00000258803_15 (sequence is synthesized)
aggggagccataaacgtaatgattgaagtagaattctaagtttctagacccactgcccattccccaaatattgtttatgaccataatcctctctctgacttcctattttcattctaaatt

SEQ ID NO: 962704 - DNA, 120 bp, Artificial Sequence
  ENSG00000258803_16 (sequence is synthesized)
ggaataaatgacttggtctttgccaaacactgcgtgtttcagaaaggacttccaaaaggactttccagaaagtaccagactcttaggaatcgcatgaggtgggagattaaaaatacattc

SEQ ID NO: 962705 - DNA, 120 bp, Artificial Sequence
  ENSG00000258803_17 (sequence is synthesized)
ttaatttatttgataggagcaatgggaggtcaaatagcttactgatttctctatgtctaagtcaccaactcattgtgtttgctgagaattactaaaccaataaatgaagtactaccggaa

SEQ ID NO: 962706 - DNA, 120 bp, Artificial Sequence
  ENSG00000259543_0 (sequence is synthesized)
ttgtccttctggccgcctggtgaagaaggtgccttttttcccctttgccttccaccatgattgcaagtttcatgaggcctccccagccatgctgaactggacaacacctgccatggtgag

SEQ ID NO: 962707 - DNA, 120 bp, Artificial Sequence
  ENSG00000259543_1 (sequence is synthesized)
ctaacgtcatgcagaggcagagaactgctgcgtcctgcagacggctgatccaaagtgacagacagctaacggagctgtgcagcacacacgctcaaaaacagaggcttctcagggaggaag

SEQ ID NO: 962708 - DNA, 120 bp, Artificial Sequence
  ENSG00000259543_2 (sequence is synthesized)
ctgctaaacatcctccaatgcacaggacagactccacgacaaacagtcattcagcctgaaatgtcagtagttcaagggggaaaaacgctgcaccaggatgatgttcgggacctggcactt

SEQ ID NO: 962709 - DNA, 120 bp, Artificial Sequence
  ENSG00000259543_3 (sequence is synthesized)
gcaaacccttcacatgtagggctaggttcacagttgtgcctacccctggaggcatattagcagctctgggaacttaaaacaacaacaacaacaacaacgtttagggccctttccagacca

SEQ ID NO: 962710 - DNA, 120 bp, Artificial Sequence
  ENSG00000259542_0 (sequence is synthesized)
cagatgaactaacagtgcttaaatactgaacagaaagaagaggtaactgtaagaatcgccctgggaatgcctaatccaagggagcagctcaaatgacaggcacacagatggacgcattgt

SEQ ID NO: 962711 - DNA, 120 bp, Artificial Sequence
  ENSG00000259542_1 (sequence is synthesized)
gtgattaatggtgtctcccaggcctggtggagaggctgcaggaaatggtggcatatataagcgagtcctctttttggtttagtgctccttccacggtttgaagtagagaagaatcaggaa

SEQ ID NO: 962712 - DNA, 120 bp, Artificial Sequence
  ENSG00000259542_2 (sequence is synthesized)
aaccaatattgtgtctttggcattcgaatccatgaacttctggaagagaaaccaaaaagccatgtcaggtatggctggagcctgcattttcatttgggagcagaagcatgtcacatagtc

SEQ ID NO: 962713 - DNA, 120 bp, Artificial Sequence
  ENSG00000259542_3 (sequence is synthesized)
ttctaaaaagagaaattttgctttaaaaatgacacaacaaaataaaatgctgactgagtcatggtaaaaagcagtctttgaatttgaataaagtgtagcagtgctgcaaaggcaaagaaa

SEQ ID NO: 962714 - DNA, 120 bp, Artificial Sequence
  ENSG00000259542_4 (sequence is synthesized)
gcagtggcaagatcacagctcactgcggcctcagtcttctgggctcaagcggatcctcctgcttcagactccaaagtagctgggactacaggataaggccgccaggacttcactttgtgc

SEQ ID NO: 962715 - DNA, 120 bp, Artificial Sequence
  ENSG00000259542_5 (sequence is synthesized)
ttctgagttctggcattagttttgttttcaaagtaatgaccagcactccaagcctggatagccttgctggagaactttccacctggagccctgcccatcggccctgcgggacttccttca

SEQ ID NO: 962716 - DNA, 120 bp, Artificial Sequence
  ENSG00000259541_0 (sequence is synthesized)
agatgatgaggaggcaccagcaaaagagactgagaaagagtgggcaggcaaatggaagaaagaccgggtgaggaaactgagcctgagaccgaacaaggggctcaccgaccactagaggtg

SEQ ID NO: 962717 - DNA, 120 bp, Artificial Sequence
  ENSG00000259541_1 (sequence is synthesized)
accagaattagtgctcctgaagacactcacttgctactccaagactggatgatctgtcaggttctctctacccctgacagtctgtggattggggagttttcatggtttaaagctcatacc

SEQ ID NO: 962718 - DNA, 120 bp, Artificial Sequence
  ENSG00000259541_2 (sequence is synthesized)
acagtcatgaaatcaaaccctgaagcctgctctccaggccggtcccacagataccaggaggctagggccatgccacaggggacagaggagctctgctgcacccacctttgctacagagga

SEQ ID NO: 962719 - DNA, 120 bp, Artificial Sequence
  ENSG00000259541_3 (sequence is synthesized)
gcccagcatcccctcagcttcccactgcaatttttcatgtcattttttgagaaagggaaggttcctcagcaaggtctctttgttcgttaggaaatacaacccacatttcttctcagtctg

SEQ ID NO: 962720 - DNA, 120 bp, Artificial Sequence
  ENSG00000259541_4 (sequence is synthesized)
agatgatgaggaggcaccagcaaaagagactgagaaagagtgggcaggcaaatggaagaaagaccgggcacaatgaagggcaggattagagtgcaggggccagccatgccctcccgggag

SEQ ID NO: 962721 - DNA, 120 bp, Artificial Sequence
  ENSG00000259541_5 (sequence is synthesized)
actggcccctagcgctgccggagggcagagagtggcacatggctcagcctttggcactcaggtgaggaaactgagcctgagaccgaacaaggatgaggaaacttgaggctcagaatggtt

SEQ ID NO: 962722 - DNA, 120 bp, Artificial Sequence
  ENSG00000259541_6 (sequence is synthesized)
aattacctcgcctaaggttactgattaataaatcactgagtagagactgaaacccacatctgtctaccagcaaaggctgtccatactacaccatgttatctccaaatgaaacctcatatg

SEQ ID NO: 962723 - DNA, 120 bp, Artificial Sequence
  ENSG00000259541_7 (sequence is synthesized)
aagttgctgcagaaactctatgggaaaaaaagacttttagatcttctggaactacaacatctagtctccgtgaatctgcaccatctcttagcactgggtcctgggaggagggggtgcttc

SEQ ID NO: 962724 - DNA, 120 bp, Artificial Sequence
  ENSG00000259541_8 (sequence is synthesized)
caccagctccctccccttcttcctgccatgttcctacttcctaagaagcaaagacaaacttgagttaggatcaacatgaggagcccacagtgggttaatgtgacagatgcatctccctgg

SEQ ID NO: 962725 - DNA, 120 bp, Artificial Sequence
  ENSG00000259541_9 (sequence is synthesized)
gtggcagagtgggcttcttgtggggtgacagtcactgaagtatgcttccaactcgagagtcctggacatgtgtggacacgacagtgtgctgaccacgagtgaatgtataggcaagtcttc

SEQ ID NO: 962726 - DNA, 120 bp, Artificial Sequence
  ENSG00000259541_10 (sequence is synthesized)
ctggaaaacaggccatatttctcactgaggctccctggagtggctggtggtcacagcacccaccacttggacactttgtcctgctgatactaataatagcaaatagcattatcatctggc

SEQ ID NO: 962727 - DNA, 120 bp, Artificial Sequence
  ENSG00000259541_11 (sequence is synthesized)
aggcgctcttctaagtgctttacaaatgttgacttgtgtaatcctcacagcagcactatgaggtagggactatcattaatcctgttttataaaggaagaaactgagcagatagcctttaa

SEQ ID NO: 962728 - DNA, 120 bp, Artificial Sequence
  ENSG00000259541_12 (sequence is synthesized)
ttacaaatactaactgatgtgtgaaaaggattggagtgtgttcacagaccccagcatctcagagctggaagttgttttagagaccctcagattcagacccttcgtcttatgcacaaactc

SEQ ID NO: 962729 - DNA, 120 bp, Artificial Sequence
  ENSG00000259541_13 (sequence is synthesized)
cagccgaaagagggacggtaactcagtcaacaacagcactgatgcttttgggagatgcctgcagctgtttcccatgctcctggcttggcacaaaggcctgccctccctgagtctcccagg

SEQ ID NO: 962730 - DNA, 120 bp, Artificial Sequence
  ENSG00000259541_14 (sequence is synthesized)
gatctgctgttaccccaggagcgcccaccagcaagctcaccagtccagggagagcccagcacttttccacattcaggtgttcatcgccctaatcgtttctgagggaggaaggtgaaccca

SEQ ID NO: 962731 - DNA, 120 bp, Artificial Sequence
  ENSG00000259541_15 (sequence is synthesized)
aggtagaaagtccccgcaacgaccaaagctggtctgtgcactgtggaggtccaggaccagctacggacaaagagcagccatgaattcctgcactagaaggacaactccttgaggacaggg

SEQ ID NO: 962732 - DNA, 120 bp, Artificial Sequence
  ENSG00000259541_16 (sequence is synthesized)
atgctcttcatctgagcccaggatctgccaccaagccatcctccaaagatgttggttatacaactacaagctaagtcaaagaggatcggagcccaaacagagaagacagctgtgggtgtc

SEQ ID NO: 962733 - DNA, 120 bp, Artificial Sequence
  ENSG00000259541_17 (sequence is synthesized)
agaggagaaaagactgaaagggaagctggaaagaaaggaatggggagaaaaccaggaaaaaggatggagagagagagctcagagctgaggaaagctgcacaaaaatgcaagatctggaaa

SEQ ID NO: 962734 - DNA, 120 bp, Artificial Sequence
  ENSG00000259541_18 (sequence is synthesized)
cagatggaaagaattgtgaaaagcagaactgggcacacatcctttaaaattcagcctttaaagaggatctactccaaaccccgcctctatggggaggaaaatgaaggtccatgtggggaa

SEQ ID NO: 962735 - DNA, 120 bp, Artificial Sequence
  ENSG00000259541_19 (sequence is synthesized)
acgcttgccaagataatatgcagggagttaatggcagacctaggataagagtctgatagagtcagacaaggccaagtttgatttctggctataagctgtgtgatattgggcaagttagtt

SEQ ID NO: 962736 - DNA, 120 bp, Artificial Sequence
  ENSG00000259541_20 (sequence is synthesized)
tctcactctgagctatggtttcctcatcaatgaagatggggttaatcgtgtctctatctcatagccttattgtaagaattaaatgagatgctgtaaataaagttgcctacatgtgcctgc

SEQ ID NO: 962737 - DNA, 120 bp, Artificial Sequence
  ENSG00000259540_0 (sequence is synthesized)
cgtgctgctcctgccaggcggatgacatcaggaatgctcatcaacttgagggcgaagaaatgcttggcggtcttctccttcaccgggtgcacccgcccgaacgtcccagtgcccacggtg

SEQ ID NO: 962738 - DNA, 120 bp, Artificial Sequence
  ENSG00000259540_1 (sequence is synthesized)
gccagtgtgtcgaagtcctgcaggcgctgattcacaactcaagtagcacagtgaaggtggacaatttggactgcctaagcatcccagcatcgtctgttctacatatcactattccaaatg

SEQ ID NO: 962739 - DNA, 120 bp, Artificial Sequence
  ENSG00000259540_2 (sequence is synthesized)
acattgggtatgtcaccattggcctataacaactggaatgacacatcttcactagaggcaggccttggccatcctccacagcagactattgagtaacaaaataagcagtactatttattt

SEQ ID NO: 962740 - DNA, 120 bp, Artificial Sequence
  ENSG00000259540_3 (sequence is synthesized)
acttcttactatgctgtttaaaaaaaaagcctctgatgaaatcctggtggcttcttctctgttcttaccaatccaggaagtgtagagagctgttgagccctgtttccaaatccccaggtg

SEQ ID NO: 962741 - DNA, 120 bp, Artificial Sequence
  ENSG00000259540_4 (sequence is synthesized)
aagctgcgctgacatgccttctgtccatacagccctttccaagactcagctatttgtgatcacccccaaatgttaccctgattctattaccaatttgtaataaaactcacttgtatggtg

SEQ ID NO: 962742 - DNA, 120 bp, Artificial Sequence
  ENSG00000251033_0 (sequence is synthesized)
cagcagcagcaagcaaatgcagcagtagtaatagaagaaggagaaacagcagaggagagtgaggataaacaggaaaatgaagggagagaaggaagataagaacaaggaaaaaaagctgga

SEQ ID NO: 962743 - DNA, 120 bp, Artificial Sequence
  ENSG00000251033_1 (sequence is synthesized)
gcagtgtaaaggcatcagtaaaattcaatcattcatcattctacatatttgctggaaaaatagcttttgtcctttaactacacttcaaggttttattggcggtttgagaccatccagata

SEQ ID NO: 962744 - DNA, 120 bp, Artificial Sequence
  ENSG00000251033_2 (sequence is synthesized)
ttcccacctggctatatgttatatgctcaaacaagaatgaccatacagcattaatgacacatataactgctacttacagacaattggatttgtgctttgtattttatggatgtataaact

SEQ ID NO: 962745 - DNA, 120 bp, Artificial Sequence
  ENSG00000251033_3 (sequence is synthesized)
tacccaggctgtctgatccacccccttctcacatttagtttaataaaaaaattagaagccatcatctaagaaacccatgcaatccttgtttgtctctgaagcatccatgtatcttccatt

SEQ ID NO: 962746 - DNA, 120 bp, Artificial Sequence
  ENSG00000251033_4 (sequence is synthesized)
ctgtgtgaatttaatgtcacctgtactcctggttttacttacttaattctcttggcaccctcattttatcattgtctatcttatctatgtaacccatcccttctattatatttagatgac

SEQ ID NO: 962747 - DNA, 87 bp, Artificial Sequence
  ENSG00000287650_0 (sequence is synthesized)
tccaccttagcctactgaatagctgggaccacaggtgtgcaccactatgcctggctaaggttttcatttttttagagacaagatctc

SEQ ID NO: 962748 - DNA, 120 bp, Artificial Sequence
  ENSG00000287650_1 (sequence is synthesized)
tgcctggctaaggttttcatttttttagagacaagatctcaccatgttgctcaggcgggtctcaaacccctgggctcaagctaacctcctgcctcagccaatcaaagtattgggattata

SEQ ID NO: 962749 - DNA, 120 bp, Artificial Sequence
  ENSG00000287650_2 (sequence is synthesized)
tgagtgagcccccacacctggccttgtttggcttttctacataggactttaaaaatccaatttaaggaacacaatatatgaaagtagagccaggcacagtggcatgtgactctagtcact

SEQ ID NO: 962750 - DNA, 120 bp, Artificial Sequence
  ENSG00000287650_3 (sequence is synthesized)
ggaggctgaggtgggaggatcccttaaacccaggagtttgtgtcaggcctgggcaacataatgagaccttgtttttttaaaaagggaagtacaatactgcctatatcttactgaactgaa

SEQ ID NO: 962751 - DNA, 120 bp, Artificial Sequence
  ENSG00000287650_4 (sequence is synthesized)
tactgaactgaaaagtacagttataatattcttccttattttgtgctgtaacttccacccaattatcttacttgtgtcctctggaaggtcatgtatacatattaatattctccttgctat

SEQ ID NO: 962752 - DNA, 120 bp, Artificial Sequence
  ENSG00000287650_5 (sequence is synthesized)
aaacgacaggcttcttagaggaaactattatatcctacttcatccccatctctaccatccaaattagactccttagttgggtacactagcctcagttctttcaagtcacatggcatggtt

SEQ ID NO: 962753 - DNA, 120 bp, Artificial Sequence
  ENSG00000287650_6 (sequence is synthesized)
tctatatcatttatgaatcttgcctatcatccaaagtatttgctgttcagtttgtcaactgtagaaagatttttaattccattgtgtcaaaaaatctttgtattattttaatccttttaa

SEQ ID NO: 962754 - DNA, 120 bp, Artificial Sequence
  ENSG00000287650_7 (sequence is synthesized)
atttattgaggcttgtgttatggcctgacatatggtttatcctggagaatgttccatgtgcactaagaaattttgctgttcttgggagtgttctgcagatgtgtattaggtctggttggt

SEQ ID NO: 962755 - DNA, 120 bp, Artificial Sequence
  ENSG00000287650_8 (sequence is synthesized)
ttatagtgttgtttgagtcttctatttacagatgtgccctgacttatgatggtttgacttatgattttttgactttacagtggtgcaaaaatgatacatataaaatacactcctcaattt

SEQ ID NO: 962756 - DNA, 120 bp, Artificial Sequence
  ENSG00000287650_9 (sequence is synthesized)
atctagttattgtcttcattattgaaagcggggtattgaagtttccaactattattggataatttaatatttcttttttcaattctatctgttttcgctttatggacattgggctttgtt

SEQ ID NO: 962757 - DNA, 120 bp, Artificial Sequence
  ENSG00000287650_10 (sequence is synthesized)
gttaggtgcaaatatatttataattgttataactcccctataagctaatcttttttgattacaaagtgtttctctttgtatgtagtggctttatttagtgtaaaagtctattttatctga

SEQ ID NO: 962758 - DNA, 120 bp, Artificial Sequence
  ENSG00000287650_11 (sequence is synthesized)
tattattgtagccatctctaggtcttttatggttgctgtttgtgtgcatatctttttttatctttttattttcaacctatctgtatctttgaacctaaactgggtcaaaacacatagtta

SEQ ID NO: 962759 - DNA, 120 bp, Artificial Sequence
  ENSG00000287650_12 (sequence is synthesized)
aaactgggtcaaaacacatagttaacagcatctggttgtatgtagagagcacagagttggatcttatttttattttaattcagtcgacagtctctgatttttttttcttttcttttcttt

SEQ ID NO: 962760 - DNA, 120 bp, Artificial Sequence
  ENSG00000287650_13 (sequence is synthesized)
tgtccagtctggagcacagtggtgtggtcacagctcactgcggcttcaatctctatgggctcaggtgatccttccacctaagcctcctcagtatctgggactacaggaatgtgccactat

SEQ ID NO: 962761 - DNA, 74 bp, Artificial Sequence
  ENSG00000287650_14 (sequence is synthesized)
atccatcccagcctctcaaagagctgaaattacggagccactgcacctgtctctgattttttattggactgttt

SEQ ID NO: 962762 - DNA, 120 bp, Artificial Sequence
  ENSG00000287650_15 (sequence is synthesized)
gagccactgcacctgtctctgattttttattggactgtttaatccatttacatttaatgctattattgatatggttggatttacatctgatattttgcttttcgttttctgtatctttca

SEQ ID NO: 962763 - DNA, 120 bp, Artificial Sequence
  ENSG00000287650_16 (sequence is synthesized)
tatcttttttgttcacctcttcctcctttactgccttcttttgccattccttcacttgttttttaactacatctatttagttattttattagcgatggctctagggcttacaatatatta

SEQ ID NO: 962764 - DNA, 120 bp, Artificial Sequence
  ENSG00000287650_17 (sequence is synthesized)
gactacagatttatttttcaaaaatttagatcttatttgcttacccacaggatttgaggcagacttgactttttcccttaagtcttaatcacatttttgttaccattgttgatcagaagg

SEQ ID NO: 962765 - DNA, 120 bp, Artificial Sequence
  ENSG00000287650_18 (sequence is synthesized)
tgccaagcaaaattctctaatattttgctctcatctagtcttctgacatatctcactgtctctgtaattcctcaacaatgattggtccttcaatcaaacctccaaattctgttagtaccc

SEQ ID NO: 962766 - DNA, 120 bp, Artificial Sequence
  ENSG00000287652_0 (sequence is synthesized)
ggggcgggggcagcggcagaccccagcagaagatgcggggtgaagcgccctcaacacaggctggccactctttctgagcttttccccactgacttaaaacctacccaaatcactcctgcc

SEQ ID NO: 962767 - DNA, 120 bp, Artificial Sequence
  ENSG00000287652_1 (sequence is synthesized)
ttcaaagacctggaaaagagtgctggatggtgagacccacaggtggagggatggctgagagggtggacttgctatgtggctgaggccaggtggaccagaggaagtggtaggtggacagag

SEQ ID NO: 962768 - DNA, 120 bp, Artificial Sequence
  ENSG00000287652_2 (sequence is synthesized)
atgaggaggcggggatgccgaggggtcctgacctctgtccactgccacccggagggcctggaggacagagtaaggagatcttgtccttggggccaatccccatgctgatttcctgccagg

SEQ ID NO: 962769 - DNA, 120 bp, Artificial Sequence
  ENSG00000287652_3 (sequence is synthesized)
cactgagggctcctggggcccaagacccacagaaggctcagagcacactcaagcactggcctcgagaccagagccacaatggggacggagcctaaaataagcattttatttaataaaaaa

SEQ ID NO: 962770 - DNA, 120 bp, Artificial Sequence
  ENSG00000287655_0 (sequence is synthesized)
agggacgcgagttcagagaaaaccggctgtgggttcgcagcgtgtgtgggaactccactttggacgcttcccgggggtcgctcccaaagaaccacagaggtagagcgggacgcaatgagc

SEQ ID NO: 962771 - DNA, 120 bp, Artificial Sequence
  ENSG00000287655_1 (sequence is synthesized)
catgaacgcctgggcttcttccctagttttcccgcagtagactctgggggcgcggttgcaaaacctagctgcccacaggggcgggcccagggtggtacattttgcaccttgaagaggaga

SEQ ID NO: 962772 - DNA, 120 bp, Artificial Sequence
  ENSG00000287655_2 (sequence is synthesized)
caaggatcgaatcaggccgcccagctacttaaatgaccatgccgtgagtgaaggagggccctggctagctttcccccatcgcaccaggtttgccaggtggtcagaacgtggaccctgctg

SEQ ID NO: 962773 - DNA, 120 bp, Artificial Sequence
  ENSG00000287655_3 (sequence is synthesized)
gggcagcagaggctggcagttaagccaagcgtttgtcccagttcactgccctctgaactatttgaactcatgtctgtgttagaccatgcccaggagagaagtggcaggtctgcattgttt

SEQ ID NO: 962774 - DNA, 120 bp, Artificial Sequence
  ENSG00000287655_4 (sequence is synthesized)
caaaggtgcttctccccaacccctagttgcgagctaacctttggtcaagtctcctgcatctttgaacttcatctgaagaataggaagaatagtgatacctactctcaaggaagagttgta

SEQ ID NO: 962775 - DNA, 120 bp, Artificial Sequence
  ENSG00000287655_5 (sequence is synthesized)
taggaagaatagtgatacctactctcaaggaagagttgtaaggatttaatagaggaagattaacaaaacaccaagtccagaatttataatgcagtttttttttgttttttttttgttttt

SEQ ID NO: 962776 - DNA, 120 bp, Artificial Sequence
  ENSG00000260148_0 (sequence is synthesized)
ttcgcgccctccccaggcctgctttgcccgagcctctggcacctccgagttccgagcgccgtgcgctcagggccaccgacgcgggaacagaggggtggcctcagcccgggcctgcggggc

SEQ ID NO: 962777 - DNA, 120 bp, Artificial Sequence
  ENSG00000260148_1 (sequence is synthesized)
ttcccttttttttttcaatagcaaaagagctcggcattttcttgccgccagagattggaaatatgacatatttctctgacacagacgataagataaagacggatccgaactgggcctggg

SEQ ID NO: 962778 - DNA, 120 bp, Artificial Sequence
  ENSG00000260148_2 (sequence is synthesized)
tctactcatccgtgcggaaaattagcaggagagccaggcactgggatggacagtggtgaaccaaagcagatagtctctctcaagttgctcacctgtgggggccaagatcaggacccaggc

SEQ ID NO: 962779 - DNA, 120 bp, Artificial Sequence
  ENSG00000260142_0 (sequence is synthesized)
gagggagtgggcttattttcttctgctcttctaccatgtgaggacccagctttcaatcctctttgtccttccctctcttctgccatgtgaggacagagcattcatttcttctggaggatg

SEQ ID NO: 962780 - DNA, 120 bp, Artificial Sequence
  ENSG00000260142_1 (sequence is synthesized)
cagcaagaaggcatcatcttggaagcagagaatagccctcatcagacaccaaacttgctggagccttgatcttggactttacattctccagaacagtgagcaataaatttttagtgttta

SEQ ID NO: 962781 - DNA, 120 bp, Artificial Sequence
  ENSG00000260142_2 (sequence is synthesized)
taaactacccagtctcaggcattttgttatagcagctcagactaagacagactaagacaatatacaatgccttagtttaatactttaatactttcatgaataacaatagtaaataaatga

SEQ ID NO: 962782 - DNA, 120 bp, Artificial Sequence
  ENSG00000260142_3 (sequence is synthesized)
atacaattatttaaattatgagattgttcattgtctcattgtctagtccttacctgtatctgtctctctccacattctgaaatcgaccttgtgatttttgcataattgtgttatacataa

SEQ ID NO: 962783 - DNA, 120 bp, Artificial Sequence
  ENSG00000260142_4 (sequence is synthesized)
ctttcctttttatttgatacttttcttatctattattggtttagctattcctagtggcctaaagatgtaattttattgcaaacatctgaacaactcaatatattcttcacactccctgct

SEQ ID NO: 962784 - DNA, 120 bp, Artificial Sequence
  ENSG00000260142_5 (sequence is synthesized)
tactttaaagctttagtatttacacagttggggatatatctatatagaaatacttatcagtgaagtaaaccttttttccctgatgtttcatcttaatggtaaaatcatcctcctgttgcc

SEQ ID NO: 962785 - DNA, 120 bp, Artificial Sequence
  ENSG00000260142_6 (sequence is synthesized)
attacactcttcaacttatgtataagaattctgttaactctaagcagcatgtttaaagtaggttagttcaaagttgtgagatggttgcacattttcagtaggtctaaaaattaagttcca

SEQ ID NO: 962786 - DNA, 120 bp, Artificial Sequence
  ENSG00000260142_7 (sequence is synthesized)
cattgaattgttttaaagcactatggcaaacattaaagtgtttaattcattattgaaacactttcattacagcaacaacagtttaacatcctgcagtggtaattctaaatgaaaaattaa

SEQ ID NO: 962787 - DNA, 82 bp, Artificial Sequence
  ENSG00000260141_0 (sequence is synthesized)
acaagtacatcaactcccagctccgctccatcacccacagctttgtgggaaggccttctgaagggctgtcctgagaccatgt

SEQ ID NO: 962788 - DNA, 73 bp, Artificial Sequence
  ENSG00000260141_1 (sequence is synthesized)
gacactagatcagccaaaccccttgaggttaagaccccacaatcacatgaggatggagtggctcaccctcagt

SEQ ID NO: 962789 - DNA, 64 bp, Artificial Sequence
  ENSG00000260141_2 (sequence is synthesized)
tgtcctcgccgcctgctccacaaatcctgcccaaggtgctgtcatctatatgatctcagtattt

SEQ ID NO: 962790 - DNA, 120 bp, Artificial Sequence
  ENSG00000260145_0 (sequence is synthesized)
gacgggatggaccaggagccaggcagctgcaatcccgcatcagctggttggggatggaatgttgcttccctgtccccagctcccactattgtaagaggagctccaagaagataaggacat

SEQ ID NO: 962791 - DNA, 120 bp, Artificial Sequence
  ENSG00000260145_1 (sequence is synthesized)
ggtcaactttttctgctgtgtcgtcacacaatgcctggcccacagtagggccacaagcactacacgttgagtactacaaagtttaaaccctggcaaggggtcaggctggccacgccactc

SEQ ID NO: 962792 - DNA, 120 bp, Artificial Sequence
  ENSG00000260145_2 (sequence is synthesized)
ttccaacctgttcaattttaacctgccaccttttatgtccaaaggagtcctttctgactcattatctccgggcagggtgggactattacagggtgccatggggtgctgtgagctgggctg

SEQ ID NO: 962793 - DNA, 120 bp, Artificial Sequence
  ENSG00000260145_3 (sequence is synthesized)
tacttgcccctggaatgttgtcacgtctcctccctccctcccagataaaacccaagcataagcgagatcctggaggtgatgcgagccatcttagacatcccagagagccccagcctttgc

SEQ ID NO: 962794 - DNA, 120 bp, Artificial Sequence
  ENSG00000260145_4 (sequence is synthesized)
accgatgttattaacattatgatttactttcctgctgtattttttcatcttagctgcagctgcttcccaccccgcctcccaccactagaagactgtttaaagtaaatccttctaaaattc

SEQ ID NO: 962795 - DNA, 120 bp, Artificial Sequence
  ENSG00000234818_0 (sequence is synthesized)
actttttcctcctgctggaggagtctgcgttgcttcctgacctcttcaacccaggctttttcatcatctgaactctccgaactttctgcatcacttggttttccttccggctcttcctcc

SEQ ID NO: 962796 - DNA, 120 bp, Artificial Sequence
  ENSG00000234818_1 (sequence is synthesized)
tcttcctgagaataaaaatatggattcagaagcctaaattcttcactctcttcatctacttggaagtcagggttctcaaacataactttaaatcgatcatcggtgagaatattaggaaga

SEQ ID NO: 962797 - DNA, 120 bp, Artificial Sequence
  ENSG00000234818_2 (sequence is synthesized)
tgctggaaaaagctgacctgtttgtgatggactctgactctgctgaacagactactttactatttctccactgttgagagtaaacaagattgcaggcaaattaatccaagtcaggtcata

SEQ ID NO: 962798 - DNA, 120 bp, Artificial Sequence
  ENSG00000234818_3 (sequence is synthesized)
aataaaaaccaagtgaagcgcttttcatagcgaaacagtcctaacccgagaatcggatgcagcagcatttcctacagttaactccatggatcactagtcccaagagatcttctgagaaaa

SEQ ID NO: 962799 - DNA, 120 bp, Artificial Sequence
  ENSG00000234810_0 (sequence is synthesized)
gaggagcccagggacatatttcacagctaagtcaactgcttttcttcaaattcagatttaatccttgagtgaaatgagtcactggctcatccagttaagatcatcacccactttcctaac

SEQ ID NO: 962800 - DNA, 120 bp, Artificial Sequence
  ENSG00000234810_1 (sequence is synthesized)
aaaacttctcttcaaagaaggactcgctcatccatcaggtggacctccacaggaacaaatcatatccatgtcaggcggcaccaaacctaaatctgcttctgcctcagcagacaggacatg

SEQ ID NO: 962801 - DNA, 120 bp, Artificial Sequence
  ENSG00000234810_2 (sequence is synthesized)
ccatcaaggacttgaaagatgcaggggtgatgattcccaacccattcctgttcaactctcccatttggcctgtgcggaagacagatggatcttggagaacgacagtgaattatcataagc

SEQ ID NO: 962802 - DNA, 72 bp, Artificial Sequence
  ENSG00000234810_3 (sequence is synthesized)
tggagaacgacagtggcagatatggtttcattgcttgagaaatgtgtacctggtatgcagccattgacttgg

SEQ ID NO: 962803 - DNA, 120 bp, Artificial Sequence
  ENSG00000234810_4 (sequence is synthesized)
agctggcaaggccagcaatatacctttacagtcctacctcagaggtatagcaactctccagctctgtgtcataatcttattcggagagaccttgactgctttttgcttctgcaaagtatc

SEQ ID NO: 962804 - DNA, 75 bp, Artificial Sequence
  ENSG00000234810_5 (sequence is synthesized)
agaggtatagcaactctccagctctgtgtcataatcttattcggagagaccttgactgctttttgcttctgcaaa

SEQ ID NO: 962805 - DNA, 120 bp, Artificial Sequence
  ENSG00000234810_6 (sequence is synthesized)
gagacatttgtatgccagaggatgggaaataaatccgactaaaattaaggaaacttccacctcagtaaaatttttaggggtacagtggtgtggggcctgtcaagatattccttctaaggt

SEQ ID NO: 962806 - DNA, 120 bp, Artificial Sequence
  ENSG00000234810_7 (sequence is synthesized)
gaaggataagttgctgcatttggccactcctacaaccaagaaagaggcacaatgcctactgggccgatttggattttggaggcaacatggtccttatttgggtgcattactgtggcccat

SEQ ID NO: 962807 - DNA, 84 bp, Artificial Sequence
  ENSG00000234810_8 (sequence is synthesized)
tggcagaggccgctaggattttagagcaaggccctgtcatcttctgcagataactattcttcttttgagagacagctcttagac

SEQ ID NO: 962808 - DNA, 120 bp, Artificial Sequence
  ENSG00000234810_9 (sequence is synthesized)
ttagagcaaggccctgtcatcttctgcagataactattcttcttttgagagacagctcttagactgttactgaactttggtggaaactgagcatttgactatgggtcatcaagtcaccat

SEQ ID NO: 962809 - DNA, 120 bp, Artificial Sequence
  ENSG00000234810_10 (sequence is synthesized)
ctgggtgctttctgacccacctagccataaggtgggtcatgcacagcagaattccatcatcaaatggaagtgatatatacgtgattgggctcgagcaggtcctgaaggcataagtaagtt

SEQ ID NO: 962810 - DNA, 120 bp, Artificial Sequence
  ENSG00000234810_11 (sequence is synthesized)
acatgaagaagtggctcaaatgcccatggtgtctacttctgccaccctgcctgctccccccacagggtgcactgatggcctcatggggagttccctataattggttgacagaggaaaaga

SEQ ID NO: 962811 - DNA, 120 bp, Artificial Sequence
  ENSG00000234810_12 (sequence is synthesized)
agacctggttcagagatgattctgcatgatattcaggaaccatgcaaaagtggacagctatagcactacagcccttttctaggacatccctgaagggcagcagtgaagggaaatcttccc

SEQ ID NO: 962812 - DNA, 120 bp, Artificial Sequence
  ENSG00000234810_13 (sequence is synthesized)
aagggcagcagtgaagggaaatcttcccagttggcagaactttgagcagtgaacctggttgtgcacttagcatggaaggagaaatggccaggtgtgcgattatatactgattcatgggct

SEQ ID NO: 962813 - DNA, 120 bp, Artificial Sequence
  ENSG00000234810_14 (sequence is synthesized)
tggggaagaggtatgtggatggacctctgagtggccaaaaactgtgaagatatttgtatcccacgtgagtgctcaccaacggatgacctcagcacaggagattttaataatctggtggat

SEQ ID NO: 962814 - DNA, 120 bp, Artificial Sequence
  ENSG00000234810_15 (sequence is synthesized)
tgggcccattaacaaagtggccatggtggtagggatggaggttatgcatgggctcagcaacatgtacttccactcaccaaggctgatctggctacggccactgctgagcgcccaatttgc

SEQ ID NO: 962815 - DNA, 120 bp, Artificial Sequence
  ENSG00000234810_16 (sequence is synthesized)
cggcagcagagactaacaccgaacccttgatatagcaccattactcatggtgattagttacctggtggcaggttgaatatattcaacctcttccatcatggaaagggaagaggtttgtcc

SEQ ID NO: 962816 - DNA, 71 bp, Artificial Sequence
  ENSG00000234810_17 (sequence is synthesized)
attcaacctcttccatcatggaaagggaagaggtttgtcctcactggaatagacaattactctggatatag

SEQ ID NO: 962817 - DNA, 87 bp, Artificial Sequence
  ENSG00000234810_18 (sequence is synthesized)
gtattccacacagcattgctgtagcagtagacttatgcttatggagttcactggccttatgttccccatcatcctgaagcagctgga

SEQ ID NO: 962818 - DNA, 88 bp, Artificial Sequence
  ENSG00000234810_19 (sequence is synthesized)
gtgaggtgacaatactttgcagggctgggacaaagttatccagaaggccgtgtatgctctaaatcagcatccaatatatggtactgtt

SEQ ID NO: 962819 - DNA, 84 bp, Artificial Sequence
  ENSG00000234810_20 (sequence is synthesized)
gtactgtttctcccatagccaggattcgtgggtccaggattcaagggatggaagtggaagtggaaaaaaatttttgctcctgtt

SEQ ID NO: 962820 - DNA, 120 bp, Artificial Sequence
  ENSG00000234810_21 (sequence is synthesized)
tagtgatccactagaaaatttttgctcctgttcccacgacattatgttctgctggcctaaaggtcttagttccagaggaaggaaggctgccaccaggagacacaacaacgattccattaa

SEQ ID NO: 962821 - DNA, 120 bp, Artificial Sequence
  ENSG00000234810_22 (sequence is synthesized)
taagaagggagttacagtgttggctgggatgattgacccagactatcaagatgaagtcagtctactactccataactgcggcaaggaagagtatgcaggtaatacaggaaattcattagg

SEQ ID NO: 962822 - DNA, 77 bp, Artificial Sequence
  ENSG00000234810_23 (sequence is synthesized)
gcaggactacaaatggcccagacccctcagaaatgaaggtttggatcactccaccaggaaaaaaaaccacaacctgc

SEQ ID NO: 962823 - DNA, 120 bp, Artificial Sequence
  ENSG00000234810_24 (sequence is synthesized)
ggtttggatcactccaccaggaaaaaaaaccacaacctgctgagctgcttgctgaaggcaaagggaatacagaatgggtagaagaaggtagtcatcaatatcagctacgaccacgtgacc

SEQ ID NO: 962824 - DNA, 90 bp, Artificial Sequence
  ENSG00000234810_25 (sequence is synthesized)
aaggtagtcatcaatattggggactgtaattgtcatgagaatttcctccttcttttgctaaaatcatgtttgtgcatgtatacacttgta

SEQ ID NO: 962825 - DNA, 120 bp, Artificial Sequence
  ENSG00000234810_26 (sequence is synthesized)
atgatgtgacataagatttattgacttcatagcagcatttaagtattgttaactttatataatagtatttgggttggggattggtgcctttctggttgtatgaaggatagttgtattatg

SEQ ID NO: 962826 - DNA, 120 bp, Artificial Sequence
  ENSG00000234810_27 (sequence is synthesized)
ttaggtgtaattatgacattattgtctttaagattatgtatgacctcaggaggtgtgtatgggttcaagttgacaggggttggagttgtgattgttaatgctctgtgtcaacttgattgg

SEQ ID NO: 962827 - DNA, 86 bp, Artificial Sequence
  ENSG00000234810_28 (sequence is synthesized)
gttgtgattgttaatgctctctgatcttgggtgtgttggtgagggtgttgccaagagatattaacatttgagtcagtgggctgggg

SEQ ID NO: 962828 - DNA, 120 bp, Artificial Sequence
  ENSG00000234810_29 (sequence is synthesized)
aaagcaggcagaaaaatgtgaaaaggagagatgggcctagcttccagcctacctctttctcccatgctggatacttcctgcccttgaatattggactctaaggtcttcgctttcaggact

SEQ ID NO: 962829 - DNA, 120 bp, Artificial Sequence
  ENSG00000234810_30 (sequence is synthesized)
aggtcttcgctttcaggacttggattggctctccttgctcctcagcttacagatggcctattgtggtaccttgtgatcatatacgtttatacttaataaattcccctttatatatatata

SEQ ID NO: 962830 - DNA, 120 bp, Artificial Sequence
  ENSG00000234810_31 (sequence is synthesized)
tctatgtatatcctattagttctttccctctagagaacgctaatacaccatccttgattaaatcccttcaccctctctccatctttgtaaaaattctcctcattaaattattgttcagtg

SEQ ID NO: 962831 - DNA, 120 bp, Artificial Sequence
  ENSG00000234810_32 (sequence is synthesized)
agtaccataaaaaagtatatcatagacatgtttgatccgagacggaaggttccagagtaagtgacaactaagcagagatcttaaagatgtgggaacacctacatgtctatgttcagaagc

SEQ ID NO: 962832 - DNA, 120 bp, Artificial Sequence
  ENSG00000234810_33 (sequence is synthesized)
tgccttgatgccacatgcgggaggctggaaacgctgaaggatgaccactgctcagcagcagtctaccagtgatggatgagagttggtgcacaaataccccagctcccttgcctctcagtt

SEQ ID NO: 962833 - DNA, 120 bp, Artificial Sequence
  ENSG00000234810_34 (sequence is synthesized)
ctagctgatctcatgctctatctggatttgagtgaagatatacatattcaccaagtcttgactcagtcaccttttgtgcaggcccaatagaagcaaatgcaggtatgatctggagaagca

SEQ ID NO: 962834 - DNA, 120 bp, Artificial Sequence
  ENSG00000234810_35 (sequence is synthesized)
tatcttgaatctcaaaaagtcaggacagacaacaccataagaaacagcagggggaaaagaaaaaagcagaatcaggctcagaactacagacaccttcagagggcagtgttccattttatt

SEQ ID NO: 962835 - DNA, 120 bp, Artificial Sequence
  ENSG00000234810_36 (sequence is synthesized)
gagggagatctgaagagatgaagtgacttgccagagcacaggtccagtaagtgtcaggtttcaagttctttgagttgagattcagtcatttgaaagccatttatctagtggaataacacc

SEQ ID NO: 962836 - DNA, 120 bp, Artificial Sequence
  ENSG00000234810_37 (sequence is synthesized)
agccctagttacccatagtggtagctaaatatagtagttggctgtattctccatcacttcttgaatcccctgccagtgttctctgcacctccttaataaaccacttgaaacaaaaatcaa

SEQ ID NO: 962837 - DNA, 120 bp, Artificial Sequence
  ENSG00000234810_38 (sequence is synthesized)
tggctctctttccatcatgtgaggacacaaggagaagctggcaatctgtaacctataagagagccctcgctagaacctgatcttgctggcaccctgaccttggacttccagcctccagaa

SEQ ID NO: 962838 - DNA, 120 bp, Artificial Sequence
  ENSG00000234810_39 (sequence is synthesized)
actcaccaccaacctcttcctaaccgcacagagcttcagcatcacacacgatccttgagccatgacacaactctatttagaaaaactccaataatggaaattagatttccagggccatgg

SEQ ID NO: 962839 - DNA, 120 bp, Artificial Sequence
  ENSG00000234810_40 (sequence is synthesized)
agctaaaatttatatttgctacaaatatacatcgttttattttttctttctagtttgtttgctcaaggattgattgattggatctcaagtatatacatacatatgtatatatatattttg

SEQ ID NO: 962840 - DNA, 120 bp, Artificial Sequence
  ENSG00000234810_41 (sequence is synthesized)
atctagatttttgtacaataaattcccttatggagaaatactgggtcaaaatatataagcatttttagatctcatttcatagttccagattgctttctacaagaattaatttaatttacc

SEQ ID NO: 962841 - DNA, 120 bp, Artificial Sequence
  ENSG00000234810_42 (sequence is synthesized)
ttgatactaagaatgattggatggactggtttaaacatatgtttattaactttagttactagtatttaaaagaaaatattgctaattgagtagtggaaaatgttacttcatttcaacaaa

SEQ ID NO: 962842 - DNA, 120 bp, Artificial Sequence
  ENSG00000234810_43 (sequence is synthesized)
gttactagaaagtttgaatcttatgccatgcctttatctatgaagtgaatttcttatgtgtattgagttttagttggcaacaattaactttgaaaaaataaattgctttttacagcttgc

SEQ ID NO: 962843 - DNA, 120 bp, Artificial Sequence
  ENSG00000234810_44 (sequence is synthesized)
gtcaccttttgtgcagcaccatcctattacaaatctgccagcctacagactagtaaaacgcgctgacccaagagaaagcaaaaagcggcccctttccccggctccagcgctgctcggcca

SEQ ID NO: 962844 - DNA, 120 bp, Artificial Sequence
  ENSG00000234810_45 (sequence is synthesized)
ggcttcacttttaaaggcgagcatcattggttcatgcgccacaggaaatggagccatcacaggacgggccaaagacacctgtcttctcatccctcttctcacttttcacttcaaaggcac

SEQ ID NO: 962845 - DNA, 120 bp, Artificial Sequence
  ENSG00000234810_46 (sequence is synthesized)
gaaaaaggaaagctgagaggaactgagacagcagttttaggtgatgggttaattatgcacagttgtgccttcctctctcctttctcaatcttcgccccaagtcctgcctccaggtttatg

SEQ ID NO: 962846 - DNA, 120 bp, Artificial Sequence
  ENSG00000234810_47 (sequence is synthesized)
ctgcagagtgtccgtggaagggtggctcttacatggtagctctgaaaagcttgacattattttactaagtgaatgcaagaattctcatgtgggcatctccactcatggataggattgcca

SEQ ID NO: 962847 - DNA, 120 bp, Artificial Sequence
  ENSG00000234810_48 (sequence is synthesized)
gatttagcaaataaaagtacaatgaaatatccaattacacttgaatttcagataatcaacaaatacttctttttcgtacagttatgccctgtttaacctctactgttccactagggatat

SEQ ID NO: 962848 - DNA, 120 bp, Artificial Sequence
  ENSG00000234810_49 (sequence is synthesized)
acttgtattgcgcacttacctgttgtttatataaaattcaaatttaaccaggcatcccactcatggggccccagaccaaacggaagccccctccctacccctagccaaatgctggttgag

SEQ ID NO: 962849 - DNA, 120 bp, Artificial Sequence
  ENSG00000234810_50 (sequence is synthesized)
ttttttgggatgataatgaggaaaataaggccagaagacccacattgcccctcatctatagcacctgaaacttggaaccacccaacagatccagttctgccctgccctgaagagagttgc

SEQ ID NO: 962850 - DNA, 120 bp, Artificial Sequence
  ENSG00000234810_51 (sequence is synthesized)
cttcattttcagcagagtctagagagtaatttaaagtttgaattggcccctggaggaagaacattgtgttaaacttcctatgtgacttgaaataaatttcgttttctctgtgggtgttaa

SEQ ID NO: 962851 - DNA, 120 bp, Artificial Sequence
  ENSG00000234810_52 (sequence is synthesized)
ggaaggctttgccaagacagtggtggctgggatttgaccctctaagtgtgagcttcagttctacatgttggaatagatcatctggaccctctggattctggtcctgtactgaccttcaag

SEQ ID NO: 962852 - DNA, 120 bp, Artificial Sequence
  ENSG00000234810_53 (sequence is synthesized)
ggtcatccattcctttattagcaaatattcatgaatgcccactatgtgcaacacacggtgcttggtgcaagcatacagtgatgaatcaagtagagaaggccctgcccttatggagcttac

SEQ ID NO: 962853 - DNA, 120 bp, Artificial Sequence
  ENSG00000234810_54 (sequence is synthesized)
agcctggctgtgagctggcaatactgggcccacatttatcatggcattcacagctgttgctaagtagaagttgaccccttcatttgtgtaaacatcttgggaatagagcagttgactgga

SEQ ID NO: 962854 - DNA, 120 bp, Artificial Sequence
  ENSG00000234810_55 (sequence is synthesized)
catctctcatgtgcagcagcagcaggaaaaagaactttggactttatctgcgttcatcaccatccctcaaaaacacaagtaatagaaaaagctgagatagagttaccctgggagaatcca

SEQ ID NO: 962855 - DNA, 120 bp, Artificial Sequence
  ENSG00000234810_56 (sequence is synthesized)
agaataactttggtaaggcatcacttggtggggatacaaagatggaaagaggaaggcaatagatttttggaaaagaaaataaacctacagttaaaagaaaaaagaaaacaatgaaaatag

SEQ ID NO: 962856 - DNA, 120 bp, Artificial Sequence
  ENSG00000234810_57 (sequence is synthesized)
taggattatcatcactcaatttacaggcatccatgtcctccaggatataaaggaagaagttgagggatggatgcagagtatactattctccaccattacaaattgggcacctttgctttt

SEQ ID NO: 962857 - DNA, 120 bp, Artificial Sequence
  ENSG00000234810_58 (sequence is synthesized)
gaatgagtgaccacagccctggaaacttgtatgctttgctaattgagggcagatgagcctcaggtcaatcccccatcaattatccactcaacaacaataaaatgctaacttgtatgccct

SEQ ID NO: 962858 - DNA, 120 bp, Artificial Sequence
  ENSG00000234810_59 (sequence is synthesized)
tatcccagtctgctcagtgggatagcaccggaatggaagcattagctttaatgggaaaggcctgtttgcaggcgaagtaaagtcagtaactcacacttcaaacacctgcaggttcattag

SEQ ID NO: 962859 - DNA, 120 bp, Artificial Sequence
  ENSG00000234810_60 (sequence is synthesized)
ggcaggaaaggcaaacctttacctggagtatgtgtctattcatataaaacaaactaccaaatgaccagcaggtctctacaggtggtgccatattcagaggttcagaatgttttagttgct

SEQ ID NO: 962860 - DNA, 120 bp, Artificial Sequence
  ENSG00000234810_61 (sequence is synthesized)
tgtaatttgtgtattttgtggtaccagttgttagaatagctttggtgaatgggagccgatggtttggggcccatgcatagacttaatttctgtcactagctattctactcatggacttat

SEQ ID NO: 962861 - DNA, 120 bp, Artificial Sequence
  ENSG00000234810_62 (sequence is synthesized)
taggaaagcagtgatgtcaagtgaaagagccgttctgtatactttattgtaaatattctctgtggaaagcattctatagtggatattaacatgtcataggaaagtcttcgtggtgtccac

SEQ ID NO: 962862 - DNA, 120 bp, Artificial Sequence
  ENSG00000236526_0 (sequence is synthesized)
acattacaggttttgcaaaagcagaaacttcaacacaggaaaacttttaaagtaaatagactagcgcggcacttacctctctctaatggtgggataaagaccctgccagtttggggccgg

SEQ ID NO: 962863 - DNA, 120 bp, Artificial Sequence
  ENSG00000236526_1 (sequence is synthesized)
gataaggttgttgttactgagattctgctggtggtactgctggacgctggtgctgctggagttggctggctttttacgggggaatatatcagcagccatcttcttctttttagtcttcaa

SEQ ID NO: 962864 - DNA, 120 bp, Artificial Sequence
  ENSG00000236526_2 (sequence is synthesized)
ggtaattatttcataacaaactggtggcaacttgctgctgttgctactgctgctgctggtatttgctttctttgagcttttcttggacctgttctttaccgtctctggaagcatcaagaa

SEQ ID NO: 962865 - DNA, 120 bp, Artificial Sequence
  ENSG00000236526_3 (sequence is synthesized)
gaaggtatggcaactggtgtcagaagtataaggggtttgtgaaaattccacagtaaagaagtggggcaacacctggactacgaggcggatctcctggcttgtcatgttgtttgcttcatt

SEQ ID NO: 962866 - DNA, 120 bp, Artificial Sequence
  ENSG00000236526_4 (sequence is synthesized)
cactctaatattcactcacagtaattacctcacacacttacagaatgctcaattgtcatatttctaatctactttaaaagaagagctttcttttaaagtttacaaagatgaaaaccatga

SEQ ID NO: 962867 - DNA, 120 bp, Artificial Sequence
  ENSG00000236526_5 (sequence is synthesized)
acatatgtagtctgcacccctgtaggggcacactacaggcaagaatgctgaaaggatacttgtggaatgagatggaaggaaggaactgcagtgaggacgctgctcaaaaacagaagaggc

SEQ ID NO: 962868 - DNA, 120 bp, Artificial Sequence
  ENSG00000236526_6 (sequence is synthesized)
tctccaggtacttgaaaatagtctatccaaagaaaagtaaaatcaaggctcaggaggtccctttcaaaaaggcctgaatggggctgttccaacaaaggacttcaatcaatcctactggga

SEQ ID NO: 962869 - DNA, 120 bp, Artificial Sequence
  ENSG00000236526_7 (sequence is synthesized)
tgctgtggctttctccaggtcatttgttggctttaaataacagaagaagaaaataatatgtttcggtcaaagaaaaaggaaagtgtttccaaagatatgttttactttggctagtattag

SEQ ID NO: 962870 - DNA, 120 bp, Artificial Sequence
  ENSG00000236526_8 (sequence is synthesized)
ttttttttgtttttttttctgatattcgaaagatagtcaccaagaacatctcctccatcagatcatcaaagtccaaaagcttctctcacatattaaccaaagagtatcttgttctatttg

SEQ ID NO: 962871 - DNA, 120 bp, Artificial Sequence
  ENSG00000236526_9 (sequence is synthesized)
ggaaaaacaccttttccaagaacacatgggacgggaagaaagaatccagacaactcccaaatcaccagatattctacatcagtcctgattattagtgaggttccaagtatcacagccaaa

SEQ ID NO: 962872 - DNA, 120 bp, Artificial Sequence
  ENSG00000236526_10 (sequence is synthesized)
tttccccaacatccacaactaagttctatacctttagtcactcagtgcttagaaataaacactgctctcctgtccttcaatttactgcctccccgccatcaacaccaaacacctgaatta

SEQ ID NO: 962873 - DNA, 120 bp, Artificial Sequence
  ENSG00000236526_11 (sequence is synthesized)
tatcaattatcttagattttaaattgtgctcactgtaaaatgaacaggacaggttgggaaaggcaaggccagaaaaagctttttattttgttgttttgttttgttttgttttgttttgca

SEQ ID NO: 962874 - DNA, 120 bp, Artificial Sequence
  ENSG00000236526_12 (sequence is synthesized)
aaaccacatagaaaagaccagttacaatttcacattttgacaaacactatacacatatccagaaggtctcaattaattactatttaatgaaatgctatcctttgttttacaatgtatgcg

SEQ ID NO: 962875 - DNA, 120 bp, Artificial Sequence
  ENSG00000236526_13 (sequence is synthesized)
accagaatgaaatatagttattttgggcaaacaatacaagatctaacattaagaggtctgctatgctgagtgaaatctgagaaatcttgctgtgggaaaacttaaacatacatgaagtta

SEQ ID NO: 962876 - DNA, 120 bp, Artificial Sequence
  ENSG00000236526_14 (sequence is synthesized)
caaagtagcttaacactcaatttctaacataccttctctcgagtagataccaccaaataaaaatgaaaaaaggcacctacatttctaaaataaataacaataatattccctaacaaaaaa

SEQ ID NO: 962877 - DNA, 120 bp, Artificial Sequence
  ENSG00000226849_0 (sequence is synthesized)
gttttatgagttgctggggtagctgatcagtactgtctgcccttgggaagaaatgaggtgaggaaaaagatatgcaaaggaatggactcctggatgggcctgtcttctcagcagaggagg

SEQ ID NO: 962878 - DNA, 120 bp, Artificial Sequence
  ENSG00000226849_1 (sequence is synthesized)
aggtcagaaacaggcgccaccagcgtgctaaaatcctccaggagcagttcttaccttgccagacggggtctgtttatttggatcaaactgagaagaaactttggatttgctgtttcctga

SEQ ID NO: 962879 - DNA, 120 bp, Artificial Sequence
  ENSG00000226849_2 (sequence is synthesized)
aagttgagtggtctggcatatttaccataaacacagtggaagaaggttaagaggaattacaatatcaatcttgtggaggtttcggaaatgaggtagacactaatagccaagctaaggtga

SEQ ID NO: 962880 - DNA, 120 bp, Artificial Sequence
  ENSG00000226849_3 (sequence is synthesized)
accggaaagaagtcaggacttaatataaagcacagggcaagccccctaagatatccaaggaagatcctgaccacaagcaggggcatcgtttttcaaaggaaaaaggagaaaagctggcac

SEQ ID NO: 962881 - DNA, 120 bp, Artificial Sequence
  ENSG00000226849_4 (sequence is synthesized)
ataccacgacctgctgtcggacggagatggcctgttctgctgcagctttgcacgcctcctttgcctgttcccgggcagctgcaagggagagaacttgtctctggagttggtgaatccagc

SEQ ID NO: 962882 - DNA, 120 bp, Artificial Sequence
  ENSG00000226849_5 (sequence is synthesized)
aaccaccctcccctccatctccatccccctccgacttggcctagccacaggggttgtcacggctgattcctcctccctctcaggtccccggtcccccatctctgcaggacaggctgcctc

SEQ ID NO: 962883 - DNA, 120 bp, Artificial Sequence
  ENSG00000226849_6 (sequence is synthesized)
agagctcaggctcaggtgctctgcccaccttcagctacacgtgagctgatcctccccagccctgcctgctcctcttctgtgaacctaaatgctcagtggcctgtggacctgagggcgttt

SEQ ID NO: 962884 - DNA, 120 bp, Artificial Sequence
  ENSG00000226849_7 (sequence is synthesized)
aacaggatcgtcaccatcaccatcgtggacaaacctgctcaaaccagctactttggctgccagcaactccagctttccagctgctcaggacaaaaccttcatccaaggttcccttccctt

SEQ ID NO: 962885 - DNA, 120 bp, Artificial Sequence
  ENSG00000226849_8 (sequence is synthesized)
ttctcacatgccacatccacctcatcatcaaatgctgtcagctttgctatgggacagatcaaggctctgacagcttctcaccacctcctctgctcccacgctggtctcaaagccaccatc

SEQ ID NO: 962886 - DNA, 120 bp, Artificial Sequence
  ENSG00000226849_9 (sequence is synthesized)
ccctctcgcctgagccactgccatgtctcctatcccttcctggactcccatcctgtcctctatagtctactgttgacacagcagccagagtgccacatgtcagtcacttccccccgtctg

SEQ ID NO: 962887 - DNA, 120 bp, Artificial Sequence
  ENSG00000226849_10 (sequence is synthesized)
ctcagcaccctcctggcttctgaactcagagtaaaaggcagcgtcatcccgtgggcctctgctggctccttccccatctcctgctcttctctacccgctctgctcatgcaggcccacttg

SEQ ID NO: 962888 - DNA, 120 bp, Artificial Sequence
  ENSG00000226849_11 (sequence is synthesized)
ggctcgctgtgctgtggctccagaactcttctctaggtcactgcaggtctcgtcaatgtcgcattcattagactgccttctccaaccaccaacgagacagctacagcacctccagcactc

SEQ ID NO: 962889 - DNA, 120 bp, Artificial Sequence
  ENSG00000226849_12 (sequence is synthesized)
cccaccaatctctctgcacagcacctgctgccatctgccaggatagatactgattgcccaccatccctcagcagaagggaagccccacaggggcttcattcatcgccgtatctggcactt

SEQ ID NO: 962890 - DNA, 120 bp, Artificial Sequence
  ENSG00000226849_13 (sequence is synthesized)
ggctgaaacagcgggtgtgcaacagccattctttaacagccgactgagttgcaaggaagtgagtgttacctgtttgctcagctgccttcttcttgacagcttctttagagtctttttgta

SEQ ID NO: 962891 - DNA, 120 bp, Artificial Sequence
  ENSG00000226849_14 (sequence is synthesized)
cttgtacctgggccagcttccagcggttgctgatctataatgaaagcaaatataacaaaaaaaaccctccaaagtcagccacctaagtctgtcttacttttcatgaggtgacgaagggca

SEQ ID NO: 962892 - DNA, 120 bp, Artificial Sequence
  ENSG00000226849_15 (sequence is synthesized)
ggttaacctaagaagtacacacattctaagtcataaattttcaaatctaagggcatgaaaaataaatttcatgctggctttattgctaaaatccctattaaggacaaagtgctactgtcc

SEQ ID NO: 962893 - DNA, 120 bp, Artificial Sequence
  ENSG00000226849_16 (sequence is synthesized)
tccaggcactgggccatccatcatctcattcaatccctctgtaaccctgggaaaaaggtactgtcatcaccctctctttagagatgagcaaacagactccgggagagtaaataacttgtc

SEQ ID NO: 962894 - DNA, 120 bp, Artificial Sequence
  ENSG00000226849_17 (sequence is synthesized)
caagggacatggtcagtaaatgacagaagcagactcaaggctgggcttccgcaagtctgctgtgtttctttatgacaccccacggacctatggcgttacaacacatggaggtgacactgg

SEQ ID NO: 962895 - DNA, 120 bp, Artificial Sequence
  ENSG00000226849_18 (sequence is synthesized)
gcataacacacaggacgtgcagttgttcagtgtgacataacccgtggggggaaaagaggagagaaggcagaagccccacctgattccccatttccaaaaatagcaagctaactcagggac

SEQ ID NO: 962896 - DNA, 120 bp, Artificial Sequence
  ENSG00000226849_19 (sequence is synthesized)
aggaacggggctgggggacctctcggttttgcctaacaaaagagctctgctgccacacagaggaagccagtcgcccatgtcatcagagcagacgcttcctaaagggaggaaggaggctgc

SEQ ID NO: 962897 - DNA, 120 bp, Artificial Sequence
  ENSG00000226849_20 (sequence is synthesized)
gaacaacagttcacgttctggctctggggaacatctcaagagggtctaggggaggtgtgctctcattcttactcataatgctggtaaaaacaagccagataagtaagatagagtgtttta

SEQ ID NO: 962898 - DNA, 120 bp, Artificial Sequence
  ENSG00000226849_21 (sequence is synthesized)
aaattaaagctgtcacctttaagagccttaaagtaacagacatctataaaaatgcatcaagctgtatatttaatatttgtgtactttactacatatagattaaacctcaatttaaaaacc

SEQ ID NO: 962899 - DNA, 120 bp, Artificial Sequence
  ENSG00000236525_0 (sequence is synthesized)
actggctagattcaaagattaatgtgtttctaaatagagaataagttaatttaatgtgtttccaaataggaagaagataatttagattatatttctcaaaactgtttctagggttgaaac

SEQ ID NO: 962900 - DNA, 120 bp, Artificial Sequence
  ENSG00000236525_1 (sequence is synthesized)
attggcccatttgattattctcactatgaacatttcagaactctgaagatctggacagctttctaacacctgttcaaaacaatcatctgtatgctgtctaaccagcactgaaacagagga

SEQ ID NO: 962901 - DNA, 120 bp, Artificial Sequence
  ENSG00000236525_2 (sequence is synthesized)
agaatttccttacttgttcagaacagaatattgccacagccccactattgttttagctttgggacagcctcattatatggttgatttattctgaccatcacacgcaggtttgtgaggcat

SEQ ID NO: 962902 - DNA, 120 bp, Artificial Sequence
  ENSG00000236525_3 (sequence is synthesized)
gtagatgagatcaacatggtatgttctccctcaagcccctgctaaaactacgggcgaggctaacaccagggacagagtgctctgctgttaactccagtttgatccttctagttacatatg

SEQ ID NO: 962903 - DNA, 120 bp, Artificial Sequence
  ENSG00000236525_4 (sequence is synthesized)
atccattcatccacaacgcaagggtgttgcttaattaactaaaagggcactcgaatgccctatatctgatcattcagctcacaatgtacctttggtttaacagagagatcatgagaatat

SEQ ID NO: 962904 - DNA, 120 bp, Artificial Sequence
  ENSG00000236525_5 (sequence is synthesized)
ttttcaagtgactcacaatagtgaagatactctgtgtctgccatactcctgtgaacctccagtctattcagttgtgggcaacaatgagattgccttgatatgattgttgttagcaaatgc

SEQ ID NO: 962905 - DNA, 120 bp, Artificial Sequence
  ENSG00000236525_6 (sequence is synthesized)
aagctggctgatattaaccatcacttccttttctaagggttcataaaccatctgttaaataattaattcaagactttcactagaaattgacatctagcccattatcaataatttccataa

SEQ ID NO: 962906 - DNA, 120 bp, Artificial Sequence
  ENSG00000236525_7 (sequence is synthesized)
tatactccattcccattaaaagataaatattagtaaaaaaaaaatctatcaatagaatgttgttagttgataactggggcaagagactgcaactacacttaacgggaaagagcaacatag

SEQ ID NO: 962907 - DNA, 120 bp, Artificial Sequence
  ENSG00000236525_8 (sequence is synthesized)
acaacagaaacagaaaagcaaagggtatgttcagtgtatggtcacactgagtggctcactgtggtgggagctgagagttcttaagtggtttaattaggactagaatggaaataaaggttg

SEQ ID NO: 962908 - DNA, 120 bp, Artificial Sequence
  ENSG00000236525_9 (sequence is synthesized)
tgtggttctcatgatggttatggggaccttgctgatgtgtttgaactttatgagtgtgagtcctgatccaggacaggacagaaagaagtggaaacagaaagaaggtggcagatgctagtg

SEQ ID NO: 962909 - DNA, 120 bp, Artificial Sequence
  ENSG00000236520_0 (sequence is synthesized)
gtgtggatttagcaattacttagctcagcagagataatgtaccccataaaatggcagagacactggccagggctgggcccaggaattcagtatggataatattctaattctgtatgacaa

SEQ ID NO: 962910 - DNA, 120 bp, Artificial Sequence
  ENSG00000236520_1 (sequence is synthesized)
gctttaccataaatttgaatctgtaatttctgctttgatcaatttgatgtataaggagtggagccagtcaaatttggaaataaaatttcgaggttagaattccaattatgccggtgattc

SEQ ID NO: 962911 - DNA, 120 bp, Artificial Sequence
  ENSG00000236520_2 (sequence is synthesized)
ataaaggtgattgtcaagctccagtgcaaatgctaataatctggaattttccttcaaaccatctgcctatgcaaaatacaactgggtcacactggaaaggagagagagagctctgattca

SEQ ID NO: 962912 - DNA, 120 bp, Artificial Sequence
  ENSG00000236520_3 (sequence is synthesized)
tatgagaaatcaagaatcgaaccttcatcttgaagatataaaccttttgccatgtaaatgtgaaggaggaaaaaaatggaagagaatctacgattttaaaaggcatattttagtgggtta

SEQ ID NO: 962913 - DNA, 120 bp, Artificial Sequence
  ENSG00000236520_4 (sequence is synthesized)
caatatgttataattgatatttcttactggcctaaaaacaacactaaaataatcctgaagagcagagtagctgtaaaaaaaaatcgcaataaaaaaatcctcccataataagctaaaatg

SEQ ID NO: 962914 - DNA, 120 bp, Artificial Sequence
  ENSG00000226842_0 (sequence is synthesized)
actaatgatttcttttcagctaagcttttggtaatgctcatcttttaatgttctttgggcaaacacaaatcaaacaatttttacaactgttattaatatgcctaaagcagtatagcaaaa

SEQ ID NO: 962915 - DNA, 120 bp, Artificial Sequence
  ENSG00000226842_1 (sequence is synthesized)
catttttcataaaaaaagagcattataaaatccttaaatatttaggatagttatacacttcaacttctctatttaaggggtggagaagatggagattgatggaacatgcctattttctga

SEQ ID NO: 962916 - DNA, 120 bp, Artificial Sequence
  ENSG00000236528_0 (sequence is synthesized)
tttctgatccgctctttcaagagcggattcggaagctgctgtgtgaacggttctcgacagcctcagaaatgtacattttctttttgctgtattgaaaatttcttacagtatttcccgggc

SEQ ID NO: 962917 - DNA, 120 bp, Artificial Sequence
  ENSG00000236528_1 (sequence is synthesized)
ttaggaatttgttcgtgtcatcgctgaatcttcgcgatcacccccagaaggaagtggctgagccgagatcaggcccgtcgactccagaccaggggtcctcgacctaagtggttaccagac

SEQ ID NO: 962918 - DNA, 120 bp, Artificial Sequence
  ENSG00000236528_2 (sequence is synthesized)
actcgagtgtgcgaacaactttgctggctcaggaggaatgcagtgaggatgctgctgcccaccgtgagcaggaagaggccagaaaagttgtgaggccagtgcgtgtgcagaggctcatag

SEQ ID NO: 962919 - DNA, 120 bp, Artificial Sequence
  ENSG00000236528_3 (sequence is synthesized)
cgggcctcatagtccagtgccacagcctccagctgagccagcgtgcacagcaccaagaagatgtggaaaagttggtggccctgcccgaagacatggcagctgccagggaaccagcgctcg

SEQ ID NO: 962920 - DNA, 120 bp, Artificial Sequence
  ENSG00000236528_4 (sequence is synthesized)
ggcatgaaggtagagaagaaggcagcagccagcagaaagaagaccacctggcacttgtggtagagaagagctggatcatccgtggtggggtcggaggacacgaagatacgatgcaccaca

SEQ ID NO: 962921 - DNA, 120 bp, Artificial Sequence
  ENSG00000236528_5 (sequence is synthesized)
ggactaatgtccagtgcgtaggccaggacggagggcacctcctggcatgtgcggcccagcaggcctggtttctggatgtacttgttatagcaggagccaatgcaggaaagccaggcgaga

SEQ ID NO: 962922 - DNA, 120 bp, Artificial Sequence
  ENSG00000236528_6 (sequence is synthesized)
aaggcagccatgggcagaaaaacagcctgcacctgggcatgccaggcgggctcgatagcatagtagaagtgtgccaaggcactgccaaactggtacacggccacccccacatagtccagg

SEQ ID NO: 962923 - DNA, 120 bp, Artificial Sequence
  ENSG00000236529_0 (sequence is synthesized)
gcagattctccaggcccagcatctgcctcaccgtggccccccacaagccaagcgcctgcctttcagcagcctctacacacccagctcctgccacccaatggctctttaggccaagctcat

SEQ ID NO: 962924 - DNA, 120 bp, Artificial Sequence
  ENSG00000236529_1 (sequence is synthesized)
gtctcatggcaaccttccctggccaagtttccacctatttcctggcagcctggacaggcccaggtcctgccacacactggcctctctacgcccagctcatgcctcacagtggcctctcca

SEQ ID NO: 962925 - DNA, 120 bp, Artificial Sequence
  ENSG00000236529_2 (sequence is synthesized)
cgcccagctcatgcctcacagtggcctctccaggcccagctcctgtcccgggacatcatctccaggcccaaaacttcctcaagtcggcctctccaggcccagttgctgcctcccggcatt

SEQ ID NO: 962926 - DNA, 120 bp, Artificial Sequence
  ENSG00000236529_3 (sequence is synthesized)
ctctccaggcctagctcttcctcctggctgtatctacaagaccaactcctgcctcacaacaaccttttatggctcagctcctgcccaactactgccggcctttgtaggcccaaaacttcc

SEQ ID NO: 962927 - DNA, 120 bp, Artificial Sequence
  ENSG00000236529_4 (sequence is synthesized)
ctactgccggcctttgtaggcccaaaacttcctcaagtcaagctctttaggcccaccttctgccttgcagtggcctgtacagacccagctctggcttgagaacagcctctgcaggccctg

SEQ ID NO: 962928 - DNA, 120 bp, Artificial Sequence
  ENSG00000236529_5 (sequence is synthesized)
ctcttgcctcacagtggcttccgtgggccaagttcccgcctgcctcccagcagcctcaacaggcctagctcctccctcacaatggcttgtttaggtccagttgatgcctctggcaacctg

SEQ ID NO: 962929 - DNA, 120 bp, Artificial Sequence
  ENSG00000236529_6 (sequence is synthesized)
tccaggcccagctcctgcctcacactggcctctctaggccgaggtcctttctcatactggcctgtttaggcccagctcattcctcttgtcatctctccaggcccagcttttgcctgttgt

SEQ ID NO: 962930 - DNA, 120 bp, Artificial Sequence
  ENSG00000236529_7 (sequence is synthesized)
tggcctctacctcacagtgcaccttccagtcccacctcttgcctcaccatggcctcctctgaccaggttcctgcctttcggcagcctctacaggcctagctgctgcctcccaatggcctt

SEQ ID NO: 962931 - DNA, 120 bp, Artificial Sequence
  ENSG00000236529_8 (sequence is synthesized)
tgtaggccacgctcatgcctcactgtggcctttccaggcctagctttcgctttttggccactccaggcccagaacttcccccagtcagcctctccaggcccagctcttcctcccagcaac

SEQ ID NO: 962932 - DNA, 120 bp, Artificial Sequence
  ENSG00000236529_9 (sequence is synthesized)
cctctgaagacccaaatcgtcctccagttggtttttccaggcccagctcctgccttttggtggcctctccaggtgcaaaacttcctcccatcagcctgtccaggcccagctcatgcctct

SEQ ID NO: 962933 - DNA, 120 bp, Artificial Sequence
  ENSG00000236529_10 (sequence is synthesized)
tggtggccttctcaggccctgcttttgacttggtggcctcttcaggcccagaacttgaactcaagtcagcctctccaggcccagctcctgccttcttaaggtctgtacaggcccagcctc

SEQ ID NO: 962934 - DNA, 120 bp, Artificial Sequence
  ENSG00000236529_11 (sequence is synthesized)
tacctcacagcggactctccacacccagctcttgcctcactgtagcctccccagtccaaaactcctgccttttggcagcttcgacaagcccagctcctgcctttcaatgacctctttagg

SEQ ID NO: 962935 - DNA, 120 bp, Artificial Sequence
  ENSG00000236529_12 (sequence is synthesized)
ggcctttccaggcccagtttttcccttttggcggcctctccaggcccagaacttcctcaagtcggcctctttaggcccagttgctgcctcctggcatcctctgcaggccgagctcttcct

SEQ ID NO: 962936 - DNA, 120 bp, Artificial Sequence
  ENSG00000236529_13 (sequence is synthesized)
ctgcaggccgagctcttcctccctgctgtgtctacaggcccaactcctgcctcacaacaacctccttggactcagcttctgcccagctcctggtggcctttgtaggctcaaaattttctc

SEQ ID NO: 962937 - DNA, 120 bp, Artificial Sequence
  ENSG00000236529_14 (sequence is synthesized)
aaatcaagctctccaggcctactgtcagcctcgtggcagcctaaacaggcccagctcctgcctgacaatggcctctccaggcttttctcctgcctcgcagcaggctttccaggcccagct

SEQ ID NO: 962938 - DNA, 120 bp, Artificial Sequence
  ENSG00000236529_15 (sequence is synthesized)
cttgcctcatggtggccttccccggccatgttcctatctgacttctggcagcctcaaccggcccagcttctgcctcacactggcctctctaggcccagctcctttttcacagtggcctca

SEQ ID NO: 962939 - DNA, 120 bp, Artificial Sequence
  ENSG00000236529_16 (sequence is synthesized)
ctaggcccatctcctacctcagatctgcctcccaagacccagctcctgtctcatggtggtctctcttacaccagctcctgcctcacaatggcctcgtctggcccatcttctgcctcacag

SEQ ID NO: 962940 - DNA, 120 bp, Artificial Sequence
  ENSG00000236529_17 (sequence is synthesized)
tggccactcaaggcccatcttttgcctcatggtagcctcttctggttttgctcttgcctcacagttgcctcttccagatccagctttaagcctttgatggtcaacagcatcaaggagcct

SEQ ID NO: 962941 - DNA, 120 bp, Artificial Sequence
  ENSG00000236529_18 (sequence is synthesized)
aaagcttccctggactctcatttgttcactttacagcagagtgccttagcaaaaactgtctcttaaccttgagagtggatttctgacaaatcgatagtaaattctgcctgtgtggtttca

SEQ ID NO: 962942 - DNA, 120 bp, Artificial Sequence
  ENSG00000218839_0 (sequence is synthesized)
caacggggtttcggggctgtggaccctgtgccaggaaaggaagggcgcagctcctgcaatgcggagcagccagggcagtgggcaccaggctttagcctccctttctcaccctacagaggg

SEQ ID NO: 962943 - DNA, 120 bp, Artificial Sequence
  ENSG00000218839_1 (sequence is synthesized)
caggcccttcagctccattctcctccaaggctgcagagggggcaggaattgggggtgacaggagagctgtaaggtctccagtgggtcattctgggcccagagatgggtgctgaagctccc

SEQ ID NO: 962944 - DNA, 120 bp, Artificial Sequence
  ENSG00000218839_2 (sequence is synthesized)
acgcctgcctgtgaaaatggagtcctctttcacctgggagagccaggtgctgccccgagaaggatgcatttatggcttcgtgaagtctttcctgacccccgatgctgctgactatagaga

SEQ ID NO: 962945 - DNA, 120 bp, Artificial Sequence
  ENSG00000218839_3 (sequence is synthesized)
agggaaagatggtaatattttccccaccaaattcttgtcggatgccctcacagaattgagattatgtacgtaaaacaccaggtgcctaacccggcacagagcaggagggctaagcgtgac

SEQ ID NO: 962946 - DNA, 120 bp, Artificial Sequence; identical to SEQ ID NO: 911808
  ENSG00000218839_4 (sequence is synthesized)

SEQ ID NO: 962947 - DNA, 120 bp, Artificial Sequence; identical to SEQ ID NO: 911809
  ENSG00000218839_5 (sequence is synthesized)

SEQ ID NO: 962948 - DNA, 120 bp, Artificial Sequence
  ENSG00000218839_6 (sequence is synthesized)
cagcattggccaatggactctgcatgggagtgacgcatgctgcctccaggcttgtctctaaaacctcccacgtgtcctccgcctgctcttcccacctccaaggagcacggcaattgtgga

SEQ ID NO: 962949 - DNA, 120 bp, Artificial Sequence; identical to SEQ ID NO: 911811
  ENSG00000218839_7 (sequence is synthesized)

SEQ ID NO: 962950 - DNA, 78 bp, Artificial Sequence
  ENSG00000218839_8 (sequence is synthesized)
ctctcttctccctgaagctagagtgaggtccctcttggcagcctttgtatctagagagagccgtccaatagaaacata

SEQ ID NO: 962951 - DNA, 87 bp, Artificial Sequence
  ENSG00000218839_9 (sequence is synthesized)
gtgaccttgggcaagttcttaaacccttcaaagcctcatttttctccaatcacaaaagggaaagatggtaatattttccccaccaaa

SEQ ID NO: 962952 - DNA, 120 bp, Artificial Sequence
  ENSG00000218839_10 (sequence is synthesized)
gtaatattttccccaccaaattcttgtaagtattaaacattgtatatgtattttgaacacgattaagctctaaacacttgttaggaagcaggactggcatttgaaacaaacagctctttt

SEQ ID NO: 962953 - DNA, 120 bp, Artificial Sequence
  ENSG00000217825_0 (sequence is synthesized)
atggtgacagggttgctgtacgaagtggccctgaggggcttggccaccatttctgagggtgggtcaggcctccggcccacagcgatcctctgccttcctgcgtagtcatgcctgtcactc

SEQ ID NO: 962954 - DNA, 120 bp, Artificial Sequence
  ENSG00000217825_1 (sequence is synthesized)
aaggaaaaacgtccggatgacacgtgacacagcactgagtgattcgggtgaccactggtaccagccaaggtggaatacgtgcacttccgtctaccgtcccactgggaacgctgaaaactc

SEQ ID NO: 962955 - DNA, 120 bp, Artificial Sequence
  ENSG00000217825_2 (sequence is synthesized)
actttgatgaaagacccaactctccaaccagaggaactggaaatggagtggggtgaatccctgtttatttcttcctctttactgttgccacttggctccaaagatggccccagtcatgtg

SEQ ID NO: 962956 - DNA, 120 bp, Artificial Sequence
  ENSG00000217825_3 (sequence is synthesized)
gaactatacaatagcacaaagaattaaaaagctaagaaaaacctgattttctggacagaagaaaactggaaaaagagctccagctgttttaaaaatggggggataatccctgttaatttt

SEQ ID NO: 962957 - DNA, 120 bp, Artificial Sequence
  ENSG00000217825_4 (sequence is synthesized)
tcttttcttttaccaatttattcctaaggtagtcctagtcacgcagagctgcatggcagtgcgggaagctaaatcttggagataacactatctttctgtccagaagaaccaggaaaggag

SEQ ID NO: 962958 - DNA, 120 bp, Artificial Sequence
  ENSG00000259564_0 (sequence is synthesized)
aggtcaggggctcagaaggttttctctaaagtcaaacccaaattcctgctgctgcaaagacctgaggaagtacgagcaacccctgctgaatctgatgaagaagtagagatagagagggat

SEQ ID NO: 962959 - DNA, 120 bp, Artificial Sequence
  ENSG00000259564_1 (sequence is synthesized)
gttggtgatgttggatcctaatttcagttcctatctcaccacaggaccttgggcatattaactaaccaatatagagttcaagtaaagtggacttggggcaacgccaggaaagcctgtggt

SEQ ID NO: 962960 - DNA, 120 bp, Artificial Sequence
  ENSG00000259564_2 (sequence is synthesized)
tagttttttctttcatgtgaccctctgcccaaatgacgagtctgggagtgctgggatccaggaaaggtaaccacagggcaagcgagcactttcagatctctcacagaagcttccatcatc

SEQ ID NO: 962961 - DNA, 120 bp, Artificial Sequence
  ENSG00000259564_3 (sequence is synthesized)
tgtgatcatggcctttaaagtcatatttggtctaacagagtcatctgaagaaacaagcaacaggaaccagaaaagtttaagcttccatttgaattcacaaattttcccaagtgacacggt

SEQ ID NO: 962962 - DNA, 120 bp, Artificial Sequence
  ENSG00000259564_4 (sequence is synthesized)
gtccatatagcaagaaccagatacatgatcgtgatcacggctgaacacagtgagatcattaatcacataaggcttgcctgttaatagtttattcatctctacatagttcctgtctaacta

SEQ ID NO: 962963 - DNA, 120 bp, Artificial Sequence
  ENSG00000259564_5 (sequence is synthesized)
taacaacagcctttttatctagcatttgtctgtatggtggcacaaacttcacctggggagatgttgacctcatcaagcttatgcaatacttaaaactatccacttaaaccagaaaccttg

SEQ ID NO: 962964 - DNA, 120 bp, Artificial Sequence
  ENSG00000259564_6 (sequence is synthesized)
tacgagcaacccctgctgaatctgatgaagaagtagagatagagagggatgttggtgatgttggatcctaatttcagttcctatctcaccacaggaccttggataatccagcactgggtg

SEQ ID NO: 962965 - DNA, 120 bp, Artificial Sequence
  ENSG00000259564_7 (sequence is synthesized)
ggaggagaagagaaagacagcggtatggtagaacatcccagactgccatgcagtctaagaaaggttctgcaaggccactgaagagtcttcaagccaaagtcggctgtcagaggagttctg

SEQ ID NO: 962966 - DNA, 120 bp, Artificial Sequence
  ENSG00000259564_8 (sequence is synthesized)
tgtctcctagaatttccagactaagtatgtcttagtataacttcatactcagccagtcgctgagagaaaccacggaaggcatgggctcaatgcaaatacagcaatggatttcaaagtgca

SEQ ID NO: 962967 - DNA, 120 bp, Artificial Sequence
  ENSG00000259563_0 (sequence is synthesized)
ccaggctgggtgacagagcaagactgtttcaaacaacaaacaaacaaacaaaaaaacaagcttttgtttcagatttctcaaaatacatctagatagaacaaatggaaaccctcaagtgtg

SEQ ID NO: 962968 - DNA, 120 bp, Artificial Sequence
  ENSG00000259563_1 (sequence is synthesized)
taggttttataaatctagtttaaaagaggattgttaatttataacacattgtcataacatgactatcatttgttcctcattagtaaatgaaagctccaagagggaagagcttgtgttgct

SEQ ID NO: 962969 - DNA, 120 bp, Artificial Sequence
  ENSG00000268472_0 (sequence is synthesized)
tcttccttcccttgcttcccatttggttcagaagacacatgttttgtataattgagagtagcgatagaggggtgtgttctgaaattctggttaatttccctcagggaacaaaggacagca

SEQ ID NO: 962970 - DNA, 120 bp, Artificial Sequence
  ENSG00000268472_1 (sequence is synthesized)
gagagcatggcttctactcaccagaatagactgcattgctttcgtagatatgtgaactggccttgatgtctagggttatggtgtagtattcatcaaaggtgaagcaggtgctactgtacc

SEQ ID NO: 962971 - DNA, 120 bp, Artificial Sequence
  ENSG00000268472_2 (sequence is synthesized)
ttataaaggtggcagaagaaagctgcagactgaggcacagaaacatccccagtggctgcagcagcatgtcatggaagactgccatggtctcagtctgtttggaaagtgctaggcctggaa

SEQ ID NO: 962972 - DNA, 120 bp, Artificial Sequence
  ENSG00000268472_3 (sequence is synthesized)
ttgggtgaaactgacaactcacctcttgtttatatgccagggcttctgggtgaagtcatacatgcagatcttctccctgccccttctgaatatacattggattctggaatttggcccaag

SEQ ID NO: 962973 - DNA, 120 bp, Artificial Sequence
  ENSG00000268472_4 (sequence is synthesized)
caaattgcagttttgctcaagaaagggaatgtcctgaatatggttttcttttacgcctgtcatttcagcatctgctgtttgaagaaagccattgagaagatgtgaataccagcaagtgaa

SEQ ID NO: 962974 - DNA, 120 bp, Artificial Sequence
  ENSG00000268472_5 (sequence is synthesized)
attcagagttgtgtaaaatgtaaaataaacccctgaggaatgagatgtctatagggggtttgaaaagcttggacgaatccctgggaatctaaaaagccatgtgcatgtgcagggctacac

SEQ ID NO: 962975 - DNA, 120 bp, Artificial Sequence
  ENSG00000268472_6 (sequence is synthesized)
acattcccaggaaagacctgaggaggccctaattactcacctctggccgaccttgaggctctgcacaagtaagaagtaaaggctaaggtagagctgtaaactgcctatctgatcactgaa

SEQ ID NO: 962976 - DNA, 120 bp, Artificial Sequence
  ENSG00000268472_7 (sequence is synthesized)
ggcattccccaaaacacacatgcagaagtgcttagcaaagactgggagacttgttggttccagagttattagttaaagaaattttttaaaaatctatttattagctggtcaataagcaaa

SEQ ID NO: 962977 - DNA, 120 bp, Artificial Sequence
  ENSG00000268472_8 (sequence is synthesized)
cagaacagagactttggtggttacacatgataaagaatacagacttcacataattaatttaggaaagtcataaaacaaacagcagcaacaacaacaataaaaaagaataacaaacagcaa

SEQ ID NO: 962978 - DNA, 120 bp, Artificial Sequence
  ENSG00000246889_0 (sequence is synthesized)
ccgccccctgccccgcctcctcccgcgtcttggcccgcaagagtcccgggggtccgcccgcagctggctaagcgctagcccggcctgtggcgagtctgcagagctcgcccggaagtagcg

SEQ ID NO: 962979 - DNA, 120 bp, Artificial Sequence
  ENSG00000246889_1 (sequence is synthesized)
ttgcgcgcgcagaggatgggcgctgagcagcacacagcccgcggcggggtctcaggatccgcggcgctgcccggggccgggggaaggaagccagccgaggagacgcacgtgccctgagtc

SEQ ID NO: 962980 - DNA, 120 bp, Artificial Sequence
  ENSG00000246889_2 (sequence is synthesized)
cgggagcggggagcctcttcatctctccatcctccctccgcgcgcgccctcagccgtcctcgtccgctcaccatgcacctcccctccaagaaagggccacatgcgtgccagggacgcgag

SEQ ID NO: 962981 - DNA, 80 bp, Artificial Sequence
  ENSG00000246889_3 (sequence is synthesized)
cccctccaagaaagggccacatgcgtgccagggacgcgagccccggccacagggacatagcagcctagaagagacagagc

SEQ ID NO: 962982 - DNA, 120 bp, Artificial Sequence
  ENSG00000246889_4 (sequence is synthesized)
gtgggcatgagccaccttgcctggcatattcaatgttctgtagaggaataaaagttccctgtttttcaaatgagcccatgagtcaaaaagaatggcataaggcaattacccataaaaaca

SEQ ID NO: 962983 - DNA, 120 bp, Artificial Sequence
  ENSG00000246889_5 (sequence is synthesized)
aaattaataaaatcttcatgtggcacacctaaaaacacttctctttccatgtaagaactaaatatatgtcactcttctgatcaggcacatgggctggaatgaaagatcgtccttatctgg

SEQ ID NO: 962984 - DNA, 120 bp, Artificial Sequence
  ENSG00000246889_6 (sequence is synthesized)
ctggtttattgcaggactctcatgcttccaacagaaaagggaaagccaatagaccaaaaaaaaaaaaaaaaaccaaaaactagttgtctgaagtttttttttttttttttttttaaagtt

SEQ ID NO: 962985 - DNA, 120 bp, Artificial Sequence
  ENSG00000246889_7 (sequence is synthesized)
tctattcgaataactagctgtctataatcagggtgccaactgaacaatgagtgcagacacagacaggtttggcgtcacctgtgtgttctgcgtcgggatctgtaacagcagtgccagtgc

SEQ ID NO: 962986 - DNA, 120 bp, Artificial Sequence
  ENSG00000246889_8 (sequence is synthesized)
actgaagtcgaaggtttcatctaaggccagaagtgctccgtgaacaccactctctataagattgtttgcatattctttaaggccaattgacaggatccagcgaatcactcgatcattgct

SEQ ID NO: 962987 - DNA, 120 bp, Artificial Sequence
  ENSG00000246889_9 (sequence is synthesized)
ccaaacaagcacgtctgcaaaagaataaagacaattataaaagtggcttcagaaagccatctttatcacatgtaccctgtaatgcaggagaaagattcctaccatggttcctaatccttc

SEQ ID NO: 962988 - DNA, 120 bp, Artificial Sequence
  ENSG00000246889_10 (sequence is synthesized)
cactctcagggagactctcccattagaactcatccttccagtgagcacgagaggaatgaagttattatttctagagaaaagaagatgatgaggatccagggatcagaagccagaggactg

SEQ ID NO: 962989 - DNA, 120 bp, Artificial Sequence
  ENSG00000246889_11 (sequence is synthesized)
caagaacttgaatacctaacatgtataaacatgcttcacacacagactggagagtcttctgaaatacttcatcacggatggagctggctccataataatatgaacactttgctcaattca

SEQ ID NO: 962990 - DNA, 120 bp, Artificial Sequence
  ENSG00000246889_12 (sequence is synthesized)
acagaaacctctcatttctaatctcgaagtctttgtctcattttaaaatgagagaaacttaacaatatcatccagcacattagagactttgcagaaaatctttttttttcctctcttttt

SEQ ID NO: 962991 - DNA, 85 bp, Artificial Sequence
  ENSG00000246889_13 (sequence is synthesized)
tagagactttgcagaaaatctttttttttcctctctttttcttgacaatgtcctgctctgtcacccaggctggatacagcctggt

SEQ ID NO: 962992 - DNA, 120 bp, Artificial Sequence
  ENSG00000246889_14 (sequence is synthesized)
aactacaggcgtgtgtcacgaagctcagctaatttttttgtactgacagggtctcactatgttccccaggctggtcttgaactcatgggctcagacaatactcctgccttggcctcccaa

SEQ ID NO: 962993 - DNA, 120 bp, Artificial Sequence
  ENSG00000246889_15 (sequence is synthesized)
ctgagattacaggcatgagctaccatgcccagccacaatatcttatgcaaattaacaaattattcaatttgctctattagatctaaaaatagccactctaaaaatatatgcagatgatca

SEQ ID NO: 962994 - DNA, 120 bp, Artificial Sequence
  ENSG00000246889_16 (sequence is synthesized)
atcaccaatcacttccaaagacacttccaaagatctttgtctattggaaaaagatgtaaaatagatacagaaaacaaaacagatggacatatttcattgccaatgcccttttctggataa

SEQ ID NO: 962995 - DNA, 120 bp, Artificial Sequence
  ENSG00000246889_17 (sequence is synthesized)
aagtccatacatatacacacactgtataaatgtcgacttacgacttttctcctgattcacattaactcaatcacaagtagacttcccttcaactgggccatctcccaaccatatttttat

SEQ ID NO: 962996 - DNA, 120 bp, Artificial Sequence
  ENSG00000246889_18 (sequence is synthesized)
ccttagtttctttcttagtataaagtggggatgaaaacagcacttagactgacagggctaaggtaaagatgaaagaaagcaacccctgagtacttagaacaccacctggcacctactcac

SEQ ID NO: 962997 - DNA, 120 bp, Artificial Sequence
  ENSG00000246889_19 (sequence is synthesized)
tgttagtaagactggcctcttcttatcattattgttattggtgacttccttgcattccaggaattctgggagtcattactctgagcttaatgtttactgtctaattttaaaagcaaattc

SEQ ID NO: 962998 - DNA, 120 bp, Artificial Sequence
  ENSG00000246889_20 (sequence is synthesized)
ttggtgaggacagatgatcttcacaaaccctctgactcttaagaacctgggagacctgctggagtttaccccacattcccttaattaaaaagccattaaaatagtcaactttgctgggca

SEQ ID NO: 962999 - DNA, 120 bp, Artificial Sequence
  ENSG00000246889_21 (sequence is synthesized)
aaactgtttctatttggaagaaaagagagatgatttagagatggtaacagtgaaaaatcttagccaattattaagaactatctccattaagttacctgtgaaaactgtcgaccattttca

SEQ ID NO: 963000 - DNA, 120 bp, Artificial Sequence
  ENSG00000246889_22 (sequence is synthesized)
gctgccctcgaaggtctttcttggtcaagtggtccagcatcctggcgtctacaaggcactccatgaagtagctgcggtactgggggaggcccaggctggggagccactcgttgccgatcc

SEQ ID NO: 963001 - DNA, 120 bp, Artificial Sequence
  ENSG00000238007_0 (sequence is synthesized)
ttgcccttgcaaacttctctcagcttaggagagtctactcgctctttgcacattgttgacatgaaatgaatattaaacaccaaacctcatagaggccagccctgctgggcgagcaatgaa

SEQ ID NO: 963002 - DNA, 120 bp, Artificial Sequence
  ENSG00000238007_1 (sequence is synthesized)
ccggtgaggagggtgccctagctcccatagtaaccccagaattagtctccttaaaggctggggatcatggcttgttcaatagtttttcttcaggttcgggcatatagaaggggctcaata

SEQ ID NO: 963003 - DNA, 120 bp, Artificial Sequence
  ENSG00000238007_2 (sequence is synthesized)
aatagtcacagaatcaataactattacaaaagccccattgatggaatgctcgctccgtaccaaggctgagaagggtgatctgtcacccaaagtaggacccctttgttgctccctgaacca

SEQ ID NO: 963004 - DNA, 120 bp, Artificial Sequence
  ENSG00000238007_3 (sequence is synthesized)
ctgccagttttgtagttttgtttttccttttcttgctatttggccaggagcagcagtagcagcagctccaagaacagcactggctccttcttagtcccatggaagcacagatcaacatca

SEQ ID NO: 963005 - DNA, 120 bp, Artificial Sequence
  ENSG00000238005_0 (sequence is synthesized)
aacctcataggtggtttgggatgtcttttggctgtgcttaaaaatttccaacagatttgctacacatcttaggataaatatgtttcctgtgaattgtgatgatttcttacagtacatttg

SEQ ID NO: 963006 - DNA, 120 bp, Artificial Sequence
  ENSG00000238005_1 (sequence is synthesized)
caagcatgtgtatgcatctgcaggaaacatagcctggctctgtgaaggaatactgctgtgaccgcaaaactgtttctgtagaattttctccggtgtggtcatcctgccttcagaggtttc

SEQ ID NO: 963007 - DNA, 120 bp, Artificial Sequence
  ENSG00000238005_2 (sequence is synthesized)
tccaggacgtcacctgtatgaggtacacagtgtgatgacacactctgtgcttttcctacttgtgtccacggctcaagcctggaagaagccttaggacgtgggggaaatgtctaacgtgga

SEQ ID NO: 963008 - DNA, 120 bp, Artificial Sequence
  ENSG00000238005_3 (sequence is synthesized)
ttcctcatggcccagccacccctcgcctgagctgagcctggccacagggcccgcctgcaggaagggctggcccatggcttcacactgggctcaggctgcgctaagagccccgggtgagga

SEQ ID NO: 963009 - DNA, 120 bp, Artificial Sequence
  ENSG00000238005_4 (sequence is synthesized)
cctccaagcccaggaagcctcagttggccaaagtgctagatgcgtgtggtctgctttcatccccgcttccctcagagcttgcattttccaaattcaagagaggctccaccttcaagaaga

SEQ ID NO: 963010 - DNA, 120 bp, Artificial Sequence
  ENSG00000238005_5 (sequence is synthesized)
ccggcctgtccctgttatttatgtgtccccctaccatatctccctttgttctgcagagcggccatacctgccagcagcctgctctcccggccatgctgcggttcacaaaagtccagcatt

SEQ ID NO: 963011 - DNA, 120 bp, Artificial Sequence
  ENSG00000238005_6 (sequence is synthesized)
tggctagcttcctgggggaatgaatctttcagagccaaactaatgctatgcatgcagcttatgatttttttttttttgtcttcaacaaagtgaatacttactttttttttgctctttaaa

SEQ ID NO: 963012 - DNA, 120 bp, Artificial Sequence
  ENSG00000238005_7 (sequence is synthesized)
cttacttccacacccaagtttctcctgaaagcactgtgcctgttttgtttgctacacatcttggtgctccagcagattaccagtgaaacatgccgactctcaccaaaccaccccatgttg

SEQ ID NO: 963013 - DNA, 120 bp, Artificial Sequence
  ENSG00000238005_8 (sequence is synthesized)
atcacactgtttttgttagctgtgtgtgtgtgtttcctgtgtatccaaaagacagaggagatgaaaaagcaaaagaaaagaaacgaggaatcagattggaaagaaggtttctccaggacg

SEQ ID NO: 963014 - DNA, 120 bp, Artificial Sequence
  ENSG00000238005_9 (sequence is synthesized)
gagagggatgtgggtcctgcggatggtcggggtgaagcttcctctcctttctgctgacagcacttcctcattaaatgcagagatctgcaaaaagggaaaataaaaacacaagaagaaaaa

SEQ ID NO: 963015 - DNA, 120 bp, Artificial Sequence
  ENSG00000238005_10 (sequence is synthesized)
gaaacagcccggggctttcagcacagatgagaagtctaaaaatttcccttttcatttcctctcttgtgtgactttgtcatttttaaaaaaactggtcacagaaaagggaattttgcccat

SEQ ID NO: 963016 - DNA, 120 bp, Artificial Sequence
  ENSG00000238005_11 (sequence is synthesized)
gcttttaaggagtttatctcgactgagtagcttccccgccactcctctaaaatccctcctcaaaaaccccaagttaaaaaaaaaaaagatctattcttgtagattttttttgtgtgggtc

SEQ ID NO: 963017 - DNA, 120 bp, Artificial Sequence
  ENSG00000238005_12 (sequence is synthesized)
tatgtttcattcatctgctttcaggctggatttataacaagcagaacttttaaaacggaggaaaatagagcaaaaaggtagaacttacttccacacccaagtttctcctgaaagcactgt

SEQ ID NO: 963018 - DNA, 120 bp, Artificial Sequence
  ENSG00000238005_13 (sequence is synthesized)
ggccagggtagaagttaaaccaggagatggctgtcaaatgcagttgttaggtgtggcacatctttctcaagctgctgagctgagcaggaaagagagacgtttgtttatggatttatctca

SEQ ID NO: 963019 - DNA, 120 bp, Artificial Sequence
  ENSG00000238005_14 (sequence is synthesized)
tctataagacactcttattagatgaactctatatcagttctatgtagaactctgtaccagttctataaggcactctttaatctgaatctttttatttgctcaagagaaaaataagtctga

SEQ ID NO: 963020 - DNA, 120 bp, Artificial Sequence
  ENSG00000238005_15 (sequence is synthesized)
tatgtttcattcatctgctttcaggctggatttataacaagcagaacttttaaaacggtatgattttaaaataaaattaaaaaaaaaacacgctgagatctttccatagctttggcttct

SEQ ID NO: 963021 - DNA, 120 bp, Artificial Sequence
  ENSG00000238005_16 (sequence is synthesized)
catctatgcatgcaggcatgcatgagttatttatgtgtgttatttggtccagccttgaagctccttttatttttcagtgaattgaaagaaggtaacctttggatgtatatattttagtgc

SEQ ID NO: 963022 - DNA, 120 bp, Artificial Sequence
  ENSG00000238005_17 (sequence is synthesized)
tccagcagattaccagtgaaacatgccgactctcaccaaaccaccccatgttgccaaatcttctctcttggccctgatgatgtgcaacttaaaaccaaggtccaggttgactgcacagca

SEQ ID NO: 963023 - DNA, 120 bp, Artificial Sequence
  ENSG00000238005_18 (sequence is synthesized)
attgaggccacaaggaaatgtaatcctgccaagtgtgggagttaacaaaaactgccaaagtcttaaggttgcagagagagcaagaaccactttctgggttacgcatgtctactgtgtatg

SEQ ID NO: 963024 - DNA, 120 bp, Artificial Sequence
  ENSG00000238005_19 (sequence is synthesized)
tgcaggggtgccatgtgtatgtaccgcgtgtgtgtgtgggtactgtgtgtgtgcatggatgctatgtggattcaccatgcactaccatgtgtgcatgagcaccatgtgtgtacactgaga

SEQ ID NO: 963025 - DNA, 120 bp, Artificial Sequence
  ENSG00000238005_20 (sequence is synthesized)
gtgtatgtggctagcaggtgtgtgtactctgtgtacctgagcactgtgcgtacctgtgcactgagcctatatatgggcatgtgtttatagcatgtatgcatgtgtgctatgtgtatatac

SEQ ID NO: 963026 - DNA, 120 bp, Artificial Sequence
  ENSG00000238005_21 (sequence is synthesized)
catgcacttgcacacatatactgtgtgtgcagcacaccagatgccacagatatggtggcgggagggtcaatgacagggaactggggggaggcaggtgtgaggcaggcctgcttgggaaca

SEQ ID NO: 963027 - DNA, 120 bp, Artificial Sequence
  ENSG00000238005_22 (sequence is synthesized)
ggtaaatcacttaaggatgcagtgcttttcatctgctttgctgctcttttcctcttaagcagcatgcgctgagattgcagaaacctgaaagatagggaaagtgtgtatcccatctcccct

SEQ ID NO: 963028 - DNA, 120 bp, Artificial Sequence
  ENSG00000238005_23 (sequence is synthesized)
gggagttgaaagcgcaggtacgtgctacatcttctggaaacctaaccctcgcacgccaagcgggaggctcttttggtcaaatactcccaggacttatgcttgagttctgaaataagtgaa

SEQ ID NO: 963029 - DNA, 120 bp, Artificial Sequence
  ENSG00000238005_24 (sequence is synthesized)
aaagttctgttggctagctgtgtgggggctgtcttaagccctgaaaacattctgcatcagaactcagcttcagaaaggggttcctgctctcctgtctgccctggagatagtcacgcatga

SEQ ID NO: 963030 - DNA, 120 bp, Artificial Sequence
  ENSG00000238005_25 (sequence is synthesized)
cagcttgtgggctgactgagcatttaggcagctgcttttcctctctccctccaggaggaaaatagagcaaaaagcttcaggaaaaagaggaccttagaactgaaggagcaagattccaac

SEQ ID NO: 963031 - DNA, 64 bp, Artificial Sequence
  ENSG00000238005_26 (sequence is synthesized)
atagccagaaacagtgatttggctaagacaaaatgaagcgatggctgtcctgggatggtgcaga

SEQ ID NO: 963032 - DNA, 72 bp, Artificial Sequence
  ENSG00000238005_27 (sequence is synthesized)
cccggttcctcgagaggtcgtcgccttgcagccctggctgatttcgaaggctaaaggcgattcttcaacaca

SEQ ID NO: 963033 - DNA, 120 bp, Artificial Sequence
  ENSG00000238004_0 (sequence is synthesized)
gatgggcttctctctctgatgtttgtcaaaatcttaggtggtgttagctctacactaaatatgacattctcttatcttccatctactatggacagatccaggaggtgctaactatcctac

SEQ ID NO: 963034 - DNA, 120 bp, Artificial Sequence
  ENSG00000238004_1 (sequence is synthesized)
cacaattggcaagaggtgggagtacaggttctttttaactgcattgcaggaccagactctgaagacagctgcttagatctaacagcgatttctttcagtaacaatcaagtaggagaagag

SEQ ID NO: 963035 - DNA, 120 bp, Artificial Sequence
  ENSG00000238004_2 (sequence is synthesized)
ggaggacttaaactacagcaccctgcagcagacacattttggaacttcagctatttatgtaagaagctcttgaaatcagcttttctgaaaagtggcaccttagatttacagaagtaagcc

SEQ ID NO: 963036 - DNA, 120 bp, Artificial Sequence
  ENSG00000238004_3 (sequence is synthesized)
cagaatgcaaacggttttaaccattcttcagtagctaccatactgacatccaaaactctgtttatgataagctatgttgatccttaaagctgtgctttatagataaatattttgaaagga

SEQ ID NO: 963037 - DNA, 67 bp, Artificial Sequence
  ENSG00000238009_0 (sequence is synthesized)
ttacaggtgtgagccactgatgcctcagtttcctcatcagttgaaaggaatgaatgaaagatatgtg

SEQ ID NO: 963038 - DNA, 120 bp, Artificial Sequence
  ENSG00000238009_1 (sequence is synthesized)
tcaagacctgtatccaggaaaagaccaaaccaatgcagaccaaaccaatgcagaactcctatgtgctgatggtggtcttacatttccctaagtttctgccgactaaactgtgcacacgtt

SEQ ID NO: 963039 - DNA, 120 bp, Artificial Sequence
  ENSG00000238009_2 (sequence is synthesized)
catttccctaagtttctgccgactaaactgtgcacacgttctcaggacctcctgaagctgcgtcacaggcactaatcaaagaacacaaccaagagtttggccttttcttcagcactggga

SEQ ID NO: 963040 - DNA, 120 bp, Artificial Sequence
  ENSG00000238009_3 (sequence is synthesized)
agaaaaaaaaacgcaaactaaacaaccacaatgaaacagaacagagttaatctgctgtagctcaagagaggatgtacctgcccccaccccgcatccctgggctcgggtttgccttgctga

SEQ ID NO: 963041 - DNA, 120 bp, Artificial Sequence
  ENSG00000238009_4 (sequence is synthesized)
cctctgctgccacctggtgccacacagagaaactgaggagaaaccacatcagtctccttcagcctcagcttcacatctgtgggtcaagcaaccctttcagaagctgtataatgtgggaaa

SEQ ID NO: 963042 - DNA, 120 bp, Artificial Sequence
  ENSG00000238009_5 (sequence is synthesized)
gctttcctctcaggaaaatgcacacatccaactttgagaagatgcccttgggggcgcttcaaggattctagataataaccccctttcccgaacatccaagaacctaagattttttttttt

SEQ ID NO: 963043 - DNA, 61 bp, Artificial Sequence
  ENSG00000238009_6 (sequence is synthesized)
ccctttcccgaacatccaagaacctaagatttttttttttttgagaaagtctcgctctctc

SEQ ID NO: 963044 - DNA, 120 bp, Artificial Sequence
  ENSG00000238009_7 (sequence is synthesized)
ctgggattacagatgtgagccaccgcacctggtccaagaacccaagttttagatctagagtgatgtcagcatgacattgatttcctgaggcccaggggcgaaggagctgaggacagcaga

SEQ ID NO: 963045 - DNA, 120 bp, Artificial Sequence
  ENSG00000238009_8 (sequence is synthesized)
acagcagaggggtgaaggaactcagctacagacagcagcagctgatgcacaggcctcccagcgcctgaagtcacccggaattgggaagtgctcagaagcttacaaagctgcctcgaggtg

SEQ ID NO: 963046 - DNA, 120 bp, Artificial Sequence
  ENSG00000238009_9 (sequence is synthesized)
caaacagtattgggattgggataaatgctcagcttttgcccaaatcttagtgacttaagcatcacttatttgctcacgattctgtggctggaccatttggtttggctcacagggcaggga

SEQ ID NO: 963047 - DNA, 120 bp, Artificial Sequence
  ENSG00000238009_10 (sequence is synthesized)
ccatttggtttggctcacagggcagggactgtgctggtcttacctgagcagacctgcatgtctgcggtcaactgggttggcagagacagagtgactgtcttcctccaggaagcagcaggt

SEQ ID NO: 963048 - DNA, 120 bp, Artificial Sequence
  ENSG00000238009_11 (sequence is synthesized)
gagacagagggactgagggactgtctccccccaggaagcagcaggttggctctgtttccttcgtggggcagctggtctccagggcagcaagagagaccaagccccagtgcacattctaca

SEQ ID NO: 963049 - DNA, 120 bp, Artificial Sequence
  ENSG00000238009_12 (sequence is synthesized)
agggcagcaagagagaccaagccccagtgcacattctacagcctctgtgcacatcagacttgttaatatcccattggccagtgtaagtcacttggccaagcccagattaaggagtggaaa

SEQ ID NO: 963050 - DNA, 120 bp, Artificial Sequence
  ENSG00000238009_13 (sequence is synthesized)
gatggaggctatctcctcctgggagaggaggcaaaggaggtgggagtattatgtggccacttatgtttgcaatctaccatacttagcactttgagaaaagaattaactgagaaacttgct

SEQ ID NO: 963051 - DNA, 120 bp, Artificial Sequence
  ENSG00000238009_14 (sequence is synthesized)
tcaaatagggccagtaaaatgaagccccaattgaagtaaaatgcatatataaaaaatgaaactgtgaccgattttaaggacagtattggcaaatatttctgtgctcttggaggagaagac

SEQ ID NO: 963052 - DNA, 120 bp, Artificial Sequence
  ENSG00000238009_15 (sequence is synthesized)
ccttattggcatgacatgtcagaaaccacaatgaaagaattattttaacttgcattcataaaaattaaaattattcattaaaaacatcgtgaatgaaattaaaagtcaaaatgtaagcca

SEQ ID NO: 963053 - DNA, 120 bp, Artificial Sequence
  ENSG00000238009_16 (sequence is synthesized)
gaaaattatttacaacgtatgtgtcaggaaaagacaatacccttcaaactttgagagtttacatcagaaagaaaacagcaaatgacatgatccaaacttgataaaggacatgaaaaagag

SEQ ID NO: 963054 - DNA, 120 bp, Artificial Sequence
  ENSG00000238009_17 (sequence is synthesized)
ccagcacttagtatgttttctgaatgaataagtagccaacagcacatgaaaatgcgtgtaatccatttgtaagcagagaaatgcaaactaaaacagtaaagtgtcattttcacttcctgg

SEQ ID NO: 963055 - DNA, 75 bp, Artificial Sequence
  ENSG00000280434_0 (sequence is synthesized)
gctaattttgtatttttcttagaggaggttttgccactttggccaggctcgtctccagccttgcatttttttatt

SEQ ID NO: 963056 - DNA, 120 bp, Artificial Sequence
  ENSG00000280434_1 (sequence is synthesized)
acaggcatgagcccctgtgcccggcccagcctgtgttttgagcgttccacggctgctggaagacctgttgtctgctgaaatcttcatattaaccactcttctgatttaagtacctcccct

SEQ ID NO: 963057 - DNA, 120 bp, Artificial Sequence
  ENSG00000280434_2 (sequence is synthesized)
ccaaacaacattaccagggtggttaatgtgcaaatagagatggtgatttgctgctgaccttgtgcaaacattaataattcacacaagcacctctcgtttataattagagcaggctggaac

SEQ ID NO: 963058 - DNA, 120 bp, Artificial Sequence
  ENSG00000280434_3 (sequence is synthesized)
acagcaccatgtgacttgcgttcttatcagtaggcctttacctgggcagcgagggcccagctttctggctggctctgtccctcatcctccattgtgctgcttgtgaaactgtgttctgag

SEQ ID NO: 963059 - DNA, 120 bp, Artificial Sequence
  ENSG00000280434_4 (sequence is synthesized)
tgacccatctcatggctctctctgtgttcttgtttgcaggatgatgatgggccggttcggtaagtaaccccagggaaagtggggagatggaggcatgttagggctcccccaggaagctcc

SEQ ID NO: 963060 - DNA, 120 bp, Artificial Sequence
  ENSG00000280434_5 (sequence is synthesized)
cagagagtgtacatggttatctggagggagtgggaaactagatgggtctcactgcccccatagttctggaatcctagagaaagtgcacagcccacccccacctttctgtataatgggctt

SEQ ID NO: 963061 - DNA, 120 bp, Artificial Sequence
  ENSG00000280434_6 (sequence is synthesized)
gtttctcagagctgagagtggctgggttgtgctaggaggagtggggtggaaggctgggtgaccagctaggggagcaggaggggcctgggatgtaacactggctggaactgtcaggggctg

SEQ ID NO: 963062 - DNA, 120 bp, Artificial Sequence
  ENSG00000280434_7 (sequence is synthesized)
gagcaagagtggttgagggtaaaagggagggaggagaggcagccagcacatggagcgtcgttagctggctggaagagagtggctcagctctgtggatgtccttccatgtgtattatttcc

SEQ ID NO: 963063 - DNA, 120 bp, Artificial Sequence
  ENSG00000280434_8 (sequence is synthesized)
tcctggaaaccactggtttagcagacttccttagagtcaggcagccagggctcattcctggctggtggcttgtggcctgccccttcctctctctgctcctcatccgtgaaatgggagtgt

SEQ ID NO: 963064 - DNA, 120 bp, Artificial Sequence
  ENSG00000280434_9 (sequence is synthesized)
aaaaggctctccccaggcaggggctgctgtgagtattgggtgagatcacaggtgagtgccctgcttggccgggggacagccctctatgtgggctggttttattagtgttggttttcagtg

SEQ ID NO: 963065 - DNA, 120 bp, Artificial Sequence
  ENSG00000280434_10 (sequence is synthesized)
gctcttcccaaagagagagaggtaatcactctctcttccctcatgaaagcctgagacctcatcttcatctcggtgagggatggtaacgtttcaaccctcagtaccaggataccccggccc

SEQ ID NO: 963066 - DNA, 120 bp, Artificial Sequence
  ENSG00000280434_11 (sequence is synthesized)
tcggcctggccagcctcagtgctttgggaagcatttcaaaagagaaacctcttgacccccagataccctgttctccagtgagcagggaggggagaacagctcttaaaaggaaaaatggaa

SEQ ID NO: 963067 - DNA, 120 bp, Artificial Sequence
  ENSG00000280434_12 (sequence is synthesized)
accagatagaagtctcccacctgcctctctagcggagctgatatctgtcttttgggggccctctgggtgggggtgccaccccctgagtcctatacaatgagggctgggccagcttggcca

SEQ ID NO: 963068 - DNA, 120 bp, Artificial Sequence
  ENSG00000280434_13 (sequence is synthesized)
tggggctctgtaacctcaagttattatggggaccagctaggatgccattgctgcttatctattgtattagggttctctagagggacagaagtaatacgatagatagatatatataaaggg

SEQ ID NO: 963069 - DNA, 120 bp, Artificial Sequence
  ENSG00000280434_14 (sequence is synthesized)
ctcacacgatcacaaggtcccacaatagtccttctgcaagctgaggagcagggaagccagtttgagtcccaaagctgtagaacctggagtttgatgttcgaaggcaggaagcatccagta

SEQ ID NO: 963070 - DNA, 120 bp, Artificial Sequence
  ENSG00000280434_15 (sequence is synthesized)
aaggcaggaagcatccagtatgggagaaagatggaggctgggagactaagccagtctagtcttttcatgttcttctgcctgctttttattttggctgtgctggcagctgattaggtggtg

SEQ ID NO: 963071 - DNA, 83 bp, Artificial Sequence
  ENSG00000280434_16 (sequence is synthesized)
gctttttattttggctgtgctggcagctgattaggtggtgcccacctggattaagggtggtctgccttttccagtccacagat

SEQ ID NO: 963072 - DNA, 120 bp, Artificial Sequence
  ENSG00000280434_17 (sequence is synthesized)
gctgacagtattaaccatcacgcctgtggagaggggaagtggctcagatcctgcggggcttgaattgagaagatgcagccagcgtgtcccccctaggctttctttactagaccttaagct

SEQ ID NO: 963073 - DNA, 120 bp, Artificial Sequence
  ENSG00000280434_18 (sequence is synthesized)
gtgctgggaacattcacaggccttctctgttttttgtttgtttgtttgtttgtttttaaggagaattccagctcttttaaattgtctctattattaaaaaacaaatgcaggaagagaaag

SEQ ID NO: 963074 - DNA, 120 bp, Artificial Sequence
  ENSG00000280434_19 (sequence is synthesized)
agaaacatcctgtatatagttgctgagggaggcgaaaccgcagtggggtcacagctcatgggaccggggtgaggcgtctccccaccctgcgtctaggtagaggcgcgttttgggggccca

SEQ ID NO: 963075 - DNA, 120 bp, Artificial Sequence
  ENSG00000280434_20 (sequence is synthesized)
gtgcccccctctgtcacctcttctccatcttttcttcctggaggaggctcagaacccctttggaattgtagaggcctaaagatgaggagagggccgggcgcggtggctcatgcctttaat

SEQ ID NO: 963076 - DNA, 82 bp, Artificial Sequence
  ENSG00000280434_21 (sequence is synthesized)
gatgaggagagggccgggcgcggtggctcatgcctttaatctcagcactttgagaggccgaggtggatggatcatgaggtca

SEQ ID NO: 963077 - DNA, 120 bp, Artificial Sequence
  ENSG00000280434_22 (sequence is synthesized)
aaaaaaaaaaaaaaaaaagatgacagtgggcccctcaagcatttttgagtctttttgttttttttgtggcgctgtcacttttgtgtttggttcgggccttgttggaggtttagggaaaag

SEQ ID NO: 963078 - DNA, 120 bp, Artificial Sequence
  ENSG00000280434_23 (sequence is synthesized)
ggttcgggccttgttggaggtttagggaaaagacagtctgttcagttcagttgggagcacatgggcctcaggctgtgtatagcaccctgtggcccgagggcccagaagcctggccccgga

SEQ ID NO: 963079 - DNA, 120 bp, Artificial Sequence
  ENSG00000280434_24 (sequence is synthesized)
gcccctgccaccccatgaatgagctttagggtctgatggctggggcagtggctccctaggtaagagccaggtgtcacatgtgaaaagtggacccagctgccactccaggggtgggaggac

SEQ ID NO: 963080 - DNA, 120 bp, Artificial Sequence
  ENSG00000280434_25 (sequence is synthesized)
tgtggaatcgcaagaccatgtacaagaggccgatggaattgttctcgttactttgtaggctttatgtgctgtgcttgagaaaatgcaaacaggctattagtcggtgacaggcaattagtt

SEQ ID NO: 963081 - DNA, 120 bp, Artificial Sequence
  ENSG00000280434_26 (sequence is synthesized)
ccacccccggccttgctgcttctgctgacgcaggttccgaagtctcctggttacccagcctggcaccctcaggcacagcagggtgtctggcccggcacccgcccctgtgggggcagcagc

SEQ ID NO: 963082 - DNA, 120 bp, Artificial Sequence
  ENSG00000280434_27 (sequence is synthesized)
acgccttgtcttcgcttccctgccatgccattcccctccttcagcccccgagagcaccccagggtgctccctcctccagcaaccttcacctgaatgctctccctctagattaccccatgg

SEQ ID NO: 963083 - DNA, 120 bp, Artificial Sequence
  ENSG00000280434_28 (sequence is synthesized)
ctcactctttcagctctgccagctcttggttcaaatgtcactgatcagggaggccctctctgactccactgccccaaactggcctccactggctctcctccccacccctgccttagttct

SEQ ID NO: 963084 - DNA, 120 bp, Artificial Sequence
  ENSG00000280434_29 (sequence is synthesized)
ttctgtactcatgtgacacaccaagcagcactcagctcatggggatggcctggctcctcttccctgtgccagtgtttacacaacgaagcttgcacgtgtctggcagacactggtgccagc

SEQ ID NO: 963085 - DNA, 120 bp, Artificial Sequence
  ENSG00000280434_30 (sequence is synthesized)
aaactttcaggggcacccacagcccctgcctttctcctttcacacatggctccttgacccagaggtgctctgtgggctggagctgacctttcctcggggtgcaccccaccccctgccaaa

SEQ ID NO: 963086 - DNA, 120 bp, Artificial Sequence
  ENSG00000280434_31 (sequence is synthesized)
gcagccagccctggccacagtctgcacgcagctgggggcagatgttttaggagcttctggaaggccgggcagaccctccttggctaatgtgctgggctttgccaggagtggtcttctggg

SEQ ID NO: 963087 - DNA, 120 bp, Artificial Sequence
  ENSG00000280434_32 (sequence is synthesized)
cctcagtttccccacgagtaccctgagccagggagggatggggactccattctgcccactccccatcattccggggagggaggtggctccacaggtcctcgctgcctcctgacagcatca

SEQ ID NO: 963088 - DNA, 120 bp, Artificial Sequence
  ENSG00000280434_33 (sequence is synthesized)
ctgtcctggatgaggtgggtgaggaggcttctctccacggaaacaagtctcaggggttccagggaggttgcagcctggtctccatggcaatgggtgagctggtgcggcttctccgcgggc

SEQ ID NO: 963089 - DNA, 120 bp, Artificial Sequence
  ENSG00000280434_34 (sequence is synthesized)
ggcccttccccctcctgggcctgccctgggctggaggctctttctgaggcagaggggaaagaagggggatgtgccttcctcactctcttccccctcattgtaactcctagtaattcccct

SEQ ID NO: 963090 - DNA, 120 bp, Artificial Sequence
  ENSG00000280434_35 (sequence is synthesized)
tcacgtctctcccatttctgccaacagggcttgttccaaaacctctggctccatcccatcacccgtggctcctgactgtgccctccataactcccacgttgcaggccacagcccctgtta

SEQ ID NO: 963091 - DNA, 120 bp, Artificial Sequence
  ENSG00000280434_36 (sequence is synthesized)
acccctctcacagtccacccggctcttgaacctgcgctgggctttctggcatctctctctccttgtgcctgctggtccctcggtggagcgcctttcctcctcctcttgccccagcaagcc

SEQ ID NO: 963092 - DNA, 120 bp, Artificial Sequence
  ENSG00000280434_37 (sequence is synthesized)
tggcttgaaccccaggactgctttgtgaagccttcctcaggtccccccagcccttggttcatgggtcccagactcaggtgtctccagggaccaggctgataatataaaagaggagagtgt

SEQ ID NO: 963093 - DNA, 120 bp, Artificial Sequence
  ENSG00000280434_38 (sequence is synthesized)
ctagattatgcaatgataatgtcatctgccccttcaccccagggctgggtggcagtggggagtggtggggtctggcgcaagctggagagtccacacccccatccccaggggcagcttatt

SEQ ID NO: 963094 - DNA, 120 bp, Artificial Sequence
  ENSG00000280434_39 (sequence is synthesized)
gctgccaggtgggagtgcaggctcactgttgccacagcctccagttcttcaagagaagccagaagttaagaacttttggacaaactttccaatttaagaactgttcgctctcgccgggta

SEQ ID NO: 963095 - DNA, 120 bp, Artificial Sequence
  ENSG00000280434_40 (sequence is synthesized)
tgacagagtgagactctgtctcaaaaagcctaaagaccaaaacaaaacaaaagaaaacaaaacaaatgaaaactgttgactcaaatcaaaacattacagcgaccaagctgagcattcctg

SEQ ID NO: 963096 - DNA, 120 bp, Artificial Sequence
  ENSG00000280434_41 (sequence is synthesized)
cattcctgcagattgagcttgggcagccctggcatatggtcaggtcggttggccccccgtctggcttcgtcttttctgacactaacagggttgcactatcatagtttactccctctccag

SEQ ID NO: 963097 - DNA, 120 bp, Artificial Sequence
  ENSG00000280434_42 (sequence is synthesized)
gccctcccccaagtctgtgcctcttccaagagaggagtccctccttgtttatctctgtgatgtccccagagcctgcggaggctctgggggacaggacgagcgggagctgtaaggactgag

SEQ ID NO: 963098 - DNA, 120 bp, Artificial Sequence
  ENSG00000280434_43 (sequence is synthesized)
gaccgacaatgctcctgccaggctccatgctcctgcctctactcactgccccacttagttccacaccaagagcgaggcaggggctgtgagaatgctgcctttatggaggaagaaaggggg

SEQ ID NO: 963099 - DNA, 120 bp, Artificial Sequence
  ENSG00000280434_44 (sequence is synthesized)
tcggagagggaaggatttgcccagtcatggggtgtgaagtggggcagctagaacaaaataggatctattttcgttcccaaggccaagcacatcacaggggtgcagtatgctctctctgtc

SEQ ID NO: 963100 - DNA, 120 bp, Artificial Sequence
  ENSG00000280434_45 (sequence is synthesized)
tctctctctcccctaggtcagggtggtccctggggaggcccctgggttaccccaagacaggtgggaggagcttcctacccgaccctcttcctgtcaacctgggctctgcggctcccaggg

SEQ ID NO: 963101 - DNA, 120 bp, Artificial Sequence
  ENSG00000280434_46 (sequence is synthesized)
ctgctccttgtattggggccccagcctggctggtaacagagggtccctccactgggctcagtcttctgagcatgctctgcccccaggaacctggaggatggaagttgggggccctgggtc

SEQ ID NO: 963102 - DNA, 120 bp, Artificial Sequence
  ENSG00000280434_47 (sequence is synthesized)
ccttccaaatgcccttgggtcctgtgcctggtccccagtgcccattttcagagcccctggcccctccctgccttgtggactgtgtgacgtgatgccagtcccctgggtccaggggcatgg

SEQ ID NO: 963103 - DNA, 120 bp, Artificial Sequence
  ENSG00000280434_48 (sequence is synthesized)
cagccggcggagaggcctctgcggccccgatgtctccttgagtggcttgactctgccagcccagcggtggcccagctaaatataccctggctgacgtcaagcactcttctgctcctgggg

SEQ ID NO: 963104 - DNA, 120 bp, Artificial Sequence
  ENSG00000280434_49 (sequence is synthesized)
tttttcttaagctgcatttatagtttgcgtattgctttgtaaagatgtaaaaatttcactttttttttttgttttgccccttagcagactgtcttattgagtgtagtcttagatgattat

SEQ ID NO: 963105 - DNA, 120 bp, Artificial Sequence
  ENSG00000280434_50 (sequence is synthesized)
gaaaatcatttacagctgccgcattaggaagctggcgtgtgtgcagaggcagggcattttggtcaatgttggtctttaggtgaagaaaacttccctcccttcccccagtcacgcacatgc

SEQ ID NO: 963106 - DNA, 120 bp, Artificial Sequence
  ENSG00000280434_51 (sequence is synthesized)
tcacacacgcacacatgcgctcacacaggcacacacacgctcacacgtgctcacacatgcacacacgtgctcacacgtgtacacacgctcacaccgcacacacgcacacccgtgctcaca

SEQ ID NO: 963107 - DNA, 120 bp, Artificial Sequence
  ENSG00000280434_52 (sequence is synthesized)
cgcacacatgctcacacatggacacacgctcacacacgcgctcacacgtacacacgctcacagcacacacacatgttcacacacaacctcacacgcacacacgtgctcacacacgcacac

SEQ ID NO: 963108 - DNA, 120 bp, Artificial Sequence
  ENSG00000280434_53 (sequence is synthesized)
atgtgctcacgtgcacacaggtgctcacacacacacatgcacacacgtgctcgcacacgcacacatgctcacacacgcaaacacgtgcccacaatgcacacacatgctcacacgcgcaca

SEQ ID NO: 963109 - DNA, 120 bp, Artificial Sequence
  ENSG00000280434_54 (sequence is synthesized)
gtgagctgcctcctggggcccagcctgggaggaagggtcagcatgcttcctctgggaggaggcttggccaacttctctccgtaggtctctggcttacctgggcctaatcccttctttctt

SEQ ID NO: 963110 - DNA, 120 bp, Artificial Sequence
  ENSG00000280434_55 (sequence is synthesized)
tttctgggctctctttgtctctctcctaggccagggcggtccctgaggaggctcccctaggccacccactagacgggtgggaggagcttcctaccccactctctccctgtcaagctgggc

SEQ ID NO: 963111 - DNA, 120 bp, Artificial Sequence
  ENSG00000280434_56 (sequence is synthesized)
tccgcagctcccagggctgctccttgggttggggccccagcctggctggtaaaagagggtctctctgctgggcttggtcctctgaacatgctctgcctccaggaacctggaggatggaag

SEQ ID NO: 963112 - DNA, 120 bp, Artificial Sequence
  ENSG00000280434_57 (sequence is synthesized)
ttggggggccctgggccccttccaaatgccctcctccctgtcttttctgccctggcagtgatgccccacagctctgtgtctacctggagacctcagccctctgcttggggtccaagtctc

SEQ ID NO: 963113 - DNA, 120 bp, Artificial Sequence
  ENSG00000280434_58 (sequence is synthesized)
tgttccatatgcccctatggaactcccccctccatggcagcaggagcaaaggctctgaggcaagtgtgcaccagtgtcagcaggagcagctgggaggccggttggtggagtgaagtcagg

SEQ ID NO: 963114 - DNA, 120 bp, Artificial Sequence
  ENSG00000280434_59 (sequence is synthesized)
gagggtgcatgtaggaggataacgctgagtctgagtgtcccatggcacgtgggagagaggatggattttatctgagtgtcccatggctcgcaggagagaagatagattttattctaagca

SEQ ID NO: 963115 - DNA, 120 bp, Artificial Sequence
  ENSG00000280434_60 (sequence is synthesized)
tgataagaagcagttggagggttttagttgtggtgggagtggaggggggaaacaaatgatcctgtttgcacttggaagggctcactctgcctgctggggagaagggctcaggggccagga

SEQ ID NO: 963116 - DNA, 120 bp, Artificial Sequence
  ENSG00000280434_61 (sequence is synthesized)
gtggagtaggaggctgcagctgctcccaggcgaggggcagtgaggcgtgagcaggacatggccaccgtcgcgggggaagtggttggattcacaggtgacatttgccagtagacaaggagt

SEQ ID NO: 963117 - DNA, 120 bp, Artificial Sequence
  ENSG00000280434_62 (sequence is synthesized)
gtgggaacagggagaattcaggacgcctcaagtcctaggacgtggcaggtgcagatgccagatgccatctatgtgtttcatatgagaaggtaaaaagcaggtggaagggaccctctgcag

SEQ ID NO: 963118 - DNA, 120 bp, Artificial Sequence
  ENSG00000280434_63 (sequence is synthesized)
cctctagtccacgctgttctggttgttcccaagcgctcttgctcgccttggtttggccgggactgatcatcagggtcagccctttcattctggtaggaattggaaggattctaggcaggt

SEQ ID NO: 963119 - DNA, 120 bp, Artificial Sequence
  ENSG00000280434_64 (sequence is synthesized)
gtgggagttgaggctgaacctcctgagggatcagaagctggcagggccctggattagggcagcaccacgggtttccataaacgctccttcgtgtctctctttgcatgtcctcagagcggg

SEQ ID NO: 963120 - DNA, 120 bp, Artificial Sequence
  ENSG00000280434_65 (sequence is synthesized)
atgccttcgacacgctgttcgaccacgccccggataagctcagcgtggtgaagaaggtgagctattggtgggatgttggatgtgctctcccctggctcgcggctttttgacagcacaaac

SEQ ID NO: 963121 - DNA, 120 bp, Artificial Sequence
  ENSG00000280434_66 (sequence is synthesized)
gccccgctgggaagaaggtgggaaaatgtttggaatctcagaaatgtttgccacatggattgaaatgtaattacagtcaaaaacctaaccacagtgcataaaatcagcgccttttaactc

SEQ ID NO: 963122 - DNA, 120 bp, Artificial Sequence
  ENSG00000280434_67 (sequence is synthesized)
aacctcgctgctccctgggtgtcttcctgcccgcccgctccgcttctgttaagtgaattacccagcccccatttctttctgactcgagaccttttttcaatgtggaaatgtttttaagca

SEQ ID NO: 963123 - DNA, 120 bp, Artificial Sequence
  ENSG00000280434_68 (sequence is synthesized)
tgtcagcctgctgctctcgctggcctcatttaccatctacagcctgcccagtaaacacgcaggcctgtgcggctgagctgtgccatacatggatttggcccgtttccctccagacagaga

SEQ ID NO: 963124 - DNA, 120 bp, Artificial Sequence
  ENSG00000280434_69 (sequence is synthesized)
atgggccctcactagcccaggcagcctgctggtcaatctgtggatggaaaaatctccgaggctctggagttgggggctgggtgtgatcagcttctgggggatctgccagggaggcttgtt

SEQ ID NO: 963125 - DNA, 120 bp, Artificial Sequence
  ENSG00000280434_70 (sequence is synthesized)
cccgtcaaaaggaactggagcccactggctgctcattaacttatccgagtgcctgcaggcatcccattcaggaggctgctgcatccctccttcccataacatcggaggagcgctcatttc

SEQ ID NO: 963126 - DNA, 120 bp, Artificial Sequence
  ENSG00000280434_71 (sequence is synthesized)
aacccatggtgcaggcaagagagttctcctttgtctaggacagcttacccaaacagctttcttagtgcaagacttgtcagaacctttaataggctgacctatactgtacttctccaagag

SEQ ID NO: 963127 - DNA, 120 bp, Artificial Sequence
  ENSG00000280434_72 (sequence is synthesized)
ggagcttggtaggaagcatttttcaaacttgtttgtttatagtgggatttatttatctatcaattttggggtaagacgcattgtattttagtggaacccacttttggaaaatgttggcct

SEQ ID NO: 963128 - DNA, 120 bp, Artificial Sequence
  ENSG00000280434_73 (sequence is synthesized)
gggtttggacgatgagatcattcatttttggaagcattttgcaaaaggctgttggaaccgtgctaatggtccttctgggacaaagccttcctagcactcttgggtggtgagggatatact

SEQ ID NO: 963129 - DNA, 120 bp, Artificial Sequence
  ENSG00000280434_74 (sequence is synthesized)
tggagcatcagagtcccccacctccacctcgtcacatgtggcccccagggaccctgacagaaccggttcagggaatgaatcaaatccagcttccccacttatcagctgtgtgacttctgg

SEQ ID NO: 963130 - DNA, 120 bp, Artificial Sequence
  ENSG00000280434_75 (sequence is synthesized)
cgaagggcgagattataccccccagcctcagtttccccatctgtcaagtggggacagagatgttacccacctctcagggcactgtgaggataaactgggattctctctgtgcatgggctt

SEQ ID NO: 963131 - DNA, 120 bp, Artificial Sequence
  ENSG00000280434_76 (sequence is synthesized)
agccggcagcgtatagtcactggtagcattgagaatggtgtggcctgagattgctttcatctctcggtagataccatgttaattcattctgcgaaagacacattttcggcactggagcca

SEQ ID NO: 963132 - DNA, 120 bp, Artificial Sequence
  ENSG00000280434_77 (sequence is synthesized)
ccagcaaggaagaagacagaatcctttgatttgcctggtagcttcccactccagcctgtcccttcctcacctccacattgcaagtttaggtgtctgtagctctctgtgccccagaatgaa

SEQ ID NO: 963133 - DNA, 120 bp, Artificial Sequence
  ENSG00000280434_78 (sequence is synthesized)
gtcaggggcccctgcccacctctgcaggtttctccctgggtcgtcccctcctactccttcccatcccacccacatccagccacagcctgaagaccccaaagggtttgcagatgtgtctgg

SEQ ID NO: 963134 - DNA, 120 bp, Artificial Sequence
  ENSG00000280434_79 (sequence is synthesized)
gtgcccactcggctcactctcaccttgcactggcccaccctcaggcccagctccaatgctccctctccatggtcttaacgggggtccgcacacccattaatggctcatgaaatctccctt

SEQ ID NO: 963135 - DNA, 120 bp, Artificial Sequence
  ENSG00000280434_80 (sequence is synthesized)
gcattgcgtgtttccctgtagtgccctatctcttgacttctccgtcccaccactacacgcatatggagaattacatcacaggccctttggcgggggccaggggtggagctctctgtgttt

SEQ ID NO: 963136 - DNA, 120 bp, Artificial Sequence
  ENSG00000280434_81 (sequence is synthesized)
ctgtgtttgtgtccttagcaccaagcagcatgcctggcacatagtagctgctcagtaaatttgagcagaatgggtaagaaatcatatcatgggcaggctgggcgcggtggctcacgcctg

SEQ ID NO: 963137 - DNA, 120 bp, Artificial Sequence
  ENSG00000280434_82 (sequence is synthesized)
acaaaacaaaacaaaacaaaacaaagaaatcatgtcatgggcagtggtggatgatattgagtttctatcaaagttggctttggtcactgaggaattacaggtgacaggttttaagcttgt

SEQ ID NO: 963138 - DNA, 120 bp, Artificial Sequence
  ENSG00000280434_83 (sequence is synthesized)
aattacaggtgacaggttttaagcttgtgccggagagaagccagtgccccttggtacttacataatagggctcagagagatcaccctgggtggatctccccatgtattgcaaatcgatag

SEQ ID NO: 963139 - DNA, 120 bp, Artificial Sequence
  ENSG00000280434_84 (sequence is synthesized)
tgccattgcactctagccggggcaccaaaagctcggatgatcctcagtggtctggggtgcaggcttcaaacctgtagctgtctagtgacagagtggttcaattccacctttgtaggcccg

SEQ ID NO: 963140 - DNA, 82 bp, Artificial Sequence
  ENSG00000280434_85 (sequence is synthesized)
ggtgtggctcaaggcagcactttcctcagtcttctgagtatgccgtttattgttccaggtcacacctaagatacatttgcaa

SEQ ID NO: 963141 - DNA, 120 bp, Artificial Sequence
  ENSG00000280434_86 (sequence is synthesized)
ccgtttattgttccaggtcacacctaagatacatttgcaaatgtaatgatcctcccctggcagtttcatctttcttaagagcacagggtgctctccagtatgattgttaaatatgtcatg

SEQ ID NO: 963142 - DNA, 120 bp, Artificial Sequence
  ENSG00000280434_87 (sequence is synthesized)
cgtgcacggattggcatatgtgtgcatgggttggtgagcagagacgtgtagccaggatagatgtgggcattatgccatgaaaactaggggctactgtcaggatattgagtttgaaacatg

SEQ ID NO: 963143 - DNA, 120 bp, Artificial Sequence
  ENSG00000280434_88 (sequence is synthesized)
ggctttttattttagcaaacaggagatgatgaaagcgtttcacagagctggggctggcaaatgtcaagcctgcccctccagatgggacctgcatgcgggccattcatggctcctgtgtct

SEQ ID NO: 963144 - DNA, 120 bp, Artificial Sequence
  ENSG00000280434_89 (sequence is synthesized)
cttttattcttggcagtctctcatcacttttgtgaacaagcacctgaacaagctgaatttggaggtgacggaactggagacccaggtatgtgctgctttggcttgaaggatcctttgtcc

SEQ ID NO: 963145 - DNA, 120 bp, Artificial Sequence
  ENSG00000280434_90 (sequence is synthesized)
accgccattttcagtcagtgttttgatcccaggtggggcgcgtgaacaaagctggcgccattttgttcatctcacaaggaactcccgtggtgcaggcagaaataaccaccgtggccttct

SEQ ID NO: 963146 - DNA, 120 bp, Artificial Sequence
  ENSG00000280434_91 (sequence is synthesized)
cagcccctctgtcttcctttcctggggctgctgccacaaagcaccacaaacctagtggctgaaacaacagacctttgtgtcctcgaagtgctggaggcctgaagtccaaaatcaagatgg

SEQ ID NO: 963147 - DNA, 120 bp, Artificial Sequence
  ENSG00000280434_92 (sequence is synthesized)
ggcctgggtgggttccctccaaggctgtgagggaggagctgttcctggcctccctcccagcttctgtggttttgccaggatctttagcattccttggcttgtacacacatcactcccttc

SEQ ID NO: 963148 - DNA, 120 bp, Artificial Sequence
  ENSG00000280434_93 (sequence is synthesized)
tttgccttcatcttcatgtggtgtcgtccttgtgtgtgtgtctctgtgtccaaatgtcccccttttatcaggacgtggtcatgttggattagagcccacccatggcttcatcccaacctg

SEQ ID NO: 963149 - DNA, 120 bp, Artificial Sequence
  ENSG00000280434_94 (sequence is synthesized)
cacccatggcttcatcccaacctgactgcatctatgtaaaccctgtttccagatacggtcacattcagaggtcctggtgattagggttccactgtatcctttttctttcttttttttttt

SEQ ID NO: 963150 - DNA, 120 bp, Artificial Sequence
  ENSG00000280434_95 (sequence is synthesized)
gggagacacaaaaccccaaaacacctgagtggtgttattcaacccataacacactccagggctccaccccagcccaacacagggcctttgcacacgcagttcctctgtctagaacgtgct

SEQ ID NO: 963151 - DNA, 120 bp, Artificial Sequence
  ENSG00000280434_96 (sequence is synthesized)
ggccccttcagcctctgctcagtgctgctgtcacactgtggccaggacctagcaaatgtccccctggtaggtatgtacaacacatttcttctgcaataagtatatcaagtctacttcccc

SEQ ID NO: 963152 - DNA, 120 bp, Artificial Sequence
  ENSG00000280434_97 (sequence is synthesized)
agccccgacccctactcaaagctaaaggagcatccttaaattatatttttgggcactccgagagcattaaagacaaaatatgattttcccaggattagcagggtgcttgaatgcggaggt

SEQ ID NO: 963153 - DNA, 120 bp, Artificial Sequence
  ENSG00000280434_98 (sequence is synthesized)
ttttgagctcttggtacagacatccctaatgcacagctgatccttcttaaaccccaaggtgaatgcattcattcccttctctttctttaactttcctcatttgcttttctaattaaaaaa

SEQ ID NO: 963154 - DNA, 120 bp, Artificial Sequence
  ENSG00000280434_99 (sequence is synthesized)
ctaattcaggttcattgtagaaatgtctgaaaatgcagataagcaaaacaaataaaaatcacccataatcccgtcacccggagatgaatgcacagagggttttgttcaggccttttctct

SEQ ID NO: 963155 - DNA, 120 bp, Artificial Sequence
  ENSG00000280434_100 (sequence is synthesized)
acacatatagcgagtcatggacagtgtgggtctgtatataaaagcatcacggtctgtttttaatgtatatatttatttgtgtatcgttggccaacacatttcttattttccgcagtttac

SEQ ID NO: 963156 - DNA, 120 bp, Artificial Sequence
  ENSG00000280434_101 (sequence is synthesized)
aaatgttgcacatttagcctcagattattttctgtttgagacgttagcaccccagaagccactgaggtgaaaagtaaaaatcttcctttctctttttctggagacctcccccttcagact

SEQ ID NO: 963157 - DNA, 90 bp, Artificial Sequence
  ENSG00000280434_102 (sequence is synthesized)
tcttcctttctctttttctggagacctcccccttcagactctccaggggcagctaactgcagttcatggttggatgtgtatttttctaga

SEQ ID NO: 963158 - DNA, 120 bp, Artificial Sequence
  ENSG00000225000_0 (sequence is synthesized)
ttttttttttttgtattttagtaaagacagggtttagccatgttggccaggctggtctccaactactggccacaagcaatctacccatcttggcctcacaaagtgcagggattacaggta

SEQ ID NO: 963159 - DNA, 120 bp, Artificial Sequence
  ENSG00000225000_1 (sequence is synthesized)
tgaaccaccatgcccagcctggtgagggttttacttaatgaaactttcgcttcaattatttgtatgtgtgtagataattataatttagaatttgaggtgaggaacaatgactcacaccta

SEQ ID NO: 963160 - DNA, 120 bp, Artificial Sequence
  ENSG00000225000_2 (sequence is synthesized)
cctactcacttattatttaattttttcattcaactagtatgaagtagggatttgttgaactcctaattcatatcatggtagacatttggtctaggcgctaggaatacagcagttccaaaa

SEQ ID NO: 963161 - DNA, 120 bp, Artificial Sequence
  ENSG00000225000_3 (sequence is synthesized)
caaattctctgcctctgtgaactgtatgttctaatgggggagatcgattgcaagtaacaaaacaacaagccttgctagttggtgataaggactgtggagaaagcagggtaaggggaaaag

SEQ ID NO: 963162 - DNA, 120 bp, Artificial Sequence
  ENSG00000225002_0 (sequence is synthesized)
agactgtagtatctcactctcagcaaaaaggcccccatcaccagatacttgagggaaagcttctaacgtgaaaaagaccaaaacaaaaagcagtaaatgaacacaggaaagaaaaaacaa

SEQ ID NO: 963163 - DNA, 120 bp, Artificial Sequence
  ENSG00000225002_1 (sequence is synthesized)
gtctccaatttccaactgccacaaacaaagtaggaaatttctgtaggatgaagatcctgaagtgtgatggagttgactaagtggtggcagagtgctctccagaattgctaccccaatcta

SEQ ID NO: 963164 - DNA, 120 bp, Artificial Sequence
  ENSG00000225002_2 (sequence is synthesized)
cacttccatcatggtactctgcagttcctgtatgattatcatatacctgccacccttagcagtatccagcttttcaattctgactttactgagaggaataaagtaatattttatattttc

SEQ ID NO: 963165 - DNA, 120 bp, Artificial Sequence
  ENSG00000225007_0 (sequence is synthesized)
ggatcggacggcactgtgtgctctaggcagggacagctgaggggccaatgccctgcccctcccagccagaggaggatgcccccatctgttcactgcaccctccagtgggaaacgagcaaa

SEQ ID NO: 963166 - DNA, 120 bp, Artificial Sequence
  ENSG00000225007_1 (sequence is synthesized)
ctttccaccagcagacacacaacaggctggatgtggagagaagcggatcggcggaagaagacacaagcggctggacgtcaaggggagcacgctggcggaagagcacagcgacagaagagc

SEQ ID NO: 963167 - DNA, 120 bp, Artificial Sequence
  ENSG00000225006_0 (sequence is synthesized)
agaatgccgattcctcactcttcatcatttctttggtatagaagaaaatatataacgtaacctacatgaattttttcactggccctctaacattataagacagagcaagtggagtaactc

SEQ ID NO: 963168 - DNA, 120 bp, Artificial Sequence
  ENSG00000225006_1 (sequence is synthesized)
atccactggggagggctacactgaggaaaaaaccctaaaaatttgcagaggtgatccttcaagaattcagcagaatcgttttcaatgtatgcatgtaagaaaactatgcatggctgggag

SEQ ID NO: 963169 - DNA, 120 bp, Artificial Sequence
  ENSG00000225006_2 (sequence is synthesized)
atgaggagagttcgagtactggattctcaaccaggggatattcaccaccactctctcccacccccaccagttcttacagtgaacacattttgcaccaactgtgctctctgcctgggattg

SEQ ID NO: 963170 - DNA, 120 bp, Artificial Sequence
  ENSG00000225006_3 (sequence is synthesized)
ccttgatcattgtcttcatgtttttatctttcctcccctgttgcttgattagtgtggatcccaacatttaaggacactggatggattcatcgcctaaatttagccacctctcaggtaaat

SEQ ID NO: 963171 - DNA, 120 bp, Artificial Sequence
  ENSG00000225006_4 (sequence is synthesized)
gagaagcaagtttatgaccaatattagccaactggtaccaggctacatcattggttggactcttgaaaagaaagcttattggtagatgaagctgaaaagatgcgagggtgggaactgctg

SEQ ID NO: 963172 - DNA, 120 bp, Artificial Sequence
  ENSG00000225006_5 (sequence is synthesized)
tgattacctagcaaacataacatgacattctgtggagaacaacggcatctttgagaaccaacaagaagatgaaaagggggagcatgtgctgacacagatgtgtaccactctccagtgatc

SEQ ID NO: 963173 - DNA, 120 bp, Artificial Sequence
  ENSG00000286879_0 (sequence is synthesized)
gaatttgggggttttcctttttgctcattacctccttactgcagggtgttctaaccaggagcccaggatgcagtttgtgtactgtggggcagtttgttctaacaatttggcaagcttgtg

SEQ ID NO: 963174 - DNA, 120 bp, Artificial Sequence
  ENSG00000286879_1 (sequence is synthesized)
cccctttaagggagactatgatcatcctaggtcagaattaataaagataccagattctatcctatggaagagctaaggcagggattgggtgaaaaaagaagaaaaaaatctcagtgaatt

SEQ ID NO: 963175 - DNA, 72 bp, Artificial Sequence
  ENSG00000286879_2 (sequence is synthesized)
gggattgggtgaaaaaagaagaaaaaaatctcagtgaattccaagtaaagtagaaaacatcaacaaaaacaa

SEQ ID NO: 963176 - DNA, 120 bp, Artificial Sequence
  ENSG00000286879_3 (sequence is synthesized)
gaggtggaggttgcagtcagccaagatcacgccagtgcactataacctggtgacagagcgagactccatcccctgcccgccaaaaaaaaaagcaatttcaagacaaactcagtaatggag

SEQ ID NO: 963177 - DNA, 120 bp, Artificial Sequence
  ENSG00000286879_4 (sequence is synthesized)
ggagagcaaaactatataaaaggagacagagaatttctgtgtctggctgtctggctttaatcactctctatgttggtaatgtcaaaatgtgtacaccccagacctcttttctaagctcca

SEQ ID NO: 963178 - DNA, 120 bp, Artificial Sequence
  ENSG00000286879_5 (sequence is synthesized)
gactaattttagagactttggtgcctcagactttaagactgaactcttattatccctctttttaatgcctttatcccttgttcttcccctgactttccaaactcagtattttgcagaaac

SEQ ID NO: 963179 - DNA, 120 bp, Artificial Sequence
  ENSG00000286879_6 (sequence is synthesized)
attcaatccattgtttgagctagaagcagagtggttgagtcatacttgattctttccacttaattcatgccagtagcaaattcagtagcaagtattgctgtcaaaagcttgtctcaaaca

SEQ ID NO: 963180 - DNA, 120 bp, Artificial Sequence
  ENSG00000286879_7 (sequence is synthesized)
tcatcaccttttcctggctctctaatgaaccagtctagtttctttccattaattcttatctccttccaatcatttctccactaacagacttacttatctgattataacttaataaagatt

SEQ ID NO: 963181 - DNA, 120 bp, Artificial Sequence
  ENSG00000286879_8 (sequence is synthesized)
tactgcgcaaaactcttcattgatttttcattacaattaaaacacatccaagttatttattaggcactgtaaattccttcattgtttggttcttgatgaggtcttcaatttttcattttg

SEQ ID NO: 963182 - DNA, 120 bp, Artificial Sequence
  ENSG00000286879_9 (sequence is synthesized)
ccactttgttctcaccccaagaggatgtcaaacttacattctttcagttccttgagtaagcccagttctttgttgctttagggcttctgcttaggttgtttctactgcctgaaatgttat

SEQ ID NO: 963183 - DNA, 120 bp, Artificial Sequence
  ENSG00000286879_10 (sequence is synthesized)
tttttggccacccattaagtaggaactttgagataattatttttgttacaaagacacatgttttatttaaaaccaatgagagaatatttgttcatatttagaaaaaacaacgtaatcatt

SEQ ID NO: 963184 - DNA, 120 bp, Artificial Sequence
  ENSG00000286879_11 (sequence is synthesized)
taaaaaatcaaaactacaattttttcttaattttgaacatttgtgtaataattgattaaatatgtcaatatctaaagaaatagtcaagttttcccatgaatatttgtagtcctctattgc

SEQ ID NO: 963185 - DNA, 120 bp, Artificial Sequence
  ENSG00000286879_12 (sequence is synthesized)
ttatattttacaatatatccaacaattgctgtggtttaagtaatatcagtttgacctttattttgttttaaaaacatatgtgatattatctgtgacagatatcaaaggataaaataaaac

SEQ ID NO: 963186 - DNA, 120 bp, Artificial Sequence
  ENSG00000286879_13 (sequence is synthesized)
tgttttgttactattaccattaaaaaagtaaaaggaagcaaaattgtctcataggcttttcaataaaaaattctttaagttaatatttaaagctaaattttatttggagatgcttttcca

SEQ ID NO: 963187 - DNA, 120 bp, Artificial Sequence
  ENSG00000286879_14 (sequence is synthesized)
taatacaaaattattagagactttaaatctctaaaagcggggcaggtgtggtggttcacacctgtaactttgagagaccagcagtttgagagtacaaggcaggtgaatctcttgagccca

SEQ ID NO: 963188 - DNA, 120 bp, Artificial Sequence
  ENSG00000286879_15 (sequence is synthesized)
tttgagaccagcctggacaacatggagaaacctcatctctgcaaaaaatataaaaaattagctgggcatagtagcactcacctactcagaatgtaaactgggacagtatgaagcaccact

SEQ ID NO: 963189 - DNA, 120 bp, Artificial Sequence
  ENSG00000286879_16 (sequence is synthesized)
cactatggaggtattcaagataagggtcaagttatgaattgaaaagtttgactaaggagatcatctgatggttatgtaatgttacctttcttctgagagcacaatttaaatggatattat

SEQ ID NO: 963190 - DNA, 120 bp, Artificial Sequence
  ENSG00000286879_17 (sequence is synthesized)
gaatgaatgaggaatattgccttttccattttcataggaattatcaacgaatttcacccttcacccagtttcaatgagctcacctatgaatgtaaactagaaatcacaagtcccatgtga

SEQ ID NO: 963191 - DNA, 120 bp, Artificial Sequence
  ENSG00000286879_18 (sequence is synthesized)
gaagaaaagacctggggagccatgtaagagtggggatgaagtgaggagacaacatccttatcaatgtctgacttctatacttttcagtccttaaggctttgctttcaatctgccctgtgg

SEQ ID NO: 963192 - DNA, 120 bp, Artificial Sequence
  ENSG00000286879_19 (sequence is synthesized)
ggatccccgagaaatcttggaagctgtgttactggcgatgatgggacaagagattggacacacctcgttataccccctcgtcactaactgacattaagtattgcttcttatggattaaac

SEQ ID NO: 963193 - DNA, 120 bp, Artificial Sequence
  ENSG00000286879_20 (sequence is synthesized)
agaaacgagccattctgaaagactccacaccaatatcaacaaactccctgatgctttccctccctgtctgcagtttcaacacaactaaccagtacttctctcttataagaccatcaacca

SEQ ID NO: 963194 - DNA, 120 bp, Artificial Sequence
  ENSG00000286879_21 (sequence is synthesized)
ctgagtggttctggcaagtctatggaggatgcacagtgaggtttttttttgtgtcctgtttttcaccttttgacatcagagggccaaaatctctaccctcaaatcatgctaatgctgcca

SEQ ID NO: 963195 - DNA, 120 bp, Artificial Sequence
  ENSG00000286879_22 (sequence is synthesized)
tgggacccatggagaggcatgaagctcaattgtacatatgcatgcttgtcctttcataaatatgcattactcctcttatagcttatgaatatgcatatttggccaccccattcagcataa

SEQ ID NO: 963196 - DNA, 120 bp, Artificial Sequence
  ENSG00000286878_0 (sequence is synthesized)
agactccgggtttctaagcagatggagtgaacagctgactgagaagctcaagcctgaagcaggtggcggattctcttagcagcaccaaatcaccctgtcaggcagcccagccagggcagc

SEQ ID NO: 963197 - DNA, 120 bp, Artificial Sequence
  ENSG00000286878_1 (sequence is synthesized)
tcaggagtgggccacagagcaggacctgccaggacgtccagagagtgtgggtggaagctgcttcccagtggagcctggccagggggcgactgccagacagtgaggcggatgagtcagccc

SEQ ID NO: 963198 - DNA, 120 bp, Artificial Sequence
  ENSG00000286878_2 (sequence is synthesized)
tgaaagcgatcctggccatgacctagtgggagaggagagaacagaaggggcagtcaggaactgacagaagcttgattgtaaagagtgttaactcttcaaggaaaaaaaattaaaaatatt

SEQ ID NO: 963199 - DNA, 120 bp, Artificial Sequence
  ENSG00000286878_3 (sequence is synthesized)
ttttaaagaaaatgaaggcccagatggaagaggcccccacctgtaacgccaaggtgagctcatccccaggtaccacaatgacctgaggtgcttgtaaaagatgccgctctcttggtgctt

SEQ ID NO: 963200 - DNA, 120 bp, Artificial Sequence
  ENSG00000286878_4 (sequence is synthesized)
ggctaggagcaagctatggcatggagaacagggatagacccacctgaaaatctggacctgcttcttcgtggatgaaggaatgtgcacccaggaggccaggacccctggtcacctgcatga

SEQ ID NO: 963201 - DNA, 120 bp, Artificial Sequence
  ENSG00000286878_5 (sequence is synthesized)
aaggtttgaggtggtgccgcacattccagaaggtgatgtggtctcagatgatgcccatgggcactgtcagggtgggtccaggactgcagctgcctgggctgtttattctgcaggcagaca

SEQ ID NO: 963202 - DNA, 120 bp, Artificial Sequence
  ENSG00000286878_6 (sequence is synthesized)
tgccctgggggccagtctgaagagcagctcagagaaggtgatcaagctccattttcaaaaacaaaacaaaaaagtgaagacagactaacacccagtaaacgtgatgtgatcagggctgcc

SEQ ID NO: 963203 - DNA, 120 bp, Artificial Sequence
  ENSG00000286878_7 (sequence is synthesized)
acttccagagcaccctgagagtcaagaccaaagatcaccagcagcctctgatttgaacttcagattggatctggaggctaagcattctcagcctgctctaaagctggacaggcttcctga

SEQ ID NO: 963204 - DNA, 120 bp, Artificial Sequence
  ENSG00000286878_8 (sequence is synthesized)
caccagagctggctgctggacctgaggatgcaccacaggaggctgagcctcctcccacagcggggagatggtgcccaggtgaaagacacgtgtcctgagagaaacccctcggcccatcac

SEQ ID NO: 963205 - DNA, 120 bp, Artificial Sequence
  ENSG00000286878_9 (sequence is synthesized)
tcatcacagaggggccggggaacagctcctacttttctctcaagcagtgataacatgtgatttcccaggtcaatcttgatttcagaaatgttaaaaataaatgggcctggaagacttgta

SEQ ID NO: 963206 - DNA, 120 bp, Artificial Sequence
  ENSG00000286878_10 (sequence is synthesized)
atttgagaataagacttgaaaacaagtgaaaagcagtgagaacagattttggtgcctcctagacttttctcattggctgcgcacatttagccttgaaagtaagtaagcttatatagctgg

SEQ ID NO: 963207 - DNA, 120 bp, Artificial Sequence
  ENSG00000286878_11 (sequence is synthesized)
aaaagggtcattactgagatgtctgtggtctcgaaaagtgactatatcctcttgcctgaggctgagacaagacatgtcgggtggtcccactgcatccgcctcacccaccctctggtgaac

SEQ ID NO: 963208 - DNA, 120 bp, Artificial Sequence
  ENSG00000286878_12 (sequence is synthesized)
caggcggggaagtcctcctcctgcagtggatgcacacagactctcctcacagctcagagaaaaggctgcttctgcccacatgtggcttggcaatccagggcacctgcctggggaataaaa

SEQ ID NO: 963209 - DNA, 120 bp, Artificial Sequence
  ENSG00000286878_13 (sequence is synthesized)
agtcatcctgggaggtgcttccatggtggcctctggcagaatgacaccttctcaggtacaggactccacatcccctttctgagccactggctgagttgggcgctcttgtatgagtgggga

SEQ ID NO: 963210 - DNA, 120 bp, Artificial Sequence
  ENSG00000286878_14 (sequence is synthesized)
atagaagcaaagatgttgctaacaccctgctttgaaagatgcttcctatttagactgatctcaggtctatctgaggctcgaggcaccgtaagtcaagaggagacaatgccacatgctgaa

SEQ ID NO: 963211 - DNA, 120 bp, Artificial Sequence
  ENSG00000286878_15 (sequence is synthesized)
ccagggtcaggcaggtacatgcacgcattgcaaggctgtgagggaatccttgagggagatgagaggatggaagctaggggtcaaaagaggatgcaccaacgtgaagggaaatgttgactg

SEQ ID NO: 963212 - DNA, 120 bp, Artificial Sequence
  ENSG00000286878_16 (sequence is synthesized)
ggacccacagcatcaagacaaacacatgagcaggctggagaggagccccaggtgaagcttattctgggaaaagagaatataaggggtgacttttactaaagattcagctctgaacagaac

SEQ ID NO: 963213 - DNA, 120 bp, Artificial Sequence
  ENSG00000286878_17 (sequence is synthesized)
ccagatatcatagggttgcttgtcatgcatctacatctccaacaagacatgctagaagtgatgggagcttgttacactcagacgtgtgacctggagactctgagttctaattctattcct

SEQ ID NO: 963214 - DNA, 120 bp, Artificial Sequence
  ENSG00000286878_18 (sequence is synthesized)
ttgaggcctgcagacatgtctttgtcttgtctcctaatctcctttctgtttaggaaaagacagaacaccagagccactgtcaaaatggtgaggatgggatcttgttttgtggattccacc

SEQ ID NO: 963215 - DNA, 120 bp, Artificial Sequence
  ENSG00000286878_19 (sequence is synthesized)
ataatgctaacatagcccagactgttgctttctgtctccggttccatgacttcttaatgacaaacttgttaaaatatggttttatttccaaaatttaaatgcaggtgggacacaatactt

SEQ ID NO: 963216 - DNA, 120 bp, Artificial Sequence
  ENSG00000286878_20 (sequence is synthesized)
cttaaatactgtttctaccatctattcctcctcttgtccttttgcttccactaatatctaggaatagcaaaagcataactacatgagaagtgatgcttggcttaactgcatgtgggagag

SEQ ID NO: 963217 - DNA, 120 bp, Artificial Sequence
  ENSG00000286878_21 (sequence is synthesized)
gaggaactggaaaagaaagagagcgttccattaagagaggacaaaacaacacacacagagaaagacagggacaagagacagcaacagtggaaacatcattcttcatatcttcacactttt

SEQ ID NO: 963218 - DNA, 120 bp, Artificial Sequence
  ENSG00000286878_22 (sequence is synthesized)
caacactggcttcctcagcctatgaggtatcacaccatttacagagaataaagggaggtctagaattgccgaggtttgccaaagttcacacagttcgacagtcattgaatgcaagaccca

SEQ ID NO: 963219 - DNA, 120 bp, Artificial Sequence
  ENSG00000286873_0 (sequence is synthesized)
ccactgtggaatcagcctgcataggtccaaatcccagccctgactgaatacctgtgaacaagttatatcagtgactcaggcttattatctgtaaaatggggattatagcattcctgcctc

SEQ ID NO: 963220 - DNA, 120 bp, Artificial Sequence
  ENSG00000286873_1 (sequence is synthesized)
atagggatgttatgagatttaaataccaataagtctgtacattataaaccttatcagattggtgtggtgaaaatgctcagtaactgagcctcgtgagcattagaatgttgagatcagcat

SEQ ID NO: 963221 - DNA, 120 bp, Artificial Sequence
  ENSG00000286873_2 (sequence is synthesized)
gaagttagcctgtatactgggcatacacattcttctggatttgctccttttgtgagcaatcaatgatgagctaaaggcatttgctaactagtaggaatgaaataaggtttcagacaggat

SEQ ID NO: 963222 - DNA, 120 bp, Artificial Sequence
  ENSG00000286873_3 (sequence is synthesized)
cttggtgggtgatgtagattttatctgtcccatttgtcccatttctcaactggaagtgagtctggccttggtctgcatctgtgctctccccttcacaaaaggcaggcccagagagactcc

SEQ ID NO: 963223 - DNA, 120 bp, Artificial Sequence
  ENSG00000286873_4 (sequence is synthesized)
gaccgaataaacaattgacatctaaccccagaagaagagcaaggacctgggacccagaaggaagaggctgtgagaggtacaaactgcaggcatggacatgatgcatatagaggacagcca

SEQ ID NO: 963224 - DNA, 120 bp, Artificial Sequence
  ENSG00000286873_5 (sequence is synthesized)
cactaagctttgaggcttctggaggcaacacagagtaaccatttgaatggaaatcactgaacagacacagagaaagagaaaccatccaatgacttgagggtgacaccaagtttgcctggt

SEQ ID NO: 963225 - DNA, 120 bp, Artificial Sequence
  ENSG00000286873_6 (sequence is synthesized)
agtttgcctggtggcctcaggactcctggctcactggtcccactgtctccccccgcccatcagaatacatgaaggctggtggggcacggtggcccatgtctgtaatcccaacactttggg

SEQ ID NO: 963226 - DNA, 120 bp, Artificial Sequence
  ENSG00000286872_0 (sequence is synthesized)
ttttttctttaattgaaatggacataaatgctgagactctaagagactagagcgccattcattgctattccaggaagcattcctggaggccaggtgcccaccagccagcctgcattgggc

SEQ ID NO: 963227 - DNA, 120 bp, Artificial Sequence
  ENSG00000286872_1 (sequence is synthesized)
cctgcagggtacaaagactggaagataagcctcttcctctgaatgatagatgcctacgggccccacctacttacaaagaaccctcagatgattctgtcagccaaggaaggggcctaacag

SEQ ID NO: 963228 - DNA, 120 bp, Artificial Sequence
  ENSG00000286872_2 (sequence is synthesized)
tgacttacacatctctgcaaagacactcatggaaactaccatactaatgaacatagtcctttattcatcaacgtaaacagaaaaccaaagattgcaaatatattaggaaaaccaacagca

SEQ ID NO: 963229 - DNA, 120 bp, Artificial Sequence
  ENSG00000286872_3 (sequence is synthesized)
tggaagagaagatccaagttggaccaatagaaaaattgaccttggaggaaacagagataatttaggaaagaaagattttataaaaattgtggtcactatcttcagaataatttgagaaga

SEQ ID NO: 963230 - DNA, 120 bp, Artificial Sequence
  ENSG00000286872_4 (sequence is synthesized)
tgctgcattcaagaactgagaagaggtggctatgggaaaggaacaagcaaagaacaagaaaagattcttgggaattaaaagtgggattgcaatagggaacactcaataagtgcgccaaat

SEQ ID NO: 963231 - DNA, 120 bp, Artificial Sequence
  ENSG00000286872_5 (sequence is synthesized)
aataaattggatgcagcgaaagaccaagcagttgatctggaatcaaggaatctcagaatgtagagcaagaaaaacaaagagacagcaaacataagagagtgccaaggacagacacagaga

SEQ ID NO: 963232 - DNA, 120 bp, Artificial Sequence
  ENSG00000286872_6 (sequence is synthesized)
tccagcatctgtctgattaggaaagaacagagaaaatgaaagagagagaatacccaaagaagtcacagaacaacattttcttaagctcaagaaatatgtgagtctttaagactgaaagtg

SEQ ID NO: 963233 - DNA, 78 bp, Artificial Sequence
  ENSG00000286872_7 (sequence is synthesized)
ttaagctcaagaaatatgtgagtctttaagactgaaagtgttcactgaacaaaattaaggtaaaagggttaaactctt

SEQ ID NO: 963234 - DNA, 120 bp, Artificial Sequence
  ENSG00000286872_8 (sequence is synthesized)
tcaagactagcctgggcaatatggtgagaccccatctgtacaaaaaatttaaaaattagccaggcgtgatgtcgcacacctgtagtcccagttactcagaaggctgaggtgggaggatca

SEQ ID NO: 963235 - DNA, 120 bp, Artificial Sequence
  ENSG00000286872_9 (sequence is synthesized)
agtgagaccctgcctcaataaaaagaaaaaaataagattaaacctccctcactagcattctcagttctccttactctatttattcctttttttgatagcactatataatactagcacact

SEQ ID NO: 963236 - DNA, 120 bp, Artificial Sequence
  ENSG00000286872_10 (sequence is synthesized)
acataattgtcttatgcattatgcatattatttatgacctgtctcccctgctagaatgtaagttccaggagggcaggaatctttgatttgttccctaatgaagcccagcaccttgaacag

SEQ ID NO: 963237 - DNA, 120 bp, Artificial Sequence
  ENSG00000286872_11 (sequence is synthesized)
tgccttgcaccctggagccatcagtaaagatacgtcaaattgaattaaaatccagacacatcttggtacaatttcacaactccaaatataaatgggaaatcttaaaatcttggggatttc

SEQ ID NO: 963238 - DNA, 120 bp, Artificial Sequence
  ENSG00000286872_12 (sequence is synthesized)
ctagaaagaaaaagaaacagaactttcacctgacatgaacaacattggatcctggacaacaatgaataacataacatcttcatagttagcaaggaagaaaagcttggtacaatctaaacc

SEQ ID NO: 963239 - DNA, 120 bp, Artificial Sequence
  ENSG00000286872_13 (sequence is synthesized)
ctgccgaagtaccagttatttgtaaaggcaatcgtagggcattttcagacatacaagaacttggaacatttactgttcatattccttggatgacaaaattattcaaacatattttccagc

SEQ ID NO: 963240 - DNA, 120 bp, Artificial Sequence
  ENSG00000286872_14 (sequence is synthesized)
aaaaattaaaggagggtccaagaaaaaggacaacatgggatacaagaaattgaaaccccaaagaagtgaaagaagccagcaagagattaagaggattcatcattttcagatgcccaaaag

SEQ ID NO: 963241 - DNA, 120 bp, Artificial Sequence
  ENSG00000286872_15 (sequence is synthesized)
gatttccttggaccaacatttcaaatggcatgaggatttacatttattaatattccctggctccagtcatattaattggttctttttttaatgggggttttccagtaaaaaaaaacaaaa

SEQ ID NO: 963242 - DNA, 120 bp, Artificial Sequence
  ENSG00000286872_16 (sequence is synthesized)
aacaaacaaacaaaaaaaagaaaacctgctagacaaattctaaaagagctgtaacaattggttatttagttaataatatttacatagtcacaaagctgaaatgctatttaaaagttttta

SEQ ID NO: 963243 - DNA, 120 bp, Artificial Sequence
  ENSG00000286872_17 (sequence is synthesized)
atttttgaaacaattataggcaaaacatagaaaacttacttggagttacaaaataaaatgtaaattttataaacgtttaccctgtaagaacagtaactgacaaaaattgaggtgagggca

SEQ ID NO: 963244 - DNA, 120 bp, Artificial Sequence
  ENSG00000286872_18 (sequence is synthesized)
tcctctgaatgatagatgcctacgggtatggaaaatattgtgtgtcaagtgttgtggctatctgaagggcagtgagttccaggagaacagctcaagcaactgagggaggccccacctact

SEQ ID NO: 963245 - DNA, 120 bp, Artificial Sequence
  ENSG00000286872_19 (sequence is synthesized)
gaagggggtttgcagcctacagactgatgcaatttccttagcaccaacagctgagagacatagcaggttacttcctcctccctccagacagcaaccaacatcagcaggaacagaggctgg

SEQ ID NO: 963246 - DNA, 120 bp, Artificial Sequence
  ENSG00000286871_0 (sequence is synthesized)
agaccctgacaatgccacgcatgctgcggaaactgctcagacaagagcttacaaagaagcagacaaagccagcatggaaacgggtgataagcagagatctgcggccatcaagagggagag

SEQ ID NO: 963247 - DNA, 120 bp, Artificial Sequence
  ENSG00000286871_1 (sequence is synthesized)
aagaggaggcagctgcaaagactgaggccagaaaaccaatggagagtcagaactgtttaggacattgttgaattttaacatctccagatgctggcactaaacgctggagcaccttccatc

SEQ ID NO: 963248 - DNA, 120 bp, Artificial Sequence
  ENSG00000286871_2 (sequence is synthesized)
cttcagtaaatgcaacaactggaaatggccccctatggttctcagtgtcccctggaggggtagtatcatcttccatacgccgtgtgaatcactatgactagtgtgtggatctgtgtgcta

SEQ ID NO: 963249 - DNA, 120 bp, Artificial Sequence
  ENSG00000286871_3 (sequence is synthesized)
gcatatgggtagccttctactcctgtgtccttcatacaaatatagaggaaatcgctcatctgtaagttcaatgaaaaagccgcacaatgaatccaactctgaaaaagctgaatgctttca

SEQ ID NO: 963250 - DNA, 120 bp, Artificial Sequence
  ENSG00000286871_4 (sequence is synthesized)
aaatgtacatacatatcaatgtgcatgagcatggtgtcacaacacacatctaactttgtgtctgtttgcagatgcgcatccatgatatggaccacttgtgccatttctaagtttgggaaa

SEQ ID NO: 963251 - DNA, 120 bp, Artificial Sequence
  ENSG00000286871_5 (sequence is synthesized)
tatttaatatcattcaaagccaaccaatatggcagtatgctttgaaagtgaaattctagtaacataaaaatcacatttatctgaaaatgagcaggtttccatgtgtgagtagtaaggtac

SEQ ID NO: 963252 - DNA, 120 bp, Artificial Sequence
  ENSG00000286871_6 (sequence is synthesized)
ccatgtgttgagagtgacatgtaacgtggggtttgtaaaaacctccgacaatgttgaatatataaaagacattactgaagtatgcaatgattggctccttgattcaatgagtaataggta

SEQ ID NO: 963253 - DNA, 120 bp, Artificial Sequence
  ENSG00000286871_7 (sequence is synthesized)
cctctcagactaatttgaaagccttcatttttttttgacaagctctttaatttgcacagtatcatgaattaacttgtatgtaaacatagcaatttgatgaattaaatgcattaaataaaa

SEQ ID NO: 963254 - DNA, 120 bp, Artificial Sequence
  ENSG00000286870_0 (sequence is synthesized)
gcagcagcagcagcagcagcagcaggagctaggaatctcttaattgctttgtgcttgtcaagattatgcaactttccagaattcaagatcatggaaaactgccagaaggaaatgggtctt

SEQ ID NO: 963255 - DNA, 120 bp, Artificial Sequence
  ENSG00000286870_1 (sequence is synthesized)
gccagaaggaaatgggtcttctcctctcccaaatggtcccataactagtctggccaccttgagccatccaagaggagaatgtggtcagggaccgtgactcagcttaagaagctacattta

SEQ ID NO: 963256 - DNA, 120 bp, Artificial Sequence
  ENSG00000286870_2 (sequence is synthesized)
tatctatatctacacacatgttctaccgactatgaccacaccaccatggcccatgcccatacacccacgtgtgaaccaagaggcaggtaatgtgccgatgacgacgtctacaaggtttga

SEQ ID NO: 963257 - DNA, 120 bp, Artificial Sequence
  ENSG00000286870_3 (sequence is synthesized)
gggaggcacctctcaaaaccgaatcatcatgcttgcaaactacaaaagactctttcttggtacttttcttgtttgaaagtacctacattttggggctcaagactcagaaagtcagagtgg

SEQ ID NO: 963258 - DNA, 120 bp, Artificial Sequence
  ENSG00000286870_4 (sequence is synthesized)
agagttgggtgccatgctccattctgcttttcctgaagtgcctcaaatgctaggcagagtccctgcactctccgtgataggaatctcctctgtggccaaaattgggcctccgtttttttc

SEQ ID NO: 963259 - DNA, 120 bp, Artificial Sequence
  ENSG00000286870_5 (sequence is synthesized)
accgcaggaatatacatgtcctcatggccgtctcctgcctgggcagcagcgaagcctccccagactgctctgccctgtggaagaaaaggcctaggtcctgctgttttcccagtctccttt

SEQ ID NO: 963260 - DNA, 120 bp, Artificial Sequence
  ENSG00000286870_6 (sequence is synthesized)
aggtggccatgactcgctcccattaacctgggcagaggctgtttcccatctcttcctgcatgagttacttcatggagcctcggaggaggagccctggactctgctcgcctgggattcctg

SEQ ID NO: 963261 - DNA, 120 bp, Artificial Sequence
  ENSG00000286870_7 (sequence is synthesized)
ctgttctacccactgtccacccagaagctcccttccccgggtctgacatgactttctcttctgagccaggcccagcaggaaggatgcgtttgtgttcggccctgcattcctgcagtgtcc

SEQ ID NO: 963262 - DNA, 120 bp, Artificial Sequence
  ENSG00000286870_8 (sequence is synthesized)
ctcgggtgtgtggctggaaatgatttgtgtaaggcactcagccagcctcccttttaatcactcccatactcacagacagagggaatcccagcccctcacccaggagagggaaggaacctc

SEQ ID NO: 963263 - DNA, 120 bp, Artificial Sequence
  ENSG00000286870_9 (sequence is synthesized)
cttcattttgacagggcctccctccgtggtggggtaagcagtgattctggtctccaggaaagatgcttccaagagcctctttctctgaggcctaattatgaaatcgatatcttcaggaac

SEQ ID NO: 963264 - DNA, 120 bp, Artificial Sequence
  ENSG00000286870_10 (sequence is synthesized)
ccctcctccttccctggagcttctgcaggcagacactgcccagataatgttcaaacatgcattgacccggcagggcttcctgagcaccactctggctggggaggaggatgggatcagctg

SEQ ID NO: 963265 - DNA, 120 bp, Artificial Sequence
  ENSG00000286870_11 (sequence is synthesized)
ggcctggaagaatgggcagggtttgcttaggacgtttcggggaggcagatggtgtaagctggggatggggtgaggaagggagagagttaggggcagcttgagggaaataggggtgtttgt

SEQ ID NO: 963266 - DNA, 120 bp, Artificial Sequence
  ENSG00000286870_12 (sequence is synthesized)
tggggaagagtgagtgatgactggtcagagtcccaacagcaaacagaggacacaattaaaatgggatagttccaggatagtttatttgcataggtgtgatcacagggaaaccacaaagaa

SEQ ID NO: 963267 - DNA, 120 bp, Artificial Sequence
  ENSG00000286877_0 (sequence is synthesized)
agacataatctttattacatgctaagcaatgtaccaactcctagatgattgtggctttgtttcattctcccaaaactattaagcaaatattttgcccactccgtagatgaggaaatggag

SEQ ID NO: 963268 - DNA, 120 bp, Artificial Sequence
  ENSG00000286877_1 (sequence is synthesized)
gttcttactgctagaaagtgggagagccaaaaattaacctggatcagagaagattctgggaagacagtagagtaggaagcactaggaatctgtctccccacctaggcaactgcactggca

SEQ ID NO: 963269 - DNA, 120 bp, Artificial Sequence
  ENSG00000286877_2 (sequence is synthesized)
agttaacagctacccatcccccattcccggccccatggcaggcagctgtgcacttatttctggagcagtgtgcacacagcttacaagaaccaggtgggcaaaaagaaccctgtcctccaa

SEQ ID NO: 963270 - DNA, 120 bp, Artificial Sequence
  ENSG00000286877_3 (sequence is synthesized)
ttactggggatctgtgctctgattactcattgctgcttctgatcacagaagagcagagaaagagatattaaagacttgtatattcaaaaccaaccacatatactggggaaatcagaaagc

SEQ ID NO: 963271 - DNA, 120 bp, Artificial Sequence
  ENSG00000286877_4 (sequence is synthesized)
tactatgcttagtcaggaaaaagtacaggcttagaaaaggtctgagaccttaggtttacatctcaggctggtcctcagcacagagacagtctacaaccatcaaaaaaacaaacaaacaaa

SEQ ID NO: 963272 - DNA, 120 bp, Artificial Sequence
  ENSG00000286876_0 (sequence is synthesized)
agttctgtggctttcaaatacacaagcaacaaccactacacaaaaacctatggcgcttcttgggttgggattttgagattgaaccctaagcaaagcgaacagaagacaacttcctctcaa

SEQ ID NO: 963273 - DNA, 120 bp, Artificial Sequence
  ENSG00000286876_1 (sequence is synthesized)
caatcatttccctttgtcatccttttcctggcttctgttaaggaaggggaaattgaagtcatccagctgacaatcacagttccacagatacctcaatgggctgctgcctctacctgcata

SEQ ID NO: 963274 - DNA, 120 bp, Artificial Sequence
  ENSG00000286876_2 (sequence is synthesized)
gtcttcttctggtactggaaccactctatataaattgttgatgaataagtatcctgcttgtagaaactcaggcaccaactggaagacccagaggctgtgggtcaacccacctgcatctgt

SEQ ID NO: 963275 - DNA, 120 bp, Artificial Sequence
  ENSG00000286876_3 (sequence is synthesized)
gcatctgtgacatcacagctctataaacaatgtttgtatgtttttattcagaaaacaaagatatttctaatttaaaaaaatttaaaaaaacttaaagaatgctgtcttttaaaaaatatt

SEQ ID NO: 963276 - DNA, 120 bp, Artificial Sequence
  ENSG00000286876_4 (sequence is synthesized)
ggcatgagttaagaatcacccaaatttcttttacatgcctataaaaatgatataatttgttttctttaagttactgatttactgtgtaatatttatgaattgttaaatattgcattgggg

SEQ ID NO: 963277 - DNA, 120 bp, Artificial Sequence
  ENSG00000286876_5 (sequence is synthesized)
ttggattcccaatttgatttattactttcctattatattgcttaatttagagtagtttatttagattgtcatatctacagctaactacaatcaattcacttctaattttgtaaaaacttc

SEQ ID NO: 963278 - DNA, 120 bp, Artificial Sequence
  ENSG00000286876_6 (sequence is synthesized)
agcagctctaaggattgagttagccattgccttgtaattataacgggtaactatctttttgatccttgacttggaatgaatagttgacactgaaattgctaaagaataatgtggaaaatc

SEQ ID NO: 963279 - DNA, 120 bp, Artificial Sequence
  ENSG00000286876_7 (sequence is synthesized)
cctctcacactgttcaccttcattgctgtggataatctttaacaactttattttctcagttgctctgttcaggttttttacctcttactatgttaattttgatgttagttttgctgttat

SEQ ID NO: 963280 - DNA, 120 bp, Artificial Sequence
  ENSG00000286876_8 (sequence is synthesized)
tctagtacttgttggtctgttttacagaatatgatccctttcattgctatttctaaatttatcacaaaactgtgagagaaatccattataatttaatcattttatccattacgatgtatg

SEQ ID NO: 963281 - DNA, 120 bp, Artificial Sequence
  ENSG00000286876_9 (sequence is synthesized)
aaccatattttggattattcattacttttactaatttttagccctgtatttttttctgaattttgaaatttattttgaaataaataatttccttttctcaaatgttctttggattgatat

SEQ ID NO: 963282 - DNA, 120 bp, Artificial Sequence
  ENSG00000286876_10 (sequence is synthesized)
tctcattttctgaaatcatagctaatttgtatttcagacaataaggttttaatgagcattctccattgtggaatttcgtatatttgtttaaaaagtgttcacttcacctgggaatctgaa

SEQ ID NO: 963283 - DNA, 120 bp, Artificial Sequence
  ENSG00000286876_11 (sequence is synthesized)
tttgattaagagacgagtggatagaaatagtgtggctgaacctgccatgctccttataatgcaggagattccagtggacgaccctggctggccattgctgcatggttacaatgtgaccag

SEQ ID NO: 963284 - DNA, 120 bp, Artificial Sequence
  ENSG00000286876_12 (sequence is synthesized)
acatgtgtgatgagtggttactaaatagaaccccaagacagtacagcaagaggataccagaagttacatagtcagaagctaccagaacttcatcctagcccagggagatggcttagcaaa

SEQ ID NO: 963285 - DNA, 120 bp, Artificial Sequence
  ENSG00000286876_13 (sequence is synthesized)
aaagttgcaggtgataggatcactcaccctggcattcttgcattccggcaggactttgtcctggaaaggcaggacacctgaatagccactacctgagtacctctcctgtgaggaaaccag

SEQ ID NO: 963286 - DNA, 120 bp, Artificial Sequence
  ENSG00000286876_14 (sequence is synthesized)
ggtgacccgggaaaccatggttctttgctttccgatcctggtgcattttgttgtcctttgctacaatggatttttgaattgattacagtaaaatttaactagtggtggtacatttatgcc

SEQ ID NO: 963287 - DNA, 120 bp, Artificial Sequence
  ENSG00000286876_15 (sequence is synthesized)
acagagtgatcatgtgcaccacgttttaagcctagttctctcaagacaatttcaaatgggttattcagtgaagagtgttaaagtataattttcagatacgccaaatcatgactctcaggc

SEQ ID NO: 963288 - DNA, 120 bp, Artificial Sequence
  ENSG00000286876_16 (sequence is synthesized)
aaatataaaatgagcacacgtcaaagactttaaaatttattaactaatgagggaaacagcaagatgtggctagttctaaaaaaatttaaaaactaggagtgtttataggcaatttaacaa

SEQ ID NO: 963289 - DNA, 120 bp, Artificial Sequence
  ENSG00000286876_17 (sequence is synthesized)
gtgttaaaaattgttactcttaaataaactgtttactgtccagtagactataaattttagggataatctattcctttggatgaaaattatttgcatctcttctggacaaaaatacatgtt

SEQ ID NO: 963290 - DNA, 120 bp, Artificial Sequence
  ENSG00000286875_0 (sequence is synthesized)
gcgcgcctcctcctggtggaaattaacgaggaatgtgccggaaaagactgcctgaatacaagccctgcatcttcataagaaaactaaagacacttcaaggtttctgataatctccacaac

SEQ ID NO: 963291 - DNA, 120 bp, Artificial Sequence
  ENSG00000286875_1 (sequence is synthesized)
caccctccaaagtatgtgccatcactcaaaaattgttcgataacttccaagtttcatcataaggaattggaagcttctttaaaatagggaaattactagtagctatggataaactgagtt

SEQ ID NO: 963292 - DNA, 120 bp, Artificial Sequence
  ENSG00000286875_2 (sequence is synthesized)
tattcattatttattacataaatatttttggagtatgtgatgagtgcttctaggcactgttctgagaactgaggaagcaatggtgaagaagacagacatgggctctattttcatgaaatt

SEQ ID NO: 963293 - DNA, 120 bp, Artificial Sequence
  ENSG00000286875_3 (sequence is synthesized)
tgttgttcccactactttgttaaatcaactaactctgatgtgaaaatctagatttcttttttaagtgaatttaaatattttatttttaaatacagcaaacacactcaacaatacagaaca

SEQ ID NO: 963294 - DNA, 120 bp, Artificial Sequence
  ENSG00000286875_4 (sequence is synthesized)
gcataaaaacctgtgcacctattactcagccttacaaatcctaacattacatttcttttttaatgttcttttgcatataattgaagtgtaccattggataattatgtatacatccttgaa

SEQ ID NO: 963295 - DNA, 120 bp, Artificial Sequence
  ENSG00000286875_5 (sequence is synthesized)
accatcattactatcaagaaaatgaacgtattcattattctcaaaagttttctcatgtccttttgtaatccctctattcacatgccgcccttaaaccatcccatcctcaggcaaccatta

SEQ ID NO: 963296 - DNA, 120 bp, Artificial Sequence
  ENSG00000286875_6 (sequence is synthesized)
gactaatttaaattttctagatttcatataaatagaatcataaagttggtgctcttttaatttggcttctttcactgtgcataactaatgtgagattcatccgtgttattgtaagtatcg

SEQ ID NO: 963297 - DNA, 120 bp, Artificial Sequence
  ENSG00000286875_7 (sequence is synthesized)
ataattcattcctttttatttttttataagtagcattccatagtatggatataaaacaactctgttccaaatggctctgaccttcctcctaagaccagtgaaatagcctaaacatgctat

SEQ ID NO: 963298 - DNA, 120 bp, Artificial Sequence
  ENSG00000286875_8 (sequence is synthesized)
tcttatggcaacaggttaagcacaagagcaagcaaacgtaaatcatgtaaatcctttttaagatactgcttgcctaacatctgccaatatgctataaaccaaagcaaatcacatactaaa

SEQ ID NO: 963299 - DNA, 120 bp, Artificial Sequence
  ENSG00000286875_9 (sequence is synthesized)
gccaaggtgcatggaattacatcccaaacaaagtgaaagggccctacaaagtggcatggcaaaaggcttgtgtaaaggaaggtctgaagaaatggggctattgatgccatctaccatgaa

SEQ ID NO: 963300 - DNA, 120 bp, Artificial Sequence
  ENSG00000286875_10 (sequence is synthesized)
ctgacataccaccatttctttaaacaccgcccacgaggatgttttcagtcttgtgctattacaaacaatacagcaatgactgagtacattgtcatcttccacacaggccagtatatctgt

SEQ ID NO: 963301 - DNA, 120 bp, Artificial Sequence
  ENSG00000286875_11 (sequence is synthesized)
aggataaatctttagaagtgaaattcttggttaaaggatataggtttttgtaattttgataggtgttgccaaagcactgttcagacataattgattgtaacaattatatttccaccaaca

SEQ ID NO: 963302 - DNA, 120 bp, Artificial Sequence
  ENSG00000286874_0 (sequence is synthesized)
tggcgcggcggggtcggttgcctcctcgcgacggctgcgccgggatgttccggggcggtggggtcgcctgcccaatgtcgggtgcgcgagtgacgggtggaagctggatttgtgcgcgtt

SEQ ID NO: 963303 - DNA, 120 bp, Artificial Sequence
  ENSG00000286874_1 (sequence is synthesized)
gggtgtcctcgaacctgggggcgcgggctgtgtccgcccccagcagggatgaccatgcctgggtcagtggctgcataaataaataaacgaatggggaggaaattgataaaatattaaaag

SEQ ID NO: 963304 - DNA, 120 bp, Artificial Sequence
  ENSG00000251370_0 (sequence is synthesized)
agttcacactcccttaagttaaagagatacattctttttacaacagagccttatgttttcatctggctaattcagaagatatcttgttctcttttgaccagagacaaaagaagaaaagtc

SEQ ID NO: 963305 - DNA, 120 bp, Artificial Sequence
  ENSG00000251370_1 (sequence is synthesized)
ttggaaacatccttcacagtttggggatgaatgaaggcagagaaggaaccagtgtgaagagacacgacagtttgtgtggagaaaggggttgaccatttacaaggagagagccatttccta

SEQ ID NO: 963306 - DNA, 120 bp, Artificial Sequence
  ENSG00000251370_2 (sequence is synthesized)
agacgttgcttcatcaaagcatcctggaaccccagaagagggaagagtatcaaaccgcatctgtgtgcaagaagcctggctcccctccccatgcaactggaagaccaatgagaatcagaa

SEQ ID NO: 963307 - DNA, 120 bp, Artificial Sequence
  ENSG00000251370_3 (sequence is synthesized)
aagcagtgaccacgggccatcctggagccacatgggggcagcgtcttctgggacacaggggaagcactgagaggcatttaggaaccagggatccatggtcattcttacttaaagaacaca

SEQ ID NO: 963308 - DNA, 120 bp, Artificial Sequence
  ENSG00000251370_4 (sequence is synthesized)
cccattatttacatcctatcccaatggtggcaaaataataccactgagctgaaaaggatctctacattctaccaaatcctgttattctcacatgggcttcttcaaaagtatagaaggttg

SEQ ID NO: 963309 - DNA, 120 bp, Artificial Sequence
  ENSG00000251370_5 (sequence is synthesized)
tcaatgtgaacacagtgcacttcatgactatcatatcaatccctgagtgtttactttcttctcagtgacattaacactggaacatccatgtcaaggaagtacgatctgttcttttcaaac

SEQ ID NO: 963310 - DNA, 120 bp, Artificial Sequence
  ENSG00000251370_6 (sequence is synthesized)
ctaaagaaccataaattaagtttaaattcatgtggtctgttcactaaatgtctttgcagaaggaaaagggaattggctccaaggattgcagttgctctgaaagtgcatgtggcatcaata

SEQ ID NO: 963311 - DNA, 120 bp, Artificial Sequence
  ENSG00000251370_7 (sequence is synthesized)
ctcacttctctaagtggggtcccaggacctgtggcatcagtattatctggaaacagaaatgcagactctcaggttccacctcagaacccctggaccagcttctgcatctccacagaatcc

SEQ ID NO: 963312 - DNA, 120 bp, Artificial Sequence
  ENSG00000251370_8 (sequence is synthesized)
ccaggtcctctgtgcctttaggttggagaatcagtggaataaacaccaggagtgcaaacaagatcaaagaagttacctgttgtagttcactttttcaaataattgactgaaattaatttt

SEQ ID NO: 963313 - DNA, 120 bp, Artificial Sequence
  ENSG00000251370_9 (sequence is synthesized)
tataattaatgaagctagtgatgatttggaatcccttgactaagagaagggttttaatgtaattaatctgcaaaatgatcagtttttgtgcatcactaaacctatgaagtttataaagat

SEQ ID NO: 963314 - DNA, 120 bp, Artificial Sequence
  ENSG00000251370_10 (sequence is synthesized)
tattttcctagctggttatgaagaaaataatgtcacaaaagcatctaagggctgtgccttaccaatgagccgaccctctccagtctgctttcctgtaatcatagtgactcaatttctaga

SEQ ID NO: 963315 - DNA, 120 bp, Artificial Sequence
  ENSG00000251370_11 (sequence is synthesized)
cttagaaagaaaaaacacagaaaactaacatagaggattgttctcccttctggtcacggtttatggtagcaacaggtgaaaaaggccaacagaagcaacgatttgcctcatcacattaaa

SEQ ID NO: 963316 - DNA, 120 bp, Artificial Sequence
  ENSG00000251370_12 (sequence is synthesized)
agaaacatttgctttctcttccaaaagcgtaagtagtaactatggaaaccagacaaaaacgttgaaaatgacttgcaattcacaaagagcagaacaactctatttcacccaccaaaaaac

SEQ ID NO: 963317 - DNA, 120 bp, Artificial Sequence
  ENSG00000266258_0 (sequence is synthesized)
aagagttttctcttgccatctttgcagtctctccactcctgacgtgtacagggtcagatttctgttggctgctgtggcaaatgtcacacacttagtgacttcaaataacccagatgtatc

SEQ ID NO: 963318 - DNA, 120 bp, Artificial Sequence
  ENSG00000266258_1 (sequence is synthesized)
tggagctgttcctattcggccatcttccgctttaagttttttataatctttttgggaaggaaaggccatgtgaaaacatggcgagaagacagtcatctgcaacccaaggagagagacttc

SEQ ID NO: 963319 - DNA, 120 bp, Artificial Sequence
  ENSG00000266258_2 (sequence is synthesized)
gcgagaagacagtcatctgcaacccaaggagagagacttcaccagacactgaccctgctggcaccttgatcttggacttccagtgttcagaactataagaaataaattcctgttatgtaa

SEQ ID NO: 963320 - DNA, 120 bp, Artificial Sequence
  ENSG00000266258_3 (sequence is synthesized)
ttgggtcctgtcttggtgataaagataaaactaaaggacaatcaaatctcatcaaacttctctctgaggagctgatgacgtttcagaaacagtgacaaagttcagaatcccattcttcca

SEQ ID NO: 963321 - DNA, 120 bp, Artificial Sequence
  ENSG00000266258_4 (sequence is synthesized)
tcctagatgggaaacatcaactttcctgatgatgctgaaaaagcaagatactcattttttccagccacccttgcagagccagaaagcccatgagattcaatagatgtaagactgagagag

SEQ ID NO: 963322 - DNA, 120 bp, Artificial Sequence
  ENSG00000266258_5 (sequence is synthesized)
gaaagcaagggctagtctcagcttcccacagaagacttggttttattggaggcaagttttgtcttgcttacaatgaggttatacaaagcataacaaaattcacattttgttaagtgacta

SEQ ID NO: 963323 - DNA, 120 bp, Artificial Sequence
  ENSG00000266258_6 (sequence is synthesized)
ccatatgatcactctgaattttattttacctgtcatttctcggtatcaataggttttacttccccttgttctggatttcagtgattgatgactgaatacaataaatatttattgagcgcc

SEQ ID NO: 963324 - DNA, 120 bp, Artificial Sequence
  ENSG00000251372_0 (sequence is synthesized)
ggacagggcagcttaggggaataagtctctgcagcgttgtagtgaagagagaatacgggacaactgcaggaccacagctcagccaagagctcccttgcagctgagttggccatatgactg

SEQ ID NO: 963325 - DNA, 120 bp, Artificial Sequence
  ENSG00000251372_1 (sequence is synthesized)
acagcaagccctggaatgcagccagaagtgatagaagcctctttcacaccatgctcctaaaatattccaagaaattttccaaacctactctttttagtctgtgcatctggaagtgaaagt

SEQ ID NO: 963326 - DNA, 120 bp, Artificial Sequence
  ENSG00000251372_2 (sequence is synthesized)
tttagaaagggtaaagtcacttaatggaaagggcccagatctagcccctcggagccaagctgtccaactagaaattctgcattagtatttgcgaccccagtaaaaaaaaaaaagtcccac

SEQ ID NO: 963327 - DNA, 120 bp, Artificial Sequence
  ENSG00000251372_3 (sequence is synthesized)
gagaaaatgccaagagtggatggagaggcaatggtgaagctgaggctgaagtcggaggaagctgtgaaccctgcatggggtacctgaacaccagggcaagtttctggcccagaatggctt

SEQ ID NO: 963328 - DNA, 120 bp, Artificial Sequence
  ENSG00000251372_4 (sequence is synthesized)
ctgggaaaggggccctcaacagattggaagatgcccaggcagttggggatggcaatctgctttctcaatctactgattcaaatgctaatctcatccagaaacatcctcacagacataccc

SEQ ID NO: 963329 - DNA, 120 bp, Artificial Sequence
  ENSG00000251372_5 (sequence is synthesized)
agaaatgatctttaatctgggccagtgaaattgacatatgaaatttaaccattacaatatctcaccagtgtcctcattaattgatgagttaaataaaatctttgacatgtgtgcatttta

SEQ ID NO: 963330 - DNA, 120 bp, Artificial Sequence
  ENSG00000251372_6 (sequence is synthesized)
aagatcaacagacaagagctgaaaaccctttcccaccagacacagtgccatctaaatgttctctcaaaagatagcatctcataaacaatttcaacaaaaggatgtcagcttttactttat

SEQ ID NO: 963331 - DNA, 120 bp, Artificial Sequence
  ENSG00000251372_7 (sequence is synthesized)
gtgcatgcacaaaatcacttttcaggaaaaaaaatgaccattaccgaatccatcataaaattaattacatttagttgatcacgttggctgactggttataactcttgctgtattttccag

SEQ ID NO: 963332 - DNA, 120 bp, Artificial Sequence
  ENSG00000251372_8 (sequence is synthesized)
aagtgtgtttcattttatttatcattaaaggaaaaaatattgtagttttccaatatactgtctattggtggttctcaaactccagtgtatgccacaattgccaaagaaatttaactaaat

SEQ ID NO: 963333 - DNA, 120 bp, Artificial Sequence
  ENSG00000251372_9 (sequence is synthesized)
ttctgatttacttaagctatggttttagaaacactacactctaattctaattattcatgttagttctcatgaaaatattcacattaattctaatgaaatataatgtgacaatactatatg

SEQ ID NO: 963334 - DNA, 120 bp, Artificial Sequence
  ENSG00000251372_10 (sequence is synthesized)
taagaatttcctccctgacttcattttgatatgaataggaggcagggaaatactgggtagaagggggcagttccccagcaaaggccccacctgaaccctggaaacccatggccctaaatg

SEQ ID NO: 963335 - DNA, 120 bp, Artificial Sequence
  ENSG00000251372_11 (sequence is synthesized)
ggaacaggcatttctgtttttgcacccaaatgttgccttttccaagaccattctggcctgccatgcccctatcctgtgtccatataaactccaagctccagtggcaaagtggcagaatgg

SEQ ID NO: 963336 - DNA, 120 bp, Artificial Sequence
  ENSG00000251372_12 (sequence is synthesized)
catgacagagaagcagagaatagaaggagtgtctgaacatcaggaagattttggctggggacggtcggagagagatcagctgcaggatgactgaactccaggggaagatcatcttcccac

SEQ ID NO: 963337 - DNA, 120 bp, Artificial Sequence
  ENSG00000251372_13 (sequence is synthesized)
tccatcccctttccaggtccccatccatcccactgagagccacccccatcactcaataaaatccccacattcaccatccttcaagttcgtgtgacctgattctctctggatcctggacaa

SEQ ID NO: 963338 - DNA, 120 bp, Artificial Sequence
  ENSG00000251372_14 (sequence is synthesized)
gtcaccctgactctccactgagctggaatagccatccatggacagcaactgctaaaagagcattaagtgtaatatatccctagatgctaaagtggagttggagcccaagagtgctcaccc

SEQ ID NO: 963339 - DNA, 120 bp, Artificial Sequence
  ENSG00000251372_15 (sequence is synthesized)
tgctaaagtggagttggagcccaagagtgctcaccccagctcctgcacctgcccatctgcatgctcctactcccataaggggtttgagcatgcagtggcccagcaaacaagccacatccc

SEQ ID NO: 963340 - DNA, 120 bp, Artificial Sequence
  ENSG00000251372_16 (sequence is synthesized)
tgttgcaagtcccacaacggggtcagggaactctcccgttttaatttcattggtaatttcctaaaattgactgttgattcctatgttcctttcaatggattgctcttttgaggaaattac

SEQ ID NO: 963341 - DNA, 120 bp, Artificial Sequence
  ENSG00000251372_17 (sequence is synthesized)
ccacagctcagccaagacacaaccacatgactgaagacagagatcatctgggtcagtgtttcagaaaatgttgccaagaaacttcaaatgcagattcctggacctccgtgcaaactacta

SEQ ID NO: 963342 - DNA, 120 bp, Artificial Sequence
  ENSG00000251372_18 (sequence is synthesized)
acatgtgaaggtttgttatataggtaagctcatgtcacgtgggtttgttttacagattacttcatcacccatatattaagcctagtaccgaatagttcctttttctgctcctctccctcc

SEQ ID NO: 963343 - DNA, 120 bp, Artificial Sequence
  ENSG00000251372_19 (sequence is synthesized)
ctgctcctctccctccttcaaccctccatgctcaaacagaccccagtgtctgttgttccctttatgttcatgagttctcatcatttatctctcacttataagtgagaacatgtagtattt

SEQ ID NO: 963344 - DNA, 120 bp, Artificial Sequence
  ENSG00000251372_20 (sequence is synthesized)
gacccagcattggagctgaaggaagttaagaattattgaaacatcttggctcaagcattgcctgtggatgatcacagatgaaccatttctggtgcagaaaaggctccgatgctgctttta

SEQ ID NO: 963345 - DNA, 120 bp, Artificial Sequence
  ENSG00000251372_21 (sequence is synthesized)
tgaaggaacataatgctagcttggagatcacacaattgcagacctctttccttcggttgggaaatatactgaagaacagaagatatgaggttgttgtatcctaggaaagaatgtcagcct

SEQ ID NO: 963346 - DNA, 120 bp, Artificial Sequence
  ENSG00000251372_22 (sequence is synthesized)
cttgcatcccctacaattggtgagagaagccctgacctcaatagcatgagaagacctggattctgatgcgagctccactagcagcctgctctcctgactccccagtgatcatttctcctg

SEQ ID NO: 963347 - DNA, 120 bp, Artificial Sequence
  ENSG00000251372_23 (sequence is synthesized)
gtactctggggctgatacctaccctgtcttcctgctttgcccttgaggactttagatgagcaaaatgcaagagacattcctatgaaaggtgtgtggcatcatgcaatgtgtagtatttat

SEQ ID NO: 963348 - DNA, 120 bp, Artificial Sequence
  ENSG00000251372_24 (sequence is synthesized)
aatccttttgtccactcggccttgtcacccttacaaagacaatacatctcaccttggtacccaactgccttttgcttctcagtgctagaggtgctactgctgtctataaccacacttctc

SEQ ID NO: 963349 - DNA, 120 bp, Artificial Sequence
  ENSG00000251372_25 (sequence is synthesized)
ttccttttcattctctgcttattggtacatttctaaatggagacaatttctggacagttacattgtaaggaggaaagctcttctttcaaaagttatggaaagatcagctctaagtgaggg

SEQ ID NO: 963350 - DNA, 120 bp, Artificial Sequence
  ENSG00000251372_26 (sequence is synthesized)
cagtgccattcattcattaaaccactctttatggagtgggtactgtgagcccaccactatgctgttatgcacttgaattcagcagtgaacagcacaggcaaggtccctgctcttgtgaaa

SEQ ID NO: 963351 - DNA, 120 bp, Artificial Sequence
  ENSG00000251372_27 (sequence is synthesized)
cttatatcttgagttgagaggagaacaagagagaaatagagtagaaaagaaaacaaaaataaaccagataaccacacagtgcggtgagaactgtatgtagagttctgatacaagccccag

SEQ ID NO: 963352 - DNA, 120 bp, Artificial Sequence
  ENSG00000251372_28 (sequence is synthesized)
ataggccacgactttggggagggggaaacaccaacatgcacatagtaaattccctgtcaacctgcaattgacctgggaaactgcactcctcaaaaagtgacttcatgtaggttccttttg

SEQ ID NO: 963353 - DNA, 120 bp, Artificial Sequence
  ENSG00000251372_29 (sequence is synthesized)
aatgggcacttgtgatcacataacccagtgagtgaaaagtcacttggcagtgtagagacctgtgtcttcatatctgaaatgccaaaaagtagggtttaatatgttgttttcattttaatt

SEQ ID NO: 963354 - DNA, 120 bp, Artificial Sequence
  ENSG00000251372_30 (sequence is synthesized)
atatttgtgttcatccacaagtatagaagctaaaaaagtaaaaaggatgaaaaatgcattagttatcctatttccatgattctaccctcttgcctaaagaccttctccaatttttctatc

SEQ ID NO: 963355 - DNA, 120 bp, Artificial Sequence
  ENSG00000251372_31 (sequence is synthesized)
tttgatcacttcatgtccaggatatgacatcttaggaagaagggactgggggaaagaaagcactttctgcttctgtggatataaacacacagtgttttattccctagtgcaacaaaacct

SEQ ID NO: 963356 - DNA, 120 bp, Artificial Sequence
  ENSG00000251372_32 (sequence is synthesized)
cactttgcctgcgttaattccctgtcctttgcccagtttctcctctcttggaaggcagaggcagcttctgattttgatcacttcatgtccagatgacttcaattccatcattactattcc

SEQ ID NO: 963357 - DNA, 120 bp, Artificial Sequence
  ENSG00000251372_33 (sequence is synthesized)
tgtctacttgcaatatcaatattatttatcattgtgttgatgtgtgctttcttctatcccatacatcctatcagtataaactctttcattatattgattaaccaactcagtttatggcag

SEQ ID NO: 963358 - DNA, 120 bp, Artificial Sequence
  ENSG00000251372_34 (sequence is synthesized)
tgtttctttatctgtcatcaattgattatcacacattcatcaggcactggatagaattcataggatatgccacaaagtgagaagggggatcatttgcttcagagaagacacatttactga

SEQ ID NO: 963359 - DNA, 120 bp, Artificial Sequence
  ENSG00000251372_35 (sequence is synthesized)
tcatactgcaaagagcaagctgacccctgcttgagatcttacagagaactacagaaaattcacaaaagcccccacaaaagagtctgctgtgaccatctgtcaagttgtcagctgtaaaca

SEQ ID NO: 963360 - DNA, 120 bp, Artificial Sequence
  ENSG00000251372_36 (sequence is synthesized)
actgccaaaatgctagatcacctcacaaggagctgtgaagtaacatctttgctgcctttcttacttcttccttcctggcaccaatccttgaagagccagaaaactctgccggtgaattgg

SEQ ID NO: 963361 - DNA, 120 bp, Artificial Sequence
  ENSG00000251372_37 (sequence is synthesized)
agaaggagtagaagtagtattagactaggtaataaatctcttccacccctacttcaacttctggcttcccactcacagcagactcaagctgccagaaaggaaaaaaacttcaactttaac

SEQ ID NO: 963362 - DNA, 120 bp, Artificial Sequence
  ENSG00000251372_38 (sequence is synthesized)
acaagatcaaagtttttacaaacacatgcttctgacagttaaattactaaactggggcagttttctgtgacctgaagtaacaagaaaactgtattactcaacagtgaccagaaacatcat

SEQ ID NO: 963363 - DNA, 120 bp, Artificial Sequence
  ENSG00000251372_39 (sequence is synthesized)
ggaatctgcctaacttttcacaaagaaatgaaaaggctaaacttacaaactacatttaaaaggatagagggagagaacatttaagctacttcttgactatattccacaagtcatctctgt

SEQ ID NO: 963364 - DNA, 120 bp, Artificial Sequence
  ENSG00000251372_40 (sequence is synthesized)
tcaatatatcagctgtttcttggaagagaaaatggtgatatcagggtacacgatggcttcctcaagaagaagctgtcatgcccaggccaaactcaatgacagcccttgaattcatggaaa

SEQ ID NO: 963365 - DNA, 120 bp, Artificial Sequence
  ENSG00000251372_41 (sequence is synthesized)
ttatcccaggcagaacacacatccttgtcatcactgtcaaggattactgattacactatcgcatttcatctgcacctacggacataagaaagcatcaaactacaagtcttttcatgtccc

SEQ ID NO: 963366 - DNA, 120 bp, Artificial Sequence
  ENSG00000251372_42 (sequence is synthesized)
caagctgctaaaaaggaatcatctaaaatgcctcttcctggcctcccaggaaggtgttgtagagattctcatgaagaattattattatctcttttaaataatagctcggcattaacagaa

SEQ ID NO: 963367 - DNA, 120 bp, Artificial Sequence
  ENSG00000251372_43 (sequence is synthesized)
ccatcacttaaagacagaacttatgacaccacaaatgacccagagaaaaggtagttctaaatcaatgcaaaataacaaaaggataaaaagcatatccccagagacacaccaggagatgca

SEQ ID NO: 963368 - DNA, 120 bp, Artificial Sequence
  ENSG00000251372_44 (sequence is synthesized)
cactgtgttgcatttattaaaatgcaggtgtaagcataaggcataaaatgacaatattaaaccaagagtttaaattatgtagaatattttataagattatagctttaatttcctttgggg

SEQ ID NO: 963369 - DNA, 120 bp, Artificial Sequence
  ENSG00000251372_45 (sequence is synthesized)
aaactaaggtggaaaatagtagtttcgtgagactgttcactgttgatttgaaagccatctggctaatccgtagcatttatttttttaatgaataaatgaaaatcaaaagaaggatgcaat

SEQ ID NO: 963370 - DNA, 120 bp, Artificial Sequence
  ENSG00000251372_46 (sequence is synthesized)
attattcaagaaaaagatttgtgctttgaaagttttaaaataatattgcaactccaaaattacatgtaaatccctcaaaatagaccaagtaggcacgttctcccaatctaatgtctattt

SEQ ID NO: 963371 - DNA, 120 bp, Artificial Sequence
  ENSG00000251372_47 (sequence is synthesized)
aactccattgaaacaggtgatctatttcttaatattgcctatgtatgggcaagaaatgtgggtatttgctctgttttgttttaaatagaaacttctaattgtattttctttctctgggaa

SEQ ID NO: 963372 - DNA, 120 bp, Artificial Sequence
  ENSG00000251372_48 (sequence is synthesized)
tcacacctccaaagtggtacactgtaggaaataggacaatcctaggggccatgggccttcgtgagaggtataagtcttgctccatcccatttcagatgtgcaagatgtttactctgacac

SEQ ID NO: 963373 - DNA, 120 bp, Artificial Sequence
  ENSG00000251372_49 (sequence is synthesized)
ggcctatgtatctttaagaagctcaaataatactaattcaatgccattcctaagttatcaagaggatccaacaagtcagtgagcatacaactgtaaagacaaagtaatctaaaatggaga

SEQ ID NO: 963374 - DNA, 120 bp, Artificial Sequence
  ENSG00000251372_50 (sequence is synthesized)
ttattttattctttttgttatagtgtttcaatgaggaattatatttcagtaaagaacaaggaaagtaatagaaaaaagaaagaaagtataatgctataaataaggaccacatatttctcc

SEQ ID NO: 963375 - DNA, 120 bp, Artificial Sequence
  ENSG00000251372_51 (sequence is synthesized)
atgccctgtttaccctaatatgtaaatatagagggctacaaagaacaaataacaattcaaagaaataaaggggccatttaatattgaatcacaaaggcctctgacaaaccccaaatccac

SEQ ID NO: 963376 - DNA, 120 bp, Artificial Sequence
  ENSG00000251372_52 (sequence is synthesized)
cctcctgaagcaaatcaccactttccaagacatgggataacctattgagtttctctagctcttcaaagttctttcttcttttgccttgttgtgaccacttctccaaaagagggactgaaa

SEQ ID NO: 963377 - DNA, 120 bp, Artificial Sequence
  ENSG00000251372_53 (sequence is synthesized)
gcttactatcaagtaactttgaatgtccacattttattctccctcttccttgtgacttgctcgactaaagggagattttgtttcctccattccaattctgcatcaaaataaaactgctgt

SEQ ID NO: 963378 - DNA, 120 bp, Artificial Sequence
  ENSG00000251372_54 (sequence is synthesized)
gtttcatcacttccatgtttgaagcatttgccttgatcatttgggtaagcgtaaatttttcacctgcaatttgatcattcttatttccttagcagtaattttacagttttggaagtccta

SEQ ID NO: 963379 - DNA, 120 bp, Artificial Sequence
  ENSG00000251372_55 (sequence is synthesized)
tcagaaaactaaaattgttctgaaaaaaattgccttaactttatcttccaaattttaaaaacaataggggcacatcgtggaatatgttaaaaagtgtaatttttaaaaagcagaaaaata

SEQ ID NO: 963380 - DNA, 120 bp, Artificial Sequence
  ENSG00000251372_56 (sequence is synthesized)
attttggggtttttttgttgctggtttattcttgttctttaaaatagtcaaatttgtattgcatatacatttgttatcctactttttacttactatcatgtcattcacattttcatgtca

SEQ ID NO: 963381 - DNA, 120 bp, Artificial Sequence
  ENSG00000251372_57 (sequence is synthesized)
aaaattatttgtaacaaagtttaatgctagttatagttgattattcagatataatgcctaattttacaatagtgaaatttcaattgctttgtattggtttataataaatgctagctagtt

SEQ ID NO: 963382 - DNA, 120 bp, Artificial Sequence
  ENSG00000251372_58 (sequence is synthesized)
gtccaggtaagcagcgctgggaagcacatggggggaggtcattgaagagaagagctaccatgcttccagcttcactcaggacacagactgcaaaggctcaattgtccagaacaaaacaat

SEQ ID NO: 963383 - DNA, 120 bp, Artificial Sequence
  ENSG00000251372_59 (sequence is synthesized)
cttgatctgaagcttgacaatccctatttgcagaacacttactggcattagctgaacatttgcttttctttaaaacctttctccctggaaacgtcacatgcagggtagctcacctctgtc

SEQ ID NO: 963384 - DNA, 120 bp, Artificial Sequence
  ENSG00000251372_60 (sequence is synthesized)
gagcattcaataaggtactccaaagcctaagtgaaggatgagtggagaggcaagataaaaatgtggttattcttatgacttaatatcttggaaaactcagatctgttggtgcttgattta

SEQ ID NO: 963385 - DNA, 120 bp, Artificial Sequence
  ENSG00000251372_61 (sequence is synthesized)
tttgcagatttctataatgtgagaaaactaagcagagctcacaggattaacatttctctatttttagtacacacatacacataaagcacagttactcaatgaccaaggagaaaacttcca

SEQ ID NO: 963386 - DNA, 120 bp, Artificial Sequence
  ENSG00000251372_62 (sequence is synthesized)
aaaaacctcttatgcaggagagccctgcccagattttcaggtcttgatgttcagttccattagcatagcaggtcaatatccattaagtgtagacagtccctcagacagtaagaaccactg

SEQ ID NO: 963387 - DNA, 120 bp, Artificial Sequence
  ENSG00000251372_63 (sequence is synthesized)
tgggttagtggttcagagcatggttttggaggtgcactgctgggcttggaatcctagcttgcctattcaatattatgtgactctatgtacattatttaaccccttggagcttcactctta

SEQ ID NO: 963388 - DNA, 120 bp, Artificial Sequence
  ENSG00000251372_64 (sequence is synthesized)
tctatgaagtggagaggagatgatgataatgtacctccctcacaagtatttaataaaagtgatgaacttggaaaagtatatgtaacgcactgagtgctttacaagcattagtcataccta

SEQ ID NO: 963389 - DNA, 120 bp, Artificial Sequence
  ENSG00000251372_65 (sequence is synthesized)
aattggcatttgaacactacattagaaagaaagttggagaaaatagtgggtaggctctgttgtcttaggatgagaaagtattgtttaaatgatttttaaaaagaagaagaaaataaaaaa

SEQ ID NO: 963390 - DNA, 120 bp, Artificial Sequence
  ENSG00000251372_66 (sequence is synthesized)
cacagctcagccaagatgagctcaagtgttgcaagtatctgcttaaaatgccatgtgatgctaatcatctctgcacgagcagttcatctcatctctccagtaaattgcttatcacagtaa

SEQ ID NO: 963391 - DNA, 120 bp, Artificial Sequence
  ENSG00000251372_67 (sequence is synthesized)
tttcacatacccaactcctcacacaatgcatgatgcaagtgggaatctacataaaatatctgatggataaatggagtagcactgatgcatatgagacccagtgttaaccagaggaagcaa

SEQ ID NO: 963392 - DNA, 120 bp, Artificial Sequence
  ENSG00000251372_68 (sequence is synthesized)
tcaactccaagatcaactgccaagataaaaaccaggaccaaggaaagcttctgagataaaatgatttttaagattaacgtagtggatatttccaattgttttttttatacccttcatctg

SEQ ID NO: 963393 - DNA, 120 bp, Artificial Sequence
  ENSG00000251372_69 (sequence is synthesized)
tgtcatggagtttagattgtgagtctccctgctagaagatgggtcgcaattggaagagcgctttatattccctgcgccactgccaaatgatcctagaggttaacagaaaacagcaatggg

SEQ ID NO: 963394 - DNA, 120 bp, Artificial Sequence
  ENSG00000251372_70 (sequence is synthesized)
aagcagtgtcccagagggtgctggactgagctgaccagggaacactaacagctgtccgggcagggcaaactgcccacttgagatttatggtcagaagctagatgatcctctgactatcat

SEQ ID NO: 963395 - DNA, 120 bp, Artificial Sequence
  ENSG00000251372_71 (sequence is synthesized)
tgtttcagcaatgttaatggatggaaaatttggatataatctttatattctaagaaggctttttaagtttattttaaactgagggggataaaaatagaatagaaatcatgttatcatagg

SEQ ID NO: 963396 - DNA, 120 bp, Artificial Sequence
  ENSG00000251372_72 (sequence is synthesized)
caactatgcacgaatggaaggatgcttaaaaccaaactttgtaacctaactttaaaataataataatgatctttattctcatttccctctatacataaatttgccccatataagattaga

SEQ ID NO: 963397 - DNA, 120 bp, Artificial Sequence
  ENSG00000251372_73 (sequence is synthesized)
gggccattttctttgatttaaagagtactgtaccatcaagggatatacttctaatctctgccactagaaaactgtaagatcctaagcaattatttaatctcactgcagcagagatagtag

SEQ ID NO: 963398 - DNA, 120 bp, Artificial Sequence
  ENSG00000251372_74 (sequence is synthesized)
gttagcacctcaatgtcttgtttgcctttctcttagaaagaactctcaactccttagctgagcagatggctccaagaatcaagactacatttcccaacttcttttgcagctaggtgcgcc

SEQ ID NO: 963399 - DNA, 120 bp, Artificial Sequence
  ENSG00000251372_75 (sequence is synthesized)
catggaactaaatttggaccaatgagacataaagaaaaatggtatgagacagcttctagaaaacttcctttaagaacgtgacaggttctccttatctaccctttaatatcttcctccaca

SEQ ID NO: 963400 - DNA, 120 bp, Artificial Sequence
  ENSG00000251372_76 (sequence is synthesized)
cagtggctagagttctagtcatcatcctggaccgtcctaaaaatggcaaaacagttagctagatagagtatgagtcactaacagttttttagaagccacatcaaccctggaatacaaacc

SEQ ID NO: 963401 - DNA, 120 bp, Artificial Sequence
  ENSG00000251372_77 (sequence is synthesized)
tccacccttcaataatgtgagagagaatgctatctctatcaagccaactgaactgaatcatgattgatatgcttagtctcaagtcttagttttcccttccttaaactaaagctatcgtca

SEQ ID NO: 963402 - DNA, 120 bp, Artificial Sequence
  ENSG00000251372_78 (sequence is synthesized)
agttttctgtgcaaatgtaaaattatcatttacaatgccatttctgtttcagagatcaaagtggaatctagcttcaattgtatgtttaatgccctcctgaaatctatttagtgttgccaa

SEQ ID NO: 963403 - DNA, 120 bp, Artificial Sequence
  ENSG00000251372_79 (sequence is synthesized)
ggaaggtgatacccagagttttaagtcctctcttcacgtgtacatctccacagagttaatgatcataatgtttgatctctgaggttcagcaacacagttctgactctagacttggtttga

SEQ ID NO: 963404 - DNA, 120 bp, Artificial Sequence
  ENSG00000251372_80 (sequence is synthesized)
catttagcgcaaacaggcattgtggggtattttctatgagctactggaacaccctccgccgaacagttccactagtttgactcgcgtattgtcctatgtaaaaaacaaaaatggaaaata

SEQ ID NO: 963405 - DNA, 120 bp, Artificial Sequence
  ENSG00000251372_81 (sequence is synthesized)
atacctcttgtgaaaatttactaccaaatcatcctttctttagccattctgaataaaatgatcagtatctgccataaagtttattaactaaggaaggatgcctttatttttagttctaaa

SEQ ID NO: 963406 - DNA, 120 bp, Artificial Sequence
  ENSG00000251372_82 (sequence is synthesized)
atgctatcacaaaaagtacaaaaggaaacatgccagatgaaaacaattattcaaaacaagtttggtaaaacctatgatctttaggaaataaaatattgaacttacattattttgataatt

SEQ ID NO: 963407 - DNA, 120 bp, Artificial Sequence
  ENSG00000251372_83 (sequence is synthesized)
tgtaagtaacggtgtaaaaatgttttccacattgctgaactagaaccctttccctatcatttattaaaagtctccctggattttcaggcaatttagagaaatgtaacttgcaggagaaaa

SEQ ID NO: 963408 - DNA, 120 bp, Artificial Sequence
  ENSG00000251372_84 (sequence is synthesized)
aacttataaaatatagtgttttaacaaaatttctctttttgcacactacacaaataatactgagccaacagaaactttcgtaaaagccagcatggaagtctgtctctgtattttttttta

SEQ ID NO: 963409 - DNA, 120 bp, Artificial Sequence
  ENSG00000251372_85 (sequence is synthesized)
atctctctctggatttaatgccctcatgaagcttgaatggaatatatgcatgtcacagcatggcagagggataatatatttccccctgcttcactgagcatgagttgtgtatcttgccat

SEQ ID NO: 963410 - DNA, 120 bp, Artificial Sequence
  ENSG00000251372_86 (sequence is synthesized)
cttgagagtccacagtgcagcacgtttatccctattagaaaagctcagtctaataatatatggatgctgcagccatttatgacaaatatgtaaaatcataaccttatatattctggagat

SEQ ID NO: 963411 - DNA, 120 bp, Artificial Sequence
  ENSG00000251372_87 (sequence is synthesized)
aactatgcactgacagatttttgttaaaactaggttttcaacctcaaagactaaaagggcaaataaattgattatatttgtatatttatgtagcctcaaactttaatttcaaggcagaaa

SEQ ID NO: 963412 - DNA, 120 bp, Artificial Sequence
  ENSG00000251372_88 (sequence is synthesized)
aaaagagcagtgccactgttgccacttcggccatacttggattcactttgcccaccctgagcacacagctattcagatcaaggcatatgtttataaatactgtttgattaattttgataa

SEQ ID NO: 963413 - DNA, 120 bp, Artificial Sequence
  ENSG00000251372_89 (sequence is synthesized)
gacattcagctttttatcatctcattttagaaatgaaggtcacagcaatgaaagagtatatttgtaaaagtgaccaaaaaataagcaaatatttacggttcaaatcccaacattttctaa

SEQ ID NO: 963414 - DNA, 120 bp, Artificial Sequence
  ENSG00000251372_90 (sequence is synthesized)
ttatataaccttgggcaaatttacttaacccaagtctagtctcaatttgctcacctgtaaaacggggatgataatcatacctaactaataggattgtatgtaaagtgtttagcatgtcat

SEQ ID NO: 963415 - DNA, 120 bp, Artificial Sequence
  ENSG00000251372_91 (sequence is synthesized)
tgggactcaataaatgttggctattttcatcatgactattccctcagaaccgtcgccagtatatcagtgggaaaaagtgagcataatctgtgaaagagagtaggtaggagagcaatcatt

SEQ ID NO: 963416 - DNA, 120 bp, Artificial Sequence
  ENSG00000251372_92 (sequence is synthesized)
aactgtgctctccagttactcttatctgctcccaaggggtataatgtgatgctgtctctaaacacacctgagaaagacacaagatcctgagaacagcacaaaggcctgataatccctaca

SEQ ID NO: 963417 - DNA, 120 bp, Artificial Sequence
  ENSG00000251372_93 (sequence is synthesized)
gaagtcttgttttaaccagacttaaaccgtacactccaaaatttaggtctgcatctacatctaattagtacacagaaaaacaaacaaccttacaaccaagagaaaaatggccaggggtca

SEQ ID NO: 963418 - DNA, 120 bp, Artificial Sequence
  ENSG00000251372_94 (sequence is synthesized)
cttgaagagagcaataggattagatttttttttcccctctataaccataggttatagaatttgcatctttcccatctcagatttagcatttcttggaacaaattgtgcaaaactatgtca

SEQ ID NO: 963419 - DNA, 120 bp, Artificial Sequence
  ENSG00000251372_95 (sequence is synthesized)
attagttgatcctctgtgttgataaggctatacattcattcctcaaattttttggctttgtgagtccaaagccacaacagtgaaaaataatgtttcacaccattttccataaagttaagg

SEQ ID NO: 963420 - DNA, 120 bp, Artificial Sequence
  ENSG00000251372_96 (sequence is synthesized)
attcaaataccttgccagtgttaaaatctcatatttgtaatatacctgtttctctaattaacacagcacagtcattaatatactatattatgttaggaagtcataattgcagccaagcag

SEQ ID NO: 963421 - DNA, 120 bp, Artificial Sequence
  ENSG00000251372_97 (sequence is synthesized)
aaaataattaccatctatcagcctttatgctttacaaaagcaaaattatttttcctttgttgtagaacttccccaggacaaataatagttttacagtggcaacactttcatttcatgatc

SEQ ID NO: 963422 - DNA, 120 bp, Artificial Sequence
  ENSG00000251372_98 (sequence is synthesized)
caactgccaaatgtctctataaaactgtcatatattcttctgagctcaactcacatgcagctgtttcaattttaaaatctaatcaaagagcaaatacttctcattccattgtgaacagct

SEQ ID NO: 963423 - DNA, 120 bp, Artificial Sequence
  ENSG00000251372_99 (sequence is synthesized)
ggtaataacaacagtgaaaaatatagggtctctttcaaatgtgtctccatgtgaaaacaagttatttcatatgtctctcaggtcagatctataaaacaattccttgaaattaattcctgt

SEQ ID NO: 963424 - DNA, 120 bp, Artificial Sequence
  ENSG00000251372_100 (sequence is synthesized)
cagcaaacctgtaatgaacacccactctaatgtgtattgttggacaatgtgctcttggaggtacacagcacgtgccctcaggcagcttatagatcattggaaaacaagacaagtaagggg

SEQ ID NO: 963425 - DNA, 120 bp, Artificial Sequence
  ENSG00000251372_101 (sequence is synthesized)
cacaaagggttacaaataactgtaacacaaaggcagaataagataaaggcctgaaagaaagataaacattgttacaaggttcagaggcagaacaattcaagatcatttaattagatagat

SEQ ID NO: 963426 - DNA, 120 bp, Artificial Sequence
  ENSG00000251372_102 (sequence is synthesized)
tggcatcattgaatgcaatgagaggtcggtagcacttcatccagcaaagggctgggcattcctggcaatggacacaacattatcaaagatcctaatgcaagaaagcacatgatgttttgg

SEQ ID NO: 963427 - DNA, 120 bp, Artificial Sequence
  ENSG00000251372_103 (sequence is synthesized)
ggtcaataagtagtccactgtgcttgagtcaagaatagcctcatgtaatggacttctgttgttactgctatccaggattcatttatttagcttctaggaacagccatatttttctcacca

SEQ ID NO: 963428 - DNA, 120 bp, Artificial Sequence
  ENSG00000251372_104 (sequence is synthesized)
tccttctcccttcagtggtccatagggtctgagtgaccctattttgctccaaagagagaaatgagattttcatagtacacttaattgcaatgactgatggaggagtgggtaggtagctta

SEQ ID NO: 963429 - DNA, 120 bp, Artificial Sequence
  ENSG00000251372_105 (sequence is synthesized)
atctgcccaatcagcattattagagctaatagacaagaccattgctattgtcttctgctaatgaacaaggaagtctgtgactcccggatctgctggcaatcattttgtaatgataatggg

SEQ ID NO: 963430 - DNA, 120 bp, Artificial Sequence
  ENSG00000251372_106 (sequence is synthesized)
accaacaatgaagcagaccaagagatggcaagagagaggtcagatccttctactgtaactgcagataggtgtgtctggcatggatgcttcaagggcatttcaaactcaatgtgtcccaaa

SEQ ID NO: 963431 - DNA, 120 bp, Artificial Sequence
  ENSG00000251372_107 (sequence is synthesized)
gcaaactctttatctccccattataattcccttacctatccaccaaaacaaattattttgtgttctccacacttatcaatggtgttaccatacacccagttatccaaattaaaaagttga

SEQ ID NO: 963432 - DNA, 120 bp, Artificial Sequence
  ENSG00000251372_108 (sequence is synthesized)
gagtcaaccacaattcctcctgctctgtaaattctacattagtctggatcgccaacccctgaggagtccatcttagtaataactttccattctccctctccatccctacactcctgcctt

SEQ ID NO: 963433 - DNA, 120 bp, Artificial Sequence
  ENSG00000251372_109 (sequence is synthesized)
cacgtctccccagaggcctctgagtctggagattaagaatttaatctctgctgtcagataaattaggattcacattcctactttggtccttattaattccaggatctttaacaagttcct

SEQ ID NO: 963434 - DNA, 120 bp, Artificial Sequence
  ENSG00000251372_110 (sequence is synthesized)
taatatctctaacctcagtttgctcttctgtaaaatggggatagtagttattcctacctgacagtgttgcaattaggattatgtaaaattatatgtaaaaagcttagaagagcatgtgac

SEQ ID NO: 963435 - DNA, 120 bp, Artificial Sequence
  ENSG00000251372_111 (sequence is synthesized)
acagagtaagcaaccataagtactattattcttattctgataatcttctaattaatctctcttcctccaaaccctcattattttttatcctctaaatgatttccagagttctgtaaatat

SEQ ID NO: 963436 - DNA, 120 bp, Artificial Sequence
  ENSG00000251372_112 (sequence is synthesized)
tagtgaccttggatccagaatattacttagatattactagtatctacttcataaagtctctgtgaggatggaataagataatgaactcaaatgtaaagcaactccttctttacatgagtt

SEQ ID NO: 963437 - DNA, 120 bp, Artificial Sequence
  ENSG00000251372_113 (sequence is synthesized)
atatatatgtttgtaaacttacacctcgctcagtccatatattcctccactgtgaatagaaatgtatagaaagcaagcggtctttagggtggctatttggtggttaccagacatagaaaa

SEQ ID NO: 963438 - DNA, 120 bp, Artificial Sequence
  ENSG00000251372_114 (sequence is synthesized)
agaaggtaataaaatataaattttaggacagtctttcgctgattatgccagactcctaccagcatctttccacaccagatcaatggaacagaaaattcaatcatgtagactcatagaatg

SEQ ID NO: 963439 - DNA, 120 bp, Artificial Sequence
  ENSG00000251372_115 (sequence is synthesized)
gcaagcccacagggtgaatgaactcaatatagctctttatatcgaaagccgagaaatagagaattcaggtttgtgtctcaatatgatagcctctgcatgttactataaagcaaatgtgag

SEQ ID NO: 963440 - DNA, 120 bp, Artificial Sequence
  ENSG00000251372_116 (sequence is synthesized)
cttttcccaagatagaaaactattgtgactgatttctgggacttttagaagcccctctatatgcaactgaattagatagccaaagaactcttcctaacagtggttatttctgcatcaggt

SEQ ID NO: 963441 - DNA, 120 bp, Artificial Sequence
  ENSG00000251372_117 (sequence is synthesized)
ggtagaaaatgaggatcacaattttagaaaagatcccaacactttctcactagaagttacagaaatcatcagaatgactagcataggtaaaaatcagttatacctataggttttcagaag

SEQ ID NO: 963442 - DNA, 120 bp, Artificial Sequence
  ENSG00000251372_118 (sequence is synthesized)
taaaaatatgtcttttggatttgctttttttttttttttttggttaaataaatatgtatcctggaacttaaagtaaaataaaattaaaaattaaaaaaagaaagatggacaaagtacact

SEQ ID NO: 963443 - DNA, 85 bp, Artificial Sequence
  ENSG00000251372_119 (sequence is synthesized)
ggcacgggagcaaaccagatgaatagagcctgtattgaaccccaagcaaaccacagcagccctacagaagagggacctgaccttt

SEQ ID NO: 963444 - DNA, 120 bp, Artificial Sequence
  ENSG00000251372_120 (sequence is synthesized)
catgaagatgagaaagaatcaatgaaaatatgctgaaacccgtaaggccagagtgtctcttctcctccaaatgattgcaatgtctctgcagcaagggtgaagaactgaacggaggataag

SEQ ID NO: 963445 - DNA, 120 bp, Artificial Sequence
  ENSG00000251372_121 (sequence is synthesized)
tgtctctgcagcaagggtgaagaactgaacggaggataagatgggcaaattgacagaagtaggcttcaggtgatgagtaataagaaactcctcttagctaaaggaacatgttttaaccca

SEQ ID NO: 963446 - DNA, 120 bp, Artificial Sequence
  ENSG00000251372_122 (sequence is synthesized)
aagctaagaaccttgataaaaggttaggggagttgctaactagaataaccagtttggagaggaacataaatgacctggtggagctgaaaaacacagcacaagaacttcgagacgcataca

SEQ ID NO: 963447 - DNA, 77 bp, Artificial Sequence
  ENSG00000251372_123 (sequence is synthesized)
acctggtggagctgaaaaacacagcacaagaacttcgagacgcatacacaagtatcaatagccgaatcaaccaagtg

SEQ ID NO: 963448 - DNA, 120 bp, Artificial Sequence
  ENSG00000251372_124 (sequence is synthesized)
accacttatgacacagaagactctaccaaaggaaatcaaactacagaacagcaacaaaactcaaaaaattaacatttggcttttgtgttattaaaatattttctcagcagacaataacaa

SEQ ID NO: 963449 - DNA, 120 bp, Artificial Sequence
  ENSG00000251372_125 (sequence is synthesized)
aataaggataaatgtgtttctcatgaacatttaaaaatttctgtgattgaatcagccaaccattaaattttaaattaagaaagacttatagagaatatagacaaccatctaggcaacaaa

SEQ ID NO: 963450 - DNA, 120 bp, Artificial Sequence
  ENSG00000251372_126 (sequence is synthesized)
aagattaaaagaagtattaatatgatttttatgtaatctctttataatattaatataaatgtctgcaaagtagacaagtgtaggtataccaaaacttctgtacaaaaaattaaactcaga

SEQ ID NO: 963451 - DNA, 120 bp, Artificial Sequence
  ENSG00000251372_127 (sequence is synthesized)
cagattaagtattcctaacaaatcaagcaagttgcccacagaaaatatatttttgctttcatatgtaaacacatctaaatacctattacaaaagaaaatgcaagaaaaatgctttctttt

SEQ ID NO: 963452 - DNA, 120 bp, Artificial Sequence
  ENSG00000251372_128 (sequence is synthesized)
tacattcaccccaaggtagcaataatgttactagttccacttgggatttattcacatattcattatatgaatgatgtatagatatatacatatgtagagagagatcagtttcctgaccac

SEQ ID NO: 963453 - DNA, 120 bp, Artificial Sequence
  ENSG00000251372_129 (sequence is synthesized)
tgatcacttcatgtccagtaggacctcctgcttcagactctaagcttccggagaacaggaactgcatcttttctatttcacatacccaactcctcacacaatgcatgatgcaagtgggaa

SEQ ID NO: 963454 - DNA, 120 bp, Artificial Sequence
  ENSG00000251372_130 (sequence is synthesized)
ctttatgtaactttaaaattctggaagaggaatgcaagactctgtccaaattgtgtgtttggggcaatgagaatattatatgtacagtccaaaatatatttccaaatacaggtaaacaaa

SEQ ID NO: 963455 - DNA, 120 bp, Artificial Sequence
  ENSG00000251372_131 (sequence is synthesized)
ggtcaagaagaaatacatgaattatataagtaaagaaaactgaaacacatctccaggcacaaagcaagctagctgtaatttactactataaaattcaagaattttgtaccctagcttatg

SEQ ID NO: 963456 - DNA, 120 bp, Artificial Sequence
  ENSG00000251372_132 (sequence is synthesized)
ccattaatccataaagataccaaagccttcaatataaaatgatactagaagctgtaatttaattaaggctgaggtactgtagttattaattacatgtgaaatagtaaatatttaaaatat

SEQ ID NO: 963457 - DNA, 120 bp, Artificial Sequence
  ENSG00000251372_133 (sequence is synthesized)
ttgaaaattgctcatatttcttaaaattgagtaatatgctataaatctcaaaaggcagggtaattgcagtctccgtggcaagtctgtttgtacagcaaaacctgtatagcatctctggag

SEQ ID NO: 963458 - DNA, 120 bp, Artificial Sequence
  ENSG00000251372_134 (sequence is synthesized)
aactaaggtataatctgcagctgtgtaattgaagaagatctgacacatggaactatacaagttattttcaactagcagagcttaggatatttttctttcagaataaaagtgcagaattct

SEQ ID NO: 963459 - DNA, 120 bp, Artificial Sequence
  ENSG00000251372_135 (sequence is synthesized)
ggattataattctatttctaccacactaaaatagctcacaagtgcttattctgtgttagaagcaggccttgaaatggatagtccaaatgtgtggaatttcaccactttttgacaatgtaa

SEQ ID NO: 963460 - DNA, 120 bp, Artificial Sequence
  ENSG00000251372_136 (sequence is synthesized)
tttttgattaattttccaacaccataagcaaaatgcacctgaacccatatacacagtgaatcctgggtgggaatattgatttaaatgtgtgtttgcaataagtaaacatcctgaaacaca

SEQ ID NO: 963461 - DNA, 60 bp, Artificial Sequence
  ENSG00000251372_137 (sequence is synthesized)
caaaacaaaaacattcgtaacccttcgagaaatcaccatactgctttccacaatggttaa

SEQ ID NO: 963462 - DNA, 120 bp, Artificial Sequence
  ENSG00000251372_138 (sequence is synthesized)
cccttcgagaaatcaccatactgctttccacaatggttaaactaacttacattcccaccaacaatgtacaagtgtttcctttcctctgtaaccttgtcagcaacagttactttttgactt

SEQ ID NO: 963463 - DNA, 120 bp, Artificial Sequence
  ENSG00000251372_139 (sequence is synthesized)
tttatcaacagccattctgacttgtgtgaggtggttttgatttgcatttctctaatgtcagtgatattgagccttttttcaatgcttgttgaccacatgtatgtcttttattaaaaaaaa

SEQ ID NO: 963464 - DNA, 120 bp, Artificial Sequence
  ENSG00000251372_140 (sequence is synthesized)
tagtagagaaacaaaagagcgattgatctacaaaggcaagacccagattgagaccacagtgaaccctgcaaaacagaggagcccctgggtgggaggggatataactggaactctgggaat

SEQ ID NO: 963465 - DNA, 120 bp, Artificial Sequence
  ENSG00000251372_141 (sequence is synthesized)
tgttcccacaaaaagacatgatctcgttgttgttttttttatagctgcgtcatattccatggtgtatatctaccacattttctttatccaatctgtcactgatgagcatttaggttgatt

SEQ ID NO: 963466 - DNA, 120 bp, Artificial Sequence
  ENSG00000251372_142 (sequence is synthesized)
ctgtcactgatgagcatttaggttgattctgtatttttgctgttgtgaatcatgcttaaatagacattcgtgaccgggcgcagcggctcacacctataatcccagcgctttgggaggccg

SEQ ID NO: 963467 - DNA, 120 bp, Artificial Sequence
  ENSG00000251372_143 (sequence is synthesized)
ggaaaagaaaagtgccacaaaactggggagacaagaagttcattgaagagctgataaaagctatgtgcccctttccaagaaaaaaataaggcacattcacacaaattttacaccatttca

SEQ ID NO: 963468 - DNA, 120 bp, Artificial Sequence
  ENSG00000251372_144 (sequence is synthesized)
ataggttcacagacctcagactagagatttctatcctaatgtgttcataagtcacaaatttaaaggcaaattcttatttgagtttaggaatatgaaggcaatatgttctgtcacacagtg

SEQ ID NO: 963469 - DNA, 120 bp, Artificial Sequence
  ENSG00000251372_145 (sequence is synthesized)
tgactacaactaaacgtagtatcatggaagcttcatgaaacatgaggcaggtcttccagttctaagaaacataaaagacacttgttaacaaacatgccacttccaaactttctgatgtaa

SEQ ID NO: 963470 - DNA, 120 bp, Artificial Sequence
  ENSG00000251372_146 (sequence is synthesized)
aataaagtttagcagctaattatttcctgtaattcatggaagtagccagagccgatcattttaaatccaaaagtacaagaatttaggaaggaaaatgttaagaatgggatagaaacagga

SEQ ID NO: 963471 - DNA, 120 bp, Artificial Sequence
  ENSG00000251372_147 (sequence is synthesized)
tgagtttttgtagttgatttcttatattcctgaaataaaccccaaaatctctaattttgttgataccttagtactgtgtaaagcattctgttatgcgttagtgactaattctacatggac

SEQ ID NO: 963472 - DNA, 120 bp, Artificial Sequence
  ENSG00000251372_148 (sequence is synthesized)
tgcctattatatcatatgtaataattcagcaaaacagaagaccactagcaaagtctaagcagagccagaaattccatgaagatattaagtttgctcatcgtattttatctatctgattgc

SEQ ID NO: 963473 - DNA, 120 bp, Artificial Sequence
  ENSG00000251372_149 (sequence is synthesized)
acaattagaggaatggtgagatcatgtctacaaagaaaagtgagcctctctaaagaaagatattacaataatgcaaagcattgcttcaccatcttaaaatggaatatcattgccatccat

SEQ ID NO: 963474 - DNA, 120 bp, Artificial Sequence
  ENSG00000251372_150 (sequence is synthesized)
ttaaaaagttctaggagaattaaataaactgagagtttttaaaaagactttgtccagaggcaaggatagatgagggactattaatccagactgtggccagttgcttattgtttgtaagaa

SEQ ID NO: 963475 - DNA, 120 bp, Artificial Sequence
  ENSG00000251372_151 (sequence is synthesized)
actaacacaatatttagtggcttaaagtaacaatttgcttatgcttctgtgggtcagtattttgggctgcattcatctggaacagtttcaatctatgctctatgtggtgtcaatggggct

SEQ ID NO: 963476 - DNA, 120 bp, Artificial Sequence
  ENSG00000251372_152 (sequence is synthesized)
cactcatctgtctgaggcctcagctggaacaatgtgaatgattgagatgactgagctgtctgggtctctctccacatggtctctcattcccccatagacagggctccaagaggactaaaa

SEQ ID NO: 963477 - DNA, 120 bp, Artificial Sequence
  ENSG00000251372_153 (sequence is synthesized)
caaaaccttcaaagtctcttaagacctcagctcagatctcacatagtgtcacttccactgtattatgttgatcaaaggaagctacaaagccagccaacagtggggaaataaactctacct

SEQ ID NO: 963478 - DNA, 120 bp, Artificial Sequence
  ENSG00000251372_154 (sequence is synthesized)
cttcacaggaggaactgcaaataatttgtggctgtttttatctaagaaagatactattccgtaaaactgtactacatacaatgcaagatttttttctaaatagaaaagaaaatgcatttc

SEQ ID NO: 963479 - DNA, 120 bp, Artificial Sequence
  ENSG00000251372_155 (sequence is synthesized)
attaagaaactattgacctgaatgctaaagaatgataagcgggtaaatgtactttgtgacaacttgatgagctgttgtattttgttggggataggaggtgcagaaagatggatggaatgc

SEQ ID NO: 963480 - DNA, 120 bp, Artificial Sequence
  ENSG00000251372_156 (sequence is synthesized)
tagacacatgatgtatccatttggataaattattctggtaagttccaaaagctataagaaactgttacctctaattttaataactattgttaagttgatggattagcaaatatcatgcca

SEQ ID NO: 963481 - DNA, 120 bp, Artificial Sequence
  ENSG00000251376_0 (sequence is synthesized)
agcacactgtacagatgttaccagtggagggtgtccagattcttggcattttaaacaaagaactggaaaaaaactcacaaataaagcaatgaaagaaacagatttactgaaatgaaagta

SEQ ID NO: 963482 - DNA, 120 bp, Artificial Sequence
  ENSG00000251376_1 (sequence is synthesized)
cactccacagagcaggagtgggcttcagcaagtggctcatgagcactggttacagaattttctgcgatttaaatactctctagagatttcccattggttacttgtaaattactatgtaaa

SEQ ID NO: 963483 - DNA, 120 bp, Artificial Sequence
  ENSG00000251376_2 (sequence is synthesized)
ctccagaccctattctcctgcctcacagagagatcacacgaagcaggtagacccacaagaatcatgatggccaagtctctcagtctgacctactggttatgaacacagcctttgtcattc

SEQ ID NO: 963484 - DNA, 120 bp, Artificial Sequence
  ENSG00000251376_3 (sequence is synthesized)
ctgacctactggttatgaacacagcctttgtcattcctgaccacagcttcaatgtggagaggaaacctctctgagccagccagtcagcaccaaacagactatgccagtgacccagaagca

SEQ ID NO: 963485 - DNA, 120 bp, Artificial Sequence
  ENSG00000251377_0 (sequence is synthesized)
cagtagtgaagatccctggaagagggaggccatgaagagggatgcagatacctggcaagcccacctcccttctatgccacctgccagccttctctgacattcccaaaccagggaccaaca

SEQ ID NO: 963486 - DNA, 120 bp, Artificial Sequence
  ENSG00000251377_1 (sequence is synthesized)
gtgggctgtgggctctgcggtccagttgctagtcaggagacgtcctggtggcccctgattcgtgttcacgttcacatcactgttcctgcggttctctacacattcaccttggtattagct

SEQ ID NO: 963487 - DNA, 120 bp, Artificial Sequence
  ENSG00000251377_2 (sequence is synthesized)
ctctttgcccctggtccagcatacctcttcagcttccaagtatgggtcaccttccttatgtaaatttcctcttgggactgtattttcttttaaataaaaattggccttgtccgagaactt

SEQ ID NO: 963488 - DNA, 120 bp, Artificial Sequence
  ENSG00000251377_3 (sequence is synthesized)
gctcagatgtcagtctctaaattcctaacacaaatgaacagaagacaaaatcatttgcaggattctgaaatgaagtttttcagcggaacacagagaaacagttaaattttgcaaagctgt

SEQ ID NO: 963489 - DNA, 120 bp, Artificial Sequence
  ENSG00000251377_4 (sequence is synthesized)
gaaactggagagggggctgtcctccaaatctaccaaccagagacctggaaggaattacttgcatgagattcatttctctctgtctttctctttctcccctctccccacctatctgcacca

SEQ ID NO: 963490 - DNA, 120 bp, Artificial Sequence
  ENSG00000251377_5 (sequence is synthesized)
gcccctttgcttcctgctgtgtacttgagctgggacatcagtcttctcctgcccttggactgggatttacaccctcagcctctggttctcaggccttcagacttggactggaattatact

SEQ ID NO: 963491 - DNA, 120 bp, Artificial Sequence
  ENSG00000251377_6 (sequence is synthesized)
ttaagttgatctctacaagactgttaaagaaccaggtctttttcctttcatgttatgcagttccaagtaaactccctttactctggtatccttatcagaggcagacatcacaggaagtgg

SEQ ID NO: 963492 - DNA, 120 bp, Artificial Sequence
  ENSG00000251377_7 (sequence is synthesized)
agcattccttatgaatatcttaatctacacacaaatagatttttttcaatgtgaatttggatttctaaaagcacgcttactgcaagtacattttgcagcctcttgtttccagatcagaat

SEQ ID NO: 963493 - DNA, 120 bp, Artificial Sequence
  ENSG00000251377_8 (sequence is synthesized)
tgagtgattttctattatttatttatttattatttgtcactttaaaatatgcaattcttgggatcatgcagaattgctgtatatttgctttgaagattagaataaaactggtagataatg

SEQ ID NO: 963494 - DNA, 120 bp, Artificial Sequence
  ENSG00000251379_0 (sequence is synthesized)
gatgagaatcgtatgtgactcctattaatagatagatttcttggactgctatctggagaaaggatgggaggcagcaaaaatgaagcacacttgggcaaagatagacacaaagctacacaa

SEQ ID NO: 963495 - DNA, 120 bp, Artificial Sequence
  ENSG00000251379_1 (sequence is synthesized)
atgctctgaagaacttttacattttgtaagtggagttatgctgcaggtcaagttgcctatgactaacgcacaaggatcaagaatgctgacttaggatgttccaagaagaagatggaaaac

SEQ ID NO: 963496 - DNA, 120 bp, Artificial Sequence
  ENSG00000251379_2 (sequence is synthesized)
aggggtataaatttgggaagttttaggtggttcatgatggtcaaagtggaaagtgcttctgaagaatattagaagatgaaacccaagagaacacaatttcaagttacataaaaaacattc

SEQ ID NO: 963497 - DNA, 69 bp, Artificial Sequence
  ENSG00000251379_3 (sequence is synthesized)
aaaacattctggatggtgaagagcaggcacaagaggcaaactttaattgatccttaaaaataaccactg

SEQ ID NO: 963498 - DNA, 120 bp, Artificial Sequence
  ENSG00000266256_0 (sequence is synthesized)
agggcgggtgaggaccctgcacacacacggtgtgtttgtgagctgtgcagagtggggtctccctggcaatggccacagcctccaggggcgctgacacctcccgtctaactggtagacagt

SEQ ID NO: 963499 - DNA, 120 bp, Artificial Sequence
  ENSG00000266256_1 (sequence is synthesized)
ttctgcctcttcttgtttggggattggagagggaagtgcgtctggatgactactaagatgaggaggctgaggcctagtgctcctagcgggcttggtcaagagcaggaggcggaggtggtg

SEQ ID NO: 963500 - DNA, 120 bp, Artificial Sequence
  ENSG00000266256_2 (sequence is synthesized)
gaaggctgtttccctgcgagaatacactgcatcgaacacagaacaaaaagactcactacaacgctgcagccacaatagtgtgtgatttcaagtcttaaaaaccagaatcactttcttctc

SEQ ID NO: 963501 - DNA, 120 bp, Artificial Sequence
  ENSG00000266256_3 (sequence is synthesized)
tggactggaagcatatttattttggccgtaaaaatactcgactgcaagactatgagtgtgcagataattctgctgcttactccgattggaggtgtctccagggagtttccaagcacagga

SEQ ID NO: 963502 - DNA, 120 bp, Artificial Sequence
  ENSG00000266256_4 (sequence is synthesized)
agcattcctgctctgaggtttcggaagaacactttcagcaggattttgggtcactgaaatgaaagtgaactatgctctgtacaaatgtatcatgtttaattcaggagaaattcatgcatt

SEQ ID NO: 963503 - DNA, 120 bp, Artificial Sequence
  ENSG00000266256_5 (sequence is synthesized)
tctttgttctataaatatttactggcagctcgttttgtataggaggctgccacctcccaaaagccccctgctcctcgagtgggttgagcctgaaaccccacatccacagacgtgcccagc

SEQ ID NO: 963504 - DNA, 120 bp, Artificial Sequence
  ENSG00000266256_6 (sequence is synthesized)
tgcgtagacatgctcgtgattgaattggaaatagttctctttccttctctctgacttcctaactgaaaagctgcagcgtggggagaaaggctgctcagaagcctggagccagaacacgca

SEQ ID NO: 963505 - DNA, 120 bp, Artificial Sequence
  ENSG00000266256_7 (sequence is synthesized)
ccccggcttttgcagggccggctcacttggttagaatcaaaggaaaagccttgttatttgggaagctgggcgtcctcaccaaattaggggatttaatttgcagatatctaaggagtgctt

SEQ ID NO: 963506 - DNA, 120 bp, Artificial Sequence
  ENSG00000266256_8 (sequence is synthesized)
tgaaatgaaagatgaactaaaatctgctctgaggcccgtgatttttcaccagtgaaggactctcttgctgctggacatacatgaaaagcatcatctgatctgaaacgcaagtccctgcaa

SEQ ID NO: 963507 - DNA, 120 bp, Artificial Sequence
  ENSG00000266256_9 (sequence is synthesized)
gacagaggagagactttataaacattttataccattctatgaaatcaattcgattcagggctagaattcaagaagtaatccatgggcaagtatatctgatggtaaacccaaacgattata

SEQ ID NO: 963508 - DNA, 120 bp, Artificial Sequence
  ENSG00000266256_10 (sequence is synthesized)
ttgttaacctcttgtactttttttaattttttattatttgatattattatcacaaaagtcgctggaacaggatccatgagctgcttcttcactgcttagtgttttcagaagctgatggat

SEQ ID NO: 963509 - DNA, 120 bp, Artificial Sequence
  ENSG00000266256_11 (sequence is synthesized)
tattaagctccaattgaatacttgatttccaatgattccattaatttttctggtttgtggtaggatttgatttacttattttgtactttaacacaccaataaaaaatagatactaagaaa

SEQ ID NO: 963510 - DNA, 120 bp, Artificial Sequence
  ENSG00000266256_12 (sequence is synthesized)
gggggaatcccaaattgtcagcaacccatcactcccaggcaaaatccaaactgctgggctgtccccttggactgatttgtgtgctggcttttggggacagctatcctctgcacagtggac

SEQ ID NO: 963511 - DNA, 120 bp, Artificial Sequence
  ENSG00000266256_13 (sequence is synthesized)
accaggctctgttaagctgacctctaatgtgccttgaggttggttaccttggtgacagaaactccatttgcaccagcttacattaaaaaaagaggagggagaatatggtcgagtgacccc

SEQ ID NO: 963512 - DNA, 120 bp, Artificial Sequence
  ENSG00000266256_14 (sequence is synthesized)
aggagtgatagggagcactgacggagtttctccctgctctggatagcagatccgctggctcccagcttatgatccatgaagagaacgtcttccccttgggcttcaatttgaagaatcctg

SEQ ID NO: 963513 - DNA, 120 bp, Artificial Sequence
  ENSG00000266256_15 (sequence is synthesized)
gacgccttctcttgggttctgtggttggatgcggaggaatcatcgatcctctgtagtggaagggaagggaggacacaccaagaccatgtggccccaagagccgtgagaggagcagaagcc

SEQ ID NO: 963514 - DNA, 120 bp, Artificial Sequence
  ENSG00000266256_16 (sequence is synthesized)
tgactggtgcctcttacatgtcactgcagcctcggggggggccaccaggaaaacacctgacatcctgttctctagtaatggtgtggctggaatcattcctgtaccaaataattcacccat

SEQ ID NO: 963515 - DNA, 120 bp, Artificial Sequence
  ENSG00000266256_17 (sequence is synthesized)
ttaaagtgtgcaatccaacaatgattggtatactcagagttctgcaactctcaccacaatcaattttggaacatttctatcatccctagcaataaatactatatcttttttttgtgtgtg

SEQ ID NO: 963516 - DNA, 120 bp, Artificial Sequence
  ENSG00000266256_18 (sequence is synthesized)
cctcttgggctccacctacccagccctggaaccagccctggaatcagccctttccctgttcctttaatcgaagaatggtatttagaagccaagatctagcttcaaggatgcactcttcct

SEQ ID NO: 963517 - DNA, 120 bp, Artificial Sequence
  ENSG00000266256_19 (sequence is synthesized)
cgagaattgtcattctcattattaattttacttttaaacttttcatttttagttgtacatggcaagtatagagaaatactattttattttatatttcacaacataattaaagcttctacc

SEQ ID NO: 963518 - DNA, 120 bp, Artificial Sequence
  ENSG00000266256_20 (sequence is synthesized)
atttattttggccgctagccctgctgtcacctacggaaaacagagaacctggggggatgtgctgaaggcagctcctgagccttcccactccccacacgccctcacatcagcagcagagcc

SEQ ID NO: 963519 - DNA, 120 bp, Artificial Sequence
  ENSG00000266256_21 (sequence is synthesized)
cggggctgacggagtgggtttctctgggaaggactctgcccttggatagatctgtatctatggtaacagtaagatgtttgtgtgaataactgaaaaaaaaaaaaaagtctttcaaatctc

SEQ ID NO: 963520 - DNA, 120 bp, Artificial Sequence
  ENSG00000266256_22 (sequence is synthesized)
acaggccgcttttttgttctccctcggccttggagggcctgggacgttcctgttgcccaacatcctggtgagctgagaacattctgtagattaattaggttctctcctctggctcagcag

SEQ ID NO: 963521 - DNA, 120 bp, Artificial Sequence
  ENSG00000266256_23 (sequence is synthesized)
gtctgttctagccatttgaccaaaggctctctgatattttctaccagccttagaacgacagtctgcagatgtgtgcacataaatgtctgggaggagcacacagatactgtgggaggagtg

SEQ ID NO: 963522 - DNA, 120 bp, Artificial Sequence
  ENSG00000266256_24 (sequence is synthesized)
ggtccggcgtagctattgggagatctcgctcgtacacatggcgctacatagaaagaatgccctgaggtgaaggtgacagctcggcagtttcttaataccctgaacttgagcgtggcctgc

SEQ ID NO: 963523 - DNA, 120 bp, Artificial Sequence
  ENSG00000266256_25 (sequence is synthesized)
gctagagaaaatacacggtgcttcttaaaaacaaaagccagcagcctgcaagagggctgtgcctgcgagttcctgggagcaggagggggctgttcctccgcccctggctccagtttcacc

SEQ ID NO: 963524 - DNA, 120 bp, Artificial Sequence
  ENSG00000266256_26 (sequence is synthesized)
gaaaggctgcggccacaccaacagacgtcgtccggccttcttcacacgcaacgaagcgcccaggtggaaatgcatgtacccgcggcagcttctcggcagcgggcttcctgggacggaaga

SEQ ID NO: 963525 - DNA, 120 bp, Artificial Sequence
  ENSG00000266256_27 (sequence is synthesized)
cacaggctcgcccgagggagacggaagcaggggatctgctagaactcagctcgcctcctcctttctcagcagggcagagaatcatgggcttgtgctgacgaaagctccagaaaatggact

SEQ ID NO: 963526 - DNA, 120 bp, Artificial Sequence
  ENSG00000266256_28 (sequence is synthesized)
catttaacctttccaaagatattatccaagctgcaaaatcttggcaatctgaagaccttttaagtcgatataccaaagagctttagtcaggattgaatgcaaaatgccaaaatttcactt

SEQ ID NO: 963527 - DNA, 120 bp, Artificial Sequence
  ENSG00000266256_29 (sequence is synthesized)
ttaaaatcatcgtaacatctaaatacaacctaagcacacttgtaaactgatgccgaacaggcacttggagagccctccctgcaccccttcctcgccccctcctttgtgcaaatgctgttt

SEQ ID NO: 963528 - DNA, 120 bp, Artificial Sequence
  ENSG00000266256_30 (sequence is synthesized)
gcccagaacttcagccactgaaaatcctgggaactttctcttcctggctgccaacctagcagtttggactcacagacgagatttttaaatcactgagggatttaagcctctctgtgtcac

SEQ ID NO: 963529 - DNA, 120 bp, Artificial Sequence
  ENSG00000266256_31 (sequence is synthesized)
agaaaagcgaacaccctcccagttgaaggtggccccaaagatgcgggcctgggacccaggacttctgcaggagagtggacgcctgggtgccccccgccttgccctgcacatgaataacag

SEQ ID NO: 963530 - DNA, 120 bp, Artificial Sequence
  ENSG00000266256_32 (sequence is synthesized)
agagactgccagcggcagctgctggctcaggtgcggcctgtgtgggaggactcgtgtctcggtggttacagagaagctggcttccacggtgtgaacccgactgaatcacaggccgctttt

SEQ ID NO: 963531 - DNA, 120 bp, Artificial Sequence
  ENSG00000266256_33 (sequence is synthesized)
ttgttctccctcggccttggagggcctgggacgttcctgttgcccaacatcctgaataacagagtacaccagtcatcataagaagaaaaattcacatttaaagtttggaaagcaacagga

SEQ ID NO: 963532 - DNA, 120 bp, Artificial Sequence
  ENSG00000266256_34 (sequence is synthesized)
ggcagtgtggaaacgcccactgaggggcacacagtgaggcggccactggctctgtgtccttggggaagccccttctgcggtcccctccattgtctgcgtgacaaagtggacgtagaactc

SEQ ID NO: 963533 - DNA, 120 bp, Artificial Sequence
  ENSG00000266256_35 (sequence is synthesized)
acgcccggccagcaaataccgtatctgactagcactttccatttccctccaaccccctaatggtttcttttcccacaataatctaaatgtttaaggaactggtttgctaactcatttctt

SEQ ID NO: 963534 - DNA, 120 bp, Artificial Sequence
  ENSG00000266256_36 (sequence is synthesized)
aatgacaagaattaagccagcacagcctctggtttctgacattctttccctacaaagtcattcatcatttatccttttttaagggacttccttcatctctgtgccttaggctcacttcct

SEQ ID NO: 963535 - DNA, 120 bp, Artificial Sequence
  ENSG00000266256_37 (sequence is synthesized)
gactgtggggatcagctcctctcaccaatggtgagtagggagtacctgccgttaaacctctgtcaccacaggagagagatgccatggatggatgattttctctctgattcttggcattag

SEQ ID NO: 963536 - DNA, 120 bp, Artificial Sequence
  ENSG00000266256_38 (sequence is synthesized)
ttcattgggcaaaaattcagcttccagttaagcaccggcccatggaccgggcttggtcctgtttcccctggaagcactgctgggaaaccaagcccagccctgcagggcttcctcctgctg

SEQ ID NO: 963537 - DNA, 120 bp, Artificial Sequence
  ENSG00000266256_39 (sequence is synthesized)
ccgcccacgccaggatcagcctcctcttgccgctgcagccccgtcgctgcaccggtttcatcggtctgaagtccagctgctcctccttggcctctgcacctcagcacaggctactgcctc

SEQ ID NO: 963538 - DNA, 120 bp, Artificial Sequence
  ENSG00000266256_40 (sequence is synthesized)
tgaggggccgcccagccgtcgtcctcctcacaacctcccatgatcgtggccctgaggtcacctttccattggcgatgaacaatcccattgtcactccccatgggtgtgcccaccggaagc

SEQ ID NO: 963539 - DNA, 120 bp, Artificial Sequence
  ENSG00000266256_41 (sequence is synthesized)
tgctcatgggcaggaggggaactgttcaagctggtttttccagcccctaccacagcgctgggtgtgtaggtggacaagaaagtcattacgtatgtaaatgaggaagcgcatgaacacctg

SEQ ID NO: 963540 - DNA, 120 bp, Artificial Sequence
  ENSG00000266256_42 (sequence is synthesized)
agcgtgtgagaattcggtggggtgaatgccactccaaatgtgtgtcaaatatgatgggactgaatgcaaatgaaagtgggtcaaggagatattcagaataaaatgagcaacttttcctca

SEQ ID NO: 963541 - DNA, 120 bp, Artificial Sequence
  ENSG00000266256_43 (sequence is synthesized)
tggagagtccagttagcctgtgaaaatgtcgtccctaggggtgagaggactctgggcgggtctctccagtgccgagggagacaccagcctccggctttcaataaatgtagccacagatta

SEQ ID NO: 963542 - DNA, 120 bp, Artificial Sequence
  ENSG00000266256_44 (sequence is synthesized)
gggactcagtttctagatggggaggcagagggaccaaggcagcgacgcgtctgtcagcagtgaggtgctaagagaataacagagtacaccagtcatcataagaagaaaaattcacattta

SEQ ID NO: 963543 - DNA, 120 bp, Artificial Sequence
  ENSG00000266256_45 (sequence is synthesized)
ctgacgtagaggcagagagctcaacagaatccagtgactcaaggcgtgcgcagaagcaatttgcttctgaaactctaaacaccgttctttagtacttcctgacactcctcagcagcaagc

SEQ ID NO: 963544 - DNA, 120 bp, Artificial Sequence
  ENSG00000266256_46 (sequence is synthesized)
aaataaatatttacatgtggaaggagactgtcctttgaaatgtaggttgttccattcagaagagaaatacggcaaggtgccactactttagtggcaacacgcgttattatttatgttttc

SEQ ID NO: 963545 - DNA, 120 bp, Artificial Sequence
  ENSG00000266256_47 (sequence is synthesized)
cagtttgaaaatcgtgcactttctatcaggacccttaaatggtaaacactgattcccacgtgaagcgaattagtccagcagccaccccccccttggtggttcagggacaacagcataagc

SEQ ID NO: 963546 - DNA, 120 bp, Artificial Sequence
  ENSG00000266256_48 (sequence is synthesized)
caattgttgagtgtaggcggggggcggggagggagaggaagagggatgaaaagggaaggcccgggtcagctgggagaggagctcgcgggctttccggcgggctggcctgaagtggaaggg

SEQ ID NO: 963547 - DNA, 120 bp, Artificial Sequence
  ENSG00000266256_49 (sequence is synthesized)
cccagggctgcctgccaccctcagatgccacgcaggtgttgggagggcacccgtctgtgggctcagggacgtgttcccaccgacaggcacagaacggaaagcaccttgggggagacgccc

SEQ ID NO: 963548 - DNA, 120 bp, Artificial Sequence
  ENSG00000266256_50 (sequence is synthesized)
ttctccccatctcaggagggaggccgggcctgcagacctccagcccttccccagcgctcgctgtgagctccccccccccacccgccccccacgtgctggggagcaggtccgtttccccac

SEQ ID NO: 963549 - DNA, 120 bp, Artificial Sequence
  ENSG00000266256_51 (sequence is synthesized)
gaagaaatacagctttggcgtgactaatgaggacagatgtggaatttctgctcctgagaaatctttaaacacaaataatatactattttttgttccgtacaagctagaaatttacctaag

SEQ ID NO: 963550 - DNA, 74 bp, Artificial Sequence
  ENSG00000266256_52 (sequence is synthesized)
gaatatgaaagtattcaaggccaagatggtggctcacgccggtaatgctagcacgttgaggggccgggtatggt

SEQ ID NO: 963551 - DNA, 63 bp, Artificial Sequence
  ENSG00000266256_53 (sequence is synthesized)
gcactgcactccgtcctgggtgacagagcaagactctattaaaaaaaaaaaaaagtattcaag

SEQ ID NO: 963552 - DNA, 120 bp, Artificial Sequence
  ENSG00000266256_54 (sequence is synthesized)
cagagcaagactctattaaaaaaaaaaaaaagtattcaagggcgttcatattgttaaagtgataacatctcatttttcataaaagttagatatgatttaaatcattaatttaagacagag

SEQ ID NO: 963553 - DNA, 120 bp, Artificial Sequence
  ENSG00000266256_55 (sequence is synthesized)
tttttctaaattttagacgagcaatattaactaaacatacgcaacacttatgatcatatagaaatacaaacacaagtctgttggcttttaaagaacaaaatgcaagaactccaaatagac

SEQ ID NO: 963554 - DNA, 120 bp, Artificial Sequence
  ENSG00000266256_56 (sequence is synthesized)
tatgaccacacttttgtctgcttttaacactgcgtgaagctaaatgtcctgccacattttagtgtatgtaatgtgtcaaaaccaagcagtatcttacattaaaacattatttgtcaacaa

SEQ ID NO: 963555 - DNA, 120 bp, Artificial Sequence
  ENSG00000266256_57 (sequence is synthesized)
gacattctaattggcattgtagatggaactgtctacaatggttatactataatgttcaagaaatatgcccgaaggcagtaaagattcaactactcaccaaggacttaggccgcatttact

SEQ ID NO: 963556 - DNA, 120 bp, Artificial Sequence
  ENSG00000266256_58 (sequence is synthesized)
cggtgttgcgggtgggaatgcacagtcaatgggaacagcatcccccgttcaaaaagccggccattcaggagaggtgacagacacacataggaggttgaggaacgccatcctgtaagctct

SEQ ID NO: 963557 - DNA, 120 bp, Artificial Sequence
  ENSG00000266256_59 (sequence is synthesized)
aggaagagcaggagctctacagaagcagaggcagaaagacactcgggctggtcaagcagctgagtcccagtgactgtagctacagatgccattgatgatgatgatgatggtgatgatgat

SEQ ID NO: 963558 - DNA, 120 bp, Artificial Sequence
  ENSG00000266256_60 (sequence is synthesized)
gatgatgatggtgatgatgacgtgaaggcaggcctgtggggtgcgggggcttggctggcaggacttgtttccctggcttggctggttgctcggcggcgggaagaggaggtgagggctgag

SEQ ID NO: 963559 - DNA, 120 bp, Artificial Sequence
  ENSG00000266256_61 (sequence is synthesized)
gagtaacttttcctctgatctgatctgttgtcaaattagtgggtggcaggagaaagccagtcacatgatatcatcgtttcctattcaaacagacggctttttttttttcagtaaaaatac

SEQ ID NO: 963560 - DNA, 120 bp, Artificial Sequence
  ENSG00000266256_62 (sequence is synthesized)
aagtacattttctgctatgatgctgcaaacaggcaccaggatgagtcagacccatttaagattgttgagcctcacaggtttagcgatttaattacgtgttttgtgggatttgcaagctgc

SEQ ID NO: 963561 - DNA, 120 bp, Artificial Sequence
  ENSG00000266256_63 (sequence is synthesized)
gtgcaatctccccgcgtgcctcaggtccacaagtggcagtggcccttgtctctctctggttttgtttggtggtacatcaggccagtctctggaagcccggaattgaggatgcaagcatgt

SEQ ID NO: 963562 - DNA, 120 bp, Artificial Sequence
  ENSG00000266256_64 (sequence is synthesized)
tcatgcgcgtggtgtaggatcgacggggaaggaaatcgctggagaccttccgctccctcctccacctggggctgggccgtgaaaacaataacagagtacaccagtcatcataagaagaaa

SEQ ID NO: 963563 - DNA, 120 bp, Artificial Sequence
  ENSG00000266256_65 (sequence is synthesized)
gagaaacgattatccttcatttccttaaggcacagaaattgagactaggttcaagaaccttcatattttaaaaactggaaaatactggctaagtgaggactgggcggtcatcctccacac

SEQ ID NO: 963564 - DNA, 120 bp, Artificial Sequence
  ENSG00000266256_66 (sequence is synthesized)
atgctctgtgtgcttggagcgaagaggggaacgcactgaatgagatgaactggaaggaggtgcagcagcgaaggaaatccttctgttgggagagttcacgtgtttaggataatccttcga

SEQ ID NO: 963565 - DNA, 120 bp, Artificial Sequence
  ENSG00000266256_67 (sequence is synthesized)
ataggacgcaacagtgatgtgaggagaagctttggagctgatttagattgagacagtctatcacaggctgtttggttgcatccctttggggccagtctcattttaggtctaaatatgcag

SEQ ID NO: 963566 - DNA, 120 bp, Artificial Sequence
  ENSG00000266256_68 (sequence is synthesized)
gaatggggctctggcttccagaagtttcaggctgcaaaaggctggggccaccatctttacagataatccattagtttgattctcttgggggccaggaagaaaaccaagaacactcaatgg

SEQ ID NO: 963567 - DNA, 120 bp, Artificial Sequence
  ENSG00000266256_69 (sequence is synthesized)
gtttgtaaaggggcaaaactgtgtgtgcccagtaattcttggagctcgcaatagaggtggagaagcagtgatgggccccacagcagcaggggcttgggaatgacggaaaagaacaaaatg

SEQ ID NO: 963568 - DNA, 120 bp, Artificial Sequence
  ENSG00000266256_70 (sequence is synthesized)
atggaaggacagctggaagaaacagggaagcttccttttaactggatgctgggtctcagccttgaatagttcctggccttcggaggccttttctcagggagcatggcctggggactccct

SEQ ID NO: 963569 - DNA, 120 bp, Artificial Sequence
  ENSG00000266256_71 (sequence is synthesized)
gcttgctctgctgagctttcagggaaggagaaatgggcaaggccagaggcgaccatcaggtgctccgtaggcacagaggcagaactcaaggtttagctttaccttaagagggtgactgca

SEQ ID NO: 963570 - DNA, 120 bp, Artificial Sequence
  ENSG00000266256_72 (sequence is synthesized)
aagtgtgctccctggaccaggggcctcggcctcacctgggagcttgctaaaaatgcaagttgctctcacccagactgaatctaaaattctgggtacagcccagcaatctctgctcacact

SEQ ID NO: 963571 - DNA, 120 bp, Artificial Sequence
  ENSG00000266256_73 (sequence is synthesized)
ttctccagatgattctggtgcaagctaacctttcaaaagtcctgggtcccattcccagaggctgtgattaagttggtctagggctgtggcctagacctggggattttggaagcccacagg

SEQ ID NO: 963572 - DNA, 120 bp, Artificial Sequence
  ENSG00000266256_74 (sequence is synthesized)
tgattctgttgtgcagccatggttggcaggctgttcacggtgctgttcaacaggtcctgctgtgggatggaaagggtctgtatctgcactggccaatgtgggagccagccctgtggctat

SEQ ID NO: 963573 - DNA, 120 bp, Artificial Sequence
  ENSG00000266256_75 (sequence is synthesized)
tgagcacttggcccctggctagtgcaactgaggagctgaatttttcatttcatttacttttaattaagtttaaatagctaaatgtggctattgtctgccttattggatagcagagttcta

SEQ ID NO: 963574 - DNA, 120 bp, Artificial Sequence
  ENSG00000266256_76 (sequence is synthesized)
aatgtggctattgtctgccttattggatagcagagttctagaaccacagataaatgtaatactgtccctttagttgatttaaaaatccaatgcctctgtaatcctagcactttgggaggc

SEQ ID NO: 963575 - DNA, 120 bp, Artificial Sequence
  ENSG00000266256_77 (sequence is synthesized)
gcaccactgcactccagcctggtgacagacggagattctgtctcaaaaaaaaatgcctcacagagttaaatatttaagttgataagaaaaatggtagtcgagtctttgaggattatttta

SEQ ID NO: 963576 - DNA, 120 bp, Artificial Sequence
  ENSG00000266256_78 (sequence is synthesized)
ggtagtcgagtctttgaggattattttaaaatccacttttggtgataaatagataaaaacagtgtggtagggcccagaagttcttcctgatttctacctgttggagctgaattcctcaat

SEQ ID NO: 963577 - DNA, 120 bp, Artificial Sequence
  ENSG00000266256_79 (sequence is synthesized)
tttacttgtaggagaacggcttcctaaagggcaccttacccagccattcctgcatgcaagtgtgtatgagaactgcagggggcattatatgaaaatccaattcctgggctctatcccaga

SEQ ID NO: 963578 - DNA, 120 bp, Artificial Sequence
  ENSG00000266256_80 (sequence is synthesized)
tgttcctatccaataggtctgggttggggccctggaaactgcatttttggcaaaccccttactgatttggatgcacaagtttcaaggaacaggcactaaggatcgctgatgtagaatctg

SEQ ID NO: 963579 - DNA, 120 bp, Artificial Sequence
  ENSG00000266256_81 (sequence is synthesized)
tttgtccatccaggaaagccagagtcaccacacttgagtaaatgggttttgatgtaggaaaggtctttataattctttcatgaattcaccaaactttaaaaactgtactatttttggctg

SEQ ID NO: 963580 - DNA, 120 bp, Artificial Sequence
  ENSG00000266256_82 (sequence is synthesized)
ggggcacaggaaaaaaatgccagagatgtccacccctaatttttttcctctcctcttctgggtttctgttgtaatggattgaaaatacacaggagatgtaatgcaaaacttggctttgat

SEQ ID NO: 963581 - DNA, 120 bp, Artificial Sequence
  ENSG00000266256_83 (sequence is synthesized)
attggagagggaagtgcgtctggatgactactaagccttttcctgggaacacgtatcttcagaggacatcaacaccagcctctcctgccatgtcttacgtcaaactcaatcccttctgag

SEQ ID NO: 963582 - DNA, 120 bp, Artificial Sequence
  ENSG00000266256_84 (sequence is synthesized)
ggcctcagctgatgtcacatccatataagaaattgggacacaccttggaagtttcagttttggtatcctgtggtaaaagttggtatctagacaggattagccatcacatccccaagaatg

SEQ ID NO: 963583 - DNA, 120 bp, Artificial Sequence
  ENSG00000266256_85 (sequence is synthesized)
aagcaacaggacaaagttcataggtttcagaataacgcaactacggtgcaagtggaacttgagaatgaatgaacattcaggattgaggatggatgcggtcagtaactgttgtcacccatt

SEQ ID NO: 963584 - DNA, 120 bp, Artificial Sequence
  ENSG00000266256_86 (sequence is synthesized)
gagagtatcctacaaagatggtctcaaagtactttgagatgaacagaatgttctataaatgggtattgaaaataatcaagacattcatggatccaaacaggccacagaaataccatagca

SEQ ID NO: 963585 - DNA, 120 bp, Artificial Sequence
  ENSG00000266256_87 (sequence is synthesized)
acaaatgaacaataattgctgcattatgggctctttccccagctgcactcatgcaatcaaagctctgctgcgtcttcagaggagcccaggtcagatctggctgccatcacccatgaggaa

SEQ ID NO: 963586 - DNA, 120 bp, Artificial Sequence
  ENSG00000266256_88 (sequence is synthesized)
acgtcctcagcatggaaccagggcccttgacagagacattgtcattctggacaccccacacccaagccagttcatccaagtcacccgataaaattgtgctctgaagaaactgcctgtttc

SEQ ID NO: 963587 - DNA, 120 bp, Artificial Sequence
  ENSG00000266256_89 (sequence is synthesized)
agcaaactccttaccttactggacgcatagcgatggccagcacaggatgaggccatgggaggatcttaatgacacagtccactctgcaaaccaaggtcaacaaggcagcaggtatggcca

SEQ ID NO: 963588 - DNA, 120 bp, Artificial Sequence
  ENSG00000266256_90 (sequence is synthesized)
cggcccctcaccgtggactctgtacgagccaatacactgtgttctattccccagttatttctgaatacggccacagggagatgtgagccagccctccttctctagggcacacagaggcta

SEQ ID NO: 963589 - DNA, 120 bp, Artificial Sequence
  ENSG00000266256_91 (sequence is synthesized)
gaaaagatccacaggacctgttcaacttgccagtgatcccaaactcctgacccaggcagatcactaagagagagagagaaatattcccttttctaggaaggtcctctggcctcacccagc

SEQ ID NO: 963590 - DNA, 120 bp, Artificial Sequence
  ENSG00000266256_92 (sequence is synthesized)
tccatgatgtgtccactagctcgagacaccccagttattgggggcatcttctccaacagtagggaggactgcggcgagggcagctgtggagatggtagaatctttcctgtgggattctgg

SEQ ID NO: 963591 - DNA, 120 bp, Artificial Sequence
  ENSG00000266256_93 (sequence is synthesized)
aatgttgtgtcccctctggaagagacacaaggagtgagggcgagactggaaagggtgtggaagggagaaccttccttattgcctagcgtccctcaggggccagtgaccaaccttattagc

SEQ ID NO: 963592 - DNA, 120 bp, Artificial Sequence
  ENSG00000266256_94 (sequence is synthesized)
cacctctgtgcattcaaccacttcctctctcctgaggcagcccgagcctgaatatctcagcaaggcattaagaaaggctttaataattgatttaattaaagtctaaaaattatagaacca

SEQ ID NO: 963593 - DNA, 120 bp, Artificial Sequence
  ENSG00000266256_95 (sequence is synthesized)
ggcaatttttttttcattttttgtatagatgaggtcttgccatgttaccctggctaaggttcttatatagtaagtggcttagattgtagatttagaaccaaaacatcgatctcttgcccc

SEQ ID NO: 963594 - DNA, 120 bp, Artificial Sequence
  ENSG00000266256_96 (sequence is synthesized)
tccagtcagtgcttcttgtactggaatggatctctagacttggtgtatgcactctcaatagtgtgtatcgaaggagaggagagggcagagcaggggtagtagggtgggctggccattttc

SEQ ID NO: 963595 - DNA, 120 bp, Artificial Sequence
  ENSG00000266256_97 (sequence is synthesized)
ttgtgagttgagaggcttagactctgttggcactaagtgtcttctgattttaaagaagtctccttacctcccgctgcctcagttcctttctgtaaaccagaggagaagggaaattgtagg

SEQ ID NO: 963596 - DNA, 120 bp, Artificial Sequence
  ENSG00000266256_98 (sequence is synthesized)
atactctcctaatatgatctcgtgttctaggaaagtcgtatgaaggcggaagtgaaagtagataatctattttatttcgtatgattttaccaacacatctgttgaaattttttttaaaac

SEQ ID NO: 963597 - DNA, 120 bp, Artificial Sequence
  ENSG00000266256_99 (sequence is synthesized)
gtcatcattctggttcacatttgcttttttaagacacatatttgagaattcagccactgggcttatttatactcattattattctaggataatctttggggtttgaaatcacttataatc

SEQ ID NO: 963598 - DNA, 120 bp, Artificial Sequence
  ENSG00000266256_100 (sequence is synthesized)
ccataacacaaaactgtgacgaacgtgtcctctgacctacatgaattattttctgtgaaaatgaaagtcgtggacagccctaattaaatccctgctgagcagatgccagtgcttaggaca

SEQ ID NO: 963599 - DNA, 120 bp, Artificial Sequence
  ENSG00000266256_101 (sequence is synthesized)
gctctccacgtgatccatagaaacaaatcaaggtttgcagttggagaaccaccaaaagcaagccagtgactgttcctatggcttgtaaacacaaaagaaaatattaaaaagtacacatga

SEQ ID NO: 963600 - DNA, 120 bp, Artificial Sequence
  ENSG00000266256_102 (sequence is synthesized)
gatacaaagaatactattacaagcaggcccaagtcagccactcagcttaggccttagagctgtgtcagtatcgctgaagactctaaggactgggccttcccgacgccattccttctcctt

SEQ ID NO: 963601 - DNA, 120 bp, Artificial Sequence
  ENSG00000266256_103 (sequence is synthesized)
cctcccagagccaccatcgtctaatgttgtgttcataattgacttaatttcctttctcattttcctatataaccatgtatccttaaagtatatgttgctaaatcttgcatatatttgaag

SEQ ID NO: 963602 - DNA, 120 bp, Artificial Sequence
  ENSG00000266256_104 (sequence is synthesized)
tttccatttaagataagtggcattatattgtagataacccagtctttggttcaagtttatgtttgggaagtcatccacgggtgttgacattttcagctgaatgtcattcattttcactat

SEQ ID NO: 963603 - DNA, 120 bp, Artificial Sequence
  ENSG00000266256_105 (sequence is synthesized)
tctatagaattccattgcatgaatatcccaagatgtatttactcatagggggatttttttcttttaattacacaattatattatcttagtattatacatacataacaattatcataccct

SEQ ID NO: 963604 - DNA, 120 bp, Artificial Sequence
  ENSG00000266256_106 (sequence is synthesized)
attacccaaaagttgtaaacattctgtgaatataggctccaatacatagacgattgagctgtgaactcattaattttctacatagtttctttggaaaccaaagatttgaaagccagagtt

SEQ ID NO: 963605 - DNA, 120 bp, Artificial Sequence
  ENSG00000266256_107 (sequence is synthesized)
attgctgatctcctctttctgcttcattaggcctgcctttcccggtaacctgttcctcaaataatatttctcccaactgtgacaccaactagatgtcaaaacctcagtgatatccgttga

SEQ ID NO: 963606 - DNA, 120 bp, Artificial Sequence
  ENSG00000266256_108 (sequence is synthesized)
gtttcctttattagaatgataatgtcatttatcatatgtcttttctttcactttccctgattttagttattaaaacaacaccccacttcaatgtgctcatttgtaaaatagcaatgccat

SEQ ID NO: 963607 - DNA, 120 bp, Artificial Sequence
  ENSG00000268087_0 (sequence is synthesized)
tgagttttgctcttgttgcccaggctattggttgcctggaagatggaggaagaggccgtgaaccaaggatgtgggcagcctctaaaagctggagaaggcgaggaaaatttctccctgaga

SEQ ID NO: 963608 - DNA, 120 bp, Artificial Sequence
  ENSG00000268087_1 (sequence is synthesized)
aaggaaccagctatgcggacacattgatgctagcctacagagacccattctgtacttttgacttccagaattgtaaagaataaatttgtggaatttttttttttgagagtctcactctgt

SEQ ID NO: 963609 - DNA, 74 bp, Artificial Sequence
  ENSG00000223502_0 (sequence is synthesized)
ggttttgtaaccaaaatttaaagtaaagaaaactgaagttttgctagcaaactctttaaaaataataagagact

SEQ ID NO: 963610 - DNA, 120 bp, Artificial Sequence
  ENSG00000279110_0 (sequence is synthesized)
gctcagccccaccagcacgtcatccatcatcaatgcgtctgtggccagcagccttgattcctggctcagccttcaacacccttcaccatacagccgccgcttgctgcctcgccaaaccag

SEQ ID NO: 963611 - DNA, 120 bp, Artificial Sequence
  ENSG00000279110_1 (sequence is synthesized)
cgctcaagcacacgtggctgctcagcctccctgcctatgctcaggcagtgccctctgccaggaattccttttccttctgtggacgttcaaccatcttttaaacctaatgccaacggcaaa

SEQ ID NO: 963612 - DNA, 120 bp, Artificial Sequence
  ENSG00000279110_2 (sequence is synthesized)
aaatgagtcactgcgccctctcttcgggtacagtaggatgtgctgggtgaggatggcctgtcttcctcacagggctgggagctccccatgggcagagcctgggtcccaggttatctctgt

SEQ ID NO: 963613 - DNA, 120 bp, Artificial Sequence
  ENSG00000279110_3 (sequence is synthesized)
ggtctcggggcctggcaccagccaagggtttagtaggtcctctgtaactgttccccaaaaggcagagaattcccagttgtcccagcaccagtcttgctcacaatgaaatcatctttagat

SEQ ID NO: 963614 - DNA, 120 bp, Artificial Sequence
  ENSG00000279110_4 (sequence is synthesized)
ctaggcatgaagatggcagacccactgtgtgcactgcattgtcggccaccaaaggggacccagggaagccagacatgtgcccatcttcaagcagtttgtgattccctgaaaggtcagggc

SEQ ID NO: 963615 - DNA, 120 bp, Artificial Sequence
  ENSG00000279110_5 (sequence is synthesized)
gcagacagaacaggttcccaaagagggaaactgaggactagggagaggatgaggtgtcttattacagaggcatccctgggcccaggggaagggtgtggatggagttagattgcctcattc

SEQ ID NO: 963616 - DNA, 120 bp, Artificial Sequence
  ENSG00000279110_6 (sequence is synthesized)
ccacacttgctagctggttaatctctctgggcccccactccttcacgtaaaataaggatgatgacagtgcctgcccccgcagggtcgctgggaggcatgaatgaggtactacgtacaaag

SEQ ID NO: 963617 - DNA, 81 bp, Artificial Sequence
  ENSG00000279110_7 (sequence is synthesized)
agggtcgctgggaggcatgaatgaggtactacgtacaaagtgttcagaatccagtacacagtaagggctcaacacatctta

SEQ ID NO: 963618 - DNA, 88 bp, Artificial Sequence
  ENSG00000279110_8 (sequence is synthesized)
aggccaatgtgggtggatcacttggagcgaaaccccgtctctactataacaaaaattatccaggcatagtggcacatgcctgtaatcc

SEQ ID NO: 963619 - DNA, 120 bp, Artificial Sequence
  ENSG00000279110_9 (sequence is synthesized)
caaacaaaaaaaatcttagctgtgagtgcctggtcgtgttagggaagcaggcgcctggtagagccagagtaaggccatgttcaattcgactccatcttaagactaaaaagccacattcct

SEQ ID NO: 963620 - DNA, 120 bp, Artificial Sequence
  ENSG00000279110_10 (sequence is synthesized)
tgctggtcacaagatagtcatgggatgtttacagttgaggaaacagcctaaagatacctacaaggacgtactcctacatcagcacagagtccaggtgtcccaatacccataacagtatgt

SEQ ID NO: 963621 - DNA, 120 bp, Artificial Sequence
  ENSG00000279110_11 (sequence is synthesized)
gcttgcaagataattatagttacgcttcggtatactcacacactaaaatgtcaaggatggtttttgttttgcttttcaagattgttttatatttcaataattttgggaagtacaggtcgt

SEQ ID NO: 963622 - DNA, 120 bp, Artificial Sequence
  ENSG00000279110_12 (sequence is synthesized)
ttttggttacatgggtgaattctatagtgatgatttctgagattttcgtgcacccgtcacccgagcagtgtgcactgtacccaatatgtagtctttcaaccctcacccacctcccaacct

SEQ ID NO: 963623 - DNA, 120 bp, Artificial Sequence
  ENSG00000279110_13 (sequence is synthesized)
accttccccccaagtccccaaattccatgatatcattcttatgccttttcatgctcatagcttagcgcccacttgtaagtgagaacatataatatttggttttccattcctgagttactt

SEQ ID NO: 963624 - DNA, 120 bp, Artificial Sequence
  ENSG00000279110_14 (sequence is synthesized)
cagaataatggtctccagctccgtctaagttgctgcagaagacattattcccttccttttttgtggctgagtagtattccatggtgtatacatacgtgccacgtttctttaaatcaataa

SEQ ID NO: 963625 - DNA, 120 bp, Artificial Sequence
  ENSG00000279110_15 (sequence is synthesized)
agtaatcaattttgtcatgccgtgcgctcacctgcaagtagacacagtttagcttagcttttacatggacaacactcctctataagaaaaacttaaaaacaaacccgggcggtgggtcct

SEQ ID NO: 963626 - DNA, 120 bp, Artificial Sequence
  ENSG00000279110_16 (sequence is synthesized)
cctctcactttctgaggatgctctactctgtaacagggtagctttcaatcaaccatcccttcttactgcactccggaacttgctttgaattccttcctgtacgaaatccgagaaccctct

SEQ ID NO: 963627 - DNA, 120 bp, Artificial Sequence
  ENSG00000279110_17 (sequence is synthesized)
cttggggtccgtttcaagaccctcttctctggtaacaatggcatatccacttcagcccccttggctagcagagcaataagagggagcccaaactggggccagcccatcagaaaagggggt

SEQ ID NO: 963628 - DNA, 120 bp, Artificial Sequence
  ENSG00000279110_18 (sequence is synthesized)
tatctgccccaaaaaaaggcatctctgagccaatcccagggcagagccaacccacagagcccttaagagtgttgtcagctgcagcacatttgaaatcactgaaaacacacaactagggag

SEQ ID NO: 963629 - DNA, 120 bp, Artificial Sequence
  ENSG00000279110_19 (sequence is synthesized)
tggcgggtggcggggggcgggggtgggtgccggttgggagggggggaacagcaaacacattttccatcctctcagttcccagcctgacccaacaactgccctcctggccccaatcggttc

SEQ ID NO: 963630 - DNA, 120 bp, Artificial Sequence
  ENSG00000279110_20 (sequence is synthesized)
tctccaccatgcggaggggcagatggggtagatggggtcagcgaagacaggacccagcaagaagcagcagcccagtcgaaaagcctgaagtcctgatacaaccaacgcagatgcgtaaaa

SEQ ID NO: 963631 - DNA, 120 bp, Artificial Sequence
  ENSG00000279110_21 (sequence is synthesized)
aaaatgccgtgctgcgtgaaaggagccagacacaacaaagccatgctgcatgagcccactgacaggaaatgtgcagaaaaggcaagactgcagagacaggccgcagacgagtggctgcca

SEQ ID NO: 963632 - DNA, 120 bp, Artificial Sequence
  ENSG00000279110_22 (sequence is synthesized)
ggggcttccgctggatggggtgggggctggggggagtgcctgctaataggtacagtgcttccttctggggtgaggacaatgttctgggctagagagtgatccctgggcaacttggtacat

SEQ ID NO: 963633 - DNA, 120 bp, Artificial Sequence
  ENSG00000279110_23 (sequence is synthesized)
ttactaaaaattgctgtacacttcaatcgagtgaattttatactctgtaaattatacttcaataagctattggaggaggaggaggaagaagaaaaaagaggaggaggagaaaagagagga

SEQ ID NO: 963634 - DNA, 120 bp, Artificial Sequence
  ENSG00000279110_24 (sequence is synthesized)
aggggtaaaggtggaagaggaaaaggagggggaagaggaggaggaagaggagatgggcccagtgcagtgactcaggcctgtaatcccagcacttcacgaggctgaggtgggaggatcact

SEQ ID NO: 963635 - DNA, 120 bp, Artificial Sequence
  ENSG00000279110_25 (sequence is synthesized)
tgagcccaggagttcaataccagccttggcaacatggccagaccctgtcttgatttttaaaaagaaaaaaaaaagtgcagaaggaggagaaaagggaggaagagataaaaatggaagagg

SEQ ID NO: 963636 - DNA, 120 bp, Artificial Sequence
  ENSG00000279110_26 (sequence is synthesized)
aagaagaggaaaaggaggagaaaaaacaggaggaagagaagagggaggaagagaaaagggaggaggaaaagaaggaagtggagaaggagcaaaccgtgccaagggatgagaaaagaggga

SEQ ID NO: 963637 - DNA, 120 bp, Artificial Sequence
  ENSG00000279110_27 (sequence is synthesized)
gaagcaagctagaaggtcttgcctgggcatgcgcagggccagcagcgcctacaacctggctggagcgctccctccccactcagtcagtgaacatgattaagccctaccaggagctgggag

SEQ ID NO: 963638 - DNA, 120 bp, Artificial Sequence
  ENSG00000279110_28 (sequence is synthesized)
cgaagctgctgggagcagggatctgcactcaggtaggcctggggttcaaatcccaactacagccctgcctcacactgtcatccaggacaacctgcttctcttctctgtgcctcggtttct

SEQ ID NO: 963639 - DNA, 120 bp, Artificial Sequence
  ENSG00000279110_29 (sequence is synthesized)
tcagacataaaatgaggctgagaataacaacaacaatcatgataatttcctccctcacaggatggcagtgaggcagaggtcagatgatatgagaaaagcactcagcaggctgactgcaac

SEQ ID NO: 963640 - DNA, 120 bp, Artificial Sequence
  ENSG00000279110_30 (sequence is synthesized)
tgctcaatcaatgaaggccctgaggataaagtgtgaagcattagggacatgagtgaggcaggattcttgccctcagcggggctcacggtctgtaagagaagcacttgggaataaattaca

SEQ ID NO: 963641 - DNA, 120 bp, Artificial Sequence
  ENSG00000279110_31 (sequence is synthesized)
gcactagaggctagagggcctggaatggaggagttcacaggatagggtgcaacccaggagggcttcttggagaaggtggcacagaacccaggcttgaaatatgacaaaatgtccctattc

SEQ ID NO: 963642 - DNA, 120 bp, Artificial Sequence
  ENSG00000279110_32 (sequence is synthesized)
tcaagagacctcgagttcaagtagaagattcagcatctctggaaatacatctccttaagagaaaaatgctgtttctataaccataagtttctcactataggctcggctatccatacccca

SEQ ID NO: 963643 - DNA, 120 bp, Artificial Sequence
  ENSG00000279110_33 (sequence is synthesized)
cgctcttttttacaaataaaacaaaaacaaaatttttttttcccaaaaaatactttctccggaagagaaaatatcatccatgaaaataaatggggcagccagggctgtgaaggctgcaga

SEQ ID NO: 963644 - DNA, 120 bp, Artificial Sequence
  ENSG00000279110_34 (sequence is synthesized)
ggaacatcctaagctcagctgggcagctctgatgtcaggttcacaaaatagaaactgacatggggcccaatggggacagagcacagtgacacatctaccgaaattagtgggctgcatgaa

SEQ ID NO: 963645 - DNA, 120 bp, Artificial Sequence
  ENSG00000279110_35 (sequence is synthesized)
aagatgaaaatctaagtggtcatggaaaatttggatgtttcaggtttagaatggaggcccgaatgtaaaacggcttaaaagcaaattaacgaaatgtggaaaatagaccgtctccatcct

SEQ ID NO: 963646 - DNA, 120 bp, Artificial Sequence
  ENSG00000279110_36 (sequence is synthesized)
accctcttgtggtcatttctgaatgatgcacaagaaaaccagtgccttgtttcacctgggaggagaatgaggcaggtaaaacagaaactggcggccctggattgagcccccacctgtgct

SEQ ID NO: 963647 - DNA, 120 bp, Artificial Sequence
  ENSG00000279110_37 (sequence is synthesized)
acctgcccagtgtcgaagcctgggccaagtcagttcgttttgccaaccctcagtttcccgtgggtctcccagagttgtggcaaggatccagtgagataacaagtgtgaataacaagacct

SEQ ID NO: 963648 - DNA, 120 bp, Artificial Sequence
  ENSG00000279110_38 (sequence is synthesized)
gtgaataacaagacctctgatacccagagtgtgaaccgaaggcagctagaatgtggcctgagcacatggtgagatgtcacattgaaatcaggattgggccaggcgcggtggctcacacct

SEQ ID NO: 963649 - DNA, 120 bp, Artificial Sequence
  ENSG00000279110_39 (sequence is synthesized)
gaggctgagtcaggagaatcacttgaactcaggcagcagaggttgcggtgagccaagaccatgccactgcactctagccttggcaacagagcaagagtccatctcaaaataaataaataa

SEQ ID NO: 963650 - DNA, 120 bp, Artificial Sequence
  ENSG00000279110_40 (sequence is synthesized)
caaaataaataaataaataaaataaaatcaggatcatcagttctgcttgaaaaactggacgatccaaccaacattctgggcaaggaagagctgggatgcaagggaagctccttcctcccc

SEQ ID NO: 963651 - DNA, 120 bp, Artificial Sequence
  ENSG00000279110_41 (sequence is synthesized)
accatttgtcacgaaatccccatccctgcctggcctggcttccgggcacagctcccgatgcagaatccccgggaaagggcctgcaaatccgggttccaagccccaaggtgccccgggtgc

SEQ ID NO: 963652 - DNA, 120 bp, Artificial Sequence
  ENSG00000279110_42 (sequence is synthesized)
cttgcaggaggcctggcatttaggaatccccagatcagggatttctgaggcagtttggaagggactttgccctcagaattctgcccccaactaaattctccattttccctctgaaccctt

SEQ ID NO: 963653 - DNA, 120 bp, Artificial Sequence
  ENSG00000279110_43 (sequence is synthesized)
ctctctgctcagtgatgagtgggcaccctgagagtgcaggggtcccctcccaggaactacatgggaggggcagcaaggtactgttgccacacaagctgtccagcctcccggccttgtgca

SEQ ID NO: 963654 - DNA, 120 bp, Artificial Sequence
  ENSG00000279110_44 (sequence is synthesized)
gactggtacctgggttacccttcctgcccctccctccgcctggccaaactactcccctgtcaggatccagggcaagatgagtctttctagttcccctgccaccaggccaaggaagagcca

SEQ ID NO: 963655 - DNA, 120 bp, Artificial Sequence
  ENSG00000279110_45 (sequence is synthesized)
attactccctcctctgtcgggttagtttgttgtgcatctgtctgttgtgtgtctgtttcccttcctcggctgtgaactcactcactccttcattcaacaatttttttttttttttttttt

SEQ ID NO: 963656 - DNA, 120 bp, Artificial Sequence
  ENSG00000279110_46 (sequence is synthesized)
caggcatgagccaccatgcctggcccctcacttaaaaaatattcacctagcttcaactctgcactgaaaacacaaaagtgaacaagagcttcaagagccctacagtcctgcaattcttgt

SEQ ID NO: 963657 - DNA, 120 bp, Artificial Sequence
  ENSG00000279110_47 (sequence is synthesized)
cttcaagagccctacagtcctgcaattcttgtttggtgggggagggataagaagtcagcaaacagcctccaccctgatgagggaggcagatatcagaaggacactgcacatgataatggg

SEQ ID NO: 963658 - DNA, 120 bp, Artificial Sequence
  ENSG00000279110_48 (sequence is synthesized)
ggtgctgtgagggaataatgggggcccgggccttatgcagaggtggtgtcagggaaggccttgcccaggggtgacatctgagtttagagaggtcctgagaagaggcctcactcaggtgct

SEQ ID NO: 963659 - DNA, 120 bp, Artificial Sequence
  ENSG00000279110_49 (sequence is synthesized)
ctggtcatcagtcccaggagcccagccttcgagtcatcccagcccgggcaccagacgtaagtgatgaggcttccagatgattcctgccccagctgttcagggctcccagcagagaagagc

SEQ ID NO: 963660 - DNA, 120 bp, Artificial Sequence
  ENSG00000279110_50 (sequence is synthesized)
tccatgaccctgttacacccctaagttctgtgatggttcattataacaacagatcaccggaccatggaaattacttctcctcttctactctttaggctaactcgtttttatataaacaac

SEQ ID NO: 963661 - DNA, 120 bp, Artificial Sequence
  ENSG00000279110_51 (sequence is synthesized)
tcatccccacccagacacacacacaaggccctagagcagcagtttccgaacagtgccgtatcccccggggatctctaaaaaatactgacacccagacaataggggggaatcctaaaaata

SEQ ID NO: 963662 - DNA, 120 bp, Artificial Sequence
  ENSG00000279110_52 (sequence is synthesized)
cctgaccaagactattcaagattgccaggctcatgaaaaacaaagaaaagtctgatactacatcctggatgggacgtaacattaaaactgagaaaatcggaataaactatgaactttatt

SEQ ID NO: 963663 - DNA, 120 bp, Artificial Sequence
  ENSG00000279110_53 (sequence is synthesized)
taataggaatgtatcagtattggctcattgatggtaatgaacataccatgctaaggcaaggtggtgatgacagttggaaactgggtgtgggtgtatggggactctctgtaccatcattcc

SEQ ID NO: 963664 - DNA, 120 bp, Artificial Sequence
  ENSG00000279110_54 (sequence is synthesized)
aattttcctgtaaatctaaaactgttctaaaaagtcaagtctatttaaaaaacactgatgcccaggccctgcccccatgcatttagatttaatttctgggatgtgacctgggtatctaag

SEQ ID NO: 963665 - DNA, 120 bp, Artificial Sequence
  ENSG00000279110_55 (sequence is synthesized)
ttttgaaaatctccctgagtgagttatttccatttccagaagaagaaatctaggttccaactggtggggctgcatctggaatctggatccttcatcacaccctgaagtcttaaacttgct

SEQ ID NO: 963666 - DNA, 120 bp, Artificial Sequence
  ENSG00000279110_56 (sequence is synthesized)
aagtcttaaacttgctttttccataactcatgtctgccacagggtgctaggatggattctattcaaaggagggatgaggctgggtgcggtacctcatgcctgtaataccagcactttggg

SEQ ID NO: 963667 - DNA, 78 bp, Artificial Sequence
  ENSG00000279110_57 (sequence is synthesized)
catgctggcgcatgcctgtggtcctaggtacttgggaggccgaggcagaaggatcgcttgagcccaggtccaagctgc

SEQ ID NO: 963668 - DNA, 120 bp, Artificial Sequence
  ENSG00000279110_58 (sequence is synthesized)
gccgaggcagaaggatcgcttgagcccaggtccaagctgctgtgagccatgattgtgccactgcacttctgcctgggcaacagagtgagaccttgtctaaaaaaaaaaaaaaaaaaaatg

SEQ ID NO: 963669 - DNA, 120 bp, Artificial Sequence
  ENSG00000279110_59 (sequence is synthesized)
cccagcagagcgcactggacatgtgacgttacccttttgggcctccgttttcctgatctgtgagatggcggcagtgcgttgtgagctaatgggctaacaggtggaaaaggttcactctcc

SEQ ID NO: 963670 - DNA, 120 bp, Artificial Sequence
  ENSG00000279110_60 (sequence is synthesized)
tgggtctccttccaacagtgaggggagcctctagagcccgcaatcccacgctgttccaccaggggacgcgcgcacgccaggatgctggcctactccacaagggaggctttgcaaggaaca

SEQ ID NO: 963671 - DNA, 120 bp, Artificial Sequence
  ENSG00000279110_61 (sequence is synthesized)
ggtgtccctgtcattcactcatctctctcctgcgggccggtcggcatccagctgggggccctgcgtggccttggtccctgggagcccacagagccccggagctccaggtggcactgctga

SEQ ID NO: 963672 - DNA, 120 bp, Artificial Sequence
  ENSG00000279110_62 (sequence is synthesized)
aaccgaagccagccatccttcttccacctggggatcctgccccactagagacaccctttctcctcccaagttgcaagggctaagtccacaggtctggattcaatccagccatcattgttt

SEQ ID NO: 963673 - DNA, 120 bp, Artificial Sequence
  ENSG00000279110_63 (sequence is synthesized)
cttcactgcatgttgcggggccagtcacctcccctctctgagcctcaggttcagaatctcttaaatgggcatcctcttggcacttcagaatatagtgaagtcacttaggggaaaagtgcc

SEQ ID NO: 963674 - DNA, 120 bp, Artificial Sequence
  ENSG00000279110_64 (sequence is synthesized)
aggaaatggaacttcatgtagaacgtggggagtatgaagacggataatgggatggtgtttgcacagtgcttagcacagcgtctgccacatagaaactcagtgtctaacatagtcacagca

SEQ ID NO: 963675 - DNA, 120 bp, Artificial Sequence
  ENSG00000279110_65 (sequence is synthesized)
tcacagcaacaatagccaacacttacaaagcacctaccaggtgtcaggcactgttcatcgcaccttgtgcataggagctcatctcacttcactgccttttttttttttttttttttttga

SEQ ID NO: 963676 - DNA, 120 bp, Artificial Sequence
  ENSG00000279110_66 (sequence is synthesized)
caggagtgagccactgcgcccggccacttcaccgcatttctaacaagtaggctctgttataatcccagtctcagagatggggaaactgaggcacggagatgtcaatccactcaaagtcac

SEQ ID NO: 963677 - DNA, 120 bp, Artificial Sequence
  ENSG00000279110_67 (sequence is synthesized)
atagctggtaagtagcagagttgggatttaaacccaggccatctggcttaggatatgagctcttttctgtattcatctcacacttcaattttaaaaatccttttccaggcaacaaaagaa

SEQ ID NO: 963678 - DNA, 120 bp, Artificial Sequence
  ENSG00000279110_68 (sequence is synthesized)
aaagttgggcgtcatcaaacttcatcaaagttataaattttgtgcatcaaagaacattatcaagagaatgaaaagacagcccacagaatgggaaaaaaatatttgcaaatatctgatatg

SEQ ID NO: 963679 - DNA, 70 bp, Artificial Sequence
  ENSG00000279110_69 (sequence is synthesized)
aggaacacttgagttcaggagttcgagaccaacctgggcaatatggcaaaaccccgtctctaccaaaaat

SEQ ID NO: 963680 - DNA, 60 bp, Artificial Sequence
  ENSG00000279110_70 (sequence is synthesized)
tgggaagctgaggtgggaggatggtttgaactcacgaggtgttgcagtgagccgagatca

SEQ ID NO: 963681 - DNA, 120 bp, Artificial Sequence
  ENSG00000279110_71 (sequence is synthesized)
atggtttgaactcacgaggtgttgcagtgagccgagatcatgccaccggcactatagcctgggcaacagagccagatcctgtctgtctgtttgcctgtctctctctctatatctgtatct

SEQ ID NO: 963682 - DNA, 120 bp, Artificial Sequence
  ENSG00000279110_72 (sequence is synthesized)
atatctatatctatatctatatctatctatatctatctatatatatgtttgtgtgtatgtattcctacaactcaacaacaaagaaaaaacaatctgattcaaaaatgggcaaaggacttg

SEQ ID NO: 963683 - DNA, 120 bp, Artificial Sequence
  ENSG00000279110_73 (sequence is synthesized)
atgggcaaaggacttgaacggacatttctgccaaaaagatatacaactggtcatttggcatatgaacagatactcaaaatcattagtcattagggaaatgaaaataaatatctcaatgag

SEQ ID NO: 963684 - DNA, 120 bp, Artificial Sequence
  ENSG00000279110_74 (sequence is synthesized)
aatgaaaataaatatctcaatgagctaccatggctaatttttaaatttttatttattcattgttttagagacaggggtctcactatgttcagcccaggctggtctggaactcctggcctc

SEQ ID NO: 963685 - DNA, 120 bp, Artificial Sequence
  ENSG00000279110_75 (sequence is synthesized)
ctgagtcactggatgacaggcatgagccacggcgcccagcccacaacttgttttttcagtcacaacctttgatgagttactttcagcagtccttgtgtggtctttcattttgattgtttc

SEQ ID NO: 963686 - DNA, 120 bp, Artificial Sequence
  ENSG00000279110_76 (sequence is synthesized)
cttctcatttggactcgctgtcaaccaactgaaatctagagggaatctctaactagcagccaggatatgttcttgggcgggggccacctcacaagttcccacttatttcaagttgattac

SEQ ID NO: 963687 - DNA, 120 bp, Artificial Sequence
  ENSG00000279110_77 (sequence is synthesized)
actcacaaggactaccactgctgtcagcagaatccaaatgttcctcccctcctttttccagtcttaataacaaagtcatcaggtccaaatgctctcaaacctctcaacctttgccctggc

SEQ ID NO: 963688 - DNA, 120 bp, Artificial Sequence
  ENSG00000279110_78 (sequence is synthesized)
agatcctgcgtacaaagatgctggcatgacgatgacacagcaccagcctcagaagcaaagggccacagtttcaccagttagagatgtgggaaagtctgagctcagtgtaaaaccaaacac

SEQ ID NO: 963689 - DNA, 120 bp, Artificial Sequence
  ENSG00000279110_79 (sequence is synthesized)
tgcgggtgtccaggagggtcacgtggaagtcaagtttaaaggaccccagatgacatccgttgtatagagcacaatttcacgcctctaaacctctgcccatgctgttccctcgatcagggg

SEQ ID NO: 963690 - DNA, 120 bp, Artificial Sequence
  ENSG00000279110_80 (sequence is synthesized)
caaaccactgttccccagaccatagttacctggcaaacacctgctcagccttcaagacttagaactcagactctttggtctcgaactcctgcttctcagctagccctccccaagtggaga

SEQ ID NO: 963691 - DNA, 120 bp, Artificial Sequence
  ENSG00000279110_81 (sequence is synthesized)
caccccctccctcctccagggagactttacacaaattcaaattaaattaaagcacatgacatgatgcctggcatatagtaaatgttcaataaacagtagctattagggagcttccggata

SEQ ID NO: 963692 - DNA, 120 bp, Artificial Sequence
  ENSG00000279110_82 (sequence is synthesized)
cctgaacacagggaggttcctggagggtggcgtgcccagggagggcatggaagctctgcactccctcccccatacctcaccctacgcatctctgcttctacagcttatcttttgtaataa

SEQ ID NO: 963693 - DNA, 120 bp, Artificial Sequence
  ENSG00000279110_83 (sequence is synthesized)
actggcaaacgaagaggaagagagaccagagacatctacctatcacccacctcccaccctgcatacacagaagaggctacgcaaagacaaatgaaggacacagctgtcagccacggagag

SEQ ID NO: 963694 - DNA, 120 bp, Artificial Sequence
  ENSG00000279110_84 (sequence is synthesized)
gagcctcattagaagccagccttgctagctccttcatcttggacttctagcctgtgtatctgtgagaaagcaaatttctgttgtttaagaaaaaaaaagaaaattagctattagaaccca

SEQ ID NO: 963695 - DNA, 82 bp, Artificial Sequence
  ENSG00000279110_85 (sequence is synthesized)
atttacctacccgctggagtgcagtggcgaaaactcagctcactaaaacctccgcctcccgagttcaagcgattttcctgcc

SEQ ID NO: 963696 - DNA, 120 bp, Artificial Sequence
  ENSG00000279110_86 (sequence is synthesized)
tgcctcagcctcctgagtagctgggatcaagtgattctcctgcccctcagcttcctgagtagctgagattacaggcacgcaacaccacgccagtctaattcttctttttttttttttttt

SEQ ID NO: 963697 - DNA, 120 bp, Artificial Sequence
  ENSG00000279110_87 (sequence is synthesized)
ccactgtgcctggcctatttacctaccttcttaattgtctatgccttagtcataactgtagcccactgcccagcatagcacttaccacatgcagataaatatttgtcaaaaaaaggagca

SEQ ID NO: 963698 - DNA, 120 bp, Artificial Sequence
  ENSG00000279110_88 (sequence is synthesized)
aaatccctaaacactctacctcagcccaactggtcctccaagcacccccctttgtctgtgtgagttctcagtcccaaatgtctcccctcctacttcctgcacctaactggaccctcccag

SEQ ID NO: 963699 - DNA, 120 bp, Artificial Sequence
  ENSG00000279110_89 (sequence is synthesized)
gtcattttcagacccctgggctgtgaactccaggaggctgacggagaaaatctccaggccccatcatgcagggcctggcgcatagtaggcccaaaaagaaataaactcaagaaccaaatg

SEQ ID NO: 963700 - DNA, 120 bp, Artificial Sequence
  ENSG00000279110_90 (sequence is synthesized)
agccagcatatgctaaccaataggtttcagggattgggagaaaattctagagactaccagaggccctcccgctggcccattgcaaggaagcctcccagctgatgaatctctgacttcatc

SEQ ID NO: 963701 - DNA, 120 bp, Artificial Sequence
  ENSG00000279110_91 (sequence is synthesized)
gtcacaagatgggcctccagggtaaactgtgactcgaggtcacagtccacaactgagtcactgtgttttatggtccctgtgaaaatgcagaccaaagctcacttcctggggaaaagagga

SEQ ID NO: 963702 - DNA, 120 bp, Artificial Sequence
  ENSG00000279110_92 (sequence is synthesized)
gagggaggaagcctgatacaggacttggattcgccatgtggactcgaggtcctgaggggaaccctgaaagtaacaagggagatggggagaaacagagagcactggccaaggagtcacaaa

SEQ ID NO: 963703 - DNA, 120 bp, Artificial Sequence
  ENSG00000279110_93 (sequence is synthesized)
gaagaactccagccccagctctgcctctagaggccacaggaccatacacaagacacttccctacactgggcctgtctcctcaactgcagaaaaacttctaaggctatggatgtttgtctt

SEQ ID NO: 963704 - DNA, 120 bp, Artificial Sequence
  ENSG00000279110_94 (sequence is synthesized)
tcccatcagctctttgggagagcatagaaaaaaaacctggccgcaaataataataaaataataataagccgggtgcagtggctcacacctgtcatctcagcactttgggaaaccaaggct

SEQ ID NO: 963705 - DNA, 71 bp, Artificial Sequence
  ENSG00000279110_95 (sequence is synthesized)
gaaaccaaggctggcggaaatctctactgaaaatacaaaaatcagcctggtgtggtggtgcacgcctgtag

SEQ ID NO: 963706 - DNA, 120 bp, Artificial Sequence
  ENSG00000279110_96 (sequence is synthesized)
aataatagctgctatgatttgtgaagccatttctcggtgtcaggcactgtgctaagagctttgtaagcatcatctcatttgggctctgtcctcccaccgggctaccacgtaagacgagtg

SEQ ID NO: 963707 - DNA, 120 bp, Artificial Sequence
  ENSG00000279110_97 (sequence is synthesized)
gaaagttcagcagacacttaagagcatggactgcagacccagaacttggaagagacacttaatggctctgagcctcagtttgcccatctgtgaagtggaaataatagcagtatctacatg

SEQ ID NO: 963708 - DNA, 120 bp, Artificial Sequence
  ENSG00000279110_98 (sequence is synthesized)
acatgtaacgatagtaagtgttaggctttgttattgctatcactatccactttatagaggaggaaaagtgaggccctgagtggtaaactcacttgctcaaggcctctagcaagtggcagg

SEQ ID NO: 963709 - DNA, 120 bp, Artificial Sequence
  ENSG00000279110_99 (sequence is synthesized)
gtctgtagttcagcaaccatgggcagggctatgcaaatcagcagggcattggcctggcaggtcccaggcaccctctgcaagacagcagcagcacagcagctgatggccaaccccgggctg

SEQ ID NO: 963710 - DNA, 120 bp, Artificial Sequence
  ENSG00000279110_100 (sequence is synthesized)
agcaaatatcacattctcagctccaggaggagtcccagggctcagggtgtcttgtttcctcatgtagctaatgcacggagtgctgcaggcccaggagagagaggagctggcaggggctgg

SEQ ID NO: 963711 - DNA, 120 bp, Artificial Sequence
  ENSG00000286299_0 (sequence is synthesized)
acaactacccagctgatgctgtacatatagctcacatccagagaaagaacaaagccatgtcaaaaccgcctgtgattccttgagtgtttttccagctacccaccacctgcccaccgtctc

SEQ ID NO: 963712 - DNA, 120 bp, Artificial Sequence
  ENSG00000286299_1 (sequence is synthesized)
ctctcggacctcagcttgggctagaatctgacaattggtgctgtaagcaggatcatgagatttagatgtggcggtgcctctcttgcagcaacatttggcagcatgcagttgggccatcaa

SEQ ID NO: 963713 - DNA, 120 bp, Artificial Sequence
  ENSG00000286299_2 (sequence is synthesized)
tgaatccaaggtccaagggtctggattatctgccaaattattggaagtttcctgtctagtgctggagttccaagctggacctggtggttcaaaccttgaatgaacagccatggaaagacc

SEQ ID NO: 963714 - DNA, 120 bp, Artificial Sequence
  ENSG00000286299_3 (sequence is synthesized)
gcccagccctggtggaggctttattacactgggccaccacccctattcagttgcagatacacactaaggatgacctcctccgaccaggttaacatgctccaactgcattgtaaactgcgc

SEQ ID NO: 963715 - DNA, 120 bp, Artificial Sequence
  ENSG00000286299_4 (sequence is synthesized)
ccacacctgtgctgaggtgatcaatgtttccaactttcgggtctgcactgcccttccagcagcagctgcagatgacttgccttggcatatacattcagtgtctacagagaactggacatg

SEQ ID NO: 963716 - DNA, 120 bp, Artificial Sequence
  ENSG00000286299_5 (sequence is synthesized)
gctggagacttggggtcccgtggttgacatctggaatgcaacgcagcaagctttggacaaaggacgctgcaagatccatggtgctcccatcatgtggctggcccatagcatttatgatgg

SEQ ID NO: 963717 - DNA, 120 bp, Artificial Sequence
  ENSG00000286299_6 (sequence is synthesized)
ctggggctggctagcgggggaacatgtagtacccccagcccaggtgtcgcagagcatagagcaacactggggtaacaccactgtgggataggtacccatcacagcctgtgtaaacataac

SEQ ID NO: 963718 - DNA, 120 bp, Artificial Sequence
  ENSG00000286299_7 (sequence is synthesized)
acatgtcaccatactgaaggtatgctggaacaagcagcccccaagtttgggccccaagggactttgtgccccctgggagtttatgggtctgtgggcacacagggtggccttacctaccag

SEQ ID NO: 963719 - DNA, 120 bp, Artificial Sequence
  ENSG00000286299_8 (sequence is synthesized)
tgaactggacggaatgttggaactgggggtggccactgttctctccacattgcccagacactgcataactggaaggcgctacactctcattttttgtgagtgcgacgagctccccagtgg

SEQ ID NO: 963720 - DNA, 120 bp, Artificial Sequence
  ENSG00000286299_9 (sequence is synthesized)
cggcgggtgtcacaactgtagaagcacaagttactgctcttgcagagcacaccactcgggctctgaattacacccaagtggccctcctcctgttaatggatgaggctggtcagatgagaa

SEQ ID NO: 963721 - DNA, 120 bp, Artificial Sequence
  ENSG00000286299_10 (sequence is synthesized)
aggtggtattgcaaaactgaatggccttagacatagtaacctgctgcacaaggaggcacctgtgcccttttaggaacacaatgttgtacctttatccctgacaattggcagaacataaca

SEQ ID NO: 963722 - DNA, 120 bp, Artificial Sequence
  ENSG00000286299_11 (sequence is synthesized)
gcagccctgcaagaggtctcatgggagattaaggtggtggagagccttactgacaaccccctgcagagatggtgggcatctctgggctgtggcctacgctgggcccttacagtcctaagt

SEQ ID NO: 963723 - DNA, 120 bp, Artificial Sequence
  ENSG00000286299_12 (sequence is synthesized)
agcatagctgggatcctggtaatgagctgttgctctctgtagtgttgtgggttatggattcagggctccaccctatgggcacgtatccctacctgaaagactcctctcagcctaggggat

SEQ ID NO: 963724 - DNA, 120 bp, Artificial Sequence
  ENSG00000286299_13 (sequence is synthesized)
ggagtgtaagggaaatggctgcattttagtcaggagtaggctgaggcagccttctggcacagcatgactcagtgggtttggaacgcaggcacacaactctacacattatgtaaccatgcc

SEQ ID NO: 963725 - DNA, 120 bp, Artificial Sequence
  ENSG00000286299_14 (sequence is synthesized)
acgtgaggcacattaggtgaccattcacatgagcctgtgcttggctgggatccattattgtctctaaaaggtttaactaccctgctgatgctgtacatatggctcgcgcctagagagaga

SEQ ID NO: 963726 - DNA, 120 bp, Artificial Sequence
  ENSG00000286299_15 (sequence is synthesized)
ataacgccatgtcaaaactgcctacgattcctcaagtttttccagctacctgccaccagcccaccaactccctttggacctcagtttgggctagaatctgacaaacagtaacaaataatt

SEQ ID NO: 963727 - DNA, 120 bp, Artificial Sequence
  ENSG00000286299_16 (sequence is synthesized)
cttttttcttgagttcaaaccatgaataattatttactctgcattgtaattatagggttgtcattcagaagacaaagtctaggcaaatggcaggtatcttctaaggactaacatttttaa

SEQ ID NO: 963728 - DNA, 120 bp, Artificial Sequence
  ENSG00000286299_17 (sequence is synthesized)
gtaataatgctcatttatagacattgctggtaggctcaggagctgttattttgttgatcttcattttgttattttcttatcatcaaatgttttatttataacactattatatttttttct

SEQ ID NO: 963729 - DNA, 120 bp, Artificial Sequence
  ENSG00000286299_18 (sequence is synthesized)
ttctttctttaaaagatgtatttcctcaggaaggaaggtttaggactaactgaaaactcccatttcgtaggtagatgatgaactgagataatggttaagtgactagttataaagtctaac

SEQ ID NO: 963730 - DNA, 120 bp, Artificial Sequence
  ENSG00000286297_0 (sequence is synthesized)
gatcagaggacggttcccacagagctggaactcacctctgagaagaggatattgctcagctgcttctcgtgcctccaagtgaacacaatagtgatgctgattcgtgaagttagaaagaat

SEQ ID NO: 963731 - DNA, 120 bp, Artificial Sequence
  ENSG00000286297_1 (sequence is synthesized)
gtggaaactagaaaaccacagctataaccaactgctgctgctaagaatacctgaaactggataatacgtaaagaaaaaaattaattcttacagctatggaggctgggaagtccaaggtca

SEQ ID NO: 963732 - DNA, 120 bp, Artificial Sequence
  ENSG00000286297_2 (sequence is synthesized)
aagggctgaatttgaatgggactgtttcaagggaaggctccttacagtgaagaaaagggtcaaatccaattaaaattgcaaaggaaacttcgcgaggacgaatgccattagcccaaactg

SEQ ID NO: 963733 - DNA, 120 bp, Artificial Sequence
  ENSG00000286297_3 (sequence is synthesized)
ctgcaggtggccaaatgctttctcataagtctcatcagaaacgtcatttatagcaacagtattcaccaagaattgtaagagaaacattttgtgaactgtgatataaaggtgatggaaaat

SEQ ID NO: 963734 - DNA, 120 bp, Artificial Sequence
  ENSG00000286297_4 (sequence is synthesized)
gcaggcctgttagtgacataacacatccattcttgaatcctgcaaaggatattatgtgagcaaatgcacatagtgaaacctaaaaaggttccagtttttaaatgctgaatgctagagagc

SEQ ID NO: 963735 - DNA, 120 bp, Artificial Sequence
  ENSG00000286297_5 (sequence is synthesized)
tctgcttttacctgctgtgatttaaaaggctagaggcctcattttaagccactaaaattcaaagtgacagaaacctacaaatttttattgctgtgcatttaataaaatttacatttacaa

SEQ ID NO: 963736 - DNA, 120 bp, Artificial Sequence
  ENSG00000286296_0 (sequence is synthesized)
gacactggcccgcggttcatgaacagtctgcatttcagacctttcctctgtttttattttacatcgtcgctagtgccacgtcttcaaatttactggctttttccttctgcaccgtctcat

SEQ ID NO: 963737 - DNA, 120 bp, Artificial Sequence
  ENSG00000286296_1 (sequence is synthesized)
ctgccatggagcctgcccactacacctctcaactccagtgctgcagctttccactcctgaagtttggtttgggaatttttatgccttccattctcagcctcccctctgactccctgaatg

SEQ ID NO: 963738 - DNA, 120 bp, Artificial Sequence
  ENSG00000286296_2 (sequence is synthesized)
cgggaagattgtcgtagttgtactctcctgcttctttgaatgctgctaatttctgatcagatgctagacattgtgagttctgcctcattctcttgagctttggaaggtgttgatcttgag

SEQ ID NO: 963739 - DNA, 120 bp, Artificial Sequence
  ENSG00000286296_3 (sequence is synthesized)
ctttggaaggtgttgatctggagctttggaaggtgttgatcttgagctttggaagatgttgatccttttgggtcatccttgctttttggcttcatcaggtgggacctgagcagtgtttag

SEQ ID NO: 963740 - DNA, 120 bp, Artificial Sequence
  ENSG00000286296_4 (sequence is synthesized)
gctctgagtgagaccccatgttgctccccgaagcctcttgggctggtcaacccttgactgaagactcggggctccccttgcagatcccagagccctccctccgggcagctctcctcgctg

SEQ ID NO: 963741 - DNA, 120 bp, Artificial Sequence
  ENSG00000286296_5 (sequence is synthesized)
gagatccagcctgagacctccagcctctgtttcctccttggacttggctccttctcctcagccctgcctggggcctctccctgcactggggctggaacccacgcccgccgtgcactgggc

SEQ ID NO: 963742 - DNA, 120 bp, Artificial Sequence
  ENSG00000286296_6 (sequence is synthesized)
cccaccttgtttgcccgccctcctcagggaccacggtctctcggtgcctggtgtctgatgcctaacacaggtttcagatattctgtccattttttaacttgttttcatggaagagtaaat

SEQ ID NO: 963743 - DNA, 120 bp, Artificial Sequence
  ENSG00000286296_7 (sequence is synthesized)
ctggtccctgttagtccttcttggctgaaagcgtaagttctgatgctgatgtctcagagcttccttggccaaatttgagtcagtgcagtagtcaatcttccattgtccctgcattttaca

SEQ ID NO: 963744 - DNA, 120 bp, Artificial Sequence
  ENSG00000286296_8 (sequence is synthesized)
ccatacaacaataatgctattcaaataaaaactgcgtgtctagccaagagagaggcttgtgatcaccagctctgcctcagggcctcctgtaactttaatcggaagggaaagcaccagagg

SEQ ID NO: 963745 - DNA, 120 bp, Artificial Sequence
  ENSG00000286295_0 (sequence is synthesized)
gagctgtgctgataggatttcccctgcatttattgatttgtctcaaaaacaaaggcataaacattgcaaatacctgacattatgcccttagagagggaaggagaatcacacctgagcaga

SEQ ID NO: 963746 - DNA, 120 bp, Artificial Sequence
  ENSG00000286295_1 (sequence is synthesized)
ggtgtcatgacggcagaagcacatgcactccccagctcccacgctcgtgccagaccctgcagaagctgccaatgcaaccgcatttctcattgattcttaggcctctcctgtgacacagca

SEQ ID NO: 963747 - DNA, 120 bp, Artificial Sequence
  ENSG00000286295_2 (sequence is synthesized)
cagctcttcctccgccggactcacaggtccctttggccaaacccagcagaagccagaggggaaggagactcacagatgtagccccgcaggtcggcgtccaggacctaagaggggtaggac

SEQ ID NO: 963748 - DNA, 120 bp, Artificial Sequence
  ENSG00000286295_3 (sequence is synthesized)
acgaggagaacctgggagacatgtggaagttgctgggcacaaatgacgggggacaccctgagggaccccatttggatgtgctgaagccagcatgctcaccctcacaatatgtgttcactc

SEQ ID NO: 963749 - DNA, 120 bp, Artificial Sequence
  ENSG00000286295_4 (sequence is synthesized)
tcagcctggaggacttttgactcttgccatgtctgtgcctttaaaaaataaccaactgtcagcaacaagggatacactttgaaaaccaaaacagaaattcccaaagaagccaggagccca

SEQ ID NO: 963750 - DNA, 120 bp, Artificial Sequence
  ENSG00000286295_5 (sequence is synthesized)
gagactgtgataaggggcagctgggcaggcctgcagccctctggccatgacgcccagcactcctccttgagcaagcggggtttggtactggggtcagtgatgagcaagactcggcccctg

SEQ ID NO: 963751 - DNA, 120 bp, Artificial Sequence
  ENSG00000286295_6 (sequence is synthesized)
ccccagggacacctaagctagcggggctgctgaccacatcacctcagggacacctaagctagcggggctgccagccacatcaccaaagcactctctacttgaaagcatgcagcagatgaa

SEQ ID NO: 963752 - DNA, 120 bp, Artificial Sequence
  ENSG00000286295_7 (sequence is synthesized)
ggtgtgcgcaggtgcagggcagcatgagaagggacccaacgtggtctgttggatcagaggaggcttgggaagtggtgataacaggacaagctggtgaatggttttgttttttgtttttgt

SEQ ID NO: 963753 - DNA, 64 bp, Artificial Sequence
  ENSG00000286295_8 (sequence is synthesized)
agtgattccaattttgtatctttagcagactcggggtctctccatgttggtcagtctggtctcg

SEQ ID NO: 963754 - DNA, 120 bp, Artificial Sequence
  ENSG00000286295_9 (sequence is synthesized)
ggattacaggcttgagccaccgcgccctgctctggtgcatgtttcgagagctgctccccacccagggcatcatcactggacaaggtcattcactcaaggctgattctggccagatgccgg

SEQ ID NO: 963755 - DNA, 120 bp, Artificial Sequence
  ENSG00000286295_10 (sequence is synthesized)
aggctgattctggccagatgccgggtttgattttgttagtttagtccagttggacatcctggaccagatggggcaagaactcagaggataaaattcatcttgtcccttgggcagaaccat

SEQ ID NO: 963756 - DNA, 120 bp, Artificial Sequence
  ENSG00000286295_11 (sequence is synthesized)
acatcttcatcttaacctcaccatctgacgattgcctttatcatcttaacctcaccgtctgaagattgccgttagatggtgttcggacggcatcactatgaacagagatagaggtaaagg

SEQ ID NO: 963757 - DNA, 120 bp, Artificial Sequence
  ENSG00000286295_12 (sequence is synthesized)
cacgtgagactccaaagcttctaccgcaaggacccttttccacctttttttccagacaaacttcattgaaaacaccatggcctctgacttccgtggtggaaaggaatcattcccatgact

SEQ ID NO: 963758 - DNA, 120 bp, Artificial Sequence
  ENSG00000286295_13 (sequence is synthesized)
cttgttgaaacctcaaaaagcatttgaagatgcccattcgccttctggaagccctgggttgggggccaggtctgtgtccaggcctgaaggctgaccactctgtcacatttttttcctgta

SEQ ID NO: 963759 - DNA, 120 bp, Artificial Sequence
  ENSG00000286295_14 (sequence is synthesized)
ggaaggggtgaccgagctcaggaaacagcaaagagaaggcacagtagttgcatgagttggggctgctgagcacctgggtgcatctagaggtttcctccccacactccttgggagccttta

SEQ ID NO: 963760 - DNA, 120 bp, Artificial Sequence
  ENSG00000286295_15 (sequence is synthesized)
ccaagacagaaagtccacttgcctaaagcaaaatgtgtcccgaaaacattcttttctcctcgccccaaatactgaataggtattttaggaattaaaatgcagtaaattcaaattacagtc

SEQ ID NO: 963761 - DNA, 120 bp, Artificial Sequence
  ENSG00000286295_16 (sequence is synthesized)
tctccaaatcacgatactaaaaaggaaatgtaatattcatactcaacttgtcatcttaattaatttgtctgtattatttcaggagttctaaaaaaaatacagagcagtcatcaagcgaaa

SEQ ID NO: 963762 - DNA, 120 bp, Artificial Sequence
  ENSG00000286295_17 (sequence is synthesized)
atggagtagaaataaagtgattcagttaactcactatccatctatgcagatttatgagaggaagacctttccactaggagaagaagtgggctacataaaacactcccagaaatagctatt

SEQ ID NO: 963763 - DNA, 120 bp, Artificial Sequence
  ENSG00000286295_18 (sequence is synthesized)
agagaaccattacttaaatatgggtgatttttttaagttattttacaatattatccaatctaaaaattcagcatgctttttctgagactttctaaatactaaagcttaacatttgaaaca

SEQ ID NO: 963764 - DNA, 120 bp, Artificial Sequence
  ENSG00000286295_19 (sequence is synthesized)
attttaggtttacaataaaactgagcagaaagtaccaagagtgcccatgtgcctcccagccccatacactcacagccttctccactgtcaatgtcccccaccacagtggtgcacttatta

SEQ ID NO: 963765 - DNA, 120 bp, Artificial Sequence
  ENSG00000286295_20 (sequence is synthesized)
aaactgatcaggctacactgacacgtcatcatcacccaacatccacagtttacattaggggcctctcttggtgttgcaccttctatgggttttggcaaatgtagaatagtatgcatccac

SEQ ID NO: 963766 - DNA, 120 bp, Artificial Sequence
  ENSG00000286295_21 (sequence is synthesized)
cactgtaacatcatacagaatcacttcgctgtcctaaaaacttcctgtgctccacctagtcatccctcctaccccctaacccctggcaaccattaatctttttactctctccatagtttt

SEQ ID NO: 963767 - DNA, 120 bp, Artificial Sequence
  ENSG00000286295_22 (sequence is synthesized)
gttttttccagaatgtcatatggttggattgattcagtctctagccttttccaattggcttcttttattggtaatattcatttaagtttcctccacatcttctcgtggcttgattgattg

SEQ ID NO: 963768 - DNA, 120 bp, Artificial Sequence
  ENSG00000286295_23 (sequence is synthesized)
ctcatttcctttcagtgctaaataatgttccattgtctggatgtgccacagattatttataaatttgtctactaaaggacattttggttgttttcaagttctggcaactatcaataaagc

SEQ ID NO: 963769 - DNA, 120 bp, Artificial Sequence
  ENSG00000286294_0 (sequence is synthesized)
ggcagggcctggcaactgaccggctcccagctccagctgtttgaccgagctgcccttctgcccagcgcagatgccccagtgacccagagcccttacaatctcacctctgactttcacctc

SEQ ID NO: 963770 - DNA, 120 bp, Artificial Sequence
  ENSG00000286294_1 (sequence is synthesized)
ccaatgtttctcagatgtgcaacaagagtgaagaaaactaaatgagcatgcaaatgtttgactattagtaaagagctcaccagtacagacacagggagctggttggtcggcttgaaaatt

SEQ ID NO: 963771 - DNA, 120 bp, Artificial Sequence
  ENSG00000286294_2 (sequence is synthesized)
ctctcagaccaagagaagccaaacaagtttctgcacccactgagaacgtgcttctgccagacgaggagaaacaagttctgggtgtggcttcctatgatgctccattagggaagcctccat

SEQ ID NO: 963772 - DNA, 120 bp, Artificial Sequence
  ENSG00000286294_3 (sequence is synthesized)
ttagggaagcctccatctgcagcacagattaggacatttcccacgatcagttttctgactgacttttggagaaggagaaggaggaggaggaggagaagaagaagaagaagaagaggaaga

SEQ ID NO: 963773 - DNA, 120 bp, Artificial Sequence
  ENSG00000286294_4 (sequence is synthesized)
gaagaagaagatcaatgctgcaggcaattaaacttgtcccttgtagatgagccctgattttaacaacataatcacaggattttatgtctctttttttctttcctcaatattcattgagtg

SEQ ID NO: 963774 - DNA, 120 bp, Artificial Sequence
  ENSG00000286294_5 (sequence is synthesized)
ctagtgaaccatttctgttagacactgtactaagaagtttacagctatgacttcgtgtattcctcttatcatccctatgaggtcattcttcatttagagatgagacatctgaggcacaaa

SEQ ID NO: 963775 - DNA, 120 bp, Artificial Sequence
  ENSG00000286294_6 (sequence is synthesized)
gagttagagcaacttatccaagatggcaagacagcaggtgaaagagctggcttgagaacacacattcttaatggagctctctactgtgggctaagcagcacagctttcaataaattaggg

SEQ ID NO: 963776 - DNA, 120 bp, Artificial Sequence
  ENSG00000286294_7 (sequence is synthesized)
tattattactagttgtaaacatagatcttaattttatgtgtgcgttttttttttaaagaggaaatacatttccttccctttgtatcaggtgagtccctttcgtccataggagaacaaatt

SEQ ID NO: 963777 - DNA, 120 bp, Artificial Sequence
  ENSG00000286294_8 (sequence is synthesized)
ggcttttaaccttgtaaaaacctttaacatgcaatgattacacaggatatcagaaagggaaaatccagattagcagagatccaggctggccccagagttctggataagtccgtcaactat

SEQ ID NO: 963778 - DNA, 120 bp, Artificial Sequence
  ENSG00000286294_9 (sequence is synthesized)
ttattgattctgtttataatatcaagaacactggtaataggacagtagcacaattccttgtatgaaatgatggccctttagtctaggaaagatgattagtttcttatttagacaaagata

SEQ ID NO: 963779 - DNA, 120 bp, Artificial Sequence
  ENSG00000286294_10 (sequence is synthesized)
ggtaccagagctttttctgaataaatgtagttaagaaaaagaagtatacatttctctggataatgtgtatttcccctagtgaccagagaaggcaggagtttggaaactttggagaggtga

SEQ ID NO: 963780 - DNA, 120 bp, Artificial Sequence
  ENSG00000286294_11 (sequence is synthesized)
aaggatgggagatagttctacctagagagaagatggaattcagcttctaaggaatgatatgtaatcttgcatcaaatgtggaataagacccatgaccaattccctgaataggtattggct

SEQ ID NO: 963781 - DNA, 120 bp, Artificial Sequence
  ENSG00000286294_12 (sequence is synthesized)
gagtgactttcagaaagtaatatcttaaaagtttcacttttaagctattttctctttctatggtgctgtattcctcacaaatcagagctcaggcaacaggctatgggtacagtgcaagat

SEQ ID NO: 963782 - DNA, 120 bp, Artificial Sequence
  ENSG00000286294_13 (sequence is synthesized)
aacactatcagcctctgcaacagctgcatgggacctggggtgtctggagcccaccatggataagaaactcatggatctgatgaagaagcctgtgttccaggctctcgaagagcacaacaa

SEQ ID NO: 963783 - DNA, 120 bp, Artificial Sequence
  ENSG00000286294_14 (sequence is synthesized)
gtggccgagagaatgttcagtggggttggcgaggagactgggccagcacagctctagacaccccaggtcccatgcagctgtcttaattttcacatatctttattctttattttcacagta

SEQ ID NO: 963784 - DNA, 72 bp, Artificial Sequence
  ENSG00000286293_0 (sequence is synthesized)
tgtgtttctgtgggatcagtggtgatatacctttatcattttttattgcgtctctttgattcttctctctca

SEQ ID NO: 963785 - DNA, 64 bp, Artificial Sequence
  ENSG00000286293_1 (sequence is synthesized)
caggatattatccaggagaacctccccagtctagcaagtcaggccaacattcagatttgtaatt

SEQ ID NO: 963786 - DNA, 80 bp, Artificial Sequence
  ENSG00000286293_2 (sequence is synthesized)
tgactaggaataaactgcattcatcaaattcacacataaccatattaactttaaatttaaatggactgaatgctccaatt

SEQ ID NO: 963787 - DNA, 70 bp, Artificial Sequence
  ENSG00000286293_3 (sequence is synthesized)
actgtcaacattagacagatcagtgagtcagaaaatcaacaaagatacccaggaattgaactcagctctt

SEQ ID NO: 963788 - DNA, 120 bp, Artificial Sequence
  ENSG00000286293_4 (sequence is synthesized)
acgttctttgaaaccaacgagaacaaagtaatagttgacttaaaaaattttagcacactgtcactatgatgaaaaaaaaaatactataaaattatttaaaaaatttttccaccttaacat

SEQ ID NO: 963789 - DNA, 120 bp, Artificial Sequence
  ENSG00000286293_5 (sequence is synthesized)
tatttaaaaaatttttccaccttaacatttagaatattctcacatttgtggttaaaaactattgtgattgttcttagaatttagataaaaaatattccagaaagtttgaagagaagcact

SEQ ID NO: 963790 - DNA, 79 bp, Artificial Sequence
  ENSG00000286293_6 (sequence is synthesized)
ttcagattctctctttgaattcaagtgtttcaaagatatcttattttaaaacaccaaaataggaatagaatatgaaggg

SEQ ID NO: 963791 - DNA, 120 bp, Artificial Sequence
  ENSG00000286293_7 (sequence is synthesized)
tgattttatagatgcttaataatggatattgagttaatatgaaccatttgtagacacaggagtttattaaagcattatataatatctttcaaatatttagaatagtgttgaaattaagcc

SEQ ID NO: 963792 - DNA, 69 bp, Artificial Sequence
  ENSG00000286293_8 (sequence is synthesized)
catgccaaaattggcttaaagcccacctgttacccaagctacacttcaggcatcaaggttcaaaaatgt

SEQ ID NO: 963793 - DNA, 120 bp, Artificial Sequence
  ENSG00000286293_9 (sequence is synthesized)
gggtgagaagagtgtatgaatgctttgtattctgacaaagagaatgtagcacccatgtcctacctgcttggttgcattgccagtgcccacggtaggccattttatccaggttattaggtt

SEQ ID NO: 963794 - DNA, 120 bp, Artificial Sequence
  ENSG00000286293_10 (sequence is synthesized)
taggccattttatccaggttattaggttttgttttgttttcttcttttcaggagagttagtccaagaccaataactacataactggtagaattggaagactttaatagtgcttaacattt

SEQ ID NO: 963795 - DNA, 64 bp, Artificial Sequence
  ENSG00000286293_11 (sequence is synthesized)
tggaagactttaatagtgcttaacattttgtacttagctttataataactcaaaagtcattgct

SEQ ID NO: 963796 - DNA, 120 bp, Artificial Sequence
  ENSG00000286292_0 (sequence is synthesized)
ggagatgggagatcagtcttaaatccatctccctggccactaaaattaggggtttatgtagcagggaagatgtgtaataatgtgtaagaaagcaggaactagggaggggcaaggaagcaa

SEQ ID NO: 963797 - DNA, 120 bp, Artificial Sequence
  ENSG00000286292_1 (sequence is synthesized)
tcatgatgaatgagggcctggcatctcattgtctggatatgattagctgaagaaactgttagagcaccctgggatgtgtgggcctgggactgtttgcctttggcacggctatgctccgag

SEQ ID NO: 963798 - DNA, 120 bp, Artificial Sequence
  ENSG00000286292_2 (sequence is synthesized)
ctttggaggagccaaggaagaaaggcctagttcctgatcttaaggcctttgcagtgtgcattgggagacatagactgcaatgaaaagatcattattgcaagagacaaatggcatggagcc

SEQ ID NO: 963799 - DNA, 64 bp, Artificial Sequence
  ENSG00000286292_3 (sequence is synthesized)
tgaaaagatcattattgcaagagacaaatggcatggagccacattcccatcacccacctcggct

SEQ ID NO: 963800 - DNA, 120 bp, Artificial Sequence
  ENSG00000286292_4 (sequence is synthesized)
agttccctctgaggctgccggctctccctgtgacagcagcccatcttagcccttcctgtgtatctctgctgcctaaaggatgagagtttcctaaagtgtagaactgtgaggggtggaggg

SEQ ID NO: 963801 - DNA, 120 bp, Artificial Sequence
  ENSG00000286292_5 (sequence is synthesized)
acattcctctcatgctggcctgaatcctgcacctactctggaggtcttttgccttgtaccatggagttcgcctacatcaccttggagaaccgacccagcaccttccaggccggctggatg

SEQ ID NO: 963802 - DNA, 120 bp, Artificial Sequence
  ENSG00000286292_6 (sequence is synthesized)
catccccaggaaggaagccgctggtggggccggtcgcactgagtgcgcttggagaacaaagtgctgtgtacatttctgctcaacactactctaagcccacagcgccagttcagaggcttt

SEQ ID NO: 963803 - DNA, 120 bp, Artificial Sequence
  ENSG00000286292_7 (sequence is synthesized)
gggaagagcaggtgccttcatccagtttccactgtacctcttctgaggtacaggagatagaggtccctcatttcaaggtgacactggcatcagtcaagcacagagctaaccaactgccaa

SEQ ID NO: 963804 - DNA, 120 bp, Artificial Sequence
  ENSG00000286292_8 (sequence is synthesized)
tcgtaaacaaggaagccagtgaggacgcccaaggaaaggctcagaaagcttccgccagggagtgggatttgagctctaccttacagaacaggttgaaaataaagagcagagtaatcaaaa

SEQ ID NO: 963805 - DNA, 120 bp, Artificial Sequence
  ENSG00000286291_0 (sequence is synthesized)
aaagaaagaaagagagaaagaaaggaaggaaagaatggaacacaaaagagggctcagagtgaagatatggattgatcagatgactgagactagaaatgtgaccagtggaacaaaacagag

SEQ ID NO: 963806 - DNA, 70 bp, Artificial Sequence
  ENSG00000286291_1 (sequence is synthesized)
tgactgagactagaaatgtgaccagtggaacaaaacagagacctcagaaatgacaccacacatctacaac

SEQ ID NO: 963807 - DNA, 63 bp, Artificial Sequence
  ENSG00000286291_2 (sequence is synthesized)
gaaagctgaaactggatcccttccttgcaccttatataaaaattaactcaacgggaaatacca

SEQ ID NO: 963808 - DNA, 80 bp, Artificial Sequence
  ENSG00000286290_0 (sequence is synthesized)
ttcttctttttttttttttatggcgtctcgcccagcctggagtgcagagctgattttcccgcctcagcctgctgagtagc

SEQ ID NO: 963809 - DNA, 120 bp, Artificial Sequence
  ENSG00000286290_1 (sequence is synthesized)
tacaggcgtgagccaccacgcacggcttctgttgttcgttgaaatcatcatttttctaatgtcctcattctctgctggctagtttaagggctgattcaaaaaataaattttcacactgtg

SEQ ID NO: 963810 - DNA, 120 bp, Artificial Sequence
  ENSG00000286290_2 (sequence is synthesized)
aaataaattttcacactgtgaaatacgcaagatgaagagaacatttataaaatatccatactgtgcatctctgaataatcttttcttcacatcagcggcagtacaaattaggtggagttt

SEQ ID NO: 963811 - DNA, 120 bp, Artificial Sequence
  ENSG00000286290_3 (sequence is synthesized)
taaaagatacttcagcaacttacagattacagcatgttatgtatcttcaagatattttgcttcattggtgtgcttgaacatttctggattcctagactcccagaaagcagtgagaggata

SEQ ID NO: 963812 - DNA, 120 bp, Artificial Sequence
  ENSG00000286290_4 (sequence is synthesized)
acgttgcagaatttggtcagaatatgaagtttggaagaccctatattcctgcagatccttggattgaggttaattcgagagcaagccgtgagtgaggtagcctttattactcatcatgtg

SEQ ID NO: 963813 - DNA, 120 bp, Artificial Sequence
  ENSG00000286290_5 (sequence is synthesized)
tttaagaatgatgcaatgaggctttgttctctgcctatctgaatcacgtggcccaagcaagagatatctattgaaatagcagatagtagtgtcattccattataattaccattatttgag

SEQ ID NO: 963814 - DNA, 120 bp, Artificial Sequence
  ENSG00000286290_6 (sequence is synthesized)
cttcagagaagtggcattgaataactcaattggagaatatgcaagtaaaattaacaaaaccgtacactattaaaaaatgacttggtagatttcttccagaaaacttagaaaacagaatct

SEQ ID NO: 963815 - DNA, 78 bp, Artificial Sequence
  ENSG00000286290_7 (sequence is synthesized)
cttggtagatttcttccagaaaacttagaaaacagaatctcatagctctctgcatactttatgtcaggcctctgagct

SEQ ID NO: 963816 - DNA, 62 bp, Artificial Sequence
  ENSG00000286290_8 (sequence is synthesized)
ctgtgacccccatccctgtccaccagagaacaactccctttgactgtaattttccactaccc

SEQ ID NO: 963817 - DNA, 120 bp, Artificial Sequence
  ENSG00000259999_0 (sequence is synthesized)
aaaagtccaaggactttccatgctagaagactcccatatgccatcaaagaagctcaaattaacaatcagacaattccaaagagcaggccattctacaggtaaggggactgttctaaatta

SEQ ID NO: 963818 - DNA, 120 bp, Artificial Sequence
  ENSG00000259999_1 (sequence is synthesized)
aaatttaaaatacactttgctgccaaagatgacttagcctcgaaaaaagaacaagcaacttctgagtcccagctccactaatctttcctagcagcagcaattttttttttttttttttta

SEQ ID NO: 963819 - DNA, 120 bp, Artificial Sequence
  ENSG00000250427_0 (sequence is synthesized)
gtgtctctgcccgatcgccaccccatctgggagaggaaaggccatgtaaggacagagcaaacaggcaactgtctgcaaaccaggaagagaggcctcaccagatatcaaccttcatggcac

SEQ ID NO: 963820 - DNA, 120 bp, Artificial Sequence
  ENSG00000250427_1 (sequence is synthesized)
cttgatcttgatctttccagactgtgagaaaattaacttctgttgttgtttaagctgccctccaactccgtctgtagtattttgttacggcagcccaaacagactaatacatcaagtaac

SEQ ID NO: 963821 - DNA, 120 bp, Artificial Sequence
  ENSG00000250427_2 (sequence is synthesized)
cacacaaatgcatgtacaattaaaactgacctaactgttaagaagaggagatagggcaagagtatatttatcgagggtattctatctggtcagagatgagagagaaagatttttctgggt

SEQ ID NO: 963822 - DNA, 120 bp, Artificial Sequence
  ENSG00000250427_3 (sequence is synthesized)
aaagttaacaaggtatatagggtggggtgaatatggagtggggaatggtcccagatagggccaattgcttgtgcaaaggccctggggtgagacagagcacagtttattagagaaaccaag

SEQ ID NO: 963823 - DNA, 120 bp, Artificial Sequence
  ENSG00000250427_4 (sequence is synthesized)
taagagtgaagaggaaggtgatacaggtgagggtggagaagagggtgaggcctaacttcccaggaccatgcaggattttcactgctaacttgggccacttgcacaccagactggagctgg

SEQ ID NO: 963824 - DNA, 120 bp, Artificial Sequence
  ENSG00000250427_5 (sequence is synthesized)
aaatggtgggtatgggagacagagatcaaaataacctctagatgtccacttgcatagctggtaggtcacgggaccattcatgatagggaagcccaggagagaaccagatttcaaagagaa

SEQ ID NO: 963825 - DNA, 120 bp, Artificial Sequence
  ENSG00000250427_6 (sequence is synthesized)
agtcatgaatttgcacgtgtcaagcttgttgtgcttttgagtcacttagaaagagacatttgtttgcggacctatctacaagtctagactcagacagagacctgagtcatgtcattacac

SEQ ID NO: 963826 - DNA, 120 bp, Artificial Sequence
  ENSG00000250427_7 (sequence is synthesized)
tgacaaggtgggagaggtgattcgggacagtcattctcagactttgagtttcaagacccctttacactcttaaaaaccatcaaggacctcaaagagcttctgtttatgtgggttatatct

SEQ ID NO: 963827 - DNA, 120 bp, Artificial Sequence
  ENSG00000250427_8 (sequence is synthesized)
tcaaagagcttctgtttatgtgggttatatctgtccatatttactgtattagaaatgtaaactgaaatattaatattaatttataataaacctgttttaccttaacataaaaaaaagaaa

SEQ ID NO: 963828 - DNA, 120 bp, Artificial Sequence
  ENSG00000247828_0 (sequence is synthesized)
agagcgccgtcgaccccacgccacgcagaggtgaagatacgcaggacgtcctctaaagcaacttccgtgggtgccaggttgtgggctgggggcggtgctgaccttgagagagcggaggag

SEQ ID NO: 963829 - DNA, 120 bp, Artificial Sequence
  ENSG00000247828_1 (sequence is synthesized)
gcgcaggcgcagcacagtttaaacttgattttgtgaggggacgaacagcgtgacaattaaaagaagatctgggaatcatccaatgtgataatttatgtgaaatctttctgcaaactatac

SEQ ID NO: 963830 - DNA, 120 bp, Artificial Sequence
  ENSG00000247828_2 (sequence is synthesized)
agtatgataaaaatataaggtagtttcactggaaacaacagaagactagaagctgatgtgacgtggcaatatcaaccaggaatacccatctcgagttctggatatgtgctctgagaaggt

SEQ ID NO: 963831 - DNA, 120 bp, Artificial Sequence
  ENSG00000247828_3 (sequence is synthesized)
gcccatgtcaccgaccacactggaggccaatgcagatactgggggaaggttccatggtagctaagtgtggacaagctaatcactgaagttccctgatgcagagttgataatctctctaga

SEQ ID NO: 963832 - DNA, 120 bp, Artificial Sequence
  ENSG00000247828_4 (sequence is synthesized)
gttggatgaaagactgtgctgccttgaagctctgagagatgccatgccaattcaaggcagggtctttattgttgaaactcttgcgtaatgacatctttattcaggtgaaaatacaggatg

SEQ ID NO: 963833 - DNA, 120 bp, Artificial Sequence
  ENSG00000247828_5 (sequence is synthesized)
aatttcaactatatgatattgtttatgttcctcagacatgttatttgtctttacaaagattggtttcaataaactgtgtgactgatattaaataaacatggaattttacacattcataat

SEQ ID NO: 963834 - DNA, 120 bp, Artificial Sequence
  ENSG00000247828_6 (sequence is synthesized)
atttggtttcttgtgattttgatgaactatactttcaagcattgtcagttcatcctcatttacaaggaaacatttgctgtagcagagtgatgtagtgacttgctttacttaagataagtc

SEQ ID NO: 963835 - DNA, 120 bp, Artificial Sequence
  ENSG00000247828_7 (sequence is synthesized)
aacttttctattcaatgtttaatgtgaaactgacttaaaaattttcttttaggccacatttacatttctgtttgtataacatgcattatactattttaacttaatactatggctatataa

SEQ ID NO: 963836 - DNA, 120 bp, Artificial Sequence
  ENSG00000247828_8 (sequence is synthesized)
accaaagacatcctaattctgtttttaatttattgttttgcaagataaataatttttaatgcactaatgaagctaaggagttcatattaaaagacatgttatatgacctactgaagttga

SEQ ID NO: 963837 - DNA, 120 bp, Artificial Sequence
  ENSG00000247828_9 (sequence is synthesized)
gctatggaaattgactatcttaaaagtaattttataaaattattttgtataaaattgactttcttgtatgaattcttgacaacaaatataaaacaaaaggaagttgaaactccttctaca

SEQ ID NO: 963838 - DNA, 120 bp, Artificial Sequence
  ENSG00000247828_10 (sequence is synthesized)
tccttctacacactgaggagagttaattgaattctttctaatgtcatgatttttgtgtttcttagaaaaagaaatcagatgaatagtaaacatttcaattgcacatatctgcttctggct

SEQ ID NO: 963839 - DNA, 120 bp, Artificial Sequence
  ENSG00000247828_11 (sequence is synthesized)
acctatttaaaatgaaaatctttttcaaagtacacctagatttttcacatctttaaagtgatatcattttatttgtagatttattcatgaaatgttttcattttgccatccaggaaaaga

SEQ ID NO: 963840 - DNA, 120 bp, Artificial Sequence
  ENSG00000247828_12 (sequence is synthesized)
aatgtcacggatttttttttttttttgaggtggggaagcccgaaaatatgcaaccctgagcccatgctccttcatcctatagcctctttccattccaggcaccctgtaagcactcatcta

SEQ ID NO: 963841 - DNA, 120 bp, Artificial Sequence
  ENSG00000247828_13 (sequence is synthesized)
catctcaaagataaaagctatgaaagggcaaataaatatgccaagaattaaagttcctctaaccttaaaaggggttatttaaaacaggcactcctggtataccatgaccaactaaggtcc

SEQ ID NO: 963842 - DNA, 120 bp, Artificial Sequence
  ENSG00000247828_14 (sequence is synthesized)
atacgctgcctttatagaaaggtaccaggaagatgttgaggaggggaaggtcaaccagctagttcagagcaagtttcaaacaacagggtaatggtgtcttcatacctaacatctgatttt

SEQ ID NO: 963843 - DNA, 120 bp, Artificial Sequence
  ENSG00000247828_15 (sequence is synthesized)
tagttttgaaattgcagtggtggtgatggggaggaaaatcagcgaggggagaggggaactgatgaacctaaaaagcagaagtaaaaaaataaagtctgtaggcatggtagtgacaaaatg

SEQ ID NO: 963844 - DNA, 120 bp, Artificial Sequence
  ENSG00000247828_16 (sequence is synthesized)
ctgattcttatggctgcacttcaaagcatgctaggacaggcttgcaaggtccagcaggattatttaaaaggcttggaattttgaatatatattttttaaaacccttttccttctgtttta

SEQ ID NO: 963845 - DNA, 120 bp, Artificial Sequence
  ENSG00000247828_17 (sequence is synthesized)
ttttttccccaaccactagactaccagaaaaaaaaaaatactttctatgccatcttttagattgggttactttggtggatgagtaacctcacccattcctaggattcttttcttttgact

SEQ ID NO: 963846 - DNA, 120 bp, Artificial Sequence
  ENSG00000247828_18 (sequence is synthesized)
agtttcatttttcaggcagtgacctttccctgacctcagccccaaactccaggtcacctttctgtagccctggtgtagcactgaatagagggtttaccagattgttggcactggataagt

SEQ ID NO: 963847 - DNA, 120 bp, Artificial Sequence
  ENSG00000247828_19 (sequence is synthesized)
ggtactgggcacaatcgtcctctttcataagcaggagggaagtttcctttcctaggattgagagagctggctgacttatgcccccttttcattttgttgtccagtaatttcccctctggc

SEQ ID NO: 963848 - DNA, 120 bp, Artificial Sequence
  ENSG00000247828_20 (sequence is synthesized)
catatctgcaaactagttgccttgcaggaaggtgacatgcaccactgatgcaaaaagacaaacaaaaagactgttattggcatcagcacaactttcaatggtacttcaaaacagattcat

SEQ ID NO: 963849 - DNA, 120 bp, Artificial Sequence
  ENSG00000247828_21 (sequence is synthesized)
ttgatagtgaaacgttagttatttgccccaaataattaaaaagtttaattgattaaagcttaatctcagctatttaaatatttctatgcttttttaaattacactctcctgaataaaatc

SEQ ID NO: 963850 - DNA, 120 bp, Artificial Sequence
  ENSG00000247828_22 (sequence is synthesized)
attactagctatgccaatcttcaatctgccctcaaattaccctaggaaagatctccttttacctcaacatgaaaacaattttttcccaagttttcaaatagtgggaaaaacatcatctga

SEQ ID NO: 963851 - DNA, 120 bp, Artificial Sequence
  ENSG00000247828_23 (sequence is synthesized)
ttagacttcagtaggagaccttaaataccctctatcatttggccttcatgttgccacatagccatggccctaccaacaggatgggcacttctgatgttctccaatgttctgctgtttctt

SEQ ID NO: 963852 - DNA, 120 bp, Artificial Sequence
  ENSG00000247828_24 (sequence is synthesized)
ttccaggaagtaacctgtttcatgggtcctaatgctgagatcccagggctgcagtgttttagtccatttgagctgctataaaaaaataccttcaactgggcaattaataaacagtagaaa

SEQ ID NO: 963853 - DNA, 120 bp, Artificial Sequence
  ENSG00000247828_25 (sequence is synthesized)
tcacagttctagaggctgggaagtccaaatcaaagcaccaggagatttcatgtctgctgagggcctgcttcctgcttcatagatggtgacttctaggtgggtcctcacacggaggaaggg

SEQ ID NO: 963854 - DNA, 120 bp, Artificial Sequence
  ENSG00000247828_26 (sequence is synthesized)
aggaaggggcaaacaaacttcttttggcctcttttatgagagtgctaatctcattcatgaggtctctgcccttatgacctaatcacctcttaaaggccctatctctcaatactattgcat

SEQ ID NO: 963855 - DNA, 120 bp, Artificial Sequence
  ENSG00000247828_27 (sequence is synthesized)
tgaggattaggtttcaacataagaattttgagggaacacaaacatttagatgacagcatacagtgaatggcaaactctagcatgtcacattgtaatgcaagaccagtgtaccagcctgtc

SEQ ID NO: 963856 - DNA, 120 bp, Artificial Sequence
  ENSG00000247828_28 (sequence is synthesized)
tttgttagttgacgatgcaatcagcatgctgattaaggttgcttggttttttactaaacattaactgaatgaaaacgggtagtccttgttctgcttggggggctttaaggaagcaaatgg

SEQ ID NO: 963857 - DNA, 120 bp, Artificial Sequence
  ENSG00000247828_29 (sequence is synthesized)
atcttcatcagaagggagtatgctaaagaacacatatgagattactgtgtgtctgacacacagtaggcccttaatattagtttgctgaatgcacaaagggagggaacttcaccaaactga

SEQ ID NO: 963858 - DNA, 120 bp, Artificial Sequence
  ENSG00000247828_30 (sequence is synthesized)
agatcatttctcaggagtaactttaataacaagctgaggcacaaaatcccactaaagtttaccagctacctatttagaatggctgaattttaacagatgttgactgactctcttaggaac

SEQ ID NO: 963859 - DNA, 120 bp, Artificial Sequence
  ENSG00000247828_31 (sequence is synthesized)
tgacaattaaaagaagatctgggaatcaaaagcttcctgaggccttcaccagaagcagatgctggtgccgtgcttctacagcctgcagaactgaaggactttacagcttctctttcgcat

SEQ ID NO: 963860 - DNA, 120 bp, Artificial Sequence
  ENSG00000247828_32 (sequence is synthesized)
atccaaattgccagcatcaccgctcttgcactccaagccattattaagtaaagtaaagaacacaaacactgtgatactgctacacttgatctgataaccaagaagtctactaagtgacta

SEQ ID NO: 963861 - DNA, 120 bp, Artificial Sequence
  ENSG00000247828_33 (sequence is synthesized)
acagaagagaagacatggagaagaggagggagtagttgtgaccgtggaggcagagaatggagtaatgtgatcataaatcaaggaatgctgacagccactaaagctggagaaggccaagga

SEQ ID NO: 963862 - DNA, 120 bp, Artificial Sequence
  ENSG00000247828_34 (sequence is synthesized)
cagatattcaatcctcccgtagaagtacagccctgctaatgcattgattttggacttctggcctcagaactatttatatatcagctttttatcagttgaaataaaccaccctgggccggg

SEQ ID NO: 963863 - DNA, 120 bp, Artificial Sequence
  ENSG00000247828_35 (sequence is synthesized)
ccctccagtctgggcaacagattgagagtctgtctcgaaaaaaataaatacataaaataaataagccacactgtacttgtgaagattaactgagatgtttaaaacattatttgcaaaaat

SEQ ID NO: 963864 - DNA, 120 bp, Artificial Sequence
  ENSG00000247828_36 (sequence is synthesized)
gcaagacatgatgtaagtgtaaagcattattatatatcaacataattgaccattagaaaaatgcaaattaacacctcaatgagatatatcaccagacacctgttagaatggttaaaataa

SEQ ID NO: 963865 - DNA, 120 bp, Artificial Sequence
  ENSG00000247828_37 (sequence is synthesized)
aagttaaacatgcacttactatacaacccagtaatacacctactggatattcattctagggagatcaaaatttacacccaaaaacatgtacataaatgttcatatcagctttatttacaa

SEQ ID NO: 963866 - DNA, 120 bp, Artificial Sequence
  ENSG00000247828_38 (sequence is synthesized)
tagcccaaaaggaaacaatcagatgtcctccaattgataactggtataaccctatcacagaatcctactgagcaataaaaaggaaagcactgttgatacatacaacaacttgagtgcatt

SEQ ID NO: 963867 - DNA, 120 bp, Artificial Sequence
  ENSG00000247828_39 (sequence is synthesized)
tcaaggctgttatgctgactgaaataaaagctaatctcaaaaggttatgtattatgtgattctgtttatataacattctcaaattgcaaaatcacagcaatgaagaactgatcagtagtg

SEQ ID NO: 963868 - DNA, 120 bp, Artificial Sequence
  ENSG00000247828_40 (sequence is synthesized)
ccaggggttagggttgtggggagggtgtgatgatgaatgggcagcgtaagagaatttctttggagtgatggaatagttttatatcttgattatagtgatcattatattaaacaattgcat

SEQ ID NO: 963869 - DNA, 120 bp, Artificial Sequence
  ENSG00000247828_41 (sequence is synthesized)
gtgataaaattctataggactgtatgccaaaaataacttaatatgtttatttttaaggtctggaaagcatggaaatttgtatcttcattcacttttgttttcatggactcttttcatgtt

SEQ ID NO: 963870 - DNA, 120 bp, Artificial Sequence
  ENSG00000247828_42 (sequence is synthesized)
tgaacttttcatggtatgagctgttttataatctataatatggaatgtttctcatacgaatgtttttcttattgaagaatgccatagaaataagggtgtgaggtatacttacttgacagg

SEQ ID NO: 963871 - DNA, 120 bp, Artificial Sequence
  ENSG00000247828_43 (sequence is synthesized)
agaattttactccttttattttatttacttatttatttttaagacggagtcctgctgtgttgtccaggctggtcttgaacccctggactcaaacgatctttctccttggcctcccaaagt

SEQ ID NO: 963872 - DNA, 120 bp, Artificial Sequence
  ENSG00000247828_44 (sequence is synthesized)
tctgggattacaggtatgagctacagtgccctgagagtcctttttaaagtagtgaatgctcaaacatggaattaaatttaggcaaagctcacttttatttatacataaaacaacttcagc

SEQ ID NO: 963873 - DNA, 120 bp, Artificial Sequence
  ENSG00000247828_45 (sequence is synthesized)
catgtacctcataacgatattttggccaatgtctgaccttatatacaatggttgtcctgtacgattataatgaagctgaaaattttctattgcctagtaacattgtagtaattgtaatgt

SEQ ID NO: 963874 - DNA, 120 bp, Artificial Sequence
  ENSG00000247828_46 (sequence is synthesized)
agcacaacctatcacacgtgtttgtagtgatgctggtgtaaacaaaccgactgcattgccagtctagtataaaagtctagcacacacaattatccacagtatataatagttgataatgat

SEQ ID NO: 963875 - DNA, 120 bp, Artificial Sequence
  ENSG00000247828_47 (sequence is synthesized)
tgagagagcggaggaggcgcaggcgcagcacagtttaaacttgattttgtgaggggacgaacagcgtgacaattaaaagaagatctgggaatctttccaagaagagttttctaatctgtt

SEQ ID NO: 963876 - DNA, 120 bp, Artificial Sequence
  ENSG00000247828_48 (sequence is synthesized)
gtcaggtattgttttatagcaatgcagaacagactaacacagacacacacaccaaccaagtacagtatgagaagggattattgggtgccattttggaggttgtctaccacaggattttat

SEQ ID NO: 963877 - DNA, 120 bp, Artificial Sequence
  ENSG00000247828_49 (sequence is synthesized)
ctgtatcattattcaaatttcgtttttgaaaaattttgtaagggcacatttatagaaatatgaatgcttaatatttgatgatattagggaattaaaccatttttgtgtgatagtaatttt

SEQ ID NO: 963878 - DNA, 120 bp, Artificial Sequence
  ENSG00000247828_50 (sequence is synthesized)
taaagattccttatcttttagaaatacatattgaaatatttagagatgtagtgatataatgtctggggtatgcttcaagataagagttgcagaaagtgggtggtagtataaatcaagatt

SEQ ID NO: 963879 - DNA, 120 bp, Artificial Sequence
  ENSG00000247828_51 (sequence is synthesized)
ggttatgagttgagaatttttgagtaataggtatatggggactaagtattctattcttcatacttttacatgccgtaaatccccacttatctgcagggaatgtgttccaagacccccagt

SEQ ID NO: 963880 - DNA, 120 bp, Artificial Sequence
  ENSG00000247828_52 (sequence is synthesized)
gtgggtagcatatacagcatagatacactggacaaagggaggactcacatcctgggcaagatggagcagaatggcagagttcatcatgctgctcaaaatgatgtgcaatttaaaactaat

SEQ ID NO: 963881 - DNA, 120 bp, Artificial Sequence
  ENSG00000247828_53 (sequence is synthesized)
gaattatttctggaatttttcagttaatatttttggacatgaggtgactgcagttaactaaaaccatggaaagcaaacccatagataaagggatactatggtatgttttcattttctata

SEQ ID NO: 963882 - DNA, 120 bp, Artificial Sequence
  ENSG00000247828_54 (sequence is synthesized)
ataaaaagttaaaaaggaaaaagacaccataggaaaataaaagacaagtcacaaactgggaaaagatctttgcaacacatgtgactatcgaaaggattagtattcacactgtgtaaagaa

SEQ ID NO: 963883 - DNA, 120 bp, Artificial Sequence
  ENSG00000247828_55 (sequence is synthesized)
ccactacaattcaatgaaaatgaagataatgctttccaccccaaacaggcaattcatacaggagaaaacctgaaaagatacccaaccacaaggaaataccatttcacacccaccagatga

SEQ ID NO: 963884 - DNA, 120 bp, Artificial Sequence
  ENSG00000247828_56 (sequence is synthesized)
acaaaaatgtaaaagtctggcaatattacaattcttatacattgctggttggagtatgaattgatataatcaatttgggaaacaatatggtattatctagtagctgaagatgcacatctt

SEQ ID NO: 963885 - DNA, 120 bp, Artificial Sequence
  ENSG00000247828_57 (sequence is synthesized)
ctgtgacccaggaaaaatgtatagcaggagacatgagcaagaaaattcataatggcatttataacagtaaaacgtggaagaaaatccactgtccatcaacagtagagtgattaaatacat

SEQ ID NO: 963886 - DNA, 120 bp, Artificial Sequence
  ENSG00000247828_58 (sequence is synthesized)
atgttgagcaaataaaaattcacaaaagaattttacagtaggattccatttatataaagaaccaatgaaagtaaatagcctaagggtacaaacataagtaaatctataaattaaagcaaa

SEQ ID NO: 963887 - DNA, 120 bp, Artificial Sequence
  ENSG00000247828_59 (sequence is synthesized)
agaatgataagcacaaattcaaggcagtgatttcctctagctacagagggaagggaatgaagtaaggaaaaggtgaacaaggagcttaaaagtatgataattatatgtgttggtttggcc

SEQ ID NO: 963888 - DNA, 120 bp, Artificial Sequence
  ENSG00000247828_60 (sequence is synthesized)
aaacagtcctggtttacctagcacagttctggtttgctgattgcctggtgtaatgattaatagcactgtcactccccaaattgtcattgtttggataatgaattatatgcatccttttta

SEQ ID NO: 963889 - DNA, 120 bp, Artificial Sequence
  ENSG00000247828_61 (sequence is synthesized)
gagtaaaagtaacttttttctccttaaactggatggagggcatgtgggtctttatcattcttccttatacatgtatttttaaaatataatttaaaactagtcagtattttaaaatataat

SEQ ID NO: 963890 - DNA, 120 bp, Artificial Sequence
  ENSG00000247828_62 (sequence is synthesized)
ttaaaactttagtcagtgttagtcactgtgttagtgacaacacagtaaaaaaaaaaaatttgtaagataaataaatataaataggatccaaatgaaactcttttcatctgggtggataca

SEQ ID NO: 963891 - DNA, 120 bp, Artificial Sequence
  ENSG00000247828_63 (sequence is synthesized)
gggataaataacatactatatgcctggcattgtattaagcttgttactgatattacttcatattcatagcaagacatttaggtaggcattattatctccattttacacatgaagaatcta

SEQ ID NO: 963892 - DNA, 120 bp, Artificial Sequence
  ENSG00000247828_64 (sequence is synthesized)
agacacaaagactatacataatttaaccaaagtcatattatatgtgacagcgcagaatttgaacccaagcagtgtgacatcagactacatgctcttaactaccatgccagagcccataac

SEQ ID NO: 963893 - DNA, 120 bp, Artificial Sequence
  ENSG00000247828_65 (sequence is synthesized)
agattttcttaaccttttttatgccacagatccctttgacagtctggtgaagcctatagagtcctttttagagtaatgtcttttgtacatcaaatataatgcacaggattataaataaaa

SEQ ID NO: 963894 - DNA, 120 bp, Artificial Sequence
  ENSG00000247828_66 (sequence is synthesized)
ataataataattgtatcttgagatatctacaaatatagtaatgtgataggaaaatgtttgtgattttgataagtgaaaaagtcaccaaaatacttgtaataacactgtggttttttgcat

SEQ ID NO: 963895 - DNA, 120 bp, Artificial Sequence
  ENSG00000247828_67 (sequence is synthesized)
atgttcacaatggaaagaaatcctaaatcttacttcgaagttagcaagaattacaatatttttcccaccccaattcatggccctctactttatggtcttatttcataggctttctgacat

SEQ ID NO: 963896 - DNA, 120 bp, Artificial Sequence
  ENSG00000247828_68 (sequence is synthesized)
gttttgcttcaaagaggtcctattccccatcccatttcctatcttctggtttgggattacactcaagatgtgatatacagatagattagtttattagaaagaaaatatttttccacatgg

SEQ ID NO: 963897 - DNA, 120 bp, Artificial Sequence
  ENSG00000247828_69 (sequence is synthesized)
cgaactttagtggaggctaacaaatcagaatgtgctaaaatagccatgtgtacatatagacaatgggaagcttggaactgctttagcattttatacaaaagacttaaaagtaatttcagc

SEQ ID NO: 963898 - DNA, 120 bp, Artificial Sequence
  ENSG00000247828_70 (sequence is synthesized)
gcagagcaactgggaacctaattctgaccaaaaaggaggaattgtttggctaattggaagtgacagaaaccttgggagaaagcaaccgcataccaaggataattataagaagaagagaag

SEQ ID NO: 963899 - DNA, 120 bp, Artificial Sequence
  ENSG00000247828_71 (sequence is synthesized)
agaaggcattgttatcataggaggtgacagctccctgtgtgttgttgcccctgaagaacttccagtgggacaagatatggtggtgaaagacagtgatattgatgatcttgaccctgtgta

SEQ ID NO: 963900 - DNA, 120 bp, Artificial Sequence
  ENSG00000247828_72 (sequence is synthesized)
tggtgaaagacagtgatattgatgatcttgaccctgtgtaggcttaggctcatgtgtttgtgtcttcattctttttttttttttgagatggggtctcgcactgttgcccaggctggagtg

SEQ ID NO: 963901 - DNA, 120 bp, Artificial Sequence
  ENSG00000247828_73 (sequence is synthesized)
cggcctcccaaagtgctgggattacagtatttaagacatttttataaattaaaaattttttaaatagaaaaaagcctatagcataaggatataaagaaaaagtatttttatgcagctgca

SEQ ID NO: 963902 - DNA, 120 bp, Artificial Sequence
  ENSG00000247828_74 (sequence is synthesized)
aaggatataaagaaaaagtatttttatgcagctgcacaatgtatttgtgttttaaactgtgttattatgcaagagttacagagtttttaaaaataaaaagtttataaagtaaaaaactta

SEQ ID NO: 963903 - DNA, 120 bp, Artificial Sequence
  ENSG00000247828_75 (sequence is synthesized)
caacacatcaaaagataatacaccatgatcaagtgggctttatcccagggatgcaagcatagttcaacatatgcaaattaataagtgatatcaacagaatgaaggacaaaagctttatga

SEQ ID NO: 963904 - DNA, 120 bp, Artificial Sequence
  ENSG00000247828_76 (sequence is synthesized)
tcatcttaacagatacagaaaagcatttgataaaatttaacttccttcatgataaaaactctcgaaggaacatacctcagcatattaagggccatatatggttaacccagagctaaaatc

SEQ ID NO: 963905 - DNA, 120 bp, Artificial Sequence
  ENSG00000247828_77 (sequence is synthesized)
ctaaaatcatactgaacagggaaaagctgaaagccttcctgcaaagaactggaacaagacaaggatgaccacttgcaccactcttattcaacatggtactggaagtcctagccagagcaa

SEQ ID NO: 963906 - DNA, 120 bp, Artificial Sequence
  ENSG00000247828_78 (sequence is synthesized)
gagaaagaattaaaagacatccagttggaaaaaaggaggtcatatattttctctgcagacaacataatcttatatctagaaaaacctgaagactccaccaaaaagggtgagcatggtgac

SEQ ID NO: 963907 - DNA, 120 bp, Artificial Sequence
  ENSG00000247828_79 (sequence is synthesized)
aggcgcagcacaggtacgtgggcgggcggatcgtggtggctgcgcttgcgaggaccctgaggtagattgggtggtttcaacaggaacgcatccactgtctgagaggtggcaattgaagcc

SEQ ID NO: 963908 - DNA, 120 bp, Artificial Sequence
  ENSG00000247828_80 (sequence is synthesized)
ggaagaacatctaccaagagcagagaacccaggaagaaaattctgcctctttaatacgttccaatatggacgttttccatatagatacctatctatatagatagatgctctgggatctga

SEQ ID NO: 963909 - DNA, 120 bp, Artificial Sequence
  ENSG00000247828_81 (sequence is synthesized)
tttgtgaaacagatcctgctgaggatgaatccagaacttcctgaagggttccgcttctgctgtgtagggacaaggttgtaaatagacaagccacaggcacctgcaaatggtaagtgtggt

SEQ ID NO: 963910 - DNA, 120 bp, Artificial Sequence
  ENSG00000247828_82 (sequence is synthesized)
gtgaagttgtactctttcatttctgacactgtggttcttaatatctgtcctaaacctggcagtcattgaggttcgcaaagtatctccttctatgtgacagtaaaactggaattactatca

SEQ ID NO: 963911 - DNA, 120 bp, Artificial Sequence
  ENSG00000247828_83 (sequence is synthesized)
gaatggaatccattcctgctagagtaaaaccatgaaaagaaatcgcagttttgattatctgcttatcatttttaatagatcacagagtgcagtgttccttatttgttgtatggcaagttg

SEQ ID NO: 963912 - DNA, 120 bp, Artificial Sequence
  ENSG00000247828_84 (sequence is synthesized)
atgaataactcttgattaatatcttttaatgttctgtttcacacagttctctcaattacatgtgaaaaatctgttatataagtaatgctatttaatgattaaaatggatatatgttttaa

SEQ ID NO: 963913 - DNA, 120 bp, Artificial Sequence
  ENSG00000247828_85 (sequence is synthesized)
gaccctccccccatctgtacaaaaaaattacaaaattaaccaggcattgtggctcgcacctgtggtaccagctacttggaaggctgagacaggaggatggcttgagcctgggaggttgag

SEQ ID NO: 963914 - DNA, 120 bp, Artificial Sequence
  ENSG00000247828_86 (sequence is synthesized)
ccagcttgggcaacagagtgagaccctgtttccaaaaacaacaaaaactggtttcaaatatattgctacattggaattctccataaaggaattaattgttgataacaatgccctcagtat

SEQ ID NO: 963915 - DNA, 120 bp, Artificial Sequence
  ENSG00000247828_87 (sequence is synthesized)
tgccctcagtatactatttgtcaatacctataacaatgcaacaaacaaaaaagaaaatttaaatagctggaccacattaaaagttttattgggctaaaatcaaaaacatctgacaagttt

SEQ ID NO: 963916 - DNA, 120 bp, Artificial Sequence
  ENSG00000247828_88 (sequence is synthesized)
tttaaaattctgttcagaaccagaagatgatcaagaaagggaaatgcccactagcagcttctactgtaaggttagagctgacagagaaagaactccttaactactatttgcttcattctc

SEQ ID NO: 963917 - DNA, 120 bp, Artificial Sequence
  ENSG00000247828_89 (sequence is synthesized)
tacaaaggaaactagagaagtgggttgatgtaatagaaagaacatgtgtttgtggggccaggcaaacctgggtttaattctgtttcaacactgcttaacaaaatttatgggaggctattg

SEQ ID NO: 963918 - DNA, 120 bp, Artificial Sequence
  ENSG00000247828_90 (sequence is synthesized)
ttttggattgggctcctgcaccaggcccctccggaccaaaccaaaatggagtcactcatactaaaactccaggtcactgaaccaaaactaagttgtttatctgaccttccaagaaatcag

SEQ ID NO: 963919 - DNA, 120 bp, Artificial Sequence
  ENSG00000247828_91 (sequence is synthesized)
gagggagaaaacaaccaaatctccaaacaggccagttttaatcagcgtgataaggaagtcctctcttttttaaccctataaagaaagtaactttttgaaatgatcaatacactttgtatt

SEQ ID NO: 963920 - DNA, 120 bp, Artificial Sequence
  ENSG00000247828_92 (sequence is synthesized)
ccttagttctgctttctttagcccctttctgcctataaagcccacttcctctgctcaacttactgaagcagtattccattttatagaatgagatgctgcccaattctggaatcactaata

SEQ ID NO: 963921 - DNA, 120 bp, Artificial Sequence
  ENSG00000247828_93 (sequence is synthesized)
aaagccaattagatctttacatttgttgaaattttgtctttgacaacattactagttatattattctgggtatccttttccccatctgtaaaatggacatagcgatatccttcccatcag

SEQ ID NO: 963922 - DNA, 120 bp, Artificial Sequence
  ENSG00000247828_94 (sequence is synthesized)
atttttctcattaatagaagtaatacattcaaaacactgagccaggctcacaccagtgagcaacttgttaatattactcagaagcatattatagatattgacagaaagcaatactgttcc

SEQ ID NO: 963923 - DNA, 120 bp, Artificial Sequence
  ENSG00000247828_95 (sequence is synthesized)
taattaggggaagaaattctaagagagtacctaagagtttgaatttagattataacatttgctctgagtattttacattacagcctttggggggaaaagtacaaatgagatctgagaaca

SEQ ID NO: 963924 - DNA, 120 bp, Artificial Sequence
  ENSG00000247828_96 (sequence is synthesized)
gtggtactcatctttgaggaattatggaaaacgtaatagaacactaaacatgggaaaacatcggccttcaggttgaaaagtggaaatctcaatccctgaattttttttttttttttacta

SEQ ID NO: 963925 - DNA, 120 bp, Artificial Sequence
  ENSG00000247828_97 (sequence is synthesized)
agtaacttttttgcccattggtgtcatttaaccaaaagaagaagaaattccaaaaaaaaaaaaaatcaactgaaacaaaagaatagactgaatttgccaaaagagtgcttaaatggagac

SEQ ID NO: 963926 - DNA, 120 bp, Artificial Sequence
  ENSG00000247828_98 (sequence is synthesized)
ctaagtcttcaaagctaaggtgatgagaaaagaacaggtcttaaatttcttcagagcttcaagaggcaaagcttgaaagaagaaaaaattttattcttaggtaagatgtaggggtagaat

SEQ ID NO: 963927 - DNA, 120 bp, Artificial Sequence
  ENSG00000247828_99 (sequence is synthesized)
ggtggcccctgcaaaaggtaagccttcctcctaatcctagaatcgtggatggtaccttatttggataaaaaggtctttgcagatgtaattaagaaccttgagatgaggagatcatcctgg

SEQ ID NO: 963928 - DNA, 120 bp, Artificial Sequence
  ENSG00000247828_100 (sequence is synthesized)
aatattattatctattggttgcctgccttgaagtacagtaatttctctgtttccattatttaaaataggtgagtgtctttgacaaagatacaaagaaaggggacagttatgaaagggaag

SEQ ID NO: 963929 - DNA, 120 bp, Artificial Sequence
  ENSG00000247828_101 (sequence is synthesized)
aaaagatagatggagatgaaaagaaattcagtagtttcagcaagggaattaggagcataatctttgagaaaagtcttggttgcttaccattcgggctttgtgatgagttgaaatgtcctg

SEQ ID NO: 963930 - DNA, 120 bp, Artificial Sequence
  ENSG00000247828_102 (sequence is synthesized)
aatgagaactgttctcaaatgctttcaagaccaacaaaaagtacgatacccacactgacctggaactctttaaaccattaagatatatcactttttcgcagttcagtccatattttttgc

SEQ ID NO: 963931 - DNA, 120 bp, Artificial Sequence
  ENSG00000247828_103 (sequence is synthesized)
aaaatgttctgcttagtttttctgctaagaaattactgtttctgaacaaggttaagtgtcgtatgctttcattgtagttttttttcccctaacatatactgttttcctaattagactata

SEQ ID NO: 963932 - DNA, 120 bp, Artificial Sequence
  ENSG00000247828_104 (sequence is synthesized)
aacagttacttcatttaaattgcccttaaaatgctttatgacaaagacgttatttgtagtaatacctataatggtaaaaagtttgttgcagtcttacagacgataagattgatcaattgt

SEQ ID NO: 963933 - DNA, 120 bp, Artificial Sequence
  ENSG00000247828_105 (sequence is synthesized)
tatatatgcttagtggaattttatctagctgttctaaagagccattagactagtctttctaatggaaaatgtttattgtctaagttaaaacagcatttgaggccaggcacagtggctcac

SEQ ID NO: 963934 - DNA, 120 bp, Artificial Sequence
  ENSG00000247828_106 (sequence is synthesized)
tcctgttattgcagcactatgggaggctgaggtgggaggatcactagagcacaagagttggagactagcctaggcaatatagtgagacctcttctctacaaaaaatttaaaaattagctg

SEQ ID NO: 963935 - DNA, 83 bp, Artificial Sequence
  ENSG00000247828_107 (sequence is synthesized)
agtgagacctcttctctacaaaaaatttaaaaattagctgagtgtgatggggtgtgcccgtagttggtccaagaggtagatgt

SEQ ID NO: 963936 - DNA, 120 bp, Artificial Sequence
  ENSG00000247828_108 (sequence is synthesized)
caacagagcaagatcctgtctcaaaaaattaaaaagcattttatagactgcatgtttgtgtcccccctccctccgcaccagaattcatatattgaagccttaatctccaatgacatgata

SEQ ID NO: 963937 - DNA, 120 bp, Artificial Sequence
  ENSG00000247828_109 (sequence is synthesized)
ttagtaggtggggcctttggggggtgattaaataataagggtgaagccctgcatgggattagtgcctttacaacaagagaccctagacagcttgcttccactctttctttgctcttcacc

SEQ ID NO: 963938 - DNA, 120 bp, Artificial Sequence
  ENSG00000247828_110 (sequence is synthesized)
tcttcaccatgtgaggacacagcaagaaaacagacaactacaaatcaggaagagggcctaatttgtgccaaccatgctggcactcttctctaacttcccagcctccagaactgtgagaaa

SEQ ID NO: 963939 - DNA, 120 bp, Artificial Sequence
  ENSG00000247828_111 (sequence is synthesized)
tgttgtttaagtcacccagtttatggtagtttggttatagttgcccatattaagacagcaggatgcaaaattgtggccagtatgattgctttgacatgaaacaaattttaagcacaaatt

SEQ ID NO: 963940 - DNA, 120 bp, Artificial Sequence
  ENSG00000247828_112 (sequence is synthesized)
gcaaaaagtaaccaaaatatatcaatccccactgctggcattaacactctaaaacaaactttgtatattgggggattttatttatttatttatttattttttttgctgaccatagtgact

SEQ ID NO: 963941 - DNA, 65 bp, Artificial Sequence
  ENSG00000247828_113 (sequence is synthesized)
tctttacaaaaatataaaaattaaccaggcatggtggcacacccctgtagccccacctacttggg

SEQ ID NO: 963942 - DNA, 84 bp, Artificial Sequence
  ENSG00000247828_114 (sequence is synthesized)
catggcaaaaccccctctttacaaaaatataaaaattaaccaggcatggtggcacacccctgtagcccggcctgtgaagcagag

SEQ ID NO: 963943 - DNA, 120 bp, Artificial Sequence
  ENSG00000247828_115 (sequence is synthesized)
tttcatggactcttttcatgtttgaacttttcatggatgcttaaaataagaagagtaaattccaaaaccagctctgttcatactagagcaaggctgagcaaagcattgctgactacgtgc

SEQ ID NO: 963944 - DNA, 120 bp, Artificial Sequence
  ENSG00000247828_116 (sequence is synthesized)
tgtgttcttgccctagggctcacccttagtgccttctaggtttaaagactttcataagaagtttcaaaaattacactgtgagaatttcattaatttgaatactatctcattctgctgtct

SEQ ID NO: 963945 - DNA, 120 bp, Artificial Sequence
  ENSG00000247828_117 (sequence is synthesized)
ttgctctgcatttgtgaagggaaggcatttcatggatgactttggcattcatcataatgagaacaacttccatggtgaatactaaccggaagaattgtgtgctttttaatggtttggaac

SEQ ID NO: 963946 - DNA, 120 bp, Artificial Sequence
  ENSG00000247828_118 (sequence is synthesized)
atcactcctggcagcaccttggagacttattttttaactaatttatgctcacggggtctggacttcaagagcatgtgtccattcaaaccacttacacactttaatacaatctctataata

SEQ ID NO: 963947 - DNA, 120 bp, Artificial Sequence
  ENSG00000247828_119 (sequence is synthesized)
gaagttattcatgtggttatttgaagcctggtggtataatcctctcatatgatagtgtacttttgtgagttagaagtcaacattaaaaggctcacagagttaatttaggttctgtctgat

SEQ ID NO: 963948 - DNA, 120 bp, Artificial Sequence
  ENSG00000247828_120 (sequence is synthesized)
tcatcactcagctagtctttgcaaactacaggatactgttgttggggacaagtgggaagaaaagtgccagaactctacttttagatataattaaaatcttcaatctgtaggactatcctg

SEQ ID NO: 963949 - DNA, 120 bp, Artificial Sequence
  ENSG00000247828_121 (sequence is synthesized)
ctcagaataatatgtaccctttggtggtaattcaggattttagtgctaaacccaaaagaacagggcaacttgactttttaaaaattttagatatgagaataaacagtaatgctatggaga

SEQ ID NO: 963950 - DNA, 120 bp, Artificial Sequence
  ENSG00000247828_122 (sequence is synthesized)
cttctgttttcctttttagtgtgttctttcctctcaccttccttcactcctgtcacttcattatttagctaatgattttttttcttctattaatgttggtcagtgacccagacattgtct

SEQ ID NO: 963951 - DNA, 120 bp, Artificial Sequence
  ENSG00000247828_123 (sequence is synthesized)
tcattctgaagtgaaattgatttaggcaagtcccctcaactatttcttgactatgcttaggattaaagagctcttcagatacatgaactatttccttttgttcagtatctgtgatattgt

SEQ ID NO: 963952 - DNA, 120 bp, Artificial Sequence
  ENSG00000247828_124 (sequence is synthesized)
tttcttttgtttaatctctttgctcaggattttagttttaactagaaccagttcagtgactaaggaattcaaaaaacttttaagagattccaccactgccaccccacctgatttctgatg

SEQ ID NO: 963953 - DNA, 120 bp, Artificial Sequence
  ENSG00000247828_125 (sequence is synthesized)
ttccatataatctaatgaaataagtacgcctcctttcccttcagactatgtgagaagggatccaaaaccaagcagtctggaagccattacacagagagtttgccctgtgcttggcttccc

SEQ ID NO: 963954 - DNA, 120 bp, Artificial Sequence
  ENSG00000247828_126 (sequence is synthesized)
ggaactggggactcttgctagaaaaactcaaaagggccttttggtattgagatgaagatttctgtccaggctgatttcttttcttggtggaatcaactctcgctgctcagctgtgacttc

SEQ ID NO: 963955 - DNA, 120 bp, Artificial Sequence
  ENSG00000247828_127 (sequence is synthesized)
ctgttcctgagatgctcagctcaattaacttctcatccctccccggctcctaatctgaggggagatataaatcagcatcgtatttattatatgttatggccacattctagatgtctgtat

SEQ ID NO: 963956 - DNA, 120 bp, Artificial Sequence
  ENSG00000247828_128 (sequence is synthesized)
aatacttcaatcctcagcccacttggatgaagccaaagaatccactgtctatcttttctattccagctgtacctgtcaaagaatacccatctcgagttctggatatgtgctctgagaagg

SEQ ID NO: 963957 - DNA, 120 bp, Artificial Sequence
  ENSG00000247828_129 (sequence is synthesized)
tacatattttccagttggacttctagtttcatatgtgttcctttactttgtcattgttaaaatgcacttctcaaatttttgatagtttctgcctccttctcctcaaatttctgtggtatt

SEQ ID NO: 963958 - DNA, 120 bp, Artificial Sequence
  ENSG00000247828_130 (sequence is synthesized)
taccacatattttaaaatcttgcatttttttcctttctgttttgaccaataagcctcactatacaattaacagtttttacgtggttgaataagagagggatcaagaatatcttttgagaa

SEQ ID NO: 963959 - DNA, 120 bp, Artificial Sequence
  ENSG00000247828_131 (sequence is synthesized)
tctagaaacatgatcatcttaaatcttgcaaacaaaaattattctcagggtatataattttaaaaattaggtttacaaggctcattcagcttttattagtcattgctttaactaataatg

SEQ ID NO: 963960 - DNA, 120 bp, Artificial Sequence
  ENSG00000247828_132 (sequence is synthesized)
tccagataataaaagttgatccatggacaggttaaatttctcacttttaagttttattttttgcttggtgtcattcatctagtttttagataaatgtctacattcaatgtttaagagctc

SEQ ID NO: 963961 - DNA, 120 bp, Artificial Sequence
  ENSG00000247828_133 (sequence is synthesized)
agacctaatgaatcacatccttagaagtgttttccctctggtaaagtccaatgaactgttgcagtattactgcctcgaggaacaaattttttttaattatactttaagttccagggcaca

SEQ ID NO: 963962 - DNA, 120 bp, Artificial Sequence
  ENSG00000247828_134 (sequence is synthesized)
cttcctgtgtccaagtgttctcattggaacaaaaattttttatcctaataattaaaataacttgggaatagaatagttaagtattggtgtgtctactaagttcatctcccaagatgagat

SEQ ID NO: 963963 - DNA, 120 bp, Artificial Sequence
  ENSG00000247828_135 (sequence is synthesized)
gtgtctactaagttcatctcccaagatgagataagaaagaaagaataaaagttctttgttaaattccctttgtcagtcttcacagattggaaaaaaagaaaagtgtacgttggaaaagct

SEQ ID NO: 963964 - DNA, 120 bp, Artificial Sequence
  ENSG00000247828_136 (sequence is synthesized)
tgtacatatctgtggataacaaatttgctaaactttctgccattatgtaacaaggatctccttccctctagtttccaagaagagttttctaatctgttaagatgtcacctgcagcctcct

SEQ ID NO: 963965 - DNA, 120 bp, Artificial Sequence
  ENSG00000247828_137 (sequence is synthesized)
caaaggttatctattatgcttctataaaaaatttcttcaaagctcttcaaactttcattaacactctcctccaagttctaccttctgttcactgccagttttaaaaccacacttacattt

SEQ ID NO: 963966 - DNA, 120 bp, Artificial Sequence
  ENSG00000247828_138 (sequence is synthesized)
taggtttttgctaacaccccacttctgagtaccaaaatgtatactgattttctattgctgcataataaactgccccaaaatacaacatgcaaagcaataaatattcattatctcatgtag

SEQ ID NO: 963967 - DNA, 120 bp, Artificial Sequence
  ENSG00000247828_139 (sequence is synthesized)
tgtctgaaggtcaaaaatccggaagcagcatagctgagtggttctgattcattgtctcttgtgaagttatcagtcaaaccatcagctgagactgtaatcatctgatgttttaactagtac

SEQ ID NO: 963968 - DNA, 120 bp, Artificial Sequence
  ENSG00000247828_140 (sequence is synthesized)
cagaggatacactttcacatgctattggcaggacactttagttcttcactagctgtttagcagaataccgcacttcctcaccacatgtacctcttcatagagcttcctggcttcctctaa

SEQ ID NO: 963969 - DNA, 120 bp, Artificial Sequence
  ENSG00000247828_141 (sequence is synthesized)
aacaagtaatccaagagagaagcagaagccaccatggttttttatgccgttgttgacctagcccccaaagtgacatattattacacagatatgtagccaacctgtgggtcactgatacgg

SEQ ID NO: 963970 - DNA, 120 bp, Artificial Sequence
  ENSG00000247828_142 (sequence is synthesized)
ttggtgctgtctttgtggcaataagtgagttctcactatctgagttcacacaagagctggttgtttaaaagagcctgtcatctcttttgctccctttctcaccatgtgatatgctgctcc

SEQ ID NO: 963971 - DNA, 120 bp, Artificial Sequence
  ENSG00000247828_143 (sequence is synthesized)
ggcgcaggcgcagcacaggtacgtgggcgggcggatcgtggtggctgcgcttgcgaggaccctgaggtagattgggtggtttcaacaggaacgcatccactgtctgagagtttaaacttg

SEQ ID NO: 963972 - DNA, 120 bp, Artificial Sequence
  ENSG00000247828_144 (sequence is synthesized)
ggtcctggacacctgtatggctgtgtgctgtggtctttgcctagcctgcggttcacttttgctctggccaccacctcccctcatgtacaaaccgcgtctctgctctgccagtcttggccc

SEQ ID NO: 963973 - DNA, 120 bp, Artificial Sequence
  ENSG00000247828_145 (sequence is synthesized)
ccgtcaggcagcggttcactccctcaccagggaagtctagatagatagatatagatagatatcgatcgatagatatagatatatatatagatagatagataggtagatatatggatagat

SEQ ID NO: 963974 - DNA, 120 bp, Artificial Sequence
  ENSG00000247828_146 (sequence is synthesized)
atagatatttggatagatatgtagacgtctatctataaatatatcgatatatcggggttctcagccatcccaaagaagcttgcacagggccagttgctttatgtcaggaaaagggacaca

SEQ ID NO: 963975 - DNA, 120 bp, Artificial Sequence
  ENSG00000247828_147 (sequence is synthesized)
gactgagtgtatgagggttttttttttctatagatgtatagatatttatatcagatgcaaataagtgaaactctcatacaacttttaattttgtgttttttccaaactctattccattca

SEQ ID NO: 963976 - DNA, 120 bp, Artificial Sequence
  ENSG00000247828_148 (sequence is synthesized)
actttttctgcctttttatttgattataatgagacatcgtactggaggcaggcttgaaatggatatacagagcactttcaacccagaaatttgtctcacgacttggggtccttacttaag

SEQ ID NO: 963977 - DNA, 120 bp, Artificial Sequence
  ENSG00000247828_149 (sequence is synthesized)
ttgtagctgttagtaatttcatccatgaattcactttgtgccatagtgtgatgttttgttatgaagttggaattgggaagggaaactaggaagttttgggagaagttaagaaggttgagt

SEQ ID NO: 963978 - DNA, 120 bp, Artificial Sequence
  ENSG00000247828_150 (sequence is synthesized)
aggcaggcgttgttatagatattaaatttcaccctgcttatcaaagtacctggagcgtatggtatccaagctgtaaatggcccaaaggaatcggggttctcagccatccaaaagaagcat

SEQ ID NO: 963979 - DNA, 120 bp, Artificial Sequence
  ENSG00000247828_151 (sequence is synthesized)
ttttaacatccactatattactctcatctttctaggctggaaaaaaaaatgttttaaatgttattctgaagtatattgcaacctttaacaattcagtagacttctgaatttttattttca

SEQ ID NO: 963980 - DNA, 120 bp, Artificial Sequence
  ENSG00000247828_152 (sequence is synthesized)
tgtagcttaccacagttgtatctaggaatatatcacatagctgattaattggtgaaataacccttgcaattttacacaggttgtacagtgcacattttcaaggaccactcacatacatcc

SEQ ID NO: 963981 - DNA, 120 bp, Artificial Sequence
  ENSG00000247828_153 (sequence is synthesized)
atttgatattttttggtatcaagaaagtctttaaacaatcagtaccaccaatagcagtaaaaagacaaaactgtctgaaagtacctatctgtttaaaactttaattagctttatccatcc

SEQ ID NO: 963982 - DNA, 120 bp, Artificial Sequence
  ENSG00000247828_154 (sequence is synthesized)
attaaatagttattgaatataaaactgtatcattcactcttctacactctgaggaaatagtggtaaataaagcagatattgtccctactatcaggaaatttacattttagtagtaataag

SEQ ID NO: 963983 - DNA, 120 bp, Artificial Sequence
  ENSG00000247828_155 (sequence is synthesized)
ccataaattaacaaaaacagaagacagtggtaagtactaggcatgaaattcaaacatgactattttagattaggtgattaaagaaactaaaataccatttaagctgctgtgtaaatgaca

SEQ ID NO: 963984 - DNA, 120 bp, Artificial Sequence
  ENSG00000247828_156 (sequence is synthesized)
agagaatccagctttgtaaaaattggtgaaccctttgcttgcagaagggacaactgcaaaatctaaggcatgatctagcctggaatatttcaggagccaaaagaaggcctgcatggttag

SEQ ID NO: 963985 - DNA, 120 bp, Artificial Sequence
  ENSG00000247828_157 (sequence is synthesized)
agaatagtgacttaagacgcaaatactgtaactttggagggataggaaagggctagatcatgttacctttgaaagacaggaaagagtttagattttattctatgtgcaatggaaaaaaaa

SEQ ID NO: 963986 - DNA, 120 bp, Artificial Sequence
  ENSG00000247828_158 (sequence is synthesized)
atgagagcattttaatccaaagagtaatataagataatatatttttaaaatccactttggtaatttgttaattggcataaagagtcagctttcatgtaacataattactaacatacttgg

SEQ ID NO: 963987 - DNA, 120 bp, Artificial Sequence
  ENSG00000247828_159 (sequence is synthesized)
atttaaatttgtcattattcttattttatttgtcccacctcttatatgttcattttgtcttcttttgcctttttgatttttttttttcttaattaggccatagcacctgatattcccagg

SEQ ID NO: 963988 - DNA, 120 bp, Artificial Sequence
  ENSG00000247828_160 (sequence is synthesized)
cagactctcatccaagtgccaatcagccccagccctgcttagcttcccagatcagatgagaacaggcatattcagggtggtatggctatagaccttttagattatttttaattattccat

SEQ ID NO: 963989 - DNA, 120 bp, Artificial Sequence
  ENSG00000247828_161 (sequence is synthesized)
tttttctacctcataagcttgacagatgtcttttagtatctttttactgttcacctcaggtattaaaacatggaaccttggtttatcatctttaagataatttggtattatacttcttcc

SEQ ID NO: 963990 - DNA, 120 bp, Artificial Sequence
  ENSG00000247828_162 (sequence is synthesized)
aggacaatgtaaggacctgcgaacacatcaacttcatttactgccacacctcatgttatatacattgtatattcttaatatgtatttcctaaattctcaagacattttttatacaatatg

SEQ ID NO: 963991 - DNA, 120 bp, Artificial Sequence
  ENSG00000247828_163 (sequence is synthesized)
aatttacatttcatattgtataaaacatttactttttctattgtgtttcgtggttcctggaatctgagcttccatctaagaccttatttcttcttgaaggacatactttaatatttcttc

SEQ ID NO: 963992 - DNA, 120 bp, Artificial Sequence
  ENSG00000247828_164 (sequence is synthesized)
gaatatctactggtaacaattcattcagattttctgtcctgacactgtcttattttactttcattttctaagaacgtttttgctgaattagcagctattttatcattttgaagatatatt

SEQ ID NO: 963993 - DNA, 120 bp, Artificial Sequence
  ENSG00000247828_165 (sequence is synthesized)
ttattccttctggcttccattatgtcctctaagacataatgtccattttgtttttttctcttcaaaggtaatctttttttggatggctacttttaagaggtttgtcttaagtttggtgtg

SEQ ID NO: 963994 - DNA, 120 bp, Artificial Sequence
  ENSG00000247828_166 (sequence is synthesized)
cccacatgtgttttgtgtttgtttttttgtgtgtgtggtttttttctgcttcgagattgataatgtttcttgaatctggctgtgatgtccttaggctgtttgagaaaattcttagctctg

SEQ ID NO: 963995 - DNA, 120 bp, Artificial Sequence
  ENSG00000247828_167 (sequence is synthesized)
tttgatcagacattgcttctgctttcactctcctttctcctcttcttttgatactccacttacatttgtatttgacaattcactttgtcccttgtattttccatttattttcttgtctgt

SEQ ID NO: 963996 - DNA, 120 bp, Artificial Sequence
  ENSG00000247828_168 (sequence is synthesized)
ttcatcctgaatatttcttcttaactttcagttcactattttctcttagtagtctcgaatttgttaaatctctcttgaagcatttattttagttatatttttggttatcagttcaaacat

SEQ ID NO: 963997 - DNA, 120 bp, Artificial Sequence
  ENSG00000247828_169 (sequence is synthesized)
ttctacttgattctgttttattgtttccagttgtttatccaatatctcaatcttttatttcctcaaacatactaatcataattactttaaaacctgtatctaataactatggtgtctgct

SEQ ID NO: 963998 - DNA, 120 bp, Artificial Sequence
  ENSG00000247828_170 (sequence is synthesized)
attatctgacacttttcttgtttcttgctgttatcacattgtcttgcttttatgtcccttatttttatgttattttgtattatttattttataaacattataaatatataaaacttggct

SEQ ID NO: 963999 - DNA, 120 bp, Artificial Sequence
  ENSG00000247828_171 (sequence is synthesized)
taggttatgttttaattgaatgtcagaattgttttgattgaactgtatatgaggaaactatactttgaagtccaatatgatggtattttctaaagaaagaatttatgtctcctggcaaga

SEQ ID NO: 964000 - DNA, 120 bp, Artificial Sequence
  ENSG00000247828_172 (sequence is synthesized)
cctttggacactagtaatctaagatcttcttaatctggttagtgatagagacaattagaatataggcaggtctatttcctgttcatactttcacaatgtagacctctgaagtcccaactc

SEQ ID NO: 964001 - DNA, 120 bp, Artificial Sequence
  ENSG00000247828_173 (sequence is synthesized)
aagcatgcagagtttaccagatcaggccctaaacttcagtttttgtctttttaattctatgggttagaaactctgttcaacttttcagccatcacctcaggaatcagaagatactccaga

SEQ ID NO: 964002 - DNA, 120 bp, Artificial Sequence
  ENSG00000247828_174 (sequence is synthesized)
ggaaaagctaatgtaaatgctggattcaacaactctgttttttccttctgaatatttcattgtctctaatgctgtcagatgtttgttttatattttgtccaagctgagtgtggtggctca

SEQ ID NO: 964003 - DNA, 120 bp, Artificial Sequence
  ENSG00000247828_175 (sequence is synthesized)
cgtctgtaatttcagcaccttgggaggccaaggcgggaccatcccttgaggccaggaatttgagactagcctaggcaacataacaagacctttgtctcttggaaaaaaataaataaataa

SEQ ID NO: 964004 - DNA, 120 bp, Artificial Sequence
  ENSG00000247828_176 (sequence is synthesized)
atattattagaagtgaaaatggggatgttgttacaaatgctgtggagattgatgagaaattatgaacaacttaataataaatgggaaaatataaatgaagtaggcagttccagaaaatgt

SEQ ID NO: 964005 - DNA, 120 bp, Artificial Sequence
  ENSG00000247828_177 (sequence is synthesized)
aacttttcaaaagccatgtaatggaaaatataaatggtgggatgttgatgtaagaaatcatgatgcccagagacttttgccaaaccttcaaaggacagatcattacaattttacacaaac

SEQ ID NO: 964006 - DNA, 120 bp, Artificial Sequence
  ENSG00000247828_178 (sequence is synthesized)
cattccacagtatattccacttatatactgtggaattggcccttactgcccttatcaaatttaacatcaaggttacagaagcttaatattactgccctgattttattagggcagtaatga

SEQ ID NO: 964007 - DNA, 120 bp, Artificial Sequence
  ENSG00000247828_179 (sequence is synthesized)
tttgataagggcagtaagaattacagccctgtcatattcgcaaagacaaaaatcctaaataaaacagaccttagaaaatgtgtttttaagaaaagataataaaacatgatcaggttgaat

SEQ ID NO: 964008 - DNA, 120 bp, Artificial Sequence
  ENSG00000247828_180 (sequence is synthesized)
ttaacccaggaatgtattttagtatattaagagattagaaaaactatctggctatctgaacagatgcaggaaaagaaaactatttgaaaaaattaacagacatagataaacctttgggca

SEQ ID NO: 964009 - DNA, 120 bp, Artificial Sequence
  ENSG00000247828_181 (sequence is synthesized)
aattagaattgtgtagaacttccttgagccaataaaacctacaacaacaatattttaagatgaagtatttgaagcagtccattagaatcaggaacaagtactatgttggagatcctagcc

SEQ ID NO: 964010 - DNA, 120 bp, Artificial Sequence
  ENSG00000247828_182 (sequence is synthesized)
agcattataaggcaagaaaaacaaaagattaaaaattgtaaataaacataacttagtctacagataaattattgaagagctttgcaaggattctgaatatactattgatatggtttggat

SEQ ID NO: 964011 - DNA, 120 bp, Artificial Sequence
  ENSG00000247828_183 (sequence is synthesized)
ttgaattgtaatccccaatgttggaggtgaggcctggtgggagattggatcacgggaatgggtttctcattcgtggtttagtaccatcctcttggtactgtccttgaaatagttcttagg

SEQ ID NO: 964012 - DNA, 120 bp, Artificial Sequence
  ENSG00000247828_184 (sequence is synthesized)
tactcagtctccagtatttatagcaatgtgaaaacagataatatgactatcaatatacaaaagtgaattgcatttctttccagcagaaatgaactgttagaaaatgatttttgtaacata

SEQ ID NO: 964013 - DNA, 120 bp, Artificial Sequence
  ENSG00000247828_185 (sequence is synthesized)
ccatttactatattcctttaaaaatataaattaggtaacttaacaaaaggtatagaagacctctgtagaaaattacaaaactttattgacaggcatttaaaaatgtctaattttaaaatt

SEQ ID NO: 964014 - DNA, 120 bp, Artificial Sequence
  ENSG00000247828_186 (sequence is synthesized)
gccatgttcaatgattaaaagactcgagttaagatggcagttctccactacacaatgaaggtaattgcaatacaaatcccaaatgagtttttcaaggagcttgacaaactgattctaaag

SEQ ID NO: 964015 - DNA, 120 bp, Artificial Sequence
  ENSG00000247828_187 (sequence is synthesized)
tctgtatgacaaaaagcagaattcaggatactccagaagcagatttaagatagaattgacttgtagatattcgtaacagcaaaaaaataaaaacaactcaaatatccatcaaaagataaa

SEQ ID NO: 964016 - DNA, 120 bp, Artificial Sequence
  ENSG00000247828_188 (sequence is synthesized)
atgtttatccatgaaaagatactcaaaaagtgacacctttatataatgggatatatttggctgcaaaaaggaatgaactgctaatacctgctataatgtggataaaccttgaaagcctgc

SEQ ID NO: 964017 - DNA, 120 bp, Artificial Sequence
  ENSG00000247828_189 (sequence is synthesized)
tgaaataaagaagccagtcacaaaggaccacttatgattccatttaaacaaagtgtataaagtagaaaatgtattgagacaatagattgtggttgtttagggcttacaaagtttggggtg

SEQ ID NO: 964018 - DNA, 120 bp, Artificial Sequence
  ENSG00000247828_190 (sequence is synthesized)
atgggggcccgaggtagtgacagctaaagggtgcagtttctttttgaggcaataaagttctaaaatgtatagttgcacgtttctgtagatacactaaaatcaattcagttgtgcatttaa

SEQ ID NO: 964019 - DNA, 120 bp, Artificial Sequence
  ENSG00000247828_191 (sequence is synthesized)
atgagtaaattggtatgtgaattgtacctcaataaatctgttaaaaccatagtaattaggatattgtaatactggcttagagatggaaaaattgatttataaggaatcctgattgtaagg

SEQ ID NO: 964020 - DNA, 120 bp, Artificial Sequence
  ENSG00000247828_192 (sequence is synthesized)
aatcttgacttatgtcagagatggcattgcataccagcagggaaagctagatcatttcaatagatgacgctgcatattcatatgggggaaaaatgaaattggtcctccctacctaacacc

SEQ ID NO: 964021 - DNA, 120 bp, Artificial Sequence
  ENSG00000247828_193 (sequence is synthesized)
atacagaaaaagtagtttcagatgactttaagatgtaagtgtgaaaggaaaacatagtaaaccttcaaaagaaagattgcaaaatatttttatgatcttatggtagggaaatgtaatatg

SEQ ID NO: 964022 - DNA, 120 bp, Artificial Sequence
  ENSG00000247828_194 (sequence is synthesized)
tataaaggaaaacatgtatgtccaatatgttaaagttaaaaacctctgttcaagactccataaaccctcagaatagcggttaatttcagtcatgcccaggaaacatacaagatgagcctg

SEQ ID NO: 964023 - DNA, 120 bp, Artificial Sequence
  ENSG00000247828_195 (sequence is synthesized)
gaataccttgtgcaagatagcaaggaagctattagagactacgagggtgtcatatcaaatggactcaggagacaactgaaaagcatccttctggccatagatgagaccatttgagtgtca

SEQ ID NO: 964024 - DNA, 120 bp, Artificial Sequence
  ENSG00000247828_196 (sequence is synthesized)
ataaggacagtaaatgcaattgattggaacatatcaagtgtctttaaatctgagtacataatgattgtaaaacaaacagcatttagttggtcaacagtagaagatgctgttgcatcaatt

SEQ ID NO: 964025 - DNA, 120 bp, Artificial Sequence
  ENSG00000247828_197 (sequence is synthesized)
cattattttgaaaatcagttttgttttgtttttaaagtaattaggcatttgtcctgccttttgtatgtgaactgtaagtaaccacatagtagatgaggagagggttctctttgtacatgt

SEQ ID NO: 964026 - DNA, 120 bp, Artificial Sequence
  ENSG00000247828_198 (sequence is synthesized)
attctagctaataaatggaggaatgatagaaaattgccattttgaaattcctaatgaacaaatggatttatttattgcatttcaacagctgctaacatgacagacaagaaaacatatgtt

SEQ ID NO: 964027 - DNA, 120 bp, Artificial Sequence
  ENSG00000247828_199 (sequence is synthesized)
tcttaatggaaaaacaccactactgatgttaaaatcttatcaaaaatttgaccctgatactaatcaggtctttagatccatccaatttgcagaaaatataaacaccattaaaactttaag

SEQ ID NO: 964028 - DNA, 120 bp, Artificial Sequence
  ENSG00000247828_200 (sequence is synthesized)
ccaatgaaacctaccacaacgtaatattttggaatggaaaatataaatgaaaaatccaattttggagaatattgggacaaattaatttcaacaaatatgttgcaggagaaaaggagacga

SEQ ID NO: 964029 - DNA, 120 bp, Artificial Sequence
  ENSG00000247828_201 (sequence is synthesized)
gaaggacaagtggagaaaaccgtagattacaagagacttagttcaatatgaagcaacctgtgaacttggattagttatcttactgtataacaaatcaccctagcttaaatctaaaaatat

SEQ ID NO: 964030 - DNA, 120 bp, Artificial Sequence
  ENSG00000247828_202 (sequence is synthesized)
ttatacactttcttaggatccacaggtggtttagctagatgttctggcccaaggtctcatgaatttgcagtcaagatgttggctgggctgtagtctgaaagtttgactggtgttagagga

SEQ ID NO: 964031 - DNA, 120 bp, Artificial Sequence
  ENSG00000247828_203 (sequence is synthesized)
tccacttcctagagggctcattcgtagagctgcctgtgttttctcacaacatggcaactggctttctctagaacaggtgatccaagagagagacagaaaccatgatcattcagagtgatg

SEQ ID NO: 964032 - DNA, 120 bp, Artificial Sequence
  ENSG00000247828_204 (sequence is synthesized)
taacattacttctactatataatgttagtcacacagacatttccctgacaatatgtgggaggagattacacaagagcatgaatactgggaagctagctgtcacaatttggccccaatgat

SEQ ID NO: 964033 - DNA, 120 bp, Artificial Sequence
  ENSG00000247828_205 (sequence is synthesized)
tgatagttcttgatttgcaaaatatattcatcccctccaaaagctctccaaagctctcatcctatgacaccattagttcaaggtctagaaatctaaatcagttccaattgtggatgacac

SEQ ID NO: 964034 - DNA, 120 bp, Artificial Sequence
  ENSG00000247828_206 (sequence is synthesized)
tcataggtgtacttaagtacagctcctcaagaagagttctttttgatctgaagactcatacactaaagacacagtctctgcttccacatgtaatagaaaatgaataggataataaatgtg

SEQ ID NO: 964035 - DNA, 120 bp, Artificial Sequence
  ENSG00000247828_207 (sequence is synthesized)
gacatgtatatttaaaaagagggaatattggaggtacataggttcacagaaattctgaaacccacctgggcacagattggcagttgcttggtcaagtttcaaggcctagaattctcttag

SEQ ID NO: 964036 - DNA, 120 bp, Artificial Sequence
  ENSG00000247828_208 (sequence is synthesized)
ctctgccttctgggatcttggatctactcactgagtcaccctttctttttcttgtttacacttctgcctgctttctgcctatagaagcttggatgtcccacaagcttctttccatttggt

SEQ ID NO: 964037 - DNA, 120 bp, Artificial Sequence
  ENSG00000247828_209 (sequence is synthesized)
tctctctgtgcctttcagtccaggctggccatgtttctgctaatagacttctcttaaaaactttgtggctcacttgtgaattttgagttcactccatcagacaaaagcaacaaccacaca

SEQ ID NO: 964038 - DNA, 120 bp, Artificial Sequence
  ENSG00000247828_210 (sequence is synthesized)
tctcgtcccacataaactctgcctcaagcttttgctgatgaaaatacccttaaactttttaaaaacctgtgatgttattcagagattttctgagacacatcgtttgtctgatgaaaatac

SEQ ID NO: 964039 - DNA, 120 bp, Artificial Sequence
  ENSG00000247828_211 (sequence is synthesized)
tctgaggcacaacttaagatctttctgagctattaaaggactttataactacagcctcaactttatgttttactggcagtgccctagatttgctttttgctcagagatattccccaattt

SEQ ID NO: 964040 - DNA, 120 bp, Artificial Sequence
  ENSG00000247828_212 (sequence is synthesized)
tagcacatttgtcatctgcacaggctgggaatcttcaaatccagcaagttttgacttgtttttgtttgtttgtttgtaatagagtctgttttttgctgtgttggccaggtgatcttggac

SEQ ID NO: 964041 - DNA, 120 bp, Artificial Sequence
  ENSG00000247828_213 (sequence is synthesized)
cctcagcctcccaaagttctgggattttaggtataagccaccatgcccagccatggctcctttttgtttaacagtccttactttgatggtctctcttctcacacattttactatcagcaa

SEQ ID NO: 964042 - DNA, 120 bp, Artificial Sequence
  ENSG00000247828_214 (sequence is synthesized)
aaaagttaaaaactttagccaggtgtggtggcacatgcctgttgtcctagctgcttgtgagcctggggtgggaggatcacttgagccctggagtttaaggctgcagtgagcaatgatcat

SEQ ID NO: 964043 - DNA, 120 bp, Artificial Sequence
  ENSG00000247828_215 (sequence is synthesized)
gccactgcactgtagcctgggttgtgacagcgcaagacactgttaataaacaagacaaaacagactccatcaaaaagctcttagagctgataaacaaattcagtaaagtttcaggatcca

SEQ ID NO: 964044 - DNA, 120 bp, Artificial Sequence
  ENSG00000247828_216 (sequence is synthesized)
aaaccaacatgcaaaaatcagtagtgtttctatacgccaataacaaacaagctgaaaaatacattaagaaagcaattccatttacaatagctacaaaaaaaaaaacttagaaataaatgt

SEQ ID NO: 964045 - DNA, 120 bp, Artificial Sequence
  ENSG00000247828_217 (sequence is synthesized)
aaccaaggcggtaaaagacctctatgccataaacgacagaacattgatgaaagaaattgaaaaggacacaaatagatatcccatgttcatggatagaaataattaatattgttaaaatga

SEQ ID NO: 964046 - DNA, 120 bp, Artificial Sequence
  ENSG00000247828_218 (sequence is synthesized)
ccatactactgaaagtaatctacagattcaatgcagtccctatcaaaacaccaataaaattactcacagaaatagaaaaaaaaatcctaaaatttgtgtggaacaacaaaggccctaggt

SEQ ID NO: 964047 - DNA, 120 bp, Artificial Sequence
  ENSG00000247828_219 (sequence is synthesized)
agccaaagcattcctgagcaaaaattataaagtgagaggcattgcccaaccagacttcaaaatatactactaagctaagtaacccaaacaacatgttactggtataaaaacagacacata

SEQ ID NO: 964048 - DNA, 120 bp, Artificial Sequence
  ENSG00000247828_220 (sequence is synthesized)
taccaatggaacagaatagagaacccaagaataatctatctatttatagccaactgattttttgtgaacatgccaagaatatacattggggaaaggatattctctttaataaatcatgtt

SEQ ID NO: 964049 - DNA, 120 bp, Artificial Sequence
  ENSG00000247828_221 (sequence is synthesized)
gggaaaattggatatccgtatacagaagaatgacactaaactcctatctctcaccatatacaaatatcaattcaaaatgaatttaaaaacttaaatatgagactccaaactgtaaaacta

SEQ ID NO: 964050 - DNA, 120 bp, Artificial Sequence
  ENSG00000247828_222 (sequence is synthesized)
ctaaaagaaaacacagaagaaacacttcaggacattggtctacattggtctagccaaagattttatgtctaagacttcaaaagcataggcaacagaaacaaaaataaataaatgggatta

SEQ ID NO: 964051 - DNA, 120 bp, Artificial Sequence
  ENSG00000247828_223 (sequence is synthesized)
aaggaaacaatcaacagagtgaagagatgacttgtagagtgacagaaagtatttgcaaactattaatctgataagggactaatatccagaatatacaagaaactcaacaggaaaaaaaaa

SEQ ID NO: 964052 - DNA, 120 bp, Artificial Sequence
  ENSG00000247828_224 (sequence is synthesized)
atacaagaaactcaacaggaaaaaaaaagtcccattaaaaagtgggcgaaggatctgaatagatatttctcgaaagaaaacaagcaaacggccaacaaatacatgaaaaaatgcccaaca

SEQ ID NO: 964053 - DNA, 120 bp, Artificial Sequence
  ENSG00000247828_225 (sequence is synthesized)
tcactaatcatcagggaaatgcagatcaaaaccacagtgagatatcatctcaccccagttagaatggctattatcaaaaaggcaaaaaataggtgtggtggcatgtgtctgtgatcccag

SEQ ID NO: 964054 - DNA, 120 bp, Artificial Sequence
  ENSG00000247828_226 (sequence is synthesized)
ctactcaggaggttggggccaggaatttaagctgcagtgcgctatgatcacacctgtgatcactgcactctagcctgggcaacataatgagaacccatctctaaaaaaatactaataatt

SEQ ID NO: 964055 - DNA, 120 bp, Artificial Sequence
  ENSG00000247828_227 (sequence is synthesized)
aaacatttttaagaagacaagaaataaatgctgaccaggattcagagaaaaagaaacatacgctgttggtgagaatgtaaattagtacagctattggccaggtgcagtggcttacgcctg

SEQ ID NO: 964056 - DNA, 120 bp, Artificial Sequence
  ENSG00000247828_228 (sequence is synthesized)
ccatatgcaatgcttacaggcctcaactctgaaggctattagagctgagtataattcttagcctctcttatctgtgtggccttgatctaattactaatctaagtttcagtttccttgtgt

SEQ ID NO: 964057 - DNA, 120 bp, Artificial Sequence
  ENSG00000247828_229 (sequence is synthesized)
ataaaatgggaataataagaatatctttctcatagggttgtgccaaggaataaataatgtaaaatgaataaaataatgtaacataagtaaaatatttccagtttgtgataaacagcacag

SEQ ID NO: 964058 - DNA, 120 bp, Artificial Sequence
  ENSG00000247828_230 (sequence is synthesized)
tccagtttgtgataaacagcacagcatttaagtttgctgataaaggcttgtctaccttattttctcctatcgtatgtgcaccttttgtttttgtttgtttttttgagacagggtctcgct

SEQ ID NO: 964059 - DNA, 72 bp, Artificial Sequence
  ENSG00000247828_231 (sequence is synthesized)
tggtagagatcgatcaacccacctcagcctcccaaagctctgggattataggcattaccactgcacccagcc

SEQ ID NO: 964060 - DNA, 120 bp, Artificial Sequence
  ENSG00000247828_232 (sequence is synthesized)
caaagctctgggattataggcattaccactgcacccagcctatatgtgcctttaactccattgtagaatgcatattgtgtagagtgtattctattttttattatcacatcatgtgaaaag

SEQ ID NO: 964061 - DNA, 120 bp, Artificial Sequence
  ENSG00000247828_233 (sequence is synthesized)
ttcaggactaattttaacaaaatttgacgttatgtttattatggtctgactgaaactaaagattccaaaatgcaaataatccctcagggcagctgaaactaaagcacaacatgtatgact

SEQ ID NO: 964062 - DNA, 120 bp, Artificial Sequence
  ENSG00000247828_234 (sequence is synthesized)
actcttagaagaggcgtgccataagcaacaagacacaatggaagggaataaacaagcagtggtttctgagggtcagggactccaagtggcagttaatttgaattgactgcttcccacttg

SEQ ID NO: 964063 - DNA, 120 bp, Artificial Sequence
  ENSG00000247828_235 (sequence is synthesized)
ggtaactctaggtatatactccagaggaattagtagcaggaaattcattcttttttaatataaatttcttttgataacaatgtattcgttatgaggacatgagcatgggaaagaaaagct

SEQ ID NO: 964064 - DNA, 120 bp, Artificial Sequence
  ENSG00000247828_236 (sequence is synthesized)
aagatgttaaacagatgaaaatatttacataacttcaaatagttgcaaatacaaagccaaggagaagtagattgaattacattttctaaagaaactgtcggacccagccactgagctttc

SEQ ID NO: 964065 - DNA, 120 bp, Artificial Sequence
  ENSG00000247828_237 (sequence is synthesized)
tcatcattctccatggtccccaaacctctgcaccctcctgttccatcctctcccccaacctggataagcaatgtaaaagcaatttcagtgtttaagttgaactgtggttagtgtagctga

SEQ ID NO: 964066 - DNA, 120 bp, Artificial Sequence
  ENSG00000247828_238 (sequence is synthesized)
gtcacagaataaactggaaagagccattcaaggaaaaagaaaaacacgtactataattgaagacaaacatcactcagtctataacgcattttcaggaattcatgtatgtgtttttatata

SEQ ID NO: 964067 - DNA, 120 bp, Artificial Sequence
  ENSG00000247828_239 (sequence is synthesized)
taagatatataaatataatatgcataaatatagtcactgggcaatcagcagaaagtatttaaggtaacttatatgcattgccaaaatctgcgatatatcatattttatttagtgcatcca

SEQ ID NO: 964068 - DNA, 120 bp, Artificial Sequence
  ENSG00000247828_240 (sequence is synthesized)
aataccccaattattactaaatggaagcaagctgataagctgcaagctatctctagaaaattgggcatgagactatgttagaaatcttccaggaatagaagtaaacagaaaacaactaag

SEQ ID NO: 964069 - DNA, 120 bp, Artificial Sequence
  ENSG00000247828_241 (sequence is synthesized)
accctgtaaagttaatacacagagttcaaagagaatccggtaatatctctaaaagactcgtgtattagtcaggattctccagagaagcaaagccaatagaatgatacatgttgttaaagc

SEQ ID NO: 964070 - DNA, 120 bp, Artificial Sequence
  ENSG00000247828_242 (sequence is synthesized)
aaattaaaatggagaccatgcctgaagaatctctgtgcagagaaacccagttaggcctcataagttaaccttacttgatttgcaaacataatctaaaagttaactggagctatttccggt

SEQ ID NO: 964071 - DNA, 120 bp, Artificial Sequence
  ENSG00000247828_243 (sequence is synthesized)
aaatgaatataacacaacttaagctcaatcagtcagaagcagctttataattatgtagctagggactttccaagaggatgaccaaagaaggaaatgatataactataaccaaataaatat

SEQ ID NO: 964072 - DNA, 120 bp, Artificial Sequence
  ENSG00000247828_244 (sequence is synthesized)
tttctttgctttcctgttcctcctataaaagcctccccactgctgagctgtgctcagcagagctccgaaacaacttctggtttagagttgcccgatttgtgaatcactgtttgctcaaat

SEQ ID NO: 964073 - DNA, 120 bp, Artificial Sequence
  ENSG00000247828_245 (sequence is synthesized)
gagttgcccgatttgtgaatcactgtttgctcaaataaactctttaaaattttattgtatctcaggttatcttttttagatagatagatgatatatgatagatagatagatagatagata

SEQ ID NO: 964074 - DNA, 120 bp, Artificial Sequence
  ENSG00000247828_246 (sequence is synthesized)
attatttattatgggaattggctcaatcacagagacccaagatctgccgtctgcaaactggagaaccaggaaagccagtggtgtaatcaagttcaaagggctgagaaccaggagaatcaa

SEQ ID NO: 964075 - DNA, 120 bp, Artificial Sequence
  ENSG00000247828_247 (sequence is synthesized)
taacttaatacccaatgtaataaggcctgagaatgtggggtagggatgctagtataagtcctagagtctgactactgcagaaccaggagttctgatgtccaagggtaggagaagatggag

SEQ ID NO: 964076 - DNA, 120 bp, Artificial Sequence
  ENSG00000247828_248 (sequence is synthesized)
gtcctaaatcaagaataaagcaaattcaccttttctttgccctttttgttctatttgggcaggcctccagtgaattggatgatgcccacccacactggtagagcagatctttagtcagtc

SEQ ID NO: 964077 - DNA, 120 bp, Artificial Sequence
  ENSG00000247828_249 (sequence is synthesized)
ttgattcaaatgctaatttcttcacagaggcacacagaaatactgttttatcatctatctggatagcccttaacacagccaagttgacacataaaattaaccatcacaattaggttttcc

SEQ ID NO: 964078 - DNA, 120 bp, Artificial Sequence
  ENSG00000247828_250 (sequence is synthesized)
tgggttggaaggaatgggagataatgaaacgggtgctggagggtagaggaggtctgagggacttcttggcgggactatgtgaaccagaatggaatgagcaaattacagaccccacagtct

SEQ ID NO: 964079 - DNA, 120 bp, Artificial Sequence
  ENSG00000247828_251 (sequence is synthesized)
ctgctctgacagagattgccagagtttgaaatagacctgatagggttactacaggttaccagaaccgggaagtcatgtggcagccaagctaatatccaaagatcacccaaagagtatttc

SEQ ID NO: 964080 - DNA, 120 bp, Artificial Sequence
  ENSG00000247828_252 (sequence is synthesized)
atgtgatcaggaagagtctctgtttaattgacaactgcttcccacttcccatccccttcacgtgtagcaggagtcacagctgtctgtatgcaggtactttactcgaccctatccaaacta

SEQ ID NO: 964081 - DNA, 120 bp, Artificial Sequence
  ENSG00000247828_253 (sequence is synthesized)
ttaataggaaaaagtactttctcagtagtctaagtagtcacaaaccctaagaaatacagaaaagattatggacatctacgggagtgccagtgatataaaatgataatccatatcacatgg

SEQ ID NO: 964082 - DNA, 120 bp, Artificial Sequence
  ENSG00000247828_254 (sequence is synthesized)
aaaccctcccacataaataatctttatttgactaggactttattcattcaactgagattctccaacacccctgataaccagccaggaccgtgctgatcctaggcaacaatctaaaaggaa

SEQ ID NO: 964083 - DNA, 120 bp, Artificial Sequence
  ENSG00000247828_255 (sequence is synthesized)
taattaaaggatgctctgggagcatctataagagaaagcagtaatcaatcgaatacagcacgggtttatctataataatttcagtctaatttaattttctttctgatagtgttactaggc

SEQ ID NO: 964084 - DNA, 120 bp, Artificial Sequence
  ENSG00000247828_256 (sequence is synthesized)
tagtcaaccaataaaatgcagtaggtaatatttttctgggcccatgaggtattactgacttttttttttttatcatatccttgtgagtaagttggaggggttggggaggctagatggtag

SEQ ID NO: 964085 - DNA, 120 bp, Artificial Sequence
  ENSG00000247828_257 (sequence is synthesized)
tactgtcagggaaggacttagcatccaaagggtactgactcctagatggcagtcagcctctccagaggtttttagtatagaattacagtcctcggtcttctgtgtttcattgacttaaaa

SEQ ID NO: 964086 - DNA, 120 bp, Artificial Sequence
  ENSG00000247828_258 (sequence is synthesized)
gaaaacatagaatccatatttatcaaatttttacctgattcaaaatcaggaaggatagtattttttccaaactttggaacagcttgatgttgactctgggctaaattctgtatgggcata

SEQ ID NO: 964087 - DNA, 120 bp, Artificial Sequence
  ENSG00000247828_259 (sequence is synthesized)
attagaatcaataaaattttgagagtctataacaatataggcagagtccaacaaactagtaggatttttaagtttattcactcatttagatgtcacaaatttctggaatatcaactctgt

SEQ ID NO: 964088 - DNA, 120 bp, Artificial Sequence
  ENSG00000247828_260 (sequence is synthesized)
gtaaatgtctatgttaggctttagaatatgaataaggtatgttagactgcaggagtttaaaatctggtgaataaaacaaacttgtaaacacaaaatacaacaaatattaattgtaaggca

SEQ ID NO: 964089 - DNA, 120 bp, Artificial Sequence
  ENSG00000247828_261 (sequence is synthesized)
ttatttagcattatatttagtaaaaaaaactacagttaattgtatgatatgcacagggactggcatgtgtgaaacacctttagacatttaataagctggaaaaaataatatttaccataa

SEQ ID NO: 964090 - DNA, 120 bp, Artificial Sequence
  ENSG00000247828_262 (sequence is synthesized)
ggcggatcgtggtggctgcgcttgcgaggaccctgagtttaaacttgattttgtgaggggacgaacagcgtgacaattaaaagaagatctgggaatcaaactctgttcaacttttcagcc

SEQ ID NO: 964091 - DNA, 120 bp, Artificial Sequence
  ENSG00000247828_263 (sequence is synthesized)
gaggaaatgaccaaaaacttaaaatctgttataacattgaccccttagagacataataaacatggaaagagtgaagagtgtggaattgtttaaaacctggttttgtcaaggatcagttaa

SEQ ID NO: 964092 - DNA, 120 bp, Artificial Sequence
  ENSG00000247828_264 (sequence is synthesized)
ttctattccagctgtacctgtcaaagtaatttatcagaattagtgctcttcttgatgatgtaatagtgagctgacacataattctactatatctgataagtaaattattagctcatgcca

SEQ ID NO: 964093 - DNA, 120 bp, Artificial Sequence
  ENSG00000247828_265 (sequence is synthesized)
gaacaaaaaggatggacattgccactcaaaattgattattttacataacacagggaccacccatagactacataggattttcacggaacttcagaaattcttgaatctcattttgagaac

SEQ ID NO: 964094 - DNA, 120 bp, Artificial Sequence
  ENSG00000247828_266 (sequence is synthesized)
cacttttctattgtactttattctggtgttttcttagatagtgtatatctgggatatatagacagaaagtttatgcttctagtaagagcagagatggaaacttgagctgtgtggatacag

SEQ ID NO: 964095 - DNA, 120 bp, Artificial Sequence
  ENSG00000247828_267 (sequence is synthesized)
gaatacttcagaaaagcctcaggctaatatagtcagactttactcactggattgcctggaaataatttttggtcagtgctatgaactgaatgtttttgtccgtctgtgaggccatagcaa

SEQ ID NO: 964096 - DNA, 120 bp, Artificial Sequence
  ENSG00000247828_268 (sequence is synthesized)
tgtgaggccatagcaagaaggtggcagtctgcaagccaggaagagagccctcagcagaaaccaaatggtccaacacttaaatctcagacttcccagcctccagaactgtgagaaaataaa

SEQ ID NO: 964097 - DNA, 120 bp, Artificial Sequence
  ENSG00000247828_269 (sequence is synthesized)
gttgatgaaaacatttttatttagagaattaggtgtattttggttttgtaaaatgtttgtctttttgtcagggtcagtcctcatacctcatagttaggtttctaaatataagatttgcaa

SEQ ID NO: 964098 - DNA, 120 bp, Artificial Sequence
  ENSG00000247828_270 (sequence is synthesized)
taagaaaaatgtatcattgaccttggacgtgaacttctaactggtcttatgttgatgtgtaactaattcctgcatgttaaacctttatacagtaggtatggttatactctttgttttgaa

SEQ ID NO: 964099 - DNA, 120 bp, Artificial Sequence
  ENSG00000250421_0 (sequence is synthesized)
aaagaagagatggatgctgcagtgacacagacaagagcaagtagcaaagtgaaaaggaaggaagaaatgggctaaaagcaaggaaaaacaggtcccaagcaaatctaaaacccagcaggg

SEQ ID NO: 964100 - DNA, 120 bp, Artificial Sequence
  ENSG00000250421_1 (sequence is synthesized)
cagacagtgtccagaattatcactggtacaggagcatatttatgttaatttcttattttggatattcctgaacattgaagattttgaagctagtacaaatttgaaccacacacttgttca

SEQ ID NO: 964101 - DNA, 120 bp, Artificial Sequence
  ENSG00000250421_2 (sequence is synthesized)
ttaaactgttcccattccaatgtgcaaaacactgctcaagagtttccttgttggagactgacagacagaaaagaagaagaatgcattgtgttctcagagaaacccagacaagaaaagatt

SEQ ID NO: 964102 - DNA, 120 bp, Artificial Sequence
  ENSG00000250421_3 (sequence is synthesized)
ggagctgctgagctgagagcactgagaactgagagcactcaatcttttatgtccttttggaggtacagcatgggagaaatgggatcacctggtagtaggactccagttgctcccaatgcg

SEQ ID NO: 964103 - DNA, 120 bp, Artificial Sequence
  ENSG00000228553_0 (sequence is synthesized)
acattcacgggaattatgtcctagaagcttggcaatttttttttccaaaagcattctttgtttttctaaaaatatcaatttggtattaggaaatgaaagacctgtaggtcctggctgggc

SEQ ID NO: 964104 - DNA, 120 bp, Artificial Sequence
  ENSG00000228553_1 (sequence is synthesized)
agcactttgggaggctgagttttttcagacttggctctgggtaggtcctcctaagcactcagttttgagctgcatatgtgaaggcagagcaggaataaaaggagaaaatactgagaagag

SEQ ID NO: 964105 - DNA, 120 bp, Artificial Sequence
  ENSG00000228553_2 (sequence is synthesized)
tccaaaatatgactaaagagatgaaaaaaacaaaatgaatggttgctcacacctctttcctatccctacatagaaacaaacaggaaaatcagagcaacagggagttttagtgataaaaca

SEQ ID NO: 964106 - DNA, 120 bp, Artificial Sequence
  ENSG00000228554_0 (sequence is synthesized)
agaagacctctgtttcaagtctctggctaactagctaggacaggaggtctcgattctgactaaatgtaattattggaatactcccagtattgctttctaatgcagataaatcactatgaa

SEQ ID NO: 964107 - DNA, 120 bp, Artificial Sequence
  ENSG00000228554_1 (sequence is synthesized)
aaggaaactagatgaaggtttaatttctgattttattttcaattgaattttgtctgtttaattgacacatattcacagagtacacagtgatgttttgaaacatataacgtacagtgacta

SEQ ID NO: 964108 - DNA, 90 bp, Artificial Sequence
  ENSG00000228554_2 (sequence is synthesized)
ttatcaggtgaccaccgactgcagactgtattaactgaaactggccacagcaatgtttcctatgtgcttttccagaatcctgccactttt

SEQ ID NO: 964109 - DNA, 120 bp, Artificial Sequence
  ENSG00000228554_3 (sequence is synthesized)
atgtgcttttccagaatcctgccacttttcatcaagagctgaagtctattccccttccttctcaacctaggtgagactttgtgactatctccaacctgtagaatgaggtagaaataatgc

SEQ ID NO: 964110 - DNA, 120 bp, Artificial Sequence
  ENSG00000228554_4 (sequence is synthesized)
tgcataacttcagagactatgtcataaaaggccgtatggtttctgcctggttctttttctcttgtgacacttgcccttggagactctgcccactgtgctgtgaggaagcctaaactagca

SEQ ID NO: 964111 - DNA, 120 bp, Artificial Sequence
  ENSG00000228554_5 (sequence is synthesized)
cacatggaaaaggccacatggaggagcccacctggagaggaactgaggcatccttggataatggccagcatcatctggctgagccagacatgtgcgaacaagccttcagaacctaagttt

SEQ ID NO: 964112 - DNA, 120 bp, Artificial Sequence
  ENSG00000281473_0 (sequence is synthesized)
tgaggcataagagaagagccccagaatgaagaaagaaggagaatatggctttattcacagctgactcactttgggagagtcacggcttctctctggaactcagtttcccacttagaacat

SEQ ID NO: 964113 - DNA, 120 bp, Artificial Sequence
  ENSG00000281473_1 (sequence is synthesized)
ggggaaggtagaagtgtgtggagtgtgtagagtggtcaagagcctggatcaggggcttaaatcctggctgccttaccttgggccacttcaccgtgctgtgaatttccttctctgtcaaat

SEQ ID NO: 964114 - DNA, 120 bp, Artificial Sequence
  ENSG00000281473_2 (sequence is synthesized)
ggtgttgtttgagtatcagtgtttgccattattcttataacaaggttctctttggtcccttctggctctgtttttatttatttttttatttctacttcctctgccctcaaattttcaagg

SEQ ID NO: 964115 - DNA, 120 bp, Artificial Sequence
  ENSG00000281473_3 (sequence is synthesized)
acaggctgatttttattttattcttcaacattaaggtaactgcaaacatattgttgaaggaaaataaaaggtacttctcaggctttcgtctgcaataacttaaagaaaaggacccagaaa

SEQ ID NO: 964116 - DNA, 120 bp, Artificial Sequence
  ENSG00000281477_0 (sequence is synthesized)
cagactcacagcctaccatcccctccagccccagcccacctgacctacatcagccaccttctgattgattctgttttttcctggggaaaaggccaaaaagccatctaggcctcaacccca

SEQ ID NO: 964117 - DNA, 120 bp, Artificial Sequence
  ENSG00000281477_1 (sequence is synthesized)
gcatctctgaacctctgacccagccctggacttcccaatttcagacttctttcagctcctgcttcttcgtcacaggtacaccagggcatccagcacattgatttgtccccactcgcctta

SEQ ID NO: 964118 - DNA, 120 bp, Artificial Sequence
  ENSG00000281477_2 (sequence is synthesized)
gcctgtctcctgccacagttgtctcattttggtgaagtgcgtgtccaggtttccccgtgctcccagctgcaacatggatctgtgaaagacagtacagcagaaaagtcttcacatcctggc

SEQ ID NO: 964119 - DNA, 120 bp, Artificial Sequence
  ENSG00000281477_3 (sequence is synthesized)
gaacacggagcagcagagggagaaattgtgtctttactgatttcagtcaattattgcagtgaccacatgtctcaggagtgttgatgtccagatgagggctgacccatgaaaggtcagcaa

SEQ ID NO: 964120 - DNA, 120 bp, Artificial Sequence
  ENSG00000281477_4 (sequence is synthesized)
ggaaaaaggaggacctaaactttcctcggtttgcaagttgtaaaagacccatggaatgccaactatccttgtccatggacatgtggacagactgtccagtggctatcatcaattttgcat

SEQ ID NO: 964121 - DNA, 120 bp, Artificial Sequence
  ENSG00000281477_5 (sequence is synthesized)
ctatttgtaaattctatgtcagcattcctattgtcctagctatgcgtggcatttttaattctcctttgggctggttgtagcatcttactggttccctcattaattaatgaactaaataaa

SEQ ID NO: 964122 - DNA, 120 bp, Artificial Sequence
  ENSG00000239877_0 (sequence is synthesized)
aggcacagaagctgcagagcaacacaaaggatcctgcgggcttgaacaaggggctcgaacaaaaagcagttactccacagaagaccagaggggtcctcccagcattgtggctctatgagg

SEQ ID NO: 964123 - DNA, 120 bp, Artificial Sequence
  ENSG00000239877_1 (sequence is synthesized)
aaactgagacccagagatggaactgggattcaaaacaatgtctagtgtgactccagagcctttcctaactcctacttaaagcctctgaggaatgctgaaaagagcacaggacatagaatc

SEQ ID NO: 964124 - DNA, 120 bp, Artificial Sequence
  ENSG00000239877_2 (sequence is synthesized)
cagattaaaatgatgaaagtcatcaaccttaaaagaagcaaaaaagaagagaattagctcctctgtgtaatttttttaaatatagcatcaaaccatcttcccgtcagcaacaggcactgc

SEQ ID NO: 964125 - DNA, 120 bp, Artificial Sequence
  ENSG00000239877_3 (sequence is synthesized)
agtattgaagatcatcacatgagggcagagggcgtaaaaaaggatggtgtgttgagaccagaagcagcagcagtcctcgacatcaactacaactttccttcgcacagtgcataccctctg

SEQ ID NO: 964126 - DNA, 120 bp, Artificial Sequence
  ENSG00000239877_4 (sequence is synthesized)
atatactgaacccaacgcctatcctccagccccctaagaactagagagggagcctcacaacattccaatttaatccttcagaaaattcattactcttcaaagttgtctgtggttttgtga

SEQ ID NO: 964127 - DNA, 120 bp, Artificial Sequence
  ENSG00000239877_5 (sequence is synthesized)
caacgatatgactaggtgcaaaatggcttgcaactaattaacaaacatagaagcatccaacaaacatatacgtgcacaatctgaggatttagggatgaaatcagttatccaggttagata

SEQ ID NO: 964128 - DNA, 120 bp, Artificial Sequence
  ENSG00000239877_6 (sequence is synthesized)
tgttgaggtgtggattatgtaagtaagactgacaacaagaaatgattttgttataatccagaagtaaaactaaataaatgttctttaaattgatggataaataagaaagaatttatttac

SEQ ID NO: 964129 - DNA, 120 bp, Artificial Sequence
  ENSG00000239877_7 (sequence is synthesized)
aacagtaaataaatccaatacttgttataaataagataaagctggctataaattcacattttcatgtgagcgttttgaagtatgtggacataaaaaacacacacctcaagcatacttctc

SEQ ID NO: 964130 - DNA, 120 bp, Artificial Sequence
  ENSG00000239877_8 (sequence is synthesized)
aatgatttctgataaagaacacacctttgtaaccagcacatggtgtaaaaccagaaacagaacattaccagattcctaaacaagccttctttgtgcccctttttagtcactaccctcccc

SEQ ID NO: 964131 - DNA, 120 bp, Artificial Sequence
  ENSG00000239877_9 (sequence is synthesized)
cattcaaggtaacttctatcttgacttctaacaccacacttttagttttgcctattgttaacttgatataaatagaatgatactgtatattttgtgtgtgtttggcttcttctgctccaa

SEQ ID NO: 964132 - DNA, 120 bp, Artificial Sequence
  ENSG00000239877_10 (sequence is synthesized)
cttttgttggtaaggtttatacagattattaaatatagctatagttcatttatttctattactatgcagtatacttggattcaggaatacaccataacttaatcatccattctattgttg

SEQ ID NO: 964133 - DNA, 120 bp, Artificial Sequence
  ENSG00000239877_11 (sequence is synthesized)
actggtttggcaattttctaaacatacgcaaattctatgaaccagcaattctatcccgtgtatgtgtatatatacacacatgttaaatatatacacagaaacatgctgtgaaagtgcttt

SEQ ID NO: 964134 - DNA, 120 bp, Artificial Sequence
  ENSG00000239877_12 (sequence is synthesized)
gcaaatggcaaaatgtaaaatgtaaggaatgttaccaaagagctgaaacgcactgtgtctttcttgcaacacagattcttggacatatcagataataaatgtattttgtattgaaaataa

SEQ ID NO: 964135 - DNA, 120 bp, Artificial Sequence
  ENSG00000286128_0 (sequence is synthesized)
tttattgtcaaaaacatttatttcttcaagtacaaatagtaagtattaaccatttcggatggtttgcatgtgctcggttttacttatgttaactcatttttacctcacaacagttaccgt

SEQ ID NO: 964136 - DNA, 120 bp, Artificial Sequence
  ENSG00000286128_1 (sequence is synthesized)
ggtaagaaattattatccacattgatatgtaaatatcaatccacagaggaagaaaattgcttaagaccaaagtcatagttattaaatgccagggtcacaatataccatctgcaagctgga

SEQ ID NO: 964137 - DNA, 120 bp, Artificial Sequence
  ENSG00000286128_2 (sequence is synthesized)
gaatcagagaagccggtggcatggcctgatccaagttggaaggaaagcccacctgcttctggtttgcagatggcagtctttgtgtggtagtcttacatggcagagagagagagcaagctt

SEQ ID NO: 964138 - DNA, 120 bp, Artificial Sequence
  ENSG00000286128_3 (sequence is synthesized)
ccactgccatgatctgaatgtgtcccctgaaattcactcataaaacagtctcctccaaaaacatggtccttctcagaaacagtgcttccccagccatctaggcatccctcaatcctgtca

SEQ ID NO: 964139 - DNA, 120 bp, Artificial Sequence
  ENSG00000286128_4 (sequence is synthesized)
agttgacacctaaaactatcacagggacactctacaagtaactggtaaacccaccagaagatcagggtccagatgcagaaagcaggtgctgatgagtttttaaatatcttggggtctcct

SEQ ID NO: 964140 - DNA, 120 bp, Artificial Sequence
  ENSG00000286128_5 (sequence is synthesized)
agtgggctgctatagcaagttaccatagactgggtggcttaaacaacacacatttctttcttactgttctgaaggctggcaagtccaagatcaaggtgcaggcacatctggtgtctgatg

SEQ ID NO: 964141 - DNA, 120 bp, Artificial Sequence
  ENSG00000286128_6 (sequence is synthesized)
agggtccacccgctttctgatttgctgaggacagtcttcttgtggtattctcacatggcagagagcaagctcttgtgtctctttttataaggccactgcgatggtctgaatgtgtctccc

SEQ ID NO: 964142 - DNA, 90 bp, Artificial Sequence
  ENSG00000286128_7 (sequence is synthesized)
ctatgatcatgccactatactccagcctaggcaacagaacaaggccccatcaatcagtcagtcaatacataaataagtctttccatctat

SEQ ID NO: 964143 - DNA, 120 bp, Artificial Sequence
  ENSG00000286128_8 (sequence is synthesized)
caatcagtcagtcaatacataaataagtctttccatctatccctaatgcaacagctgtgagagaacaaacatctgttctatataaattacccagtctcgggtattctattatagcagcac

SEQ ID NO: 964144 - DNA, 120 bp, Artificial Sequence
  ENSG00000286128_9 (sequence is synthesized)
aaaatggactaagacagccactaatcccactcatgagggccctaccatcatggcctaattagttacttcccaaagttcccacttcctgttaccatcacaaaggggttaggatctcagcat

SEQ ID NO: 964145 - DNA, 120 bp, Artificial Sequence
  ENSG00000286128_10 (sequence is synthesized)
gttaggatctcagcatagaaactttgggggcagacgagcattcagtccataacatggagtgtcttagcttgggttgctataacaaataccatgccagctgggcgcagtggctcacgcctg

SEQ ID NO: 964146 - DNA, 120 bp, Artificial Sequence
  ENSG00000286121_0 (sequence is synthesized)
agaatttcagagatgcaacaaggatggaattactgtcctcgttctaggtttagaaggcaggcatgcaagtacctagagaaagagaacagatgaaagctggcagcctcttcatttacagac

SEQ ID NO: 964147 - DNA, 120 bp, Artificial Sequence
  ENSG00000286121_1 (sequence is synthesized)
agcacaattttctgaatttagcaagactcttcttttcccccagaacgctctatatcagcatgggcctgtgaccttctgtgactgataaaatagtccagcttccaaaaggagagaaagaag

SEQ ID NO: 964148 - DNA, 120 bp, Artificial Sequence
  ENSG00000286121_2 (sequence is synthesized)
acaaaaaggagtgagaaaaatgtcaaagaaataaggctggaacacagatgttgtgggggctcagctttgagttttcaaataaggacaacacgtggggcaacaggatggaagaaatctggg

SEQ ID NO: 964149 - DNA, 120 bp, Artificial Sequence
  ENSG00000286121_3 (sequence is synthesized)
tccctgaatgacttcatggagaagagccattcagctagcaggactacttatatctggattattatgtaggagatacacaaacttttatcttacttaagaaaaatcagattcatcaattga

SEQ ID NO: 964150 - DNA, 120 bp, Artificial Sequence
  ENSG00000286121_4 (sequence is synthesized)
atctttggccaacaactgtttgggaacgatgttaacatcacataaacaagtcacgtgcagagaaaaggtatttaacctgagtctttatggaatttcccaggccacatctcccatcaaatt

SEQ ID NO: 964151 - DNA, 120 bp, Artificial Sequence
  ENSG00000286121_5 (sequence is synthesized)
ctcgactatgaatttctaaggaactatagacttttatactacaagtaacaaacctacgttcaaagacagaaataacttctgcaaattaataaggaaagaaaatgtcagaatctgggcata

SEQ ID NO: 964152 - DNA, 120 bp, Artificial Sequence
  ENSG00000286121_6 (sequence is synthesized)
tttcatgtgttgtgatggtgccaatctcatggactgtctactcctggtttggtgtgctcttacaagaaaagtgtcaaaaccttggtcaagtgcaatgcacaggagttgcatccacgacag

SEQ ID NO: 964153 - DNA, 120 bp, Artificial Sequence
  ENSG00000286121_7 (sequence is synthesized)
cagttagtcagaaagaaaagatatttgtgaaatggctgctgtggctggactctgtcctagattctggtgacgcattggtgaataagtcaaaccttgctctgactgttggaagcttatatt

SEQ ID NO: 964154 - DNA, 120 bp, Artificial Sequence
  ENSG00000286121_8 (sequence is synthesized)
ttcatggtggaaagacaaataatgaacaactaaataaacaagatgtttttagagagtgacagaagaactaaaatcaggtcaagaactaggcttacatcaacactgactaatttagattaa

SEQ ID NO: 964155 - DNA, 120 bp, Artificial Sequence
  ENSG00000286121_9 (sequence is synthesized)
caaaggtttatcaagcaagcagcaggggatccattggaatgccataaataactgaatagtgttatatggaatcaagaggatatcgactgagttgctgtcctgggaacactggcgtggctt

SEQ ID NO: 964156 - DNA, 120 bp, Artificial Sequence
  ENSG00000286121_10 (sequence is synthesized)
ttttcttcagcactgctctataataggactaccctgcatgtgtttccagatggtggtttttcctgagtgccaaagttaagtcaatgccactagggaaagtgggagagggctaaggaaact

SEQ ID NO: 964157 - DNA, 120 bp, Artificial Sequence
  ENSG00000286121_11 (sequence is synthesized)
gtcctactatccacatttagggaattctaactgaaggaatgatttcatctctcagcatctcttagtgacttaatattcaaaaattttaactgatattgtttcatttaccacaagatagaa

SEQ ID NO: 964158 - DNA, 120 bp, Artificial Sequence
  ENSG00000286121_12 (sequence is synthesized)
attccagcaatgtaaattagttattaataagtcctagatttcattgttaaaaagttaaatttaatgattctacagggaatacatttaaaggaacaaagtaaaagtgagaagaagtaataa

SEQ ID NO: 964159 - DNA, 120 bp, Artificial Sequence
  ENSG00000286121_13 (sequence is synthesized)
aacataaaattcagtgttttagctcatgtctttcaaaagctttatagacctaattccaacactttgcaattgttcttgtgtacctcttgtccccccttccaagtttctcacactcctcat

SEQ ID NO: 964160 - DNA, 120 bp, Artificial Sequence
  ENSG00000286121_14 (sequence is synthesized)
tgactcaaaacctgttattttccaagtcccatccaaatcatctctaatcctagttttggaagaccattttcatcttcctcctgacctccctcccgttctttgtctcttgtgattttatta

SEQ ID NO: 964161 - DNA, 120 bp, Artificial Sequence
  ENSG00000286121_15 (sequence is synthesized)
tgtcagcttcacctatagataggctttttctcctgtccacatcaagcctctgtggttcattccttctctgctggctctccatttcacctttttaaaagtctaggaattagcttgactgag

SEQ ID NO: 964162 - DNA, 120 bp, Artificial Sequence
  ENSG00000286121_16 (sequence is synthesized)
aaaacttctctatagaaggtagagaaaggtggaggaaagttaactgagaagacaattaagactggtgtgagatgatagaaatgttgtgatgccatgaaagggaaggatgttttgattttc

SEQ ID NO: 964163 - DNA, 120 bp, Artificial Sequence
  ENSG00000286121_17 (sequence is synthesized)
tttggttgtttgaatatctgtcacttaccatcttgtatatagttttgctgctctaatttcagtattgattttataaatcccaactttcattttgtttttcatagcacaacaaaagaagtt

SEQ ID NO: 964164 - DNA, 120 bp, Artificial Sequence
  ENSG00000286121_18 (sequence is synthesized)
ccctgaactttgaacagtaaagtcaaattacatggaaaccaaatgtctataggtctttataatcctaaattatgtgttactcaagaaatggcataattaatgcaacctaggtaattgtac

SEQ ID NO: 964165 - DNA, 120 bp, Artificial Sequence
  ENSG00000286121_19 (sequence is synthesized)
aacatgtgcatgccttaagagacctggattctctagtactatgctctccatgtaaatgcccgagttttatgttgctacttacattcagatttatagaagcaacctgagaaaaatctaagt

SEQ ID NO: 964166 - DNA, 120 bp, Artificial Sequence
  ENSG00000286121_20 (sequence is synthesized)
gaaggctgtatcatattaatttcctctcagtgaatatcctatggattttcctaaaatatcagtatgtacattttgacatatttgaatatatagctctgtagtagtccattctcatgctgc

SEQ ID NO: 964167 - DNA, 120 bp, Artificial Sequence
  ENSG00000226063_0 (sequence is synthesized)
agctcagagtaggtgctgtgtaatgctggatgactgaacaaatcctctacattcgttatcttttattacacgcatacatctttgtttccttgcatacgacatgtttcaagtcgtctggag

SEQ ID NO: 964168 - DNA, 120 bp, Artificial Sequence
  ENSG00000226063_1 (sequence is synthesized)
cacgtcgacatttgggaataggcatccaagtgcttacagtatgaattttgccactgttgggagtaagatgaggttcaatcaactgcttctggaatgacttactgtgggagctagcagcag

SEQ ID NO: 964169 - DNA, 120 bp, Artificial Sequence
  ENSG00000226063_2 (sequence is synthesized)
gagttcttgatcacgctgcgagttttgcacacaatgttagcacgctgattcttccactgccgggaggaggcccggggctctgagggccggtccctgcggtagtgagctcgtgggggatga

SEQ ID NO: 964170 - DNA, 120 bp, Artificial Sequence
  ENSG00000226063_3 (sequence is synthesized)
acggggagcgagtggccgcggggaggagcgagagggtcgcagccccgagggctgtcctgtgagcaggctgcggggcctggcgcgcggggacccggggaagacgctacaaggcctggaggc

SEQ ID NO: 964171 - DNA, 75 bp, Artificial Sequence
  ENSG00000286123_0 (sequence is synthesized)
caaaaagggaactggaggctcgcgcacggtgcaggcacccactgacctgcgccaactgtctggcactccctagtg

SEQ ID NO: 964172 - DNA, 120 bp, Artificial Sequence
  ENSG00000286123_1 (sequence is synthesized)
tcctattcggccatcttggctcctccacccggatgatttttcttactttctatagtcctcattctataacttttgatccaaattattccagagattggattaaaaacaaatggatgtggc

SEQ ID NO: 964173 - DNA, 120 bp, Artificial Sequence
  ENSG00000286123_2 (sequence is synthesized)
attctcaccagcaggtctcatgtgctccgaaaccaacttgaagcactctccttcttcctctagttctttagatcaagaggaactacttgaagagcagcactcaacaaatctgcacatcga

SEQ ID NO: 964174 - DNA, 120 bp, Artificial Sequence
  ENSG00000286123_3 (sequence is synthesized)
cctggtttaaatgctaagatcctgcccttgtagattcgatgccataatgatgagactttcacaaggtcaagggagaagtgtgaaagaggactaatacgttccccatcaagcctccagatg

SEQ ID NO: 964175 - DNA, 120 bp, Artificial Sequence
  ENSG00000286123_4 (sequence is synthesized)
agaaccctgtcctgaccaacattttgattgcagctttgcagaggaccgagataaaccataactagactcctcacccatagacactgtgagataataaatgtgtggtgttttatactgcta

SEQ ID NO: 964176 - DNA, 120 bp, Artificial Sequence
  ENSG00000286123_5 (sequence is synthesized)
tactgctatatttgtatgcaactctgaaaattaatacgtgcttaactttcatttaaactatgaaatatatttgataaaaaataatatattcatgttttgacagaataaatatctgcaaaa

SEQ ID NO: 964177 - DNA, 120 bp, Artificial Sequence
  ENSG00000286122_0 (sequence is synthesized)
acaggctccagctttctgctctgatgtctgcactcaagctttggaggctcttgccaagcattcaccctcacaggttctggaacaagctccaaggcagagggatgatggcctggctgagcc

SEQ ID NO: 964178 - DNA, 120 bp, Artificial Sequence
  ENSG00000286122_1 (sequence is synthesized)
gcaccgcgcaggcgctcttccccagcgcagacgccctgctctgtcctgacagtcccgcgttgccctcaatctgaaggtatggataattaagcgcagtgagattggagagcatcctccgat

SEQ ID NO: 964179 - DNA, 120 bp, Artificial Sequence
  ENSG00000286122_2 (sequence is synthesized)
gcactgtacatttgggaggaagagaaaggataagagccctgctgattcagtggtggtcattatcattgtcaatggagctgtcactgttatcgtcattttcgtttgcggtgagagatcatc

SEQ ID NO: 964180 - DNA, 120 bp, Artificial Sequence
  ENSG00000286122_3 (sequence is synthesized)
tggttccatcttgtcttgagaatggacatcaaagtactatttttgttgtgattgttcaaggattgctgccatgactcaaaatgggaccatgccttcagatctccatctgctccacccagg

SEQ ID NO: 964181 - DNA, 120 bp, Artificial Sequence
  ENSG00000286122_4 (sequence is synthesized)
taataaggacacttggagccttcatgctccatttgtgactggcaatacagggacctaaaggctaaggtgttctatcttcagcaaaaaggaacaatcttagagtctggtggaaaaggatca

SEQ ID NO: 964182 - DNA, 120 bp, Artificial Sequence
  ENSG00000286122_5 (sequence is synthesized)
tgccatatactctggggaacagatttctgatggcattgtttaaacaactatgaaatcataccattggactgagtcaggagttgcagatgtctagttgagaagcagatgcattcatgaaac

SEQ ID NO: 964183 - DNA, 120 bp, Artificial Sequence
  ENSG00000286122_6 (sequence is synthesized)
aacacaagatcaggtggaagaagagtgaattttatagaactgaatgagcagatgattatgatttctatttgaaatattgttaaggttttattgctctattttttggaagtaagaatttct

SEQ ID NO: 964184 - DNA, 120 bp, Artificial Sequence
  ENSG00000286122_7 (sequence is synthesized)
tttctttttctcttaagttatcgctcaaacaattttatagactatgctaatttcttgtaaacagaaatgaaacttctttcttttcttccctgactcacccattccaaatctggaaactct

SEQ ID NO: 964185 - DNA, 120 bp, Artificial Sequence
  ENSG00000286122_8 (sequence is synthesized)
cattgagtcttgttatcttcatggcaatatagttatttgcatagataccataagagtctgtcctccttgttaacaggatgcaagcaaaaacattggtaatacaaccaaggctttgcctgg

SEQ ID NO: 964186 - DNA, 120 bp, Artificial Sequence
  ENSG00000286122_9 (sequence is synthesized)
ctggatgtcatatttgagaatgatgcttatttgatcagatatgaccagacacttttaaggaactaaagttgagccccaaaactccttaagataataagcaacttcagcaaagtctcagga

SEQ ID NO: 964187 - DNA, 120 bp, Artificial Sequence
  ENSG00000286122_10 (sequence is synthesized)
acttcagcaaagtctcaggatagaaaatctgtgtgaaaaaatgacaatcattcttataaaccaacaatagatgagcaaagccaaatcatgaatgaactcccattcgcaattgctacaaag

SEQ ID NO: 964188 - DNA, 90 bp, Artificial Sequence
  ENSG00000286122_11 (sequence is synthesized)
caagggatgtgaaggacctcctcaaaggagatgatacaatcaagtggaaaaacattctatccttatggataggaagaatcaatattgtaa

SEQ ID NO: 964189 - DNA, 72 bp, Artificial Sequence
  ENSG00000286122_12 (sequence is synthesized)
taaatttcatatggaaccaaaaaacagcctgtatggctaagacaatactatacaaggctacagttaccaaaa

SEQ ID NO: 964190 - DNA, 82 bp, Artificial Sequence
  ENSG00000286122_13 (sequence is synthesized)
ctagccatatgcagaaaacaaattggacccttctcttacactttatacaaaaatttccataaaaaccctaggagaaaaccta

SEQ ID NO: 964191 - DNA, 81 bp, Artificial Sequence
  ENSG00000286122_14 (sequence is synthesized)
tttttgcaatctacccatctgacaaaggtgtaatatccagaatctacaagtaacttaaagaaatttacaagaaaaaaaaag

SEQ ID NO: 964192 - DNA, 71 bp, Artificial Sequence
  ENSG00000286122_15 (sequence is synthesized)
gaaatcacaatgagataccatttcacaccagtaagaagggtgattattattaaaaaatcaagaaacgatag

SEQ ID NO: 964193 - DNA, 76 bp, Artificial Sequence
  ENSG00000286122_16 (sequence is synthesized)
atgcaaatcgaaatcacaatgagataccatttcacaccagtaagaagggtgattattattaaaaaatcaagaaacg

SEQ ID NO: 964194 - DNA, 61 bp, Artificial Sequence
  ENSG00000286122_17 (sequence is synthesized)
taccgtggtacatatataccatggaatactgtacagccataaaaaggaatgagttcatgtc

SEQ ID NO: 964195 - DNA, 76 bp, Artificial Sequence
  ENSG00000286122_18 (sequence is synthesized)
agttgggggttagggggtgaggggaagggagagcattaggagaaatagctaatgcatgtggggcttaaaacctaga

SEQ ID NO: 964196 - DNA, 120 bp, Artificial Sequence
  ENSG00000286122_19 (sequence is synthesized)
ggacctaaagcgctgctgggttagggtctccccgacctagctggtctcggcaagtggcatccattgtggggactgaatccaggtcaaagggtcacaggagcgatggttggaacagaaaac

SEQ ID NO: 964197 - DNA, 120 bp, Artificial Sequence
  ENSG00000286122_20 (sequence is synthesized)
agcaatccctgtggtgagtaagaaggggagcttggaagcgtcagggtaacaatgggacaggtgtggggtctggttcatttcaccttggaactttttcacgctgatgttgaggaggaacaa

SEQ ID NO: 964198 - DNA, 90 bp, Artificial Sequence
  ENSG00000286122_21 (sequence is synthesized)
ggcaaaggagtgagaggttcatccgtacctttctgcaccccctccttattatttggaagaaaatgaccctccagatctttcttttccaga

SEQ ID NO: 964199 - DNA, 120 bp, Artificial Sequence
  ENSG00000286122_22 (sequence is synthesized)
tttccagaggacactgggtgaaaagtagtggccccagtgacagttcgagcagtgcctcgagcgaccgctcttagttctactcaggcaggaattcagcaagctaaacaagagggtgattta

SEQ ID NO: 964200 - DNA, 68 bp, Artificial Sequence
  ENSG00000286122_23 (sequence is synthesized)
tcgagcgaccgctcttagttctactcaggcaggaattcagcaagctagatcaaaaaggaagtattata

SEQ ID NO: 964201 - DNA, 74 bp, Artificial Sequence
  ENSG00000286122_24 (sequence is synthesized)
aagtcagcaagtcaggccgccagagaggggaaaaaagaaaattgttgagcctgaaatatgtccaaaatgtaaaa

SEQ ID NO: 964202 - DNA, 120 bp, Artificial Sequence
  ENSG00000286125_0 (sequence is synthesized)
tttccgcttccggtggcgttttagcgggagatccgagcgtctcggctggtggaaggggcgaggagctttgcagttgtgtgcgagtgtgtacagggacagagtcctgagcaaggaaaccta

SEQ ID NO: 964203 - DNA, 120 bp, Artificial Sequence
  ENSG00000286125_1 (sequence is synthesized)
gaagggagagaggaataccatggaattgagtcctgtctggtagcactgacagacacagtggccagccaccctcatgccaccctgtcctgccatgggaaggaacagcagctctagagttcc

SEQ ID NO: 964204 - DNA, 120 bp, Artificial Sequence
  ENSG00000286125_2 (sequence is synthesized)
tatgggaactctctttccttctcactgaactctagcttcatcaataactcagtgcctctggccaagtttttagcctctgggacaacatccactatatccatatgaggcactcatgtaaca

SEQ ID NO: 964205 - DNA, 120 bp, Artificial Sequence
  ENSG00000286125_3 (sequence is synthesized)
cggtgattaagagtacagatgctgaagccagcagcctaagtctgaatcctgactgccaattattaatataagttgtggaaccatggtcaagttactcaacctctttatgcctctgtctcc

SEQ ID NO: 964206 - DNA, 120 bp, Artificial Sequence
  ENSG00000286125_4 (sequence is synthesized)
tggtctacgaaatgaagctttgaatctgctgttattaagttgctggtgctgaaataacacttattatttatgatctaactgaaatgggaacactggaaacttctttgaaactgaagaaaa

SEQ ID NO: 964207 - DNA, 120 bp, Artificial Sequence
  ENSG00000286125_5 (sequence is synthesized)
aaatgaaaaagaagtttttacaatcaaaactgccatgaagactgctttacccaaaattttggtccacagctttcattgaattacttatcagggcaaacaaagtttagccatgtgaacacg

SEQ ID NO: 964208 - DNA, 120 bp, Artificial Sequence
  ENSG00000286125_6 (sequence is synthesized)
ttccaattttgttggaaataatttggatccagctatctttatacaatggtgagttcgtattgcatctcatggctaaaatactgaggtaaaggcttttggatctttgtgtgtgtgtgtgtg

SEQ ID NO: 964209 - DNA, 68 bp, Artificial Sequence
  ENSG00000286125_7 (sequence is synthesized)
gggcacaggcaaatatttcatgacaaagatgccaaaagcagtagcaacaaaagcaaaaattgacaaat

SEQ ID NO: 964210 - DNA, 87 bp, Artificial Sequence
  ENSG00000286125_8 (sequence is synthesized)
gaaattatcatcagagtgaacagacagcttacagcatgggagaaaatttttgcagtatatccatctgacaaaggtctaatattcagc

SEQ ID NO: 964211 - DNA, 75 bp, Artificial Sequence
  ENSG00000286125_9 (sequence is synthesized)
tcatcagagtgaacagacagcttacagcatgggagaaaatttttgcagtatatccatctgacaaaggtctaatat

SEQ ID NO: 964212 - DNA, 89 bp, Artificial Sequence
  ENSG00000286125_10 (sequence is synthesized)
tgggggcaatgaacattttttttaaaaaagctcaacaccactgatcattagagaaatgcacatgaaaaccacaatgagataccatctca

SEQ ID NO: 964213 - DNA, 120 bp, Artificial Sequence
  ENSG00000286125_11 (sequence is synthesized)
aggtcaaaaaacaacagatgatagcaaggttgtgaagaaaaatgaacacttttatacgttggttggagtataaattagttctacccttgtcgaagacagtgtggtgattcctcaaagacc

SEQ ID NO: 964214 - DNA, 120 bp, Artificial Sequence
  ENSG00000286125_12 (sequence is synthesized)
catcaatgacagacttgataaaggaaatatggtacgtatacaccaaggaataccatgcagccataaaaaggaacaagataatgtcttttgcagggacctggatggaaccagaagccatta

SEQ ID NO: 964215 - DNA, 90 bp, Artificial Sequence
  ENSG00000286125_13 (sequence is synthesized)
atgtcttttgcagggacctggatggaaccagaagccattatcctcagcaaattaatgcaggaacagaaaagtagctgaatgatgagaaca

SEQ ID NO: 964216 - DNA, 87 bp, Artificial Sequence
  ENSG00000286125_14 (sequence is synthesized)
catggacacatggtggggaacaatacacactggggcctgttgcagggtgcggagtgggagggagagcatcgggaagggatggaatga

SEQ ID NO: 964217 - DNA, 120 bp, Artificial Sequence
  ENSG00000286125_15 (sequence is synthesized)
acaaacctacacatcctgcacatgtacccctgaccttaaaataaaagttggaaataaaaaaaaccctaaacatatacctactacctgatccagtgatttcatttttaagtatttacccaa

SEQ ID NO: 964218 - DNA, 120 bp, Artificial Sequence
  ENSG00000286125_16 (sequence is synthesized)
gagaaataaaaacatatggccacacatgcaaaagaaatacttgtacatgaatgttcttagcagctatattcataatagccaaaaatctggaaacagcccaggtgtcaatcaatagtagaa

SEQ ID NO: 964219 - DNA, 120 bp, Artificial Sequence
  ENSG00000286125_17 (sequence is synthesized)
taaataaccaaagtatgctaggttcatgcgatggaatactacactcagcaaaaaaggaacaaactgcctatacatgcgataaaatggatgaatatagaaaaacatgctgagtgaaagaag

SEQ ID NO: 964220 - DNA, 120 bp, Artificial Sequence
  ENSG00000286125_18 (sequence is synthesized)
agttacacaacgaatgcatgctgtgtcattccattcatgctaattctacaacaagcaaaactaatgtgtggtgaaaataaattggtggttgcccctaaggagacagagttggagactgat

SEQ ID NO: 964221 - DNA, 120 bp, Artificial Sequence
  ENSG00000286125_19 (sequence is synthesized)
tgatgaggagcaagagggaattttgggattgacaatattgttttgtatattaatagagatttgagttacacaggtgtacatattttccaaaactcattgaataatatccttaagatctgt

SEQ ID NO: 964222 - DNA, 120 bp, Artificial Sequence
  ENSG00000286125_20 (sequence is synthesized)
atgttttgatgtatgtaaatttgacctcacaatagaaaaaaaagaatccttaaaaaaatgaaagaactaagtacatataaatgggaaaaatgcttgtagacagacttttcatgtaattta

SEQ ID NO: 964223 - DNA, 120 bp, Artificial Sequence
  ENSG00000286125_21 (sequence is synthesized)
aaatcttataattatcttgaataataaatactcattagatgttgggtgttttccaattaaaaatgggttataatatgaaaaaaacatgtttctaaaaattacagaatggtttcagctata

SEQ ID NO: 964224 - DNA, 120 bp, Artificial Sequence
  ENSG00000286125_22 (sequence is synthesized)
aaatgctaacatctgataaacagttcaagatttattgcttcctgagttttcactaaaatttaaggttactaaaagtaagaattgcaataatatataactctgtaagttgtattcttattg

SEQ ID NO: 964225 - DNA, 120 bp, Artificial Sequence
  ENSG00000286125_23 (sequence is synthesized)
ggagaggcatcatcatgaaattacagagagaacaggcagtggagaaggagctgtttctccccaaccacatgcatctgcaagagtgaggagtggaacaggcagagccagagaacagcagag

SEQ ID NO: 964226 - DNA, 120 bp, Artificial Sequence
  ENSG00000286125_24 (sequence is synthesized)
ttgaggttttccaaggaggtacatgcagcagaatatgcaagagattcgagtgtgtccagaggaatttatcctaacaattgaccatggaaggtgaccagatgggtgtgaagatagtgtctt

SEQ ID NO: 964227 - DNA, 120 bp, Artificial Sequence
  ENSG00000286125_25 (sequence is synthesized)
tgaggttcagacaggctaagtccctactgcaggctgcggaatctaaaaaggtcatgaactctgagagtttgagatgagcctctaaaagctgtatcaatagcaccttgcactgttgaagca

SEQ ID NO: 964228 - DNA, 120 bp, Artificial Sequence
  ENSG00000286125_26 (sequence is synthesized)
cacacagaaggagattctaggagagaaacagagaaaggcagacagtctggctccagccaccttggcgtttcaccttccctgtattgaataaagttcaggacctttgcaggtgcagctccc

SEQ ID NO: 964229 - DNA, 120 bp, Artificial Sequence
  ENSG00000286125_27 (sequence is synthesized)
tccacaccctgagtcttcatgtggctccatcttgtctccaaccagtgctctgaacagagttcaccacccaagggagccctctctgactgctgtcccccgagcacctgctttgttcccttc

SEQ ID NO: 964230 - DNA, 120 bp, Artificial Sequence
  ENSG00000286125_28 (sequence is synthesized)
ataatgctgccatgcacgcggttgcacaaacgtctctttgattctctgctttcaaaacttatagtgtcttgcaatgtcgcccaggctggagtgcagtggtgcccctcctgttgtgaatgt

SEQ ID NO: 964231 - DNA, 120 bp, Artificial Sequence
  ENSG00000286125_29 (sequence is synthesized)
atctcctgatctgtttaactcctgtgtgtgaaactttgtgattcatgcaatgagaacaaggctttacgtgaacagaccagagcccaggtgcagggcggtcattccagagcccaggtgcag

SEQ ID NO: 964232 - DNA, 120 bp, Artificial Sequence
  ENSG00000286125_30 (sequence is synthesized)
caggtgcagggcggtcattctgcccacacagtggttcagatccgttcagcagccagccgccggaaggccttctccacctgttcttcccacctgggcatggtgctcctgttctatggcacc

SEQ ID NO: 964233 - DNA, 120 bp, Artificial Sequence
  ENSG00000286125_31 (sequence is synthesized)
ggcagctccacctacatgcgacccaccacccgctactccccgctggaagggcgcttggctgctgtcttctactccatcctcatacccaccctgaatccgctcatctacagcctgaggaac

SEQ ID NO: 964234 - DNA, 120 bp, Artificial Sequence
  ENSG00000286125_32 (sequence is synthesized)
caggacatgaagagagccctgtggaagctctatctccaggtgccatactagggtctgccatctggatgcgggagggacccaaaaatccaccttcccaagattttccttgtggtcgtggtg

SEQ ID NO: 964235 - DNA, 120 bp, Artificial Sequence
  ENSG00000286125_33 (sequence is synthesized)
gaagtgttagtgcctccagagacccccaggaacacacctattcgccaaagttgtcaacaaagttgaattgcaatgaatcatgcaggagaaccctgatggatgtctggataaaatggagac

SEQ ID NO: 964236 - DNA, 120 bp, Artificial Sequence
  ENSG00000286125_34 (sequence is synthesized)
aaatccaatgtgcatttaatttaggcaaatagtattaaatgtacacaggggaggagagaaagaggaggagcaaataatttaaatagggtgggtgattccacccaagagctcactcaataa

SEQ ID NO: 964237 - DNA, 120 bp, Artificial Sequence
  ENSG00000286125_35 (sequence is synthesized)
atttatgacctggactacgaatccaataggagactgtcctctcagcctgcctcggtttccatgcacttccccatgtggacatgttttatcctgctcaatgtggttctaatgtttagtggt

SEQ ID NO: 964238 - DNA, 120 bp, Artificial Sequence
  ENSG00000286125_36 (sequence is synthesized)
acacattttttcatctagtgtttgtcctaaatgcaagccaaagccttcatcacaagcagcagcatctattccagaagaaaaataggccatattggacgtgcagagaaatggttggtagtc

SEQ ID NO: 964239 - DNA, 120 bp, Artificial Sequence
  ENSG00000286125_37 (sequence is synthesized)
ttcacgcggctgcttcctaagggaaagtcaagggtacctttatctttctgcaatgtttctctgatagcaaaccctgtatttgttgtatttctggttcagctgctttaacagaaacaaaat

SEQ ID NO: 964240 - DNA, 120 bp, Artificial Sequence
  ENSG00000286125_38 (sequence is synthesized)
aacagcaacctaagtcatacagaaggcttgtttctcttttgtgtaatcatttgtgcttggaggtgaccctgggtgtctctatgccacagtcatcctgaggccaggttccttctatctcgt

SEQ ID NO: 964241 - DNA, 120 bp, Artificial Sequence
  ENSG00000286125_39 (sequence is synthesized)
tgctctaccatccctgaaggtttccttattcctatggtgggagttggatcactagcacctcattcacaatccagctgctggaagagggacagaggaaatggagggcaagctacatggttt

SEQ ID NO: 964242 - DNA, 120 bp, Artificial Sequence
  ENSG00000286125_40 (sequence is synthesized)
taagatgtgacccagaagttatacgcttcacttctgctaacatcttattggctggtgtttagccacatggtcacactgaccgcaaaggaggctgggaaatgttgtctccagctgagagcc

SEQ ID NO: 964243 - DNA, 120 bp, Artificial Sequence
  ENSG00000286125_41 (sequence is synthesized)
aatgttatttactaatttgtaatcagtccctcacatctgatctcttgatgagccaccatttatcttcttactcaatcctaccattatgcttccaatggccacctgtactaatgtttagtg

SEQ ID NO: 964244 - DNA, 120 bp, Artificial Sequence
  ENSG00000286125_42 (sequence is synthesized)
gcactaaaactttacatacattgtcacttttatgtacattatctctaatattcaaaacacctctgtgaggtagttgtaattttcctcattttttagataagcaaaataaaattctgataa

SEQ ID NO: 964245 - DNA, 120 bp, Artificial Sequence
  ENSG00000286125_43 (sequence is synthesized)
gttaggcagtttacccggagttaagaaggttgagaaaggcttgatatttttagattgatatttttaggtttgatatttcagaatcactcaggattctttttttttttttttgagataggg

SEQ ID NO: 964246 - DNA, 66 bp, Artificial Sequence
  ENSG00000286125_44 (sequence is synthesized)
tttttttttttgtagagatgggagtctcaggccttccaaagcgctgggattacaggcatgagctac

SEQ ID NO: 964247 - DNA, 120 bp, Artificial Sequence
  ENSG00000286125_45 (sequence is synthesized)
ggattacaggcatgagctaccatgcccagcctctacttcttttaatgatagagattgaattatatgtgtctagggctttaaaaaatcttaccttacagaggcatttctcagaagttttag

SEQ ID NO: 964248 - DNA, 120 bp, Artificial Sequence
  ENSG00000286125_46 (sequence is synthesized)
gcatttctcagaagttttaggagtccgttgcagtcctaccaacatatccctgaggattgaacaattctgctctacctgggaccaccctttgatcaaagacataacccttaggggagacat

SEQ ID NO: 964249 - DNA, 120 bp, Artificial Sequence
  ENSG00000286125_47 (sequence is synthesized)
aaattggccaaagagagagaaaatgggtaggtgaccagccagcttgatcaagtctctggtgactactggggcatggcagatgcacacaaaggtgaccaccaattagtcactttcttgtat

SEQ ID NO: 964250 - DNA, 120 bp, Artificial Sequence
  ENSG00000286125_48 (sequence is synthesized)
aaacccttccccttgagtgtggtaggaacctgggatttgccttcagccaatagaatatggcaaaggtaagggttggtcacttccacagttatctgagagctcctctctgaggtgaaaaac

SEQ ID NO: 964251 - DNA, 120 bp, Artificial Sequence
  ENSG00000286125_49 (sequence is synthesized)
acctcattctgttttactatctccattacatttaccacccttatgaaattatataaattattgagtgtgtttgttctaccccaaccaccccattcctctgaatataatatccatgaaggc

SEQ ID NO: 964252 - DNA, 120 bp, Artificial Sequence
  ENSG00000286125_50 (sequence is synthesized)
acggtcttgttttcttcaatgccgtatcccctgtgcatagcgtagtacctgacacatattaggtgttaaatatgtatttttatgaagaaataaatgtgaagcagaacaacaaaaaacaaa

SEQ ID NO: 964253 - DNA, 120 bp, Artificial Sequence
  ENSG00000286125_51 (sequence is synthesized)
aaccagagctgttcttgtgtaaacgagggtgagagggctgggatccttgtctatttggtgttttcccaacccctcagcacagtcatttctgcaacacctacatgggatctttgagctcca

SEQ ID NO: 964254 - DNA, 120 bp, Artificial Sequence
  ENSG00000286125_52 (sequence is synthesized)
caaacctggttgagacacctcttctctaatcagattaatacatgctattgaatagaaaccaccattgattgtaagatactccactatcttgcattccattaagaaagaaaaagacactgc

SEQ ID NO: 964255 - DNA, 120 bp, Artificial Sequence
  ENSG00000286125_53 (sequence is synthesized)
caatcaaattgtgacactccatcaataaaacatcttgattttccatgctaaaatgtgctcctcagccttcagatcacagctgaaatgtcacttcctgatcacccctgctggccaacctgt

SEQ ID NO: 964256 - DNA, 120 bp, Artificial Sequence
  ENSG00000286125_54 (sequence is synthesized)
atagaatgaccacaaccatattaacaaaccaaaaacctgtgcacagaaacaagatgaagaaaatatatcaagatgttaaccacactctttggatggtgaaaacatgggtgagtttctctt

SEQ ID NO: 964257 - DNA, 120 bp, Artificial Sequence
  ENSG00000286125_55 (sequence is synthesized)
ctacatttctgtaacttcaaagtttctataatgaacacatttcatatataatggaaatatatgtagtaaaggtggactaccaaaacactagaatgatgacctttcaaggaaaccgaaaca

SEQ ID NO: 964258 - DNA, 120 bp, Artificial Sequence
  ENSG00000286125_56 (sequence is synthesized)
aaataaccataatcccacaacaaccacacaactatttcttgtttttcatctttcttcccatctttgacatttatgcatacttatcactaacaccctaataatcacagactagtgcacaga

SEQ ID NO: 964259 - DNA, 120 bp, Artificial Sequence
  ENSG00000286125_57 (sequence is synthesized)
tcaagatgttaacagttaattgttgttgggtgttgggaatatgtgtgaattttctttactgaatttccaaagttttgtatgagtatgtattatatttgtaatggaaaatacatacataaa

SEQ ID NO: 964260 - DNA, 120 bp, Artificial Sequence
  ENSG00000286125_58 (sequence is synthesized)
atttattaccaaaacaccaaagattatttaaggaatttgagacaaaatatttaaccaaattcccacaatgacaacactattttagttattttccacatcttttcatttaagactttatgc

SEQ ID NO: 964261 - DNA, 120 bp, Artificial Sequence
  ENSG00000286125_59 (sequence is synthesized)
acacatatttaacactgttatcacaagcgtgtgcactgaaacaagatagaggaaacagatcaagatgttagcagtagttgttaggtgttgggaatataggtaattttttaaaataattta

SEQ ID NO: 964262 - DNA, 120 bp, Artificial Sequence
  ENSG00000286125_60 (sequence is synthesized)
ctttattttctaatttttcctctgggtatgtattatgcacaccaatggagacacacataatacactgttatcaggacattattatagggaacatttgaaaaaattaaagtgaaagtattt

SEQ ID NO: 964263 - DNA, 120 bp, Artificial Sequence
  ENSG00000286125_61 (sequence is synthesized)
aaccataattccacaaaggtaatgtaacagctattttgaatatacattttgacacagttataatcataaacctgtgcacagaaacaagaatgaacaagataagaggagagtatatgtctt

SEQ ID NO: 964264 - DNA, 120 bp, Artificial Sequence
  ENSG00000286125_62 (sequence is synthesized)
tggatggtggggatatgattttttttcctccacttttctgtattttccaagtgtgtgataatgagttcaaattatgttcacaatgaaaatgtgatcataaactttttagtaacactacca

SEQ ID NO: 964265 - DNA, 120 bp, Artificial Sequence
  ENSG00000286125_63 (sequence is synthesized)
taaagaacattcaagaaatttaagaaaataatgctcaactataagcctacaacaacaacaccacaacagcttttgactataagcatatatatttttaaacagttataatgaactgtttaa

SEQ ID NO: 964266 - DNA, 120 bp, Artificial Sequence
  ENSG00000286125_64 (sequence is synthesized)
atgaactgttaaatgaacagcatataaatgaactgttgagttataactgtagtataaatatactttcgtgtcctgctttctccacttaatgttctgtaaatatatttccacgttgctaca

SEQ ID NO: 964267 - DNA, 120 bp, Artificial Sequence
  ENSG00000286125_65 (sequence is synthesized)
taactcgtgattatcatttttaaacagttgcattaagtgtccacagataggtttaaacaatcattctcttgtttaccatttgttactaccttttcactagctgaaggttggaacggacac

SEQ ID NO: 964268 - DNA, 120 bp, Artificial Sequence
  ENSG00000286125_66 (sequence is synthesized)
cctgacttacagcaagttgctttctgaaaaggggctaccactgccaacaatgttaacaccaagtaatgtacccacaaagttcaccccgacatcaacactgattctcgtttcaagagtcct

SEQ ID NO: 964269 - DNA, 120 bp, Artificial Sequence
  ENSG00000286125_67 (sequence is synthesized)
tttcccatgtagtaaacctcactgcccctcagctttcccgatgtccgttccaacctcagtccttcctatgcagccagccctcacctacaccataccatcaaaaactccttttccaaactg

SEQ ID NO: 964270 - DNA, 120 bp, Artificial Sequence
  ENSG00000286125_68 (sequence is synthesized)
ctcaggacaccccgctcaattcattctcagaaacctggccttctacagttcttgcctctggtgttttcttctgtctgtctcctctcccctcctagatctggtgatatattaggactccct

SEQ ID NO: 964271 - DNA, 120 bp, Artificial Sequence
  ENSG00000286125_69 (sequence is synthesized)
gtaagattcagacacatttcccccagtgggtactttaattttgcttgttcaaatgatctacacttacattttgcaaatctttttttttaaattttttaaattttatattttttttccagc

SEQ ID NO: 964272 - DNA, 120 bp, Artificial Sequence
  ENSG00000286125_70 (sequence is synthesized)
caactcaaggccaaaaaaaatttcttaatatagttattatgcgaggggaggggaagcaaaggagcacaggtagtccacagaataggacacaagaaacctcaagctgtgaggtcaatttgt

SEQ ID NO: 964273 - DNA, 120 bp, Artificial Sequence
  ENSG00000286125_71 (sequence is synthesized)
aattaaaagaatactaagattagatgaacacaacactcagaaatactctaggagagctgaaaaagaaggaacagatgttaacaaaacaaattaaggctgctggggaacctgagtccatgt

SEQ ID NO: 964274 - DNA, 120 bp, Artificial Sequence
  ENSG00000286125_72 (sequence is synthesized)
taagcttgggttgactgtaaagaatttttttttttttaatgcaagttagacatggagttagagggtcagataaataacgaagagaattaagttagcgatagaaagatctaaggatactag

SEQ ID NO: 964275 - DNA, 120 bp, Artificial Sequence
  ENSG00000286125_73 (sequence is synthesized)
ctcctgggcacctagggtgcaaactgacttgtggcagcataagctgatgctgcacaggggacccaagccatgttgctacttgtcacttaaggcaggaagcgcacaaaggaagtgatgaaa

SEQ ID NO: 964276 - DNA, 120 bp, Artificial Sequence
  ENSG00000286125_74 (sequence is synthesized)
ggttattagcctgcaacattatttacagcatgagagcctctcctacggttctcaaccttcattaggcactactgtgatctagtgatggttgtaacccattctttaaaggcaaagatgtaa

SEQ ID NO: 964277 - DNA, 120 bp, Artificial Sequence
  ENSG00000286125_75 (sequence is synthesized)
gatttacagggaaaagcttcgggttttatcaattcactatcatcaaacacatattgagttggttaaaaaaaaaaaaaacccagaacacaaatgtgtaatatttttgcatgagaaccactt

SEQ ID NO: 964278 - DNA, 120 bp, Artificial Sequence
  ENSG00000286125_76 (sequence is synthesized)
caacaaacataacatgtggcaaccaatcaatctgggtcacaaaaagccaatccgtatattgtaaagccttacacagtattaggttccaaagtgttggcgcagatgaaatggctgcagaaa

SEQ ID NO: 964279 - DNA, 120 bp, Artificial Sequence
  ENSG00000286125_77 (sequence is synthesized)
gaagctaaagtacttatcttttcaaacagtaaggagtaaaagccatgttatctatcatgcctacagcttcacaagactatttaagggtaagaaacaaaacaattactcaaaaagatattg

SEQ ID NO: 964280 - DNA, 120 bp, Artificial Sequence
  ENSG00000286125_78 (sequence is synthesized)
acagggttcaaataatgcacaataaatctttctcaggatctaagacacttaaaaatataatcaaatttgttgctctcttcctcctccaaaaaaaaaaaaaattcaaagaataccaggtaa

SEQ ID NO: 964281 - DNA, 120 bp, Artificial Sequence
  ENSG00000286125_79 (sequence is synthesized)
ggtacctctgcagagtaaactgtaactgtatatcatataaatccaaatatatgtgatcactgttctgtcataatttgctattttatatacacctcatgaaacactatatatacgttacac

SEQ ID NO: 964282 - DNA, 120 bp, Artificial Sequence
  ENSG00000286125_80 (sequence is synthesized)
aagtgtcatttacagttgatttgggcaaactctgtagtctggaatactcatagggttttctcaatctgattacttggaaaggtaagatgtgtgctatggctttcccacatgcagacactg

SEQ ID NO: 964283 - DNA, 120 bp, Artificial Sequence
  ENSG00000286125_81 (sequence is synthesized)
acatctgaaggggaaagcttaagactgtggaatctgcacattcggtctcttttcaatctgagtttagagatgttaagtcaggtgtgtaacacactaaggttaagtctcctactgacatta

SEQ ID NO: 964284 - DNA, 120 bp, Artificial Sequence
  ENSG00000286125_82 (sequence is synthesized)
tcatggattggtttggattctctgtggtttggtaagggtcaagtcctaggtgaaggttttctaacctttaccccatgccctcagccagtgtgggtattctggtgtctggcgagggacagg

SEQ ID NO: 964285 - DNA, 120 bp, Artificial Sequence
  ENSG00000286125_83 (sequence is synthesized)
cggtcattgaagagctgcccacagacgtcacatttgaagtacttctcatcagcttgattggcaccacctgtgctggtgctggcacgttcgatgtagcctgagcactccccaaaggcattt

SEQ ID NO: 964286 - DNA, 68 bp, Artificial Sequence
  ENSG00000286125_84 (sequence is synthesized)
caggctggagtgcagtggtgcccctcctgttgtgaataatcaaagaagactccacccgacttcaaact

SEQ ID NO: 964287 - DNA, 80 bp, Artificial Sequence
  ENSG00000286125_85 (sequence is synthesized)
cacatctacaaccatctgatcttcgacaaacctaccaaaaacaagcaatggggaaaggacctcctattcagtaaatggta

SEQ ID NO: 964288 - DNA, 71 bp, Artificial Sequence
  ENSG00000286125_86 (sequence is synthesized)
acagaatgggaggaaatttttgcaagccaaagaaactatcaaagaaaccatcgtcagagtgaacaggcgac

SEQ ID NO: 964289 - DNA, 120 bp, Artificial Sequence
  ENSG00000286125_87 (sequence is synthesized)
agtcagatatcatttctcaactcaaaataacaagttccaaaagagagctctggttatttcccagctctaaatgcttcaatggctcccactgccttccaaataaagtgaaagttccctcca

SEQ ID NO: 964290 - DNA, 120 bp, Artificial Sequence
  ENSG00000286125_88 (sequence is synthesized)
tatcagtcatttcgggcctcactgtccagtcaagatcaccacagaacctctgtttctcaactgtaaagcagaaataatgacaatacctatacagtagtccccacttatctgaggttttgt

SEQ ID NO: 964291 - DNA, 120 bp, Artificial Sequence
  ENSG00000286125_89 (sequence is synthesized)
tttctgcagtttcagttacccatggtcaattgggggtcaaaaatatttaatggaaaattccagaaataaataattcatatgttataaattgtgtgccattctggtgatgaaatctcacac

SEQ ID NO: 964292 - DNA, 120 bp, Artificial Sequence
  ENSG00000286125_90 (sequence is synthesized)
tttcctgctctgtcccacctgggacatgaatcatccctttgtccagtgtatccactctgtatacactaccccttagtcacttattagctgtcttggtcatcagatcaactatcacggtat

SEQ ID NO: 964293 - DNA, 120 bp, Artificial Sequence
  ENSG00000286125_91 (sequence is synthesized)
cacagtgcttgtgttcatgtagaccttattttacttaataatgcccccaaagcacatgagtagtgatgctaacctactgttataattgttccattttataactagttgttaatatcgtac

SEQ ID NO: 964294 - DNA, 120 bp, Artificial Sequence
  ENSG00000286125_92 (sequence is synthesized)
tgtgcctaattaataaacttcgtcacagatatgtatgtagaggaaaagacatagtatatatagggtttgataatatccacactttcaagtgtgttagaatgtatgcccctcagataaggg

SEQ ID NO: 964295 - DNA, 120 bp, Artificial Sequence
  ENSG00000286125_93 (sequence is synthesized)
gagtatactatacctctaagggctcttgtgagaattaaacattacatatgtaaggcacacagtaggtatttttttggtaaatggcagctcttatgattaagcctttcctacatatttttc

SEQ ID NO: 964296 - DNA, 120 bp, Artificial Sequence
  ENSG00000286125_94 (sequence is synthesized)
gaaataatttggatccagctatctttatacaatgatagaatgaccacaaccatattaacaaaccaaaaacctgtgcacagaaacaagatgaagaaaatatatcaagatgttaaccacact

SEQ ID NO: 964297 - DNA, 120 bp, Artificial Sequence
  ENSG00000286125_95 (sequence is synthesized)
ctttggatggtgaaaacatgggaagggaaagatcccgcggaggcatccctgggaagaaaaaaggcatcaacaagaagcagggcccagtccatcctgcaggtcccagggtgccctgctgcc

SEQ ID NO: 964298 - DNA, 120 bp, Artificial Sequence
  ENSG00000286125_96 (sequence is synthesized)
tccaaatctcaggcctggtgctcagatgtggcacttccctaacactgcaggaagtcatggcagacattcctagttaacaatattgttacaatgtgtttttcattctcgccttctgcctat

SEQ ID NO: 964299 - DNA, 120 bp, Artificial Sequence
  ENSG00000286125_97 (sequence is synthesized)
ggcacttcatactagttttcaatttttgcagtggcatagtctttcatacagaaacttccagtttttttttttttaatgcaccagcttaagaatactgagcaaatagtttaggtggcaaca

SEQ ID NO: 964300 - DNA, 120 bp, Artificial Sequence
  ENSG00000286125_98 (sequence is synthesized)
ggtctatgtggtgaaacctgtgctggtggtaccgagtggaacttcaaaaatacgagccttggactaaacttttggggaagcggaatatactccaaatggagcagcagaaacttcgaggcc

SEQ ID NO: 964301 - DNA, 120 bp, Artificial Sequence
  ENSG00000286125_99 (sequence is synthesized)
ctggcactttccccttgaacctgtgcacagcacatgctctatatctcctactgggaaagaaagtggttaagactcactgcttcttgggttcctggtgtgggaccagcggtctcgtggctc

SEQ ID NO: 964302 - DNA, 120 bp, Artificial Sequence
  ENSG00000286125_100 (sequence is synthesized)
catgtctctgcttctgcccctccggtcccagtcccggtcacctaagcaggtgagacattccagtggttaacaaagctctttgacacacctgttttccctgcatgtgcacaaacacccctc

SEQ ID NO: 964303 - DNA, 120 bp, Artificial Sequence
  ENSG00000286125_101 (sequence is synthesized)
tggaaagagatgctaccctcttcccacaaggagatggatccaaaacagagagctccaggttcccaggctcatctggccccttctttatcatatacccgcaacatggtttctgcaggcttt

SEQ ID NO: 964304 - DNA, 120 bp, Artificial Sequence
  ENSG00000286125_102 (sequence is synthesized)
gcccaagtggggcttgcttccaagcaagttccaaagctcagtccagtagctaacccccacttcagactctttgctggcttcccagttcctaaggggctgagtccacattcaggagaatgg

SEQ ID NO: 964305 - DNA, 120 bp, Artificial Sequence
  ENSG00000286125_103 (sequence is synthesized)
actgcagaccccctactgtctggcagccgatcttaaagtacacgttattctactacaaaaaaaacaaaacccaagaaaacaacacacacaccctccctgaaagcagtgctccctataaaa

SEQ ID NO: 964306 - DNA, 120 bp, Artificial Sequence
  ENSG00000286125_104 (sequence is synthesized)
gctcactgaagcatctttaatgaaccttcctgaggaggctgggggtacagctggaagcagcctgttgcaaattccaaatagctttatatactttatcgttgaataaaacggtattaagta

SEQ ID NO: 964307 - DNA, 82 bp, Artificial Sequence
  ENSG00000286125_105 (sequence is synthesized)
gtcatgaactctgagagtttgagatgagcctctaaaagctgtatcaatagcaccttgcactgttgaaggaaagagagaaaga

SEQ ID NO: 964308 - DNA, 120 bp, Artificial Sequence
  ENSG00000286125_106 (sequence is synthesized)
aaagagaaagaaagaaagaaaaagaaaaagaaagaaagaaagacttcaataacctaaggatgcacctcaagaatctaggaaagcgagaacaaaccaaacccaaaaattagtagaagccat

SEQ ID NO: 964309 - DNA, 120 bp, Artificial Sequence
  ENSG00000286125_107 (sequence is synthesized)
aattagtagaagccatgaactctgagaatttgggctgcatttttaaagctgtatcactggcagtttgtactcaaaaagcagtgctctgaacagagttcaccacccaagggagccctctct

SEQ ID NO: 964310 - DNA, 120 bp, Artificial Sequence
  ENSG00000286125_108 (sequence is synthesized)
ttgcagggggcttattaagagttgcagaagacactccttctacccctgtcactcaggaaattccaagggttttaggggctctggtaccaggagctggggataaagattaaacatatattt

SEQ ID NO: 964311 - DNA, 120 bp, Artificial Sequence
  ENSG00000286125_109 (sequence is synthesized)
cttattatatcacaagatcacaggaagacacatgcattacatcacactctgacacacacagggtcatacacaatcatacctgcccagacacacacagacatgcagagacacccaaaccca

SEQ ID NO: 964312 - DNA, 120 bp, Artificial Sequence
  ENSG00000286125_110 (sequence is synthesized)
tatccagggacacacagtcgccctcctaacccccatgcaaggaggcaggtgggaagccatcacctgcagccacactcacacatgcacacagggtcccgggcacacgtagctacacacaca

SEQ ID NO: 964313 - DNA, 120 bp, Artificial Sequence
  ENSG00000286125_111 (sequence is synthesized)
cccagccccacacgtagctccctgtgtgaagaggtgcacagagacgcacaaggtcacacatgccacctgctccacacaggccggccattactgggacacacccacaggggatggctggac

SEQ ID NO: 964314 - DNA, 120 bp, Artificial Sequence
  ENSG00000286125_112 (sequence is synthesized)
acatgtgcagtcacactcggtggatagagctccagcatagccaaagcccacatgtgcagcgtctccatcatgtgcagatgcacacacttcagacagcacggcactctacaggctcgcaca

SEQ ID NO: 964315 - DNA, 120 bp, Artificial Sequence
  ENSG00000286125_113 (sequence is synthesized)
gccaggtcacccatcattgtgctggcaggcacacgggccgagccagcctacacggcggcacacccagacatgcacacgtggggtcacacacctcacatccaggagaactttcagacttgc

SEQ ID NO: 964316 - DNA, 120 bp, Artificial Sequence
  ENSG00000286125_114 (sequence is synthesized)
ccaaaggcagccacacgtgtatgtgacatgctgtgatatgcagacaccgcttcacatgaacgagcacataacacaccgataaagtgttacatgcctttacctgcagtcacctgcctgggc

SEQ ID NO: 964317 - DNA, 120 bp, Artificial Sequence
  ENSG00000286125_115 (sequence is synthesized)
tggcaccactgagtgagcaggtgcagacacagtgacactcggggacgggctcacaggcagtcacacacctgcaaggcctggcaccgccgagtgagcaggtacagacacagtgatgggctg

SEQ ID NO: 964318 - DNA, 120 bp, Artificial Sequence
  ENSG00000286125_116 (sequence is synthesized)
gcaccgccaagtgagcaggggcagacgctgtgacactcagggacgggctcacaggcagtcacacacctgcacctgctggtaccgtcgagtgagcaggtgcagacgctgtgacactcaggg

SEQ ID NO: 964319 - DNA, 120 bp, Artificial Sequence
  ENSG00000286125_117 (sequence is synthesized)
acaggctcacagccagtcacacacctgcacggcctggcaccgccaagtgagcaggtacagacacagtgacgggctggcaccgccgagtaagcaggtgcagatgcagtgacaggctcacag

SEQ ID NO: 964320 - DNA, 120 bp, Artificial Sequence
  ENSG00000286125_118 (sequence is synthesized)
gcagtcacacacctgcacctgctggtaccgtcgagtgaccaggtgcagacgctgtgttactcagggacgggctcacaggcagtcacacacctatacgggctgacaccgctaagtgaacag

SEQ ID NO: 964321 - DNA, 120 bp, Artificial Sequence
  ENSG00000286125_119 (sequence is synthesized)
acgcgcacactacacaccgttgctctcgcctcccggtatcaccttcgaacgcgctggccggccccctcctagcctggtgcagtcggctccgcttctactcagtctcgggtcctcctgggc

SEQ ID NO: 964322 - DNA, 120 bp, Artificial Sequence
  ENSG00000286125_120 (sequence is synthesized)
caacgcagaccctggtgcctccttccttagacgagctaaggtcaagacttctgctgctgcggaggagcccgcgcaccaggccggggtggactgcgcctgcgcatcgggcccgcctggttc

SEQ ID NO: 964323 - DNA, 120 bp, Artificial Sequence
  ENSG00000286125_121 (sequence is synthesized)
ttaggaactacgactcccagggggcgctgcgcgctcgccggcaccgcgactaaagcttgcaaagcctgggtcatcgaaactacaactcccagaaggctaagcgtctgcacacgctaggtc

SEQ ID NO: 964324 - DNA, 120 bp, Artificial Sequence
  ENSG00000286125_122 (sequence is synthesized)
cgcagggcgctgacccctgggggcccgaggagcgccgggctgctgccccgagccccgcccactacagcctcagtgcatggcggtgggcgcttccagtaactcaggggtgggacttttttc

SEQ ID NO: 964325 - DNA, 120 bp, Artificial Sequence
  ENSG00000286125_123 (sequence is synthesized)
tcaggggtgggacttttttcttgctcaggggatgaggccgagcccacaggcttagaaagaaggaacttgagtccgggcacctgtcatcccagcgcttagggaggccgaggcgggtggatc

SEQ ID NO: 964326 - DNA, 83 bp, Artificial Sequence
  ENSG00000286125_124 (sequence is synthesized)
cacttccagctacttggaaggctgaggcgggagaatggcttgaacctgggaggcgagggttgcagtgagctgagatcgcacca

SEQ ID NO: 964327 - DNA, 120 bp, Artificial Sequence
  ENSG00000286125_125 (sequence is synthesized)
tgaagcaggtaagtgttttccttgttacttcttaagttcagttggaaacccaacatagcaaatcctctagaatgcagctgaagcagtactaaggctgggtgtggtggctcatgcctataa

SEQ ID NO: 964328 - DNA, 120 bp, Artificial Sequence
  ENSG00000286125_126 (sequence is synthesized)
ttcaagaccagcctgggcaacacggcaagacctggttctccacaaaaaggaaaaaaaaatgctaagaggcaagtatatagcaataaactcctacatcaaaaaagtagaaacatttcaaat

SEQ ID NO: 964329 - DNA, 76 bp, Artificial Sequence
  ENSG00000286125_127 (sequence is synthesized)
gctaagaggcaagtatatagcaataaactcctacatcaaaaaagtagaaacatttcaaataagagattggggtggg

SEQ ID NO: 964330 - DNA, 120 bp, Artificial Sequence
  ENSG00000286125_128 (sequence is synthesized)
acatagcgagaccctgtctctacaaaaaatcagaaaattagccaggcgtggtggtgcaagcctgtagccccagctactcgggaggctagggtgggaggattgattgagcctttgaggtag

SEQ ID NO: 964331 - DNA, 120 bp, Artificial Sequence
  ENSG00000286125_129 (sequence is synthesized)
tgaagggtgctcagaaactgtgtcagcactagttgctctatcatctgctccttggtgaggatctctggctgcagccattgcaaacagagctcctggatttggctcacagcttgatgaggc

SEQ ID NO: 964332 - DNA, 120 bp, Artificial Sequence
  ENSG00000286125_130 (sequence is synthesized)
cccacacctcagcctagcattgctctgtccaaaggcagacagcctggtacagccatgtgtgcagttattttcacttcaaaaaaaaccttattaaacaaaaaccaaatatatgtaaacaca

SEQ ID NO: 964333 - DNA, 120 bp, Artificial Sequence
  ENSG00000286125_131 (sequence is synthesized)
gaataatgctgccatgcacgcggttgcacaaacgtctctttgattctctgctttcaaaacttgtgagtaagattcagagatagtgtcttgcaatgtcgcccaggctggagtgcagtggtg

SEQ ID NO: 964334 - DNA, 120 bp, Artificial Sequence
  ENSG00000286125_132 (sequence is synthesized)
cccctcctgttgtgaatcaagcactgacacctcagcttcacagagacattgtgtcagcccaggaaatgtagagagaccaaatgcagaatctgtgaaccattggagctggtagtttccgtg

SEQ ID NO: 964335 - DNA, 120 bp, Artificial Sequence
  ENSG00000286125_133 (sequence is synthesized)
gcctcggatgcggaatgttgctgttctcccctcaattttaatgtatccagggatcctctgcagacaattgcaggatatataaactgtagaaagaaacattcttcggggatttctcaataa

SEQ ID NO: 964336 - DNA, 120 bp, Artificial Sequence
  ENSG00000286125_134 (sequence is synthesized)
gaaagaaacattcttcggggatttctcaataatatttaagagtattgggattctgtcgatgacacaaatggagggaaaatcattccatgctcaaggattggaagaatcaatatcattaaa

SEQ ID NO: 964337 - DNA, 120 bp, Artificial Sequence
  ENSG00000286125_135 (sequence is synthesized)
caacgttattcctatcaaatgaccaatgtaattcttcacataattggaaaaaacaatctgaagcagcaagaacaaagttggaggtatcacattacccaacttcaaactgtaagactacag

SEQ ID NO: 964338 - DNA, 120 bp, Artificial Sequence
  ENSG00000286125_136 (sequence is synthesized)
tcgccaaaacagcagggtactggtacaaaaacacacgtagaccaatgaaacagagcagagaacccagaaataaagctactcacctacagccgtctaatctttgacaaagttgacaaaaaa

SEQ ID NO: 964339 - DNA, 120 bp, Artificial Sequence
  ENSG00000286125_137 (sequence is synthesized)
aaaaaagcaatccaaaaggactctctattcaataaattgtgctgggatcactggctagccatatgcagaagaataaaactggacccctacatttcaccatatacaaaaattaactcaagg

SEQ ID NO: 964340 - DNA, 120 bp, Artificial Sequence
  ENSG00000286125_138 (sequence is synthesized)
tggaataaagatttaaacgtaacacctcaagctatacaaatcctagaagaaaatctagaaaacaccattctgaacttgggccttgggaaataatttatgactaaattctcaaaagctatt

SEQ ID NO: 964341 - DNA, 69 bp, Artificial Sequence
  ENSG00000286125_139 (sequence is synthesized)
acctaattaaactaaagagcttctgcgcaagaaaaaaacttgcatctgaaaaaggtctaatgtcaaaaa

SEQ ID NO: 964342 - DNA, 120 bp, Artificial Sequence
  ENSG00000286125_140 (sequence is synthesized)
aggtctaatgtcaaaaaatctgtaaggaacttaaacaactaaacaaggaaaaaccaaataaccccattaaaaattggcaaaagatatgaacagacgcttctgaaaagatgatatataagc

SEQ ID NO: 964343 - DNA, 120 bp, Artificial Sequence
  ENSG00000286125_141 (sequence is synthesized)
agccaacaaatatatgaaaaaatgtttataatcgctaatcatcagagtaatgcaagtcaaaaccacaatgagacatcatctcacacgaataagaatggctattaataaaaagtcaaaaaa

SEQ ID NO: 964344 - DNA, 120 bp, Artificial Sequence
  ENSG00000286125_142 (sequence is synthesized)
cagtaatcgctggtgatgctgtggagaaatggaaacacttacacactgttggcaggaatgtcaattagttcagtcactgtggagagcagtttagagatttctcaaagaacttcgaacaga

SEQ ID NO: 964345 - DNA, 120 bp, Artificial Sequence
  ENSG00000286125_143 (sequence is synthesized)
attgcgccactgcactccagactgggcaagaagaatgaaactctgtctcaaaaagaaaaaggaaattgagaatacaatgactaaaatttgaaatagataatgtaaccaacttttccgtta

SEQ ID NO: 964346 - DNA, 120 bp, Artificial Sequence
  ENSG00000286125_144 (sequence is synthesized)
atagataatgtaaccaacttttccgttatgtttggggtcattgctatggcaacaataaaagggttccctatttcccatcagtcttaagcaagatctagtggcaacctaactgatactgct

SEQ ID NO: 964347 - DNA, 61 bp, Artificial Sequence
  ENSG00000286125_145 (sequence is synthesized)
gtcttaagcaagatctagtggcaacctaactgatactgctggcacttaaaaagcaaagact

SEQ ID NO: 964348 - DNA, 120 bp, Artificial Sequence
  ENSG00000286125_146 (sequence is synthesized)
gagactagatccctacaaaagttttaaaagttcactgtgcgtggtggcaaggatctgtgattccagctcccactcaggaagctgagatgggaggatcccattagcccaggaggtcaagac

SEQ ID NO: 964349 - DNA, 120 bp, Artificial Sequence
  ENSG00000286125_147 (sequence is synthesized)
tgcagggagtcatgatcacaccactgcattccagccttaatgacagagtgagatcctgtctcaaaaacaaacaaacaaaagccaaaacagcatggtaaaaatattttcatagaagaaaac

SEQ ID NO: 964350 - DNA, 120 bp, Artificial Sequence
  ENSG00000226067_0 (sequence is synthesized)
gcgtgcgaggggggtggggtggaaatagcggctgcttcttttccaaggatttatttaatggggatgtgttcaaggcaagaccgaattcagaaggatatcgacgtcgtgatccagaagtcc

SEQ ID NO: 964351 - DNA, 120 bp, Artificial Sequence
  ENSG00000226067_1 (sequence is synthesized)
agagctgaggactgcctgtttgcaggacaactgtgcagactacaaagcttcggaaaaccggagaggctgagtcgactaatcgtgttgttccacgttagaaacgcttgcattgcctgactc

SEQ ID NO: 964352 - DNA, 120 bp, Artificial Sequence
  ENSG00000226067_2 (sequence is synthesized)
tgaaaccagaagggcggccgaatggccttcaccctccgttaaccctcgcctgcttcagaagctagtgcctctggaaatgcctggatctgcgaccccagcctgagcctagtagggcccaag

SEQ ID NO: 964353 - DNA, 120 bp, Artificial Sequence
  ENSG00000226067_3 (sequence is synthesized)
cctgccagggcaccggcaacagttttccgtttgtgcctactccacctgctgtctttgttgggtcagcgaacatcgcctccctctaccgctcaatcagcaaaagggaccgcccttgaggac

SEQ ID NO: 964354 - DNA, 120 bp, Artificial Sequence
  ENSG00000226067_4 (sequence is synthesized)
ctcacccgccgctcactcccctcccaaattcgcgggcatcgcctccggtcgcctcttccgaaggcctaacgagcatgttagctgcgaacggaggtgaggaggctccgctgactgaccggt

SEQ ID NO: 964355 - DNA, 120 bp, Artificial Sequence
  ENSG00000226067_5 (sequence is synthesized)
gcccatgtccagggcacgcacaaacgccatgacttggcttggcctctctcttagttattcacagctcagcccgataggcacctccggggcggcgacggcaaagagggtgagcttattaag

SEQ ID NO: 964356 - DNA, 120 bp, Artificial Sequence
  ENSG00000226067_6 (sequence is synthesized)
caggaatcgaactcgagctgcaggcggtgaaagcgccgaatcctagccactagaccaccagggaaacaacagcaagcacttttcattcctcttgccttccaaaggtttctccaaaaggtg

SEQ ID NO: 964357 - DNA, 120 bp, Artificial Sequence
  ENSG00000226067_7 (sequence is synthesized)
aacctgtctgcaatgctcacgaagccctccagatgcacaagtcaaaactgatctagagattctgaagtacgctgtgctccttgagaagtgcggagccactggaaccacaagcagcttcag

SEQ ID NO: 964358 - DNA, 120 bp, Artificial Sequence
  ENSG00000226067_8 (sequence is synthesized)
cctcaacagaggcatctgtgagttcattgtggtggctgcagacaccacgctgcaagagagcattctgcactcccactgctgtgtgaagagaagaatgtgctgggcctgcctggaatgttt

SEQ ID NO: 964359 - DNA, 120 bp, Artificial Sequence
  ENSG00000226067_9 (sequence is synthesized)
gcgcactccaggcgggccctggggcgggcctgtggggtctccagtcctgtcatcacctgttctgtcaccatcaaagaaggctcacagctgatccagtccattcagcagtccgttgaaagg

SEQ ID NO: 964360 - DNA, 120 bp, Artificial Sequence
  ENSG00000226067_10 (sequence is synthesized)
ctcctagtctaaacctgtggcgtctaaacccgtggcctctgctgcacaatctctgctgactcctccccctgaggttattctcagctactttctattgctataaaatattatagtactaaa

SEQ ID NO: 964361 - DNA, 120 bp, Artificial Sequence
  ENSG00000226067_11 (sequence is synthesized)
gcaggacgactgagcaagttcttggaaaaccagagatattagagcggtgaatcgcgctggtcacgttggacacctgcgcgttaggagattctggagccagagggagagaccccagaaacg

SEQ ID NO: 964362 - DNA, 120 bp, Artificial Sequence
  ENSG00000226067_12 (sequence is synthesized)
cccagtgaaggagcctgtatccaccctgcccagtcgctgttgggctgctgcggagcttccgctgccatcttcggatcctgtgttccgcccggggctccaccagggcagggatggtgcaga

SEQ ID NO: 964363 - DNA, 120 bp, Artificial Sequence
  ENSG00000226067_13 (sequence is synthesized)
atggggaaatggagagagaacctgaaagagccccaaactcgaggacctattgctccccaagaataacatcttccagaactagacagaaaactaggcgtctgggaaccctgaaatccttgg

SEQ ID NO: 964364 - DNA, 120 bp, Artificial Sequence
  ENSG00000226067_14 (sequence is synthesized)
aggagtagatcatcatgaccctctgtgttccttttggcaaatgacttgcttccattgtttgtttgttcaattgtctgtttgttaaataaataaaaccctttttatgtatctttaaaatta

SEQ ID NO: 964365 - DNA, 120 bp, Artificial Sequence
  ENSG00000226067_15 (sequence is synthesized)
aatgaatcccttgtcgcctttagcttttagtcctttgaagagaggtgagagtggaaatcaagagatttttttccacggggaagttctttttacaaagcgttgatttcttggcaccccgcg

SEQ ID NO: 964366 - DNA, 120 bp, Artificial Sequence
  ENSG00000226067_16 (sequence is synthesized)
gggcgggcaactgacacgacctccggtgcaccttctgcgctgtggagcctctggggctcagctgggcggtggtcgggtcgtggggcggtagggcgggagcgggggaagggaaagcaaaag

SEQ ID NO: 964367 - DNA, 120 bp, Artificial Sequence
  ENSG00000226067_17 (sequence is synthesized)
ctggaaaagaagcaggggagttgtgaaccagacatccagacctcctgaagggctcgtgcagacgtacaggcgggatcttctggaagtgagaattgtttttgtttgtttatctattgtagc

SEQ ID NO: 964368 - DNA, 120 bp, Artificial Sequence
  ENSG00000226067_18 (sequence is synthesized)
ctcctcctcctcctcctcctcctcctctcacccaggatcacttccgaaaccacttggccttcagcccctgcctcggccagaggtttcatttttaactgaatatttacgaaagctgaaagc

SEQ ID NO: 964369 - DNA, 120 bp, Artificial Sequence
  ENSG00000286127_0 (sequence is synthesized)
agtcttagcaagtcacagaactttagactccaggggctctggagggcactccgcacagcacggcctctcacttggccgaggagaccactggcacccaggaggttaagttccctgtctgtc

SEQ ID NO: 964370 - DNA, 120 bp, Artificial Sequence
  ENSG00000286127_1 (sequence is synthesized)
cacagcaattctactagcccgcgctgaagttacaccaaggcaagcagcttaattttggccaacccgaaggatttaggcaggatttgggtggaaggcaggctgggcgacccttgaggagag

SEQ ID NO: 964371 - DNA, 120 bp, Artificial Sequence
  ENSG00000286127_2 (sequence is synthesized)
ttgctaaacgttgtacagataaaatgaaataggtcatgtggtcacgtggtcatagttaacaacacttgacgccaccaagtccgcggaaagatgctcaacaccactaatcacgaggcaagt

SEQ ID NO: 964372 - DNA, 120 bp, Artificial Sequence
  ENSG00000286127_3 (sequence is synthesized)
gcaaaccaaacccatcatgcaccaggctggccactgtcaaaaaacagaaaataacagttggtgaagatgtgcagaaactggaagccttgtacactgttggagagaatgtgaaatggtgca

SEQ ID NO: 964373 - DNA, 120 bp, Artificial Sequence
  ENSG00000286127_4 (sequence is synthesized)
gatccagcaacttcacttctgggtatatacccaaaataattggaaccaggggtgccaagggatgtttgtaccatcaagttcatagtggcattatttacaatagctaaagtatggaagcag

SEQ ID NO: 964374 - DNA, 120 bp, Artificial Sequence
  ENSG00000286127_5 (sequence is synthesized)
caagccaggtgtccactgacagatgcgtggagaaacaaaatgtggtatctacatacaatggaatatcattcagcctaaaaaaaggaaggaaactgtgacagtgctacaccatcggtgaac

SEQ ID NO: 964375 - DNA, 120 bp, Artificial Sequence
  ENSG00000286127_6 (sequence is synthesized)
cttgcagacattatgctaagtgaaatgagccacaaaagtcacagtaagccacaaaaagacaaatactagatgatttcacttatgtgaggcacctagagcagtcaagctcatagggacaga

SEQ ID NO: 964376 - DNA, 120 bp, Artificial Sequence
  ENSG00000286127_7 (sequence is synthesized)
aagtagaatggggtggtgcggggcatggggtagaaggaaacgggagtcattgtttcttgagtccagagctttacttaggcaagatgagttctggagagggatgatgatgatggttgcaca

SEQ ID NO: 964377 - DNA, 120 bp, Artificial Sequence
  ENSG00000286127_8 (sequence is synthesized)
ggagagggatgatgatgatggttgcacaacattatgaatgtatttaataccagtgaactgtacactttaaaatagttaaatggggccgggcgcgtgggctcatgcctgtaatcccagcac

SEQ ID NO: 964378 - DNA, 120 bp, Artificial Sequence
  ENSG00000286126_0 (sequence is synthesized)
actgcagaacaagcagctgacatgattgctgtcggtgttcacagagccaaatatgaagataattgtaaagaaagagacggtcgcatcggatagaagatgtgatcctgctctcacgttttt

SEQ ID NO: 964379 - DNA, 120 bp, Artificial Sequence
  ENSG00000286126_1 (sequence is synthesized)
ccttctggcatgaccatacacgttttgagaaaatgttgccaaatgggtagactaaacaatgaatggctgccgggtttagtcatacctctctgtgtgagccgtcaattgctgacgggagct

SEQ ID NO: 964380 - DNA, 120 bp, Artificial Sequence
  ENSG00000286126_2 (sequence is synthesized)
aggacattattccagctacaaaatgggcgcgtgatcctggaaactgatgcatgggccttgcaagctacgtctatagaattggctgtaggtactaagcacagaagaccatcggatccctgt

SEQ ID NO: 964381 - DNA, 120 bp, Artificial Sequence
  ENSG00000286126_3 (sequence is synthesized)
gtcaaggattggccattcctgtggtgtcagtagtgagtgcttggatgaatgtgagatctataggctggtgatgcagatggtgacgggaagagacagtagagatgccaacacactccctgg

SEQ ID NO: 964382 - DNA, 120 bp, Artificial Sequence
  ENSG00000286126_4 (sequence is synthesized)
acggtgtttctggagggaaaaggtccgcgtctggcgagccagtggaatgtgctgtggcagaaaatccacaggctctggaatctgactgtcagagcctgggccctggatacagtgtctacc

SEQ ID NO: 964383 - DNA, 120 bp, Artificial Sequence
  ENSG00000286126_5 (sequence is synthesized)
acctttgtgatctgtggcatgttatttagtatcttggagcctcagtttaccttctgtattattagggtaataatgttttcttttggggcttttggtgaggattaaatgatatatggaaag

SEQ ID NO: 964384 - DNA, 120 bp, Artificial Sequence
  ENSG00000270426_0 (sequence is synthesized)
aaatgaggaaaagtggtgctggcattcgtcttcagccaccggcctccttatggctgtgactcggtctgcttttgatgaatggccaggaggtatggaggatagttagatttcctgttgtgg

SEQ ID NO: 964385 - DNA, 120 bp, Artificial Sequence
  ENSG00000270426_1 (sequence is synthesized)
attttcaggcatcaccgagactgctgtcaagcctgcagtcatttactagttttcatatcgactgcaggttctctttgagcagttcagtttttggtgcttaagggcaggtgcacaacgggg

SEQ ID NO: 964386 - DNA, 120 bp, Artificial Sequence
  ENSG00000270426_2 (sequence is synthesized)
ttcaccacgcacgcagattcaggattctctgatttccccaactttcctttattcttcttttagtgggagaaggggcaaaagtagaaacctaaaaaatcctgggaaaaggagccttttctg

SEQ ID NO: 964387 - DNA, 120 bp, Artificial Sequence
  ENSG00000270426_3 (sequence is synthesized)
aggaaacttcagcagatgaaatatttaagacttgaactgggatctctagggggaacgttggaacatctattgattgatgtgtcaaagtccggaatttcactgtaattagtgaacgattat

SEQ ID NO: 964388 - DNA, 120 bp, Artificial Sequence
  ENSG00000270426_4 (sequence is synthesized)
aacttgtaactttgtctgttatgtaagaaattacattttggtctcttagatccaagagttcttgtctgttacgatttgtaactgcttgttaaaattaaacatttacatatttcattctca

SEQ ID NO: 964389 - DNA, 120 bp, Artificial Sequence
  ENSG00000283183_0 (sequence is synthesized)
cttccagttcgtttctgctgcggcggcaagaggctggggagccgatgactcaccctgccggctaattgcagcgttaaataactttgcgccggattcggtggctgcagcagggaacgcgct

SEQ ID NO: 964390 - DNA, 120 bp, Artificial Sequence
  ENSG00000283183_1 (sequence is synthesized)
ccgggcgccgggggaggtggagggacgccctgagaacgcacctccgtccctgtcaccagccttagcaagttctggcctgtggagccgtcatccagagcgcacagcttcatgcccttgaag

SEQ ID NO: 964391 - DNA, 120 bp, Artificial Sequence
  ENSG00000283183_2 (sequence is synthesized)
ggcgcagtgtgtcccgtggtgcccggtgggcccggacagagaccccagaggctctgtctgaaggaagctgcacccacagactccatccaggcagcgcgggcgcggtcctgtcgcctacct

SEQ ID NO: 964392 - DNA, 120 bp, Artificial Sequence
  ENSG00000283183_3 (sequence is synthesized)
ttctcggaagccatctgcccatgtgaatctatgtgaaggcccttcatgcgctcctggacatctgcgtgggatttacttcaactgctatcgctgcgaggaggacgagcatgtttcactgta

SEQ ID NO: 964393 - DNA, 120 bp, Artificial Sequence
  ENSG00000283183_4 (sequence is synthesized)
tttttagcagagagtgcagattttagaacctcgcgaacggtcctgtatctcctgcacgatgactctccagaacaggaatagtgacccttcctttgcatttatggtgcataggttttcaaa

SEQ ID NO: 964394 - DNA, 120 bp, Artificial Sequence
  ENSG00000283183_5 (sequence is synthesized)
ggacagtgtgtaaatcagcttgtgtaataattgtggcacccacgcgcgcaagcagacttaccatgagctgacttccactgattatttcagtttccagggaaacgaggtttgcagccccct

SEQ ID NO: 964395 - DNA, 120 bp, Artificial Sequence
  ENSG00000283183_6 (sequence is synthesized)
ctccctaaagggtgagggtggaaggatggggctgtgccctcttagggcagggaaaaacagcttggaggggtttctgccatcagagatcccataggaggcaggtcagtcctgcagaatttc

SEQ ID NO: 964396 - DNA, 120 bp, Artificial Sequence
  ENSG00000283183_7 (sequence is synthesized)
tccccagtctggcctccagcctccctggcccctttctagaggcctccatcccactggcggcttgctcctgccaccgggcctctgcacagtcacctcctgcagcctggggtgtgtcgcctc

SEQ ID NO: 964397 - DNA, 120 bp, Artificial Sequence
  ENSG00000283183_8 (sequence is synthesized)
tccacgtcctcaccggcgtctgcctttgcatttcccagatgctcgcttcaccccactgagatgtaactcagttttgtgggatcccactgccctccaggtgccgctccgagtgctctacac

SEQ ID NO: 964398 - DNA, 120 bp, Artificial Sequence
  ENSG00000283183_9 (sequence is synthesized)
agattttcattcagtccttgcggcacacgaagcctgttaatatgatgaattacactgattcagtttcaaatgtccaaccaagcttgcactccagagatgaagcccacttgatcacatgga

SEQ ID NO: 964399 - DNA, 120 bp, Artificial Sequence
  ENSG00000283183_10 (sequence is synthesized)
ttattcttttaatatatgatggatacgacttggctgttcttttgttgaggatttttgtgtttatgttaatgaggatattatttgtagttttcttttcttgtaatgtttttgtctttgttc

SEQ ID NO: 964400 - DNA, 120 bp, Artificial Sequence
  ENSG00000283183_11 (sequence is synthesized)
agtgtcagagtaatgccaacttcataaagtgagctgggaagtactccctcattttctgttttctgtgaaagaattgtatagaattgatgttatttcttccttaagtgttgagtagaattc

SEQ ID NO: 964401 - DNA, 120 bp, Artificial Sequence
  ENSG00000283183_12 (sequence is synthesized)
acttgcaaagccatctgaggttgacatcttctttgggaatgactttagctataaattcaatttatttaacagatatagggctattaaggttatttaatttttttcttgaatgagctttag

SEQ ID NO: 964402 - DNA, 120 bp, Artificial Sequence
  ENSG00000283183_13 (sequence is synthesized)
cgaaggacaagtcccaggtggccttggaatgaacaagcccctcccttctcacgcgtacttctcgagaatacctgaagaatgtgccaggaatgcaaccacctggtctagggaaggaccggc

SEQ ID NO: 964403 - DNA, 120 bp, Artificial Sequence
  ENSG00000283183_14 (sequence is synthesized)
cggacagccctggctctgctcctgtgcctcctagggcaggatgtcccacacactgtagccctatgagtcacccctggctatggaacccagagcagagtgcacctttgggatctctcagct

SEQ ID NO: 964404 - DNA, 120 bp, Artificial Sequence
  ENSG00000283183_15 (sequence is synthesized)
gtggtgtgaagcgggacacacatagacaaggctccattcgttctgggcagctttcccgagcctcggggacccgctcaccatggatcctaagcttctgctgttccctgctgcctgcctgtg

SEQ ID NO: 964405 - DNA, 120 bp, Artificial Sequence
  ENSG00000283183_16 (sequence is synthesized)
gtgccgtgagcgtgtgcccgcggttcgggggatgagtaggggcgctgacttttaggaccagccatttgagtcaagctggagacgacgtcttagaacctaggatgagtctcgtttggtttt

SEQ ID NO: 964406 - DNA, 120 bp, Artificial Sequence
  ENSG00000283183_17 (sequence is synthesized)
agtctgcaaagctcgtctgcatcagacaggaattttccccagacgcgggtgcacgtgaattaattcatcagaaggcggttcacggcctgagtgagggggacgagggcggcgaattcctcc

SEQ ID NO: 964407 - DNA, 120 bp, Artificial Sequence
  ENSG00000283183_18 (sequence is synthesized)
gcctcattcctaccctgacgattcgaggtgggtgagaggaaggcgtggggcggctgggtgcgtggggtgggggaaggtcacctcttcggcctctctgggccctccagcctcttcctgaga

SEQ ID NO: 964408 - DNA, 120 bp, Artificial Sequence
  ENSG00000283183_19 (sequence is synthesized)
atttttccattttatttaagtttttagatttgttggcataaagttatcccaatatttccttagaagttgtgacttttactgcatataaaacatacctcaataaagctaatacatacatat

SEQ ID NO: 964409 - DNA, 120 bp, Artificial Sequence
  ENSG00000283183_20 (sequence is synthesized)
gacagcccggagctggcgcacagtaaagtcttcagataggaggggcagagtgagggtgccaccgtcgggcagcaggtgcccacccagaagggtctttgagccttgcggggaagttcagac

SEQ ID NO: 964410 - DNA, 120 bp, Artificial Sequence
  ENSG00000283183_21 (sequence is synthesized)
tttaccctgaggataaaggaggtcctggacccgcaggaggatgccctgagtggctgtaccattttgcattcccagaccgaagtgtgaaagctccagatgccccacgccctcaccagccca

SEQ ID NO: 964411 - DNA, 120 bp, Artificial Sequence
  ENSG00000205562_0 (sequence is synthesized)
gcgagagctttgttcacgtgcgtttccagtgggtgtgttgctgtctaggggcactcgcgtggcaagacgcccgtggctggcttccagcgcccaagattcaaggaagggaaggagccctag

SEQ ID NO: 964412 - DNA, 120 bp, Artificial Sequence
  ENSG00000205562_1 (sequence is synthesized)
cgtttcatccggaccagacccagccctcggagtctattttttgcctccagttaccggatttattgaagttgccagcgaagttggttttattcctttacttctctgctctccgcccccgtc

SEQ ID NO: 964413 - DNA, 120 bp, Artificial Sequence
  ENSG00000205562_2 (sequence is synthesized)
cacatcccccaaccctgtattatttcctgtcctagctgcgctttaaagattcggaacttttcactcgttctagctacagattttaactgtgttccgtgtgcgagacgaattgtggagggc

SEQ ID NO: 964414 - DNA, 120 bp, Artificial Sequence
  ENSG00000205562_3 (sequence is synthesized)
acccacccacccatgccaagtgtaaatgaaaccgcaagaaaagctgcctcccactcacccatccagtgtccgagtaagcctaatgacacacattcacataactaagaagacacgggaaga

SEQ ID NO: 964415 - DNA, 120 bp, Artificial Sequence
  ENSG00000205562_4 (sequence is synthesized)
taggggtgcggaggacggagtttgatgtgtgaatgggaaatggagagaggggacagcgcgcgcgagagaaacagcgcgagcctgagccttagaatggaataaacgggaaacacacacaag

SEQ ID NO: 964416 - DNA, 120 bp, Artificial Sequence
  ENSG00000205562_5 (sequence is synthesized)
aatgacgatgcaaaaaatgtatctaagtcccaacattgacagcagagggtcagctttaagcgcctacattttgatccgcgaaatttcccagcttttttggaggcggttacatagagaaca

SEQ ID NO: 964417 - DNA, 120 bp, Artificial Sequence
  ENSG00000205562_6 (sequence is synthesized)
caggagcctctgccttggccgcccagatgctttgcattttgtaaacagctttgactaagtgctctggacttccaagaagttaactggagtggaaggcgagtcatattgtggatgcggaat

SEQ ID NO: 964418 - DNA, 120 bp, Artificial Sequence
  ENSG00000205562_7 (sequence is synthesized)
ggaagcttagacaagaaaaaactgtcagcagagcgcctctgctctcaccgtcacacccaaatgagccaggacgtcgctcagagcgcaaactgagatccacacagggacatcttcaaccga

SEQ ID NO: 964419 - DNA, 120 bp, Artificial Sequence
  ENSG00000205562_8 (sequence is synthesized)
atctttcttctgtctccattccggactaaggaaagaaagaaagaaatacggagcctttatagagtattcagaggctacacacatggatcttgctgaaacggagttatttaaaaacagaga

SEQ ID NO: 964420 - DNA, 120 bp, Artificial Sequence
  ENSG00000205562_9 (sequence is synthesized)
aagtgtgttttcccatgagatagatgttatagtttctctctgaaacatacccaagtctatgggtgtcaataatagccatttcaaatgcctctctgagccttgccagccccagaagaggct

SEQ ID NO: 964421 - DNA, 120 bp, Artificial Sequence
  ENSG00000205562_10 (sequence is synthesized)
ccttctgagtttccaaggtggcagcagagcatagggatagctcctcaagctccagcatcaacaaggaagatcacattttaggacaaatactcatctacctgcatttaaacatccattttc

SEQ ID NO: 964422 - DNA, 120 bp, Artificial Sequence
  ENSG00000205562_11 (sequence is synthesized)
gtatgttacaagatgattatgcgtgaacaaaaacagaaggtacatactggcaggaaacaaaagcacgttaaaccatggagatttcctcttacataaacctgccatttgttaagcagttgc

SEQ ID NO: 964423 - DNA, 120 bp, Artificial Sequence
  ENSG00000205562_12 (sequence is synthesized)
tgtctgttccacagggaagctggcaaaaacttgatacaaacattctccaactgcactgggaggaataagtgaaggtaacacctttttaagaagggcatacaaagagataaaagatctacc

SEQ ID NO: 964424 - DNA, 120 bp, Artificial Sequence
  ENSG00000205562_13 (sequence is synthesized)
tagggacttactcaaacctagatgctaccattgtacaaaatgttaccaagtctacctatatctaactatagttctgataaagagggaagtgatgttttaatttgggaaaacacacttaat

SEQ ID NO: 964425 - DNA, 120 bp, Artificial Sequence
  ENSG00000205562_14 (sequence is synthesized)
caaacatgtaaatgagattctgaattaaaattcatatgtattttctctcactatctatcaacgtgctagaaaaataaaattgccttctttggaaggacaggggcaattttcaagagtgct

SEQ ID NO: 964426 - DNA, 120 bp, Artificial Sequence
  ENSG00000205562_15 (sequence is synthesized)
tattcaaagaaaaaaatgaatatttgcactcaaactttatgcagttagaagaaggtctgagcttggtcttggaagatcttacttcatgtctccatcttaccagggaaatcacgtaactgc

SEQ ID NO: 964427 - DNA, 120 bp, Artificial Sequence
  ENSG00000205562_16 (sequence is synthesized)
tctgagcctcagcatcccttctatcaaataaaaaaagtataataaagatcatctttcagggtaggtatgaaaagatcaagtaaagtgaggtgtttcaaaactcaaaataaaaataagctg

SEQ ID NO: 964428 - DNA, 120 bp, Artificial Sequence
  ENSG00000205562_17 (sequence is synthesized)
aacacaatttagtgtgagatatattttagtccatctaaccttcagccacttcatggagttttaattgcattggtacttcctgctttgctggtacccttgttccatataacctctgagagc

SEQ ID NO: 964429 - DNA, 120 bp, Artificial Sequence
  ENSG00000205562_18 (sequence is synthesized)
ttcaaaggtgtagagctgcttaattcctgcacagttaactctgcagtgctttcaggtgtcaccatttgctaccctagaaataaacttgacctaccctagaaataaacttcctcaaaccag

SEQ ID NO: 964430 - DNA, 120 bp, Artificial Sequence
  ENSG00000205562_19 (sequence is synthesized)
acgctctaggagtttcccgggtatcaagtatgggtccagcccgtcccagttatcctcttcccctatggcttcattcccgttgtcagtaccccgacctcagcttgcaaccttgatcttggg

SEQ ID NO: 964431 - DNA, 120 bp, Artificial Sequence
  ENSG00000205562_20 (sequence is synthesized)
cttgattataaatgacgaaagaccgcggcagccttcaaagtgcgggagcgagccccgtactggtcagcgcggcggagggatctttccaggaggccccaagcccccaagcctgtggagaga

SEQ ID NO: 964432 - DNA, 120 bp, Artificial Sequence
  ENSG00000205562_21 (sequence is synthesized)
cttggtaacagctggcaaggcctgctccagccaccctcgctggctccttgcccctgcattcagcgcctgagggcgttattcgccctctccctgcgtcccacgcaagcggctcaaggaact

SEQ ID NO: 964433 - DNA, 120 bp, Artificial Sequence
  ENSG00000205562_22 (sequence is synthesized)
cactcgatccggattccgcctcgtatgctctccaagccttcgccacctccgcaggcgctctagaaaggcgtgatggccccagctcagtgcccgccagcccgaagaggacaagcagggctg

SEQ ID NO: 964434 - DNA, 120 bp, Artificial Sequence
  ENSG00000205562_23 (sequence is synthesized)
gaagggacttggttttggaaaaagccccacccgcccccaccaactggaaggaaaaggaattagtatccaccgcatctgtttaactgctaatagatcccagattacgggcaggtagtaggt

SEQ ID NO: 964435 - DNA, 120 bp, Artificial Sequence
  ENSG00000205562_24 (sequence is synthesized)
tggtgtctttagatacaacagcctgataataacgctggtgacattaacaacagcttgtggaggggagagggttgttactggtgaaagttaagagattcaatctagggaagtaggagactg

SEQ ID NO: 964436 - DNA, 120 bp, Artificial Sequence
  ENSG00000205562_25 (sequence is synthesized)
aactctgacaaggttaggggcactgagaaccccaatttagcatcgatgcatctaccaggcaagaaaatttgcgttttgacccagaactcagtcatgatgctccgtagaggaggtggattc

SEQ ID NO: 964437 - DNA, 120 bp, Artificial Sequence
  ENSG00000205562_26 (sequence is synthesized)
gaccagcagacagatgtccccaaagtcgagagagagctaagctgcctattttctctccaggtgaaagacaaagcctagagcaccccacttaagatgaccacccccagctctttcaaaaaa

SEQ ID NO: 964438 - DNA, 120 bp, Artificial Sequence
  ENSG00000205562_27 (sequence is synthesized)
aaaaaatcccccgaagagacagcgtggtgccagcgtagcagcagctcggccggttactggaaacttcacctggcaacgcagccccttttacctgacggctgcgtcttctccttgcaatgg

SEQ ID NO: 964439 - DNA, 120 bp, Artificial Sequence
  ENSG00000205562_28 (sequence is synthesized)
gctcatccgaatccgacagggtcagggaggtggaaagggaagacgctggcgcggcagcagcggggatcccggggcatggtattgttttaggggtcgccgccgaggtccctcctgcccatc

SEQ ID NO: 964440 - DNA, 120 bp, Artificial Sequence
  ENSG00000205562_29 (sequence is synthesized)
gttgagaactgccaccctgatcccagggctcggtggacacggcggcgggagcggagatgccgcctcgccgctgctgggcaccagggacggaggaccagaggcgcacctcggaaaggagta

SEQ ID NO: 964441 - DNA, 120 bp, Artificial Sequence
  ENSG00000205562_30 (sequence is synthesized)
gctcagcgccttggcgcggagatttgcgggcactgatgatatctcgagcgctcgttcctccgcggtgacaatggataatgccaaacgcgcaagtgacggcgacaggtttcgaacgtacaa

SEQ ID NO: 964442 - DNA, 120 bp, Artificial Sequence
  ENSG00000205562_31 (sequence is synthesized)
ctaactacaaggtacccagcctgagacagtatgctgcttttcccctcctcctcctctccctcctaccagggagggaactaacttaaccctgtgtgcgcctgacactccctagagaagctg

SEQ ID NO: 964443 - DNA, 120 bp, Artificial Sequence
  ENSG00000283648_0 (sequence is synthesized)
gtggctggcacaaagagacgatggagctgccgttttgaacatgcctagtcccagtgtctgaggcgcatggccccgggagaggaggagaatgggacggtggttcagatctgctgatgtagc

SEQ ID NO: 964444 - DNA, 120 bp, Artificial Sequence
  ENSG00000283648_1 (sequence is synthesized)
tgtggtcagtcactggggagaataggcctgtggatttctgctcctctgagatggatccatcactgactactgaacttgttttctcattggctcaacttaagaaggttctagaggatcaag

SEQ ID NO: 964445 - DNA, 120 bp, Artificial Sequence
  ENSG00000283648_2 (sequence is synthesized)
gacgtgaaacaaccaaaaccaaagagcagctggagaccacttgccagtgattagcacgagcttctggaccagcagcttgccccgtgacgtctgttctctgatgaattgatgatctggaga

SEQ ID NO: 964446 - DNA, 120 bp, Artificial Sequence
  ENSG00000283648_3 (sequence is synthesized)
ctttaatatgggatttatgatggctaaagagcattacctacccaagaggaacctttaatccagggaactgacttcttcctcctcatggtccacttgaaattccaggaaaaggaacagatg

SEQ ID NO: 964447 - DNA, 120 bp, Artificial Sequence
  ENSG00000283648_4 (sequence is synthesized)
tgcaaggaattgcagcctggagaaacatagtgtatttggagacttgcatgtaaatggataagtaggtgtaggaggagaagctgggtcacattttcctaaattttattccacaaaacacta

SEQ ID NO: 964448 - DNA, 120 bp, Artificial Sequence
  ENSG00000283648_5 (sequence is synthesized)
gtcccatgatcagtacatttggggcatgctgcatgttgtattccctgttgtcttatattggatttcctaaaaatagactctgaggtggagacttatgtgcagaaggtctcttggcgaatg

SEQ ID NO: 964449 - DNA, 120 bp, Artificial Sequence
  ENSG00000283648_6 (sequence is synthesized)
ctccagggaggcgtgcgtgtaaggaagtgagacagacccacctcaggcccctgggacttccactggccagacgccctgtgcctacttgtgtcatgggatacagggcccatctcttcccat

SEQ ID NO: 964450 - DNA, 120 bp, Artificial Sequence
  ENSG00000283648_7 (sequence is synthesized)
ctccacactctgaccacacgctagtagcttgaaatcagccatggtgcaactattggcatcacaaaaatggacaaatgcttcaaactggggcctgacttattgttttgttgattgccaggc

SEQ ID NO: 964451 - DNA, 120 bp, Artificial Sequence
  ENSG00000283648_8 (sequence is synthesized)
ttaaaaagtgatggaaaggatgctaataatgcatattaaaccaaaaaagtgcgtcatgtctgtagctgtgacattgtgaatagcacaagcattgaggttacatgcttctgatatttgaaa

SEQ ID NO: 964452 - DNA, 120 bp, Artificial Sequence
  ENSG00000283648_9 (sequence is synthesized)
acccttattggattcaacaaagaattcactcatgtcattgtctatcaggtgaagctctgatgcacattttttgctttcacttttgccttattcattaatataaacagaatgtcaatcaac

SEQ ID NO: 964453 - DNA, 120 bp, Artificial Sequence
  ENSG00000230733_0 (sequence is synthesized)
ctaaatcaagtccattttatttgaaattttccacatgccacacatgtacatgaaaattcccatccagaatgtagtttgctacagtgaacaccaatgtcaggagcaggcatcaccgtgaga

SEQ ID NO: 964454 - DNA, 120 bp, Artificial Sequence
  ENSG00000230733_1 (sequence is synthesized)
cgccacgggggcaggtcagcgggacggggacagggaggttggtcatcgaaaggcaggtgatgcatgtcgtgtcatttagcacctggtcatgagatacggcgagacccccaggtccaggga

SEQ ID NO: 964455 - DNA, 120 bp, Artificial Sequence
  ENSG00000230733_2 (sequence is synthesized)
aaggtctccccttaaaaccacgtggagctctgctgtctctgggcagtctcacgtggacagacaatgctcagaaggtggcgaaggggctggagggagataccaccgacggctgcaggggag

SEQ ID NO: 964456 - DNA, 120 bp, Artificial Sequence
  ENSG00000230733_3 (sequence is synthesized)
gggcacgcacacacacaggcacgcacatgcttgcccatgaacaccccccgggcacacacacacccttgcacactccccaccctccctccaccccagacacatcagcacagcggtccaggc

SEQ ID NO: 964457 - DNA, 120 bp, Artificial Sequence
  ENSG00000230733_4 (sequence is synthesized)
tctggctcactccccgggaggcttctgtggccagggttcccatggcgggtctggtggcaacagcttggagaaaagcctcccgggaccaaccctcattcccaggtccactgatctggggta

SEQ ID NO: 964458 - DNA, 120 bp, Artificial Sequence
  ENSG00000230733_5 (sequence is synthesized)
ggagtagccaagtgttctgacaggcggttttcccgtaaaccgaccccttcagcgtttctgctttttgttgtttgttttctgagacagggtattgctccgtggcccagagtggagggcaat

SEQ ID NO: 964459 - DNA, 67 bp, Artificial Sequence
  ENSG00000230733_6 (sequence is synthesized)
acaatgcccagctaacttttttttttattttatgtagcgatacagtctcactatgttgcccaggctg

SEQ ID NO: 964460 - DNA, 120 bp, Artificial Sequence
  ENSG00000230733_7 (sequence is synthesized)
cggcccctcccatgtttctcaaaggagctttagagagcagaggagcccgagtcactgccaccactgggttcctcagtgtctgtggggtttgtgttcatcatgcccagtagatctagaaac

SEQ ID NO: 964461 - DNA, 120 bp, Artificial Sequence
  ENSG00000230733_8 (sequence is synthesized)
cagcctcctgagtggctgggaccacagcgctgcctgctgggggatcaaggtccccgcatccaggcctccagcaccctccatccctgcaggagcactgctggcaccgccaaggccggagca

SEQ ID NO: 964462 - DNA, 120 bp, Artificial Sequence
  ENSG00000230733_9 (sequence is synthesized)
ctggtctggagcttcattggccggcaggggcccagccctcagctgttggagccctacggctctaggtctggcccctccacaagccctccaggcccacgcctgagcccagccccggtcccc

SEQ ID NO: 964463 - DNA, 120 bp, Artificial Sequence
  ENSG00000230733_10 (sequence is synthesized)
tgggtccaacggcctgtggctctgggtccggacccagggtgtggttgagggagggcgctgctgagctggcaggcaacccttgtgtgtttgcagcgcaagaggagctcagcccgtcctggc

SEQ ID NO: 964464 - DNA, 120 bp, Artificial Sequence
  ENSG00000230733_11 (sequence is synthesized)
gtcgaagcagcaagtgtcttcccgccctgtgcacagacaggtcccaggagggcctcttggagaagaaaccgctcaggcccatgtcctggcagggcctctgggggcagcagatggcaagga

SEQ ID NO: 964465 - DNA, 120 bp, Artificial Sequence
  ENSG00000230733_12 (sequence is synthesized)
tagagcccgccccctctgctgcagaaggaagcggccctcacccagcccccctgggctggacgggccgttgaaaacaagaaaagccttccatagcagaaaggagtactcaaggcccagaaa

SEQ ID NO: 964466 - DNA, 120 bp, Artificial Sequence
  ENSG00000230733_13 (sequence is synthesized)
ggcagctttgctctgggtcatcaggctcaagtgcctgctctgggccaccttcggaagcctggtggagccgagtgttgcctggtgacgtggagcaggaggcggggcggaggctgcgggaca

SEQ ID NO: 964467 - DNA, 120 bp, Artificial Sequence
  ENSG00000230733_14 (sequence is synthesized)
cggggctgcagggccgggaagggggtcaggagaataaatagcagctaggtgtggggtgagctgggagcacaggcaggagggggcagccagagaggttggggctctcccttttaaagaaca

SEQ ID NO: 964468 - DNA, 120 bp, Artificial Sequence
  ENSG00000230733_15 (sequence is synthesized)
aagggatacataccctttcccctcctccctccctccaaccccacagtctctccctcacatacacacacggaagacgtgactcacacacacatgcacacacagggcacaggtacacgaagg

SEQ ID NO: 964469 - DNA, 120 bp, Artificial Sequence
  ENSG00000230733_16 (sequence is synthesized)
cacacgtgcacacacagggcacaggtacacgcaggcacatgtacacacaggcacacgtgcacgcaggcacacgcatgcaggcacatgtgcacacacagggcacaggtacccgcaggcaca

SEQ ID NO: 964470 - DNA, 120 bp, Artificial Sequence
  ENSG00000230733_17 (sequence is synthesized)
cgtgcacgcaggcacacgcacgcaggcacggggacaagtgctgaccacgctcctccagcaggcagcatatggtctgctgcttaacagccgagctctgccaattggggaccattagggtgg

SEQ ID NO: 964471 - DNA, 120 bp, Artificial Sequence
  ENSG00000230733_18 (sequence is synthesized)
gttcttttcccagcatcaaatgctgcagaatataaattgcaactaacgctggtgccaaaatagcacttagagaaaataagcacgttattaacatctggtgaagcccatctcgggggtagc

SEQ ID NO: 964472 - DNA, 120 bp, Artificial Sequence
  ENSG00000230733_19 (sequence is synthesized)
agcagcggaaattcttgctctaagtcagaggatggttgcaggggacactaaaaatacaaggtccactgtttcaggggtgctttccaaggcactgcaccccagcctcaggaacagcccttc

SEQ ID NO: 964473 - DNA, 120 bp, Artificial Sequence
  ENSG00000230733_20 (sequence is synthesized)
ccccagtcctgtctatgagtataaattatgctgctggttaaaaccgcttgctcatgagaacaggacacccaggcgcgatcgtacacacgctaggatgcattcctggagcagacgcaattc

SEQ ID NO: 964474 - DNA, 120 bp, Artificial Sequence
  ENSG00000230733_21 (sequence is synthesized)
tctagcccgagtggggaatgttctggaggaaggagtggggcggagctgcggtgcccagagacacaggccccctgagggtccgggaacctcccaggccactcgcccctgcctggtcggaga

SEQ ID NO: 964475 - DNA, 120 bp, Artificial Sequence
  ENSG00000230733_22 (sequence is synthesized)
gcaagaagtggtcagtcccaggaggcaccacaccacccgatctgatcgccgcgcctggtggtctccaggtgccattttaaagctctaaagaaatgcccaggaactgtgggtggggggggt

SEQ ID NO: 964476 - DNA, 120 bp, Artificial Sequence
  ENSG00000230733_23 (sequence is synthesized)
gctcccaccacctctgagaccctcatctacagcccctgccccctggggccgtgggcagctggtcctgcggcctgcagactaggagacggggcctaggggtgtggctctcacaggccatga

SEQ ID NO: 964477 - DNA, 120 bp, Artificial Sequence
  ENSG00000230733_24 (sequence is synthesized)
caggagggccaggaggcctctgggaggcgaaggcttggtctggtgtgggtcccaccatcgggcactgctggaatcagcctgcagaagggtccctctggccaggaggcaaaggttctgcac

SEQ ID NO: 964478 - DNA, 120 bp, Artificial Sequence
  ENSG00000254422_0 (sequence is synthesized)
aaggatacattccactaccacactattataaatgttatgtttgggtgtgtgtatgtatataaaagagagagcagataatcgagatttaaataaggtggtaaaaaaaaccaggaaatgaag

SEQ ID NO: 964479 - DNA, 120 bp, Artificial Sequence
  ENSG00000254422_1 (sequence is synthesized)
attttaccaaaacaactacaataaccatcccaagctacaactattaacagattcactaatatggtcatttgcctagttaaaatgattggtgaacatttaactgggcaaaaggaatggcat

SEQ ID NO: 964480 - DNA, 120 bp, Artificial Sequence
  ENSG00000254422_2 (sequence is synthesized)
agcccccaaaatgaacagtagttttaatagcaaaagaaataaaaagtttttttcttttgattctttagagccaactgtgaaagaggtcagcaatacattaacagcagcaatggacaagga

SEQ ID NO: 964481 - DNA, 120 bp, Artificial Sequence
  ENSG00000254422_3 (sequence is synthesized)
agagcaaaatagaggattaaagtatcttgctggacgtttgttcatctttttctgtattagcctgaaaactgcaactggcttatggaaatttccggtgcatgtgtctccttagatccttca

SEQ ID NO: 964482 - DNA, 120 bp, Artificial Sequence
  ENSG00000254422_4 (sequence is synthesized)
cagatttagaattcagtctgcctgagggctctataaccatgtaagaaagctttctttatctagcttggtggcagccaaaacagactccatgtcattaaggatgtcagaactcaaagcttc

SEQ ID NO: 964483 - DNA, 120 bp, Artificial Sequence
  ENSG00000254420_0 (sequence is synthesized)
accaagtatttccgaagtccaaaagaccatacaaggtctgaccagtacctggctaagcgctcctctaagaaatggtatcgttcttctctgaggcctcctccaaagagttccccaactcca

SEQ ID NO: 964484 - DNA, 120 bp, Artificial Sequence
  ENSG00000254420_1 (sequence is synthesized)
gtcagtttctgaagcaagtaaacctttaacattttggcaatggctaattaactacctaccagaatcttactgactacatacaaattataagtggacaatttcctctctcttgcaccattt

SEQ ID NO: 964485 - DNA, 120 bp, Artificial Sequence
  ENSG00000254420_2 (sequence is synthesized)
gtgtagtatactgaacacaaatgtattttcttcataaatgtgatagaaatgttaattataaaaatgtggatagtgttaaaaattatgaaacattaaaaatcacctatcagtaccagaaaa

SEQ ID NO: 964486 - DNA, 120 bp, Artificial Sequence
  ENSG00000254427_0 (sequence is synthesized)
ccaagaatatgaggaagtcttcttccttcgcgccttcttcttccttacgctccagggcagcctgacagagccgctcgaaggctctgctggccgcggctagccgggtgcagcagaagtctc

SEQ ID NO: 964487 - DNA, 120 bp, Artificial Sequence
  ENSG00000254427_1 (sequence is synthesized)
ggtagctgagaagttcatggaatcttcttatttgctacacctttcactactgcttgtgatatagtgcagggttgggatgtgcagacatttctcaagtgcactgtgtacctacacagcatg

SEQ ID NO: 964488 - DNA, 120 bp, Artificial Sequence
  ENSG00000254427_2 (sequence is synthesized)
ctgcaatttggctactgaagtcaagagaaactggtttgaacaactactgagtgtaacataggaagcgcatttcatttgataacaggaacacagcttttgtgctaataaaatgctttgaaa

SEQ ID NO: 964489 - DNA, 120 bp, Artificial Sequence
  ENSG00000254427_3 (sequence is synthesized)
ccgcggctagccgattttccccttcgccaatcagcagttgcaaaaagtcctccaggaaaagtctggatgccagaaagccgtacctgagggaggcagaattgcatggcagtgggctacatg

SEQ ID NO: 964490 - DNA, 120 bp, Artificial Sequence
  ENSG00000254427_4 (sequence is synthesized)
gtttactttttagttgtcatgaaggtgagggatgatgatgcttagcacagtgtctgacactttacagcaagcgccacgatccactgttgtcatcgggacttttgtcatcctcagtgctgc

SEQ ID NO: 964491 - DNA, 120 bp, Artificial Sequence
  ENSG00000254427_5 (sequence is synthesized)
cacacgtttgccctgggtccttgagcaaattggctcttttctgtggcccccttgttcctcatctgccaactgaactctccgcagttaataactccagcgacactcgaaaaaacaacaaaa

SEQ ID NO: 964492 - DNA, 120 bp, Artificial Sequence
  ENSG00000254427_6 (sequence is synthesized)
agatgctgagcgctgaaattctcatccgccacacacaacatggcggcttcctggacccgcgcccaattttcgcttccgggatggaagctacgtcatttccccctctgttgccctagcgcc

SEQ ID NO: 964493 - DNA, 120 bp, Artificial Sequence
  ENSG00000254427_7 (sequence is synthesized)
cccactgagtcatttatctaaatgaaaagtttggttaaattgtagttgtaggcattgatcaaagctaatgggaaaaagagattaagatgaaaatcatgggattaaatttttaattagttt

SEQ ID NO: 964494 - DNA, 120 bp, Artificial Sequence
  ENSG00000254427_8 (sequence is synthesized)
gccccttggaccgttgcttggtatgacatggagattgattggctacttatgcctgcctgggaagatatggctctgctaccaaacctctgaacgtaagagtgttttgcaaaaaaactgaat

SEQ ID NO: 964495 - DNA, 120 bp, Artificial Sequence
  ENSG00000254427_9 (sequence is synthesized)
attttattcagtaatttttcactttattcctgcttaacaaggaattgaaaaggaaggcaaggtcttggatctcatagttcttggtatagtgatagatataaagtatgagatgggggcttc

SEQ ID NO: 964496 - DNA, 120 bp, Artificial Sequence
  ENSG00000254427_10 (sequence is synthesized)
agtgggttcattaataaatatctcaaattaacatgtctaagtcaaactcttcctttcctgcccccaatctcttcctctcccagggctccttatgtcaactaatggtgccatcattagtgc

SEQ ID NO: 964497 - DNA, 120 bp, Artificial Sequence
  ENSG00000254427_11 (sequence is synthesized)
ccgcggctagccggtttacccattccactggacccagccaccacccactcctgctgtctggtaaactttcctcctgtttctggggccatgtctggcatgaagagtttttactgaatagtt

SEQ ID NO: 964498 - DNA, 120 bp, Artificial Sequence
  ENSG00000254427_12 (sequence is synthesized)
ttcattgatcgcaggccagttctctcttctcacccctttattgaagtgacagtgaaaatctaagtgagaaagcactgttacaggggctgaaaaggctacaggagaccagagccattgact

SEQ ID NO: 964499 - DNA, 120 bp, Artificial Sequence
  ENSG00000254427_13 (sequence is synthesized)
tttatttttaaaatgaagatctcttttacttgaaggaacttaagaattttggcattcaaataggggctggaagacttgaaagcagtagaaatttcaccacaggtgataggaaaggatgat

SEQ ID NO: 964500 - DNA, 120 bp, Artificial Sequence
  ENSG00000254427_14 (sequence is synthesized)
cacgaaatgaatatctcctgacttgcacacctagtgagcagagccaggaaggacctccttcaccttagcatttggaacaggctgcaaagttcattcttcctcatagcagcccctgcattc

SEQ ID NO: 964501 - DNA, 120 bp, Artificial Sequence
  ENSG00000254427_15 (sequence is synthesized)
catttaacttccctgcttctaatcttctgacccattttcaccatcccagtccattcaccacacagtagcagccaaaatatttgtttaaaatgtaagttagattctatcacttttgtgttt

SEQ ID NO: 964502 - DNA, 120 bp, Artificial Sequence
  ENSG00000254427_16 (sequence is synthesized)
agaattattgtcttcccccactaattactgtgccctatgtgatctggactcaatctggtaccactccctaccccttcactcactataatccagacatactatctttctttcttcaacctg

SEQ ID NO: 964503 - DNA, 120 bp, Artificial Sequence
  ENSG00000254427_17 (sequence is synthesized)
ccaagttttatcctgccttagggtccttgcactagctgttccctttgctggaaccctcttcacccagttattgcagagctggccctctcttgtttagagctgaatttcaatgtgacctct

SEQ ID NO: 964504 - DNA, 120 bp, Artificial Sequence
  ENSG00000254427_18 (sequence is synthesized)
tcaaataagtcctcccttgaccacccaaactcatgtacccccttgttactctctgtcacgtcatcctgattcagtttcaccacaacactcatcattactgctattttcttgtatcttcct

SEQ ID NO: 964505 - DNA, 120 bp, Artificial Sequence
  ENSG00000254427_19 (sequence is synthesized)
ttgtttattgactgtctcctcccattaatatgtaagctccctgaaaataaacatcttgtctatattgtatgactgtatccccagaacttcaaatagtctgtgacatatgaatgaatgaat

SEQ ID NO: 964506 - DNA, 120 bp, Artificial Sequence
  ENSG00000254427_20 (sequence is synthesized)
gaatgaatgtacgaatggattctgcttccccaaagctgctgccatctcatctcaggtacattgaaacaggaaggctggtaaaggccagggggtcaaatgctacatagagtggagcctgaa

SEQ ID NO: 964507 - DNA, 120 bp, Artificial Sequence
  ENSG00000254427_21 (sequence is synthesized)
gcacaagatgtgggcaaagacacagtggagaggggcaagaaaagcatttgggatggagggcagagggtctgggaaggaacatggaaatgatatagaacaactctacagatatgtcctaga

SEQ ID NO: 964508 - DNA, 120 bp, Artificial Sequence
  ENSG00000254427_22 (sequence is synthesized)
catcttaagacttgtacaagcatgcgtgtgcccgcacatacacacataccagcttgaagaatcttgtctcagcacatgctctgtacttgagtcttagagaacacttttcttggtagagat

SEQ ID NO: 964509 - DNA, 120 bp, Artificial Sequence
  ENSG00000254427_23 (sequence is synthesized)
gtttaggcttcagcattaaggagtctgattcagaggtctaggtagggcccatgtgtctgtgactgcataatacttgtaaactggtctcattcttggtcaggacaataaggctgcagtaaa

SEQ ID NO: 964510 - DNA, 120 bp, Artificial Sequence
  ENSG00000254427_24 (sequence is synthesized)
tcatagcagctgggagaaagtagtgtggtatcctgcagtggttctgttcaccaccacatgggcagagcatgagcaactttcctttcctgggccctcgttctgctcagatacaaagtgaag

SEQ ID NO: 964511 - DNA, 120 bp, Artificial Sequence
  ENSG00000254427_25 (sequence is synthesized)
gcttacttgggctcctgtgcaactttaaaagtgaaacttaactgaaattgggcaggtgggctgcacttcttctaaaaagtaagaggcccactttttagaaaatattaaaccttggattac

SEQ ID NO: 964512 - DNA, 120 bp, Artificial Sequence
  ENSG00000254427_26 (sequence is synthesized)
acctcagtttggcagttacatgacacattatttctaaagagccatctaattttatgccatctaatgtttatattgataactgatgaaaatacaggagcttattatgccactgaaactacg

SEQ ID NO: 964513 - DNA, 120 bp, Artificial Sequence
  ENSG00000254427_27 (sequence is synthesized)
atgaagtggctcaaatttattctctcactgtaggttggatttgaggggataaggataagagagaaaatactattggtgctcaggttaaaaaaagaaaaagaaaaaaatggagcttagact

SEQ ID NO: 964514 - DNA, 120 bp, Artificial Sequence
  ENSG00000254427_28 (sequence is synthesized)
ttaatcttttcataaatcttcctcatccccaattgttcagccaaattcagaaggattagctttccatcttccatgaaccttttggttggatcttttgtcaatctttttcccctttgaggc

SEQ ID NO: 964515 - DNA, 120 bp, Artificial Sequence
  ENSG00000254427_29 (sequence is synthesized)
gattcctgggtaggataacgtcatttcgctcaggactgctctcagtaagtgggcctttcctgtcagaagagcctggaacctctctgttcctcagagctgccaacactggccttgttctgt

SEQ ID NO: 964516 - DNA, 120 bp, Artificial Sequence
  ENSG00000254427_30 (sequence is synthesized)
ggtctgatctgctggcgacctctgtccgcacacttctgagactggccaggggccctggcacagtcacactgcacagcccgccaaatcgaaaggtcctttcttttgagcaaatagcatcat

SEQ ID NO: 964517 - DNA, 120 bp, Artificial Sequence
  ENSG00000254427_31 (sequence is synthesized)
tttggaaacaattttgtgaccagagaatggttggagacaaaggtctttctatctgatctgctcaccaggctggcatgggatcgtggggggcctatgtccctctttcctggcaccacatgg

SEQ ID NO: 964518 - DNA, 120 bp, Artificial Sequence
  ENSG00000254427_32 (sequence is synthesized)
attgctatcactgcatttgtctcctctctttgattaggacaagacaggcaggcaggcagagggttgtatttcaactgcccttgactctgtttataatcacaaacatgaaaggaaggggaa

SEQ ID NO: 964519 - DNA, 120 bp, Artificial Sequence
  ENSG00000254427_33 (sequence is synthesized)
gagattgagtttataggactggttctttgtgtagcctaatttatctctctcaggcagcagtgggccgagcgagtttcctttttgtttccaatgcaggaaactgaaatatgaatctatgtt

SEQ ID NO: 964520 - DNA, 120 bp, Artificial Sequence
  ENSG00000254427_34 (sequence is synthesized)
gatgagagaataaaggaattgaaagaggcataaatcttatcttctcgcaaccctagaagatcagcttcttgtgaagaaggggattatacttctgtaattaactgctttgcagctcctggt

SEQ ID NO: 964521 - DNA, 120 bp, Artificial Sequence
  ENSG00000254427_35 (sequence is synthesized)
gatggctcagagctgaataatagcacccagccaagttggataaaaggctgttggatgggcaggtgcggccgctcatcgtgaacaatggtctcagggcttgacatctttttccagtgcccc

SEQ ID NO: 964522 - DNA, 120 bp, Artificial Sequence
  ENSG00000254427_36 (sequence is synthesized)
gtgctcagagagtccaaccaggggatatttgttccctgtctatcaacattcacagcagagaataaaattccagaacaaatagctcaaagagacctgtttcactggaggccagtagctgca

SEQ ID NO: 964523 - DNA, 120 bp, Artificial Sequence
  ENSG00000254427_37 (sequence is synthesized)
atgagctgccttgaaggaccaacccagattctacacctctttgtgttccgaccagtgcccgggacctgttaggggcttatggaacgctggttggcagtgactgcttctcagccgctgtgc

SEQ ID NO: 964524 - DNA, 120 bp, Artificial Sequence
  ENSG00000254427_38 (sequence is synthesized)
tgtctcaggaaagttgcgtgagttctctgatcttcagagttaaccgtccacacaatgcaaggggttcttatggaattcttatgaggaagaaatcagatcatgagtgtaaacaaattactt

SEQ ID NO: 964525 - DNA, 120 bp, Artificial Sequence
  ENSG00000254429_0 (sequence is synthesized)
tgccacaaaagacctttaatggcctcctatttattgttcttttgttcatttgttagagttgaatgaactataataacttgtctgacataataagaatgccacaggtataacagataaacc

SEQ ID NO: 964526 - DNA, 120 bp, Artificial Sequence
  ENSG00000254429_1 (sequence is synthesized)
tggcaggtggtccaggaatgagagtgtcacaaaataatcactcaacacaagggccacagacctggagattcttcccagccatccctcactcctgccccaggacacaacccatgcaggcag

SEQ ID NO: 964527 - DNA, 120 bp, Artificial Sequence
  ENSG00000254429_2 (sequence is synthesized)
tctcactaaagtgtccaggattcctgggggaatcctgccctcaaaggagggacttttgtcataaaatcctccctgagtctgtcttttatgtgagccaagatttccatccatccggcgctg

SEQ ID NO: 964528 - DNA, 120 bp, Artificial Sequence
  ENSG00000254429_3 (sequence is synthesized)
tgtaaagatgaatttaaccctagcctctctcctatcacactgcttctcctgctgtgtcccttgggcctaggccaggaaagtggggtgccagataggggtgcagacacaagtcctcagtgg

SEQ ID NO: 964529 - DNA, 120 bp, Artificial Sequence
  ENSG00000254428_0 (sequence is synthesized)
agagatggggtttcactatgttgttcaggctggtcttaaactcctgggctcaaatgatcctctgtctcagcctccaaaagtgctggaattacagtcatgagccactgcaactgaattgcc

SEQ ID NO: 964530 - DNA, 120 bp, Artificial Sequence
  ENSG00000254428_1 (sequence is synthesized)
tttttttttttaaagagacattcttgctatgctgcccagctggagtgtagtggtgggatcacagctcactgcaggttcaacctcctgggctcaagtgatccctcaggctcaggtgatccc

SEQ ID NO: 964531 - DNA, 120 bp, Artificial Sequence
  ENSG00000254428_2 (sequence is synthesized)
actataggctagcctccagagtaggtaggactatatgcccagctaatccagataccctttttattaaaaatctgaaaatcaggctgggaccagtggctcacacctgtaattgcagcactt

SEQ ID NO: 964532 - DNA, 120 bp, Artificial Sequence
  ENSG00000280989_0 (sequence is synthesized)
aggtatgaccaccatctgggaggaagctttaccccttcccttatcctgtgacccaacaaatacctttgtcagagcagaactggaaatatcgacaaacagcactgaaggctcctggtctac

SEQ ID NO: 964533 - DNA, 120 bp, Artificial Sequence
  ENSG00000280989_1 (sequence is synthesized)
cacaggaggtgatctctagtgaagaaggttgagatttgcatgcagaatttccagaatgctgaatatcagcacggatcactgcaaagaagttggaactcatctcacatgaacttctcaggt

SEQ ID NO: 964534 - DNA, 120 bp, Artificial Sequence
  ENSG00000280989_2 (sequence is synthesized)
tctcttacaagaccaccaacattcttcaaacatcagtgaaataaaacaggaggagggtttcgagctctggatcctcagcctggaaatgtcacaatttaatcccaaaggtttgctgtgaag

SEQ ID NO: 964535 - DNA, 120 bp, Artificial Sequence
  ENSG00000280989_3 (sequence is synthesized)
tattcttgaattctttgtttgttttcgttgtgacccgactctcataaaatttatgttttcttccaaacccccagggtgtgtggtcatatgacttaaatagagaaaaacattgtcaaaaca

SEQ ID NO: 964536 - DNA, 120 bp, Artificial Sequence
  ENSG00000280989_4 (sequence is synthesized)
gtattgaggagttatcacttttacattgttttaattaaagaaaaagcctttctatccaggtctaataccatcatttttatgggcatgttaaagtatctaatctaatactgtagttagtag

SEQ ID NO: 964537 - DNA, 120 bp, Artificial Sequence
  ENSG00000280989_5 (sequence is synthesized)
tagtatttagtatttttagtattattatagttttatctgtatcttaaagaaaaagtcaataaatatgaaaacagagtttgttttgggaatgtatgcaagtgccctccatgttaaaatcat

SEQ ID NO: 964538 - DNA, 79 bp, Artificial Sequence
  ENSG00000280989_6 (sequence is synthesized)
ttcaattttgtgtgcatggatcagtgaatatcctattcacaaatgttacaaggattatctcagggtggtgggatgaaga

SEQ ID NO: 964539 - DNA, 68 bp, Artificial Sequence
  ENSG00000280989_7 (sequence is synthesized)
tgggcttgagctactgtgcccagccgtgcctgcctctttagacacatcaaaatccgcctctgtgattt

SEQ ID NO: 964540 - DNA, 120 bp, Artificial Sequence
  ENSG00000280989_8 (sequence is synthesized)
cctgcctctttagacacatcaaaatccgcctctgtgatttttgcttatggccatatagaggcaatttgaggttcaccaaccacaagggaagtagctccctgccttcatgaggctctgata

SEQ ID NO: 964541 - DNA, 120 bp, Artificial Sequence
  ENSG00000280989_9 (sequence is synthesized)
gccttcatgaggctctgatacactataaaccttccattcagaacctgtgatggagtcgagtgtgtagccctagctacttgggaggtcaagggaagaggatcacttgagcccaggagtttg

SEQ ID NO: 964542 - DNA, 120 bp, Artificial Sequence
  ENSG00000229209_0 (sequence is synthesized)
tgaggagagaagaaaaggaactagcaaggggagctcttgatgggtaccaaggcataaaaaaaaggctctcagccatcctcatactgaaacctaaactcctggtacctggacccacgttgt

SEQ ID NO: 964543 - DNA, 120 bp, Artificial Sequence
  ENSG00000229209_1 (sequence is synthesized)
cctcagtctctccttccagtcacctggcttggattctgttcaacatgagggcttgctgtttcctgcatggcctggcctggccccatggttttgtggatctgctgcctaatttgtgaaagt

SEQ ID NO: 964544 - DNA, 84 bp, Artificial Sequence
  ENSG00000229209_2 (sequence is synthesized)
gtttacacaacctttctacgtgaagaatattgcaactttaaaaacagcatgaaaaattttgttacattaggatgcaaaaatgga

SEQ ID NO: 964545 - DNA, 78 bp, Artificial Sequence
  ENSG00000229209_3 (sequence is synthesized)
gcctgattgagtatcccaacacctaacacacacatgtgcacatgcacacacacacccatggcaagtgagagagagaga

SEQ ID NO: 964546 - DNA, 120 bp, Artificial Sequence
  ENSG00000229209_4 (sequence is synthesized)
cacatgcacacacacacccatggcaagtgagagagagagaaccatttaacaatgactgaagattaattggtctcaggaatttaaaataacttctgtacagccattagctggctactgaaa

SEQ ID NO: 964547 - DNA, 120 bp, Artificial Sequence
  ENSG00000229206_0 (sequence is synthesized)
catgtctcttacaatgctcctgccttccagcctcagaaattgctctatgaaatacaatcaagaaaaagcaatttatgtggaagagcacagaacaagtagaagattgctgggtcatagcta

SEQ ID NO: 964548 - DNA, 120 bp, Artificial Sequence
  ENSG00000229206_1 (sequence is synthesized)
tttacaccaaaaaatcctcaagagacttgcaggcaacctcaggctttggaaacgaggaacagaggtgcaacctcaggctttggagatgaggaacagaagtgggacctcgggctttggaga

SEQ ID NO: 964549 - DNA, 120 bp, Artificial Sequence
  ENSG00000229206_2 (sequence is synthesized)
cgaggaacagaggtgcatcctcaggctttggaaatgagaaacacaggtgcaacctcagattttggaaatgagaaacagaggtacattttcgagttttcagtaccaccaccttttagaacc

SEQ ID NO: 964550 - DNA, 120 bp, Artificial Sequence
  ENSG00000229205_0 (sequence is synthesized)
acaggcctgagcgtcgcacgctttgcgtagatgagggatggcgccggcgcaggcctgcgcgccacgcgctttaggtggatgagggatggcgcaggtgcaggcctgcgcgcctcacgcttt

SEQ ID NO: 964551 - DNA, 120 bp, Artificial Sequence
  ENSG00000229205_1 (sequence is synthesized)
atgtacatgagggatgaggcagcacaggaattggcacaacctgaagtcagctctgcagctttccaagcttcgttctgcgtgtcctgtactcaacagtcatctcatgctgcagggtggctg

SEQ ID NO: 964552 - DNA, 120 bp, Artificial Sequence
  ENSG00000229205_2 (sequence is synthesized)
gtagggacggttcccggagggtgctcagcaccatgccgactactgctggctggcacgttcgcacgtggccatgtcagctccaaggaggatgctgacatcctgctggctggcacgttcgca

SEQ ID NO: 964553 - DNA, 120 bp, Artificial Sequence
  ENSG00000229205_3 (sequence is synthesized)
cgtgtccatgttagctgcgagggccatgccgacatcctgctggctggcacttccacaggtagccatgttagctgagagggcgatgccaacatcttgctggctggcacgtttgcacgcggc

SEQ ID NO: 964554 - DNA, 120 bp, Artificial Sequence
  ENSG00000229205_4 (sequence is synthesized)
catgttagctgcgaggacaatgcttctgcaacttttggtttcttccctttcatcctcccacccctgaccgtttttgcctgggagcaagtgcctaataaattacctgcactcaaatctttg

SEQ ID NO: 964555 - DNA, 120 bp, Artificial Sequence
  ENSG00000229205_5 (sequence is synthesized)
cccctctgacagatccctccacggaaaggctccggcacctcaacctcactctggctgcattggaaactcttctgtcgctatcggccttctctgaagagctttaatctctccttccatgga

SEQ ID NO: 964556 - DNA, 120 bp, Artificial Sequence
  ENSG00000229205_6 (sequence is synthesized)
gtctcctgtggacttaatacacgaatccatacacttgtactaatgggtagcatggaattaatgtgtggctttctccagatgtggatgttgatatttcagtaaagtctgagttgtttctgg

SEQ ID NO: 964557 - DNA, 120 bp, Artificial Sequence
  ENSG00000229205_7 (sequence is synthesized)
cagagtgtctgcctggatctcggatggtcgtaagccacagagcacctgtcactgaggaccttcattccacagcatgtctgcctggatgtcggatggtcggaggacacacagcgcctgtca

SEQ ID NO: 964558 - DNA, 120 bp, Artificial Sequence
  ENSG00000229205_8 (sequence is synthesized)
ccgaggaccttcattccacagcgtgtctgcctggatctcggatggtgggaggacacacagcgcctgtcactgaggaccttcattccacagcgtgtctgcctggatctcggatggtgggag

SEQ ID NO: 964559 - DNA, 120 bp, Artificial Sequence
  ENSG00000229205_9 (sequence is synthesized)
gacacacagcgcctgtcactgaggacccttcattccacagcgtgtctgcctggatctcggatggtgggaggacacacagcgcctgtcaccgaggaccttcattccacagattccacagtg

SEQ ID NO: 964560 - DNA, 120 bp, Artificial Sequence
  ENSG00000229205_10 (sequence is synthesized)
tgtctccctggatcttggatggtggctcttcagagtcaatcttttccttgatgttcaccgataagtcagagaatggcaacaaatcctgggaaaggagattttttgtaactgagcttttcc

SEQ ID NO: 964561 - DNA, 62 bp, Artificial Sequence
  ENSG00000229205_11 (sequence is synthesized)
gtttgttttgtttttttttcaatagagacatggttttgccattaagtgctgggattacaagt

SEQ ID NO: 964562 - DNA, 120 bp, Artificial Sequence
  ENSG00000229205_12 (sequence is synthesized)
tctcactctgtcacccaggctggagtatggtggtgcaagtggtgcagccatagctcaccgcagcctaattattttgtattttttcatagaggcagagtcttcctatgttgcccaggctgg

SEQ ID NO: 964563 - DNA, 120 bp, Artificial Sequence
  ENSG00000229205_13 (sequence is synthesized)
tctcgaactcctgggctcaagccatccactgaacttggcctcccaccgtgctggaaccacaggtgtgagtcaccgtgtccggccaaggctgacatttttgaggagcggttgagggatttg

SEQ ID NO: 964564 - DNA, 120 bp, Artificial Sequence
  ENSG00000229205_14 (sequence is synthesized)
ttgagggatttggcttcttcccttgactctgagaccagaggacagaccaaaggctgggaggaaattcagcagtgtggccctcctcgggacgtaagatgcccgttctcagatttggagatg

SEQ ID NO: 964565 - DNA, 120 bp, Artificial Sequence
  ENSG00000229205_15 (sequence is synthesized)
ccagaaaacaaggcccaggaaaggaccccgtgcagggcccagggctccgggtactgtggtcccagtgggcctgttaattctcagactgttagtgcgtcttaaaatgtcttataaagcagg

SEQ ID NO: 964566 - DNA, 120 bp, Artificial Sequence
  ENSG00000229205_16 (sequence is synthesized)
gaaaggtacatttccgccatctgtaacaaagcaccttcgtgaaataagccacgagttaaaaagtaaaattgggattcctggaagagacgcctccgtgttagaggccgtcagagcacgggc

SEQ ID NO: 964567 - DNA, 120 bp, Artificial Sequence
  ENSG00000229205_17 (sequence is synthesized)
tttgaacaaaacttccggaacgtatgtgagtggctgtgatgctgcaggaccgtcggaagacaaataacttctctatctggttcctacctaataacctttacaataaagaggaaatcaacc

SEQ ID NO: 964568 - DNA, 120 bp, Artificial Sequence
  ENSG00000229205_18 (sequence is synthesized)
ggggtggcttcctagaggtgtggcgttgccctctgtcttgaacaggctgtgagccgttttgtcatttggggtttctagatgcaaacagcagaagctgctggccaattaccaaagggaacg

SEQ ID NO: 964569 - DNA, 120 bp, Artificial Sequence
  ENSG00000229205_19 (sequence is synthesized)
tgctgttaggatatcagggcctgggagctgcagcaatgtgggctgacagcagagagctaaggcactttccgaggtgacgagctgggctgctatgctggagacggctgggcagaagcagtt

SEQ ID NO: 964570 - DNA, 120 bp, Artificial Sequence
  ENSG00000229205_20 (sequence is synthesized)
agcagggcatttccttgtgtccttatctcaagagtcacagtttcaggagtgagcatctcagaggtcagggttcattcacatgccacctcccttctcactgtgtcattggggaggggccgt

SEQ ID NO: 964571 - DNA, 120 bp, Artificial Sequence
  ENSG00000229205_21 (sequence is synthesized)
ctggaccctctggctcctgtggcaagaaatggtcccatcaagtcatccaagggcctggaagcctcccaaggaaagcaggagggctgggtgctgagcagcgtccagcagcaaaggtaggct

SEQ ID NO: 964572 - DNA, 120 bp, Artificial Sequence
  ENSG00000229205_22 (sequence is synthesized)
ccagccccgcaggtgtggctgcgccatcccagggaacgtgccccagcaagtgctggtgctgctctcactacaggtggggttggtttcactggacaggtggcacttcctcacctcttgccc

SEQ ID NO: 964573 - DNA, 120 bp, Artificial Sequence
  ENSG00000229205_23 (sequence is synthesized)
tctggacccacggcaggcactttccagggcacatcacgtgggtgtgcggtctggctgctgggtccacgcgggttctcaatcatgacctggcttgcaagctctttccacagttggataaat

SEQ ID NO: 964574 - DNA, 120 bp, Artificial Sequence
  ENSG00000229205_24 (sequence is synthesized)
gaagccgttggggaagtatccgcaaactcttacagtgagtatgtgataatgacacacgcgtggcccttctaagacctccgctaggcattatcagtgactgtgctcgtgagcgctgacctc

SEQ ID NO: 964575 - DNA, 120 bp, Artificial Sequence
  ENSG00000229205_25 (sequence is synthesized)
cgctaggcgttatcagggactgtgctcgtgagcgccgacctccgctaggcgttatcagggactgtgctcgtgagcgcggacctccgctaggcgatatcagggactgtgctcatgagggcg

SEQ ID NO: 964576 - DNA, 120 bp, Artificial Sequence
  ENSG00000229205_26 (sequence is synthesized)
gtgtgttccacacacaggaccaaagttgagataggcgcacattttcttggtcccacttgtggccccagtcggctgtcagaagtgggtgtgctccacatgtacccaccatgtcagggcaca

SEQ ID NO: 964577 - DNA, 120 bp, Artificial Sequence
  ENSG00000229205_27 (sequence is synthesized)
gtgctcacatttcacacctcagcaggtgccttgatgttgaccagaggccccaaaatcatctctttctatgacttctagatcttagattcccaggaactgggaaatgcagtcagtatcttt

SEQ ID NO: 964578 - DNA, 120 bp, Artificial Sequence
  ENSG00000229205_28 (sequence is synthesized)
tgggtccaagaaactttgtcagagcccttgtgggagaaccatagattctcaccagataaacagaagagcttcgtgttagagaaacccgcctgtctccccacattctcagttttctggaga

SEQ ID NO: 964579 - DNA, 120 bp, Artificial Sequence
  ENSG00000229205_29 (sequence is synthesized)
gcagctgaaagccatctgggtggagattaagagctccaaccgtgtagctttgatgtatcgggcaagttgcttaagctctttaatgctgtttcctcatttattgtgtgaggccaaaaatac

SEQ ID NO: 964580 - DNA, 120 bp, Artificial Sequence
  ENSG00000229205_30 (sequence is synthesized)
ccattccttaaagttgtgaggattaaaaacagtaatgaaaagtgagtggcaagtgccgagtacacagtcaagtacctgatactttttagtgtaaggtaagtagcaagaaagcatgaaatt

SEQ ID NO: 964581 - DNA, 120 bp, Artificial Sequence
  ENSG00000229205_31 (sequence is synthesized)
tattttcatttactcttactacatgtggtaaaccatctatgcacagagcactgcattgggtgccatgaatgacagaataagagtaccaggtgcatgaaaagcttaaaagacaaatgagac

SEQ ID NO: 964582 - DNA, 120 bp, Artificial Sequence
  ENSG00000229205_32 (sequence is synthesized)
agagctaggctgcagaagacttaaaaagttgatgtatttaacttttaatggacacactgtacatgtttatggggtacgatttgttgtttccatgcatatctgtgttgtgtaatgatccaa

SEQ ID NO: 964583 - DNA, 120 bp, Artificial Sequence
  ENSG00000229205_33 (sequence is synthesized)
tcagggtagtgtgtgtgcccatttcctcaagggtggatcattatgtgtatcatcgtgcatcatcatgtatcatgcatgtaccatcatcatgcatcattgtgcatcatcatgcctgtatca

SEQ ID NO: 964584 - DNA, 120 bp, Artificial Sequence
  ENSG00000229205_34 (sequence is synthesized)
ttatgtatcacctcatgcatatattataatgtatcacctcatgcgtgtattatcatgtatcaccatgcatgtattgtgcatgtgccatcatcatgcatcattgtgcatcatcatgcctgt

SEQ ID NO: 964585 - DNA, 120 bp, Artificial Sequence
  ENSG00000229205_35 (sequence is synthesized)
atcattaatcacctcatgcatatattataatgtgtcacctcatgcgtgttttatcatgtatcaccatgcatgtattgtgcatgtaccatcatcatgcatcattgtgcatcatcatgtctg

SEQ ID NO: 964586 - DNA, 120 bp, Artificial Sequence
  ENSG00000229205_36 (sequence is synthesized)
tatcattaatcacctcatgcatatattataatgtgtcacctcatgcgtgtattatcatgtatcaccatgcatgtattgtgcatgtaccatcatcatgcatcattaggcatcattgtgcat

SEQ ID NO: 964587 - DNA, 120 bp, Artificial Sequence
  ENSG00000229205_37 (sequence is synthesized)
gtatcatcacctcatgcatgtattatgtatcacctcatgcatgtatcatgcatgtaccatcatcatgtatcattatgcatcattgtgcatgtatcactgtgtatcatgcatgtgtcatca

SEQ ID NO: 964588 - DNA, 120 bp, Artificial Sequence
  ENSG00000229205_38 (sequence is synthesized)
ccgtacatcacacccatatttcagatgaacaagccaaggctgaggaaaagaaaactccttgcccagcacacaggcagtaagttgtgggtctggaagtcacactagttccatgaggcccca

SEQ ID NO: 964589 - DNA, 120 bp, Artificial Sequence
  ENSG00000229205_39 (sequence is synthesized)
caatgcgtgctgcctctgagacgctgaggagagagaagagatgccttggtcacagctcccaccctcagatgagatgagcctgcaggtaggaggcctgccatggcaaatgctgcctcttag

SEQ ID NO: 964590 - DNA, 120 bp, Artificial Sequence
  ENSG00000229205_40 (sequence is synthesized)
atgaattggggtaggagaatgacccccaaactcctggagcaggcaggcagccacctgcatcaagaccacggggtacttctgtgggtcttaagccctttccccactccctgaataggggtt

SEQ ID NO: 964591 - DNA, 120 bp, Artificial Sequence
  ENSG00000229205_41 (sequence is synthesized)
ggcactctgacatgtgacgcggttgtctaaacgctggtgtaagccaaaaataaaattctaaggccccccaaccatccaaatggacccctcttctcagccaagggcattccagagttaacc

SEQ ID NO: 964592 - DNA, 120 bp, Artificial Sequence
  ENSG00000229205_42 (sequence is synthesized)
tgaaaaactggttcagacatgatggaagagggggtcggacatgcctcatgatacctccctccattgtggaattcaggaaaagccaaccagccttaacatcaacaaagacctgagtccgat

SEQ ID NO: 964593 - DNA, 120 bp, Artificial Sequence
  ENSG00000229205_43 (sequence is synthesized)
gagaaacagtgaccatctgttccctccaaagcctgctacccagagatctgcatggtcaaaccctggtctccacaccccttatcctaacccagaccttcctttctactgatcataactctt

SEQ ID NO: 964594 - DNA, 120 bp, Artificial Sequence
  ENSG00000229205_44 (sequence is synthesized)
tcaaccaattgccaatcagaaaaatgttatgacctggaagccgctgctttgagttgtcccgtctttccagactgaaccaatgtcaatcctacacgtattgaatgatgcctcaattctctc

SEQ ID NO: 964595 - DNA, 120 bp, Artificial Sequence
  ENSG00000229205_45 (sequence is synthesized)
taaaatgtataaaaccaagctgtgctccgaccacactgggcacatggcgtcaggacctcctgaggctgtgtcacaggtgtgtccttaacctcggcaaaataaactttctaaattggttga

SEQ ID NO: 964596 - DNA, 120 bp, Artificial Sequence
  ENSG00000229203_0 (sequence is synthesized)
ggagacgcagcagtgccagggacaaggaggagtcgacctgggggtagcacagcccaccggggcacagctggagcagcacccaggtgcttctgactccggcatggaggaagcgcccgcttt

SEQ ID NO: 964597 - DNA, 120 bp, Artificial Sequence
  ENSG00000229203_1 (sequence is synthesized)
ctcggcccaggcccgcagccagggctgctccgcccgctgcgccccagggcaaaagccccgcaaggcagtgtgagctggagccgccagcctgaggacctcttttaagatgacccgtacgga

SEQ ID NO: 964598 - DNA, 120 bp, Artificial Sequence
  ENSG00000229203_2 (sequence is synthesized)
gagcgatccgtggcccggcctgctgagcccgcgcctttcaacaagcgccactgccccagcttcgacttcctggaggcgctggaccggccgaccacggagaccctgccggagccaccgccc

SEQ ID NO: 964599 - DNA, 80 bp, Artificial Sequence
  ENSG00000229203_3 (sequence is synthesized)
cgaccacggagaccctgccggagccaccgcccccggagcccgctgtgccgcgcgcccggacccgcgaggccgagccacgc

SEQ ID NO: 964600 - DNA, 120 bp, Artificial Sequence
  ENSG00000229201_0 (sequence is synthesized)
tgaactaataaatgattaagaatggaggctacagctgtacacagatcagaattgtaaaaaatgagcttcgtgcttgctagagtggactagatgagatatatcttattgttatttggaagg

SEQ ID NO: 964601 - DNA, 120 bp, Artificial Sequence
  ENSG00000227338_0 (sequence is synthesized)
ttcctgtccagatgaactcactcctgatgcactggccatcttgttttctgaaaacttctttctctttggtcctattttagactcagagcagtttgggaggcaactggttttatttgcaca

SEQ ID NO: 964602 - DNA, 120 bp, Artificial Sequence
  ENSG00000227338_1 (sequence is synthesized)
gttatcacctgttccaatgaagaagaaacacaaagatgtgcttctgtgatttgaaagtttatccaggattcaggctttttaggagtctatgagggtattgcttggctgaaattctccaca

SEQ ID NO: 964603 - DNA, 120 bp, Artificial Sequence
  ENSG00000227338_2 (sequence is synthesized)
ttgccactggttacttattatcgtttcatccacatcagtgcttctcaaactgctgagcattagtgtcacctggggagctttaaaacattctgaagcccagcccataccccagaccggtta

SEQ ID NO: 964604 - DNA, 120 bp, Artificial Sequence
  ENSG00000227338_3 (sequence is synthesized)
gatcacaagtggagaagctggggccccagcattggcagttgttaaagctccctgggtggacccaccgtgcggaaggtgggagaagcagcaaacgcaattcttagtctctaagtgtggtcc

SEQ ID NO: 964605 - DNA, 120 bp, Artificial Sequence
  ENSG00000227338_4 (sequence is synthesized)
ccaggccggcagcagtgagagtttgttggaaacacagactctcaggagctactgaatcggaatgttgtgtcttccacaagctcccaggccgtgtgcttcggtgccaggaagatcaggctg

SEQ ID NO: 964606 - DNA, 90 bp, Artificial Sequence
  ENSG00000227338_5 (sequence is synthesized)
gatgaagggtctggcctcccgtccttatgcgccaggacaacaggactgagccaccgcaccatccaagtctcttgctttttaatagctttc

SEQ ID NO: 964607 - DNA, 120 bp, Artificial Sequence
  ENSG00000227338_6 (sequence is synthesized)
ccaccgcaccatccaagtctcttgctttttaatagctttcttatttttcttttattcatccaggggttactttgtgaatttaaataattcacttaaaataacattttgaaatttatcaac

SEQ ID NO: 964608 - DNA, 120 bp, Artificial Sequence
  ENSG00000227338_7 (sequence is synthesized)
tttatctactgttgtatgagatatgaggaacttagcaaatggactcattcttcattttcttcttcctctctctcctgatttttccaagttatgttattatttttaaatttccaaagcttg

SEQ ID NO: 964609 - DNA, 120 bp, Artificial Sequence
  ENSG00000227338_8 (sequence is synthesized)
tgtcatttagattgttctataaatataattaagcaatcagtggttgtctaagtgtggtttcttcttaaaatgtatactcaataaatacatttccagtatcatgaatatataaatactttt

SEQ ID NO: 964610 - DNA, 120 bp, Artificial Sequence
  ENSG00000227338_9 (sequence is synthesized)
cactctaggaaaaataataaaaaaaaggtcttgatgtcctaagccattaggttctaaaatgtgtctttttgttcatgtatattgttataaaagtgaataaatgggatttttgataccatg

SEQ ID NO: 964611 - DNA, 120 bp, Artificial Sequence
  ENSG00000227330_0 (sequence is synthesized)
actcacacatctgcaattgtctggctattgcctgcagctggctgctttgtgttggccttgcctgtatgactggaacaactggggttcctcttcttccaggtttaattcatgaaatcctgc

SEQ ID NO: 964612 - DNA, 120 bp, Artificial Sequence
  ENSG00000227330_1 (sequence is synthesized)
ggagaatggagaccctccacgctaatacaaatatattccacttctattagaccacccaggccatggcattaactccatgacatgaagaaaatgcaggaggatgatactcaatacaacagg

SEQ ID NO: 964613 - DNA, 120 bp, Artificial Sequence
  ENSG00000227330_2 (sequence is synthesized)
acttctaaagactggcgaaatgcttcatgatatcatcaaagaatgagatgtaattaaatcaagaatctcaagatgaaatcattctggattatccaagtgtgtcctatatccaaagaaaaa

SEQ ID NO: 964614 - DNA, 120 bp, Artificial Sequence
  ENSG00000227336_0 (sequence is synthesized)
ccagagttacagcatagtgaaacttcaagaactaggtttttctggaccatcccagtgcgcatgaatcagatttaaaaagaaagaaacatacaagaaatacataaatcatactatatgacg

SEQ ID NO: 964615 - DNA, 120 bp, Artificial Sequence
  ENSG00000227336_1 (sequence is synthesized)
aatttccatctcttgcatcagcacttgacagctggagttattgttgaccaggcatcaagaaaggagggatatgcatcagaaatcattttgcctgaaataagcacaactccatggaggaca

SEQ ID NO: 964616 - DNA, 120 bp, Artificial Sequence
  ENSG00000227336_2 (sequence is synthesized)
atgacacattttctctggtgatcttgtaattggggatgatgtaaacatgagtctaatctgcattttgtctaagaaattcttcatcatgagcatcttccaataaaacgtggttccttacaa

SEQ ID NO: 964617 - DNA, 120 bp, Artificial Sequence
  ENSG00000277602_0 (sequence is synthesized)
cgggtcggtgggggtagaccggcggatgtggcatcgctggtggcctggctctttgataccagtataaaaaggcatttgtagccagcgtttactcctgcttttcggcgttctgggatgtgg

SEQ ID NO: 964618 - DNA, 120 bp, Artificial Sequence
  ENSG00000277602_1 (sequence is synthesized)
gtaccagctgtcgggtgcggtccgtgcgtagagccgtcaacctgaccctgcccctgggctcgcagtgtggctcttgataaataacgtaggtaaatgaataaaccgggtaatctcaaaggc

SEQ ID NO: 964619 - DNA, 120 bp, Artificial Sequence
  ENSG00000287458_0 (sequence is synthesized)
ttccacataaacaatcttctaatactcacatgaaaagacagatggattttcaagatgtactattaagtgaatggttgagcattcctaattggaaaaatccgaaatccaagatgctccaaa

SEQ ID NO: 964620 - DNA, 120 bp, Artificial Sequence
  ENSG00000287458_1 (sequence is synthesized)
ctctgaaactttttgaattctaacatgatgccacaagtgaaaaactccacacctaatacttgttttctaatgattcaaggtacacaaattttatttaatgcacaaaattattaaaaatac

SEQ ID NO: 964621 - DNA, 120 bp, Artificial Sequence
  ENSG00000287458_2 (sequence is synthesized)
tgtatactacactgtttttgtttaacttgtggacaaagacttatggttaggtgcaaaaaataaatcctcttttgcaacccagaactcattgttcagtatgagttttgatacatataagaa

SEQ ID NO: 964622 - DNA, 82 bp, Artificial Sequence
  ENSG00000287458_3 (sequence is synthesized)
tatcaatgacaatggtgcccgaaactttattagcaattttaatttcgcctcttttgtgatattctattaccctgttaagtac

SEQ ID NO: 964623 - DNA, 120 bp, Artificial Sequence
  ENSG00000287459_0 (sequence is synthesized)
gggacacagcctctgagtaccaggagctgcagagggaaagggagggacagacggaggtgagaacattacatgaaagagagcatttctctgagctaagtgaagacccgagccggccaagcg

SEQ ID NO: 964624 - DNA, 120 bp, Artificial Sequence
  ENSG00000287459_1 (sequence is synthesized)
aggggcccaccggctgcaggctgggaacctggcgccacgaaaactgacacgagctctgctaatgatggaggtgttgcctgagtcatccaagccaacctgctgtttcctagacatgaaatt

SEQ ID NO: 964625 - DNA, 120 bp, Artificial Sequence
  ENSG00000287459_2 (sequence is synthesized)
gccgggttgcaggacaatgaagcattttgaataagcgctgccaaactacttccaaaaagagctgctgacttctactacagtacgggcattcctgtcttccccatcccgctaggcaggctg

SEQ ID NO: 964626 - DNA, 120 bp, Artificial Sequence
  ENSG00000287459_3 (sequence is synthesized)
ctgcacctggctctgcactacgagcgtcatcctcacggcttttccaggcatcctgtgggcgatttatctgagtgtcaacaaatggaaagagggttctgtgtgagttcctgtcctatagca

SEQ ID NO: 964627 - DNA, 120 bp, Artificial Sequence
  ENSG00000287459_4 (sequence is synthesized)
tggagtgtcatgttaaaggacactttttgtgccgttgtctaaatacaaatggctgcaggcattgaactaatggactttggacagagtcaagcaactccatagtgagggacgaggaggcga

SEQ ID NO: 964628 - DNA, 120 bp, Artificial Sequence
  ENSG00000287459_5 (sequence is synthesized)
cttcccccacctggttctcgccctcctgtcagtccttgctggccagggcccagtccatcgcattctgctcacccacctaacctccgcagctgggcggcctttcatcctgcttgattgaat

SEQ ID NO: 964629 - DNA, 120 bp, Artificial Sequence
  ENSG00000287456_0 (sequence is synthesized)
attcacctcagttcatctcaccaagtaagcattttatcatctcattatcaccacaaagctcctgaaaagatacagggttgaaagaagcaagcaatttcagctgctgcccaacacaggaga

SEQ ID NO: 964630 - DNA, 120 bp, Artificial Sequence
  ENSG00000287456_1 (sequence is synthesized)
aaaagtttggagcccagctaagttaagtacccttaataccaaaagtcaatattctttcagaggaagataacagaattcagtctttacaccatagctcccaaaatgcacagtgtatgagtc

SEQ ID NO: 964631 - DNA, 120 bp, Artificial Sequence
  ENSG00000287456_2 (sequence is synthesized)
aaacttactagatccgtaatgaaacggggaaatgtaaccactagtaaagagaagaaacagtcaactgaaaccaaacccacagtaacccaaatttagaataatcagaagactattataaac

SEQ ID NO: 964632 - DNA, 120 bp, Artificial Sequence
  ENSG00000287456_3 (sequence is synthesized)
tttttaaaacatgtttaaggatttaagagaaaatatggtcataataaatgaacacacaggtaatctaagcagagaataaaacaagggaacaacatggaaaatccagaactaaaaagtata

SEQ ID NO: 964633 - DNA, 120 bp, Artificial Sequence
  ENSG00000287456_4 (sequence is synthesized)
tccaatctgcaggaagaaaaaaaaagaaaaaagaaactgcacctcagtgacctcttggacaatatcaagaagtctaatgtgaaactggaagaaaaggagaatgggacaggaaaaaagtga

SEQ ID NO: 964634 - DNA, 120 bp, Artificial Sequence
  ENSG00000287456_5 (sequence is synthesized)
tgaaagaaaaatatatcaagccaagattctatatccagtgaaaatatacttcaaaagaaggacagaataaagatatttgcagaataatggaaacaatattcatcactagcagacctgtgc

SEQ ID NO: 964635 - DNA, 120 bp, Artificial Sequence
  ENSG00000287456_6 (sequence is synthesized)
taagagaaatgctacagaaagttcttcaggctcaagggatgtaacgtggaaatctgaatctaaagtagtaaatgtcaagaaggggcagttttgtcccacaggggacatcaggaaatgtct

SEQ ID NO: 964636 - DNA, 120 bp, Artificial Sequence
  ENSG00000287456_7 (sequence is synthesized)
ggaggcatttttgtttgtcacaaatggaggttgctactggcacctgaatgctactggataaacatcctgttaaacatccgaccaagcacaggacagcctcccataacaacaacaaaaaaa

SEQ ID NO: 964637 - DNA, 120 bp, Artificial Sequence
  ENSG00000287457_0 (sequence is synthesized)
aatagccattactttaataaattcaaacaataaacatactgagaggcattttgtcaagaatgtacccaactgttgccttctcaaggagggcagcacctgttacaccttgtgaatttctct

SEQ ID NO: 964638 - DNA, 120 bp, Artificial Sequence
  ENSG00000287457_1 (sequence is synthesized)
ttctggtcattctcttcatggcccctccctcttcctaccttcactatactgtgaccctggagatgacaccctagttgcgggatgagaattgtcaacatcagagcatgtgtgtttcctgca

SEQ ID NO: 964639 - DNA, 120 bp, Artificial Sequence
  ENSG00000287457_2 (sequence is synthesized)
cttggaatctcctctgttagaagctctcttggcaaaaccgactgatctactaaaaagcctgctgctgtggccttgcctctctttagtttcctctgccctctcttctccaggccgaattaa

SEQ ID NO: 964640 - DNA, 120 bp, Artificial Sequence
  ENSG00000287457_3 (sequence is synthesized)
ttgtcagagttgcaatgtatattaatttaagcttgaattatacatatttttttcctattgtaggtagttgtttgtggttttgagcctgtttctcctgctgatcattgagaaccctgagag

SEQ ID NO: 964641 - DNA, 120 bp, Artificial Sequence
  ENSG00000287457_4 (sequence is synthesized)
tgacactctagcctccgggctcatcacagcagccaagtggtcacctgcaggaagtggaatcctagattctggggagagagatgcagcttcactccaacttgcttgggaagggacaacatc

SEQ ID NO: 964642 - DNA, 120 bp, Artificial Sequence
  ENSG00000287457_5 (sequence is synthesized)
ctctgtttgttttaataatttaagcaagaaaaaccaaagaacactaggcagtaaccataataagttaaacaaaacaaacaaaaaacacccaatcatagagaaacccaggtaatcctaaag

SEQ ID NO: 964643 - DNA, 120 bp, Artificial Sequence
  ENSG00000287457_6 (sequence is synthesized)
ggagtcggctggaaagtgtaacgaagttcagctaaacgtgtgcctttgttgttccaatccttttacaaggacttcaaatgggagcttgtgtttggaaagagcactggcgtggagtgttgt

SEQ ID NO: 964644 - DNA, 120 bp, Artificial Sequence
  ENSG00000287457_7 (sequence is synthesized)
ttccgaaaggggcagatgtctgtgccgtcctaacctactggtattaaaggcaaaagaagaaaatgctgatgggctgaaagtggaggaggcagtgttagcaaatgcaccaggaccaaggca

SEQ ID NO: 964645 - DNA, 120 bp, Artificial Sequence
  ENSG00000287457_8 (sequence is synthesized)
gattttgtgggatgaacagaattcttgtgggctgagtgttttttgaaaattctctccaagaatgcatacgacttaaatatttctttaccaaaaggggaggaagaatagattggtttgcaa

SEQ ID NO: 964646 - DNA, 120 bp, Artificial Sequence
  ENSG00000287457_9 (sequence is synthesized)
agttgaaaaaaattttttccctctagttccttgttcctctttttacagaggagcagaacaaaccagtggcaaggcaggtacttaaacttttatcttgacagagccaagcaatctttctac

SEQ ID NO: 964647 - DNA, 120 bp, Artificial Sequence
  ENSG00000287457_10 (sequence is synthesized)
gtaaatcaaacatgaatcctctcaaagttatagctttgctgagaaggaacacaggggcagagcaaatatccagactcacagtcgtagaagcagcaagaacctttgccttattccctgcaa

SEQ ID NO: 964648 - DNA, 120 bp, Artificial Sequence
  ENSG00000287454_0 (sequence is synthesized)
atcctggctttgtcaccagttgacttggaaactcccctcccctcgaagatcctcacttgctaaaggaggggtaggtagggcaagacgctttcttggatcctctcttgagtgactttccaa

SEQ ID NO: 964649 - DNA, 120 bp, Artificial Sequence
  ENSG00000287454_1 (sequence is synthesized)
ggtgacagactcccttctgtgccatggagaaggatgcttgtttcctactcattcctactacacttgattggtgctgccacgccctcggctctgcaggatgcaggaaatgctcaaatccca

SEQ ID NO: 964650 - DNA, 120 bp, Artificial Sequence
  ENSG00000287454_2 (sequence is synthesized)
gaagcaggaacgctcatgctggcaaacgcagactcggtgtgggcttgggcaacagcctgacgtaagtggatctggcaaggccgcaagagctttggcagccgagcccctggcgcagaagca

SEQ ID NO: 964651 - DNA, 120 bp, Artificial Sequence
  ENSG00000287454_3 (sequence is synthesized)
tcctcatcaacacagtgttgacggcgctcccgggcctctggctcatccctgtttcttagcaactgccctattttgggggaacactgagtgccacagggaagctggcctggaagcacgtgc

SEQ ID NO: 964652 - DNA, 120 bp, Artificial Sequence
  ENSG00000287454_4 (sequence is synthesized)
aagacaggcagcaccttcagtcaacacgcagccccctgctcccagcagcctggtcccctgataccagctgccatctcccggcacaatgtgaccagattggaagacctccatgaggcggtt

SEQ ID NO: 964653 - DNA, 120 bp, Artificial Sequence
  ENSG00000287454_5 (sequence is synthesized)
cagccactccacaggtctctaagcagcttccaggacccaagcttgtgagagaggccctggtcatcccctgcgcccccaggcaatagcccattgccatctgttatgcttccaaccatctga

SEQ ID NO: 964654 - DNA, 120 bp, Artificial Sequence
  ENSG00000287454_6 (sequence is synthesized)
atagctgctatggtaggaaagaaagacacttaacaaaacacaccaggccctcaacactcacacccagggccgggcacagagggccccctcgatcgataaaacaccccaaagggagtccag

SEQ ID NO: 964655 - DNA, 120 bp, Artificial Sequence
  ENSG00000287454_7 (sequence is synthesized)
gtcttccctaacattccatgaccaacagaggtgttctagaaagttctgggatatgaatgcctgctggatgtttgttccttctccactttgacaacatcattttatctttgcaaaatttat

SEQ ID NO: 964656 - DNA, 120 bp, Artificial Sequence
  ENSG00000287454_8 (sequence is synthesized)
tttggaggaattaaagaattccaccagggccaggtttcttgggagaggcagttgatctcagatatgtattattaatactaacattttcttgtcgtgattgcacgcccaatttaaaatgaa

SEQ ID NO: 964657 - DNA, 120 bp, Artificial Sequence
  ENSG00000287454_9 (sequence is synthesized)
aatcccttccaattaagtaaagattgttcagtacatcgtgaggctaagccaagaggttgctgtggagacgggaggatttttcatcctatcaccattttcctctcttgatgagaagggagc

SEQ ID NO: 964658 - DNA, 120 bp, Artificial Sequence
  ENSG00000287454_10 (sequence is synthesized)
cagcagagctttcagcctcccccggggttgaatgttcagtgccagcaaggacaaaaggtctgctggacagaagaggatgaggggttgtgaaagcttccaggtctccttctgcaacaacag

SEQ ID NO: 964659 - DNA, 120 bp, Artificial Sequence
  ENSG00000287454_11 (sequence is synthesized)
agagaacccgtgtcttcagcttctcgtgagcaaaagacagttgcccacattatggggataccagagcccatcctttttccctctccacctcatgctgaaggtgtgatagggccaactcgg

SEQ ID NO: 964660 - DNA, 120 bp, Artificial Sequence
  ENSG00000287454_12 (sequence is synthesized)
ccagcagagagaaatagattcatggtacctggccagaaagatcaaggctgtatggttgggtgtaaaatgatccatgccaagaacagtaagaggagacacagatttttatttctaaaatgg

SEQ ID NO: 964661 - DNA, 120 bp, Artificial Sequence
  ENSG00000287454_13 (sequence is synthesized)
aaatctgctcatagcactctcttgcttttttaagagacagagttttgctctttcactctgttgccgaggctggagtgcagtcatatagtaagagctcactgcagcctctacttcctgggc

SEQ ID NO: 964662 - DNA, 120 bp, Artificial Sequence
  ENSG00000287454_14 (sequence is synthesized)
gtgatcctcctgcctcagcctccccagtaagtaggactacaggtgcgcacaaccatgcccagctaattttttgtcatttttgctcatctgttattattagttttttggttcttgggggct

SEQ ID NO: 964663 - DNA, 120 bp, Artificial Sequence
  ENSG00000287454_15 (sequence is synthesized)
tgggggcttttttttgtttgtttttgtagaaacaaggcctcactatattgcccaggctggtctcaaaactcctgggctcaagcaatcttctcatcttggcctcccaaagtactgggatta

SEQ ID NO: 964664 - DNA, 120 bp, Artificial Sequence
  ENSG00000287454_16 (sequence is synthesized)
tgtgagcattccccgccccctcccccatctcctgtttttaactttttttttaatgtatttttatttatttttttttttgagatggagccttgctcagttgcccaggctgcagtgcagtga

SEQ ID NO: 964665 - DNA, 120 bp, Artificial Sequence
  ENSG00000287454_17 (sequence is synthesized)
acagcctgacctgctgagcccctcaggaggaaggaggtatgtttccaaagggatggctggatggctgaggaaaaggcagaggtgaaagaagaggccgtgtcaactggaggtggatgtata

SEQ ID NO: 964666 - DNA, 88 bp, Artificial Sequence
  ENSG00000287454_18 (sequence is synthesized)
ggtgaaagaagaggccgtgtcaactggaggtggatgtataattaaaaaccctaggccaggtgctgtggctcatgcctgcaatcccagc

SEQ ID NO: 964667 - DNA, 120 bp, Artificial Sequence
  ENSG00000287454_19 (sequence is synthesized)
cgcgccactgcactccagtctggccaacaggagtgaaactgtgtctccaaaaaaaagccttattcaagaagtggtgaatgctgtgaatcccagcaggaattcctgcccctcaggcttgac

SEQ ID NO: 964668 - DNA, 120 bp, Artificial Sequence
  ENSG00000287454_20 (sequence is synthesized)
ccataaggtgcctggcagttgtcagggccagtgacagaaatgctctgggcatgggccccgctcttctctactctaagatgaagggtccatctgtctgatgttaaggagtgaaagacttgt

SEQ ID NO: 964669 - DNA, 120 bp, Artificial Sequence
  ENSG00000287454_21 (sequence is synthesized)
tagcttgttaataaataaaatctctgaaaaagatccttactgttacatcaggttataaaactaccttctggaagactcagtttaaacctaaggaaaaaaaaacttatccaaaaattcaca

SEQ ID NO: 964670 - DNA, 120 bp, Artificial Sequence
  ENSG00000287454_22 (sequence is synthesized)
ccatcagaactacagtaacaaacctatctcctagggcttaaaacaagaccaagggaaaaagctgtttgacagagaggaagtgtaaaatgcccaggcctcagttaaatgtcctgtttaggc

SEQ ID NO: 964671 - DNA, 120 bp, Artificial Sequence
  ENSG00000287454_23 (sequence is synthesized)
ctctacggactctggtttctgcccctcacgggctcagccacaggcacctcccatgacctgtgtgtttctcaaatcaacaggggcctttcatccatacccgggttgcaaaacatgccgctc

SEQ ID NO: 964672 - DNA, 120 bp, Artificial Sequence
  ENSG00000287454_24 (sequence is synthesized)
aaagcttaactggggaaagcagttccctggtggagctcggatgcggaaccctggccctccagactttccccacacctgcgtcacgtgcactccgcacaactgtagatgcaggaaggagcc

SEQ ID NO: 964673 - DNA, 120 bp, Artificial Sequence
  ENSG00000287454_25 (sequence is synthesized)
tctgagcacagtgatcagagcctccgatcccagcactgccaatccgggattggcgcccccagggtcgccttttcttcccatttaagtcatctattaaaatcatgtgcacttcgagaccag

SEQ ID NO: 964674 - DNA, 120 bp, Artificial Sequence
  ENSG00000287454_26 (sequence is synthesized)
ggagctgctcaattcccagcaactctgaatccctccaaggcaggactcctcttgggtggacctgtctccaccctggggacttggctcagcgatgtgtctttgattctagtgtcacacctg

SEQ ID NO: 964675 - DNA, 120 bp, Artificial Sequence
  ENSG00000287454_27 (sequence is synthesized)
tcacggagtctagtgtttatacctgctgcagaatctaggtgctgtgcctgtcatggggagcagtttccttttaggatttgctgaatcgaaccatcacttatagagggaaaccaacactct

SEQ ID NO: 964676 - DNA, 120 bp, Artificial Sequence
  ENSG00000287454_28 (sequence is synthesized)
ccttttaagtataattttaaaaatctaaacaaaaagcccagcagtgtctgaaatacagtcatgcatcacttaacgatgaggctacgttctgagaaatgtgtcgctggggaatttcgttgt

SEQ ID NO: 964677 - DNA, 120 bp, Artificial Sequence
  ENSG00000287454_29 (sequence is synthesized)
tgtgcgagcatcatagcatgtacttgcacaaacctggagggtctagcctatcacacaccaaggctatgctatatgctctcaggctacaaacctgtacagcacgttactgtactgaatact

SEQ ID NO: 964678 - DNA, 120 bp, Artificial Sequence
  ENSG00000287454_30 (sequence is synthesized)
gtatgtaggcaactgcaatataatagtaagtatgtatgtatctcaacgtatctaaacgtacaaaaggtacagtaaaaatatggaattatagtcttatgggaccgctgttatatacgtggc

SEQ ID NO: 964679 - DNA, 120 bp, Artificial Sequence
  ENSG00000287454_31 (sequence is synthesized)
ccactgtggaccagaacattatgtggtacatgactgtatatggaggtgttacagagtgaattttgtccttccccaaactatgctgatgtcctaatccccaatacctgtgactaggacctt

SEQ ID NO: 964680 - DNA, 120 bp, Artificial Sequence
  ENSG00000287454_32 (sequence is synthesized)
atttagaaaggggtctttacagacgtaaccaagttaagatgaggtcataatgcattaaggtgggccctaatccaatgaccggtatcctcataagaagaggaaaatcggccaggcacggtg

SEQ ID NO: 964681 - DNA, 120 bp, Artificial Sequence
  ENSG00000287455_0 (sequence is synthesized)
gagttatgtggtagaaagtggcaggctggagttatgcggctcactttctagccagaaggagggagactgaatggaggcacattgaagatgcctgcttcctcttccaccgtgattggacgt

SEQ ID NO: 964682 - DNA, 120 bp, Artificial Sequence
  ENSG00000287455_1 (sequence is synthesized)
ttcctgaggcctcctcagccatgtgaaactgctggaataaggatgggatgctggtgagttagctttgacaatgccgaatagaaaaacactctaagggatctggatgctggatgaactcac

SEQ ID NO: 964683 - DNA, 120 bp, Artificial Sequence
  ENSG00000287455_2 (sequence is synthesized)
tggagcattactgcctgtttgccctgtttcttctcacctgtctcttccaatgctaagccatatgcaagcctcttctaaactcaggttccactggctgaaagatgacaaagggaggatgta

SEQ ID NO: 964684 - DNA, 120 bp, Artificial Sequence
  ENSG00000287455_3 (sequence is synthesized)
gagcaattctgaaaagctgagtattttctccaacgaaactacattaacctggaagagactaggttatattgaatctaaaatggtggtgttattcatccacttcgtatcagaaatggaggt

SEQ ID NO: 964685 - DNA, 120 bp, Artificial Sequence
  ENSG00000287455_4 (sequence is synthesized)
ccctgatgaaattatagtcagtacaaacatacagttagatagaaggacaagttctagtatttgatagttcactaggaaaattatagctaacaacaatttctgtatgtttcaaaatagcta

SEQ ID NO: 964686 - DNA, 120 bp, Artificial Sequence
  ENSG00000287455_5 (sequence is synthesized)
gaagagaagaattacaatgttcctaacaacaaaaaagacaaatatttgaggttatgaatatcccaattactctgatttgatcattacacagtgtatacatgtatcaaaatattacatatg

SEQ ID NO: 964687 - DNA, 120 bp, Artificial Sequence
  ENSG00000287455_6 (sequence is synthesized)
ttagtatggtgagaaagattttctgaatatctgatgtagttgtaggctctaaactatattaccataaaatagataatttattgaattcaaagactactcttctagcaatgttttgctggt

SEQ ID NO: 964688 - DNA, 120 bp, Artificial Sequence
  ENSG00000287455_7 (sequence is synthesized)
gctctgttgcccaggctggagtgcagtgtggtgcaatcatagctcacttcagtctcaaagtcctgggctcaagtaatcttcctgccacagcctcctgagaaggtgcacaccacacctggc

SEQ ID NO: 964689 - DNA, 120 bp, Artificial Sequence
  ENSG00000287455_8 (sequence is synthesized)
gcacaccacacctggctggtgctgtgtttcaaacatgggtatagaaggcaaggaggcaagacctctgctccaaagggaatgctagtaatagagagaataaagtgcaaatgggtaattgat

SEQ ID NO: 964690 - DNA, 120 bp, Artificial Sequence
  ENSG00000287455_9 (sequence is synthesized)
attcattttggaaaatattcactataaaaatgtaaattcttcttatggtttaggaggtttagaaggtttaggaggcacacatagggagaaatcgattaaatgcagaagaattagaaatga

SEQ ID NO: 964691 - DNA, 120 bp, Artificial Sequence
  ENSG00000287455_10 (sequence is synthesized)
cttttgaatctaattacttcaggtacttgcaacaatattgccattagttgggaaaatgatgtttaaatcctaggtgccatccttttattagagtgatgttcaatggaaggaagttcaaag

SEQ ID NO: 964692 - DNA, 120 bp, Artificial Sequence
  ENSG00000287455_11 (sequence is synthesized)
accctccacttttggaggccaccttggaactgcctggaagaaataatttctattgtgactttgagattaacatgcatttaattgtgttatgtttgttagtagcaaataattatggtttaa

SEQ ID NO: 964693 - DNA, 120 bp, Artificial Sequence
  ENSG00000287455_12 (sequence is synthesized)
ctcctcagccatgtgaaactttggctagtttcaagtttggcgttattttgaagagtactgctatgaacattctagtgcatgtctttttggagtatacatgtttgcatttctgttgggaat

SEQ ID NO: 964694 - DNA, 120 bp, Artificial Sequence
  ENSG00000287452_0 (sequence is synthesized)
gctacctcaaagtgggcttaatatgtggtgcaacttgcgcttccctgtagaatcaaaccaaaactagtcttcagccgtgaccacactcttgtttaagtttcctattcctgtcctgtcctg

SEQ ID NO: 964695 - DNA, 120 bp, Artificial Sequence
  ENSG00000287452_1 (sequence is synthesized)
ctgccttcactcctcttatcctgggagcactttcccaatcaagcataagaatcttcatctcagtcctcactgcttaggaaaccaatttaagacaactggcattggagatggattctaggg

SEQ ID NO: 964696 - DNA, 120 bp, Artificial Sequence
  ENSG00000287452_2 (sequence is synthesized)
aagacaactggcattggagatggattctagggttaattcacttgctggctggatggcaatgaggaccccactggtggaggcactcaatctctcacctgccaccctgtgaagaggtgcctt

SEQ ID NO: 964697 - DNA, 120 bp, Artificial Sequence
  ENSG00000287452_3 (sequence is synthesized)
cagacatatggaactgtgagtcaatttaatctctttcccttataaattaccaagtcttggttatgtctttattagcagcttgagaacagactaatatagtaaattggtactgggtagtgg

SEQ ID NO: 964698 - DNA, 120 bp, Artificial Sequence
  ENSG00000287452_4 (sequence is synthesized)
ggtgctgctgtaaagatactaaaaaatgtgaaagtgacttggaactgggtgaaaggtagaggttggaataatttggatagttcagaagaagtcaggaaaatatgggacagtttgaaactt

SEQ ID NO: 964699 - DNA, 90 bp, Artificial Sequence
  ENSG00000287452_5 (sequence is synthesized)
gcaagagatgtggtggcattttgtctctgtcctagagatctgtggaactttgaagttcagagagatgatttagggtatctggtgaaagaa

SEQ ID NO: 964700 - DNA, 120 bp, Artificial Sequence
  ENSG00000287452_6 (sequence is synthesized)
tgaagttcagagagatgatttagggtatctggtgaaagaaatttataagtagcaaagcattcgaaaggaagcagagcataaaagtttggaaactttgcagcctgatgatgcagtaaaaaa

SEQ ID NO: 964701 - DNA, 76 bp, Artificial Sequence
  ENSG00000287452_7 (sequence is synthesized)
tggtggtgaaaatgtctccagggcacatcagagaccttcatggcagccactcccatcatagatccagaggcctagg

SEQ ID NO: 964702 - DNA, 120 bp, Artificial Sequence
  ENSG00000287452_8 (sequence is synthesized)
ttcatggcagccactcccatcatagatccagaggcctaggagggaaaaaaatgattcctgggctgggccaaatggtttccttcctgctctatgcagttgagggacatgttgccctgcatc

SEQ ID NO: 964703 - DNA, 120 bp, Artificial Sequence
  ENSG00000287452_9 (sequence is synthesized)
ccagctgtttcagctccagctgtggctaaaaaggagccaaggttcagcttgagtcgttgcttcaggggatgcaagccccaagccttggcagcatccacgtggtgttggtcccgcaggtgc

SEQ ID NO: 964704 - DNA, 78 bp, Artificial Sequence
  ENSG00000287452_10 (sequence is synthesized)
agccttggcagcatccacgtggtgttggtcccgcaggtgcacagaagatgagaaatgaggtttgggaccctccaccta

SEQ ID NO: 964705 - DNA, 120 bp, Artificial Sequence
  ENSG00000287452_11 (sequence is synthesized)
tagggcagtgcagaagggaatgtggagttggagctcccacacagagtcctcactggagcactgcctagtagagctgtgagaagagggctttgtcctctagatcccaaaatggtagatcca

SEQ ID NO: 964706 - DNA, 120 bp, Artificial Sequence
  ENSG00000287452_12 (sequence is synthesized)
ccaacagcttgcattgtgtgcctagaaaagcttcagacactcaacaccagcccaagaaagcagccaggaggggaactagaccctgcaaaagccagagaagcagagctgccaaaggctatg

SEQ ID NO: 964707 - DNA, 120 bp, Artificial Sequence
  ENSG00000287452_13 (sequence is synthesized)
ggagcccaactgttgtatcagtgtgacctggatgtgagtcatgaagtcagaggagatcattttggaactaaagttccaaaggtttaataactgacctattggatttcagacttgcttgga

SEQ ID NO: 964708 - DNA, 78 bp, Artificial Sequence
  ENSG00000287452_14 (sequence is synthesized)
tctcccatttgaaatgggtgtatttacccagtgcctgtaccccattgtatctaggaaataactaatttgcttttgact

SEQ ID NO: 964709 - DNA, 75 bp, Artificial Sequence
  ENSG00000287452_15 (sequence is synthesized)
aagagtgtgattgtgttttgaattgggaggacatgagattttggaagggccaaaggtagaatgatgtggtttggc

SEQ ID NO: 964710 - DNA, 81 bp, Artificial Sequence
  ENSG00000287452_16 (sequence is synthesized)
gttggaagagtgtgattgtgttttgaattgggaggacatgagattttggaagggccaaaggtagaatgatgatagttccca

SEQ ID NO: 964711 - DNA, 120 bp, Artificial Sequence
  ENSG00000287452_17 (sequence is synthesized)
atgatggtggtttccaccatcgtgttctcgtgatagtgagttctcatgaaatctgatgattttataaagggcttccctcttcgctgggcactcattttctctcctgccatcctgtgaaga

SEQ ID NO: 964712 - DNA, 120 bp, Artificial Sequence
  ENSG00000287452_18 (sequence is synthesized)
cactcattttctctcctgccatcctgtgaagaggtgcctttgccatgactgtgagtttcctgaggcctctccagccatatggaactgagtcaaacctctttcttttataaattactcagt

SEQ ID NO: 964713 - DNA, 120 bp, Artificial Sequence
  ENSG00000287452_19 (sequence is synthesized)
atgattagttatgcatattcttgacttttatataaatggaattcatacaagatgcattcatttttttcctggctcttttcatacacgtttgtgagattcatccatgttgcatgtaacagt

SEQ ID NO: 964714 - DNA, 120 bp, Artificial Sequence
  ENSG00000287452_20 (sequence is synthesized)
cagttttgtttactcctgtgtactgttttattatatgactatatcaaatctgttattgatgaatatttggttgtttccaggttttgctattatgcataaagctgctttgaaaattcttgt

SEQ ID NO: 964715 - DNA, 120 bp, Artificial Sequence
  ENSG00000287452_21 (sequence is synthesized)
agaaatattttggtggaaatccttttatttcttttgagtgtataactgggatggttggaaggtgctagatctaggaattatgtatgtttacctttaatatcaactgccaagtggttttcc

SEQ ID NO: 964716 - DNA, 120 bp, Artificial Sequence
  ENSG00000287452_22 (sequence is synthesized)
aactgggttataccaatttttactcccaccagcaacaacaatttgaattccagttgctttgtattttcatgaacacttggtattgctagtctttaattttagtcattctatagaaaatgt

SEQ ID NO: 964717 - DNA, 120 bp, Artificial Sequence
  ENSG00000287452_23 (sequence is synthesized)
tttgtcatggctttaatatgaatttctctgactaataatgataagcaactgtttatatatgtattggccagttggatagcctctatttgaagttcaggtcttttgccttttcaattttgt

SEQ ID NO: 964718 - DNA, 120 bp, Artificial Sequence
  ENSG00000287452_24 (sequence is synthesized)
tgtttgtattattggtttataagagtttttatacattacaggtgatagtccattgtgaagtatatgttttgcccatatcttttccctctgtgtcttgacttttcactctgttgataggtc

SEQ ID NO: 964719 - DNA, 120 bp, Artificial Sequence
  ENSG00000287452_25 (sequence is synthesized)
ttaatgtttatttagttaacagtgtctcactgtatcgcacaggatggagtgcagtggcacaatcataactcacggtaaccttaaacttttgcctcagactcctgagtggctggaactaca

SEQ ID NO: 964720 - DNA, 120 bp, Artificial Sequence
  ENSG00000287452_26 (sequence is synthesized)
gacatgcaccaccatgcctggcaagtttttttattgtagagacaaggtctctctatgttacccaggctggtcttcaattccggtcctaaaatgatcctcccaactcaggctcccaaagtg

SEQ ID NO: 964721 - DNA, 120 bp, Artificial Sequence
  ENSG00000287452_27 (sequence is synthesized)
ctggtattacagatatgagccaccatccctggcccatagttcttaattttaaagaagccaaaattaatatatcctttcttttatgattattgatctttatgtcctgtctaataatatttg

SEQ ID NO: 964722 - DNA, 120 bp, Artificial Sequence
  ENSG00000287452_28 (sequence is synthesized)
cttctggcaaggcttctgaagatgttttcctattctttcttctagaaattttatcattttatgttttatatttggtcttaatttttatggtgcaagataggagggtcactttcatttttc

SEQ ID NO: 964723 - DNA, 120 bp, Artificial Sequence
  ENSG00000287452_29 (sequence is synthesized)
ctatatcaacatccaatcgacatttattaagaaggacatccttccccagtgacttgtaatggcatctttgtaataagttgtgtgatggtatttatgtagaagtattcctatgtttcattg

SEQ ID NO: 964724 - DNA, 120 bp, Artificial Sequence
  ENSG00000287452_30 (sequence is synthesized)
ttctttttctttcactgataccacataatatttatagtactgtagctttaaactagatcttgaactttgatcttcaacattttttttcacaattctaggtcttttgtatttccatgtaaa

SEQ ID NO: 964725 - DNA, 120 bp, Artificial Sequence
  ENSG00000287452_31 (sequence is synthesized)
aggtgggtggtcttcagtctccgaggagttgtcaaggaggttttaatcggccactcccagccatctgtacagctcttaagatcggcaaacgtgagtcacctctgctgcatccatgcaaac

SEQ ID NO: 964726 - DNA, 120 bp, Artificial Sequence
  ENSG00000287452_32 (sequence is synthesized)
cacccatggagagttcgacctccgcctatttctagagaggcatttaacgaagactgacctaattcaagcaaaaataggtcttgattagtgtgtgactaacctgcttatttctctaattaa

SEQ ID NO: 964727 - DNA, 120 bp, Artificial Sequence
  ENSG00000287452_33 (sequence is synthesized)
aaaagagcctttcttctatgcttagtgactagattgtgatgcttgataatggtaaagttgccagttaccatttttctcctttttcttctccttcctcttcctctcttttccatacctttt

SEQ ID NO: 964728 - DNA, 120 bp, Artificial Sequence
  ENSG00000287452_34 (sequence is synthesized)
tttctctctccctctcttaaaaaaaaaacaaaacaacaacttatgctggtatccaattatgctgcctgagaacctctgttatttcctcaatcttgcagagcagctgccattcagaactct

SEQ ID NO: 964729 - DNA, 120 bp, Artificial Sequence
  ENSG00000287452_35 (sequence is synthesized)
agttattgcccaaggttaaagtcatctcttcccagttcagatctgagcggcagctgcttctccctacagacacgaattcagtgtgcaaagacccacctggcaccaggaactccttgttag

SEQ ID NO: 964730 - DNA, 120 bp, Artificial Sequence
  ENSG00000287452_36 (sequence is synthesized)
ctcagctactccactgctagccgagggagcattaccaatctccccaagaagcactcatgcccatacaacatcgcttattttaaattgattctaagaatcagggagttatttaaaacttct

SEQ ID NO: 964731 - DNA, 120 bp, Artificial Sequence
  ENSG00000287452_37 (sequence is synthesized)
ttgaaactgttcacaattacagtctatctatggagaccctctcctttatttttatgacgcacaccacattgaacaaaagaaaagtgattgaaaaagatagtttccaaatgcctggaaaat

SEQ ID NO: 964732 - DNA, 120 bp, Artificial Sequence
  ENSG00000287452_38 (sequence is synthesized)
aagaaaggtgatctgataggtctggggcagaaatataacagggaaatagagtcccaggcaaagggacttaatacaagagaggactttaagtagaactggttaaccagttttaccacagcc

SEQ ID NO: 964733 - DNA, 120 bp, Artificial Sequence
  ENSG00000287452_39 (sequence is synthesized)
gttttaatgaagcaaagactgctttgatgacatacatcaagcttctataatttatctcaaccactggccatgattctatcagaggattttcttactagaaaatgagactgtggtctgatt

SEQ ID NO: 964734 - DNA, 120 bp, Artificial Sequence
  ENSG00000287452_40 (sequence is synthesized)
tcttttggtccttggctcatcctgtgagaaatgttctgaagaagctgaagatgttcattacagagctgtatatgcccttaaaggaaacttgaaaggtatcgtacggacggtcccttgggt

SEQ ID NO: 964735 - DNA, 120 bp, Artificial Sequence
  ENSG00000287452_41 (sequence is synthesized)
ctctcagggcagtgcagaatcagcagggaacgtctgaaggcttcactagggctggtcaaactgactgccttccactggtgggtatagacatgtggagcttatgttgctgaaagaattaaa

SEQ ID NO: 964736 - DNA, 120 bp, Artificial Sequence
  ENSG00000287452_42 (sequence is synthesized)
tgagaccctctgtggtaggctaaaaatgggggagaaaatcaggtctccagagggtctggtgtgacctttactcattcatgttttcacttttagctgtgtaccctctcatgcagaattcag

SEQ ID NO: 964737 - DNA, 120 bp, Artificial Sequence
  ENSG00000287452_43 (sequence is synthesized)
tggccagaagcttgtatcttggtcttggataatacagttatctctgtattttgagtttcttccttattcagaagcagaggatggggatctggaagcagtgccccgaggcatgggagccct

SEQ ID NO: 964738 - DNA, 120 bp, Artificial Sequence
  ENSG00000287452_44 (sequence is synthesized)
ctttctggatggatttatagtgcttggcttcagtcttacattgttttgccttctggtatcctgaatgttcccctggcgatctcctggaaagggtttctcaatttatttatgtccagagtt

SEQ ID NO: 964739 - DNA, 120 bp, Artificial Sequence
  ENSG00000287452_45 (sequence is synthesized)
gatgttttatgaactaatcattctttattgaccacttaggaatggtctttaaacagaattattattatttttccttttttctaatggactaacaggccactgaccctaaatgtatggttc

SEQ ID NO: 964740 - DNA, 120 bp, Artificial Sequence
  ENSG00000287452_46 (sequence is synthesized)
acttacatgtgtcatcaatttgtgagttacttgatatttcaaattgccttgaatattgccgtgtttataggtgtacagtatttttaatgttgccattaactttattgctacttttacaat

SEQ ID NO: 964741 - DNA, 120 bp, Artificial Sequence
  ENSG00000287453_0 (sequence is synthesized)
acttggccagcgccatcttgtctgatccttactgtacacgtggctggccaagagaagagaagatggagcggccattttgatcatgcctagtcccagatagaaaatatggtgacaacaaaa

SEQ ID NO: 964742 - DNA, 120 bp, Artificial Sequence
  ENSG00000287453_1 (sequence is synthesized)
gtgacaacaaaattttgaccatttataaataataagtgaacttccaaaaaagaagggaaatgtttggagaccaaaattaagagaagccacaatggttttgatatcaggatgatgctggcc

SEQ ID NO: 964743 - DNA, 120 bp, Artificial Sequence
  ENSG00000287453_2 (sequence is synthesized)
tacctctggtagaattcagtgtaaatctgtctggtcctgggctttttctgaatttgatgatgatgtatcttggggatgccctctctcaccactcctttcaacatagtggaagttctggcc

SEQ ID NO: 964744 - DNA, 120 bp, Artificial Sequence
  ENSG00000287453_3 (sequence is synthesized)
agcacaatcaggctggacaacatgaaaatgtctgataataccaagtattgccagagtgtggaccaagaaaaactcttacaaatactaataaaactgtaaaccatgtgaaaaacaatttaa

SEQ ID NO: 964745 - DNA, 120 bp, Artificial Sequence
  ENSG00000287451_0 (sequence is synthesized)
gtccacagtgatgatcagctccttgaaaagatgtgaggatactggtgcatatttctttaaattactcagtcaattttaaaagagaaatattgttgctattttcatcacttttcttcataa

SEQ ID NO: 964746 - DNA, 120 bp, Artificial Sequence
  ENSG00000287451_1 (sequence is synthesized)
gggatgcttctatactcatagcataaggtgactcatcaaaactttgtcacagtgagtggtcagaaggcatacgccagaactccagcattatccaacagctgtcacttccatttaagggac

SEQ ID NO: 964747 - DNA, 120 bp, Artificial Sequence
  ENSG00000287451_2 (sequence is synthesized)
caacgcattctctcatggacacttcctggggcagccttttgcaaattgctcatctaacaatcgagaaaatgaggaaggtgtttacttcaaaataatcttagaaattgacaacatgaaatg

SEQ ID NO: 964748 - DNA, 120 bp, Artificial Sequence
  ENSG00000287451_3 (sequence is synthesized)
aagatggctgaataggagcagctccagtctacagctcccggcaagatcaacacagaaggaagagaagaataactacataaccgaagactcaatcaatggagaagaaatcgacttcactat

SEQ ID NO: 964749 - DNA, 120 bp, Artificial Sequence
  ENSG00000287451_4 (sequence is synthesized)
gcgtgacaaactttgcttgtgttttgcttttcctggtcatctttcttaacaaaacctttcctacatccttatgcctttgtttcagagaatggtagtgtttgcatctgaggtataagacaa

SEQ ID NO: 964750 - DNA, 120 bp, Artificial Sequence
  ENSG00000287451_5 (sequence is synthesized)
ttctttgagatctactctagagatctgcccatttttcttgtttctatcccatgtacaaaggaggtatttatgttattaagcttctgtttgtttttctcttgcttttttttttttagacag

SEQ ID NO: 964751 - DNA, 120 bp, Artificial Sequence
  ENSG00000272239_0 (sequence is synthesized)
aagtttgtattctctagattaaaagaagccattggttgttagatgcagtgttaattctcaaattttgaggcaaattaaaatttgaggcaaaagaaaataaaatatacatattgatttcaa

SEQ ID NO: 964752 - DNA, 120 bp, Artificial Sequence
  ENSG00000196167_0 (sequence is synthesized)
cccttttctccgccttttccgcgctccatcttgccctcctccctccttcgcccccgctcctactctccccttcttcccctctctccctaccccctccctttctggggcaggcgtttctcc

SEQ ID NO: 964753 - DNA, 120 bp, Artificial Sequence
  ENSG00000196167_1 (sequence is synthesized)
gaggcgcactgaggctccggggcgagtccgcgcagcgcgagctggggaaagccgtccggggctcccgatgaccctgcactccgccgggaggccgcccttcggaaaagccgtggaaacaca

SEQ ID NO: 964754 - DNA, 120 bp, Artificial Sequence
  ENSG00000196167_2 (sequence is synthesized)
cccggattgaaatgcccctggcccgcctgacccgaccctaggagaagcagccgagttacccgacatcgtggtcagcaggagctgggtcggtggctggatgctgcagcagcagggactcag

SEQ ID NO: 964755 - DNA, 120 bp, Artificial Sequence
  ENSG00000196167_3 (sequence is synthesized)
cgcctgggagggctcctggggcagggagagaagcagagatgcaacatttttaaaatttcacaaagcatccggctgcacccaggtccctggaacaggagacaaacagaattaatgttttat

SEQ ID NO: 964756 - DNA, 120 bp, Artificial Sequence
  ENSG00000196167_4 (sequence is synthesized)
accttcgggtataggtttgagttttttccccctcatgccaagtatttaaaacctctagaaacccatgatttgacaatcaatgattgcgcgatactttcaatttgaatattcaaaggctta

SEQ ID NO: 964757 - DNA, 120 bp, Artificial Sequence
  ENSG00000196167_5 (sequence is synthesized)
acaaaatggactatcttctgcagaaatcctgcacacaggcaccccacagagagtccagagaaacagggagtgagacccctttgggtcctggcccttgcttttattatagtttgagcattt

SEQ ID NO: 964758 - DNA, 120 bp, Artificial Sequence
  ENSG00000196167_6 (sequence is synthesized)
tgtcctccttcccacagatagagcagatgtcctcaaagatgctctgtatttcagccttcagggcagctaagaagccatgagtgacttaggctgccctggccatgaacaccggagccagac

SEQ ID NO: 964759 - DNA, 120 bp, Artificial Sequence
  ENSG00000196167_7 (sequence is synthesized)
tggctggccagactgattcccgcatcccccatctgtgttttgaggggaaatctcaggttttgaggaatgaacatggcagctagtgggtgtggcacagcaagaagtcgctctgggcccagg

SEQ ID NO: 964760 - DNA, 120 bp, Artificial Sequence
  ENSG00000196167_8 (sequence is synthesized)
tggcaggccagcggcctagcagaggccttcgctctgcacctcctatttttctggctccgcctggctaccagcgggcttccctccccctttcatcccgctcttcctgggcccgacactggg

SEQ ID NO: 964761 - DNA, 120 bp, Artificial Sequence
  ENSG00000196167_9 (sequence is synthesized)
gtttctgctcagaatgactgcccattaagaccctttcctcctccccacagagctggggatgccaggagcctcatcctctggagactttctgactctgggtttcaccaccgcactgcgaag

SEQ ID NO: 964762 - DNA, 120 bp, Artificial Sequence
  ENSG00000196167_10 (sequence is synthesized)
tgccctctttgctttttcgccttctagagccacccctgcctttttgctgtaggagcacatgttaggaaacaatgacaagtttggctcctgctcattttaactgaaaggatgtggacttag

SEQ ID NO: 964763 - DNA, 120 bp, Artificial Sequence
  ENSG00000196167_11 (sequence is synthesized)
gttcaagccttctcccattggggtgagaagggggagggacttgggatcaggcttcccccttggtccaggcccaagcccctcactaatgacttgggattctactgggtcatcttctgtgag

SEQ ID NO: 964764 - DNA, 120 bp, Artificial Sequence
  ENSG00000196167_12 (sequence is synthesized)
tacttactgtgcctcttccatgtgatttggaaggtgaggagacaggaatggtccacagagggagagagtgccaggccaagtcctctcatagccacccgccccctccacagaaggggacag

SEQ ID NO: 964765 - DNA, 120 bp, Artificial Sequence
  ENSG00000196167_13 (sequence is synthesized)
caagagaagagagaggcatggtgaggttccttttgcaaataaccaagatatttccaggattcaagaccagtccatggttttaggcctctgctgtttattctctgagttctcagaaatgca

SEQ ID NO: 964766 - DNA, 120 bp, Artificial Sequence
  ENSG00000196167_14 (sequence is synthesized)
aaaagtgtagtttagccccagaggcctcaagaaaaagattggggtgcccccaaatgtgtcaaatacagagggaaacacacagagcttagggaaagggcaactgagaatgacaagactgat

SEQ ID NO: 964767 - DNA, 120 bp, Artificial Sequence
  ENSG00000196167_15 (sequence is synthesized)
aggaattgcttggcagctgaagccacatctctgggggagaggagcaggcctgggaacacctgaggtggcacctggcagtggagggcaggatggatgtattgaaatctgacagcttctgga

SEQ ID NO: 964768 - DNA, 120 bp, Artificial Sequence
  ENSG00000196167_16 (sequence is synthesized)
acttctttctacaaatgcccctgagcctgtgtcctaggtttccctgatggaccagacctgaggaggggaaggacaatgggggtggagatggcacctcccctccctgcatgccttcttcct

SEQ ID NO: 964769 - DNA, 120 bp, Artificial Sequence
  ENSG00000196167_17 (sequence is synthesized)
cgctgtgcctaggccttgccccctctgaaggaacagtgaaccaagcagcttggaatctagggatggtctcttgtcctcatagcgtcttccattacttcttttcttcgctgctctcctcct

SEQ ID NO: 964770 - DNA, 120 bp, Artificial Sequence
  ENSG00000196167_18 (sequence is synthesized)
ttttgttatactcttattttttgatttgcttttaaaaaccttctttgttgcatttttgtttatttctttctgtgtttctttgtctctcttcctgtcattgctttcttccatttcttatct

SEQ ID NO: 964771 - DNA, 120 bp, Artificial Sequence
  ENSG00000196167_19 (sequence is synthesized)
gtactactggttttctccctggcttcacgtgtctctgtgttcccctatgctggggtgtcctcccagtgctttcaggcttcatctccttcctaacctctcctttctatttttttttttttt

SEQ ID NO: 964772 - DNA, 120 bp, Artificial Sequence
  ENSG00000196167_20 (sequence is synthesized)
cttgctcagtcgcccaggctggagtgctaacctctcctttcatgtggagatggacagggatggcaggagcactgagtgctcttgacaacaccattgaagatgatgctgacgatcagctac

SEQ ID NO: 964773 - DNA, 120 bp, Artificial Sequence
  ENSG00000196167_21 (sequence is synthesized)
gctgacgatcagctaccctgtggagaaggcaggccaggctgggtgagaggggagctccttggaagtcagggggtctgtaaggacagcaaggatctctttgtcccaacctccagcagcctt

SEQ ID NO: 964774 - DNA, 120 bp, Artificial Sequence
  ENSG00000196167_22 (sequence is synthesized)
tcagtgctgttgctggctagcgatttcagaaaactagatttttctaggcctgagccctgttttgagaaagaagcttccctctggtttgtagctcaacattaatgagttttggttcctgtt

SEQ ID NO: 964775 - DNA, 120 bp, Artificial Sequence
  ENSG00000196167_23 (sequence is synthesized)
gtttctataattacaaaaccccagcacaggtatttaagagccaaaggccatgcttgtggaagtaagggaggatctttctaaatggatcctgcaaatcctccttacagatctgagtggatg

SEQ ID NO: 964776 - DNA, 120 bp, Artificial Sequence
  ENSG00000196167_24 (sequence is synthesized)
atcaggcccagagcaaccctgagaccccaggtacccacagcattggctgttcttcataggagactcagagaagacttcataggagactcattattgtttactggacatcaggtgctatat

SEQ ID NO: 964777 - DNA, 120 bp, Artificial Sequence
  ENSG00000196167_25 (sequence is synthesized)
tgtatagcattcacattccacaggtgaggaaacaggctcagaggaataagtggcatgccaagatcactgagtatatcagtagcagaattaggattcagactttgttaggcctaactccaa

SEQ ID NO: 964778 - DNA, 83 bp, Artificial Sequence
  ENSG00000196167_26 (sequence is synthesized)
agcagaattaggattcagactttgttaggcctaactccaaagccctggctttttttttttttgagatggaatcttactctgtc

SEQ ID NO: 964779 - DNA, 120 bp, Artificial Sequence
  ENSG00000196167_27 (sequence is synthesized)
tgggattataggcatgagccaccatgcccggcctttgctcttaactactgatgttgtcttcctgatcttttctacaagaagcttttaaactttttggactttaacctacaataagaaatc

SEQ ID NO: 964780 - DNA, 120 bp, Artificial Sequence
  ENSG00000196167_28 (sequence is synthesized)
tttggactttaacctacaataagaaatccattttacatgttcacatgtatctataacaacatttatatttctaaaacaaacttttcatgaaacaagatatacctacatatgtcaggcact

SEQ ID NO: 964781 - DNA, 120 bp, Artificial Sequence
  ENSG00000196167_29 (sequence is synthesized)
ctgatattttctattctagtccaccttttccatttcattctatttatgggaaatatatgttggttgggagtcactgagttaatttaatgacccactaataggctgtgagtggcattggaa

SEQ ID NO: 964782 - DNA, 120 bp, Artificial Sequence
  ENSG00000196167_30 (sequence is synthesized)
aaatacctgcttgtaagatatgcgaacacacgtttcaaggttgtttgtgcatgtggaaatattttggggtgctatctgttttaccatcagtttgtacaaggacactaagacagtgtagcc

SEQ ID NO: 964783 - DNA, 120 bp, Artificial Sequence
  ENSG00000196167_31 (sequence is synthesized)
tgctgacttgagaatgttctgtaaggactggaaacactagaatcttgaagaaacgcctggctagaggtgagggtaagctgttaattacactgattacagtttgtgcctctcagactgaga

SEQ ID NO: 964784 - DNA, 120 bp, Artificial Sequence
  ENSG00000196167_32 (sequence is synthesized)
actcttttcttcttgctgggggcattgctatctctaggatgtttgccctgaagtcctgatagtctctttggggttttaataaatggctgaaaaaattgttgtggggtttcaacaggcgtt

SEQ ID NO: 964785 - DNA, 120 bp, Artificial Sequence
  ENSG00000196167_33 (sequence is synthesized)
cataggcacccttgcttggcaatataacatggcttttgatgtttgggtgttggaagggatctttgaagtgctgagagggactcagtctttttccaaaatctctgcttgtgtctgtccagc

SEQ ID NO: 964786 - DNA, 120 bp, Artificial Sequence
  ENSG00000196167_34 (sequence is synthesized)
ctctggctccactgcttggctgagatcctggcccatagtagaatctgtgtagaggaaacgagagctcactatttgtgaggcagcctgttccactattggactgctttaaatgtagtgatc

SEQ ID NO: 964787 - DNA, 120 bp, Artificial Sequence
  ENSG00000196167_35 (sequence is synthesized)
agtgattatgctataatccaatcatgtattaattgggcaccaactatgcactaggcatggtatcaagtaccaggagtacaaaaataagtaaaccttgatttctgctatcaattactctct

SEQ ID NO: 964788 - DNA, 120 bp, Artificial Sequence
  ENSG00000196167_36 (sequence is synthesized)
tctcctacttctgtactactgcttttctattgtgagtttgtttagttcattaattggtttattcattcattcaacaatcatatactgattagctactctgaccaggtccagtactaactc

SEQ ID NO: 964789 - DNA, 120 bp, Artificial Sequence
  ENSG00000196167_37 (sequence is synthesized)
tgaagaagttatgcccatcccatcttcaccccaagccttctccttttgagactcctcatccagtttctttagttcttcatatatcactgtttttcagatctctggctatccttgccattg

SEQ ID NO: 964790 - DNA, 120 bp, Artificial Sequence
  ENSG00000196167_38 (sequence is synthesized)
acctcagaaatcctgtatttgaccttaaccttcttatacccagtccatacccaaagtgatggaaatggaatagatttctttttaaagttttaaacgaatattttgactgaaaaattttgg

SEQ ID NO: 964791 - DNA, 120 bp, Artificial Sequence
  ENSG00000196167_39 (sequence is synthesized)
cagtcttgtatgcaaatgacactgcagagcattgttttctcccccccacgtaggagattttattcaactaaggcacaggcatattaaaagactttcagtataaggaaaaggggtagttta

SEQ ID NO: 964792 - DNA, 120 bp, Artificial Sequence
  ENSG00000196167_40 (sequence is synthesized)
ttccctccaaatttgactacagctcgaaattgtctttattaatgcaaagttcttttgtcaccttgactttgggacactgttaccaaacctcgtgggaaatatcaagttccagaagattga

SEQ ID NO: 964793 - DNA, 120 bp, Artificial Sequence
  ENSG00000196167_41 (sequence is synthesized)
atacatgcaggaaacaaatgttttttgggccctagagtgaacatttggtccatatgaaaatgaccaggaagacaattaggtgaaggttttttaatgatttgtgctacgtcagtctcttcc

SEQ ID NO: 964794 - DNA, 120 bp, Artificial Sequence
  ENSG00000196167_42 (sequence is synthesized)
cataagacatattcaaagttttaacttttccttaagaggcttccatggggagcaagcatttgataattcatcctttaagaaaaacaccaccgtacactgcttgaagagttcctcttctat

SEQ ID NO: 964795 - DNA, 120 bp, Artificial Sequence
  ENSG00000196167_43 (sequence is synthesized)
tacttaaaacgtttttattgtgcaacatttaaggcatacaaaaacatataaagaataccatgatgaaaatctatgactgtattaccaagcttaagaaataaaacagttgagtgatctctc

SEQ ID NO: 964796 - DNA, 120 bp, Artificial Sequence
  ENSG00000196167_44 (sequence is synthesized)
gttgagtagcagaggtaggagtgtttatgtaatcgagttattcttattgggctgagaaaacctacacttgtttgaactgctttctgggaacagagaaggggagggaagcccctgtcggct

SEQ ID NO: 964797 - DNA, 120 bp, Artificial Sequence
  ENSG00000196167_45 (sequence is synthesized)
ggaaactaaaggaacagagcaaaggcattatttgagtgtcttgggatgttctgtattccatctaacagtgcactaaaaaaagataagttcctgagaacaattctgattttgtagttcagt

SEQ ID NO: 964798 - DNA, 120 bp, Artificial Sequence
  ENSG00000196167_46 (sequence is synthesized)
ttagttacttggcgatgaggaactggaataaatgtgaagaacaaactcttgagacaatatagcagagagtagagaattcagaaatgaagacaacatttatgcttgttttcttgctgggct

SEQ ID NO: 964799 - DNA, 120 bp, Artificial Sequence
  ENSG00000196167_47 (sequence is synthesized)
tgcatgtggagtgactatgcctttttcaccttctgattggttggattccaattaaatggtggtgcctatcttaacccctgaatcaagactgaaagacttttgagatggacttttgaaaga

SEQ ID NO: 964800 - DNA, 120 bp, Artificial Sequence
  ENSG00000196167_48 (sequence is synthesized)
gtgtttgagggaactgttaatgctggctgtactgacctgcagaagatggtgcaactgggtctgaaaggtggacactgctgcctccggaccgctgtcaaagcaagaatatcaccgtgaagc

SEQ ID NO: 964801 - DNA, 120 bp, Artificial Sequence
  ENSG00000196167_49 (sequence is synthesized)
agtgccaggatgccagcgcctcgcctggtcactgcggggaccgcagctggacagcagggatccccctcaagccgggttccaggagttagggtctccccaggaaaggagattgcgctcttc

SEQ ID NO: 964802 - DNA, 120 bp, Artificial Sequence
  ENSG00000196167_50 (sequence is synthesized)
ctagcccggacccagggaatcccgtgccccgcccgcagggcccaggcgccgcgccctctccgcgctccagcctaccgcagccccaccaccccgttccccgatcggctccggactccgcgg

SEQ ID NO: 964803 - DNA, 120 bp, Artificial Sequence
  ENSG00000196167_51 (sequence is synthesized)
aaaacagttgagtgatctctcatttatgactaaattaacttattaaaaccattaaaacttttggattattcctgttaagatattttcttttttttattattatgctttaagttctagggt

SEQ ID NO: 964804 - DNA, 120 bp, Artificial Sequence
  ENSG00000196167_52 (sequence is synthesized)
agacatgaagtccttgcccatgcttattcctgttaagatattttcttagggggaagtttagcaggtatatctatcaattttcctaatccaaaagagctaattcctagatactgtatgttt

SEQ ID NO: 964805 - DNA, 120 bp, Artificial Sequence
  ENSG00000196167_53 (sequence is synthesized)
ctaattcctagatactgtatgtttggtccacatttcattcctcttggaacttctaacattttttactgttcttttttttaattgtactaacaatgacattgcatattacaaatgcacgta

SEQ ID NO: 964806 - DNA, 66 bp, Artificial Sequence
  ENSG00000196167_54 (sequence is synthesized)
ttcgatggttcactgcagccttgacctcctgggcttgagcaatccttccgcttcggcctcccaaag

SEQ ID NO: 964807 - DNA, 120 bp, Artificial Sequence
  ENSG00000196167_55 (sequence is synthesized)
tcccaaagtgctgggattacaggcggcgtgaactgccacacctggtcagaggatacttccatatcaaaaatcaaatataatataatgccatcatttgcaaataactatagaatattttaa

SEQ ID NO: 964808 - DNA, 120 bp, Artificial Sequence
  ENSG00000196167_56 (sequence is synthesized)
catcatttgcaaataactatagaatattttaatgtttatttagcttgacctttggggattcttgttcctgatttatcatacttgttttagtcacaccagagataatgatcaaacattaaa

SEQ ID NO: 964809 - DNA, 120 bp, Artificial Sequence
  ENSG00000196167_57 (sequence is synthesized)
taacttttatttataagatttcttagcaacagatcatagtacatgtacatactaaatgaatatatcaacatttttctgtgctatttcaaaggttcagtaattttatttcataaaggtatc

SEQ ID NO: 964810 - DNA, 120 bp, Artificial Sequence
  ENSG00000196167_58 (sequence is synthesized)
taaaaagactaaaccagtcatcttaaatatattaccactaaagcccaatatccacctactgtctgaatttggagagagtatggctaatgttagatactaaacatggtgagaatcctctca

SEQ ID NO: 964811 - DNA, 120 bp, Artificial Sequence
  ENSG00000196167_59 (sequence is synthesized)
gatactggtttcagagagctgtcacccatagaaccaagggctaaaaagttactcatctttatggtataattttacttcaatctaacaaaaatttactgagcatctacagtgttctgggcc

SEQ ID NO: 964812 - DNA, 120 bp, Artificial Sequence
  ENSG00000196167_60 (sequence is synthesized)
tcgagccaggtgctgggacacagaggtgagccactcatgagtcctccccatgagtctctttagctggagaaccactttgtctagagtgtgtgattttgcacttaacctctctagagtcta

SEQ ID NO: 964813 - DNA, 120 bp, Artificial Sequence
  ENSG00000196167_61 (sequence is synthesized)
tggtgtgtgagatgaacagtgtaatattgttttgcatagagaggatactgtagacagaacccagtgatggagccttaagtaaagagtataattttggtgtgtggttggtagaatcactat

SEQ ID NO: 964814 - DNA, 120 bp, Artificial Sequence
  ENSG00000196167_62 (sequence is synthesized)
aatgtaatgtgacttaaaccttagacatcaatcattattttggtactttaaatataactgatgttttattccttgtgactacactatttagatatttacattaaatatcgaaaaactgat

SEQ ID NO: 964815 - DNA, 120 bp, Artificial Sequence
  ENSG00000196167_63 (sequence is synthesized)
cacaaagatactataatacttttatacatgtgtgtacgtatgtatatatgtatgtatgtatgtcaatgtatgttttactattggcattagtaattattttccctttatgcaatttctttt

SEQ ID NO: 964816 - DNA, 120 bp, Artificial Sequence
  ENSG00000196167_64 (sequence is synthesized)
agagtgcttctgtcttctcctcctacccaatagtaccatgaaattgtattattaactgagctatagcaagtcataatgatcatttgaaatcatttattaaataaatgaggtaaagatgta

SEQ ID NO: 964817 - DNA, 120 bp, Artificial Sequence
  ENSG00000287989_0 (sequence is synthesized)
gaggagagaaagtgtggtgagaaagctagagatagcagttatagataactacaaaactataaaaatgatcagagaaatggggctgcagcttgagacagatgtgtgtcaagcacgtgtttc

SEQ ID NO: 964818 - DNA, 120 bp, Artificial Sequence
  ENSG00000287989_1 (sequence is synthesized)
ttgtctggactaggaaatgttatcgcatattcatatgctgattgaaattcctctagaggagaaagaatctctatgacgaatagagaggggaactattgcagaagcaaagtccttgagaag

SEQ ID NO: 964819 - DNA, 120 bp, Artificial Sequence
  ENSG00000287989_2 (sequence is synthesized)
gcaggaagcctagaattcagatccgaagtagaagaattggccttcaacaggaagatgaccatgggcatggattgacaaacatagtagatgcttgcagccactcaatgacatcacatagct

SEQ ID NO: 964820 - DNA, 120 bp, Artificial Sequence
  ENSG00000287989_3 (sequence is synthesized)
gtctgaggctctagaaggtgctctgctgctaaaaggagcattataaagagtgtttgaatacctccatgggaacagaaaagcaatgtgtgtggaaggatattcaacaatgtgttgttggaa

SEQ ID NO: 964821 - DNA, 120 bp, Artificial Sequence
  ENSG00000287989_4 (sequence is synthesized)
gaccaagtgcattttgctgaaaacctccataacaagaacagagacttggaagaagagattcaaagaggataaatatatattaaatagattcaactgcttatttgggaagatctttactat

SEQ ID NO: 964822 - DNA, 120 bp, Artificial Sequence
  ENSG00000287989_5 (sequence is synthesized)
actagatactgttttactttgtcttaacatatgtattacactgattcaacttcttatcataaatggaatatggttgttttttctgtcaataaatagatccatgcttcatattaagggaat

SEQ ID NO: 964823 - DNA, 120 bp, Artificial Sequence
  ENSG00000287989_6 (sequence is synthesized)
gaactttgaagtcagacaaacctgggtttatatccttgtactaccaattattaattctgttatttgggacaatgtgcttaaacattctaaatctcagtttccttttcaaatcaataatag

SEQ ID NO: 964824 - DNA, 120 bp, Artificial Sequence
  ENSG00000287989_7 (sequence is synthesized)
taactacttcatagagttacactaaagattcaacaagataatctatagaaagtacttagcacatatttgaaccatgataagtactacataaatgatagctactatcggagacctatagca

SEQ ID NO: 964825 - DNA, 120 bp, Artificial Sequence
  ENSG00000287989_8 (sequence is synthesized)
atcccttttgaaagagttctttcacacaataattccatttgaagccttttgattaacatataacaatgctcggcttacgtttctgcagtttattgttaaatgatcaccacatttcttatt

SEQ ID NO: 964826 - DNA, 120 bp, Artificial Sequence
  ENSG00000287989_9 (sequence is synthesized)
cactatgattttctggtcaacatatgaggattccaattagcagttacaacgaacctgtaagttcccagaattactgaaaatgttttattcgtaagcaaaatgtttgcagtgagcctttta

SEQ ID NO: 964827 - DNA, 120 bp, Artificial Sequence
  ENSG00000287989_10 (sequence is synthesized)
ttagcactaaatactttgcaagcaacgcatgtaaaggctgtgagcaaccaactaagaaatcacacaagttgctataggatcatcccagtgcatgtaaccagctcctatcatatttgtctc

SEQ ID NO: 964828 - DNA, 120 bp, Artificial Sequence
  ENSG00000287989_11 (sequence is synthesized)
atatatttacaaagctgtttcttccccttagtagttcctaggcatgcctcgattaatcactaaaggagtcattaggtaacatctgccataaaaatgctccccagatgatcaaatagcaaa

SEQ ID NO: 964829 - DNA, 120 bp, Artificial Sequence
  ENSG00000287989_12 (sequence is synthesized)
actataaaatgccatagagcagacactgggccttcaaaaacctaagattcaaggctttaactctcaagaaacttctaatatctttgacatgacgcaacctgtgatttttctacagcacag

SEQ ID NO: 964830 - DNA, 120 bp, Artificial Sequence
  ENSG00000287989_13 (sequence is synthesized)
atttgctcactctgatactctttgagtatgatatgtaggaatgagtggcttaactagcaaggtgagcctcacagtaatgtcagcatcctttagtgttctctctccatcttcatgcatata

SEQ ID NO: 964831 - DNA, 120 bp, Artificial Sequence
  ENSG00000287989_14 (sequence is synthesized)
tattgtttttatgtagatgtccatttactgacaattgtgtaatatacaatgtatactcgcctataagtatagctgagacatttcttgctcatctcaatagaaatgcacctctcatatgta

SEQ ID NO: 964832 - DNA, 120 bp, Artificial Sequence
  ENSG00000287989_15 (sequence is synthesized)
acaaaatcagtatagctcaagctaggactacttacacaaataggtaggactgaatgtaacatgttatagggttttttttaaaaaaaaccttttagacataattttgaaaatcaatttgtc

SEQ ID NO: 964833 - DNA, 120 bp, Artificial Sequence
  ENSG00000287989_16 (sequence is synthesized)
cagatattatactgtcaatgagatattctaatataatatctaatataatgtgtcaatgagatattctaatataatatatgagtctgagttactttgtggctctattctgcaatgtcataa

SEQ ID NO: 964834 - DNA, 120 bp, Artificial Sequence
  ENSG00000287989_17 (sequence is synthesized)
gaaatgctgacccttttctatcatgatgctttgctagtcctaggcagttgacttcatttgaatggtccagtagactcaccactagatccccatccctgccaacagggagggggtaaggaa

SEQ ID NO: 964835 - DNA, 120 bp, Artificial Sequence
  ENSG00000287989_18 (sequence is synthesized)
gaagaagacaacatgcctcatctccttagacctagaaattgcacacatttttatatctctttacgtctcactcaccagaacttagttacatggtcactcagcccgcaggggaggctggaa

SEQ ID NO: 964836 - DNA, 120 bp, Artificial Sequence
  ENSG00000287989_19 (sequence is synthesized)
acatcatcttaactattacaatgaaaaatgtgaagatatcaagggacaaccacagtgtctgctactcagcatgactgtaattttaaatgtgaagagataaatgtcactcaaaataaatgc

SEQ ID NO: 964837 - DNA, 120 bp, Artificial Sequence
  ENSG00000287980_0 (sequence is synthesized)
gggggcggggttcccagtcccccggtcaaattttaggacttttcagcaggaaagctgcacaactggaggagggcaggacgaggctggcctcgcaggtcgggctacgttcttctacggtct

SEQ ID NO: 964838 - DNA, 120 bp, Artificial Sequence
  ENSG00000287980_1 (sequence is synthesized)
gaggcgttgtctagaaactcaaaatctctggaatcccatccaggactcctccatcaagatttcttccgatcctgagtaaccaagattggaatactgaccccttcaggaggcagcccatgc

SEQ ID NO: 964839 - DNA, 120 bp, Artificial Sequence
  ENSG00000287980_2 (sequence is synthesized)
cgttttttcccaaccgctctaatctgccccaaatgcttccttatatgaatccaaatttgtctctccttgacctctaccctctgcactgtttcagcctccgcctctggggccttactaaac

SEQ ID NO: 964840 - DNA, 120 bp, Artificial Sequence
  ENSG00000287980_3 (sequence is synthesized)
aagtccaatcacccttccacgtgaccccttatctaactgtaggtgggattaatgtacttatctgcccaaacagctccagtcctttaaactgccttttattgattggagcccacccaggat

SEQ ID NO: 964841 - DNA, 120 bp, Artificial Sequence
  ENSG00000287980_4 (sequence is synthesized)
actacattacattcagatgtcatgtctccttaggctcctgcagactgacaatttctcaaactttgtttttgatgactttgacaattttgaggtggtatgataatttgtgaagtgtttctc

SEQ ID NO: 964842 - DNA, 120 bp, Artificial Sequence
  ENSG00000287980_5 (sequence is synthesized)
gaaaaagaccaaagatgtgaagtgccattctcatcacatcatgtcaagggtacatgctgttaacatgaattaacatcgatgatgttaaccttgatgtcctggctgagatgaactctcttg

SEQ ID NO: 964843 - DNA, 120 bp, Artificial Sequence
  ENSG00000287980_6 (sequence is synthesized)
gatagaaggattcaaacagaaaaatgcaaaaagaagtcagatggaaaactctggaaaatccaagaagggagctagttgatgatgagcaaagccacatgtgctgtcttgacagccatagag

SEQ ID NO: 964844 - DNA, 120 bp, Artificial Sequence
  ENSG00000287980_7 (sequence is synthesized)
aagaatggaggcctccatacctgagtggaaagagaagaacatgggcaatgattttgtctctacaaaacaacaacaacaacagacaaacaaaattagctgagtgtggtggtgtgcacctgc

SEQ ID NO: 964845 - DNA, 120 bp, Artificial Sequence
  ENSG00000287980_8 (sequence is synthesized)
aaaattagctgagtgtggtggtgtgcacctgcaacttcactacttagcaggctggggtgggaggatggcttgaacccaggagttcaaggctatagtgagctgtgattgtgccactgcact

SEQ ID NO: 964846 - DNA, 120 bp, Artificial Sequence
  ENSG00000287980_9 (sequence is synthesized)
aaaaaaaaaagaaaaggaaagaagaaaagaatttaaaaagagaagggagaatgagaagagtcacaactttgataaagtggggagcattgggttgggtatggaatggtagtagtcttgtct

SEQ ID NO: 964847 - DNA, 120 bp, Artificial Sequence
  ENSG00000287980_10 (sequence is synthesized)
gtctagttcagaatcagacagacctgagtttagtccttcacatctacccttttacccttcttattttatttcccttcccttcccattttgttattcatttaataaagtttctaaattcta

SEQ ID NO: 964848 - DNA, 120 bp, Artificial Sequence
  ENSG00000287981_0 (sequence is synthesized)
ttttcattttctcagctcacttggacctgcatatccttgtggtctccaggtgtgagaaaggtgcagggagagaagaaaagctacagttccagtggctgttatggagcagaaacttgataa

SEQ ID NO: 964849 - DNA, 120 bp, Artificial Sequence
  ENSG00000287981_1 (sequence is synthesized)
atgtgtatggtagtttagaaaaaaaaatggccacaagtgtgttgacactgtcccatcaagaggtggcgttgatgttctcactccttgactctagacagacttgtaactactttgaccaat

SEQ ID NO: 964850 - DNA, 120 bp, Artificial Sequence
  ENSG00000287981_2 (sequence is synthesized)
agagtatgatggaagtgacactatgtgagtgctaagactaagtcacaaaagaccatgcagtgtttacttgcttctcttggaatgctcagtcttgtaacacttgtgaactccagtcatcat

SEQ ID NO: 964851 - DNA, 120 bp, Artificial Sequence
  ENSG00000287981_3 (sequence is synthesized)
gctgtgagaagtgcaagccacatggagagaccacatatgagtgcttcagttgacagcactggtggagcccagtcttcaagtcatctcagcccaagtaccaggcatgggactgaagaggcc

SEQ ID NO: 964852 - DNA, 120 bp, Artificial Sequence
  ENSG00000287981_4 (sequence is synthesized)
tgcagatgtgtcagcccccagttgttgtagtctcccctgctgagactccagacactgtggaacagagaaaagccattcctgctatattctgctttaagtcctgacccacagcatctgtga

SEQ ID NO: 964853 - DNA, 120 bp, Artificial Sequence
  ENSG00000287981_5 (sequence is synthesized)
gctaataaaatgattgttgtgttaggccactaagtttgtggtgcttcattatactgcaatagataagtggaacaacgtggacaggatgtgtacttcttgtctaggaggttgagcttcatt

SEQ ID NO: 964854 - DNA, 120 bp, Artificial Sequence
  ENSG00000287981_6 (sequence is synthesized)
ctcagttacaaaacctatatgggtgcctgaaagtcatttgagttccagcccgctgctctccctacccattgaagctcatgcttgctgttagctgtgcagaaacactaaccatgggtatca

SEQ ID NO: 964855 - DNA, 120 bp, Artificial Sequence
  ENSG00000287981_7 (sequence is synthesized)
aagtgacactggccctaattggttggatgatctgagagacctgaggagggtttctgcctagtgtggaaatctcctcccacagacactcaggtttgtcaaaaacaccttgaagaatgtgct

SEQ ID NO: 964856 - DNA, 120 bp, Artificial Sequence
  ENSG00000287981_8 (sequence is synthesized)
ctcaattctggatgctgctggaataccgaagaattcttcccatgtgcatctatgttcatttaaaaataacttttaaaatattatttatttattatttttaaaaatttttgagaaaaggtc

SEQ ID NO: 964857 - DNA, 120 bp, Artificial Sequence
  ENSG00000287981_9 (sequence is synthesized)
gggttttgccatgttggccaggctggaaaaatatcttttaaaagtggtaatgcatattcattatatcatgaactgaaaatacagacatactcaaagaagaaagcaaaaaacatctataat

SEQ ID NO: 964858 - DNA, 120 bp, Artificial Sequence
  ENSG00000287981_10 (sequence is synthesized)
gccatccaatgacacatgctgttaacaactttcaaacttcctttattgagtgtaaatcatatgactcatttgtatataatataatgtgatgcataattattataataaaattcacaaata

SEQ ID NO: 964859 - DNA, 120 bp, Artificial Sequence
  ENSG00000287981_11 (sequence is synthesized)
taatatatatattaacataatgggattatactatctatattattctataactttctttaacccaactattgttgaaattgttttgtgcctctgtataaagccctaatttatttgtactga

SEQ ID NO: 964860 - DNA, 120 bp, Artificial Sequence
  ENSG00000287981_12 (sequence is synthesized)
ctgattgcataagattcattgtctgattgtctgtagtttattgcttcccttgttgatggatctttacagttttcttacttctgttgtaaaaattacattgcatcaccgtccagtgatagt

SEQ ID NO: 964861 - DNA, 120 bp, Artificial Sequence
  ENSG00000287981_13 (sequence is synthesized)
acctcagtggttcaggctggctgttggttgttgcaactccttgtctgttgcacatctcagtcactttttaataggaaatgttttcacttctctcccgctccttcaacacacacacacaca

SEQ ID NO: 964862 - DNA, 120 bp, Artificial Sequence
  ENSG00000287981_14 (sequence is synthesized)
cacgcacgtgcacacataaaggaattcagtgggagaacacacacgaacacacagggaaatcccacagaactcgacaatgggattttgagattagatgctttcaaaagggagcaggctgtt

SEQ ID NO: 964863 - DNA, 120 bp, Artificial Sequence
  ENSG00000287981_15 (sequence is synthesized)
gccttctcagattttgtacagggttgcaacatctgctcctctgacaaaagaaatatttaaaaatgctgtggaaactaggttaggccaaacttgaaaagtttttccttccctcactgttga

SEQ ID NO: 964864 - DNA, 120 bp, Artificial Sequence
  ENSG00000287981_16 (sequence is synthesized)
atttgtaaatatattccctatgcttttttgtaaatgcaaaatgtcagcataaatgtggaataaaaatgggctggttagcctgttgctttggcttctctaaaatggaggaaataaaataga

SEQ ID NO: 964865 - DNA, 120 bp, Artificial Sequence
  ENSG00000287982_0 (sequence is synthesized)
acaatcacgtgggggctttgttaaaacaggaattctgggccccgctcccggacacctcattcaattggtctcagctgggcctgagaatgcgcatttctaaccggttcccggggtatgttt

SEQ ID NO: 964866 - DNA, 120 bp, Artificial Sequence
  ENSG00000287982_1 (sequence is synthesized)
tgggaaggactgctctgtgtgttgcgttgatgccctctaggttcctttgtcaataacaaaaaaccctctttagaggaaagtacgtcgttcttctctgtgtgtcctcagcacttacacaag

SEQ ID NO: 964867 - DNA, 120 bp, Artificial Sequence
  ENSG00000287982_2 (sequence is synthesized)
gcttgcacaccagtgcctaataaatatttgggcttaatcatgaacgcttagagctgtcaccgtggtttacagatgtttagcgtgcgcctggcatttttctgggcacattaggagtgtctg

SEQ ID NO: 964868 - DNA, 120 bp, Artificial Sequence
  ENSG00000287982_3 (sequence is synthesized)
tttaatgctagtgacaacggtgggagttaagacccttattttgacatggatggctcacaatggggatgccaggaaccgggagagggaaatcgtgcctgtacccagacagatggaagccaa

SEQ ID NO: 964869 - DNA, 120 bp, Artificial Sequence
  ENSG00000287982_4 (sequence is synthesized)
ggtctacccaagggacagaaaccgctgagtcccgctccaccaacctgggacaaaccagcttaaaggcgctgttcaggaagactcagctctctccgctggtaatggctgggaaatggcgga

SEQ ID NO: 964870 - DNA, 120 bp, Artificial Sequence
  ENSG00000287982_5 (sequence is synthesized)
cgtagaagacctgcacctccagagtccctgcgccatggaatgtgcgcccctcatacccctaaacgtccaccttgcagtgcttttgcctgccggtccttggtgggcaaatggagagaccca

SEQ ID NO: 964871 - DNA, 120 bp, Artificial Sequence
  ENSG00000287982_6 (sequence is synthesized)
gcgccaagctttctatatgggaatcacccctcaacctttctgaaggatccagaacctctctccagggcttggaggcctcggattctggaggattccacaacttagagtcaagagggatgg

SEQ ID NO: 964872 - DNA, 120 bp, Artificial Sequence
  ENSG00000287982_7 (sequence is synthesized)
cctctcgaaacagtgggggtgacctggaggatcttagcattccaggcacaatcctagcctcgcctgggagaactgccactcagatgagggtcttgggcctggtgctccaggaggagggaa

SEQ ID NO: 964873 - DNA, 120 bp, Artificial Sequence
  ENSG00000287982_8 (sequence is synthesized)
gagggtgcccctggagagacgtggcgctcccattttacaccctccagatagctctggggccacgctcctgtgctccaactccattgagtcctgcatgcagctcggtgttccccggccaca

SEQ ID NO: 964874 - DNA, 120 bp, Artificial Sequence
  ENSG00000287982_9 (sequence is synthesized)
tcgtaaaaagatttacaagactatgttaaactggcaggatcctccactgggctctggagttcagaggttcaaggttaaagtgaaaagaaggctgagcatggagacaacaggagacttcaa

SEQ ID NO: 964875 - DNA, 120 bp, Artificial Sequence
  ENSG00000287982_10 (sequence is synthesized)
gtcccacttgacagttcctggctaagtgatcctaaacaagcctcttaacctctctgagactcagtatgcccatctatgcaatgagaatttgtaacaataaaatcaaaaagcctcctctgt

SEQ ID NO: 964876 - DNA, 120 bp, Artificial Sequence
  ENSG00000287984_0 (sequence is synthesized)
actgggtttctggctccaagatgacccagtggcatctccactacgtgctggagactgagaggctcaggacagtgcctgaagttcattcaccctcaggctacgtcttcagggactctgatc

SEQ ID NO: 964877 - DNA, 120 bp, Artificial Sequence
  ENSG00000287984_1 (sequence is synthesized)
tgctactaaaaccaagccccagggagtgaaggtccctgccatgtcatccctctgatctcctccctgtgagggcaaagaaaactactgggtgttgatcatccagcaccggtagaacctgca

SEQ ID NO: 964878 - DNA, 120 bp, Artificial Sequence
  ENSG00000287984_2 (sequence is synthesized)
gtcagctcttagactccagtataattgtgaagtgtgctgcagcaaacagaaaaataagtcaatgcagagcttccaacaccatcagctcactgtggttctgccttcatgggccagtaactc

SEQ ID NO: 964879 - DNA, 120 bp, Artificial Sequence
  ENSG00000287984_3 (sequence is synthesized)
ctggaaactgcctccattgcctttgctgtccctgcccctctgctggaagtcgcccacaggtgccagctggggccagcctcccccaagactgcctcccccatcaggagtggagtcctgcca

SEQ ID NO: 964880 - DNA, 120 bp, Artificial Sequence
  ENSG00000287984_4 (sequence is synthesized)
gtgagaagatggctgtctacaatcaggaagagagctcttaccaggaaccaaatctgccagaaccttgatcatggacttccagactttagaaatatgagaattcctgttgtttaagccacc

SEQ ID NO: 964881 - DNA, 120 bp, Artificial Sequence
  ENSG00000287984_5 (sequence is synthesized)
tagtctatggtattttattatgacagccagaactgactaagatgagtcccttggtcccaagaactctggactagaatagacatgttcaagtatgggttttacttctgacctgctgtgtga

SEQ ID NO: 964882 - DNA, 120 bp, Artificial Sequence
  ENSG00000287984_6 (sequence is synthesized)
cctcagcaagtcacttaacctctctgaacctcagtttccatcggtgtaattggatgataacacttagatcactgggttgtggaaagactcaataatgatgacagccacacttatagagca

SEQ ID NO: 964883 - DNA, 120 bp, Artificial Sequence
  ENSG00000287985_0 (sequence is synthesized)
agtgtcctcaccttactaacacctgcccacagggggaattttgatatatcactaaaaccagcatccagatgatgtgactcttcttccagggtcctgctcacagaaagattgtgacatctc

SEQ ID NO: 964884 - DNA, 120 bp, Artificial Sequence
  ENSG00000287985_1 (sequence is synthesized)
actggaccagcacccgcgcagatgatgtgaccttcctgcttgttctctgttcacaggtaatattgtgccatataccagagaccagatcaaaggcctaataaggactcttgtacctggagc

SEQ ID NO: 964885 - DNA, 120 bp, Artificial Sequence
  ENSG00000287985_2 (sequence is synthesized)
caggacttgtgcaggatggtgactctcatccctgaacatttccacaggtgttattgtgacatatacctgtgcccacctcctgagtgatttaataatcctgcctgttatagcccacagatg

SEQ ID NO: 964886 - DNA, 120 bp, Artificial Sequence
  ENSG00000287985_3 (sequence is synthesized)
acatattgacgtatacctgggccaagaaccttggtgatttgactctcatatcttaacagtgtcctcagaagggaccgtcacatatctctggacccatcatctaggttatgtgactctcct

SEQ ID NO: 964887 - DNA, 120 bp, Artificial Sequence
  ENSG00000287985_4 (sequence is synthesized)
cccatcacttaggtgatgcgactctcctttcctgcctggatgttctccacaagaggcattatgccatagagctgagcctagcacccaagttttgtgacttttctgttagggccctgccta

SEQ ID NO: 964888 - DNA, 120 bp, Artificial Sequence
  ENSG00000287985_5 (sequence is synthesized)
caaagagaatattggaatatttctggcttaggatttaggtgatgtggttgtcctgcctgtttaataactacagaggggatggtgacacatacctaggcacagctaacgggcatgataatg

SEQ ID NO: 964889 - DNA, 120 bp, Artificial Sequence
  ENSG00000287985_6 (sequence is synthesized)
actcatatgtggacccagccaataggagaaattttgactcataactaggtttagggacatgagtgatgtaaagggtctccttctggtaaaaaggtcacagaagattataacacacacata

SEQ ID NO: 964890 - DNA, 120 bp, Artificial Sequence
  ENSG00000287985_7 (sequence is synthesized)
ttttataacacccttgggttgtatagagagtgtcagaacagggcctagcacatggagaaaattgtgagtctcatatgcacacccacctgacagtaaggactttcaccatcacagatggat

SEQ ID NO: 964891 - DNA, 120 bp, Artificial Sequence
  ENSG00000287985_8 (sequence is synthesized)
gaaggcaactgtcctacatgaaaacagaacatgtgtggtattgtaaatctaatccctaaaattttatttcatcgtgatagtcatgtgatataaatttcatgtgatataaatctttgccaa

SEQ ID NO: 964892 - DNA, 120 bp, Artificial Sequence
  ENSG00000287986_0 (sequence is synthesized)
actgcagcctcgacctcctgggctcaattgattctcctcctcagccttccaagtagctgggaccacacacgtgtgcaccatcatgcctggctaatttttaaattatttgtagagacaggg

SEQ ID NO: 964893 - DNA, 80 bp, Artificial Sequence
  ENSG00000287986_1 (sequence is synthesized)
tcatgcctggctaatttttaaattatttgtagagacagggtctccctgtgtcgcccgggctggtaactcccgggctcaag

SEQ ID NO: 964894 - DNA, 120 bp, Artificial Sequence
  ENSG00000287986_2 (sequence is synthesized)
tgtgacctggtctgcttctaatggtaagtcatttttgcaaataaaacaaatattggtaagtttgtacacataggatacttatacaagtcctatgagcagtgtcggaaaaaaataacaaat

SEQ ID NO: 964895 - DNA, 120 bp, Artificial Sequence
  ENSG00000287986_3 (sequence is synthesized)
tttgaaagcaaaataagtcttgaaactggcaattccaacaagtgattctatgaaccttgttagtgagtctgaatgttagttatttgaacacttcccagtaatgattgctggcatttccac

SEQ ID NO: 964896 - DNA, 120 bp, Artificial Sequence
  ENSG00000287987_0 (sequence is synthesized)
catatgttcaggcttttttccctcctccccacagcctgggcatggcaggtgaaggagcctcctcctctactttctctgcttctcaaatgttctaagacttgggagaagcccaaagacctc

SEQ ID NO: 964897 - DNA, 120 bp, Artificial Sequence
  ENSG00000287987_1 (sequence is synthesized)
caggctcttcactcattcattcaacagataccttctgagcatctggtctgcttcaggggacccccaatctaagacagatatccccaatttcacatgaagagactgaggcagctggaggca

SEQ ID NO: 964898 - DNA, 120 bp, Artificial Sequence
  ENSG00000287987_2 (sequence is synthesized)
aagcagcttgtacaagaccccacaagaagaggaggagttgctttcttgaactgctgtggttttacccacagtcaccggaccgtgctgccgccctggtgggaggatgtgtctgcctgcaca

SEQ ID NO: 964899 - DNA, 120 bp, Artificial Sequence
  ENSG00000287987_3 (sequence is synthesized)
ggttgaacaatctcaagacaccttgctggaattggcagaacattgagctcattcggtcactaccagggctatcaggcacagaggatgaggcagtcctgccctgccctctagaaccgaaag

SEQ ID NO: 964900 - DNA, 120 bp, Artificial Sequence
  ENSG00000287987_4 (sequence is synthesized)
tctggacagggagtggcagttaaatgtggggcagaatgagatcaatgtctccaaggggtaaccctgtcatcctctcccttggatcttctctgggagagctgcaggacatgagcgatcact

SEQ ID NO: 964901 - DNA, 120 bp, Artificial Sequence
  ENSG00000287987_5 (sequence is synthesized)
ggagatggacttgccccaggccacacggcttatacctggcagaactgagtctgtcccagggctctttgagcacctggggatgcagaagctggcggggtgggaggtggcggggactgtgga

SEQ ID NO: 964902 - DNA, 120 bp, Artificial Sequence
  ENSG00000287987_6 (sequence is synthesized)
aggcttcgtggctctcatgggcactccagctcactgtctttactgccacagccactgcttctacatttgctatctcattggatcatggcgccttgaacaaaagtgtccttactcattatc

SEQ ID NO: 964903 - DNA, 120 bp, Artificial Sequence
  ENSG00000287987_7 (sequence is synthesized)
taattgaactcccattttacaggtgggaaaattaagacccagagaaggaacttcccagagagctatccagtgagccaagtcagagttaggagcaggagcctcaaattcccaggaaagcag

SEQ ID NO: 964904 - DNA, 120 bp, Artificial Sequence
  ENSG00000287987_8 (sequence is synthesized)
cacggtcctcgagttcccccaaaagccagacggcatctttgacacctgactcccaggggccagtcctggagaggacacctggcctggagccaaccttcctctcctcgctgccaaagctct

SEQ ID NO: 964905 - DNA, 120 bp, Artificial Sequence
  ENSG00000287987_9 (sequence is synthesized)
gctctctgggttctggcactgtctgaaaattcctccgttggtctgctctcggcagagcatagattatcactcttgtgctaattatttttatgattaaaagatgataaattattaaacaaa

SEQ ID NO: 964906 - DNA, 120 bp, Artificial Sequence
  ENSG00000285582_0 (sequence is synthesized)
acagaatgggttgcaaaacttgcttacttgtgtgacatattcaacctgctcaagaaactcattctgtcacttcaggagagaataacaactgcattcaagttggcaggtaaagtggctgca

SEQ ID NO: 964907 - DNA, 120 bp, Artificial Sequence
  ENSG00000285582_1 (sequence is synthesized)
ttcaatgccaaactggaattatgggggcgacaagtaaactctcgaatttctgacatgtttcaaacattagaagagatttttttctcccagcaccatctttctcccagctggtgcatgaac

SEQ ID NO: 964908 - DNA, 120 bp, Artificial Sequence
  ENSG00000285582_2 (sequence is synthesized)
aactattacagcttacaaaagaatttcagcattacttcccaacttcaaaaagaccccaaactgggaaggaatggatacgcgacccatttgcgagtaagccaggtgaatcgactttgtcca

SEQ ID NO: 964909 - DNA, 120 bp, Artificial Sequence
  ENSG00000285582_3 (sequence is synthesized)
tgctagaagaggatcaactgcatgagatcgcaaatgacagtagccttaaaagtatgtttaagacaacttcaaatcactatacattgtgagttaaagtcaaggcagaatatcctgagattg

SEQ ID NO: 964910 - DNA, 120 bp, Artificial Sequence
  ENSG00000285582_4 (sequence is synthesized)
ccacaaaagcaccaaaaagcctgcttctatttccagcatcctgtcttcgtggagcagagttttctgcagtgacagcaaccaaaatgagattatggagtagactgaacataggcaaaacac

SEQ ID NO: 964911 - DNA, 120 bp, Artificial Sequence
  ENSG00000285582_5 (sequence is synthesized)
gaccatctagttgcaggaaaacaagcccaggattctcacttattctacattatgatgacaataaaatatgagtgcaaagaagaacaaatccctgaacagatgatatcgaagtcatactgg

SEQ ID NO: 964912 - DNA, 120 bp, Artificial Sequence
  ENSG00000285582_6 (sequence is synthesized)
caaatccctgaacagatgatatcgaagtcatactggtaaacaaaattactcatctgaaattaagacgatatcagcatttacaatgaatgcatataaaatttactttgataccaagactcc

SEQ ID NO: 964913 - DNA, 120 bp, Artificial Sequence
  ENSG00000285582_7 (sequence is synthesized)
aaatgtctaacgactacatgctcaacatctgcaggatctgtacggttccaggcaaaatgttttgtaaagacttaagtactcaatgttttgattgtatattttacagaaaaaaattaaatt

SEQ ID NO: 964914 - DNA, 120 bp, Artificial Sequence
  ENSG00000285582_8 (sequence is synthesized)
catgaaaattcaaaactatatgagaagtcaagatataacttggttgtataatataaaagagcatgctatcacccatacactgttattgaagaaaaggtatgtttatcatatttagcttta

SEQ ID NO: 964915 - DNA, 120 bp, Artificial Sequence
  ENSG00000285582_9 (sequence is synthesized)
ctgggattacaggcgtgagccaccatgtgattatattctactatatatttgttctcccttgcatacatacttggatacgttgtaggataaataaattccataataaattgctgattcaag

SEQ ID NO: 964916 - DNA, 120 bp, Artificial Sequence
  ENSG00000285582_10 (sequence is synthesized)
aaataaattccataataaattgctgattcaaggatatttataatatttctggtgaaaaattctctggttaccaatttctacattctgaagaaaagaaaaaaataatatatagacttcctc

SEQ ID NO: 964917 - DNA, 120 bp, Artificial Sequence
  ENSG00000285582_11 (sequence is synthesized)
tctagccattcctgtgaaagcatctctcattacttcaccctcagtcttctagatataaaaatgtatataaagtatcaggcatataatagattctcaatgaatattacttttcttatttta

SEQ ID NO: 964918 - DNA, 120 bp, Artificial Sequence
  ENSG00000285582_12 (sequence is synthesized)
gaggagatagtggtatagccacttaactcttaagccacaatttcctcatgtgtcaatgggaaatatacccacttgacagaattgaaggtaattaaatgacataatgtatgcatagctttc

SEQ ID NO: 964919 - DNA, 120 bp, Artificial Sequence
  ENSG00000285582_13 (sequence is synthesized)
agtacagtctctgcaatagggactacaaaaacttagctcccataatcctcttcaaattacaagtgatataccttagagcactgaaaggcagttcacaactccctgcagtctcaccacatc

SEQ ID NO: 964920 - DNA, 120 bp, Artificial Sequence
  ENSG00000285582_14 (sequence is synthesized)
tgttgctaccagtaaagctacactagtacttgtttacttaatcacttgccaaaaaacaattgtcaatttcataattaattttcaaccaaacttataggtttagatcacgttttgtggcat

SEQ ID NO: 964921 - DNA, 120 bp, Artificial Sequence
  ENSG00000285582_15 (sequence is synthesized)
attattaagattttatgtcacttaagaagggatcctgcctactaatttgaaatttaacacggtagcctgcttctggtatacaagacattaataaaaataaacaaaaaaaacctcttttac

SEQ ID NO: 964922 - DNA, 120 bp, Artificial Sequence
  ENSG00000285582_16 (sequence is synthesized)
attaaattacaagaatcattaaaagaaggaatttttaaaaaatacttacgaatagaaaatgttgaaaccagttagattatacgcagcatcactaaaaaaatgtaacagtgcatagccaga

SEQ ID NO: 964923 - DNA, 120 bp, Artificial Sequence
  ENSG00000285582_17 (sequence is synthesized)
tgtagtaacaacttcaggcacagtttcattgccccttatttcagggactatcaaaccactaaaagagaacaaaactgaatattgtatgtatagatatacataagactgttaagcacataa

SEQ ID NO: 964924 - DNA, 120 bp, Artificial Sequence
  ENSG00000285582_18 (sequence is synthesized)
aatttactcagaaatattcttaccaggatcagtaatgcttgtacgtcagaatgggcaactaaaaggagaatacatctaaaagaagtccctatccatttctcactaaattagttctactac

SEQ ID NO: 964925 - DNA, 120 bp, Artificial Sequence
  ENSG00000285582_19 (sequence is synthesized)
tgctgccaatacactaaaatctactctcatgccactgtaccccattttttttcttatcactatttgtaaggcaatgtctcatttctcctttttgtcctgctatccatcctgtcataatac

SEQ ID NO: 964926 - DNA, 120 bp, Artificial Sequence
  ENSG00000285582_20 (sequence is synthesized)
tacagggtagtcttccacttaattcatataaaacttcacttaaagtcaccttgctactctaataaaaccctgtacctttactcattctgattggtttaaaaatccgatgaagctggaaga

SEQ ID NO: 964927 - DNA, 120 bp, Artificial Sequence
  ENSG00000285582_21 (sequence is synthesized)
cactctacatcagttaagcaattacaattacattctagttatagctgtacatttccaatacatttatctaggtgatttaaaatatttacttcaaaaaatttaaaactatatagactttaa

SEQ ID NO: 964928 - DNA, 120 bp, Artificial Sequence
  ENSG00000285582_22 (sequence is synthesized)
tgtttttctaattttgcatatctatgcaaattgcattaatatataactattccaagacagaatattgctcacataagcccataagcacacaaacaaaaacttggggtgggggagatataa

SEQ ID NO: 964929 - DNA, 120 bp, Artificial Sequence
  ENSG00000285582_23 (sequence is synthesized)
atgtacaaaatagttttaaactggtaacttgtacttctttttaaggatacttgttcatgaggaaaattacctatcttcatttagttatatgttctaacctctctaaatctatgaaaacat

SEQ ID NO: 964930 - DNA, 120 bp, Artificial Sequence
  ENSG00000285582_24 (sequence is synthesized)
taccactaagaactgaattcccccattcaaatcatatttgacacataaatgaaatattatagtcaaataattgatttagaaaatacattctcaaatgcaaacaagttaaaaagtaatcaa

SEQ ID NO: 964931 - DNA, 120 bp, Artificial Sequence
  ENSG00000285582_25 (sequence is synthesized)
ctcttgatttaacgctttagtaattattattacatctactaggttatgtttgtgaagcaacaaatgattttaaaatgagactctcaaaacaatacaaaccctatgacaccagtcttaagt

SEQ ID NO: 964932 - DNA, 120 bp, Artificial Sequence
  ENSG00000285582_26 (sequence is synthesized)
tatacatacatattgttcattgtaataaaattatataaaggtgagtattactaaaaataggtctttataatagatacagctagtctctgagcgctctctgaaaaagataaaaagaatagg

SEQ ID NO: 964933 - DNA, 74 bp, Artificial Sequence
  ENSG00000285582_27 (sequence is synthesized)
taggtaggtggaggcaggcggataacgaggtcaagagatcaggaacatcctggccaacacagtgaaaccccatt

SEQ ID NO: 964934 - DNA, 120 bp, Artificial Sequence
  ENSG00000285582_28 (sequence is synthesized)
gtctcaaaaaaacaaacaaacaaaaaagaatagatctgtttggttttttgtttacaagtattttaaaaacaataaataaaagagagtttccacttcctgtataatacaccaggaaattcg

SEQ ID NO: 964935 - DNA, 120 bp, Artificial Sequence
  ENSG00000285582_29 (sequence is synthesized)
agagagtttccacttcctgtataatacaccaggaaattcggaccaactgaaatctagtaaaatgacaaattatataaaaacaaaaaaatcagcttgaaggcctgcccaggcattgaggtc

SEQ ID NO: 964936 - DNA, 120 bp, Artificial Sequence
  ENSG00000285582_30 (sequence is synthesized)
atttaccctattggcatttgctgatttcaaggctggaggtaagatttgaagggctaaaaaaaactcggtggtaatttcagggattttacagaatgaaggaaagaaaaagtgaaacacaag

SEQ ID NO: 964937 - DNA, 120 bp, Artificial Sequence
  ENSG00000285582_31 (sequence is synthesized)
gccttcacgttgaactgggactccaatggttggaagtgaaagcaaactacctaaagttaggccctccaaaggactgcactgcagctgagctatgaatcacctcagtatctgagtttggat

SEQ ID NO: 964938 - DNA, 120 bp, Artificial Sequence
  ENSG00000285582_32 (sequence is synthesized)
tgagttgaatatggattgcgagtgtccccaggtagtctctgcaagaatataatctttctaggcctcaaattattactatatatgattttccaaacaacaacgtccaacacacaattgtcc

SEQ ID NO: 964939 - DNA, 120 bp, Artificial Sequence
  ENSG00000285582_33 (sequence is synthesized)
agcacacagtaaaaaaaaaaaaaaataacacttctccattccaatgcattctccacattctaaaaactcttgcctacagaataaaagcccaacttctttagtgtggtgtacaagcaagca

SEQ ID NO: 964940 - DNA, 120 bp, Artificial Sequence
  ENSG00000285582_34 (sequence is synthesized)
atattacagtgattaagggattaggacctataattacataaccttgattcatattctgacttaccagctaggcaaccttcgggccactcacagaaaatctctgtgtctcaattctgcatt

SEQ ID NO: 964941 - DNA, 120 bp, Artificial Sequence
  ENSG00000285582_35 (sequence is synthesized)
tgtaaaattacaatattaatacctacctaaaggttattttgaggattaaataaactaatgcatataaagaactcctgtacattggcacaaaatgagcactaagtaaatgtcactgattgc

SEQ ID NO: 964942 - DNA, 120 bp, Artificial Sequence
  ENSG00000285582_36 (sequence is synthesized)
tgttttggggtaatgtgactcctacgtatccttcacagttcctacaatcaagttactcaaaactttcaactattgccctaaaatataatgctctttaatgtgtctatacctttgtatata

SEQ ID NO: 964943 - DNA, 120 bp, Artificial Sequence
  ENSG00000285582_37 (sequence is synthesized)
tgcttttctctccctagaatgtcctatctgacccccatacttcatacttttactcacgatgaaagtcaacatgaaggattagttatttattttgaaattatatagaactccttcataacc

SEQ ID NO: 964944 - DNA, 120 bp, Artificial Sequence
  ENSG00000285582_38 (sequence is synthesized)
tgattgtaacactaactaggctgtgtgaaaaatctgtttacatacccccactaatgcatgactactgcatactaaagaatttggctggcttttgtccccagttcttgggacataacctct

SEQ ID NO: 964945 - DNA, 120 bp, Artificial Sequence
  ENSG00000285582_39 (sequence is synthesized)
aaattcttgaaatttcctgagtgatgggagtgtcttcctattcatggtgagccctgaaaatttatgccaatgaggtgactcatggtgggcccctaattaatttaagctaaagatataatt

SEQ ID NO: 964946 - DNA, 120 bp, Artificial Sequence
  ENSG00000285582_40 (sequence is synthesized)
cagaataggggatggccactccagaaacactaaccatgtgattaaaatgttggggccatatggtattagcctaacttcccgagagagaaggggatgggaggggctggagatttgagttca

SEQ ID NO: 964947 - DNA, 120 bp, Artificial Sequence
  ENSG00000285582_41 (sequence is synthesized)
gcctcatggccaatgattcaatcactcatggctacataatgaaacttcaataaaactctggacacctgaagctcagatgagcttccctgttggtgatacatgttgatgtgctgggtgggt

SEQ ID NO: 964948 - DNA, 120 bp, Artificial Sequence
  ENSG00000285582_42 (sequence is synthesized)
aacacattctgaggacccagaagctttgcatttatgatcctcccagacctcactctatgcatccctttatttggctggctctgatttctatccttcatgataaaactatagtcataagtg

SEQ ID NO: 964949 - DNA, 120 bp, Artificial Sequence
  ENSG00000285582_43 (sequence is synthesized)
tagaactttcctgagttctatgataattctagtgaattatcaaacttttaggacagagtaggaacccctaaatatgtagccagatggtcagagtaggtggggagcaccaagcttgcagct

SEQ ID NO: 964950 - DNA, 120 bp, Artificial Sequence
  ENSG00000285582_44 (sequence is synthesized)
agtgtctgaaatgacagcagtgttatagagcagcaatccccaacctttttggaaccagagaccagtttcatggaagacaaaatttccacagaccgggggaggatgattttgggatgattc

SEQ ID NO: 964951 - DNA, 90 bp, Artificial Sequence
  ENSG00000285582_45 (sequence is synthesized)
tttctattattattacattgtaatatgtaatcaaataattatacaacccgccataatgtagaatcagtggaagccctgaacttgactgat

SEQ ID NO: 964952 - DNA, 120 bp, Artificial Sequence
  ENSG00000285582_46 (sequence is synthesized)
caactagatggtcccatctggggctgatgggagacagtgacagaccatcaggcattagaacctcataaggaatgagcaacctagatccctcacatgcacagttcacagtagggtctgtac

SEQ ID NO: 964953 - DNA, 120 bp, Artificial Sequence
  ENSG00000285582_47 (sequence is synthesized)
tcctatgacaatctaatgccgctgctgatctgacagaaggtggagctcaggcagtaatgcaagcagtggggagcagctgtaaataaagatgaagctttgctcacttgcccgccactcact

SEQ ID NO: 964954 - DNA, 120 bp, Artificial Sequence
  ENSG00000285582_48 (sequence is synthesized)
tcctactgtgtagccctgttgctaacaggccatggactggtacggggatctggggtggagaggagacccttgttgtagaggactgtgctcttaacctaggaaatctgttctagcccaact

SEQ ID NO: 964955 - DNA, 120 bp, Artificial Sequence
  ENSG00000285582_49 (sequence is synthesized)
gcaggtagttggtgtctaaagccactgcgatagcctatgccttcttccttactatgtactctaagcctgtgacacagtctctgtaattaaatgttgagtaataaatatttatacaattga

SEQ ID NO: 964956 - DNA, 77 bp, Artificial Sequence
  ENSG00000285583_0 (sequence is synthesized)
aactcttggactcaagttgtgccactgtgcccagctgagagtaggttttaatctgagcatgggggcagctatgattc

SEQ ID NO: 964957 - DNA, 120 bp, Artificial Sequence
  ENSG00000285583_1 (sequence is synthesized)
agagtaggttttaatctgagcatgggggcagctatgattccccgtagcacctggggtgagaccaggtcctggctccactcaccctgccaggatctcgtggtctgacaccttcacactgga

SEQ ID NO: 964958 - DNA, 120 bp, Artificial Sequence
  ENSG00000285583_2 (sequence is synthesized)
gcctgtgaggccagcatgatggctttcactcacccctgcgtggccccggaatttgcgcacgacctgccctgatgccacatcccacagaaccaccgccttgtccccgccgccggagcagag

SEQ ID NO: 964959 - DNA, 120 bp, Artificial Sequence
  ENSG00000285583_3 (sequence is synthesized)
actactgttgtcaaaggagctggagtaaaggaggaggaggatcagcatcgacctcggatcccagcctcagcgctcccatcccagcctggtccccggctcacccggccgcatccagcacct

SEQ ID NO: 964960 - DNA, 120 bp, Artificial Sequence
  ENSG00000285580_0 (sequence is synthesized)
agaacatgaagtctaggaaccggcatgcgcataacctccgtatataaatgatgctgaaaagctgttacggttttttttttttagggttcggtgttttactgttgagctgctcagtgccca

SEQ ID NO: 964961 - DNA, 120 bp, Artificial Sequence
  ENSG00000285580_1 (sequence is synthesized)
gcttagaggaccaggaaaaggagtcaccggccgtatgctggaggcttgagacacggcacagcggcgcagctcgcctcgctatggttggtggtgtcagtggagattgcgattgccgcgcgg

SEQ ID NO: 964962 - DNA, 120 bp, Artificial Sequence
  ENSG00000285580_2 (sequence is synthesized)
ctggagggtcctttaggttgtttgagggacattcatcaaggaaaccggagaaacttaaaatgctcttccgcttctttggaacagtcacagagaaaagtgaactcctttcattcttgcagt

SEQ ID NO: 964963 - DNA, 120 bp, Artificial Sequence
  ENSG00000285580_3 (sequence is synthesized)
aatttttcttgctgatgggaacagttcaagtcaagtgacataacctactgggttggtgacatttacaagacagagtcttgaggattttccagaacgggaaagattttgaaagaacaaaga

SEQ ID NO: 964964 - DNA, 120 bp, Artificial Sequence
  ENSG00000285580_4 (sequence is synthesized)
ggaactacagaatcattgcttacattgacaccggccctgttgtcccaatggatgggttttttttggatgaacgtcaaaattgaccctgctgttaaagcttgaaacttggatctgttgtat

SEQ ID NO: 964965 - DNA, 120 bp, Artificial Sequence
  ENSG00000285580_5 (sequence is synthesized)
ctgagttctctcctcaaaaaaagaccttcaggaagtatcagataactgaaacataccagatcacagcaccacatgcctcctgcccctccctaatttctgttctcttatacattgttaaat

SEQ ID NO: 964966 - DNA, 120 bp, Artificial Sequence
  ENSG00000285580_6 (sequence is synthesized)
tacttgtcacctcagtgactggctttttctccgatgagcaggaggacctggacgaaacccctagtgtttggtcaaggaacttgatgctccctaaatccaaatattacggttaaaagaaga

SEQ ID NO: 964967 - DNA, 120 bp, Artificial Sequence
  ENSG00000285580_7 (sequence is synthesized)
gagaggaaatgtgtgcagagaaagtgtattttacaaatgaattaaaggtggattctgagttacaggtttatagatttacctagagttttgagttcaggaagccatcattctttagagggc

SEQ ID NO: 964968 - DNA, 120 bp, Artificial Sequence; identical to SEQ ID NO: 795262
  ENSG00000285580_8 (sequence is synthesized)

SEQ ID NO: 964969 - DNA, 120 bp, Artificial Sequence
  ENSG00000285580_9 (sequence is synthesized)
gcagatgaggagtccgttgaagatgagtctgttgaagatgagtccgcagagaacaggatggtggtgacattgctcatatcagctcttgagtccatggatcatggcacaagttgcagtttc

SEQ ID NO: 964970 - DNA, 120 bp, Artificial Sequence
  ENSG00000285580_10 (sequence is synthesized)
ggagagcaggatggtggtgacattcctaatgtcagctctcgagtccacggtcagaccttctgttctcacattctgtagtttggtaggactgggcagtagataaggttgatttatttttgt

SEQ ID NO: 964971 - DNA, 120 bp, Artificial Sequence
  ENSG00000285580_11 (sequence is synthesized)
aggactgggcagtagataaggttgatttatttttgtagaacttacaattttatgattttcagttgtaatgagtagacctttttcgtgaatagtagttatggttaaacacctctaaccaaa

SEQ ID NO: 964972 - DNA, 120 bp, Artificial Sequence
  ENSG00000285581_0 (sequence is synthesized)
gcagaatgatggtctccaaaagagatccgtgtcctaatcctaagagactgtctccttagatagcacagcaggatggaagctgcagatggaatcaggttcccggtcactgacctgaggaag

SEQ ID NO: 964973 - DNA, 120 bp, Artificial Sequence
  ENSG00000285581_1 (sequence is synthesized)
gggaggttatctggatgggcccagtgttgtcaggagagccaagggcactgagcagggaggcagcggaggaagacagcgcggcgtgggaagggcctgagtcagcagtgcaggcagctccta

SEQ ID NO: 964974 - DNA, 120 bp, Artificial Sequence
  ENSG00000285581_2 (sequence is synthesized)
gaagctgggaaaggaaggcacccagaaagaactggccctgcagactagcccggtgaggtccgtttgaggtaagttcattttgcctccagccacgaagttcatggcaactgcagcaacagg

SEQ ID NO: 964975 - DNA, 120 bp, Artificial Sequence
  ENSG00000285581_3 (sequence is synthesized)
agatgaaggcagattttggttctaggcatgaggcactgctgtagcaaatacctagaaaggtggaagtggctttggaattgggctgaaagaattttgagggtgatagaaaaagcccgtgat

SEQ ID NO: 964976 - DNA, 120 bp, Artificial Sequence
  ENSG00000285581_4 (sequence is synthesized)
gttgttaaacaggtggtagaaggatggaggcgagcggggctcgaggggctcggaggaaccagcctgggctctgagaagagtcagagcccctctgacccgcccgtcctcggacatgtgggg

SEQ ID NO: 964977 - DNA, 120 bp, Artificial Sequence
  ENSG00000285581_5 (sequence is synthesized)
ttaaaggtgcaggtgggagctcagagggaaaggaaagaacgggagccagggagagccccgtccatgggggcagaggtgcagctgcactctgtcccgttgccacgtgcgggcagcactcga

SEQ ID NO: 964978 - DNA, 120 bp, Artificial Sequence
  ENSG00000285581_6 (sequence is synthesized)
gggtggtcagcctgggccccttgcgctgctcaggttggccactaagtgagagaaggacattagcagaggggtgagcaccctgccatcgggaattctcagctgaagatgctgatgtcagga

SEQ ID NO: 964979 - DNA, 120 bp, Artificial Sequence
  ENSG00000285581_7 (sequence is synthesized)
gattcactgtcaggaatgtgtgctcagagtaacggccacaccaagagctcctggaggagggcgagcctgtggctggtggatgccccgggtcacccaagcagatgctcaaagcagggaccg

SEQ ID NO: 964980 - DNA, 120 bp, Artificial Sequence
  ENSG00000285581_8 (sequence is synthesized)
ctgtgggaggtctgtggacgagccttgggtctgtggacgagccttgggtcttacggatccggtgaagccctgtgggaaccacgagaggctcttaaaccatcagaaactcagctggcttgg

SEQ ID NO: 964981 - DNA, 120 bp, Artificial Sequence
  ENSG00000285581_9 (sequence is synthesized)
actgaggcagaggggatgtgatgaaaggctcttgagccccaaaaatcagcaggcaggaagcagactaaactgttcagctgcaaacacttgctacgtttcataaatagagagcatggccct

SEQ ID NO: 964982 - DNA, 120 bp, Artificial Sequence
  ENSG00000285581_10 (sequence is synthesized)
gggacccacagaaggagttcccaggccttgctgggacggaggaagtgtacccagctggattttggatttcttgggagcagcgacacaagcaccttgcagctttctctgtgtgtcacgtgt

SEQ ID NO: 964983 - DNA, 120 bp, Artificial Sequence
  ENSG00000285581_11 (sequence is synthesized)
gtgtgtgtgtgtatgcacatataaatgactgggtttcaccgtcacccaaactggagtgctgggtaatcctagctcactgcagcctcagacttccgggctcaaggggtcctcccccttcag

SEQ ID NO: 964984 - DNA, 120 bp, Artificial Sequence
  ENSG00000285581_12 (sequence is synthesized)
actcctgagtagccagcaccacaggtgcgagccaccacgcccggctgattttgaaatattttgtagagttgaagtttcactacccaggctggtcttgaacccctggactcaggtgatcct

SEQ ID NO: 964985 - DNA, 120 bp, Artificial Sequence
  ENSG00000285581_13 (sequence is synthesized)
ttctgtctcagcctcccaaagtgctggaccgtcacacccagccaaactttccttgaaaacaggagtgtctgtgactggcattccgcgtctgttctctggtcgtattttgggagcaggtaa

SEQ ID NO: 964986 - DNA, 120 bp, Artificial Sequence
  ENSG00000285581_14 (sequence is synthesized)
ctggttttctagctttcggggtccacagatggagaggaaactgccccagggtggaatgcccagagtgtcacccatacctgatcggggtagcttagagggtgcgacttgcgacttgtgagc

SEQ ID NO: 964987 - DNA, 120 bp, Artificial Sequence
  ENSG00000285581_15 (sequence is synthesized)
tgatgagctgtacgtgaggtttgggactggactgggtgctgtgtttggtggagactgttggggccgtgaggggagggatgcatttgcacgtgggatgggtgtgaagcagcgggagtggga

SEQ ID NO: 964988 - DNA, 120 bp, Artificial Sequence
  ENSG00000285581_16 (sequence is synthesized)
gggtactgcgttcggcctgagacatcccttaccactggtgatgtccacatctagtcccatggaagtgaacgtgccacccagcagcaaaggggaatgaaagcagcgatgggattaaggcaa

SEQ ID NO: 964989 - DNA, 120 bp, Artificial Sequence
  ENSG00000285581_17 (sequence is synthesized)
tcagctgaccttgagaggcagagatggtctgggcccagtgagagcacgaggccttcatcgtggaagctggacgcaggttgggatgcgcaggacacagctgtgaggaggctccacccacgc

SEQ ID NO: 964990 - DNA, 120 bp, Artificial Sequence
  ENSG00000285581_18 (sequence is synthesized)
tcctggctgcgaaggtggagaccccaggccacgggatgcaggcggccacaggtcctcccctggagcctccaggaggagcacaccttgattctagaccagggcaccccttgagtgagacct

SEQ ID NO: 964991 - DNA, 120 bp, Artificial Sequence
  ENSG00000285581_19 (sequence is synthesized)
gcccagtccttgactctgggactgtgagcttaggaggctggggctctgtgcctctgccttcagctgacggaaaagcccagggcaggctccccatggagcagacctaggcctggactgctg

SEQ ID NO: 964992 - DNA, 120 bp, Artificial Sequence
  ENSG00000285586_0 (sequence is synthesized)
gtgtcttcaaggtcagtaatttacatgtcctcctctcgaggctaaggcagcctctccttgcaaataggaagtttttgcttgatcgtgaccttgggaaaaaggaagcaaaggaggaatgac

SEQ ID NO: 964993 - DNA, 120 bp, Artificial Sequence
  ENSG00000285586_1 (sequence is synthesized)
tccttttatgagctttctggagatatttgttctaagaaccttctcagtattccccgtacctttggtgactctgaataaggaaagcgagcaagcagtgaagagagaggagctggttgcggg

SEQ ID NO: 964994 - DNA, 120 bp, Artificial Sequence
  ENSG00000285586_2 (sequence is synthesized)
agaaattcctgaatgaacacagagaggactttagcaacgcattcggccttggagaagataaaggaggaaattttctaaggtggggaggacctttcctcacgtctgtcctagacaaggcca

SEQ ID NO: 964995 - DNA, 120 bp, Artificial Sequence
  ENSG00000285586_3 (sequence is synthesized)
caggctgcagggctgcgtctctgccaactgtgacaagaacagcctcttccagtctacgggatgcaatactttgtccaatattcagttaacagggcattcgaaatctagctgagtgactgc

SEQ ID NO: 964996 - DNA, 120 bp, Artificial Sequence
  ENSG00000285586_4 (sequence is synthesized)
tgagccagggcgcgaggtcctgggccttggagcccaggtggcctgggcggtgcggctcctcgcgctgctgcctcaggctctcacctccctctagcggccgccaaggacatcacacacgcc

SEQ ID NO: 964997 - DNA, 120 bp, Artificial Sequence
  ENSG00000285586_5 (sequence is synthesized)
ggggctgcggtgggggcctgcacaagaaagtggccttactcccaatagcggaaatggagtttcccttgtttcacttaaaaatacaatggaaaaaaatgcctctgtacaacagcctaagct

SEQ ID NO: 964998 - DNA, 120 bp, Artificial Sequence
  ENSG00000285586_6 (sequence is synthesized)
gacagttgatgtctaaccctgggctgtactcaccactaaacactgatagatgttgtcattttcatgctaaagaaaccccactcaccccaaataatttgtcaaagagtactcatgtagaca

SEQ ID NO: 964999 - DNA, 120 bp, Artificial Sequence
  ENSG00000285586_7 (sequence is synthesized)
gcaagttttggaaggtggagatgcttatctgtcttctgtgatgtgcctgtgcctgatagctagtaaataagtttaaatgaattgacattgaaatacactacaggcttggaattaaaaaca

SEQ ID NO: 965000 - DNA, 120 bp, Artificial Sequence
  ENSG00000285586_8 (sequence is synthesized)
aagaagaaacctattcctaccctcagagaatgaccacttcatcgcagaggagatgatggctgaagtgcttatgctcatcaacgactgtggaattgggtcttggaattttagttcctctgt

SEQ ID NO: 965001 - DNA, 120 bp, Artificial Sequence
  ENSG00000285586_9 (sequence is synthesized)
taaacttaggaaatggatggctggaggtctgcgccagccgatgagggattgatacacctgagattgctttacaaaacactgcttttagtgtttaatgacacaggatagtgtctacagcag

SEQ ID NO: 965002 - DNA, 120 bp, Artificial Sequence
  ENSG00000285587_0 (sequence is synthesized)
agtgctcgggatctttgctgatgtccaagttcatctctcggggagaccgagtttgaatcaaatctgcgtgcgcccagctgtcaaatctgcaaacctatcacgccagacaatgggccgccg

SEQ ID NO: 965003 - DNA, 120 bp, Artificial Sequence
  ENSG00000285587_1 (sequence is synthesized)
cggaggacagacaagaatggctcattttgatcgaggggggtaaattgaaaagggcacgggctttggttgaagtttgaggcccgggtgtcagggcggggagaagaagaggaggaaggagga

SEQ ID NO: 965004 - DNA, 120 bp, Artificial Sequence
  ENSG00000285587_2 (sequence is synthesized)
gggttgggccgctctccattcaaccacacatcagccaggcgcgcccctcggctgcagcggctgcttgcaggcgggctgcatattgtgtggagtcgccaaagagggtctgcgcctcggggc

SEQ ID NO: 965005 - DNA, 120 bp, Artificial Sequence
  ENSG00000285587_3 (sequence is synthesized)
gcgccccaaacccgggggacatcctacggatccgcacttctcttgtgctgtacgcgtgttcctccagggtaagtatgaggagacggacgccctcatcagacacccctcctccaacacaca

SEQ ID NO: 965006 - DNA, 120 bp, Artificial Sequence
  ENSG00000285587_4 (sequence is synthesized)
cacacccatagccacatcattcagggatactctagttcagtgtatcagtttacacttggttgttgagtaaacaaagcaaacatatgtcacattttcgcgacagatggttcaaaccaaggg

SEQ ID NO: 965007 - DNA, 120 bp, Artificial Sequence
  ENSG00000285587_5 (sequence is synthesized)
ctacttaagttctctctctctaacagtctaagttacaggctgaactaagcagaaatgtaattaagtcatctgatcagtttcttcgacttaaaatgttttcccatattttcacaaacaagc

SEQ ID NO: 965008 - DNA, 120 bp, Artificial Sequence
  ENSG00000285587_6 (sequence is synthesized)
cagataaatcctggggatgtggtttcaaggaaaggagggctgaatatgaactaagactttgtgtgaagactccgtttctccccggtcaccccaaacagaaaatcctctttcattgttcca

SEQ ID NO: 965009 - DNA, 120 bp, Artificial Sequence
  ENSG00000285587_7 (sequence is synthesized)
tttcgtaagtggaggagaatgtcttcttttggaaaatcagtaattggaatttcaattttcaatagagggactagtgcttaccggtgctgattacttgggatagttggattacaatgaggt

SEQ ID NO: 965010 - DNA, 120 bp, Artificial Sequence
  ENSG00000285587_8 (sequence is synthesized)
ttaagacatcatccacatcttttgtaaatgttctttgtttagaaatgacttcatgttaccctatatattccacggaattcttttgaatcaaattttaacagggtgggggaagggtgaact

SEQ ID NO: 965011 - DNA, 120 bp, Artificial Sequence
  ENSG00000285587_9 (sequence is synthesized)
aaaagctctcccagtgtagaatatgggacttctttttaaaatacagatgatctccaacttatgatgcttctacttatatttttagactttaccatggtgcaaaagccatatacattcagt

SEQ ID NO: 965012 - DNA, 120 bp, Artificial Sequence
  ENSG00000285587_10 (sequence is synthesized)
agaaactgtattttgactatggaccatacaatcattctatttttcactgtcaggttagtattgaataagtttcatgagatagtcaacactttactataaaatagctttgtgttagataat

SEQ ID NO: 965013 - DNA, 120 bp, Artificial Sequence
  ENSG00000285587_11 (sequence is synthesized)
aaatgcattttcaacctatgatgttctcaacttttgatgagtttatcagagcataagcctcattggaagtcaaggatcatctgtatttttagcttcaataatgtatttctgaaccattca

SEQ ID NO: 965014 - DNA, 120 bp, Artificial Sequence
  ENSG00000285587_12 (sequence is synthesized)
ctcacacttgtccttattaagtttgtgctgctgatgaatacagagctttgtttttaaaaaggtaacaataaacccccagaggctgtaactgtgttgtccaatacaatagtcactagccat

SEQ ID NO: 965015 - DNA, 120 bp, Artificial Sequence
  ENSG00000285587_13 (sequence is synthesized)
gtggctatgtcaatgaaattaattaaaattaaataaaagaaaaatgcagttcctcagtagcattaaccatatttcaagtgctcaatagctacatgtggctggtggctaccatattggaca

SEQ ID NO: 965016 - DNA, 120 bp, Artificial Sequence
  ENSG00000285587_14 (sequence is synthesized)
acacagatatagatcatttccatcattgcagcaagctctactggacagcactaccctataatgttggtgtggaattagttaatgtggtatatacacatatataaagtttttagaatagta

SEQ ID NO: 965017 - DNA, 120 bp, Artificial Sequence
  ENSG00000285587_15 (sequence is synthesized)
acacatatataaagtttttagaatagtagaatagtgcatagagtgcttacttcataagcagcagcagtactgggggttgtagttggaaggataatgatgatgatgatgatgatgatgatg

SEQ ID NO: 965018 - DNA, 120 bp, Artificial Sequence
  ENSG00000285587_16 (sequence is synthesized)
tcaaagaatcgatgaagacacagcccacttctggtatgtcaggatgagatcagcaggcaaagaagccagggagtaggagaatctatatgtcaaaagctgatcttccaaggaaagctgtga

SEQ ID NO: 965019 - DNA, 120 bp, Artificial Sequence
  ENSG00000285587_17 (sequence is synthesized)
acagaaagatgtggcccatactgtagcctaagacttcccgtagtaggagctaataaaaataataattaaaaaaatcactgctttacaactacatccattaacttttttttttcttttttt

SEQ ID NO: 965020 - DNA, 120 bp, Artificial Sequence
  ENSG00000285587_18 (sequence is synthesized)
acaggcgtgaaccaccacgcccggcctacatccactaacttctaaagccagttatggtcatgtggccagatctgatgaatcagatgtggcagaaaggatgcgaagaagctctgagcaggt

SEQ ID NO: 965021 - DNA, 120 bp, Artificial Sequence
  ENSG00000285587_19 (sequence is synthesized)
aaaggatgcgaagaagctctgagcaggtgccctccctctacatgttcccaccatcctgcgtccttgtgctgcgccggaccaggcatgcaagaacaacacaccaaggatggcggagcaaca

SEQ ID NO: 965022 - DNA, 120 bp, Artificial Sequence
  ENSG00000285587_20 (sequence is synthesized)
agatagaagaggcctgagtcccaggatgactgcctggagcacagctgtctgcctgctcagggccttgtgtcacatactataatgtgagagacaaataaacttgtcatatttaagccagta

SEQ ID NO: 965023 - DNA, 120 bp, Artificial Sequence
  ENSG00000285584_0 (sequence is synthesized)
agtcacatcagatgacacatggcagcagctaaaacgggaaaagcgctccctgagtcatccctggagccgggcggcaaaggctcctcctgggaccatgtgtggaccctccaatgagggggg

SEQ ID NO: 965024 - DNA, 120 bp, Artificial Sequence
  ENSG00000285584_1 (sequence is synthesized)
cctgggtcaccttcactgagtggacaggacactcagtgaagttccaaaggacactcagtgaagttccaaaggacactccgcgtctttttcctccagctcctgaaggaagcacagtgaaga

SEQ ID NO: 965025 - DNA, 120 bp, Artificial Sequence
  ENSG00000285584_2 (sequence is synthesized)
ctccagcatggaaaagcgtgtcccacacggcctcggcgcctccatggatgatagagccagccagtcatggaagagcgggatcatcccggaagggagcctgcagcgatgatccagctcctt

SEQ ID NO: 965026 - DNA, 120 bp, Artificial Sequence
  ENSG00000285584_3 (sequence is synthesized)
caaagggtctgtggattatctcagcttccctgaattattcaactcagactgccatgcagaagaaaaaccatgaacccgtaagtgttacattttgaagcaaaagtttattttttcaaagtc

SEQ ID NO: 965027 - DNA, 120 bp, Artificial Sequence
  ENSG00000285584_4 (sequence is synthesized)
cattttcccccttagaaagaaatatcagagtgagaaatagcgagtctcacattatctaaaaagcgactctctccggtttttgttccatttattgaaaactccaatttctttgcctcgggt

SEQ ID NO: 965028 - DNA, 120 bp, Artificial Sequence
  ENSG00000285584_5 (sequence is synthesized)
tctaatttattttgcaattcgcacagtgcactgtaaacataatgtaaagttttcaaagcttaattaacagctacaggataacggcaggccaagattttaaaggcatttaagcttggctcc

SEQ ID NO: 965029 - DNA, 120 bp, Artificial Sequence
  ENSG00000285584_6 (sequence is synthesized)
aagaaatgaagagacttccattcaggaagctgtgaacttgtacctcttaaaacaataaaacccgtcagatccagtactttggcttgccttgaatgccaagaccggcacacctgctggctt

SEQ ID NO: 965030 - DNA, 120 bp, Artificial Sequence
  ENSG00000285584_7 (sequence is synthesized)
aaccccatccctccgaggtgcttctcgagggagtccttcctgttctggagctgtttttctcttggggagatgagacagcaaaaacaacaaaaccaaaagaaacaagcgaaaaaaaccacc

SEQ ID NO: 965031 - DNA, 120 bp, Artificial Sequence
  ENSG00000285584_8 (sequence is synthesized)
aaaaactcaaccaccccaaaactaaaaactgtatattttaatcaaaggttcagaaaatccactttcaaattccacagggatgagggttgggattcaggtatctcggcagaaggatagcca

SEQ ID NO: 965032 - DNA, 120 bp, Artificial Sequence
  ENSG00000285584_9 (sequence is synthesized)
actgaaaaaccaacccaagtggatgggaagaattgacacaatctctcagatctgcagtgggttcagaagaggtgctgcgttatctgtagtgttccagttctgccatttcctaggagaagt

SEQ ID NO: 965033 - DNA, 120 bp, Artificial Sequence
  ENSG00000285584_10 (sequence is synthesized)
gcttggtgtggtcacttactctttcttggcctcagttttttccatctgtagaatgggactgagaagaagaatatctctcacaggtaggacattgcgtttttgtgctgcaaacgattgcat

SEQ ID NO: 965034 - DNA, 120 bp, Artificial Sequence
  ENSG00000285584_11 (sequence is synthesized)
agcatggaaaagcgtgtcccacacggcctcggcgcctccatggatgataggcatggggcaccccctttcctctggaaggttctggtggggggcagcacaccgtccacgggagcaacggcc

SEQ ID NO: 965035 - DNA, 120 bp, Artificial Sequence
  ENSG00000285584_12 (sequence is synthesized)
tctgcatctgcccactgcagattcacttcgtatttttagttcccaaaccttgacatccaagctcccgctctgtggcttccgcggcagcctggcaagcttcctgtgaagtcgcccgctgct

SEQ ID NO: 965036 - DNA, 120 bp, Artificial Sequence
  ENSG00000285584_13 (sequence is synthesized)
gagcttccgcacccttcctcccgcagagccagccagtcatggaagagcgggatcatcccggaagggagcctgcagcgatgatccagctccttcaaagggtctgtggattatctcagcttc

SEQ ID NO: 965037 - DNA, 120 bp, Artificial Sequence
  ENSG00000285584_14 (sequence is synthesized)
agtggccgaggatcacgtaatcccggtcttgatggggtggcatcaccatctgcagtgtatgaggatgacagtgatcgccacgcagcattgatggaagctaaaatcagcacctaagaacca

SEQ ID NO: 965038 - DNA, 120 bp, Artificial Sequence
  ENSG00000285584_15 (sequence is synthesized)
aaacggcagagagaaagagcccgttccgaaaccgttacgcagaactggcgaggggaatgtccaacttaccagaccgtggtccaaatgctcacttcctcaacagggagctttcttccatgg

SEQ ID NO: 965039 - DNA, 120 bp, Artificial Sequence
  ENSG00000285584_16 (sequence is synthesized)
ccgaaccagcacccccgcccgtctactccttcacatgggcacgatggacccaagagaagggcaattttctgttgctattatttcaattaaatagctgctttgagcctttatttcttatat

SEQ ID NO: 965040 - DNA, 120 bp, Artificial Sequence
  ENSG00000285584_17 (sequence is synthesized)
taatatctcttaagcaaaagtaaatgtgtcttttctggttctatgagaaaaaatagttacaaagtctgtataatattaaatgagaagaagttttcactctcctttcatgatgtaatattc

SEQ ID NO: 965041 - DNA, 120 bp, Artificial Sequence
  ENSG00000285584_18 (sequence is synthesized)
atttatatcaatctccacctctcaataaaattttccacactcatcatcaatgtgaaccaagaattagaaagatataaatgtcagaatcttttaaaggcactgtattatacaacattcatt

SEQ ID NO: 965042 - DNA, 120 bp, Artificial Sequence
  ENSG00000231295_0 (sequence is synthesized)
ctgtattttcaattagagtcaaagcccaaggatgtctctaccatcttgtagcccttgccaatagcctactcttgtcttccagggttcctccaaatctctctccaaatatttgttatctac

SEQ ID NO: 965043 - DNA, 120 bp, Artificial Sequence
  ENSG00000231295_1 (sequence is synthesized)
tcattcaatacccttcttcaaccatcctcttgctttggaattgacatgaaccaactaggcccgccttattggtaggaattcatttgccctgcctgccagcccccatagagacagaaccat

SEQ ID NO: 965044 - DNA, 120 bp, Artificial Sequence
  ENSG00000231295_2 (sequence is synthesized)
ttttatgtaacttctgttggagagatgtcttcaggagactgaagtagaagagcgactgtcaaaatggaaagtcccagagacatccaatttatgtaaatcaacatcacctgaattcagaat

SEQ ID NO: 965045 - DNA, 120 bp, Artificial Sequence
  ENSG00000231295_3 (sequence is synthesized)
ctcatccagatttcaacaaagacttctgaatgccaacaaagaagaggactgaatttacagactctcactctaacaatatatgctgttcaatttgaaaacagaataaaattattttggcag

SEQ ID NO: 965046 - DNA, 120 bp, Artificial Sequence
  ENSG00000277223_0 (sequence is synthesized)
ataacaaggatattattttaaagttggttggttaatgtgggctgtgttagaacttccaatgtgttgtgtttgggttgatgcaatgttattttaatgagtttattggttcgatgcacaaaa

SEQ ID NO: 965047 - DNA, 120 bp, Artificial Sequence
  ENSG00000277223_1 (sequence is synthesized)
tttaaatctatccgcacaaaatacaacctttcagttttttacatatatggttgttattatgtgattatgaaaaccaaataaaaatttccatagaagatgttatattccttaatgaactat

SEQ ID NO: 965048 - DNA, 120 bp, Artificial Sequence
  ENSG00000277223_2 (sequence is synthesized)
tttgtatatatattgaagttttcacaataaacatttatttcacagtatttgttgagtgaatctacaaagtgaatttggagtcttctagtaaagactgagaataaaggatcttcctcttta

SEQ ID NO: 965049 - DNA, 120 bp, Artificial Sequence
  ENSG00000231297_0 (sequence is synthesized)
gggaaaagttctgctgaaaactctagggatggttagtcgttttagggaaatacggggaactagatggattctggtttttatttatcttccttcaaaacagctactagtaatctgcagaaa

SEQ ID NO: 965050 - DNA, 120 bp, Artificial Sequence
  ENSG00000231297_1 (sequence is synthesized)
agatgcatgggaaataaaccaggaaaactgagcccaaagtgaggtgcaaaggttctaaaaggatcagtggtcaatgatgtcgtggcatgtatcagctgaatccaaagttgatgtgagttc

SEQ ID NO: 965051 - DNA, 120 bp, Artificial Sequence
  ENSG00000231297_2 (sequence is synthesized)
caaaattatactgagactttgggggaaaacaaaggctcagctatgctcatccatcagatttcagttccttcatcagttccttgagtggccaccacttctactgtgataagtcaccactga

SEQ ID NO: 965052 - DNA, 120 bp, Artificial Sequence
  ENSG00000231297_3 (sequence is synthesized)
cctgggccactgctctgttctcatcacagttacaagacgttggaggaaacaccagagcctatacagggatggttgattgtgagaaaagggagacgccatctgcccattcaggaatgtgcg

SEQ ID NO: 965053 - DNA, 120 bp, Artificial Sequence
  ENSG00000231297_4 (sequence is synthesized)
aaacagtagcctgtccctagcaaccacacatcgtcttttccccagacatttccaatttctctgcactcctatggagactgttttcttcttgcttcactctttctgtgacataagacagaa

SEQ ID NO: 965054 - DNA, 120 bp, Artificial Sequence
  ENSG00000231297_5 (sequence is synthesized)
attttcacagctcttccacaccatgggtgtatatggactgaaccagcataacagcaaataaacggtggtggacccaggtactggaaatagccagaccacttaccttaagggaaaatgtac

SEQ ID NO: 965055 - DNA, 120 bp, Artificial Sequence
  ENSG00000231297_6 (sequence is synthesized)
caggaagaaccttagtgtccagccagcttctaggaactgctttttggtctccaaaggatggggaccggtggtgggccaagcagcctcgggtgagtgtggcctcctggttctcgatgctga

SEQ ID NO: 965056 - DNA, 120 bp, Artificial Sequence
  ENSG00000231297_7 (sequence is synthesized)
tactgaacatgcagtaaaaccctgtgagggagcacgatggctaggaacagccgattagcagatgaatgagaataaatgggagaaagtggagccttttccagccagtgttctttaacaatg

SEQ ID NO: 965057 - DNA, 120 bp, Artificial Sequence
  ENSG00000231291_0 (sequence is synthesized)
accttgtctccagctgaggctgagcgagcacgcctttgtttagggccccttgtctcggcctgtgtcagagcttgcaggggcgttgggcctctctctgcagggaggactggttttagagga

SEQ ID NO: 965058 - DNA, 120 bp, Artificial Sequence
  ENSG00000231291_1 (sequence is synthesized)
ctcccgcttcccccagttgtatcagttcaggtgtaaacccgatatgcaataggatccggcgtggtgtccacactcattagacacatggcatcgtttccaaagatacaggcccccgcactt

SEQ ID NO: 965059 - DNA, 120 bp, Artificial Sequence
  ENSG00000231291_2 (sequence is synthesized)
cagcttgatgccagagggcttacacgtaaactctgcttgacttggaaatcaaagagaggtgagaagagttcagattttctcctgctgaggtaggaggctcgccaagagacaagactggac

SEQ ID NO: 965060 - DNA, 120 bp, Artificial Sequence
  ENSG00000231291_3 (sequence is synthesized)
tcataaggtctgcaactggctttatctagttaatagcagcctttgacatcacaaaacatgctatttccttgtgttcatgtctttaagaggagccacggtgaaagcaaacattaaagattt

SEQ ID NO: 965061 - DNA, 120 bp, Artificial Sequence
  ENSG00000231291_4 (sequence is synthesized)
taatctaacaaaaatgtggagtgaaagtaagacattttacacctgctctctgcactactatttcaggaggaggtcggtcgctgatgttgaaactgttattcataaatgttttccatctgt

SEQ ID NO: 965062 - DNA, 120 bp, Artificial Sequence
  ENSG00000231291_5 (sequence is synthesized)
gtttgtttctgatttctcatctgcatccgcagttatgcaatgtcctccaatgtttgtctcttcttcctgaaatacggtctatttcacattgcactgcccattttcacaaggcatcactgg

SEQ ID NO: 965063 - DNA, 120 bp, Artificial Sequence
  ENSG00000231291_6 (sequence is synthesized)
attaatattaagtctgcaaaacaagtcctctctttaattcaacacttccaaaatgaacaaagagttacaatgccctgcagtaaaaggcgacttaattgcatttggccaatatttatttcg

SEQ ID NO: 965064 - DNA, 120 bp, Artificial Sequence
  ENSG00000231291_7 (sequence is synthesized)
tgcacactgtgtaagacgcattgaactagagagtataaaaattggtaaattaccatctctcaactaaataatcttatggtctcataacagaaataggttacaatgaatgtacaaataaca

SEQ ID NO: 965065 - DNA, 120 bp, Artificial Sequence
  ENSG00000231291_8 (sequence is synthesized)
atttaaataaagataataatgagatttttaaatgattaaagttattctccaagaacactttaaacacagtgcttaaattgtttctatttattgagcttctactacaatgaagactatatg

SEQ ID NO: 965066 - DNA, 90 bp, Artificial Sequence
  ENSG00000231291_9 (sequence is synthesized)
ccccaactcacaaacagtagaaagcatgtgacattaaataattgcatcatttaattcttgcagcaaccgtggtattataatcccccatta

SEQ ID NO: 965067 - DNA, 120 bp, Artificial Sequence
  ENSG00000231291_10 (sequence is synthesized)
ttaattcttgcagcaaccgtggtattataatcccccattacacatgagagcactcagtgtaaccatagggagttgatctgctgccagccacactgaagaggcagggcatacttcaggtat

SEQ ID NO: 965068 - DNA, 120 bp, Artificial Sequence
  ENSG00000231291_11 (sequence is synthesized)
caggggttgagatttggctatgagagctagaatgtctggttccaactccagttccacaacatgaaagctgcgtgacactgagcaagtcactcaataactctgtctgagtttccccgcgct

SEQ ID NO: 965069 - DNA, 120 bp, Artificial Sequence
  ENSG00000231291_12 (sequence is synthesized)
gtaaaggtttgttttgagaagtgaattaatcctcatcttgatctacctagggagatctagtatacaagaaattcctctgtcatctttacttttttttaatcaaaaagttaaacaacttca

SEQ ID NO: 965070 - DNA, 120 bp, Artificial Sequence
  ENSG00000260167_0 (sequence is synthesized)
gtttgaaaggctgagggtgaaggagcgacagatctgaaaatagccggagctgaggggcctcagggtctaccctgactcgcttttcccggacggtctcctaggagagaggctgtggccagc

SEQ ID NO: 965071 - DNA, 120 bp, Artificial Sequence
  ENSG00000260167_1 (sequence is synthesized)
tgacgcgacttccttctgctactgaggtgagaagtcttagggcagatgcggatgtccagggcttcgagatggagtctcactgtggcacccaggctggagtacactggcatgatctcggct

SEQ ID NO: 965072 - DNA, 62 bp, Artificial Sequence
  ENSG00000260167_2 (sequence is synthesized)
tggcacccaggctggagtacactggcatgatctcggctcactgtaacttccacctcccaggt

SEQ ID NO: 965073 - DNA, 120 bp, Artificial Sequence
  ENSG00000260166_0 (sequence is synthesized)
agactagaccttcgccgcatccggctcgaaggctcggatggatgatggattgcccggcccatcttccccggggggttggatctgagaccatcagcatccagcagccgtgagtgtgatgga

SEQ ID NO: 965074 - DNA, 120 bp, Artificial Sequence
  ENSG00000260166_1 (sequence is synthesized)
tgaaccgaggccagtcacctagtggggaaacgacatctcacatttaaagaacaccaggcgtttctacacagcgggggaaggaaatccgtcctgattttaaactttggcacagctgtgaaa

SEQ ID NO: 965075 - DNA, 120 bp, Artificial Sequence
  ENSG00000260166_2 (sequence is synthesized)
ccgagggtagtgaactctgaggagaggactcttttctggacatacatttaacgtccgtgaaagcctcagaccccctgagcacacctgcctagccgtgttgtggacgaacaagggctgacg

SEQ ID NO: 965076 - DNA, 120 bp, Artificial Sequence
  ENSG00000260166_3 (sequence is synthesized)
aggggcacggatgaaaataacagaacagtgacccagaatcctggctgtggcctcatgaaacaggtgctgttaaaatcagctgcattggaaacagccgagtcaggcaacgaaggcacagag

SEQ ID NO: 965077 - DNA, 120 bp, Artificial Sequence
  ENSG00000260166_4 (sequence is synthesized)
aggttagacaacttgtggaaaatcacgcagcaccggtgcctccacattcacactccgcccctccgtgtcctgcaatcctgaccagccccacgttccccaggacaagccgccagcatcccg

SEQ ID NO: 965078 - DNA, 120 bp, Artificial Sequence
  ENSG00000260166_5 (sequence is synthesized)
gaaggggttaatccctctctggtgggtcagctcctgccactctcccgagtgcttttgcacatggtctggtcgcaatgtgcccaagacggccctgtgctggggaggaaagcgcttacataa

SEQ ID NO: 965079 - DNA, 120 bp, Artificial Sequence
  ENSG00000260162_0 (sequence is synthesized)
ttaggcacagcaaattcaaatgctatttattgaaggctggaggtgtccaggctcttgcggcttgtggaatgctcccctcttccccaccctgctccccactctcccagtcctcacccccca

SEQ ID NO: 965080 - DNA, 120 bp, Artificial Sequence
  ENSG00000260162_1 (sequence is synthesized)
ctggcaaatgaacttgcgtttccttccatgcaagtccactgaaatcaggatattagttatatttgaagcgacatgttctaaagttactcggaaagaaaaaggtatcagttttccatcaag

SEQ ID NO: 965081 - DNA, 120 bp, Artificial Sequence
  ENSG00000260162_2 (sequence is synthesized)
catctcagacgtggtcctggggatgtgcccctgacaccgaaaccagcagaccctgcctgtggctatgaacggggctgcaggttatgaatggggcactccggcgttctgagaactgagcac

SEQ ID NO: 965082 - DNA, 120 bp, Artificial Sequence
  ENSG00000260162_3 (sequence is synthesized)
tccgacgttctgagaactgggcacaggggcaccaggccctaagtgagttctgctccggggtggccgggcccatcccgagagcactgacgtccaacaggagtgtcgctgcccaccgcctcc

SEQ ID NO: 965083 - DNA, 120 bp, Artificial Sequence
  ENSG00000260162_4 (sequence is synthesized)
cacaagaggacacttcgatttgccagagaagggcagagtgggagatgactttttctcagcatcttgcctcgttttcctcttcccagaggtttgtttttaaggaagtttaagcttgctgca

SEQ ID NO: 965084 - DNA, 120 bp, Artificial Sequence
  ENSG00000224648_0 (sequence is synthesized)
gcttggctgagggtacactgtgtgccagagaagcataagggccgctgccaccattaagtagagaaaagaatgcggaacagcagggcatggtggctcacacctgttatcccagcaccatgg

SEQ ID NO: 965085 - DNA, 120 bp, Artificial Sequence
  ENSG00000224648_1 (sequence is synthesized)
gcccagctggcaggaggtgcctccttctttgtccagaaagaagaaagagtggctgcttggcccgggggctgtcaaagggcaaaccaggtcaatggtcccacccggcccacagcgtcagag

SEQ ID NO: 965086 - DNA, 120 bp, Artificial Sequence
  ENSG00000255468_0 (sequence is synthesized)
tggtaaaggatggcgcgggctcagcagaaaggaaatcaaaacgctcccttccttccgcggcttcttctttccctgtgtccgaagaggtctgcgttgcgacttacgtggtagtgcttggaa

SEQ ID NO: 965087 - DNA, 120 bp, Artificial Sequence
  ENSG00000255468_1 (sequence is synthesized)
gcactccaagtggatgaagagcagctcctgcccgctgctggcagcctcaggcccaggggcctccaccccgcagaggcctgagccaagctcgccattcgccctgggctggatctcagctcc

SEQ ID NO: 965088 - DNA, 120 bp, Artificial Sequence
  ENSG00000255468_2 (sequence is synthesized)
gagaagaggctgccaaagagcctggaggggccacttcagagcagcgccttgaagaggaaggagagggaggctccacaggaaagtcccagggccaggaagaaggtcatgagggcgccggcc

SEQ ID NO: 965089 - DNA, 120 bp, Artificial Sequence
  ENSG00000255468_3 (sequence is synthesized)
acctccctctcgtgtggcagcacctgcctagaacacccgggaacaggagctcttagaaaatgctgggtctaaatctggacccagctccactgccctctgcccatccagtctgggctctga

SEQ ID NO: 965090 - DNA, 120 bp, Artificial Sequence
  ENSG00000255468_4 (sequence is synthesized)
cccaacccctctgtcaccataactggccccttctttccgggcctcagtttcctggtctgtaaatgaggctgctggataaggatgtctctcagggcctctgagtctaacatgatgggattc

SEQ ID NO: 965091 - DNA, 75 bp, Artificial Sequence
  ENSG00000255468_5 (sequence is synthesized)
tccgcccaccttggcctccgtagtataattctaactaccagtctcctcttccataaaagggtcagcaacttgagg

SEQ ID NO: 965092 - DNA, 120 bp, Artificial Sequence
  ENSG00000255468_6 (sequence is synthesized)
taccagtctcctcttccataaaagggtcagcaacttgagggtaaggatgtctgtctccactgagcccagctcagtgccctgtgcagtgcgagtgtttgctgatggaaactggctgcttct

SEQ ID NO: 965093 - DNA, 120 bp, Artificial Sequence
  ENSG00000255468_7 (sequence is synthesized)
gtgggaatccgggcctgtcggcagagctgtaacagggtgggcaggcagcagtagctggggactaggcatcaggcgaggggcaggcaggtgtagccaaccagtccaagaatttgtttccaa

SEQ ID NO: 965094 - DNA, 120 bp, Artificial Sequence
  ENSG00000255468_8 (sequence is synthesized)
ttctccactccattgccccttgaggaaatagcccatgaccttgtttttggtcaaaaccttagctctccttcaactgagaattttacagttagatgggccctgagggatgacagttcaacc

SEQ ID NO: 965095 - DNA, 120 bp, Artificial Sequence
  ENSG00000255468_9 (sequence is synthesized)
catttttttttacagatggggaaactgaggcacattgaggcggccccagaaccagtgcctgggctacttggttgggcgggtacctccctagcccagttctctcccctgcagttaaggctt

SEQ ID NO: 965096 - DNA, 120 bp, Artificial Sequence
  ENSG00000255468_10 (sequence is synthesized)
ggcccagtagggggcgccagcaaggcctgcagacagctagggttgggctggccagaagcaggatgggccgtccctccattgcaggcggtcccttcccaaagactgaacccacctccctac

SEQ ID NO: 965097 - DNA, 120 bp, Artificial Sequence
  ENSG00000255468_11 (sequence is synthesized)
gaggttgggggggaagcatctacattttcacatcctgcctatttggagcagcaagctggaggtgcgagggcccagagcaaaaacacacactgagtacctggtctctgccaggaactgtgt

SEQ ID NO: 965098 - DNA, 120 bp, Artificial Sequence
  ENSG00000255468_12 (sequence is synthesized)
taggcacgagggatgggccttggaggagacacaggtattgtccttgagagtttccactggtgaccttggctgtaaagaggagaaaatgcagaagttcatttcttgccaaattgctctagc

SEQ ID NO: 965099 - DNA, 120 bp, Artificial Sequence
  ENSG00000255468_13 (sequence is synthesized)
tagaacttctagtacaatgttgaggagatgaaacggtgaaaccacgtatccttctcttgttcctgatctttgggggaaggctttaggtctttcgccattaagtatgatgttatttgtgga

SEQ ID NO: 965100 - DNA, 120 bp, Artificial Sequence
  ENSG00000255468_14 (sequence is synthesized)
tgaagtatagcagtgcagtcacaacttgctgcaggcttgaactcctggcctcaaatgattatcctgcctcagccttccaagtacctaagactacagatggagtctcgctctgttgcccag

SEQ ID NO: 965101 - DNA, 66 bp, Artificial Sequence
  ENSG00000255468_15 (sequence is synthesized)
agacatgcccagataatttttatatttttagtagagccaggtttcatcatgttggccaggctggtc

SEQ ID NO: 965102 - DNA, 74 bp, Artificial Sequence
  ENSG00000255468_16 (sequence is synthesized)
taggcgcctgccaccaccatgcccagataatttttatatttttagtagagcagtgttccacctgcctcagcctc

SEQ ID NO: 965103 - DNA, 120 bp, Artificial Sequence
  ENSG00000255467_0 (sequence is synthesized)
gctcacctgcaccagcctccggagcagggggctgcggctgcgggcgccgctgcgcagaagtgccgccagcacagccatggtcgcagagggctgagtatcggctccacaggcgtagactag

SEQ ID NO: 965104 - DNA, 120 bp, Artificial Sequence
  ENSG00000255467_1 (sequence is synthesized)
cggcctcctccccaaccccgcacccctagcggcccggcgcgggcaccgcccatcccgcttcctccaatagtcgcctctcagtcggcggcgattggccggcagccaagggcggggcggagc

SEQ ID NO: 965105 - DNA, 120 bp, Artificial Sequence
  ENSG00000255467_2 (sequence is synthesized)
ctggcgctgggacaccgcagcctgggccaggaaaggttgacgagtgaaggacgtggatggagacactggcgctggggtcaacgagcacctgacacgctgctggctcccgtgtccaccaag

SEQ ID NO: 965106 - DNA, 120 bp, Artificial Sequence
  ENSG00000255467_3 (sequence is synthesized)
tctaacctgccggggccggtggtttatgtataagtagagcaaatcaaagtttggatcagcgctcctgaagttaggccatgaccaatccacaaagcaagctgttactcattttacgcactc

SEQ ID NO: 965107 - DNA, 120 bp, Artificial Sequence
  ENSG00000255467_4 (sequence is synthesized)
acatcactattaaagatttctaagcttgggttatatccctgctcggcaccaattttaagtgtacgctggagagaagagacctgaataaaggatgccaactgtgattccagacctttacaa

SEQ ID NO: 965108 - DNA, 120 bp, Artificial Sequence
  ENSG00000255467_5 (sequence is synthesized)
actgctggtgactgattcaaacctgaggctacaaatccctaatcatgagaccttaaaataccaaaatacttctatgctacagattaagagatcagttacataactatatcagagcaggag

SEQ ID NO: 965109 - DNA, 120 bp, Artificial Sequence
  ENSG00000255467_6 (sequence is synthesized)
atttctgtgttgtttttaataaattcagatatggcataataaatattaggtatataaacattaagtgtgttagtaaacacacaatatgtttagtaaacacacttaatatgtttgttttgc

SEQ ID NO: 965110 - DNA, 120 bp, Artificial Sequence
  ENSG00000255467_7 (sequence is synthesized)
tattttggctctgcaatcataatgacctacctatctccataaattttttaaactattgaagcaacaattaatataagcttcatttttcaaaacaagctttccagccatatttaaaaaaaa

SEQ ID NO: 965111 - DNA, 120 bp, Artificial Sequence
  ENSG00000255462_0 (sequence is synthesized)
agaaggcggagccccggactggctggaaaagagaactccatctcaggaaccatggtttgccctggagagcttagcactgggctgagcacaccgtgtgggattcaacgtgctaaaatgcag

SEQ ID NO: 965112 - DNA, 120 bp, Artificial Sequence
  ENSG00000255462_1 (sequence is synthesized)
agcaaaggggaaaggatagcaggagccttgatccacccaggaagaggtgccagctggatcagcaagaggctggtggagaacaagaagctgctatgaaccaatctttagaaaacagcagga

SEQ ID NO: 965113 - DNA, 120 bp, Artificial Sequence
  ENSG00000255462_2 (sequence is synthesized)
tctccgaggagagaaagaatttctctccagccaaaagcttcatgagatggaaggggatatcctatctcctatattgtatcctcatcatggtctcaataaacccacttggaagatgcccat

SEQ ID NO: 965114 - DNA, 120 bp, Artificial Sequence
  ENSG00000226352_0 (sequence is synthesized)
ccatgaaaggctggattggatgcccagaatgaaaacagtggagctcaaggaggatgattagcaaaacaaggaaaagcaggagacatagagcagactatgaaaaacctgggtcacgaacag

SEQ ID NO: 965115 - DNA, 120 bp, Artificial Sequence
  ENSG00000226352_1 (sequence is synthesized)
tgttttgacctggaaaagagacagagtcttcactagtaaacaggatctaatctccatagtatatttttctaaagaaacaagagctttcagtcctaaagtaatttgctagactagaatcac

SEQ ID NO: 965116 - DNA, 120 bp, Artificial Sequence
  ENSG00000226352_2 (sequence is synthesized)
tgaccagcagacctaaattcaagcttcaatattaagattgttgatggaggaaactgtcatggaaatggcaatttcttaactctttataataaaagcagattcaatgtcacaagaattaaa

SEQ ID NO: 965117 - DNA, 120 bp, Artificial Sequence
  ENSG00000237921_0 (sequence is synthesized)
ccatgtaggatgtgcctgcttcccctctgccatgattttaagtttcctgaggctcccccagtcatctttcctgtacagcctatggaaccatgagccagttaaacctcttttctttataaa

SEQ ID NO: 965118 - DNA, 120 bp, Artificial Sequence
  ENSG00000237921_1 (sequence is synthesized)
ctcagctttaatgctatcaatgagaacaagaatatttggcttatcttcaacatcttcataccatcagataactccaaagttaacacaggatacgtcatccacattgctgccagagcattc

SEQ ID NO: 965119 - DNA, 120 bp, Artificial Sequence
  ENSG00000237921_2 (sequence is synthesized)
tctctgaaatgattatctgatcatcatcctctcttcttctccacaagctcaaacactttcagtgactgatttgaaaccagttgtaccgtattattaggaaaggcgccttgatgaaaagat

SEQ ID NO: 965120 - DNA, 120 bp, Artificial Sequence
  ENSG00000237923_0 (sequence is synthesized)
actctggacgccaaaatttggtggagcttcctggttggtgaacacatccatgtgccaggagggtgacacaacctgattcacagagagaagacacagaagctctgcatggaagacccgccc

SEQ ID NO: 965121 - DNA, 120 bp, Artificial Sequence
  ENSG00000237923_1 (sequence is synthesized)
agaccccgccctacgtgtgtcttcattagtctggtcctcctgatttgtatcctttgtaacaagcctgtaatcaactttctcagttgtgtgtgtgagtacgcctggcttttcatcaaagag

SEQ ID NO: 965122 - DNA, 120 bp, Artificial Sequence
  ENSG00000237923_2 (sequence is synthesized)
ctttgccgtcttgatgcttccttttctgtgaacacagcaataaatagattctgcagaacaaatgaccaggagaaaggactttgtgctccttcacctcagaaacctgaactcagaatttcc

SEQ ID NO: 965123 - DNA, 120 bp, Artificial Sequence
  ENSG00000237923_3 (sequence is synthesized)
aaggagcccagtgccttgagggcagccaagaagacagaggccctggactggataccggctgaggtaggtggatccctgtggggtggagaccatccccagctccacagccccaggcatgtc

SEQ ID NO: 965124 - DNA, 120 bp, Artificial Sequence
  ENSG00000237923_4 (sequence is synthesized)
aagggctatcatcaaggcctcagaggagaccagctgcctggggcacctcaggaagctataccctgacacctggactccagagtccacaaatatatctgtacccaaaccagtgggcaagca

SEQ ID NO: 965125 - DNA, 120 bp, Artificial Sequence
  ENSG00000237923_5 (sequence is synthesized)
tgtacccaaaccagtgggcaagcaaagaagcccttgcctttgggagacctcaggatgttggccatgagaacatcatggatgggcgcggtggctcgctcctgtaatcccagcactttggga

SEQ ID NO: 965126 - DNA, 120 bp, Artificial Sequence
  ENSG00000237927_0 (sequence is synthesized)
tggcttgaattaagatgacaaaggtagagatggggagaggtggatgaacttgagagctatttcaaggataaaatctaaacgcataccctggagttcagggacgtggattaggacacccta

SEQ ID NO: 965127 - DNA, 120 bp, Artificial Sequence
  ENSG00000237927_1 (sequence is synthesized)
ctggatcccatggagaaggatgattcaagggatatctccctgggggggtgtggttcttgtttgtggacccactggtttatttaccagaacatggctcttctatgctatcgtttttgcatc

SEQ ID NO: 965128 - DNA, 120 bp, Artificial Sequence
  ENSG00000237927_2 (sequence is synthesized)
ttgggtcaaaagacaacaaggttgctgaccaggtggcctctggtctggcatcctctggccaggcgggtcctgctgcacttgactgagaaagctggccgctcggactactgctacatttgg

SEQ ID NO: 965129 - DNA, 120 bp, Artificial Sequence
  ENSG00000237927_3 (sequence is synthesized)
ttgaaatttctttttctttgtaacctagtaatgcaatatacctggaggtccatttatattattaagcttttaatacatttcataagtaatatcctacttactgaaaacatttactgttta

SEQ ID NO: 965130 - DNA, 120 bp, Artificial Sequence
  ENSG00000237927_4 (sequence is synthesized)
ggattttcattagatcacttggataaatgcagaattcccttaaagttgacaacaatgaggaaacttacaaaacaagtgatttgtcaaaagctgaaatctgaaaaattatgttagttttgg

SEQ ID NO: 965131 - DNA, 120 bp, Artificial Sequence
  ENSG00000237927_5 (sequence is synthesized)
aggtctaggtaattaatacggtttggaaatagaggatcttagtgggttataagcacagtatatattcatgaatcgggctttctgggaagatgtgccacacactcaacagacctgatttcc

SEQ ID NO: 965132 - DNA, 120 bp, Artificial Sequence
  ENSG00000237927_6 (sequence is synthesized)
tttcttcctgcgactgcatttcccagcctcccctgcagctaggtaagatcatgtaatggaattctggccaatggaatatgagtggagttaatgtgggtaacctccatgatgggcaaagaa

SEQ ID NO: 965133 - DNA, 120 bp, Artificial Sequence
  ENSG00000237927_7 (sequence is synthesized)
acacctcccaggaaaaagtcttgatttttcctcatgtctgctgactacatatcgactcttgaatagacttgagtatctgctgttgaaggatgcagaggctctgtcagcctgggcccctga

SEQ ID NO: 965134 - DNA, 120 bp, Artificial Sequence
  ENSG00000237927_8 (sequence is synthesized)
accatcaacagtaaggaagaacaatgtggaccaccagaaggctggagtgttttctgaagctgctcctgcttggactttggttggaagtcgtgattgtctgagggttcatgctggcgctcc

SEQ ID NO: 965135 - DNA, 120 bp, Artificial Sequence
  ENSG00000237927_9 (sequence is synthesized)
cccagtgaacctagctcacctaccctctgctctggctctagtctctcttcccttcttctaagggaggctactgctgtgctcagtgcggagctgggttcaaggagagctggggctctgaag

SEQ ID NO: 965136 - DNA, 120 bp, Artificial Sequence
  ENSG00000237927_10 (sequence is synthesized)
gagtcgtggggagaaggctgacatgagtcctgagtgagtggacctgctctctctggccctgaaggggtcaagaggcaactgggtgtgtgggctgagtctttcctggccctgaagctggaa

SEQ ID NO: 965137 - DNA, 120 bp, Artificial Sequence
  ENSG00000237927_11 (sequence is synthesized)
gtagaggctttgtgcaggatcctcagcaggggactaaaagcctgtgctttcataacccgagccacactggcaagtgcgctgcctcctcccacctttgagacagttgccttcaggagcaca

SEQ ID NO: 965138 - DNA, 120 bp, Artificial Sequence
  ENSG00000237927_12 (sequence is synthesized)
tctaccagaagccaacaaagaaaagcaacagcctcttggaggggcctttctccagggagagaagggtgaggcagcacaggcagagctggtgtaggagacacaagacagtatgaatttcaa

SEQ ID NO: 965139 - DNA, 120 bp, Artificial Sequence
  ENSG00000237927_13 (sequence is synthesized)
aatcagagcattgaaggagattcaaatatggcacaaaaagagtttctggagctaaaaatcataatttcctaactaaataccattcagtagattaactgaaaaagtggaagatcaccgtga

SEQ ID NO: 965140 - DNA, 120 bp, Artificial Sequence
  ENSG00000237927_14 (sequence is synthesized)
agatatggtcagctctcctggagggtcaaagggcagacagaccccttgatgaaaagggtggtatagagcaaatgtagaaagagatgggaagcaagtagaaatgggtaaggaacatgggat

SEQ ID NO: 965141 - DNA, 120 bp, Artificial Sequence
  ENSG00000237927_15 (sequence is synthesized)
ggatcctaaaaccttgacttgtgaatagagaaaccttgacttgcagaaagaggaaaaaatagaaccaacggaggagaggtgaccatgatactaacaataaaagaaaacttccctgaactg

SEQ ID NO: 965142 - DNA, 120 bp, Artificial Sequence
  ENSG00000226355_0 (sequence is synthesized)
tctgcctcccgggttcacgccattcaggtgatgatgttttttatttatgtgcccacctgccccactccgtagggcccctcgaggccaggactgcaccgttcatctcggaattcgcttgtt

SEQ ID NO: 965143 - DNA, 120 bp, Artificial Sequence
  ENSG00000226355_1 (sequence is synthesized)
gaggccaggactgcaccgttcatctcggaattcgcttgttcctaacttaggggagtggcgccgagacaccgtgtagcgcccatgccaaggaggaagcgagacagcaggagcggaggaaag

SEQ ID NO: 965144 - DNA, 120 bp, Artificial Sequence
  ENSG00000226355_2 (sequence is synthesized)
aaccccgggctgtgttgaggaagcctcctacttttgcctgaagtgagccacccaggactttgtgaccacagccctagcaaacgaatacgccgcatttcacagggccctacagacaggaga

SEQ ID NO: 965145 - DNA, 120 bp, Artificial Sequence
  ENSG00000226355_3 (sequence is synthesized)
attgaaaaaggcaactattcctcatctcggtccaatgaaagagcaactaagtgagtgctccaggcgcccagtgcccaaaggtccatagtccgtgggaggatccagacactgtcacgtgca

SEQ ID NO: 965146 - DNA, 120 bp, Artificial Sequence
  ENSG00000226355_4 (sequence is synthesized)
ggaggccacctgtgctgcaggaggctgagcttgggtgctgtgcccccagctgggagaaggctggggtgggccagggaagctgtgcttgggcacgaaccacttatccccgagttggaaaaa

SEQ ID NO: 965147 - DNA, 120 bp, Artificial Sequence
  ENSG00000226355_5 (sequence is synthesized)
ggtgcgatccaattctccaccccatcctgccagttcatcacccagacaacctagagtgagcacccagggccatttttggaaaatcctgctcttttgcataataagtgggcaaaacagaca

SEQ ID NO: 965148 - DNA, 120 bp, Artificial Sequence
  ENSG00000226355_6 (sequence is synthesized)
cagtccctgcccctctggcagtttgtcgcttctgcaagactcaagtgccaaatgacattttagaaaaaatttctgacatatttgtgcttggaacacacaatatgatcttggagcagataa

SEQ ID NO: 965149 - DNA, 120 bp, Artificial Sequence
  ENSG00000226355_7 (sequence is synthesized)
aggcggctcagccaccgggacctgtcctgcctccaccctctgtgcaacccctttccttgccttttgtctctgttgcttttggggggtgattagccgctagctcagcggctagaggattct

SEQ ID NO: 965150 - DNA, 120 bp, Artificial Sequence
  ENSG00000226355_8 (sequence is synthesized)
ctcccggaaaaggctccggagttgaggcccagacccccagggcaagacggaatctgctccccagggcactaactgagactcggttccctcactggtaaaatgagaaaactcacttatggt

SEQ ID NO: 965151 - DNA, 120 bp, Artificial Sequence
  ENSG00000226355_9 (sequence is synthesized)
cttatggtcaggggtccccgagttaatgccagtgaattccttggcagagcatcaagcacttggagaagcccccacccccggtcattgtgatgatggtttgtttgtttgtttgtttgtttt

SEQ ID NO: 965152 - DNA, 120 bp, Artificial Sequence
  ENSG00000226355_10 (sequence is synthesized)
tcaggggagtggcgccgagacaccgtgtagcgcccatgccaaggaggaagcgagacagcaggagcggaggaaagaaccccgggctgtgttgaggaagcctcctacttttgcctgaagtga

SEQ ID NO: 965153 - DNA, 120 bp, Artificial Sequence
  ENSG00000226355_11 (sequence is synthesized)
ggttgttgttgttgttgttgttgttttttccacgtgccttattcatccacgtaacctcagcctctagtgcagcgtcctattttttggcttgtattattatttttaattggcacataataa

SEQ ID NO: 965154 - DNA, 120 bp, Artificial Sequence
  ENSG00000226355_12 (sequence is synthesized)
ttgtacatatttatgggatgcagtgtaatattttagtacacatatacaatgtgtattggtcaaatcagggtaattagcacattcagggttggagtttttctgtcaatacagatacttata

SEQ ID NO: 965155 - DNA, 120 bp, Artificial Sequence
  ENSG00000226355_13 (sequence is synthesized)
aggtccacaaaggttcacttcatgtgagtggcacctcagggctcttccacaggcccttctctccatgcagctctcttgggcttcctcacagcatggcggggtttttcacggtggctggct

SEQ ID NO: 965156 - DNA, 120 bp, Artificial Sequence
  ENSG00000226355_14 (sequence is synthesized)
agccagtcctggagtcagcccagatccaaggggaggaggaaaagactccaggtcttgctgagagtaatgactaagaatctgcagccatctccaatccaccacgcccatgcaagagacggg

SEQ ID NO: 965157 - DNA, 120 bp, Artificial Sequence
  ENSG00000226355_15 (sequence is synthesized)
agtgatatttgcaaccaagatggtgaacggcagcagattggtcactgtttccagttattcaccatcccctcagtgagaggattatccatcctgccccattgctacgtgacatgcagagca

SEQ ID NO: 965158 - DNA, 120 bp, Artificial Sequence
  ENSG00000226355_16 (sequence is synthesized)
tccagtgctgggtacacttcccctccccaccaaatcatgtttggccacgtgacttgcgttagccagtgaatccggagcccaagtcctagcaggccattcaaaagagaagcttcaagagcc

SEQ ID NO: 965159 - DNA, 120 bp, Artificial Sequence
  ENSG00000226355_17 (sequence is synthesized)
atcacgtgggttggccagcctgcctgcacttttccctttaaacagagctgcgttttctagagagaggcctcacacaagcctccctgttccacagaatacaaatccaattggtaagtcttc

SEQ ID NO: 965160 - DNA, 120 bp, Artificial Sequence
  ENSG00000276571_0 (sequence is synthesized)
agctaaaggtgatgggcttccattattcctgtaggctgaaagggctctctcctgaaaaccatctacacagaaaacggaagaggtatgaacccttgctgagtgtttgtgcatgtttgtaaa

SEQ ID NO: 965161 - DNA, 120 bp, Artificial Sequence
  ENSG00000276571_1 (sequence is synthesized)
ttttctcatcttgattcatgagcctcagatatgcaacatttaaaaattattgatacataatatttgtgtgtatttatgaggtacatgtggtattttgttacatgcctagaattacaatga

SEQ ID NO: 965162 - DNA, 120 bp, Artificial Sequence
  ENSG00000276571_2 (sequence is synthesized)
ttgtgccagggtatttggggtgtctgtcgcctaagcatttatcatttctatgtgtacagaacatttcaagtcttctcttatagctattttgaaatgtataatacactgttgttaattgta

SEQ ID NO: 965163 - DNA, 120 bp, Artificial Sequence
  ENSG00000276573_0 (sequence is synthesized)
tctctattgctccacccccccttaactgagtatgcactttaatcgctgaactaaaatcgtgcatgttattcatccttgtgttaaattccaaactagaataaagcagatattttcgtggtc

SEQ ID NO: 965164 - DNA, 120 bp, Artificial Sequence
  ENSG00000246695_0 (sequence is synthesized)
aaactcccttgccaaggacactgggaggaagcagaaaagcaaagaccaagctcgtacttttcagtccgcggcttgtgtgccgcgaggagaggcgcaaagggtgacacaccaggaaagcag

SEQ ID NO: 965165 - DNA, 120 bp, Artificial Sequence
  ENSG00000246695_1 (sequence is synthesized)
gtagcaggcaagagtgtggttatcgttggaccaggattcaggatctgactgagtagctgactcttaatccagtttgtgttgatcaccaggaggatctggacctcagtattaccacatcta

SEQ ID NO: 965166 - DNA, 120 bp, Artificial Sequence
  ENSG00000246695_2 (sequence is synthesized)
gagctataatcacatccctgttaagccttcctgagatcacaccaaatgtccttgatgggaattgtaaacaacccttacttctggtttctaatgatattccaggaaaggagcctaactaga

SEQ ID NO: 965167 - DNA, 120 bp, Artificial Sequence
  ENSG00000246695_3 (sequence is synthesized)
gtcagtagaaggccatcctaggaaacaatcccatgagtgatgtttcatgaattatcttcgtgaaccggagcaagtcgctttgccttcctgaaccttctctgagatggaagggtgatctga

SEQ ID NO: 965168 - DNA, 120 bp, Artificial Sequence
  ENSG00000246695_4 (sequence is synthesized)
aaatatgcctcccgggtaaacctcagccctggctggcagatctggctggctaatgggactccccttttcctctccatggctcctgtgcctccccctcaagactgtgtgtattccaagagg

SEQ ID NO: 965169 - DNA, 120 bp, Artificial Sequence
  ENSG00000246695_5 (sequence is synthesized)
actacattcccaggtggggtcgtattgttcttataatgaaggcttacagaatttcctcgaatgttgcatctagttttagcgttctgaatctgtgaatcacaaattagaattggtgccttt

SEQ ID NO: 965170 - DNA, 120 bp, Artificial Sequence
  ENSG00000246695_6 (sequence is synthesized)
ggaagaggagatgggacatgaagcctgctccaccttctgataatgccctaaagagcagctcaaaatacagctaaaagaacccagaaaacaaaataggtaagtcttgaagagagatcaaca

SEQ ID NO: 965171 - DNA, 120 bp, Artificial Sequence
  ENSG00000246695_7 (sequence is synthesized)
ttaggaacacaatattcactgaatataattctgtggtctgttttatactttattttatgcattcactcctagtatttaatttatgtatcaatttctgagaattggtttccaaaaaagtca

SEQ ID NO: 965172 - DNA, 120 bp, Artificial Sequence
  ENSG00000246695_8 (sequence is synthesized)
ttatccagtgaactctattagtcactaaagctttataacaaataaattaacaaaacattgttaccctaagaaggaatagcctcttgtcacttgttgccccttggctctcaaaactggaaa

SEQ ID NO: 965173 - DNA, 120 bp, Artificial Sequence
  ENSG00000246695_9 (sequence is synthesized)
gtccacatgcttatagtggttatgatagtttatcaaactgaagaagaagcctgaacaacactccagtgattccagacacaagtagataatctattcagccccatgtagtttcagagagta

SEQ ID NO: 965174 - DNA, 120 bp, Artificial Sequence
  ENSG00000246695_10 (sequence is synthesized)
aacgaagataaggaaatttttttcttctcctcagggcagagatgtttttcagttcttcttcttttttttttttaatcttagcacttgatattcccttgggaagtgttggttacaacaaaa

SEQ ID NO: 965175 - DNA, 120 bp, Artificial Sequence
  ENSG00000246695_11 (sequence is synthesized)
cactatttattagaatccaagtatctgaaattaatcaaagatagattagcatgccagtgtcccctttcctcttttgttataaaagagcaatagtcattttactattgctaaatgtcattt

SEQ ID NO: 965176 - DNA, 120 bp, Artificial Sequence
  ENSG00000246695_12 (sequence is synthesized)
acatttagtcatttactaaaaattagtaaaaaatttcttaatataagcataaagttacaaaggcaaagagaagatgtactggaaggtaaataggcgtggcagaggtttgaaaggctgtta

SEQ ID NO: 965177 - DNA, 120 bp, Artificial Sequence
  ENSG00000246695_13 (sequence is synthesized)
tcagtactcactgtgcatgagaggtgcttgagtgagtctttgttagataaatgaaaagcaaattaatccacttttcagagctctcttcggagacctgagcctgaacaagacaattctcta

SEQ ID NO: 965178 - DNA, 120 bp, Artificial Sequence
  ENSG00000246695_14 (sequence is synthesized)
aaagacagaatatttgggaatgaaaaataggacattagaagatgctgtttgttactttttaaatcccttttcatcctggctacgctaactctaccctcaagggcaggagaacagaggacc

SEQ ID NO: 965179 - DNA, 120 bp, Artificial Sequence
  ENSG00000246695_15 (sequence is synthesized)
agagatggctccaggcaagttgtgagctgtgtggcatcagcatctgtctatagtggtgatgctggtgctgacatgtggtggtttatttaatctatttgggccccaatatctgcatgtgta

SEQ ID NO: 965180 - DNA, 120 bp, Artificial Sequence
  ENSG00000246695_16 (sequence is synthesized)
aaagggaatgatgataatgagtattttccaaaaaatatggttgaaggattaactgtatttgagatagagtaggcctcagttcgtgtcagctattagccttagtctgtctacaggaaccag

SEQ ID NO: 965181 - DNA, 120 bp, Artificial Sequence
  ENSG00000246695_17 (sequence is synthesized)
aagtttcaggttgggagaagcctggccttttagtgagaagctttcttgtggtgggacaagatgttggtgtgagaccagaaactcagcctctcaggagcagaaaaagaggggactcgatgt

SEQ ID NO: 965182 - DNA, 120 bp, Artificial Sequence
  ENSG00000246695_18 (sequence is synthesized)
tctgctggtgattctgagatgagtgttaacatcagatgtggctgttagtccccagaaggacaaatataaatgtttccttcatgctcttctttgtttttgtttttggtttttgttccttct

SEQ ID NO: 965183 - DNA, 120 bp, Artificial Sequence
  ENSG00000246695_19 (sequence is synthesized)
gctgataaatattcttactcagaggttattactgcaaataataataaaaaatactggtaaaccaggcctctgatgtgttattgttaaaaaaaaatcaatgttttattcacagtctgagta

SEQ ID NO: 965184 - DNA, 120 bp, Artificial Sequence
  ENSG00000246695_20 (sequence is synthesized)
cagacttggctttattgttctgaaagaattctgcatggcagggcaggggctgagcaaaagattaatgttcaaaggatttattagtgttgactgtgagtatctgtttgtgtttgtctgtaa

SEQ ID NO: 965185 - DNA, 120 bp, Artificial Sequence
  ENSG00000246695_21 (sequence is synthesized)
agttggcttggtagtcagaatgtatgggaaaaccttctaagagtcatatggcagcttttcaaaaactctgtagagctgggtacacaatttccctggactcactcccatctaagcagcctc

SEQ ID NO: 965186 - DNA, 120 bp, Artificial Sequence
  ENSG00000246695_22 (sequence is synthesized)
tatcagagggaccagagcagctgtaagatacctgttcaggacagatgtgcataggcctgaagcaggatactgcatcccaagcaaccacagactgccaagaaagtttcctgtcatggcaca

SEQ ID NO: 965187 - DNA, 120 bp, Artificial Sequence
  ENSG00000246695_23 (sequence is synthesized)
acttaagctgaaaaaatagcatcacagcctgagctggaaggggtccgagagctgctatcatccaatcatccaatcccttcattttctagttgaggaatcaaatctacacatctctagcga

SEQ ID NO: 965188 - DNA, 120 bp, Artificial Sequence
  ENSG00000246695_24 (sequence is synthesized)
cctgcccaagataatgcagctaattagggtcagagttaagatttgagacagaatacagaaatttttttttaaagccttctgtactgacatttgttttcattaaatttgataccacttcta

SEQ ID NO: 965189 - DNA, 120 bp, Artificial Sequence
  ENSG00000246695_25 (sequence is synthesized)
tcctttgtcaacttttatcgctgagaaataattaatgttgcaataagctggaatcaaagaaattggtgagagaaattgtgctgacatgtttggggttgtctttgtattctctgaaaccac

SEQ ID NO: 965190 - DNA, 120 bp, Artificial Sequence
  ENSG00000246695_26 (sequence is synthesized)
cctcaccaggagcagatgctcgtcccatgcttcctataagcctgcagaactggaaaagaaagctggataaagtatttatagaagatagaggacctgtggtggctcatgcctgtaatccaa

SEQ ID NO: 965191 - DNA, 120 bp, Artificial Sequence
  ENSG00000246695_27 (sequence is synthesized)
ggggaaaaaaatcaaaaagagccgttccatcccccctccaaggactgggtttgaattgcttttcatctgcagtggctgtgattcagcgtccctcttagcagcaggcaatgacagaggcag

SEQ ID NO: 965192 - DNA, 120 bp, Artificial Sequence
  ENSG00000246695_28 (sequence is synthesized)
catgtttggaagctccctgaggcctcaccaggagcagatgctcgtcccatgcttcctataagcctgcagaactgctggccaggggcagtggttcatgcctgtaaacccagcactttggga

SEQ ID NO: 965193 - DNA, 120 bp, Artificial Sequence
  ENSG00000246695_29 (sequence is synthesized)
aggaatttgagatcagcctggacaacatggtcaaggaagcttttcctgatccactaactaaggacaatcaaacccttcatgatctagaatctggagactgtgtcttctgggaatagtatc

SEQ ID NO: 965194 - DNA, 120 bp, Artificial Sequence
  ENSG00000246695_30 (sequence is synthesized)
cacatgtagcaaaactttgagacgttgaattatgggtccataatctcacaactcagaggggcacctctagactcttggaactgtatatctattggagactttaaggtaaagctgaacaga

SEQ ID NO: 965195 - DNA, 120 bp, Artificial Sequence
  ENSG00000246695_31 (sequence is synthesized)
gagacgtttttctccagaagcagacagcaccatagtcatggacagctttcccaagatcacagatcaagacttctctgccgtcatgagactcataacctcttaattttttcttgcttatgc

SEQ ID NO: 965196 - DNA, 120 bp, Artificial Sequence
  ENSG00000246695_32 (sequence is synthesized)
ttctgtgaacaatagaattggaaaaggggtggtcccgcgtgcacccatagggtatacttttatttgtggaggattttgctgccaaccttatacatgggcaaacttatgccttcatggatg

SEQ ID NO: 965197 - DNA, 120 bp, Artificial Sequence
  ENSG00000246695_33 (sequence is synthesized)
gaagataaagggctaatatgggttagaaattttaatggtacctttgtttctccataatcattcagaaacagaacactggtccactcttgttaacctacatcataggttgaagagaacatt

SEQ ID NO: 965198 - DNA, 120 bp, Artificial Sequence
  ENSG00000246695_34 (sequence is synthesized)
gccaggaggccttcatccttccagatgggcaccatttgttgggtctttttccgtggtatgaagaaaatgaagcaatgattagaaattggtccctcggccgggcacaatggctcatgcctg

SEQ ID NO: 965199 - DNA, 120 bp, Artificial Sequence
  ENSG00000246695_35 (sequence is synthesized)
aaagtttagaaagagctgggctcgtattcagaaaaaacgcctcatccccccgccccgctgcactcccaacccctttaaaaatagcagataatcaagaaaggaaacgggtgctttcatatg

SEQ ID NO: 965200 - DNA, 120 bp, Artificial Sequence
  ENSG00000246695_36 (sequence is synthesized)
aactgtgagccataataaactgtgaattataaattgcctttatagcaatgcaaatggaccagtacagatgggatgctgggaagacagttgtttccaccttcagtaaagtccgtggaacac

SEQ ID NO: 965201 - DNA, 120 bp, Artificial Sequence
  ENSG00000246695_37 (sequence is synthesized)
agttgtgactatattctaggccagccaagatgcttgtactcagaaaggagtggtctcaggaccataagaaagtgaaaaaataaaaataagaaaataaagaagggattgtcaatgaatcag

SEQ ID NO: 965202 - DNA, 120 bp, Artificial Sequence
  ENSG00000246695_38 (sequence is synthesized)
aattcatcaaggtcaaagtcttaggaaattccttcatgaggaagtctaggggggctatggaaatgaaatttttaaacaaataggtatgtggtgctggcaggaataaattatggacttatg

SEQ ID NO: 965203 - DNA, 120 bp, Artificial Sequence
  ENSG00000246695_39 (sequence is synthesized)
aatataacataagattctttattacctggtctcacccgtctttccacctctgccccccttcttgcccgactctgtgtatcacccataataaactacttacagcttcctagtgttaaattt

SEQ ID NO: 965204 - DNA, 120 bp, Artificial Sequence
  ENSG00000246695_40 (sequence is synthesized)
accctaaagctgcctccttcaatattttaagtttaacctaaaggttcttcatacatagtgaactataacccaatgattaaacagattgtaacctactcttgtaccagtcaccaagtttca

SEQ ID NO: 965205 - DNA, 120 bp, Artificial Sequence
  ENSG00000246695_41 (sequence is synthesized)
gccaatcagaggtggccaactgttcaaaccatgctcaaataagggaaatgtcatggtgtaactaatccagctgtttctataccttacttctgttttcttaggtcactttccttttttgtc

SEQ ID NO: 965206 - DNA, 120 bp, Artificial Sequence
  ENSG00000246695_42 (sequence is synthesized)
cataaattctctccaaccactcagcagcactggagtcactccaaagctatcctggttcaggggtctgtctgattcacaagtcattctttgttcaattgagctctgctaaatttaatttgt

SEQ ID NO: 965207 - DNA, 120 bp, Artificial Sequence
  ENSG00000246695_43 (sequence is synthesized)
accacaaggggtacctgctgggcccgtcctctcgcagtgtccactgctctcttacagcaactggagattgtggctgcattctctctcagattctgaagctccatacattgccgttttcag

SEQ ID NO: 965208 - DNA, 120 bp, Artificial Sequence
  ENSG00000246695_44 (sequence is synthesized)
ctgttcaagcttgcttgagcaaatttttgatcttagctgagtttggaagtcgatagacattggactgggtccaggatttgattggatctgataattaactggcttggatccagttagatg

SEQ ID NO: 965209 - DNA, 120 bp, Artificial Sequence
  ENSG00000246695_45 (sequence is synthesized)
cctcggttatctgactgggtcagatagaaaccgccagtaaatattttaataacaatactgcaggggtatgaactctggctttaagaaactcacaaggaattttatgttctataccctttg

SEQ ID NO: 965210 - DNA, 120 bp, Artificial Sequence
  ENSG00000246695_46 (sequence is synthesized)
tttctttttcttgtgtgcttcggtcaggaaaaatcattagtcaagttaatcaaggggatctgagagccaaatacaagattcaacgtaaaaatggaatccttgggctaggcgtggtggctc

SEQ ID NO: 965211 - DNA, 71 bp, Artificial Sequence
  ENSG00000246695_47 (sequence is synthesized)
caacgtaaaaatggaatccttgggctaggcgtggtggctcaccttaggagttcgagaccagtctggccaac

SEQ ID NO: 965212 - DNA, 120 bp, Artificial Sequence
  ENSG00000246695_48 (sequence is synthesized)
ggcaaaagagcgagactccatctcataaataaatacataaataaataaagaaatccttaatttctgcggaactgagtgctctaccttctggctacacctacgtatacctgtatgaggtat

SEQ ID NO: 965213 - DNA, 120 bp, Artificial Sequence
  ENSG00000246695_49 (sequence is synthesized)
aggccctggaagcagcaaacacttacagaaatggtgaaatcttactaaaggtaatctaaagttatggtggaacatcccaaatgaacaacactgcactttaggaagtacatataaaaatga

SEQ ID NO: 965214 - DNA, 120 bp, Artificial Sequence
  ENSG00000246695_50 (sequence is synthesized)
agtctcccaatttagtattattcagggatggctgttgaagttcagaagcttctaaaaagattccaataattttacagattcttttaaaagattctttgtaaaaggcaaataaaaagctta

SEQ ID NO: 965215 - DNA, 77 bp, Artificial Sequence
  ENSG00000246695_51 (sequence is synthesized)
acaaaaaatgaaaataaaattagccgagcgtgatggctcatgcctgtagttctagcttctagttacagtgagctatg

SEQ ID NO: 965216 - DNA, 120 bp, Artificial Sequence
  ENSG00000246695_52 (sequence is synthesized)
tgtctcaataaaaagacaaaaaggtaagcccttaggtaaagtaagcttgcttctttgttagagctatccatgctgagtccaggcaaagaaaatgctttctttggcctggtgcggtggctc

SEQ ID NO: 965217 - DNA, 80 bp, Artificial Sequence
  ENSG00000246695_53 (sequence is synthesized)
cccgcaccggctggaggccccggccccccggcgttccctctccgcgcacctcccggcccgcgctaggtagcaggcaagag

SEQ ID NO: 965218 - DNA, 120 bp, Artificial Sequence
  ENSG00000246695_54 (sequence is synthesized)
cccctcggccgggcgctcgggtttcagccgccgctcctccgcgccccgcccgcgcctggcccgctcgccggcgccgggagagacctcgtaacggaactgggacgccagcgctgcattgtg

SEQ ID NO: 965219 - DNA, 120 bp, Artificial Sequence
  ENSG00000246695_55 (sequence is synthesized)
cgctgcattgtgggagcttttaaagcggcggggagctcggcgcgaccctcgggcccaccgggccacgctcgcccggcccgcgacgcccccccgctgtcgcctggcccgcgacgcaccgag

SEQ ID NO: 965220 - DNA, 120 bp, Artificial Sequence
  ENSG00000246695_56 (sequence is synthesized)
gcctgaggacccgaaagccgggcgcggggagatgaccggtggctcgtgacggtcccacgggcaaaatcttccatcgcccggggctgagacttgtcaaactgccctctacggtcacccgga

SEQ ID NO: 965221 - DNA, 120 bp, Artificial Sequence
  ENSG00000246695_57 (sequence is synthesized)
gcaagactctgtctcaaaaaaaaaagaagaaagaaagaaattgatccctcataataggctgtatagcagattctactgcaaaggctatggttgcacaacagacttctttgaatttgcttg

SEQ ID NO: 965222 - DNA, 120 bp, Artificial Sequence
  ENSG00000246695_58 (sequence is synthesized)
tcataataggctgtatagcagattctactgcaaaggctatggttgcacaacagacttctttgaatttgcttgctaaacttttactggataatactgggattacaggtgtgagccactgtg

SEQ ID NO: 965223 - DNA, 120 bp, Artificial Sequence
  ENSG00000246695_59 (sequence is synthesized)
tttacttacttctttaatttgtaaaattgggtcacttagagtttttttagcctatcttgccatttagccactgttactgataatttggatggaaaagaaaaataaattatatcacctctc

SEQ ID NO: 965224 - DNA, 120 bp, Artificial Sequence
  ENSG00000246695_60 (sequence is synthesized)
gattggataacaatacctactatttaggaaaaacccttcctaaaaatccaggtatcctcacctccagtcttactgatggctgccaaagtcagtgaatttgcctccattcagtgctggata

SEQ ID NO: 965225 - DNA, 120 bp, Artificial Sequence
  ENSG00000246695_61 (sequence is synthesized)
aaaccctgtgacataataagatttgatttttaagaaaacaacttgagaggatggattcagaaaagaggcagatccaagggagagtctaaactggagagcagtggcaatgaacaggaggag

SEQ ID NO: 965226 - DNA, 120 bp, Artificial Sequence
  ENSG00000246695_62 (sequence is synthesized)
gccatatcgagagatgaattgatcatcttatagacctggaggtcagaaatctaaaatcaaagtgtgggctgtgttccttctggaggatcgaggggagaatccatttccttgcccttttca

SEQ ID NO: 965227 - DNA, 120 bp, Artificial Sequence
  ENSG00000246695_63 (sequence is synthesized)
gtaacttctgcttcatggtgatggggacatctctctctctgatcgtaggaattgatttagatgcttttctagccatatgtattatgaactaaatgcagttgaattacttatgggaggaaa

SEQ ID NO: 965228 - DNA, 120 bp, Artificial Sequence
  ENSG00000246695_64 (sequence is synthesized)
tggcaggtgacctcattacttgtcaaatcatcgttagataactgacttgactgttaagattgctgaagcagtgatttattacctcagctaaatctgtatcaatctggtgacccgtgtaac

SEQ ID NO: 965229 - DNA, 120 bp, Artificial Sequence
  ENSG00000246695_65 (sequence is synthesized)
tgaaaccaagatgttaacactgtaagaaaacctagcttatgtttgcagctcctgagaataaatccctttatcttgaaatacctggaaatccctttttaatgtccagtggagtcatattgc

SEQ ID NO: 965230 - DNA, 120 bp, Artificial Sequence
  ENSG00000246695_66 (sequence is synthesized)
caagtttgagaaatgtgtctagaccagtatttcccaaacagcccaccagacaacaccagcctgtaagatggtgatattgtttggatgttttttccctccaaatttcgtgttgaaatgtga

SEQ ID NO: 965231 - DNA, 120 bp, Artificial Sequence
  ENSG00000246695_67 (sequence is synthesized)
ccgccatgttggagttggacctagtggaaggtatttgggtgatggggaatctcttgtgtggctatgtaccttccctgcagtaatgagttcatgaaagatctggatgtttaaaagagtctg

SEQ ID NO: 965232 - DNA, 120 bp, Artificial Sequence
  ENSG00000246695_68 (sequence is synthesized)
tgatcttcctcctctctctcttgctcctgttcttgccaggtgatatgccaactccacctttgccttccaccatgtttggaagctccctgaggcctcaccaggagcagatgctcgtcccat

SEQ ID NO: 965233 - DNA, 120 bp, Artificial Sequence
  ENSG00000246695_69 (sequence is synthesized)
gtatctgactcaggacctgatttaaggtttggggttttttggccctttgtttcttcctcttgttttttgacctttagttactccacacctcattagttccttgacctgcaggtggactga

SEQ ID NO: 965234 - DNA, 120 bp, Artificial Sequence
  ENSG00000246695_70 (sequence is synthesized)
ccccatctctacaaaaattttttttaaaagttacccaggcatggtgttgcacatctgtgttcccagctactggggaggctgagacgggaggatcacttgagtccaggaagttgagaggtt

SEQ ID NO: 965235 - DNA, 120 bp, Artificial Sequence
  ENSG00000246695_71 (sequence is synthesized)
gaggctgctgtgagctgtgattgtgccactgcactttagcctggacaacagagggagaccctgtcaacaacaacaacaacaacaaaaaagcaaaacatcataggctgcagaaataaactt

SEQ ID NO: 965236 - DNA, 120 bp, Artificial Sequence
  ENSG00000246695_72 (sequence is synthesized)
tcttgtcaattgtgtctttaaccatgaccattttgagtcatttccacagtgagttgcctaattttgatgcatttctgaaaactctttataagcaagtaaaatcctagagaattgtgcctt

SEQ ID NO: 965237 - DNA, 120 bp, Artificial Sequence
  ENSG00000246695_73 (sequence is synthesized)
caaggagactcatggaaaggatggaaagaactcttgaatacatgtttctgatagctttatgatcatatcatttggactgggtaagaattcccagaactcatgaagagactgactatttat

SEQ ID NO: 965238 - DNA, 120 bp, Artificial Sequence
  ENSG00000246695_74 (sequence is synthesized)
taatccaagcaggaaaagaattaattgaataccaaggaaatactgtgccagagattttcatgctaaatcagtcagcaccgaaatcgttaagatgtgtagtttgaatgaactccatgatcc

SEQ ID NO: 965239 - DNA, 120 bp, Artificial Sequence
  ENSG00000246695_75 (sequence is synthesized)
tagtcaaatttcctatgatgacccatttaataaacagtgctatgcacctgaattggagaaacagaattgatacttaaatccaatgttaatcatagattcatggaaagcctaaatggctgc

SEQ ID NO: 965240 - DNA, 120 bp, Artificial Sequence
  ENSG00000246695_76 (sequence is synthesized)
ttgggtcttcctgagcccttaaagcttccattattaaaggctctgcactttataagttatcactgaagagagaaaatgatccagatttaaaatacacatattggtgtggtgaatgttcta

SEQ ID NO: 965241 - DNA, 120 bp, Artificial Sequence
  ENSG00000246695_77 (sequence is synthesized)
aattgcgaaaatggtttatgaccaacatttggtttgtcatgctcacaatcctggaaatacattcaaaacttcaggtacatttctgctacctgatgggctatttgaatatatagagaggga

SEQ ID NO: 965242 - DNA, 120 bp, Artificial Sequence
  ENSG00000246695_78 (sequence is synthesized)
tttcattcaattgccattttcattgcatgttttttggttgtatagaagctttcccatgcaaggaggctgatgctgttattacagtagctaaaaggttagtaggaaatgtgttttccccca

SEQ ID NO: 965243 - DNA, 120 bp, Artificial Sequence
  ENSG00000246695_79 (sequence is synthesized)
tggggcattcctggagaaatctctagcaataaaggtacttgtttgactggacaagttgtaaaacagtttaataaggttttttttaggtgtcatagcattaggcaaagctaactgaattga

SEQ ID NO: 965244 - DNA, 120 bp, Artificial Sequence
  ENSG00000246695_80 (sequence is synthesized)
ctggattgtcatagtcaaacatattgcagatccgcttccaatagaagacaatgaaatagtcactggaaagcctgtgctcctaattttagaacctcatgtatcttctgctcctaaactctg

SEQ ID NO: 965245 - DNA, 120 bp, Artificial Sequence
  ENSG00000246695_81 (sequence is synthesized)
attcaaagctcgcgtcccttcaagttgaatcttccggctttgtgcgatttaccctctcaaactttctagtttgcaagtcagaattactttgaacgtcccctcttctggactcccctcccc

SEQ ID NO: 965246 - DNA, 120 bp, Artificial Sequence
  ENSG00000246695_82 (sequence is synthesized)
aaagggactggcggcaaaggagaatagaatgcagatggttaatagttcaaatgaaatttaaaaacctataaaccaatatttttttagaggagaaaagcgttcaccaaaccgccacccggc

SEQ ID NO: 965247 - DNA, 120 bp, Artificial Sequence
  ENSG00000219410_0 (sequence is synthesized)
aaagacaaaaagaaaaatgctgtggctagaggacaggggtggagagagggaaaaaaaggacaaaaataaacaaaacatcaaatatgaaaattctcagagataatgcatttataaacacag

SEQ ID NO: 965248 - DNA, 120 bp, Artificial Sequence
  ENSG00000219410_1 (sequence is synthesized)
aaatggttacaacaaagatggccgtgatgagtgagtataatatatttatatatatatatttatatataaatccgtgtccggcatctgactgtggcacctagggagctaagtccagtcctt

SEQ ID NO: 965249 - DNA, 120 bp, Artificial Sequence
  ENSG00000219410_2 (sequence is synthesized)
gcgtttgccttgaactctcccttctccgcaacacccctgttttggagtttcacagataacacaaagcctcccacagctccttgggggtgggttggggagactgagagtatagggtctttg

SEQ ID NO: 965250 - DNA, 120 bp, Artificial Sequence
  ENSG00000219410_3 (sequence is synthesized)
taggcagagaaggagagaggcttcaaggaaatccgtaaaaccataacacacacttctaagccacctgtgaccaacttgggaatttctggccccttggggaccacatctcagcccttgccc

SEQ ID NO: 965251 - DNA, 120 bp, Artificial Sequence
  ENSG00000219410_4 (sequence is synthesized)
ccttcaaataaaaggaggtctagcccctaccccaaatctccttctaccagcagtcaataggaagcaaagtgagacgatgtaggggaagaaatggctctcagggactgaggcatttgagaa

SEQ ID NO: 965252 - DNA, 120 bp, Artificial Sequence
  ENSG00000219410_5 (sequence is synthesized)
acctctgttcttttgcaggcaagaatagaacaagaggctggttgcatttggggctcccttttctctgttatctgggagggccagcctctagtcttacatcagcccaaactttgaggataa

SEQ ID NO: 965253 - DNA, 120 bp, Artificial Sequence
  ENSG00000219410_6 (sequence is synthesized)
ttcccttgagcaccgacccccagttttagaagctttgcttgggaggggaggctgctggatgacaccatcagctcagtattcctttgcaatcaggagggctgatgttccttttgaagaaga

SEQ ID NO: 965254 - DNA, 120 bp, Artificial Sequence
  ENSG00000219410_7 (sequence is synthesized)
gttcagaaaaaggatggtatcctgtgaaggaaagccgtgacagaggcccaaggagatggagccaaggcctgtcaaggaagaaaaggacttttcccaccaagagttggagaaagaagacac

SEQ ID NO: 965255 - DNA, 120 bp, Artificial Sequence
  ENSG00000219410_8 (sequence is synthesized)
caggactacttcttcctcttcccagtgggtggcagcacggatctctaagagctggccaggtgctccacctggatggtgctggtggtgacagtgaggcagatgtccttatgatgctccgcc

SEQ ID NO: 965256 - DNA, 120 bp, Artificial Sequence
  ENSG00000219410_9 (sequence is synthesized)
gtcttatacggggtcaggtcaaaggaacactggggtggagggttgggattgctgtccccaccacccccaccctggggggctgccccaggagactggaagtgtggtggtggctgttgctgc

SEQ ID NO: 965257 - DNA, 120 bp, Artificial Sequence
  ENSG00000219410_10 (sequence is synthesized)
tgctgctgctgctgctgctgctgctgtgatgcctgggaggcctgggcctgggcctgggcttgagcctgagcctgagcctgggcttgagcttgagcctgggcctgggccactgctgccgct

SEQ ID NO: 965258 - DNA, 120 bp, Artificial Sequence
  ENSG00000219410_11 (sequence is synthesized)
actgctgccgctgctgctgctgcctgcacctgttgctgaagatcaggcgggttgtgtttgcgcatatgtttcataaggtatgtttctgatgtgtatgcccgactgcagatagtgcaggtg

SEQ ID NO: 965259 - DNA, 120 bp, Artificial Sequence
  ENSG00000219410_12 (sequence is synthesized)
tacaccttggcatgcttcactgtgtgcgtagacaggtgcacctctagtgaggctgcatccgtgtacgcccgatgacagttgtggcacttgaagggtttatctttgttgtgttgccgtctg

SEQ ID NO: 965260 - DNA, 120 bp, Artificial Sequence
  ENSG00000219410_13 (sequence is synthesized)
actatattaccgccggtacacatccgcccgacactgaaacttttccttttgcatggtagccacgaccgcccacagtgaggcggctgtagcccgcttccgcccttacagacaccccaggac

SEQ ID NO: 965261 - DNA, 120 bp, Artificial Sequence
  ENSG00000219410_14 (sequence is synthesized)
cctgctcctcatcagcgacttcagaaccatctctatgaccaggtgcttttcgggacctctggtataaaatctcaaaaacatcacaggacgtgtctcttatttgtgaggaaagcctgactc

SEQ ID NO: 965262 - DNA, 120 bp, Artificial Sequence
  ENSG00000219410_15 (sequence is synthesized)
ctcctcttctcaaagcaagatgtctgatcactttaaggtgagatcatcacatccacaagaagccgggtgagacggtctatggcctgtaagtctggactccagttcaacttgagatagcac

SEQ ID NO: 965263 - DNA, 120 bp, Artificial Sequence
  ENSG00000219410_16 (sequence is synthesized)
caaagatcatcacttctagttggcaggttcccttcttcctagtcactccagattcacgggataaacactgggcatctttatgaagcataagcgttttcattttctgtttgctgattctct

SEQ ID NO: 965264 - DNA, 120 bp, Artificial Sequence
  ENSG00000219410_17 (sequence is synthesized)
ctgaacatttagtacgtgttttcttttgttctctactcctggcatccctcagagccttgcttgttgctgtgggtgtcaccaggctggtgcccagctaatgtctgattttatttcctgttc

SEQ ID NO: 965265 - DNA, 120 bp, Artificial Sequence
  ENSG00000219410_18 (sequence is synthesized)
ataattggtgccctaagggctagaggtatggtcttctccactcaaatgcctctgttttggcatcaaggggcaaatcttccaagatgggtacatgagtattttcagggaggaaaattagag

SEQ ID NO: 965266 - DNA, 120 bp, Artificial Sequence
  ENSG00000247121_0 (sequence is synthesized)
accgcttccttatcctctcggtatgcgcatcgccaccaccctcgctgcagaggccgccgccctcccagcgcgccatcaccgcctcctctgcctcttcccctccctcagccccggcccctg

SEQ ID NO: 965267 - DNA, 120 bp, Artificial Sequence
  ENSG00000247121_1 (sequence is synthesized)
cattgacttggctcgggctgcgcctcactgcgcctgccaactgtcacacgctctgaggctttcaacagcggggcgccagggacaaacaagccgcggcaagcgcaaacagcctgctcaaac

SEQ ID NO: 965268 - DNA, 120 bp, Artificial Sequence
  ENSG00000247121_2 (sequence is synthesized)
agggacggccagggtgttgtttgaccagcactggaattggaaactaggtttcgaagaagtcaaatcgaagtacaatattgtattttaaactgcctgttgttattacatccctcacaacgc

SEQ ID NO: 965269 - DNA, 120 bp, Artificial Sequence
  ENSG00000247121_3 (sequence is synthesized)
acgctctacttgaaacttccagtggataccaactgcacttagaataaaaaatgaaactccttgcctaactctgggacctcatcagcacatactcaccatattttggtaacaaaggccttc

SEQ ID NO: 965270 - DNA, 120 bp, Artificial Sequence
  ENSG00000247121_4 (sequence is synthesized)
atgctgttcccggaagtcgccaagttccatccatcattgttaataattccttttgctcgctcctcgcacaagaactgtttcttctgcttagtgctttgcctactgattccatcttgtcat

SEQ ID NO: 965271 - DNA, 120 bp, Artificial Sequence
  ENSG00000247121_5 (sequence is synthesized)
ttaagtctcggctcaaatgtcacctctgcaaagaacccttgtctgaccatacatctaaaatagccacaaacactctataaagacttggccttgctttatttccttctcagcactcatcac

SEQ ID NO: 965272 - DNA, 120 bp, Artificial Sequence
  ENSG00000247121_6 (sequence is synthesized)
tgtctgaaacaatgttttggatttgttgcttattatcagtctcccttctcaagaatgcaagctttgtgagggcagagtcgtaatcttttttaaggctgtatccccaatgcctggattatc

SEQ ID NO: 965273 - DNA, 120 bp, Artificial Sequence
  ENSG00000247121_7 (sequence is synthesized)
aacttcaggcaatggaccacgcaccaggattccacctctttctagcacctatcagtgttgcgcacatcataggccctcaacaaacaggtgagaatgaatgagttaacagtgaattttcca

SEQ ID NO: 965274 - DNA, 120 bp, Artificial Sequence
  ENSG00000247121_8 (sequence is synthesized)
aatgaatgagttaacagtgaattttccaaagagatgagactttattgtcaaaatattttaaagatttcacgaattttcatgattttttttttttgacaaagtctcactctgtcacccagg

SEQ ID NO: 965275 - DNA, 120 bp, Artificial Sequence
  ENSG00000247121_9 (sequence is synthesized)
tatcctcttagggtgttctcaacagatttaaatcttaatgacttcattttttaaaaaattataaactgaacctaggatcaagagaattgaaacatcttcttaaaataattcacttcctca

SEQ ID NO: 965276 - DNA, 120 bp, Artificial Sequence
  ENSG00000247121_10 (sequence is synthesized)
tctccaaattagacacaatgatactttgctacagaggattattgtcaatccgagaatcaattagggaaaatatatgaaagacaattcataaatgttttgtaaactttaaatttctttacc

SEQ ID NO: 965277 - DNA, 120 bp, Artificial Sequence
  ENSG00000247121_11 (sequence is synthesized)
cagagtcttgctctgttgcccaggctgtaatgcagtggcacaattacagcttattggagcctcaacctcctgggctcaagcgattctcttgtttcagccatccaagtagctggggctaca

SEQ ID NO: 965278 - DNA, 120 bp, Artificial Sequence
  ENSG00000247121_12 (sequence is synthesized)
cgattctcttgtttcagccatccaagtagctggggctacaggtgtgcactaccacacttggctaattttttaattttttgtagatatgggttttcaccatgtttcccaggttgatttcga

SEQ ID NO: 965279 - DNA, 120 bp, Artificial Sequence
  ENSG00000247121_13 (sequence is synthesized)
aacctctgcagtggggagatacagaatgaataaaatgacgaatggctccctgacagtgctagatgcttgtaactctgaagccaacttatagtttaaaaagtagcttccttttctctgact

SEQ ID NO: 965280 - DNA, 120 bp, Artificial Sequence
  ENSG00000247121_14 (sequence is synthesized)
tccattttatttttcaaaaggatctctataaatctattaaaaatacttctaagaattattgttatgcctatgttctttttcagacaaaatagagacagagtctatattatgggcttaaaa

SEQ ID NO: 965281 - DNA, 120 bp, Artificial Sequence
  ENSG00000247121_15 (sequence is synthesized)
tttttaatttaaagaaaatcagtgaaagtttatgttagtataaagactcagagccttatgcaaaatatgagaaatgggggtagggaggggaaattcacctagtaaatgcaatctatagct

SEQ ID NO: 965282 - DNA, 120 bp, Artificial Sequence
  ENSG00000247121_16 (sequence is synthesized)
tccacctctttctagcacctatcagtgttgcgcacatcataggccctcaacaaacagtgtccttgtctggcttcaatatcagggtaatgctggcctcataaaaacagtttgaagcaggca

SEQ ID NO: 965283 - DNA, 120 bp, Artificial Sequence
  ENSG00000247121_17 (sequence is synthesized)
gccacgctgggggatcccacatggtaaagaactgcaggtggcctctaggagatgagggcggcctccagtcaacagccagcaagaaactgaagtgctctgtcctacaaccttgtgtaactg

SEQ ID NO: 965284 - DNA, 120 bp, Artificial Sequence
  ENSG00000247121_18 (sequence is synthesized)
aattctgccaacaacctgagtgagactgaaagtggatccctctccagtcatgcctcaggtgagactgtatccctggatgacaccttgattcagcctcatgtgaccctaaggagacgaccc

SEQ ID NO: 965285 - DNA, 120 bp, Artificial Sequence
  ENSG00000247121_19 (sequence is synthesized)
atataaactgtgcctggactcaaggccctcagaaactgtgagataataaacatgtgttaagctattgaatttgtggcagtttgtcacatggaaaagtaatgcctgcccagtaaattgccc

SEQ ID NO: 965286 - DNA, 120 bp, Artificial Sequence
  ENSG00000247121_20 (sequence is synthesized)
actcaacaaatgtggagccctactgcgacccgcccgatcccggacgccgagacacccgcactgcgccagaaaatcatggtcccagtcccaggagcggacattccagaaacagaccataaa

SEQ ID NO: 965287 - DNA, 120 bp, Artificial Sequence
  ENSG00000247121_21 (sequence is synthesized)
taaacacagaagacacacgagtgtaaagtcagtgccccgctgcgaattaaatcggggtgatgtgatggcgagtgagtgggtagttaattcggatggcttggttagacgaggcctcgctga

SEQ ID NO: 965288 - DNA, 120 bp, Artificial Sequence
  ENSG00000247121_22 (sequence is synthesized)
gcaggtgccactgaagccgaagtctgaaggcagagcaggaacctgcgggcgaaggtcgctatctgaaccgcgaatcgctggtttccctggggaggttggccgcggagggatcactgctcg

SEQ ID NO: 965289 - DNA, 120 bp, Artificial Sequence
  ENSG00000247121_23 (sequence is synthesized)
aaggaccgagggagcgggcgctgtaggtgttttcggcagagatgcccgcccgcatcagagtgcctcaggagggcggtgaggaggagacggaagagagggcggggacctcgcagggccgag

SEQ ID NO: 965290 - DNA, 120 bp, Artificial Sequence
  ENSG00000247121_24 (sequence is synthesized)
cgagggcgccctggggtccagtcccggggctggcggctgccttgcggcctctaggtgcgggcggataacaaaacccggcgccggatcgcccggcccgggtcgcgggcgccgcaggatgtg

SEQ ID NO: 965291 - DNA, 120 bp, Artificial Sequence
  ENSG00000247121_25 (sequence is synthesized)
gaaggcccgcctgttccgagccttaaatcaacacctgcggttcccgggggtgctaccactggggcccgcagcaaggctccgcggcgctaggcccgagaaaccgaaactcccctagtcgcc

SEQ ID NO: 965292 - DNA, 120 bp, Artificial Sequence
  ENSG00000247121_26 (sequence is synthesized)
cctgccccccagcactcgcgccattgcctccagccccgagccaccattgtttccagtgccaaatcgggcagccccgctagcctccgaggccgaaccgccaggggccccataagccccgag

SEQ ID NO: 965293 - DNA, 120 bp, Artificial Sequence
  ENSG00000247121_27 (sequence is synthesized)
caaggaactagtcatatctgagagcagcctccagaaaacagtcagcaaaacactgaggttctcaatccgatagtcaatgaggaacggaatgctggaacaatgatgtgagcttggaagcag

SEQ ID NO: 965294 - DNA, 120 bp, Artificial Sequence
  ENSG00000247121_28 (sequence is synthesized)
atccttcccttctgctgggcctcaggtgagactgcagctccagtcatcatcttgattgcagcccacagaaactaccaacccacagaaactgtgagttaataaatgtgttgttttaagttg

SEQ ID NO: 965295 - DNA, 120 bp, Artificial Sequence
  ENSG00000247121_29 (sequence is synthesized)
cagcttttctgcaccttcctctccattgacctagagtgtctatggaacactcagagtgtcccctgtgtaaaccacctaccacaagattatcaacttcaggcaatggaccacgcaccagga

SEQ ID NO: 965296 - DNA, 120 bp, Artificial Sequence
  ENSG00000247121_30 (sequence is synthesized)
catcataggccctcaacaaacagctgccaagaacctgaacaccctccgctggtaacattaagatgttatctttaactggcaagtcaattaaggaatgtagaagaatgaaactggatcctc

SEQ ID NO: 965297 - DNA, 120 bp, Artificial Sequence
  ENSG00000237813_0 (sequence is synthesized)
gagggaagataggtgattgggggaggagaagggggtttgagactgtgagaggaactagctgctgagagtccgaagagcctgggaagagaaaagaaagtacagagaaaaaaaaagaatgga

SEQ ID NO: 965298 - DNA, 120 bp, Artificial Sequence
  ENSG00000237813_1 (sequence is synthesized)
atacacatgaatgccgaaccacattggatatgtagctgttcatgaagatattccagggaaggcctatctagtagagcctcaaatctatttgaatacaaatggcactcattaaggacatct

SEQ ID NO: 965299 - DNA, 120 bp, Artificial Sequence
  ENSG00000237813_2 (sequence is synthesized)
aataacttgctactgagagcagcacacatattttcccaaagtgcaaagttgagaagaagtacaaagctttgttaatattctgaacagtactgcttagtatgatctaattgatggattttc

SEQ ID NO: 965300 - DNA, 120 bp, Artificial Sequence
  ENSG00000237813_3 (sequence is synthesized)
catggactccctagagactgaaaaaggtttgactgtcaggaaacttttcttgtgtttattcttcaattttccttttcctactttccaatcatcattccctattaacatcccttgatgggt

SEQ ID NO: 965301 - DNA, 120 bp, Artificial Sequence
  ENSG00000237813_4 (sequence is synthesized)
caccttaagtgattattctttttaatggcatttataacgtttaatatttccctgttaatttctattccgacaaagtacatatttttttaatcttcactcataacattaataaatttttcc

SEQ ID NO: 965302 - DNA, 120 bp, Artificial Sequence
  ENSG00000237813_5 (sequence is synthesized)
cttctgggggcccgtactgtcatgcctcagagctggcaagtcgtcccagggaagacaacggccttcctggagggagggaaccttgtggttaggcgcatggggtgcgaagcagggcctcta

SEQ ID NO: 965303 - DNA, 120 bp, Artificial Sequence
  ENSG00000237813_6 (sequence is synthesized)
cttggccgacgcagctagaagactaaggtcaggggcattctggatgcagcccacaaagctagctctctgtggcactgagcaaggcacttcttgctgccaccatgtgaagaaggatgtgtt

SEQ ID NO: 965304 - DNA, 120 bp, Artificial Sequence
  ENSG00000237813_7 (sequence is synthesized)
ttggaggcatgtgaggtgcaggaaggattctaagcagtggtgctggctttgaagatggaaggcattgtacctcaatgaatgtgactggtttctagaagctgagagtagccagcccccagc

SEQ ID NO: 965305 - DNA, 120 bp, Artificial Sequence
  ENSG00000237813_8 (sequence is synthesized)
tgacagccaacaaggaaacagggaccttggttctccaaccacagaaaatagattctaccaacaagaatgagcttgaaagcagattcttccctcgcacttaaagattcattctccatgcct

SEQ ID NO: 965306 - DNA, 120 bp, Artificial Sequence
  ENSG00000237813_9 (sequence is synthesized)
agcagctgcagaatgtccagctagatcatctcagcctctcctgaactgtgaccaactggcttactcaagggactggatctgctgtcccgacatgatggcaagctgcagcacatcatgcag

SEQ ID NO: 965307 - DNA, 120 bp, Artificial Sequence
  ENSG00000249873_0 (sequence is synthesized)
ggaggcttcattgggtaacaaagttcttcccaagcattctcttgcattccacccggggaacaagacagcaccgggtttcacactggcaaggcaggaggctgtgtgctgccagaacgacca

SEQ ID NO: 965308 - DNA, 120 bp, Artificial Sequence
  ENSG00000249873_1 (sequence is synthesized)
gcagggggcgcaaaggccacgccaggcacctgctggcctcagagaaaacagaaagggaaccaggaagcccactcctgctgtcctttctctgcaaggaaatgtgccagggcactgcagccc

SEQ ID NO: 965309 - DNA, 120 bp, Artificial Sequence
  ENSG00000249873_2 (sequence is synthesized)
agacagtcggcagtagaggacccatgaagtatctttgtgcaaagaaagcagcaaagagaattaagagaattgcatcatataaagagtgaattaaaccatctaaaggagcaaaaattcatc

SEQ ID NO: 965310 - DNA, 120 bp, Artificial Sequence
  ENSG00000249873_3 (sequence is synthesized)
atcacatggacaagaaattaagacgtaacatccatctcactatttgcaaagtggcttattcctacagacaatgcagatatcagctggaaacctaggagcagaagcccagcataaagatct

SEQ ID NO: 965311 - DNA, 120 bp, Artificial Sequence
  ENSG00000249873_4 (sequence is synthesized)
ctgaaagcctggatgcgtggattcctctcttacttcccaaaacggtggggtggaaatgtgaatatcagcatgatgcacagatctctgcagatgtccagcgaactgaatttctagacgcta

SEQ ID NO: 965312 - DNA, 120 bp, Artificial Sequence
  ENSG00000249873_5 (sequence is synthesized)
taatctatgttctttcccaacccccacttcagtttacatatcgcaggccatagatcctgtttgttgaaaagcgatcagctagaaaacaagagtggttataacctgtgctgcccagtgatc

SEQ ID NO: 965313 - DNA, 120 bp, Artificial Sequence
  ENSG00000249873_6 (sequence is synthesized)
aggaaaagagagcggatgaaacttccatgactttctgttagtctgattaatatccatgccaaatgtaagattagttaaaaggccttattgcttcccaccaaaatgttccttcactagcta

SEQ ID NO: 965314 - DNA, 120 bp, Artificial Sequence
  ENSG00000249873_7 (sequence is synthesized)
tatactacactgaaatgtaaagttatgggtatgtttaacagtttaatttgtcagtgggcatccaactcttctatttgtgtttttactttgagcttaattggagcagacaaatagaggtga

SEQ ID NO: 965315 - DNA, 120 bp, Artificial Sequence
  ENSG00000249873_8 (sequence is synthesized)
tgcatgcagtaccctgagctgtcttcagcacaccaagcatccacaacatgggaaataccgtgctttaaatgttgctttaatcacagtgctcatgagtaagggcatgtcctgtctcttatc

SEQ ID NO: 965316 - DNA, 120 bp, Artificial Sequence
  ENSG00000249873_9 (sequence is synthesized)
catgaaaacactcccacaaaatgaagtcacacccagtatctgttaacggagatactgagtgggtgaagaagactcattccctaatgcaattcaggtcacacagggtaaaaaagaaaaaaa

SEQ ID NO: 965317 - DNA, 120 bp, Artificial Sequence
  ENSG00000249873_10 (sequence is synthesized)
aatccttttctgttgaggatacagatggagagaaaatggaaaatgcctttcaggaagcacaagcctagttttctaattgtgtttcagtgaacacgcaggtgaacttacctgtgtggcttg

SEQ ID NO: 965318 - DNA, 120 bp, Artificial Sequence
  ENSG00000249873_11 (sequence is synthesized)
gtattgtggtgggttttcagcttcttctccaccaaatcctttgaaaagcagcagtggcagaaacaaataacccaattaaaaacaataatagcaacaataaaaaaagaaaagatgaagaaa

SEQ ID NO: 965319 - DNA, 120 bp, Artificial Sequence
  ENSG00000249873_12 (sequence is synthesized)
gcagtggttttctttggctagctgaggaactttctactaggcgttagcaatctctttgtaaacttttttctttacagcaaatgcttcattctctagacacatgtcaagaattttcaagca

SEQ ID NO: 965320 - DNA, 120 bp, Artificial Sequence
  ENSG00000249873_13 (sequence is synthesized)
tcgccagactcaattcttcacccccatgttaacaattaaagaatcagccgaatgcctgtgtttaagaatcaagcccctgaaacctgtgatttgtacgttactcacaccctctagtcctat

SEQ ID NO: 965321 - DNA, 120 bp, Artificial Sequence
  ENSG00000249873_14 (sequence is synthesized)
tagcaagagatgctgggagaacttcttggtcatcaatttgatgagttccaaggggaatgtgggttttggttgtgatgttcatacacatagaaatctggctgaacacacgtacctaagagt

SEQ ID NO: 965322 - DNA, 120 bp, Artificial Sequence
  ENSG00000249873_15 (sequence is synthesized)
cttccatctttccttgcttgctctacagaaaataaagacagagggtgtgtaaaatatcatgtatatattatacaaagacctcttgaaaaggtaataaattctggtgattcggggcacaaa

SEQ ID NO: 965323 - DNA, 120 bp, Artificial Sequence
  ENSG00000249873_16 (sequence is synthesized)
cttattgaagctcttccctctgcagccctggaagcctgatcctacctacagatgtcagcgaaatctccctccctcagggtccctgtctagtttgtttttgacccggccacaaatactagg

SEQ ID NO: 965324 - DNA, 120 bp, Artificial Sequence
  ENSG00000249870_0 (sequence is synthesized)
tttggtgcctcctggaattcctacctctactggcacagggaacatgactatgagtatccaactagccctgccttccaagtgttcattggctagaactgaatgcaagcagatgatgtaagg

SEQ ID NO: 965325 - DNA, 120 bp, Artificial Sequence
  ENSG00000249870_1 (sequence is synthesized)
agttcagcttcagaagatggataccacagaatacgacaattccaaaaagacctacctttgtggaatgattcaagcttcagaatttttcacgttttattatgactactgaggctttttatc

SEQ ID NO: 965326 - DNA, 120 bp, Artificial Sequence
  ENSG00000249877_0 (sequence is synthesized)
gcaaaggggaagcaaggcaggccttacatgggagcagaagagagagagagagaggggaagagccacacttttaaaccatcacatctcatgataattcaatcacaatcacaaaaacagcat

SEQ ID NO: 965327 - DNA, 120 bp, Artificial Sequence
  ENSG00000249877_1 (sequence is synthesized)
ctaaataactcatttgtgctcttttgcgtttttttgatggtgttgtatataaaattatatttttttgttcatggtttttgggaggaattttgaagagattaaaaacttcactatcatgat

SEQ ID NO: 965328 - DNA, 120 bp, Artificial Sequence
  ENSG00000249875_0 (sequence is synthesized)
ttaggactgacctatgggaggaacaacttggactcctgtgttcacctgtgccctcttcactctttacaaatttacttggatgacgacttccacttcatatagctcctagatgaggccagt

SEQ ID NO: 965329 - DNA, 120 bp, Artificial Sequence
  ENSG00000249875_1 (sequence is synthesized)
gttcctctgatcacactccgaatggcaaagccccagataacttggacccaggtgctggccaataatgagtaatttagcaacatatgcctcaaaaaccatgcactacataagagacaataa

SEQ ID NO: 965330 - DNA, 120 bp, Artificial Sequence
  ENSG00000249875_2 (sequence is synthesized)
gttacttcgtgacaagtactatgatgagagttctaaggcaataaaatgtcagaaaatttccctaagatgactccaggaataaggaatggagcctgtaaaaacactctttgggaggccgag

SEQ ID NO: 965331 - DNA, 120 bp, Artificial Sequence
  ENSG00000230651_0 (sequence is synthesized)
tgatttgaggcacctgaggaactaagagcccaggaagaaaggacagtaatgaaaaagccaacaaatgagaccagtatttagtggtatttcccctataggcaattatttattcaaaaatac

SEQ ID NO: 965332 - DNA, 120 bp, Artificial Sequence
  ENSG00000230651_1 (sequence is synthesized)
aggaacagcatttatttgcttaactgcagatatgcaaacaaaaaatttaaatggtcttagttactatctacatgcagatgcttccaatcttaatctctagtcatgaccactgatcctttt

SEQ ID NO: 965333 - DNA, 120 bp, Artificial Sequence
  ENSG00000230651_2 (sequence is synthesized)
ttgattcctttaattcaatttatatatctctaagtgaatatcttgtcaacactgacaatcaagactaagatgtatttattctattccagattctactctaaaagtcaccaggaaaaattc

SEQ ID NO: 965334 - DNA, 120 bp, Artificial Sequence
  ENSG00000230651_3 (sequence is synthesized)
taagtctactagcaaaatcttccagagaagtggaaaagccatcagccaatgtgttagactatcatttccatgaccttacacctatcaaaaaggcactattaccaggcttatagaattcta

SEQ ID NO: 965335 - DNA, 120 bp, Artificial Sequence
  ENSG00000230651_4 (sequence is synthesized)
aaaaagttggaaaccattttccattataaaagaaattcttccaaatcacacaaaacactctgacacttctccaattccccctatcatggggctggcagcagccgctttgcgtcctgaatg

SEQ ID NO: 965336 - DNA, 120 bp, Artificial Sequence
  ENSG00000230651_5 (sequence is synthesized)
tcatgacagtgatgataacagtaatgatgataacagcaatgatgaagtctcacatttaaaattttcaagtcactcatcacatcccaagtcactcccttcattaccttttatttatactgg

SEQ ID NO: 965337 - DNA, 120 bp, Artificial Sequence
  ENSG00000230651_6 (sequence is synthesized)
agtcatcctgtgtgcctcagtcagaccattttgtatgtacaatgaccgacaatgagatttaacatgcagtttgcagatcctcccttctctgggtcacctgaaaataagccacaaacaaag

SEQ ID NO: 965338 - DNA, 89 bp, Artificial Sequence
  ENSG00000230651_7 (sequence is synthesized)
aacagtgtgtggaacgttggcgacctcggcgctcgagctgcactccgctgggctcttggcagcaccctgtgctctgagggtgtcttgcc

SEQ ID NO: 965339 - DNA, 120 bp, Artificial Sequence
  ENSG00000230651_8 (sequence is synthesized)
attggcttttaatgatgcatttaaaaatattcatcccatttactgacttatgcaggcaatgtacttttgtaaatgtgggccagcatcatgcttaaattcccaaaccactatttatttaaa

SEQ ID NO: 965340 - DNA, 120 bp, Artificial Sequence
  ENSG00000230651_9 (sequence is synthesized)
actcatcacttcagtttttataccctttctcccccataagggaaaaaatatgattctgactgtataagcaccaactaaacagaacacaaaacatggcagacgataaaaacatattttcac

SEQ ID NO: 965341 - DNA, 120 bp, Artificial Sequence
  ENSG00000230651_10 (sequence is synthesized)
aaatgagacatgtcattttaccatcgaggagagaaacaaaataagctggttttcaagttccatatcttgtgtgctcctttcagctaaatgcccttacatctgtaagcccttgggacaggt

SEQ ID NO: 965342 - DNA, 120 bp, Artificial Sequence
  ENSG00000230651_11 (sequence is synthesized)
taaggcttttattattattttaaagtcttcataactacaacctagcatccaaagtgaaacagatgctattggatatgagtagcatatgcaatggaaatattgacattgccttcccgacag

SEQ ID NO: 965343 - DNA, 120 bp, Artificial Sequence
  ENSG00000230651_12 (sequence is synthesized)
tcatgagggatagaccataggctttttggtaacctatattttctaggcccaaagcagggaatgagatggcagggaaattcagggtaaactccaaatttacataaagttatagaagaatat

SEQ ID NO: 965344 - DNA, 120 bp, Artificial Sequence
  ENSG00000230651_13 (sequence is synthesized)
agatcatgagtagtggctagcaccttcctgacttccagaaaatggtggtgccgatattgaacaacagtttggagaaaatgtaaaatgtttacatttacatttacagtttagtctttgaac

SEQ ID NO: 965345 - DNA, 120 bp, Artificial Sequence
  ENSG00000230651_14 (sequence is synthesized)
aacagtttggagaaaatgtaaaatgaaaatttgttaacgaacttgtttttaaaaagcacctagactccatataagagtacttgtcctatgttattttcataaactacatttgtgattgtt

SEQ ID NO: 965346 - DNA, 120 bp, Artificial Sequence
  ENSG00000230651_15 (sequence is synthesized)
aaaaaaaaaaaaaaaaaagactaaactgtgatttgaggcacctgaggaactaagagcccaggaagaaaggacagtaatgaaaaagccaacaaatgagaccagtatttagtgattctactc

SEQ ID NO: 965347 - DNA, 120 bp, Artificial Sequence
  ENSG00000230651_16 (sequence is synthesized)
ctcagtcagaccattttgtatgtacaatgaccatctgaggcactgcctataaagtggaagatataattataatactacagacgtcattccagctttccagttgcttatggtccagcaggg

SEQ ID NO: 965348 - DNA, 120 bp, Artificial Sequence
  ENSG00000230651_17 (sequence is synthesized)
aggatgcacatgggaaaaataataactaatgacaaatgtgatgagtcttaacaaagaagaagagcatattgcaagggaatgtaattcactccagggacaatgagatttaacatgcagttt

SEQ ID NO: 965349 - DNA, 120 bp, Artificial Sequence
  ENSG00000230658_0 (sequence is synthesized)
acagtggcgcgccgttccgagcaatgagactgcaggcacaggtgcggccggattccctgtcgctgtcccgcgctgagtgaattttgcctcggagctggtccgaggtcgcgcctgctcttt

SEQ ID NO: 965350 - DNA, 120 bp, Artificial Sequence
  ENSG00000230658_1 (sequence is synthesized)
tgtgtgcccaaggcagatttccaggtttcgaagtagaaatctgtcttctaactctaaggccttgggagatgaaggatccgtgattcaaaggcagaaatagatggagtcttgctgtgttct

SEQ ID NO: 965351 - DNA, 120 bp, Artificial Sequence
  ENSG00000230658_2 (sequence is synthesized)
tgtgttctccaggattgagtacagtggcttattcacagatgtgatcatactacactacagcctcaaactcccggggtcaagcagtcctcctgcttcagcctcctgaggagctgggactac

SEQ ID NO: 965352 - DNA, 120 bp, Artificial Sequence
  ENSG00000230658_3 (sequence is synthesized)
atcaccatgcccactagattcacagtcattttgcttgtggaaggtcttgcctcaatgttgataggtgctgactgatcagggtcaggttgctgactgatcagaatggtagtttctgaatgt

SEQ ID NO: 965353 - DNA, 120 bp, Artificial Sequence
  ENSG00000230658_4 (sequence is synthesized)
taagacaacaatgaagtttgctgcattgattgactccctttcacaaaggatttctccatatcatgcaatgctgtttgatagcattttacccatagtagaacttctttcaaaattggagtc

SEQ ID NO: 965354 - DNA, 120 bp, Artificial Sequence
  ENSG00000230658_5 (sequence is synthesized)
agaacttctttcaaaattggagtcaattctctcaaaccttgtctctgcttggtcaactaagtttatgcactattccacatcctttgttgtcatttcaacaatatttacagagtcttcacc

SEQ ID NO: 965355 - DNA, 120 bp, Artificial Sequence
  ENSG00000230658_6 (sequence is synthesized)
gtcatttcaacaatatttacagagtcttcaccatgaatagattccttttcaaacaaccactttctttgctcagccataagaagcaactcttcacccattcaagttttatcatgagattgc

SEQ ID NO: 965356 - DNA, 120 bp, Artificial Sequence
  ENSG00000230658_7 (sequence is synthesized)
ctaattctagttgtttttctatttccaccacatctgcaggtactttctccacagaaatttcaaacctctcaaagtcatccgtgagggttggaatcaacttccaaatttctgtgaatgttg

SEQ ID NO: 965357 - DNA, 120 bp, Artificial Sequence
  ENSG00000230658_8 (sequence is synthesized)
atctagaatggtgaatcttttccagaaggttttctatgtgctttgcccagttccatcagaagaatcactgtctgtggtagctctagccttattaaatgtatattttaaataataacacct

SEQ ID NO: 965358 - DNA, 120 bp, Artificial Sequence
  ENSG00000230658_9 (sequence is synthesized)
ctctagccttattaaatgtatattttaaataataacacctaaaaatcaaaatgactccttgatccatgggctgtagaatagacattgtgttagcagtcatgaaaacaagattaatctcct

SEQ ID NO: 965359 - DNA, 120 bp, Artificial Sequence
  ENSG00000230658_10 (sequence is synthesized)
catatagcaccattatagctcttgggtgaccacgtgcattgtcaatgaccagtaatattttgaaaggacacctttttttttgagcagtaggtctcaacagtggacttaaaatattcagaa

SEQ ID NO: 965360 - DNA, 120 bp, Artificial Sequence
  ENSG00000230658_11 (sequence is synthesized)
agctgtgttgtaaacagatgtgctgccagctaggtatcgttgttccatttatagagcactggtagagcagatttagcataatttgtcaggaccctaggatttttggaatggtaaatgggc

SEQ ID NO: 965361 - DNA, 120 bp, Artificial Sequence
  ENSG00000230658_12 (sequence is synthesized)
actggcttcaacttcaagtaaccaactgcattaactcctaacaagaagagtcagcctgtccttgaaagtatgaaaacaggcatggacttctcctctctagctatgaaagtcttagatggc

SEQ ID NO: 965362 - DNA, 120 bp, Artificial Sequence
  ENSG00000230658_13 (sequence is synthesized)
ctagctatgaaagtcttagatggcatcttcttccaatagaagttgtttcatgtacattgaaaatctgttgtttggtgtagccaccctcttcgatgatcttagctagatcttctggataac

SEQ ID NO: 965363 - DNA, 120 bp, Artificial Sequence
  ENSG00000230658_14 (sequence is synthesized)
gaacctctgctatcttctagattttcttgggcaacttccttacttctttcagctttcatagaactgaatagtgttaggatcttgctctgggttaggttttggcttaagggaatgtggtag

SEQ ID NO: 965364 - DNA, 120 bp, Artificial Sequence
  ENSG00000230658_15 (sequence is synthesized)
ctggtttgatttatttagaccactaaaactttcttcatatcagcattaaggctggtttgctttattatcatttatgtgttcactggagtagcactttaaatttcctccaagcttgtttgc

SEQ ID NO: 965365 - DNA, 120 bp, Artificial Sequence
  ENSG00000230658_16 (sequence is synthesized)
ttttcactcacagtgtggctgtttggtgccaagaggcctagcttcccagtcttggctttcaacatgccttcctcactaagcatagtcatttctagctatttatttaaagttagagatgtg

SEQ ID NO: 965366 - DNA, 120 bp, Artificial Sequence
  ENSG00000230658_17 (sequence is synthesized)
caactcttctttcacttgaacacttagaggctattgtagggttattacttggcttaattgcaatattgttgtgtctggaggaatagagaggcctggggacacaaagagaaatggggaaca

SEQ ID NO: 965367 - DNA, 120 bp, Artificial Sequence
  ENSG00000230658_18 (sequence is synthesized)
gctggtcactggagcagtgagaacacacgcaacatttattgattaaattcgctgttttatgggctcggttcatggtgctccaaaacaattataatagtaacatcaaacatcactgttcac

SEQ ID NO: 965368 - DNA, 86 bp, Artificial Sequence
  ENSG00000230658_19 (sequence is synthesized)
aattcagagaaacaataaagtgagcacatgctgttggaaaaatggtactgatagacttgatccatgcagggttgccacaaacgatt

SEQ ID NO: 965369 - DNA, 120 bp, Artificial Sequence
  ENSG00000230658_20 (sequence is synthesized)
actgatagacttgatccatgcagggttgccacaaacgattaatttgcaaaaaaaacaaacaaaagaacatgcagtatctgtgaagcacaataaagcatactgcaaataaaatgtgtgcct

SEQ ID NO: 965370 - DNA, 120 bp, Artificial Sequence
  ENSG00000230658_21 (sequence is synthesized)
gtcctgtattaactttgttactatttaatctagcatttcccaaaatgtgtttcttggaatacaactagtcttatgattcccctaacctgaactggttctctgggaatgcacccacaggag

SEQ ID NO: 965371 - DNA, 120 bp, Artificial Sequence
  ENSG00000230658_22 (sequence is synthesized)
gataggtccttgggtgatcttggccaatccagctctccctgcaacttgtagttctcagaataaccgagaatgcaactttctgagatagagaggtgatgtccagaataatccatattgtgt

SEQ ID NO: 965372 - DNA, 120 bp, Artificial Sequence
  ENSG00000230658_23 (sequence is synthesized)
ccttgttcctcccagaacagggtgtactgcagcgcttgttctcagtgatcctagtgccacctagagtataaaacccagagcacagtgctttcagtgtccctcagctgcagtggaatgtgg

SEQ ID NO: 965373 - DNA, 120 bp, Artificial Sequence
  ENSG00000230658_24 (sequence is synthesized)
agcacacacagataagaccctttccacactcagcagctttcttgagccttagaggactggcttgctgtggatcctaggcttctatttattcctgctgctcatctatctgtgcatagtaaa

SEQ ID NO: 965374 - DNA, 120 bp, Artificial Sequence
  ENSG00000230658_25 (sequence is synthesized)
tctttgtctagcctgtgtgagtgttctgtctctctcaccagactcatgcgattggtagagaacctttgcgacaattttgggagacatgtaaaatatatccttggtgaaaaatcccaaaat

SEQ ID NO: 965375 - DNA, 120 bp, Artificial Sequence
  ENSG00000230658_26 (sequence is synthesized)
atatttgcatattaagtgtttagagaaggttttctgtacctattacttaaacctattgaacttttctatagtccagtacttcttgaagtgtcaacttagccaattcccattttctgtgag

SEQ ID NO: 965376 - DNA, 120 bp, Artificial Sequence
  ENSG00000230658_27 (sequence is synthesized)
ttgcttactcctctgttcacccacaggagggattcctaaagctgtacctattctgtggggctttacctctacctggtctcagtttattggattaaggttgaacacctaaaccaaagagac

SEQ ID NO: 965377 - DNA, 120 bp, Artificial Sequence
  ENSG00000230658_28 (sequence is synthesized)
gacactggacagatggatgttgatgagcttgtgtgcagcagttctactggaagtatgtacaaggggctcagccagccaatttggacggtgtatgtgataagcagagaaaggcagcagtct

SEQ ID NO: 965378 - DNA, 120 bp, Artificial Sequence
  ENSG00000248694_0 (sequence is synthesized)
aaaatcgcctgatgatgcatgtgaagggctggaatgaagttgttttaatacatgggaatggaaacagacactattccaaggatgacagattatcttatatgtggttttaaaatatgtcta

SEQ ID NO: 965379 - DNA, 120 bp, Artificial Sequence
  ENSG00000248694_1 (sequence is synthesized)
gttcaccttggaaagtgggtgttgccgcattctgtctgggtgctggtggtacttgtttaaaatgatgctttcgtgtttaccttgaaccatggtgtagaaagaatcgatcgaggacagatt

SEQ ID NO: 965380 - DNA, 120 bp, Artificial Sequence
  ENSG00000248694_2 (sequence is synthesized)
tgaagtgatgctgacatcttcttctcggctagatgactcaatgtccactgtgatagccttgtccatgtccccatgcagcaccagagaaaatttcaaaaatgatggtgtcgtctgaagaaa

SEQ ID NO: 965381 - DNA, 120 bp, Artificial Sequence
  ENSG00000248693_0 (sequence is synthesized)
attgggaggatacttcttatctcatttctaggggcccatccgggatttctccacagcagatttgtggctcttcacgaagataaatatttatcaccaaacaatgtaaacttcccacatgac

SEQ ID NO: 965382 - DNA, 120 bp, Artificial Sequence
  ENSG00000248692_0 (sequence is synthesized)
agttctatcaatccagcttcttcaggatgatggggaacatgggtcccacaataggccatctgtaagccgaggagcaaggaagccagttgaagtcccaaagctgaagagcttggagtccaa

SEQ ID NO: 965383 - DNA, 120 bp, Artificial Sequence
  ENSG00000248692_1 (sequence is synthesized)
tgtttgagggcatggaacatccagcactggagaaagagctcctgaaatcgtttggtgaagtttctgaaaagtaatacagcaggcaaataaaatctgcaggagacagcagaaggaaaagca

SEQ ID NO: 965384 - DNA, 120 bp, Artificial Sequence
  ENSG00000248692_2 (sequence is synthesized)
ttattctgaataatctacacataaattgctgtaacttctcacctggattccagagctctcatgaagaaatatgattttgtttgatatttaccacccccttcaattttgaggagcgattac

SEQ ID NO: 965385 - DNA, 120 bp, Artificial Sequence
  ENSG00000248692_3 (sequence is synthesized)
ttccaaatttacaatggaatgatagaattaacaatgtgctaaagactttctaagatgtgagaaattaccagctttaagaggcataaaggcttttagcaaattgagggaatttgaatttct

SEQ ID NO: 965386 - DNA, 120 bp, Artificial Sequence
  ENSG00000248692_4 (sequence is synthesized)
aatccagcttcttcaggatgatggggaacatgctcctgaaatcgtttgggtaagcaattgctgattttagtcaaattccctcacctcacaaaaaggctggagtgcagtgacgtgaactcg

SEQ ID NO: 965387 - DNA, 83 bp, Artificial Sequence
  ENSG00000248692_5 (sequence is synthesized)
aagtttctgaaaagtaatacagcaggcaaataaaatctgcaggagacagcagaaggaaaagcaattattctgaataatctaca

SEQ ID NO: 965388 - DNA, 120 bp, Artificial Sequence
  ENSG00000248692_6 (sequence is synthesized)
catcaaaatgcaatgtacaaaggaggaaaaaatatgactcacccagcccccaaatttcatatttatatctctgattgaatctggttttaaaggcgaaattttaaaggaataaaaggcaaa

SEQ ID NO: 965389 - DNA, 120 bp, Artificial Sequence
  ENSG00000248692_7 (sequence is synthesized)
gtacagttctcccgctaatggcatgagttagtctaatacagaaatggattattaacagaacaacctagccttacatttaaatttacctttgacaattaatcataattggaaataaacatg

SEQ ID NO: 965390 - DNA, 120 bp, Artificial Sequence
  ENSG00000248692_8 (sequence is synthesized)
tgtttgagggcatggaacatccagcactggagaaagagctcctgaaatcgtttgggtaagcaattgctgattttagtcaaattccctcacctcacaaaaagtgaagtttctgaaaagtaa

SEQ ID NO: 965391 - DNA, 120 bp, Artificial Sequence
  ENSG00000275178_0 (sequence is synthesized)
cccatgctgtgggcaaaagaacagtgcccgcccctgggttgtctgagcagaagctggattgtgtgcctggagccctgtcgccctcagccagacccggggtcgaggctgggccggctctcc

SEQ ID NO: 965392 - DNA, 120 bp, Artificial Sequence
  ENSG00000275178_1 (sequence is synthesized)
ggagcatcagggatccggttggagagaggctcatacggcggtcccaggggccacctcgagggggttgaccggagctgggtctgggagctgcagcagagggaaggcggcatgaggagagag

SEQ ID NO: 965393 - DNA, 120 bp, Artificial Sequence
  ENSG00000275178_2 (sequence is synthesized)
ccgcaggtggggcgtgtgcacaaagtgcaggtgtgtggaggccctgtgggtttacattgccctgaggcaccacttcacgatcaccccattatttttaataaaggttgtggagaggctgcc

SEQ ID NO: 965394 - DNA, 120 bp, Artificial Sequence
  ENSG00000275173_0 (sequence is synthesized)
taaatttaccacttaaccttagtggaccacaggagaccaataagagatccatgtatgaggaccacacatcacccagagaaccagaactggataaaatcatggcttgtctctttgagggaa

SEQ ID NO: 965395 - DNA, 120 bp, Artificial Sequence
  ENSG00000275173_1 (sequence is synthesized)
acttgcagtcactgtggacatttgtgaccacaaagacccatgaaactggatgatgaagccaaatctaataccacagaaggcagagcaaggagagggggagaggctggccttggtgacatt

SEQ ID NO: 965396 - DNA, 120 bp, Artificial Sequence
  ENSG00000275173_2 (sequence is synthesized)
gtttgaatctagtcttctctgaatcagtcccaccttagcccttctcaatcatgattatggcatccagctgcatccatgtcactgcaaaggatatgatttcatcggaaagaaagtatttga

SEQ ID NO: 965397 - DNA, 120 bp, Artificial Sequence
  ENSG00000256742_0 (sequence is synthesized)
ggccgactcaaattcaaagcattttgtatatataactgttttctttttttgcttttctgctgcatgtctttttcgtggggggtgatcctctgcagatccccccatttgcggacccgccat

SEQ ID NO: 965398 - DNA, 120 bp, Artificial Sequence
  ENSG00000256742_1 (sequence is synthesized)
gtggaggaggcatttggggggctcagaaggaaattagctcggcttccatacctataaggactgcctaacttttaaactcccggcactcaaagatgtggacacacacacgtacaggaaata

SEQ ID NO: 965399 - DNA, 120 bp, Artificial Sequence
  ENSG00000256742_2 (sequence is synthesized)
ctgcccgcctctgtggactcctttactaggcgaccagccctgaaacagaagttggacattttttaaaggttcttgcgctcggcaaggggagcagatagatgctcaggagcgaaagacgca

SEQ ID NO: 965400 - DNA, 120 bp, Artificial Sequence
  ENSG00000256742_3 (sequence is synthesized)
gagaattggatctggcgcctcctaacgcagcccgcacaggagcgaaggagagtgtgacgatccccctgatgcggctgagatgttctgaaatgaagacgttggctctcatccccagcctga

SEQ ID NO: 965401 - DNA, 120 bp, Artificial Sequence
  ENSG00000249352_0 (sequence is synthesized)
ttttgagcagcaagtcccaagatcaagaaatcagaaggaactaatactttaactaattagtagtaatgaaaatttactagacatcaatgacaaatttacaaggcaaatttatttccaaag

SEQ ID NO: 965402 - DNA, 120 bp, Artificial Sequence
  ENSG00000249352_1 (sequence is synthesized)
tacattcatatatatcacagtctttgctacagcagtgtgttcctctcaagtcacccactcgttcctccaggggtcattggagagttattattttaagtctagttcccaggtatgacttcc

SEQ ID NO: 965403 - DNA, 120 bp, Artificial Sequence
  ENSG00000249352_2 (sequence is synthesized)
tcatctgcctagaacacagcaagaaccaggaaatgagctgacaagactgagcaaaagaggcagcatcaagctgatgaactgaggcgtgggcattttactcatgggaaaggccctcggaac

SEQ ID NO: 965404 - DNA, 120 bp, Artificial Sequence
  ENSG00000249352_3 (sequence is synthesized)
ccacgctgagcatgcgctgaaaacaagtgtgatcagtgggttccaaacacccagcagatacatgtgagggtgatctggctgtgacttctgtcacccccttgattaccagggttgattcag

SEQ ID NO: 965405 - DNA, 120 bp, Artificial Sequence
  ENSG00000249352_4 (sequence is synthesized)
aggcaacagatgactttctgcaaaggcactgataatagctatgaggaataaatattgcagatggattaaatcaaagaatcaaatttcaaagccaaattagtcgtgaaaaggagggagaag

SEQ ID NO: 965406 - DNA, 120 bp, Artificial Sequence
  ENSG00000249352_5 (sequence is synthesized)
tctggttctcaagatgtcttacatgaaaaaagctctgtggcacattacatttgggagctgctgattaaagacatataagctcttttgctgaccatttttccagaaccttgactggaatgt

SEQ ID NO: 965407 - DNA, 120 bp, Artificial Sequence
  ENSG00000249352_6 (sequence is synthesized)
taatatccattgtaaatctctaagtgggtaccagtgttctgcaaagcactctgggaaatgtttccctttcctttatcttttttagccagtcccaatgtattataacttgagtgaaacaga

SEQ ID NO: 965408 - DNA, 120 bp, Artificial Sequence
  ENSG00000249352_7 (sequence is synthesized)
gctgtcctatacgccactctcagcatactgagacatccaaaggaaatccaagtctggctgaaaaaatcacccaccttgaaaaacaacgtatgttgatcaagacagatgcctcttggagag

SEQ ID NO: 965409 - DNA, 120 bp, Artificial Sequence
  ENSG00000249258_0 (sequence is synthesized)
aattttaacaaataaaagactagcaggtatcaggagcaaccgttatggctaagactgagatagagctcccaatatagagctttccccctactagggctgaaatccagatgtctttggaaa

SEQ ID NO: 965410 - DNA, 120 bp, Artificial Sequence
  ENSG00000249258_1 (sequence is synthesized)
gggcacacctttgattcactggatagtggagaagtcactaaggtgcctcgtaagtgggagcataagtgggagttgctagaagtttctggggtgccaggggggccatccacagaaaagtgg

SEQ ID NO: 965411 - DNA, 120 bp, Artificial Sequence
  ENSG00000249258_2 (sequence is synthesized)
agtcttaaatcatcagagtgaactccctgagtgtcagagggagctggtggtggctgggcactgctggaaccgaaatctggagaagcagccctctaggagcccagcatgcctgcaggacgg

SEQ ID NO: 965412 - DNA, 120 bp, Artificial Sequence
  ENSG00000249258_3 (sequence is synthesized)
ccctgggattctaggactgaaaagatgtggggagcagtgacttggtttggtgtgcaggcccataccatctgggaaatcccggataatctccagctgaacacttgagaaaattgcagcctg

SEQ ID NO: 965413 - DNA, 120 bp, Artificial Sequence
  ENSG00000249258_4 (sequence is synthesized)
cagcatgggagaaaccacacagggaataagcatgcaggggagggtggagtgtgccctacaacagcctagagagtgaatcataccagaaccaggaaaggaaaatcccttcctcctccagcg

SEQ ID NO: 965414 - DNA, 120 bp, Artificial Sequence
  ENSG00000249258_5 (sequence is synthesized)
tcctccagaaccctctactgacaaggtttaacactcggctagctagcaaaggagaaatatttccaaaatccatcttcatttattacaaagtaggccaaaatatggtgaatttggagctaa

SEQ ID NO: 965415 - DNA, 120 bp, Artificial Sequence
  ENSG00000249258_6 (sequence is synthesized)
gaggaaatacatcaataaacagcatagtctgcccctttgagtactcactgtccatatataccttctacgcacacttgaatgccatacaataataactctacatttcacctaacaggatac

SEQ ID NO: 965416 - DNA, 120 bp, Artificial Sequence
  ENSG00000249258_7 (sequence is synthesized)
tcatcatctccaaaatgaggagatgcaacaatcattgcatacagtgctgtggctatattaattgccctttagaatcatcacagttccactggatagtctgttgcccaaagactaattgtg

SEQ ID NO: 965417 - DNA, 120 bp, Artificial Sequence
  ENSG00000249258_8 (sequence is synthesized)
aatttaacctctagcaacttgcatataaaatttttgttaatagaagggagcaagaagaggaaaatgtgagcatatatacataagtacatacacatgaaaagcaaaaaaggaaatattcaa

SEQ ID NO: 965418 - DNA, 120 bp, Artificial Sequence
  ENSG00000249258_9 (sequence is synthesized)
ccttttttctgcagttggtcacaaggccctaatttttacttatggcttccttcttctactgttcattgatttcgcccacctccagccagaacctggtagagtaattcaaactctcattcc

SEQ ID NO: 965419 - DNA, 120 bp, Artificial Sequence
  ENSG00000249258_10 (sequence is synthesized)
tgaaagttccaagtcctcaattatcctgccttttattttggtttctgtacttttctactacacttttctattgcatatggagtactaatatacaccccaaactgtctcctgggttacaga

SEQ ID NO: 965420 - DNA, 120 bp, Artificial Sequence
  ENSG00000249258_11 (sequence is synthesized)
catagtcttccttgcccctaatgtataaaggcaacccagtttcctcttggcaatagggatcagtcactccacctagtagagcaatccacctttctgcctgttgattcagtagcatgagga

SEQ ID NO: 965421 - DNA, 120 bp, Artificial Sequence
  ENSG00000249258_12 (sequence is synthesized)
gtccagaatagccaaatggaaatctttctccaattcagtggaaccattgtgtctcatggtggaaaccatgttccctttaagaactcagatctctgaaatggcagagctcaaagatgccag

SEQ ID NO: 965422 - DNA, 120 bp, Artificial Sequence
  ENSG00000249258_13 (sequence is synthesized)
aagcagcagcaaatattctgcaagtgtgttattaggtgttgctacggtctgaatgttggtgacctcccaaaatttatatgttgaaatctaatcacaaacgtaatagtattaagaaatggg

SEQ ID NO: 965423 - DNA, 120 bp, Artificial Sequence
  ENSG00000249258_14 (sequence is synthesized)
gcctttaggaagtgattaagtcatgagagtggaaccctcataaatgagattagtgccttggtaaaagaggtgcaagggaactgttcaccccttcctccaggtgaagagccacaagaagat

SEQ ID NO: 965424 - DNA, 120 bp, Artificial Sequence
  ENSG00000249258_15 (sequence is synthesized)
gccatattggaagcagaaagcaagccctcgccaggcactgaatctgcttgatctgggacttcccagcatctagaactagaaacagaaccaatgggatgtacataaagagatttattgtaa

SEQ ID NO: 965425 - DNA, 120 bp, Artificial Sequence
  ENSG00000249258_16 (sequence is synthesized)
gaaatcggcacatgtgattatggaggctgacaaatcccaagatctgcagggggaggtggcaagctggagactcaggggagcatgtcttgaaccagagccaatgtgggtttccacagacca

SEQ ID NO: 965426 - DNA, 120 bp, Artificial Sequence
  ENSG00000249258_17 (sequence is synthesized)
cggggcaagacacgttgactttacctccactcatatctgctgtacagaaaacccaacatgattaatctagcctacaatttgacagagacagaattgaatataagcagttattcctcaggt

SEQ ID NO: 965427 - DNA, 120 bp, Artificial Sequence
  ENSG00000249258_18 (sequence is synthesized)
gcccccagtgattacctgctcttccaacagaacagaaaaggtcttaacgaccacgggataaagacaccattctgtgtttcaaggctggagttatccaggaataaagctatatcttcaagc

SEQ ID NO: 965428 - DNA, 120 bp, Artificial Sequence
  ENSG00000268886_0 (sequence is synthesized)
ttttttttcttcaattctatgtttaatatccatctacctggaaacttcacattccaggcctgccttccgggaacaacagggcgagggtggaaaaagagggttgcctccaggagaagcacg

SEQ ID NO: 965429 - DNA, 120 bp, Artificial Sequence
  ENSG00000268886_1 (sequence is synthesized)
ttttcctggggttggaactggggagaagcagggccggcacgaggagggaggtggtgggcgatggcgccttcggacaggggtggggtctgcaggatcccaggaccaggcagaggacgcggc

SEQ ID NO: 965430 - DNA, 120 bp, Artificial Sequence
  ENSG00000268886_2 (sequence is synthesized)
gatgaggagcccagggcgagagtccaactcgctggtgaggacctgaaacagcgcgaggcgggaggacgggtcgggaagggttttgagaaggaaagtttcgctacaggaggtgtctgcacg

SEQ ID NO: 965431 - DNA, 120 bp, Artificial Sequence
  ENSG00000268886_3 (sequence is synthesized)
gccctactgcagaaaagaccgggacgggaccagcctcagggcgactttaaactcaaaaggaaaagactcacggactcccacccggacgtctcaatttgctctgagttgagaaagaggggc

SEQ ID NO: 965432 - DNA, 71 bp, Artificial Sequence
  ENSG00000268886_4 (sequence is synthesized)
cccggacgtctcaatttgctctgagttgagaaagaggggccggaatttccagcatcacgtctctgtataga

SEQ ID NO: 965433 - DNA, 120 bp, Artificial Sequence
  ENSG00000241409_0 (sequence is synthesized)
cagaaatgttgctggtgaatttataagaatgtggtatgatactagtaatgaaggcaaaatggacagtgaagtttaacacaactgaactctaagaaaatcaaccattaatctctcattttc

SEQ ID NO: 965434 - DNA, 120 bp, Artificial Sequence
  ENSG00000241409_1 (sequence is synthesized)
atctgcaaattgaagcaacagtttagtttcaaacctagctccctgggtggaatgacgacttcactatacttagtgaatatcctttaagagctgggatttttttcaagacaacaaagatca

SEQ ID NO: 965435 - DNA, 120 bp, Artificial Sequence
  ENSG00000241409_2 (sequence is synthesized)
ttcatttggttctttatactatgaaacttgatagagacttcaaataaccgtggaagtttaaatgcaggaaatgctgcagccccatctactggagaggtgcagaaagcaaaaaatataagt

SEQ ID NO: 965436 - DNA, 120 bp, Artificial Sequence
  ENSG00000241409_3 (sequence is synthesized)
agaaatttttatgccaatatgtggatccagttacctttcctcccagctctgcgatctatgcatttctctgccacctcctcgaccaaaaacaccctctacttcatcaaaacttctttggta

SEQ ID NO: 965437 - DNA, 120 bp, Artificial Sequence
  ENSG00000241409_4 (sequence is synthesized)
gaaaccacattcacctctgcctctgcctgaaaataagaaaacagaaaaaaatgatagtcagatgtcaacatgtggcacacattcaccaccataaattaatatctaaagttctatctctat

SEQ ID NO: 965438 - DNA, 120 bp, Artificial Sequence
  ENSG00000241409_5 (sequence is synthesized)
acaaggcaggacatctacatttaaatactgaacgaggcctgatgatcttgacttatgagaccaacaatggcattgaagtagctggaccacaagaggctgaaagaaacaagttaaaaaaac

SEQ ID NO: 965439 - DNA, 120 bp, Artificial Sequence
  ENSG00000241409_6 (sequence is synthesized)
taacataatataatgcaatagacccagtcctgaacaagaaagtatcaactttaagttctttaacgaacagttgaatagtgaaattctaagaagttcaataaaacactaccgtagattaaa

SEQ ID NO: 965440 - DNA, 120 bp, Artificial Sequence
  ENSG00000268889_0 (sequence is synthesized)
aatccccaccctgcggaccccgcgcgcctcgccttctccctctggttggcgagcgcctttctgcgccttcaggcatttttgctgaggcttttgtctgcgcatgtgcgggtggcataaaat

SEQ ID NO: 965441 - DNA, 120 bp, Artificial Sequence
  ENSG00000268889_1 (sequence is synthesized)
gacactccaagagtctttcaccaaacaggtagttgttcattgtttcagcaactatcttggcaacatcctcagactcaaactccacaaatgcatagcctttgccatttccagtcattttac

SEQ ID NO: 965442 - DNA, 120 bp, Artificial Sequence
  ENSG00000268889_2 (sequence is synthesized)
tcttgttttttttgctgggttatgtgcttgcaaacctgcgccacctccttttgaaactggacatcttcctgcgggttaagcagtgagatctcagccaggccagaaaaagctgccatgcca

SEQ ID NO: 965443 - DNA, 120 bp, Artificial Sequence
  ENSG00000268889_3 (sequence is synthesized)
aaagcggccgacactaactccacgcggtgctcctggaaacgtcgggctcccagctcccatgaggcagaaaacgggcatctattcttttaacatacgtatgtatacacagtccaagtgatg

SEQ ID NO: 965444 - DNA, 120 bp, Artificial Sequence
  ENSG00000233351_0 (sequence is synthesized)
gtggtgctggtgtccctccacttcccaaaagaatgatgccggactcattcttggtgctgaatgacaggttgatttctgttcctacatcaattggcacaggggagagctccacaaaaccag

SEQ ID NO: 965445 - DNA, 120 bp, Artificial Sequence
  ENSG00000233351_1 (sequence is synthesized)
gtgggtgtctatggccaattccaaattggagcctgtagctatgaacaatgaagatcctgaaagttctgttccagtctttaaacctcatcattcaagtggtggatttacttttttctttac

SEQ ID NO: 965446 - DNA, 120 bp, Artificial Sequence
  ENSG00000233351_2 (sequence is synthesized)
ccacattttcccttcatttccctaattctattggagtggtttaagataattttgattagaagcagcagacaaaatgaataattgtattatgataggataattaaaaatgtatgagaatga

SEQ ID NO: 965447 - DNA, 120 bp, Artificial Sequence
  ENSG00000233354_0 (sequence is synthesized)
ccccgcaccccagccttccaacggggatggatggcactcactcccacaccccaaccccagcctggggaagggaaaagaaggaaggtcttcccccaccccaagctgtctccggcctgcggt

SEQ ID NO: 965448 - DNA, 120 bp, Artificial Sequence
  ENSG00000233354_1 (sequence is synthesized)
cagggggaggggctctagctgtggaaagttggcagaggcggccggcagcagccgggagagtggaaaaaatgatatcaaacccggaaaaatgcaggccggatggagggccggagtgggccc

SEQ ID NO: 965449 - DNA, 120 bp, Artificial Sequence
  ENSG00000233354_2 (sequence is synthesized)
agccactgggtctcaccctgctatcatatcttaaggccttgcagaaaccaggatttgttaaaggaatgaaagctccttgagggaagggccctcagtgctgctctgatcccagcacctaca

SEQ ID NO: 965450 - DNA, 120 bp, Artificial Sequence
  ENSG00000233354_3 (sequence is synthesized)
acagtgcctggctcataataggtgtctgtgaataaggaatggaaagcatgtgagaaaaccacactcttcctcagcctattatagtttaaaaagtactttctcatccataaaaacaaaacc

SEQ ID NO: 965451 - DNA, 120 bp, Artificial Sequence
  ENSG00000233355_0 (sequence is synthesized)
actgtggaattttccacagtcagtgttcaacgtattttgatatagagcttttgtgagtatgaaaccagagtgctccagaatctaaaaagtacttgaaaatgagatgacgagctccatgag

SEQ ID NO: 965452 - DNA, 120 bp, Artificial Sequence
  ENSG00000233355_1 (sequence is synthesized)
ggccaaggctctccattcttgttcaccactgcacactcaggagctcatggcatgctggctgtgctagttctgtgagtatttattgaattaatgaatgaagatcctggaaatttccagaag

SEQ ID NO: 965453 - DNA, 120 bp, Artificial Sequence
  ENSG00000233355_2 (sequence is synthesized)
ttcttcagatgggaaaactaatagaaggctgggtttcccgcaggcaagcaaaaagcagttttaagtctaagaactaaggccttgagagacatcttctaattttgtaagcattgctggtta

SEQ ID NO: 965454 - DNA, 120 bp, Artificial Sequence
  ENSG00000233355_3 (sequence is synthesized)
ggcatacacagatgaattacccaaatgatatgaaagaaatctgccgtattaacatcatgtctggtttaaagaacagggcttaaaaccttaaagaggtacatacatttctctgggcttatg

SEQ ID NO: 965455 - DNA, 120 bp, Artificial Sequence
  ENSG00000233355_4 (sequence is synthesized)
ttttgtccctcgtccataaaacaatttaatggaacaccgttttttatacttaaataaggtgatcacacaatttatcatccagactaaggcatgtttgttagtgaaagagagtaatcataa

SEQ ID NO: 965456 - DNA, 120 bp, Artificial Sequence
  ENSG00000233355_5 (sequence is synthesized)
ttgtgcctcagcaacagaggtaaactgcagaggtctccagcaaactgggacaagtggtcaccccagctgtggctgacataacagtatgatatagggaaatgcaaaattctctgtccatgg

SEQ ID NO: 965457 - DNA, 120 bp, Artificial Sequence
  ENSG00000233355_6 (sequence is synthesized)
agatctgtgatgggagctatagaataactaagcccaacatagagggatgcttctcatcaatgtgatgttggtgtttgtgcaaattgtagaagaagcaatgcatcttcaataatgcagtaa

SEQ ID NO: 965458 - DNA, 120 bp, Artificial Sequence
  ENSG00000233355_7 (sequence is synthesized)
acagaataagattacagttgcattcagcattttacattttatttggagcttgttctgtttattattttattttgttcccctcaacatacctattttaattcctcaaaaagcctttgatga

SEQ ID NO: 965459 - DNA, 120 bp, Artificial Sequence
  ENSG00000233355_8 (sequence is synthesized)
gcaatgggccaggcacaattgtgatggaaaggaagaacaagatatcaaccatccctagagaatcgacagtataattacagagcaaatagtgtcatccataattacagattaaggaatgga

SEQ ID NO: 965460 - DNA, 120 bp, Artificial Sequence
  ENSG00000233355_9 (sequence is synthesized)
cacccagaactcagaaatgacttggttaagggtgtgtagataataaacagtataactggaactgcaattcagatctctgacttccaattcggaattcactttattttgctcagctgcctc

SEQ ID NO: 965461 - DNA, 120 bp, Artificial Sequence
  ENSG00000233355_10 (sequence is synthesized)
ccacttaatgtacttaatgtactttatgctcttgtcttctaccgcacagaaatgcccatgaagtacgttgacacagtctttgcagaagcagattgtgcccgggcttagcgggcagtgttt

SEQ ID NO: 965462 - DNA, 120 bp, Artificial Sequence
  ENSG00000233355_11 (sequence is synthesized)
gtgttgcccgtgtggacttcctttttaggcgctggcttctggccctgtgtcagggattggaaggggatttaaaaggccaagcacatctctgattaacttgtcgctgtatcatacctatgt

SEQ ID NO: 965463 - DNA, 120 bp, Artificial Sequence
  ENSG00000233355_12 (sequence is synthesized)
ttaaatcctgggtaaattaaaaggacaaaaatatgtctttttacttcatgatcaaattccactgcagaggagtaatgaaatagtccagatatggtcaggggataaccctggggataacag

SEQ ID NO: 965464 - DNA, 120 bp, Artificial Sequence
  ENSG00000233355_13 (sequence is synthesized)
accatctctactccataaaatgtgggtatttgtccatgatgaaacattggaccttttcattaaagagaaacactatttattagtgctttggggtttacaaaatacagtctttaccgaata

SEQ ID NO: 965465 - DNA, 120 bp, Artificial Sequence
  ENSG00000233355_14 (sequence is synthesized)
gatttattactgttctcagatttctaagggaaacagcttttaagattgcaatgcaagtattcgaggaaatgcggcattatgcttaaattcttttaaatgctagcaacaggcactggttaa

SEQ ID NO: 965466 - DNA, 120 bp, Artificial Sequence
  ENSG00000233355_15 (sequence is synthesized)
aaggtaaagtattttcaatagtcagagataccccagcttacagagacttctgttctttcattcattccaactacatacttctgctagcataagatcctgatgataaaattgaaaggtgaa

SEQ ID NO: 965467 - DNA, 120 bp, Artificial Sequence
  ENSG00000233355_16 (sequence is synthesized)
ttttgtcattttcaactttcaaaaaaaatttcacttattttacagaaatatttcctaagtaagaaatgactttcaaataatcttttttctttttctgacctgaagagaattctgtaaagg

SEQ ID NO: 965468 - DNA, 120 bp, Artificial Sequence
  ENSG00000233355_17 (sequence is synthesized)
acaaaagcaaaatcaaaatagctcacaaaccaacgaagtcattccaatcacaaccaaggataactaaaatagaagactcctaaagttacctgaaattgatcggggaccaagataactggg

SEQ ID NO: 965469 - DNA, 120 bp, Artificial Sequence
  ENSG00000233355_18 (sequence is synthesized)
acaattatagtgaataaaattattttttaaacatctataaaattattgatcctatgctcatgacaaagatggatacaatgtataattgagattaaaaataaccttctctttttgggtagt

SEQ ID NO: 965470 - DNA, 120 bp, Artificial Sequence
  ENSG00000233355_19 (sequence is synthesized)
ctgacagtttatcttaaagggagggttttctttgttggaaatatttctgaatgggcttactagaggcaaaggctgagatcaaaaggcatctaagcctggggggatgggctctggggagcc

SEQ ID NO: 965471 - DNA, 120 bp, Artificial Sequence
  ENSG00000233355_20 (sequence is synthesized)
ctggtatggatctagctatagctaaaggggaatggggctggatgtggagtttgagaacagcttgggcaatagagtgagacttcatctctacattttattgtttgtcttaaagttagcaga

SEQ ID NO: 965472 - DNA, 120 bp, Artificial Sequence
  ENSG00000233355_21 (sequence is synthesized)
gtatggtggtgcgtgcctgcagtcctagctactctagaggctgaagcaagaggatcccttgagcccaggattttgaggctgcagtaagctgtgtctcacccctgttctttagtctgggca

SEQ ID NO: 965473 - DNA, 120 bp, Artificial Sequence
  ENSG00000233355_22 (sequence is synthesized)
acagagtgagaccctgtcactaaaaaaaaaaaaaagcagagagagagtgagagagcgggaaatggggatgtgaggatggagagagacggagggagtggggcagtggactaaaggtttggt

SEQ ID NO: 965474 - DNA, 120 bp, Artificial Sequence
  ENSG00000233355_23 (sequence is synthesized)
tttataaataacaataatttattatttcttactatttaatattaatatcgtatattattatttaatgattactgatttattaaatctttgggctgatggatggaatggggggtctgggtg

SEQ ID NO: 965475 - DNA, 120 bp, Artificial Sequence
  ENSG00000233355_24 (sequence is synthesized)
ggtggccaagcattattgaaccacatggaaagaggagtgcagacactggggactgagcaggagtaaactctgagtaatgttcaagacttttggggagcacccgggactcaaaggatgcaa

SEQ ID NO: 965476 - DNA, 120 bp, Artificial Sequence
  ENSG00000233355_25 (sequence is synthesized)
agttggatgggggtcagtaaagtttatccagtctcagaggagcaagaaaactccaatttgttattggggttacagacacaatccatgcatgaccccaaaaccttacggtgtagtggaaga

SEQ ID NO: 965477 - DNA, 120 bp, Artificial Sequence
  ENSG00000233355_26 (sequence is synthesized)
agcagatgggcaaacaacacacaagggatgtgtatttatctaaggaatctcatctgtgccactgcagctgcatctgtacaatgtccagggcccagaggaaggcctcacttatgctacctg

SEQ ID NO: 965478 - DNA, 120 bp, Artificial Sequence
  ENSG00000233355_27 (sequence is synthesized)
gaaactcagggcggtattgtggggaggtggcatttttgctgggtcttgcagaatgagtgagagttgtcaaatagttttgaaaactcagaacagtattatttcaatttcctaaaaagaagc

SEQ ID NO: 965479 - DNA, 120 bp, Artificial Sequence
  ENSG00000233355_28 (sequence is synthesized)
caaacgaagctgggaaagaaggagacaggctttcttggtgggaggtatagcatgaatgaagttaggaacacggcaggttgtttgcggtgtggtgagaggtaccagggtacatggttgagg

SEQ ID NO: 965480 - DNA, 120 bp, Artificial Sequence
  ENSG00000233355_29 (sequence is synthesized)
agtggtcaaccttcactctaaagccatatttattaaggccttaaagcctatacttattttctttatgcttagaaacaagcaacttgtcaagaattgagatataagaaaaaaatattaatt

SEQ ID NO: 965481 - DNA, 120 bp, Artificial Sequence
  ENSG00000233355_30 (sequence is synthesized)
tactttatctaaacttggcattcaatatagttactaaattctctgtctgatacctggttaaatgactaaataatagtcagtaaatgattctaatttaagcttaactgaagcttgtatcta

SEQ ID NO: 965482 - DNA, 120 bp, Artificial Sequence
  ENSG00000233355_31 (sequence is synthesized)
aagtgaaccacaggtcccctcctcatctcctcataccctcctgctcatatgtcacatacccaaacccatagcatatctatctccacagttttaatgatcttaatcatttacaatgttatt

SEQ ID NO: 965483 - DNA, 120 bp, Artificial Sequence
  ENSG00000233355_32 (sequence is synthesized)
tctcatcatttaggttgtcaggtgttctttgcattatcagcctgcctatagatatggaattaataagattatacaaaatatttgcccaacttagatcagagaattttgcaatttcctgat

SEQ ID NO: 965484 - DNA, 120 bp, Artificial Sequence
  ENSG00000233355_33 (sequence is synthesized)
caactgcaagattgatcttccacaatatggatgtagttatatacatacaaacacatatatatgggtatagttacatatatagagagtatctatatgcatacagttatatatatatattca

SEQ ID NO: 965485 - DNA, 120 bp, Artificial Sequence
  ENSG00000233355_34 (sequence is synthesized)
ataatatggatatagttatacatataacacttagatgcagataatgaaaagactgttatttgtttttaattggctatttaattgtttgattcacaatgtttgtttctggaattccatgac

SEQ ID NO: 965486 - DNA, 120 bp, Artificial Sequence
  ENSG00000233355_35 (sequence is synthesized)
aagtccaataacattaactagctttcaaggtcgatgtcagcaaaatgaaattgccattagaagcatcacaatcagtgtccttcctcatttggcataggtggaggaggactgcagagttac

SEQ ID NO: 965487 - DNA, 120 bp, Artificial Sequence
  ENSG00000233355_36 (sequence is synthesized)
agtaatatctcatgatacaatgatgcttcatgtcaaatagcaattaatatcattttaacttaaataatgtggatattattttacattttgatattaatttttttaaaacacttgaggttt

SEQ ID NO: 965488 - DNA, 120 bp, Artificial Sequence
  ENSG00000233355_37 (sequence is synthesized)
gtttaaagaaaagataaaacaaggtagctttgtcaagaatgagaatttagatcttcactggttaatctctttaatttcaaatttagctacttaagtggaacgtcccaacttaaaataaat

SEQ ID NO: 965489 - DNA, 120 bp, Artificial Sequence
  ENSG00000233355_38 (sequence is synthesized)
gtctagaaattgcctcataggttaaagaactctcaaaaacctgtccctgacaatggtatttccaaaagcagctagtgacaacaggttaaagggatttatagcccccttttagcagcttaa

SEQ ID NO: 965490 - DNA, 120 bp, Artificial Sequence
  ENSG00000233355_39 (sequence is synthesized)
tgtctatacaaaggaattcattcattcacttctttttttctcaacacgtatggaacccctgccacacaggcagcactgtcctagctggaaacatgagtagataaagtcactgattcaaag

SEQ ID NO: 965491 - DNA, 120 bp, Artificial Sequence
  ENSG00000233355_40 (sequence is synthesized)
gaactttattctactggtgggcacaaaatggcagctaaatttataaggtaacattggctgctttacggaaaaaaacaaagcagggtaggtgggtacaatgagtgattgtcaagagtatga

SEQ ID NO: 965492 - DNA, 120 bp, Artificial Sequence
  ENSG00000233355_41 (sequence is synthesized)
ctattttagacacggcggtcggtaaaatccgcctcaaggtggaggcattagaaccaagacctctgctcaccagcaggcagtctgaaaaagtattagacaaaataacccagaaaacaaaga

SEQ ID NO: 965493 - DNA, 120 bp, Artificial Sequence
  ENSG00000233355_42 (sequence is synthesized)
cttggggtggcaaacaagcttcaagtgctcaagaaactgtaagaaatgttgatgtgactggcctgagtttcagtctgaaaactttgggtgctaaatagtgaacatagttgcagaaaaata

SEQ ID NO: 965494 - DNA, 120 bp, Artificial Sequence
  ENSG00000233355_43 (sequence is synthesized)
gaaagtaaaagaaagcattgtacgtttaaacatatgcaaataaataggtagaaacagatagaaaacagtatgttttagggagtataattttggggtaacatatcttttattatttttcct

SEQ ID NO: 965495 - DNA, 120 bp, Artificial Sequence
  ENSG00000233355_44 (sequence is synthesized)
aactggggagggggtggaagactatattgccaacaaaatgaaagcttttaccccctaaacatgtcaaacaattcagcagctgataattacatttattggagttaaaaaataaagtgggat

SEQ ID NO: 965496 - DNA, 120 bp, Artificial Sequence
  ENSG00000233355_45 (sequence is synthesized)
cttaaggagaattagtttatttgaatcatggtgactgagagtgaaaagagaaaaagacaaatgtgaaacttctgtttcatccactaaggagtcagcagaaagtaccacggaacctacaga

SEQ ID NO: 965497 - DNA, 120 bp, Artificial Sequence
  ENSG00000233355_46 (sequence is synthesized)
ccctgcctctgtattcccatagcctgctacagacctccacgacatcacatgaaaggtaccagctaaacagatgtggggtgattaaccatccactccaaggaacacatgtgggaaggtatc

SEQ ID NO: 965498 - DNA, 120 bp, Artificial Sequence
  ENSG00000233355_47 (sequence is synthesized)
cgtcagtggagcaggtttgcaaatacacgacacacgagactcgccactggccttaatgaagcctgcatcattcggtgctgaaagcaaaagatgacgagctccatgagggccaaggctctc

SEQ ID NO: 965499 - DNA, 120 bp, Artificial Sequence
  ENSG00000233355_48 (sequence is synthesized)
tggagtacaaaaaaactacaaaagcaatgaaaaaaagaaggatgttttatttacatcctatttcaaaaccattgctttcttgctattgtatgtctctgcaggcccaatatcgcgcatctt

SEQ ID NO: 965500 - DNA, 120 bp, Artificial Sequence
  ENSG00000233355_49 (sequence is synthesized)
cataagaagtttagaattgttccttatgtttccttctaacaaacactggtgttaagtttcaagaagttggtgaaatggagacagccaatccaacccaggagacagtgtttgaaaacaggg

SEQ ID NO: 965501 - DNA, 120 bp, Artificial Sequence
  ENSG00000233355_50 (sequence is synthesized)
ttgcaaaatgactgaaggaaactttacctaaacaatagttgccagttctgctgagaattatcacgggcccacaacggctgtgtgtttttccatacagatattctaatttttttattatgc

SEQ ID NO: 965502 - DNA, 120 bp, Artificial Sequence
  ENSG00000233355_51 (sequence is synthesized)
tttaaatctaccaggagaaatgtctggaatctttttggttattaaaattaaaattcaggataatgaaaggcatatgcaacttattatattctttatataacttatttcatctaatcctcc

SEQ ID NO: 965503 - DNA, 120 bp, Artificial Sequence
  ENSG00000233355_52 (sequence is synthesized)
ttgtccacagttacccagaaaattgtttgtggagctcagtacaaggctgactgccagactccaaagtctatgttccttctactaccatacattgcctttgtttttcttttataaaagttg

SEQ ID NO: 965504 - DNA, 120 bp, Artificial Sequence
  ENSG00000233355_53 (sequence is synthesized)
agccagtatagtctatttccaaaagagctgtaaagaggcatttcagaaacttccctaaacaatatttctttaaaatgcaccaagctggataaagccgctttgtgacctgcataaaaactc

SEQ ID NO: 965505 - DNA, 120 bp, Artificial Sequence
  ENSG00000233355_54 (sequence is synthesized)
caacggataaatgtgtattaccttcccaaagaactacttctccaaagttattccagctctttccagttgaaatgtcaaacttgacataaaaatgagatgttcttgcatcaattaataaac

SEQ ID NO: 965506 - DNA, 120 bp, Artificial Sequence
  ENSG00000233355_55 (sequence is synthesized)
aaataaatctgtgtttcccattgcccttttcattcagtgcgtttaatgatttggttgaagttactggttacctgtctgtttcctccattatattttattcctcaggaatagaatctacat

SEQ ID NO: 965507 - DNA, 120 bp, Artificial Sequence
  ENSG00000233355_56 (sequence is synthesized)
ttactgatatcagtaatttgcataggtaaacaattctgaatagagtgaatcaaacacaaacttcaagtagattcagcaattcttacaggatggcattatcactttaatgatatttctcaa

SEQ ID NO: 965508 - DNA, 120 bp, Artificial Sequence
  ENSG00000233355_57 (sequence is synthesized)
tttgtgttacaatttgattaaacaatttttaccctaaagctttgagaacaggttttctgacaattgtataatttgattttaatgcttatgtcagagggcatatgtcttggggaaaggata

SEQ ID NO: 965509 - DNA, 120 bp, Artificial Sequence
  ENSG00000233355_58 (sequence is synthesized)
aaagaaaataacagattgctaggtgacagtcatcaactgtttgccttcatgaatttcttgatttgtatggtagtcatttcccacgcttctcctcaaaacaaaataaaatcagaataataa

SEQ ID NO: 965510 - DNA, 120 bp, Artificial Sequence
  ENSG00000233355_59 (sequence is synthesized)
gagttagaaaccctgcctctgtattcccatagcctgctacagacctccacgacatcacatgaaagatgacgagctccatgagggccaaggctctccattcttgttcaccactgcacactc

SEQ ID NO: 965511 - DNA, 120 bp, Artificial Sequence
  ENSG00000233355_60 (sequence is synthesized)
tttaatctatagagtgttattctacactggacctctctcttattttttggagtctagcatcttgcatcttcctggagccccaactaaactcataacttctaagcttctaagaaatatatg

SEQ ID NO: 965512 - DNA, 120 bp, Artificial Sequence
  ENSG00000233355_61 (sequence is synthesized)
tttaaaggttaatttttccttccctataaagatagggcctttatagaggtaatcgccttaaaatgaggctattagagtggccttaatccaacatcactagagttcttagaagaaggggac

SEQ ID NO: 965513 - DNA, 120 bp, Artificial Sequence
  ENSG00000233355_62 (sequence is synthesized)
atttggacacagagacatggggagaacgccatatgaagacgaaggcagagattcatctacaaaccaaggaactacaaagactgccagcagcccccagaagccaggcggcagacatggaac

SEQ ID NO: 965514 - DNA, 120 bp, Artificial Sequence
  ENSG00000233355_63 (sequence is synthesized)
agattctccctcacagctgtcaggaggagccaaccctgcctccagaattgtgaagcactaagtttctgttgtttaggccttccagtctctgctactttattgcaacaactctagcaaatt

SEQ ID NO: 965515 - DNA, 120 bp, Artificial Sequence
  ENSG00000233355_64 (sequence is synthesized)
aatgcacaaatggcagaatggtatttttcaacttttatgagaaaagtaaaggcagttatagtagaagagagcatcatgagtcgactgtgctcagatagggctatttgcttttccccaact

SEQ ID NO: 965516 - DNA, 120 bp, Artificial Sequence
  ENSG00000233355_65 (sequence is synthesized)
atgctccatacttttttcttttcatatgttttttttgagtcggggtcttgctctgctgcccaggttggagtgcagtgtcatgatcatagctcactgtaacctcgaccttctgagcttgag

SEQ ID NO: 965517 - DNA, 120 bp, Artificial Sequence
  ENSG00000233355_66 (sequence is synthesized)
gagactgcaggtgcatgccaacacagctggctatttatttgtttttattttattgtagagacagggtctcattgtgttgcccaggctggcctcaaacttctggccttaagtcatcctcct

SEQ ID NO: 965518 - DNA, 120 bp, Artificial Sequence
  ENSG00000233355_67 (sequence is synthesized)
gtcttggcctcccaaagtgctgggactatgggtgtgaacccatcgcacccagacattttgtacttctttaatttggagtgtctttcctttccatgcatgcctatagaatttatgattatc

SEQ ID NO: 965519 - DNA, 120 bp, Artificial Sequence
  ENSG00000233355_68 (sequence is synthesized)
atttagcccaaagaagactttcgcataaattctgccgtaacccttgttggaataaatgtattcctctaagctccctctagctctatttgtatctttattataaatattaatatatctttc

SEQ ID NO: 965520 - DNA, 120 bp, Artificial Sequence
  ENSG00000233355_69 (sequence is synthesized)
cttgcattgctgttacatgtatgcacatcttatcttctggcaataaataagcctcgtcccttgggggaagggctaacctttcctccttctggtattgctcaggatgctgaccacagcacc

SEQ ID NO: 965521 - DNA, 120 bp, Artificial Sequence
  ENSG00000233355_70 (sequence is synthesized)
ctgcacagagaagaggtttaatatttattttattacttaaattgcataagagggatctacctacttgtgaaaaaggttgctgtgacctgtgttccttcttctgtgacaagaaactaaaat

SEQ ID NO: 965522 - DNA, 120 bp, Artificial Sequence
  ENSG00000233355_71 (sequence is synthesized)
gtacatatattctcttcttgatgttctttcgagttttatctccttcctagatctggttcaccagatttcctcccctccttttttttcatcaatacaaaacttcaagtcgcagtcttgcca

SEQ ID NO: 965523 - DNA, 120 bp, Artificial Sequence
  ENSG00000233355_72 (sequence is synthesized)
ataattcttctttgactaatttatgagttaaataaagaaaaaattcctcacacacatatcatgtccaaggtcagctcaacattgctttattccacacctctcaatgggtgtatgatgcgg

SEQ ID NO: 965524 - DNA, 120 bp, Artificial Sequence
  ENSG00000233358_0 (sequence is synthesized)
tggtgctaagtttttacagttgtcttagccccagtggttctcaaagtggggttcctggcccagcagcagcatcccgctaggaacttcttagaaatgcaaagaaaaccaagaataaaatga

SEQ ID NO: 965525 - DNA, 120 bp, Artificial Sequence
  ENSG00000233358_1 (sequence is synthesized)
cacctgacaaccttgccagctcagcacatctggaggcactaaatgtctgacccaggaaatgtgcatcaaactgacggtcatcccagcaagagtgaagtggcctctcctgtggttttgatt

SEQ ID NO: 965526 - DNA, 120 bp, Artificial Sequence
  ENSG00000233358_2 (sequence is synthesized)
tgcatttctctaatgactatgttgaacatcttttcatgtccttgttagccatttgtatatcctctttggagaaatgtctgttaaagtattctgctcattttttcccttcagttgtttgtc

SEQ ID NO: 965527 - DNA, 120 bp, Artificial Sequence
  ENSG00000233358_3 (sequence is synthesized)
ataatctggatagtagacattttttggatatatgatttgaaaatattttctgtcattctataggtagtcttttcactcccttgatgcatgaaagttttaatttgataaagtacaattgat

SEQ ID NO: 965528 - DNA, 120 bp, Artificial Sequence
  ENSG00000233358_4 (sequence is synthesized)
gtacaaaagttttaatttgataaagtacaattaattttttatttcgttgcttctactttttgtgtcatatctaagaaacaattgctgaatacaaggttatgaatatttccccctaagttt

SEQ ID NO: 965529 - DNA, 120 bp, Artificial Sequence
  ENSG00000233358_5 (sequence is synthesized)
ttttctaagacttttatagttttagcttttatatttatgtctcatatccattttgaggtaagggctcaactttatttttttgcatatggataccccgttgtctcagcatcatttgtggaa

SEQ ID NO: 965530 - DNA, 120 bp, Artificial Sequence
  ENSG00000233358_6 (sequence is synthesized)
gacactattctttcgccattgaatgcttttggaacactggtcaaaagttaaacatgaattggccaaagataaatgggctgatttctagattctcaattctattccattgatctgtatgtc

SEQ ID NO: 965531 - DNA, 120 bp, Artificial Sequence
  ENSG00000233359_0 (sequence is synthesized)
gataaagcttcataagaggagaaactaagaaaatattatttttgattttctacatagacaattatacctctgtgaacaaagacagtttatttcttccttcccagagattgagagagcaag

SEQ ID NO: 965532 - DNA, 120 bp, Artificial Sequence
  ENSG00000233359_1 (sequence is synthesized)
aatcgtagatatgatagcaactacaagaaactttggctccattctacacgacggttctacctctgacttaaaactagggtaggcttccttattgctcctcattgccatttctggaacatt

SEQ ID NO: 965533 - DNA, 120 bp, Artificial Sequence
  ENSG00000233359_2 (sequence is synthesized)
ctcttcctttcttccctaataactactagctttagtcacataagccaccaactattataatcatcatctaattcctagagtcattttctccgatttctcaaagaaaccctagaatacgtc

SEQ ID NO: 965534 - DNA, 120 bp, Artificial Sequence
  ENSG00000233359_3 (sequence is synthesized)
actctccccgaaacttttccttatttaattcttacttattttaatgtccatataaataaacttctaatctcctggcttcttacttgaacacctccacaccaatacttttgatttccattc

SEQ ID NO: 965535 - DNA, 120 bp, Artificial Sequence
  ENSG00000233359_4 (sequence is synthesized)
tttcagtgttaagtatccatccctccacatttaccatcttctactagtcctttgactccaacagtccttcaaccacaacaataccattgatctataaacttttctctattgctcatctcg

SEQ ID NO: 965536 - DNA, 120 bp, Artificial Sequence
  ENSG00000233359_5 (sequence is synthesized)
tcatatgttgagacttctctcctcactcaaactaaaatccaacgtcataattatactaattattttgaacataacctcataggccttacaaatttttgccctttatatttgcttggtaaa

SEQ ID NO: 965537 - DNA, 120 bp, Artificial Sequence
  ENSG00000233359_6 (sequence is synthesized)
atcccaaccctggttaaatactaatgaagcttaacttacctggagaaaaatggatagccttacggactgatctcatttaaaatcctattttctttaatgtgtctttacctatccagttat

SEQ ID NO: 965538 - DNA, 120 bp, Artificial Sequence
  ENSG00000233359_7 (sequence is synthesized)
cctactatttccctggcccattcagtttttcacttcttaaaattctgtattattcttctcctttctctttaaattttcaacgccgtttcactctcacttgcaacttgtgctcattatttt

SEQ ID NO: 965539 - DNA, 120 bp, Artificial Sequence
  ENSG00000233359_8 (sequence is synthesized)
atgagaaaattattaaagaaataagataagacattccacaagcttccctcaactcattcatctatcctgtgttacatctgaaatatgtttcctgcttctgttctccccatataccagaga

SEQ ID NO: 965540 - DNA, 120 bp, Artificial Sequence
  ENSG00000233359_9 (sequence is synthesized)
ctgtctctcttgaatcacagtaggaaaacacaagcgtgaagcctccatttgggaagcctgcagaagccccaatccaatcacagcactgccagaggatcttagaagttgaatatcaattta

SEQ ID NO: 965541 - DNA, 120 bp, Artificial Sequence
  ENSG00000233359_10 (sequence is synthesized)
cagcactgccagaggatcttagaagttgaatatcaatttaataacacatcctgtttgagattgggttctaactatattgcccaagctagattcaaactcttgggctcaagtgatcctcct

SEQ ID NO: 965542 - DNA, 120 bp, Artificial Sequence
  ENSG00000233359_11 (sequence is synthesized)
tatccataacccagtttcattgaagatggagtcttccttcagattttctacatagacaattatacctctgtgaacaaagacagtttatttcttccttcccacaccctgccacacttcctc

SEQ ID NO: 965543 - DNA, 120 bp, Artificial Sequence
  ENSG00000233359_12 (sequence is synthesized)
ctgctccagcaatgtaaaacgtgcctgcttccccttcaccttccacgtgactgcaagttacctgatgcctctttcgccagctttctgtacagcctgcagaaccatgaggaatcacacccc

SEQ ID NO: 965544 - DNA, 120 bp, Artificial Sequence
  ENSG00000233359_13 (sequence is synthesized)
ttttctttacaaattacccagtctcagacatttctttatagcaatgcaagaatggactaatacagtatctgtgtaaaatggagatgtttcctaagaaagaataaactccttttggtataa

SEQ ID NO: 965545 - DNA, 120 bp, Artificial Sequence
  ENSG00000277767_0 (sequence is synthesized)
ttcggaaccgagtgcggtgggctaggactatacgtttgcaagtttaagagataagcgagaagaccagacagagcaaacaataaaaggctttttgttgagaactgtataaatgtaagggag

SEQ ID NO: 965546 - DNA, 120 bp, Artificial Sequence
  ENSG00000277767_1 (sequence is synthesized)
taccaaatcccctattttgaatgacagtatcacggactttattacatatgtaattttattctgattatgaaagcatcagtaatttcactattgaggaataaccacaatgtttatgaatat

SEQ ID NO: 965547 - DNA, 120 bp, Artificial Sequence
  ENSG00000277767_2 (sequence is synthesized)
ttcctttgcttctaaatatgcggtctttttaaatcatgtattttatttcatttgtatatatagtttttcgctgtgtaaacttcctttttgcaaaattctacgtcacaaattgaacaaggc

SEQ ID NO: 965548 - DNA, 120 bp, Artificial Sequence
  ENSG00000277767_3 (sequence is synthesized)
aattagatgtctagggaagtactgatgcacgagaaagcatattgcagcattggttaataaaacgaaaaaatagaaacctaagatttaacaaagggaagttgttaactagtggtgtaaaca

SEQ ID NO: 965549 - DNA, 120 bp, Artificial Sequence
  ENSG00000277767_4 (sequence is synthesized)
ctcaacacagacatgtcttcatacagcaaacatttgttgagtacaatgctgaatgaaacacattgagaaacactctatagtggggaagtagcaaatatttcaattcagtgagcaattgct

SEQ ID NO: 965550 - DNA, 120 bp, Artificial Sequence
  ENSG00000277767_5 (sequence is synthesized)
aatgaatggaaaatatgacacatagaatctatcttctcccagggagtttgtaatctgttagtgaagcaggaaagaataatcaagcaatacttttttgtttggaccaaaagggtgagaata

SEQ ID NO: 965551 - DNA, 120 bp, Artificial Sequence
  ENSG00000277767_6 (sequence is synthesized)
gactataaactcatttcaggttttgtttactctagaacgtaatcatttttcttctcacatgccatgttgattttaatctaatctctttaaaatatatccccctgatttccatctttctta

SEQ ID NO: 965552 - DNA, 120 bp, Artificial Sequence
  ENSG00000277767_7 (sequence is synthesized)
aaggacgtgagtgtatcttgtcctccatgtaatgaaagggagggattacttgctaggctgcattctgggaatggtgaaacagagatggtggtaagtcaaggaatttgtccaagggcaaac

SEQ ID NO: 965553 - DNA, 120 bp, Artificial Sequence
  ENSG00000277767_8 (sequence is synthesized)
tgcatgcctgtggcagagcttagaataatatccagacctaggttccaacccactgttagattttttttaactttggaatttattttgcatagagtattaagggctaggaagataaaatag

SEQ ID NO: 965554 - DNA, 120 bp, Artificial Sequence
  ENSG00000277767_9 (sequence is synthesized)
gttatagtgatagggtacttcgtgtacgtctttcctcacttcagatgactgggttttttaaaggattatttagactatatacatatttatttagctgtacaggagtagactgacatatat

SEQ ID NO: 965555 - DNA, 120 bp, Artificial Sequence
  ENSG00000277767_10 (sequence is synthesized)
acgtggtgatggatccccaagacagatcctgtaactgtggcaggaggattgtggataggatggtgtctactgactattcccaatgccagtgatctaattggttggtcacccagattttgc

SEQ ID NO: 965556 - DNA, 120 bp, Artificial Sequence
  ENSG00000277767_11 (sequence is synthesized)
tcaactctgataattgtcagatgcattccaactagaactactccatcttaaatggggctgggtaagatgaggctgagacctattgggctgcattcccagatagttaaggcattctaagtc

SEQ ID NO: 965557 - DNA, 68 bp, Artificial Sequence
  ENSG00000277767_12 (sequence is synthesized)
aggaggtcagcacaagatacaggtcatgaagaccttgctgagacgagagtgacctctggtcatcctca

SEQ ID NO: 965558 - DNA, 120 bp, Artificial Sequence
  ENSG00000277763_0 (sequence is synthesized)
ggccgcggttcccaagcccacgttttcctggctggagttcgatgggattaacttcctctccgagtagaatagcgctctctcgacgtcactgtgtcccggcttacaactagaggtgtcgca

SEQ ID NO: 965559 - DNA, 120 bp, Artificial Sequence
  ENSG00000277763_1 (sequence is synthesized)
cacacccacttgggtgcctccccttccaaaaccaagcagaaaggcgtctagaaaattagaaggttttgccagttggtgctggcgtagaggacgtttcgaaggcgcttggagcaccccacc

SEQ ID NO: 965560 - DNA, 120 bp, Artificial Sequence
  ENSG00000277763_2 (sequence is synthesized)
ggggaagagttgttttttaatccatactttatccacttttcctgtgccttctttccatcccctaatacatacaaggggaaattacctgggtggactttttagtgaacgtaaatgttcctt

SEQ ID NO: 965561 - DNA, 120 bp, Artificial Sequence
  ENSG00000277763_3 (sequence is synthesized)
tatgaccgtgatttaatcaatgcactgtttgctttctattctttttaaactagttattgctatggctttaaaatatcgtagactgtatagttttactgactgctgtttttcatcatacag

SEQ ID NO: 965562 - DNA, 120 bp, Artificial Sequence
  ENSG00000277763_4 (sequence is synthesized)
gattttattgttctaacatttattaagcactcataatgtgctagaaactctacatattattgcgagtcattgcctctcaacactgttaaatatttaaagaaataaatactgcagaagcta

SEQ ID NO: 965563 - DNA, 120 bp, Artificial Sequence
  ENSG00000277761_0 (sequence is synthesized)
tactatgcagactccgtgaagggccgattcaccatctccagagacaatgccaagaactccttgtatcttcaaatgaacagcctgagagccgaggacatggctgtgtattactgtgcaaga

SEQ ID NO: 965564 - DNA, 80 bp, Artificial Sequence
  ENSG00000277761_1 (sequence is synthesized)
gctggtggagtctgcgggagagcctctggattcacttgcagtaacgcctggatgagctgggtccgccaggctccagggaa

SEQ ID NO: 965565 - DNA, 120 bp, Artificial Sequence
  ENSG00000277761_2 (sequence is synthesized)
cctgtgaaaggcagattcaccatctcaagagttgattcaaaaaacacgctgtatctgcaaatgaacagcctgaaaaccgaggacacggccgtgtattactgtaccacagggggaggggtc

SEQ ID NO: 965566 - DNA, 120 bp, Artificial Sequence
  ENSG00000271086_0 (sequence is synthesized)
ggattcagctcattgtgctctaaggcaactttcatagcagaaatgctgtgatttggtaattctaagcatctgaaaatgttttctttggcccttggccatcccaggatgtttgataaaatc

SEQ ID NO: 965567 - DNA, 120 bp, Artificial Sequence
  ENSG00000271086_1 (sequence is synthesized)
tgatcatttggataagtcccagaaaaggaacagatcagagcctgcgttgggtgctgggagcccacctgatgggagaatgtgtgtacatgtggcggggaatagggagcatggtaaagtgtg

SEQ ID NO: 965568 - DNA, 120 bp, Artificial Sequence
  ENSG00000271086_2 (sequence is synthesized)
ttaaaggcagaactgggattagaattaatccattcctgggttttttcccctacaatgaggatgacaaatacatttccttttctgccctctgatcaattagcagtggctaccttgagcact

SEQ ID NO: 965569 - DNA, 120 bp, Artificial Sequence
  ENSG00000271086_3 (sequence is synthesized)
gacttctggaaggttcccaggttcttcaaaattcagcaagaagaatgctgattgattagcaatgtctgatatggccacaggaaaggagagtacccagaatttgtcagccaggacttacca

SEQ ID NO: 965570 - DNA, 120 bp, Artificial Sequence
  ENSG00000271086_4 (sequence is synthesized)
ggacttgtgatagaacaaaattgccagtggggaacttgaggctcattcctcatagagaaccaacaggctccaaatcaccaaacttctttgcctctctgggaaaactaaatgacccaccac

SEQ ID NO: 965571 - DNA, 120 bp, Artificial Sequence
  ENSG00000271086_5 (sequence is synthesized)
gttccagggggttcctttgaaaacttcctgcggtgtccaggagcgagcagcctgctgcacacaggacgcaatgcctgctgaaatcccagatgaaaattcataatccacttaggaaaaagg

SEQ ID NO: 965572 - DNA, 120 bp, Artificial Sequence
  ENSG00000271086_6 (sequence is synthesized)
aggggggatgcacggagttagcacatattaagtgcctgctgtagtcaagccctgttggacaccagggacatctggaccttgacaacggagcgaaggggtggtcctgcctgcaccaggttt

SEQ ID NO: 965573 - DNA, 120 bp, Artificial Sequence
  ENSG00000271086_7 (sequence is synthesized)
catgaaaaatagaagcctccagtttctcctgatagtgtatagatgggcagatctggcctcaatggcagaagatacttggggaactggagaaagtacagaaggtgatgtgaaatcaattgg

SEQ ID NO: 965574 - DNA, 120 bp, Artificial Sequence
  ENSG00000271086_8 (sequence is synthesized)
gtcatcaaaagaagacgggtgtaccacaatttgttcctccacctgctgcccatgaacatttggagggtttctagtttttggctattacaaataaagttgtcatgaacatttgcatacaaa

SEQ ID NO: 965575 - DNA, 120 bp, Artificial Sequence
  ENSG00000271086_9 (sequence is synthesized)
taggcacaatccttgtttcagcttaaatgttttccccaacatgccactcagataacacaaggtagagccatggtttgaacagaaatgtcttccttcaaagtttcagctcttgtcctttct

SEQ ID NO: 965576 - DNA, 120 bp, Artificial Sequence
  ENSG00000271086_10 (sequence is synthesized)
tccacccacccccatcccacctactcatatgactatgtgttgcatgaaagcacatacgtgtgcatatagaaaaaagattcagatggggaggggaatatagctggagaagtatagattgat

SEQ ID NO: 965577 - DNA, 120 bp, Artificial Sequence
  ENSG00000271086_11 (sequence is synthesized)
tatggattggtgactggtgaaaagtatttctgccagaagcccccacactacaaaatgtaatcctattaatgtgtgtcatctaaaaacatatattgtatcctagctgtaagaatttctatt

SEQ ID NO: 965578 - DNA, 120 bp, Artificial Sequence
  ENSG00000271086_12 (sequence is synthesized)
taatgggctacaaagacaaattttggagatcctaagcaatttgagtctcttattcttctagtataatcaaacagtgatccactttcttggccttcccccagaatccttgctcccatggca

SEQ ID NO: 965579 - DNA, 120 bp, Artificial Sequence
  ENSG00000271086_13 (sequence is synthesized)
agtttttcagcccaactggtggaaattgttttgtcctgattgagaggtattaaagaaaaaatatctaccccagcaccttagttttctaaatcacttgtctttgcttgtttcctagcagca

SEQ ID NO: 965580 - DNA, 120 bp, Artificial Sequence
  ENSG00000271086_14 (sequence is synthesized)
tgaaatactagtctggagaaatagatttagaattagtttcaattgccatttattgatcacaggtactatgcatacaattttcataaatggtcacatttgattttgattctcatcaaaatg

SEQ ID NO: 965581 - DNA, 120 bp, Artificial Sequence
  ENSG00000271086_15 (sequence is synthesized)
atttctatttagcaatgaagaactgagggtctaatggattaggagacttgctcaatgtaccctgttagtaaggggacagaataggaactggagctgggctctgcagaattcatggcctgg

SEQ ID NO: 965582 - DNA, 120 bp, Artificial Sequence
  ENSG00000271086_16 (sequence is synthesized)
ccatccactagttctgctgtatcctgggaacctgcaggaccagccaagcccaggacagggccgcctggggccagggcaggtagacttacctggaagagcaccagcctggctatcagcata

SEQ ID NO: 965583 - DNA, 120 bp, Artificial Sequence
  ENSG00000271086_17 (sequence is synthesized)
tccactttcttcccatttccttttgcagcctccttccttggttcacaatgacagtccaacttctgccagtcctgactgtcattcaagcctttttgctatttaagaattttgaggaagaaa

SEQ ID NO: 965584 - DNA, 120 bp, Artificial Sequence
  ENSG00000271086_18 (sequence is synthesized)
accgtcatgtactcaaaatcctggtaatcagaagtgtctggagatttcgagctgttaacatagagaggtggcaaaattattttctgggatatccttatgggcctgaatggcagcgggagt

SEQ ID NO: 965585 - DNA, 120 bp, Artificial Sequence
  ENSG00000271086_19 (sequence is synthesized)
cgacatagctggtgcctgggcaggtttccaaagcacagccgaggtggagagtaggtgagggctgcaacaaaggtcccgacatctgaagagcactgcacagtttgtcagaggatttcagct

SEQ ID NO: 965586 - DNA, 120 bp, Artificial Sequence
  ENSG00000271086_20 (sequence is synthesized)
ccacactctcacttagtcctcacagcaaccccatgcagtgactgctgtcacttcttttcatggctgagaagactgttgggagaggaaaaatgaattgcccactggcaggcagattcataa

SEQ ID NO: 965587 - DNA, 120 bp, Artificial Sequence
  ENSG00000271086_21 (sequence is synthesized)
actttcaagctaaaaggaaggaggctcagcagtgggtttccaactgtggtctgccttagtatccctgccacactcagttgctgattgtctagaagcagccaacaggaagagtggcctcta

SEQ ID NO: 965588 - DNA, 120 bp, Artificial Sequence
  ENSG00000271086_22 (sequence is synthesized)
cataaatatgggtgcaagcagctggaggccatgatcaactgaactctctcttcaggagacatattcttatggccaccacacctacccaatcctgatgtcttttgcttgaacatccacatc

SEQ ID NO: 965589 - DNA, 120 bp, Artificial Sequence
  ENSG00000271086_23 (sequence is synthesized)
tatcagcgccaatggcagggtcagcagaaaatagcagaggggcctgaaaacagatgggaacatctggaaaaggcagtggggagctgttgagagcattttgagtggggcagtgacactgct

SEQ ID NO: 965590 - DNA, 120 bp, Artificial Sequence
  ENSG00000271086_24 (sequence is synthesized)
aggagattgaggcccacagagatccgggactggcctcacttagctggctggtccctgagtgctccaaggacccatgcatctgaccataggggatgctgggagtatcctccatcctggcct

SEQ ID NO: 965591 - DNA, 120 bp, Artificial Sequence
  ENSG00000271086_25 (sequence is synthesized)
gaaagagctccctttcagcttcctggattcatatctctttctgaaaactgacttcccatattcccaaagccatcgccagctcccagctttgtcattcaggaaaaagagtatgcacctccc

SEQ ID NO: 965592 - DNA, 120 bp, Artificial Sequence
  ENSG00000271086_26 (sequence is synthesized)
cttcatcctcctcatctctcaccatcattaagtacaagcccaaggagaagaatcaagggcaatgaatcttcatcaaacaataaaatcctgcctggtaccagacctacctgtgccatccaa

SEQ ID NO: 965593 - DNA, 120 bp, Artificial Sequence
  ENSG00000271086_27 (sequence is synthesized)
aggctggtccctgagtgctccaaggacccatgcatctgaccataggggatgctgggagtatcctccatcctggcctgaaagagctccctttcagcttcctggattcatatctgtctttct

SEQ ID NO: 965594 - DNA, 120 bp, Artificial Sequence
  ENSG00000271086_28 (sequence is synthesized)
cagagccgaaatcccagagcagtgaaagaggagccagtgtcatggggcttctggtttcaggacacactggaaagggtccagccactttgtcacaagctacatctatggcgagcaacgact

SEQ ID NO: 965595 - DNA, 120 bp, Artificial Sequence
  ENSG00000271086_29 (sequence is synthesized)
acactcttctttttcccaaattaatcaagaagtaggaatttctgacaaatgccatctgctgatttttcagagagacaagttttggtggtgtgaccagcaggtgcctcggctttttctagc

SEQ ID NO: 965596 - DNA, 120 bp, Artificial Sequence
  ENSG00000271086_30 (sequence is synthesized)
atgcagtaccaaaatagtcaccatggcaaccctgggagggcagacttccaaagagatgcattgtgagctcagaaactctagagcactttcaagctaaaaggaaggaggctcagcagtggg

SEQ ID NO: 965597 - DNA, 120 bp, Artificial Sequence
  ENSG00000271086_31 (sequence is synthesized)
tttgaagacgttgttggttgtggaaactggggaagtgctaccagaatctagtgaatagaggctaaggatgctgttgctgaacagcctctgatgcacagaacagcccccacccccaacaaa

SEQ ID NO: 965598 - DNA, 120 bp, Artificial Sequence
  ENSG00000271086_32 (sequence is synthesized)
gaataatccagcctcaaatgatagtgttgctgttgagaaaccccgatctagagagaaagcagctttgctagggaagatttgagcagggccccatgaataaacccaccagagtgagctgca

SEQ ID NO: 965599 - DNA, 120 bp, Artificial Sequence
  ENSG00000271086_33 (sequence is synthesized)
gctgtgagttccaggcttggaaccttccgtgcctgtttagtgccctcaaatttgagcccatacccttcggcacacacactaagacttccttccatgatcaagccctggcttacccttcag

SEQ ID NO: 965600 - DNA, 120 bp, Artificial Sequence
  ENSG00000271086_34 (sequence is synthesized)
ccctgtctggaatgctctccttccacttctgtctgacagatactcactccccattccctgttctgcatccagctgtggcatatttgagaagccttctttcattgctatcctgcatcttcc

SEQ ID NO: 965601 - DNA, 120 bp, Artificial Sequence
  ENSG00000271086_35 (sequence is synthesized)
ttgttcctggggtagcacacagcctctctttcatagaacatcacacaagacagctgctgggatggctgacttgtgtatctgtctctcccaccagactgtgggttctctcaacagggtgaa

SEQ ID NO: 965602 - DNA, 120 bp, Artificial Sequence
  ENSG00000271086_36 (sequence is synthesized)
cagtgccattttgtgggaacttagatccaatatatccctgttcacgggtcccacaatgcttagaatgatgcactgccctgaggagtttgacagacgtggcagaggagagaggcaggaggg

SEQ ID NO: 965603 - DNA, 120 bp, Artificial Sequence
  ENSG00000271086_37 (sequence is synthesized)
aggaggagaagagacacttaacaagtgtctgtgaggtggcgtttacatttagaattccctttcctttcaaaggaatctccaggatagccaaagagtccagcttaaaggtagccagccaga

SEQ ID NO: 965604 - DNA, 120 bp, Artificial Sequence
  ENSG00000271086_38 (sequence is synthesized)
acgaatgatgctgagctctcagcagcaccagaacctcaggctctgacacccacaaagctgcaggtctccagggctgcttgggccaaaaggacattggcactggatttagagcccaccaga

SEQ ID NO: 965605 - DNA, 120 bp, Artificial Sequence
  ENSG00000271086_39 (sequence is synthesized)
taatttgggatgatcttcttcatatcaagatccttcacatctgcaaagatcctttttccatataaggctccaaatcaccaaacttctttgcctctctgggaaaactaaatgacccaccac

SEQ ID NO: 965606 - DNA, 120 bp, Artificial Sequence
  ENSG00000258969_0 (sequence is synthesized)
cccgtctttaactcaactaaggaaaagtcctcaacatttttggtgcgcaacgtgggggctcgagaagtgaaaccatagatgtaaaggtgaagagtgtcggcaaatacactttctgccatg

SEQ ID NO: 965607 - DNA, 120 bp, Artificial Sequence
  ENSG00000258969_1 (sequence is synthesized)
cagtgaaagggagaaatacagcagacacacatggagactctgaggcaagaaacaaagacctttcaagaagtattaaggaagccagatctcatgccttacagcacagtgggaagaaccact

SEQ ID NO: 965608 - DNA, 120 bp, Artificial Sequence
  ENSG00000258969_2 (sequence is synthesized)
ggcctagcaagagtccctgtttcccctttttcttccttttcatccaataaagctctgtctcactcaccattcaaattgtttatgagcctgaattttcgtggccatggtgtgtccggaatt

SEQ ID NO: 965609 - DNA, 120 bp, Artificial Sequence
  ENSG00000258969_3 (sequence is synthesized)
caacagagctgctgtgaatcctgccatggaggcatatgtaagatgtgctgaagccttgccttcaccacaagggacactgagccagctgcctgcgtgaaagataagtaatactggtggtta

SEQ ID NO: 965610 - DNA, 120 bp, Artificial Sequence
  ENSG00000258969_4 (sequence is synthesized)
agctgtaatagaaattcagttgatgagacaagatcgaagttctgccattgaatactccttgaacttggaactcttctgaataggcccaaaggaagataactttgactatataaactactt

SEQ ID NO: 965611 - DNA, 120 bp, Artificial Sequence
  ENSG00000258969_5 (sequence is synthesized)
ttggtcattacaggtcgactattatgttctcttgtcttataaaacaaatatcatctaaaatattgtacatgattataaacataacctttccaaaataaaatcagaactttttcctgtgcc

SEQ ID NO: 965612 - DNA, 120 bp, Artificial Sequence
  ENSG00000274227_0 (sequence is synthesized)
acatcagcccctgtcatgctcatcatcccaggaggcctttcgcagtaaaccctgaacaagaaatctgacaaaaataaacaaacctacctacaaaggagttggcatcatggaggacgcttt

SEQ ID NO: 965613 - DNA, 120 bp, Artificial Sequence
  ENSG00000274227_1 (sequence is synthesized)
ggctagataggccagagtttgaacccagcaatttcagggcagataagctagtgagaggccaggcttgggacaatgtcttctccctagactacacttccctctggctagatctctgggttt

SEQ ID NO: 965614 - DNA, 120 bp, Artificial Sequence
  ENSG00000274227_2 (sequence is synthesized)
tgcagtaaaattcacataatatttgccattgtaaccatttaaaagtgtacattctgcatgattcagtgcattaagaatgtgcaaccatagaggttactatctagtgccagaacattttca

SEQ ID NO: 965615 - DNA, 120 bp, Artificial Sequence
  ENSG00000274227_3 (sequence is synthesized)
tcatcccaaaaggaaaccctatactcattacgcagtcactccccagtcttcctcctcccagccccagcaaccactcatctattttctgtctctatagatttgtctattctgatggaaatg

SEQ ID NO: 965616 - DNA, 120 bp, Artificial Sequence
  ENSG00000274227_4 (sequence is synthesized)
tacaatatgtgcccttttgtgtctggcttttttcacttagcatgttttcaaggtttgtccatgttgtaccatgtattggcacactgttactttttatggccaaataaatattacactgta

SEQ ID NO: 965617 - DNA, 120 bp, Artificial Sequence
  ENSG00000279658_0 (sequence is synthesized)
ctgttaactgacgctgcaggcccagcaactgctccagtctctgcttccacgagattgtcaaattgggcagcagttgggaaatcaatggatatcttcccagtataaatcccaaaatgttcc

SEQ ID NO: 965618 - DNA, 120 bp, Artificial Sequence
  ENSG00000279658_1 (sequence is synthesized)
tgaaatggggttacttctgtcccaattgagacagacgtttcaaattccaaataagaggtagtagggtacaacagcacagaaggtactttaaggaagcttgagtcctcagatgcagaagaa

SEQ ID NO: 965619 - DNA, 120 bp, Artificial Sequence
  ENSG00000279658_2 (sequence is synthesized)
taccaacaatgttgacattcccagtttcaatgggcacaggagaaccctcattcattaaatcaggaatatccaacttgctcagcatcccaactccagaaacaaagaatccctataagttta

SEQ ID NO: 965620 - DNA, 65 bp, Artificial Sequence
  ENSG00000279658_3 (sequence is synthesized)
ctcgagggttttctataaacatactgcctaagactgtaaatgaaaacgagacagcaccttgagga

SEQ ID NO: 965621 - DNA, 120 bp, Artificial Sequence
  ENSG00000279658_4 (sequence is synthesized)
gcctaagactgtaaatgaaaacgagacagcaccttgaggacaaaatgcacttcagtcaaaatgaacgtttttggatctgattttacaactatgtaaattaaaaaggttcagaccagctga

SEQ ID NO: 965622 - DNA, 120 bp, Artificial Sequence
  ENSG00000274225_0 (sequence is synthesized)
tagaccacagggaggcctgggaactgcctgagcacctgcaccacgggagaggcttgggtgacacttgggcacctgcacccaacacaggtagcagtgatcacagtgaaaacattttgttag

SEQ ID NO: 965623 - DNA, 120 bp, Artificial Sequence
  ENSG00000274225_1 (sequence is synthesized)
cagtcgtctgcttcctgtcctggcatgagcagcaacgggtaaagggcactcttgtcagctgaggggatgagtggggctctgcccagctggttggagactccagcaggtttgcaggaggag

SEQ ID NO: 965624 - DNA, 120 bp, Artificial Sequence
  ENSG00000274225_2 (sequence is synthesized)
gtgggaaaacaggaacccaaagaaggaactccaatgggaaactaatttagacaacaatgatcttaaagtttttgctccttcgagactgttgaaaagaactcccacgagtgaacaaaagac

SEQ ID NO: 965625 - DNA, 120 bp, Artificial Sequence
  ENSG00000274225_3 (sequence is synthesized)
gcctggccgaggacactccagagtgctgtcacgagggttccctgcagttttcagaaacttggagcatgtggccacagcggcttgcacgtgattcatacggcacatcttgtcaccatgtaa

SEQ ID NO: 965626 - DNA, 120 bp, Artificial Sequence
  ENSG00000274225_4 (sequence is synthesized)
atgtttatcagcagagacaaagaccagaagagcaaccttggaaagagctaaatattccgatgttccagcattttcccctctggtttgtattgtgaatttttaaaatctcgattgacaagt

SEQ ID NO: 965627 - DNA, 120 bp, Artificial Sequence
  ENSG00000274220_0 (sequence is synthesized)
agctgaagtttgaactgggagaagcgccgccttctagtcgcagctcctgtgctgtaaacaaagagtcctttccgcagtctgtttactgacacttttttttctgctttttgtgggtggttt

SEQ ID NO: 965628 - DNA, 120 bp, Artificial Sequence
  ENSG00000274220_1 (sequence is synthesized)
tgctttctaaaatggcccccaagcgtagtgcttaagctctgcccagtgttcctaagcgaaagaagaccgtgatgtgccttacggagaaagtccgcgtgttggataagctccaatcaggca

SEQ ID NO: 965629 - DNA, 120 bp, Artificial Sequence
  ENSG00000274220_2 (sequence is synthesized)
tgagttacagtgctgttggccatgagctcaatgttaacgagtcgacaatccggtacatcaagaaaaaggaaaaggaaattcaccgatctgtccgtgaggccgctccggatagtgctgaag

SEQ ID NO: 965630 - DNA, 120 bp, Artificial Sequence
  ENSG00000274220_3 (sequence is synthesized)
tgacctccatcgtgcgtgatgaagctatgacaaagatggaaaagatggaaaagcggctaaatttgtggattcatgagatgtcaatcgattaaaaaaaacatagtggacagcattgtggtg

SEQ ID NO: 965631 - DNA, 120 bp, Artificial Sequence
  ENSG00000274220_4 (sequence is synthesized)
aggctgaaagccaaagatatctgtggtcacgttacccagagtcaaagaaatgctaagcccttctcggcgagtgctggccggctcgcgcgtttcaaaaggcgatacggggtgaaaaatgtt

SEQ ID NO: 965632 - DNA, 120 bp, Artificial Sequence
  ENSG00000274220_5 (sequence is synthesized)
aaacttgcaggtgaggcgagctctgcagatcaggaggctgcggaagaattttaaaaatacttgctaagtgttatacaggaaaagggttatgtgaaagagcaggttttcaatgcggatgag

SEQ ID NO: 965633 - DNA, 120 bp, Artificial Sequence
  ENSG00000274220_6 (sequence is synthesized)
actggcttattttacaaggatgttggcaaacgaacctatataatgcaaacggcctccaaagcccctggctttaaatcatgccaggatcatgcacccttgttattgtgcgccaatgccaag

SEQ ID NO: 965634 - DNA, 120 bp, Artificial Sequence
  ENSG00000274220_7 (sequence is synthesized)
agcgactaaagtgcaaactcctaatggtgtaaagaacccaaaatccacaagcacttaacgggaaatacgtgaaccatctgccagtctattggaggtggaacaaaaaagtgtggatgatgt

SEQ ID NO: 965635 - DNA, 120 bp, Artificial Sequence
  ENSG00000274220_8 (sequence is synthesized)
caaaaaagtgtggatgatgtctgattggttccacaactgcttcatcccagaagctgaacactgtctccagggcagaaaccttgccttcaagggttttttgttttgttttgttttgttttt

SEQ ID NO: 965636 - DNA, 120 bp, Artificial Sequence
  ENSG00000274220_9 (sequence is synthesized)
gtgagccaccgcgccgggcaccttcaaggttttgttaattttggataatgctacaatccattgctgcaaagaactcgaaaatgcacacgccaacataggagttctttttatgcccccaaa

SEQ ID NO: 965637 - DNA, 120 bp, Artificial Sequence
  ENSG00000274220_10 (sequence is synthesized)
cactaagtctctcatccaacccctcaatcggggcataataaaagcattcaaggcacactacacaagggagctttatatgaaggcctgtgaggctctcaggaccaacaaggaaaccaccat

SEQ ID NO: 965638 - DNA, 120 bp, Artificial Sequence
  ENSG00000274220_11 (sequence is synthesized)
gctggactattggaagtcggtcactacatgcaacgttattgattatgtcagtacagcctgggagagcattggtcaggctactaccaataactgttgggaaaatgtttggccagactgcgt

SEQ ID NO: 965639 - DNA, 120 bp, Artificial Sequence
  ENSG00000274220_12 (sequence is synthesized)
ggagaattttgaagggtttgaaggtgttacagaaaatataaagaacactgtcagagacataatgcatatggcacagcaggtaagtggagagggctttgatgacgtgaaggaaggagatgt

SEQ ID NO: 965640 - DNA, 120 bp, Artificial Sequence
  ENSG00000274220_13 (sequence is synthesized)
ggagtacattttggcagagaaggcagtggaaccaaccaacgaagacctggatgagatggcaaaagaaggcattggagttgatggccatgaaagtcggcccaagacttccagaattgtccc

SEQ ID NO: 965641 - DNA, 120 bp, Artificial Sequence
  ENSG00000274220_14 (sequence is synthesized)
tctcacagcgccaaaatatcagaatggagttctgccttggaaaaaatttttagcgacatggaagagtgtgaccctacgcttgatcgaagcctcaaatttaaatggctggcctccactgcg

SEQ ID NO: 965642 - DNA, 120 bp, Artificial Sequence
  ENSG00000274220_15 (sequence is synthesized)
tttgccccttataccgagatgcttaaagatttcaggcagaaaagccaggcaggcaaggctaatgcaatttctcaagccagtttgggagggaagattgcccactccttcaacaagtgtcaa

SEQ ID NO: 965643 - DNA, 120 bp, Artificial Sequence
  ENSG00000274220_16 (sequence is synthesized)
gagccagactcctaaggtagaaatgccagaggttgacctgccaccctcttcctcttctgcagaataaatttcactcacccctcccctggtttctgtggggcaagccaaggtcgagaggtt

SEQ ID NO: 965644 - DNA, 120 bp, Artificial Sequence
  ENSG00000274220_17 (sequence is synthesized)
taaccacattgtgcagctccatcaaccgtaagattttagttgatatttttataaaacttaggatgctccatctttgaactttttccctttatttgtattgctgtactgtagggtatacag

SEQ ID NO: 965645 - DNA, 120 bp, Artificial Sequence
  ENSG00000274220_18 (sequence is synthesized)
tatgtgtgcaaagtagtgtatgtgtttactgtgggaactgtacagtatgttatactgttgactgtatatgggaactatatgtgtgtactctgtgtgtgccaatgaaaaggttgtacaggc

SEQ ID NO: 965646 - DNA, 120 bp, Artificial Sequence
  ENSG00000279652_0 (sequence is synthesized)
gtaacaattcgaaactatgtttaagtattcaactaatgacaaagatgacaaggatacagaagataacagaatgtagattcaagagttctttaagtctctgtccaaggcaacaaactaaca

SEQ ID NO: 965647 - DNA, 120 bp, Artificial Sequence
  ENSG00000279652_1 (sequence is synthesized)
atccattcatctagcccggcagacttctcaaacttaagagataattttaaattccttaggaaatacctgattaaagcttactaaaacaccagaaaaaaaatgaaatcaaatggttttaac

SEQ ID NO: 965648 - DNA, 120 bp, Artificial Sequence
  ENSG00000279652_2 (sequence is synthesized)
tgaatacttattctcttgattcttgaaccctctcataacccaaccacttcccattatgatacctagtttccttataaaaaagctccattttgacccaaagcagatggaaatttaccttta

SEQ ID NO: 965649 - DNA, 120 bp, Artificial Sequence
  ENSG00000279652_3 (sequence is synthesized)
ctgattatgtctcctgggtcatttatccaatacgtcttgcctcttgcttcagtataaacttcagaagttcgaagctaagccaaaaacaaaacagctacaagatgaaggttagtaaggatg

SEQ ID NO: 965650 - DNA, 120 bp, Artificial Sequence
  ENSG00000279652_4 (sequence is synthesized)
aacccactcctggaaacatctatgtctctgccttacaactctgaattccctcacatcttccactcagcctcgtatgtaaatgaactcccctccctttccctacttggaggcagaaaacag

SEQ ID NO: 965651 - DNA, 120 bp, Artificial Sequence
  ENSG00000279652_5 (sequence is synthesized)
gataccttgctttactttcaaacttctcagaggtaggatgagatacagaatggttattaagtgctctgaatctcaagcaaaacataacatacaaaaacataatacaatactggttttaac

SEQ ID NO: 965652 - DNA, 120 bp, Artificial Sequence
  ENSG00000279652_6 (sequence is synthesized)
atatttaccatgtaatgtccaaacagctttattccactactaagaatcaactaaggaacacataagacagaaaggacataaacagatgcatatacaagtgttaaaagcccaagcaaagct

SEQ ID NO: 965653 - DNA, 120 bp, Artificial Sequence
  ENSG00000279652_7 (sequence is synthesized)
aaattcacctttgcgcctcaaaaggaccattttgattacaggtcagagtttgcatcatcaaaatgaatcgaattgttccaagtaatactgaaatagcagctgagggtaaaatgaacttta

SEQ ID NO: 965654 - DNA, 120 bp, Artificial Sequence
  ENSG00000279652_8 (sequence is synthesized)
gccactggactctgaccatcatcagaggcagttattaaaacacaggtatgttaacaggggaaaatagcagaaaataaaggtggatgtaatggttttaaaatatgctcacaaagtatttga

SEQ ID NO: 965655 - DNA, 120 bp, Artificial Sequence
  ENSG00000279652_9 (sequence is synthesized)
tactactccattcaaaaggtaggtcctgcttttcctccccttaagaggagctagacttgcttctaacagcataaagcaaaaatttaagtagatcctcctgcctcagtcaagccttcagat

SEQ ID NO: 965656 - DNA, 120 bp, Artificial Sequence
  ENSG00000279652_10 (sequence is synthesized)
aaatgcagcccagtcaaaagcttgactgaaacctcatgagagatcctgggacagaactacacagctaagttgtctcaaatttctgacctacagaaactatgagataataagtgtttgttg

SEQ ID NO: 965657 - DNA, 120 bp, Artificial Sequence
  ENSG00000279652_11 (sequence is synthesized)
tttgaagccagtaagtgtagggctaatttgttacacagcgagaaataactaatagggagggtatgttgtagtgcactgtgttatgaatcccaaactgccattatgggaggtcgaggcaga

SEQ ID NO: 965658 - DNA, 61 bp, Artificial Sequence
  ENSG00000279652_12 (sequence is synthesized)
gtctcgaaaaacaaaaaaacaaacaaaaaaatcattaaaggtccctccaaagttctgaaaa

SEQ ID NO: 965659 - DNA, 120 bp, Artificial Sequence
  ENSG00000279652_13 (sequence is synthesized)
aacaaaaaaatcattaaaggtccctccaaagttctgaaaacaaggactaccagaaagaagcacaccagtattgtagtaacttccccttctagtttgagcaagctaataggaatataatga

SEQ ID NO: 965660 - DNA, 120 bp, Artificial Sequence
  ENSG00000279652_14 (sequence is synthesized)
gagccagaaatatatgccattatgtaatttaaaattttgtagtagccatattaaaaatggtaaaaaaaaaaaggtgaaactaattttaagaatatattttattgaatccaacacagttaa

SEQ ID NO: 965661 - DNA, 120 bp, Artificial Sequence
  ENSG00000279652_15 (sequence is synthesized)
ttagcatttcaacatgttgattttaaaacatactcaatattttaaaaatctcaacatagtatcttacattcttttttgtactaattcttctaaatctagtgtatagtattttacattgag

SEQ ID NO: 965662 - DNA, 90 bp, Artificial Sequence
  ENSG00000279652_16 (sequence is synthesized)
ggtctcactgtgtcactcaggccagagtacagcagcacgatcatcgctcactgtagccttgactttccaggctcaaatgatcctcccacc

SEQ ID NO: 965663 - DNA, 120 bp, Artificial Sequence
  ENSG00000279652_17 (sequence is synthesized)
tcagcttcccaagtagctgggaccacaagcctgtgtcaccatacccagttaattttttaattttttgtagaaatggggtctctctatgttgcccaagctggtctcaaactcttgggttca

SEQ ID NO: 965664 - DNA, 89 bp, Artificial Sequence
  ENSG00000279652_18 (sequence is synthesized)
atacccagttaattttttaattttttgtagaaatggggtctctctatgttgcccaagctggtctcaaactcttgggttcaagtgaatta

SEQ ID NO: 965665 - DNA, 84 bp, Artificial Sequence
  ENSG00000279652_19 (sequence is synthesized)
caagcgtgaggtaccatgcctagcttttttattttttattataatttcatataagaacagagatgcgggtctcactttgttgcc

SEQ ID NO: 965666 - DNA, 120 bp, Artificial Sequence
  ENSG00000279652_20 (sequence is synthesized)
agctctatagccacatgtggctaccgtattaccatattacacagcaagtctagaggatttcttctacagcctgttaccccttcagaaacatgagtgtagagcccagggaggcaaaagtaa

SEQ ID NO: 965667 - DNA, 120 bp, Artificial Sequence
  ENSG00000279652_21 (sequence is synthesized)
agaatgttttagataactaaaggatcctttttattgtctttactgagatatctcatttgagcaggtcccaagctgggaaaggacagccttcatgaaagaaaagaaagagggaaaggacag

SEQ ID NO: 965668 - DNA, 120 bp, Artificial Sequence
  ENSG00000279652_22 (sequence is synthesized)
tgcttactgttagaaagaggaacaactactttgaagaactgaaaagaaactaatacttcctacaaaacatcaaaaccaatcatcagagtatagagaacatcatctacctttttacgtgat

SEQ ID NO: 965669 - DNA, 120 bp, Artificial Sequence
  ENSG00000279652_23 (sequence is synthesized)
attcccctcagcattcagtcacccattcatctcatacacaggctacatccatttgaaatggaaagatgcagtttgttccgaataagaaggtttggaaggaaataaatggggaaaaacact

SEQ ID NO: 965670 - DNA, 120 bp, Artificial Sequence
  ENSG00000279652_24 (sequence is synthesized)
gagtgaaagaacatttgcctttctccaaacacaaaaaccttccccatttaacacatttgcctcctctccgccggcaatgttatctcctaggatcatagctttcaagaataaaccaaaccc

SEQ ID NO: 965671 - DNA, 120 bp, Artificial Sequence
  ENSG00000279652_25 (sequence is synthesized)
agagcctgccgggagacagtgatccaactgatacggtttggctctgtgtcccccacaaaatctcatctcaaattgtaatccccacgtgtcagaggaggggcctggtgggaggtaactgaa

SEQ ID NO: 965672 - DNA, 120 bp, Artificial Sequence
  ENSG00000279652_26 (sequence is synthesized)
tcatggggacagacatcccccttgatgttctcaggatgagtgagttctcgagtgatcgtttaaaagcatgtggcacctcccccttcacactctctctctctcctgctccaccatggttaa

SEQ ID NO: 965673 - DNA, 65 bp, Artificial Sequence
  ENSG00000279652_27 (sequence is synthesized)
cccttcacactctctctctctcctgctccaccatggttaagatgctcctgttaaggctttggaac

SEQ ID NO: 965674 - DNA, 120 bp, Artificial Sequence
  ENSG00000279652_28 (sequence is synthesized)
aggtagttctttacagcagtgtgagaacggactaatacaccaacaagaaaatctcttccagtgcaaccaagtcacccttttcctcctcctcctcctgcttcttgaggagctagattcaga

SEQ ID NO: 965675 - DNA, 120 bp, Artificial Sequence
  ENSG00000279652_29 (sequence is synthesized)
cagacgattatggaaaaaagcccagctgtgtgagtcactgcagccatcccaaggggcctgggcaaaatccagaggacagctggaaacagctgttgtgagatcaactgcaactaggaggga

SEQ ID NO: 965676 - DNA, 120 bp, Artificial Sequence
  ENSG00000279652_30 (sequence is synthesized)
aggaggaaaaagaggatgaattcatagtttattacacatgatcccattctggcctcagcaaagcttgtttttattttctctcccaaatgaaaagtttcttctcccttcttactaaagatt

SEQ ID NO: 965677 - DNA, 120 bp, Artificial Sequence
  ENSG00000279652_31 (sequence is synthesized)
cttcttctaacaaagaaaataataattgattcaccaataaaaacctcctgagatcattatccaatctactatgggggataccattcccctcacccatatgtctcccacggtacaggataa

SEQ ID NO: 965678 - DNA, 67 bp, Artificial Sequence
  ENSG00000279652_32 (sequence is synthesized)
aggaggctgaggcatgagaatcacctgagaggcaacagagcaagagcaagactctgtctcaaaaaaa

SEQ ID NO: 965679 - DNA, 120 bp, Artificial Sequence
  ENSG00000279652_33 (sequence is synthesized)
aaaaaagctgtaaaggcaactgtaaaggcaagacacctttgacttgaataaagctcttaaaaagagaaaaaaaagtcaccaggaaatatgaggctgctgagatctagcagagaaatagcc

SEQ ID NO: 965680 - DNA, 120 bp, Artificial Sequence
  ENSG00000279652_34 (sequence is synthesized)
ccaaggaaagagaggttgctctatggttccttacacgataatattataaatgctttgttgattaaggaagaaatgtcagaagagtgtttatttgcacagctagagggcaaccagccttag

SEQ ID NO: 965681 - DNA, 120 bp, Artificial Sequence
  ENSG00000279652_35 (sequence is synthesized)
gatgtctaatcccctttcctatcagccaaaaagatgtagatctccacacatcaatcctgaggtcctgaagaaaatggtgactgacaccacaagtccagatactgtggtaaaatgaagagc

SEQ ID NO: 965682 - DNA, 120 bp, Artificial Sequence
  ENSG00000279652_36 (sequence is synthesized)
aggtacctttcctaagaaagaacttctcagagtttgataggtaagggaagaatagggatttactggcatttgatacaaactaatattgatttaatgggctctgataatatgagacttagg

SEQ ID NO: 965683 - DNA, 120 bp, Artificial Sequence
  ENSG00000279652_37 (sequence is synthesized)
aaactaataagcattctcctctacctggtcttaacacacccagacatccacccttcaaaatccctgggcttacagctcaaatggttttgatcaacacatattcctcagtggtcagtcttg

SEQ ID NO: 965684 - DNA, 120 bp, Artificial Sequence
  ENSG00000279652_38 (sequence is synthesized)
gattctacagttctttcagacattcacacaatagaagcggtcataccttaaaatttaccagccaaaccatacatgagaatagaagaactgctgccttcagaagtctagagatatatttaa

SEQ ID NO: 965685 - DNA, 120 bp, Artificial Sequence
  ENSG00000279652_39 (sequence is synthesized)
aagccaacaaaatctcctctaactctctcagctgcccacctgccatcaataacactgttcctaaagtaaggtacaaaggttcaaaatccctctatgcattctctgctccctagtgtggcc

SEQ ID NO: 965686 - DNA, 120 bp, Artificial Sequence
  ENSG00000279652_40 (sequence is synthesized)
ctgtcactacagaacttcaattatttcttccacaaatatttttaaatactgtatttacattccatctcatttcaatatatataagacctcttgcaactaattgccaaagagagccacagg

SEQ ID NO: 965687 - DNA, 120 bp, Artificial Sequence
  ENSG00000279652_41 (sequence is synthesized)
agatcctgtaaatagtggaaggaactgagatgcggagggagtatagaggaaagtctgagtcagctcccaaggccaaaggaacacttcccttggcctcccaggcttaacattaaaataact

SEQ ID NO: 965688 - DNA, 120 bp, Artificial Sequence
  ENSG00000279652_42 (sequence is synthesized)
cctagcactttgggaggttgaggcaggaagatcgctagagcccaggagtttgaatcagcctgggcaacacagtgcctaggctatagtgcctcatggctacaaaaaataaataaaaaatta

SEQ ID NO: 965689 - DNA, 120 bp, Artificial Sequence
  ENSG00000279652_43 (sequence is synthesized)
atggctacaaaaaataaataaaaaattacccagacatggtggcacacctgtagtcccagccacttaggaggcttaggtgggaggactgcttgagcctgagaagtcaaggctgcagtgagc

SEQ ID NO: 965690 - DNA, 120 bp, Artificial Sequence
  ENSG00000279652_44 (sequence is synthesized)
cgtgaccgaaccaccacactccagactgggtgacagagtgcgaccctgtctcaaaaaaataaaataatgacatctttgttaaaaagatgtaaaagtcagaaaaagtttttcagttgcctt

SEQ ID NO: 965691 - DNA, 120 bp, Artificial Sequence
  ENSG00000279652_45 (sequence is synthesized)
agctaacattttgcatctccctctttttctcctttatgcttctcctttccaagtgtacagcaaatctagaattttatactaaattctgatacaattttatattatatatagttttatctt

SEQ ID NO: 965692 - DNA, 120 bp, Artificial Sequence
  ENSG00000279652_46 (sequence is synthesized)
tcccaccaatacaatagcaaggtatgaccctataccatattttacaccatcaacttaccttatttaattttggctgagtttgtatatcatctaaccaactcaatcaaaagcccttacaga

SEQ ID NO: 965693 - DNA, 120 bp, Artificial Sequence
  ENSG00000279652_47 (sequence is synthesized)
caatcaaaagcccttacagaccatctcctagatcttacatttcctgcacacactacctcacatagagaacatccaatgatacttcttaattaggttttttttttgagacggagtttcgct

SEQ ID NO: 965694 - DNA, 120 bp, Artificial Sequence
  ENSG00000279652_48 (sequence is synthesized)
cctggccaattaggttatatttcatataaaatgagtgcaagagtgagatggagtgattcaatctaaaatgcacaaagtgagaaagcaatcaaggtgagccaccctccagaagacaggaag

SEQ ID NO: 965695 - DNA, 120 bp, Artificial Sequence
  ENSG00000279652_49 (sequence is synthesized)
aaaaaaagcatttgatcaaatcttatgagatgacatctggagcctctgcacctcgtcacaacagccaagtctatcagtaacatagctaagtcgccacagccacttgtactttcatcccct

SEQ ID NO: 965696 - DNA, 120 bp, Artificial Sequence
  ENSG00000279652_50 (sequence is synthesized)
tctccttcagtatttctgatgaccacaataacttcctttccaattagccacagtggcagccactgccatgataatcaacaatgattttaataagtctaggcgtctgttttcaagggcaac

SEQ ID NO: 965697 - DNA, 120 bp, Artificial Sequence
  ENSG00000279652_51 (sequence is synthesized)
atgaggaagccaacagatgagaatgtcccaggccagctctggagtatccatgaggttgaaagggtaaaaaggggtctgtgaaaggagatgaacatgagctaaaaggtcagaatgtattca

SEQ ID NO: 965698 - DNA, 120 bp, Artificial Sequence
  ENSG00000279652_52 (sequence is synthesized)
actcaaatgtgctcatggtagtaaccatgggatttttttacttttttttctccaaccaagacaacaagaaaaaattaataataattatggtctaatggcaacgtacaaaatgaatcttaa

SEQ ID NO: 965699 - DNA, 67 bp, Artificial Sequence
  ENSG00000279652_53 (sequence is synthesized)
ataattatggtctaatggcaacgtacaaaatgaatcttaaaaaataagtgatgagagttcaagacca

SEQ ID NO: 965700 - DNA, 86 bp, Artificial Sequence
  ENSG00000279652_54 (sequence is synthesized)
acctgttgtcaggggcccaagagttggaggttaaaatgaactgtgataacaccactgcaatacagcctggcaacagagcaagactc

SEQ ID NO: 965701 - DNA, 120 bp, Artificial Sequence
  ENSG00000279652_55 (sequence is synthesized)
caacagagcaagactctgtctctaaaaaaacataaaaataagtgatgaaaataattgaccattatactttagagggacttctcatataagaattttggttaggagatgaaagatatgtag

SEQ ID NO: 965702 - DNA, 120 bp, Artificial Sequence
  ENSG00000279652_56 (sequence is synthesized)
ggttaggagatgaaagatatgtagactaaaagctacaaaacgttgatcaaagaaattgaaaacataaacagaaagatagcccatgttcatgggggaaaaaagaggattttggttaagcac

SEQ ID NO: 965703 - DNA, 120 bp, Artificial Sequence
  ENSG00000279652_57 (sequence is synthesized)
acacactgttgcataggtactactgtccatgcttagcagacagaggcagacagggaagaagttacaaatcctagctcgaggtttcacagacgacatgtatccaaagacagaaactagatt

SEQ ID NO: 965704 - DNA, 120 bp, Artificial Sequence
  ENSG00000279652_58 (sequence is synthesized)
tcttgaaggcataatttacagggggaacttttgtcttagacatgaaatataaaacatacaggaatgcatcattagctttacatatttaacatccaaatcaagaaatataaaagttatata

SEQ ID NO: 965705 - DNA, 120 bp, Artificial Sequence
  ENSG00000279652_59 (sequence is synthesized)
atctcaggtgatccaccaacctcggcctcctaaagtgctggaattacaagcatgagccaccgtgcctggcccaaaagttgtatttcttataacaatgctaaaacacactatgtttaaaca

SEQ ID NO: 965706 - DNA, 120 bp, Artificial Sequence
  ENSG00000279652_60 (sequence is synthesized)
taaagtttcagagctcagagggattgctagacaatagatcaatagcaattccaacacacactgtatccaaggagttcaaggcacttggctttaaatactacatatgtgcaacatgaataa

SEQ ID NO: 965707 - DNA, 120 bp, Artificial Sequence
  ENSG00000270937_0 (sequence is synthesized)
gaattcccagagctgtgccagtttaagggctacccacaggcatctctatgctttgccatttgcccctgtaagaagtaaggtcgggagtcctggagaagtcaagctcaagtcgtcctttgt

SEQ ID NO: 965708 - DNA, 120 bp, Artificial Sequence
  ENSG00000270937_1 (sequence is synthesized)
aacgacactaaagctcaccttgagttcacttcacacgggccagtcacaaccacttaattctgtcctcacagcccatcagcaggcactgtggtgtttctatcttatggaggaggacgccag

SEQ ID NO: 965709 - DNA, 120 bp, Artificial Sequence
  ENSG00000270937_2 (sequence is synthesized)
ggcttgcccaacgctatcaccttgccagagtcgtgctgctgaatgatggcagatctagggtgctgtcgtgggtgtctctgtctccctcccacatcccagtctctacccaccatactccct

SEQ ID NO: 965710 - DNA, 120 bp, Artificial Sequence
  ENSG00000270937_3 (sequence is synthesized)
caatcacagatctgctggtttctttctctgcacctggcaacctctggagggcaaggcctgcacttttccagctgtgacaccagcccatgtgtctcatatcatttctctctcatgtagcaa

SEQ ID NO: 965711 - DNA, 120 bp, Artificial Sequence
  ENSG00000270937_4 (sequence is synthesized)
gaatttctccccagaaaggaggtggcaaagatgggcagggggtgcaaaggtgggggctctgacagccaggttccagggtgcactgctgagccagcccacaaccatggtgaggcagggaga

SEQ ID NO: 965712 - DNA, 120 bp, Artificial Sequence
  ENSG00000270937_5 (sequence is synthesized)
ttccgcaggactccgtatccgtgctttgaagatggctttcgtgcttttagtcttttctttgttcatttgttgtttgttttctgatgatgttttagtaaaaagttcttttgaaaatcccaa

SEQ ID NO: 965713 - DNA, 88 bp, Artificial Sequence
  ENSG00000236540_0 (sequence is synthesized)
gggggctcgctgtgtcgcacacgctggagtgcagtcgtgcaatcatggcttactacagcctcaaactcctgggctcaagcgacgctca

SEQ ID NO: 965714 - DNA, 120 bp, Artificial Sequence
  ENSG00000236540_1 (sequence is synthesized)
ttggattagggcccacactaacgacctcattctaccttggttacccctggaagaaccctatctccaaatgcagtcacattctgaggagcaggtctgcttgtcaagagtccaagcacgcct

SEQ ID NO: 965715 - DNA, 120 bp, Artificial Sequence
  ENSG00000236540_2 (sequence is synthesized)
gtgttctgtggccacaggagaggaggggccgcttttaaatacaagcctactcctgtcgttggaccagaacaaagacctactggccagaagcacatgagaggagtttcactcttgtcgccc

SEQ ID NO: 965716 - DNA, 69 bp, Artificial Sequence
  ENSG00000236540_3 (sequence is synthesized)
tggccagaagcacatgagaggagtttcactcttgtcgcccagactagagcgcaatggtaacagaagtcc

SEQ ID NO: 965717 - DNA, 120 bp, Artificial Sequence
  ENSG00000236540_4 (sequence is synthesized)
caaccaaagcaacctctcacacttggttgattggtgagttggaggctccagtggcccctgtcagacttgagacctcagacctgcccaccacagccagtttcccacacagcctgggactga

SEQ ID NO: 965718 - DNA, 120 bp, Artificial Sequence
  ENSG00000236540_5 (sequence is synthesized)
ctgggtgacggagaaggatccttaccatggaactagccaggtccagccccagggttgcaaagattgatgattggaagttgggactccagcccaagctgggggaggatcctttcccctctg

SEQ ID NO: 965719 - DNA, 120 bp, Artificial Sequence
  ENSG00000236540_6 (sequence is synthesized)
ggctcctgtgtttccacctaagcccggctcacccatgagccaggcatctgctggcagatgagaacaagacgtggtctcaggaagtctgcaggcagaccaggagcccaggccttcaaggat

SEQ ID NO: 965720 - DNA, 120 bp, Artificial Sequence
  ENSG00000236540_7 (sequence is synthesized)
acgcctgtgttctgtggccacaggagaggaggggccgcttttaaatacaagcctactcctgtcgttggaccagaacaaagacctactggccagaagcacatgagagagatggggtctcac

SEQ ID NO: 965721 - DNA, 86 bp, Artificial Sequence
  ENSG00000236540_8 (sequence is synthesized)
ctgcccgcagccaccgtgcctcgccactggtgagtttttagacgacaacactaagtgaaaaaagtcagtcccctaaactacatatt

SEQ ID NO: 965722 - DNA, 120 bp, Artificial Sequence
  ENSG00000236540_9 (sequence is synthesized)
ataggcaaatccagagacagaaagcagattaaaggttgcaggcgctgaagagacggggaatggggagtggctgctgacaggtatggctttctttggggatcaagaaatgtcctggaatta

SEQ ID NO: 965723 - DNA, 120 bp, Artificial Sequence
  ENSG00000236540_10 (sequence is synthesized)
ggtagtgatgacagttgctcaactctgtgaatgaaacgaaacctactgaatgatacactttaaatgggtgaactgtgccgctagtcagtcatatctcaataaaactttatcaaaaaaaaa

SEQ ID NO: 965724 - DNA, 120 bp, Artificial Sequence
  ENSG00000236540_11 (sequence is synthesized)
cagatggactgacccacaggcatccacatgtggtgctgaagaagccgtgaggaaagggggaggtgggaagggcctcgtccagggtgtctggctgcacaggagacatagcagctcccactg

SEQ ID NO: 965725 - DNA, 120 bp, Artificial Sequence
  ENSG00000236540_12 (sequence is synthesized)
ctctcatgggtctgaaaaggccaagttaggggttgggtgcagaggcttagaaaagtctaggtctcagcattggatatccgggacccccttatactcggccaggctcagggatgaagctcc

SEQ ID NO: 965726 - DNA, 120 bp, Artificial Sequence
  ENSG00000236540_13 (sequence is synthesized)
ttagagctggccccaaaccaggagctcctggggctgagacagatgcagacctgctctcctgcccctcctaccatcccctggcccccatcatccaacagaagtccaggccagcctgcctcc

SEQ ID NO: 965727 - DNA, 120 bp, Artificial Sequence
  ENSG00000236540_14 (sequence is synthesized)
gccagccccatgcctccagactctatgtctacacagctcaccttggccatctcggggccagagggcagaagcagcttatgttgggaaggggcatctgagaagaaggagcaggtctgcttg

SEQ ID NO: 965728 - DNA, 120 bp, Artificial Sequence
  ENSG00000270933_0 (sequence is synthesized)
tttagatgcagttcacttttgttttttaaagtaagttttattaatggaaaggaagaactttttccaagaaagcattttgaaagccactgggggagggggacatttatgcttttgggctgt

SEQ ID NO: 965729 - DNA, 120 bp, Artificial Sequence
  ENSG00000270933_1 (sequence is synthesized)
ggagatcctttaggtggagagactgctctctcatccctagtggaatggaggtttgggttggtgagtttctatcaatagcctgctctctatagtgggtcagtgactggcaccaaattgtag

SEQ ID NO: 965730 - DNA, 120 bp, Artificial Sequence
  ENSG00000270933_2 (sequence is synthesized)
tcctgttccatggacattgccctgttttggttttatgagcttttggccaggcacaggacgcagggtggtagggaaaaaaggaaatggttcctgtgcccgtggtgctgacaggtaagggaa

SEQ ID NO: 965731 - DNA, 120 bp, Artificial Sequence
  ENSG00000270933_3 (sequence is synthesized)
cttcagaaacctgggggttgcttgtgtctctgggaagcccttggtaaagaaagccaccattttttttacttaggtatattccagtggtttatcatcgggagagggatgataatggaggaa

SEQ ID NO: 965732 - DNA, 120 bp, Artificial Sequence
  ENSG00000270933_4 (sequence is synthesized)
ggctcaatgagggagaaagtattcagctgcttgatgttagagcttaatggcaggacctaccagttgcttttcacagaaatgctgtgtattgatcctaaggcagcatgtgttctcttttgt

SEQ ID NO: 965733 - DNA, 120 bp, Artificial Sequence
  ENSG00000270933_5 (sequence is synthesized)
gtggccattatccattctcccacttttccatcagtgactgctttgcttttgttcctcaatcctttacccaaaaatggctgaattatttctgtgcagttaaataaagtgatccaaactcaa

SEQ ID NO: 965734 - DNA, 80 bp, Artificial Sequence
  ENSG00000272686_0 (sequence is synthesized)
ggcagcgggggcgggcgagaccacaggacggagggcgcgggggagcgcgccggaaacgcgcggctgcggcccgggagaaa

SEQ ID NO: 965735 - DNA, 120 bp, Artificial Sequence
  ENSG00000272686_1 (sequence is synthesized)
gccacgcccccttccggccgaggcgcggaccgcgcggagctaagtggaatcccggttggcttggggcgcaggcttccaacttcgtactctggcctctggcgtctcggctcgtcggttggg

SEQ ID NO: 965736 - DNA, 120 bp, Artificial Sequence
  ENSG00000272686_2 (sequence is synthesized)
tacccgaacccagctactgctgcttgaagagaagatggatggggactcctcgccgtcgctgcgccgccggccttccctgggcggacgtacacctttgcgaagcgtcagtgaggacccagg

SEQ ID NO: 965737 - DNA, 120 bp, Artificial Sequence
  ENSG00000272686_3 (sequence is synthesized)
gcccctccttggaatagctcttatttctcaagcgctgcagcgtgaagctcgctctgcgggtccgagaggcctgcgatctgaagactgaaaactgggaagagacgctctaccctgtgctcc

SEQ ID NO: 965738 - DNA, 120 bp, Artificial Sequence
  ENSG00000272686_4 (sequence is synthesized)
tcgccggcttcgataggagccgcaggtgcctgggattttctcaaactttgtcccaaacttcagctgtgggagtggaggaacaaacaggcctctcccagaattgtgaaagagatcgccctg

SEQ ID NO: 965739 - DNA, 120 bp, Artificial Sequence
  ENSG00000272686_5 (sequence is synthesized)
gtggatgaaacaaaaacaaatgcacttgacttccaccgcctgcctggcgtgtcacgcgggtttaatgtatgtgtcacatttaaattcaaagtattttcttctaagggcctggacacattt

SEQ ID NO: 965740 - DNA, 120 bp, Artificial Sequence
  ENSG00000272686_6 (sequence is synthesized)
cttttctccctgtatcgtgaattggaaaataccttaggatattaaaagttatctaagataaccccctttcttctgtaagttaaatactaaacggcttaagacgaaattttggaatataga

SEQ ID NO: 965741 - DNA, 120 bp, Artificial Sequence
  ENSG00000272686_7 (sequence is synthesized)
gatgatgatgcagactgcagtgaattatcaaatatgcatctcactgttctccacattaaacatatttttgttgcgtaaattcatgttaagacgtctataacaattacactttggtaaaat

SEQ ID NO: 965742 - DNA, 120 bp, Artificial Sequence
  ENSG00000272686_8 (sequence is synthesized)
tggtaaaccattatcatgcactttgaaaatataataaaatattataattaaagctgccattaatgaaataggctgagcaacaataaatttacaaaggaaaataaaagtggatagccttgg

SEQ ID NO: 965743 - DNA, 120 bp, Artificial Sequence
  ENSG00000272686_9 (sequence is synthesized)
gagttctcacataaaatatggagatttcaaagttaaacttgattaattatgttagggtaaaaagtgaattaaagcaacaggactatttataaaataattagatttagaaagcagtcgtag

SEQ ID NO: 965744 - DNA, 120 bp, Artificial Sequence
  ENSG00000272686_10 (sequence is synthesized)
aaatataagcctggagttgcctctgaattacatatttaacaaacctagaagctaaatcagtttgtcttttatcaaaactgcaactcctctaagttgaaagcacagtgacaagagaaagca

SEQ ID NO: 965745 - DNA, 120 bp, Artificial Sequence
  ENSG00000272686_11 (sequence is synthesized)
ttacaaattcttgagaaataatagaaattaaagctcttttcaaacctgtgaacaagtatagtaccagaagtataagattcagataggcccaagttgtagttcttgttatgagtcttacaa

SEQ ID NO: 965746 - DNA, 120 bp, Artificial Sequence
  ENSG00000272686_12 (sequence is synthesized)
ccctatggactttggacaaattacttctctgcgtctgtttcctcatctgtaaaatgaaaataatttctgtttcatacaggtatagtctaaatagggataattacacctacttcaaagttg

SEQ ID NO: 965747 - DNA, 120 bp, Artificial Sequence
  ENSG00000272686_13 (sequence is synthesized)
taaaatacacaattacaactagataggaggtataagttctagtgttctgtagcactgtaggatgactatagttaacaatattgtatagtttcaaatagctagaagaaggatattgcatgt

SEQ ID NO: 965748 - DNA, 120 bp, Artificial Sequence
  ENSG00000272686_14 (sequence is synthesized)
tcccaaaacaaagacataagtttttgagatgatagatatgctaattaccctaatcactatatgttatatgtattgcaacatcactatgtacccccataaatatgtacagttattgtgtat

SEQ ID NO: 965749 - DNA, 120 bp, Artificial Sequence
  ENSG00000272686_15 (sequence is synthesized)
taaaatttttttaaactaaaattataagacattaaaaaaaggtatcacatgtaaagtacctgatacatagtggttactcaagtattagttgtcggccattgacagtccttgcctatggtc

SEQ ID NO: 965750 - DNA, 120 bp, Artificial Sequence
  ENSG00000272686_16 (sequence is synthesized)
ttttctgctttccctgagctaagggatcaagacttaatatatgtattcttacctttgttctaattctgactcttcaaaaactgtccttcaaatatacaattgtacatattttttcaaaaa

SEQ ID NO: 965751 - DNA, 120 bp, Artificial Sequence
  ENSG00000226861_0 (sequence is synthesized)
aatgccaacagcagcctcctctgctcatctctcccgctgcccccatcagaaaatccataaccacaacctttcccagcctttaagctgcctctggagagtcagggaagccaatggcatcat

SEQ ID NO: 965752 - DNA, 120 bp, Artificial Sequence
  ENSG00000226861_1 (sequence is synthesized)
tgttcacgcggcaactgtgctgcacctcgttgtgcaaaagcttggtgggcgtccgtgacttcaggagcccgtgagaaggggaagccgtcggtattgtgcctcatgccaaagaaccggact

SEQ ID NO: 965753 - DNA, 120 bp, Artificial Sequence
  ENSG00000226861_2 (sequence is synthesized)
acccaccagggacagttacttgtcttttacaatatccaggaagtgcccttcatcacagacgctgaagtttgactgtggccttatgcggtacattgtactgacatattttctcatgggaac

SEQ ID NO: 965754 - DNA, 120 bp, Artificial Sequence
  ENSG00000226861_3 (sequence is synthesized)
ttaagagacaaccaaatagagttttaatgccctgtaagataataacgaaagacatttatgaaaaaaaaaattccagttagtttgaaagccagggcccgcactccatattttgacagcaga

SEQ ID NO: 965755 - DNA, 120 bp, Artificial Sequence
  ENSG00000226861_4 (sequence is synthesized)
tggatggctagcttgactgatcctggtttactttctgacttgaatttgtcccctagtccagtgaaatcataagggctcccttcaatctggttaatgttcagaaccaatgtttgagtttta

SEQ ID NO: 965756 - DNA, 120 bp, Artificial Sequence
  ENSG00000226861_5 (sequence is synthesized)
gactaattaaggggcaaccactgacattttttctataatgtgaagactggtgccagcagtaactcagtgagatttaacataaaagccagataaaacaattaaagtggaagaatatttgat

SEQ ID NO: 965757 - DNA, 120 bp, Artificial Sequence
  ENSG00000226861_6 (sequence is synthesized)
taagtggatcactgatttatagtgaggtaaattgaaattgaaaggagagtgaactttttatggcaatcatatattacgttcattatcagagactctggatcctttgtgcttttgtgattt

SEQ ID NO: 965758 - DNA, 81 bp, Artificial Sequence
  ENSG00000272682_0 (sequence is synthesized)
gctgcatatctgccttcttcccagactctaccaatgccttctccctctttttgtgcattctacttcttcacctcctgaggg

SEQ ID NO: 965759 - DNA, 120 bp, Artificial Sequence
  ENSG00000272682_1 (sequence is synthesized)
tccctctttttgtgcattctacttcttcacctcctgagggtctctctggttcttgggggacatgccagaagaggcaggtgtcaacattgcagaggcagaactgcccgggcatggagcggg

SEQ ID NO: 965760 - DNA, 120 bp, Artificial Sequence
  ENSG00000272682_2 (sequence is synthesized)
ccgcttcatccaggatgcacacacagggccggcactcctggtatgtttgacagagagctttggattcgacttggagacctccagcgttgctcctagggttgcagtcctgtgagcaagcaa

SEQ ID NO: 965761 - DNA, 120 bp, Artificial Sequence
  ENSG00000272682_3 (sequence is synthesized)
tgtcggttatgaagttcaaggggagagagaagaaattgatgaaaacagcggctcatccgggaccgtcttccttctctggtttgtgccttgacttcttcagagcttgggcctgaaggcgtg

SEQ ID NO: 965762 - DNA, 120 bp, Artificial Sequence
  ENSG00000272682_4 (sequence is synthesized)
agctccatctcattcgccgctggcacactgggccacaaacggctcactaggttcttggagtgtgggaagtccacgcggtgctccttctggatacgcagcatcttcctgatgttggagtcg

SEQ ID NO: 965763 - DNA, 120 bp, Artificial Sequence
  ENSG00000272682_5 (sequence is synthesized)
taaggcatggagctgcagaccatgatgtagaggatcatgcccaggctccagatgtcatacaccatgggctggtaggggatgccctgcagcagctcgggggctgcatatgccaccaacccg

SEQ ID NO: 965764 - DNA, 120 bp, Artificial Sequence
  ENSG00000272682_6 (sequence is synthesized)
cttgatgttgaagtccttgtcgaggagaaggttctaacacttgaggttctggtgcatgatgtccaggtcgtggcagtatttaatggctgaggagagttggtggaacatcttgcacgccat

SEQ ID NO: 965765 - DNA, 120 bp, Artificial Sequence
  ENSG00000272682_7 (sequence is synthesized)
gtccttgggcagggctccctggcactcaatgaactagttttttttctgcccctggctgggctcccagggcagatctggggctgggggctaaaggcggggactggatgccaccctgagcac

SEQ ID NO: 965766 - DNA, 120 bp, Artificial Sequence
  ENSG00000272682_8 (sequence is synthesized)
tggtggctgctctgaggacagtacaagcagcaggggcagcactggagagtgtggccattgttttttctggcagtggagcccctctgctgtgccaggctctgtgtccagcacttgttccgg

SEQ ID NO: 965767 - DNA, 120 bp, Artificial Sequence
  ENSG00000272682_9 (sequence is synthesized)
gctatgccctaggggagtaggagtcacatgactatcctagccttggatttgactttggcctcatccacctagagggagtgagcacccctttctcacaggagccaagtggaaccctgggcc

SEQ ID NO: 965768 - DNA, 120 bp, Artificial Sequence
  ENSG00000272682_10 (sequence is synthesized)
cctcaggatgacttggtagggcgggctggttgtcactcatgttgggttgggtccccacctgccgtggcccttcccccttttctctgctccttcaccttcttccctaacgctgactgccca

SEQ ID NO: 965769 - DNA, 120 bp, Artificial Sequence
  ENSG00000272682_11 (sequence is synthesized)
ctgccaggcctttgtgcattcttggttctcctccttccagacagcctccttctccttcccgctggggacaccccaactactgtctcctggaaaccaaaaataaaactctaaccccccagc

SEQ ID NO: 965770 - DNA, 120 bp, Artificial Sequence; identical to SEQ ID NO: 863901
  ENSG00000272681_0 (sequence is synthesized)

SEQ ID NO: 965771 - DNA, 120 bp, Artificial Sequence; identical to SEQ ID NO: 863902
  ENSG00000272681_1 (sequence is synthesized)

SEQ ID NO: 965772 - DNA, 120 bp, Artificial Sequence; identical to SEQ ID NO: 863903
  ENSG00000272681_2 (sequence is synthesized)

SEQ ID NO: 965773 - DNA, 120 bp, Artificial Sequence; identical to SEQ ID NO: 863904
  ENSG00000272681_3 (sequence is synthesized)

SEQ ID NO: 965774 - DNA, 120 bp, Artificial Sequence
  ENSG00000272689_0 (sequence is synthesized)
gaattgcttcaacaattttatgttgtaatccatgtgatagaatactgatatattttttaaaaaagaggttagctccacagaagtgacaggaaactgtccacaatgtgtcctgaggccaaa

SEQ ID NO: 965775 - DNA, 120 bp, Artificial Sequence
  ENSG00000272689_1 (sequence is synthesized)
actcccagattctctgatgataccactctggtgcttgtcctaatgggaaagtttcctgaaatcctgcgatgagtttgacagtttcaaaattccttcaaacatacagtgaatgacagacaa

SEQ ID NO: 965776 - DNA, 120 bp, Artificial Sequence
  ENSG00000272688_0 (sequence is synthesized)
taacaaggacagcctgacttggatcccactatgcaggaaggaaggcgactcttccccgcacctcttgctacgattaggacttgcgacttggtgaaaacaggaatcaaaacttgggcctat

SEQ ID NO: 965777 - DNA, 120 bp, Artificial Sequence
  ENSG00000272688_1 (sequence is synthesized)
ttctcctgaggtctgcttgcctagaacaattcgtaacgatgaatcttattaaaaagagaaagtcctccccgactttatctttttccgcccagaatccgataaggaagacttgttctggcc

SEQ ID NO: 965778 - DNA, 120 bp, Artificial Sequence
  ENSG00000272688_2 (sequence is synthesized)
ccagtgtggctcccgtggccagaacccttctgaagtttgggttgccctgtggtcttcgccttcaaagcaggccgccacttgaatccttctggaacggacagtgttgctgtaaacgccgcg

SEQ ID NO: 965779 - DNA, 120 bp, Artificial Sequence
  ENSG00000272688_3 (sequence is synthesized)
gaatagtatcttctaagtattcgtagcttctttcttgagggatctcgggaacgttccgtgtattaaccactaacgtattccaaagttaacttcgtggtaaagtcgctggggaaaaaaata

SEQ ID NO: 965780 - DNA, 120 bp, Artificial Sequence
  ENSG00000272688_4 (sequence is synthesized)
actgctccagttccacaggtgattgaaacaaaagtgatctgtttcccaaacttccttgatggtaaagaatgacttggggtactaattaaaaataaaaataattgcgtcatttccaaccta

SEQ ID NO: 965781 - DNA, 120 bp, Artificial Sequence
  ENSG00000271334_0 (sequence is synthesized)
gacatcatcaagtttcctgaaggctatagccggagccacgaaaaagttcggaaacaaattgcttggtctttgaggaatcgccacactgccttccacatggaaaggacacaaatggttgaa

SEQ ID NO: 965782 - DNA, 120 bp, Artificial Sequence
  ENSG00000271334_1 (sequence is synthesized)
ctgatttacactcccaccaactgtgtataagtgtgcctttttctccacaaccagctttgttaacagcgtgaagactagaagaaaaagaatggaagaaagaagtgaaagagaaacaaatag

SEQ ID NO: 965783 - DNA, 120 bp, Artificial Sequence
  ENSG00000271334_2 (sequence is synthesized)
agtcaggatgaatgcctgacaaaaaactctgctgcagtgacactttgacatgaagcagattcaaactttctatgactgaacaggacattttccatttattgctcctttgatacccaagct

SEQ ID NO: 965784 - DNA, 120 bp, Artificial Sequence
  ENSG00000271334_3 (sequence is synthesized)
cctcaatgggggtattcttcaatgagacacttttaccagtgaccatattcttgcttgttggtttcttttttttttaaagtatgttgctgctgtacttttaagaaagttgtgttttatctt

SEQ ID NO: 965785 - DNA, 120 bp, Artificial Sequence
  ENSG00000271334_4 (sequence is synthesized)
agtactttgatattcataaatggtataaagcataattttaccacatagctttaatggaatactttttacaaacaaaataaaacttgaccttcttccaccctatctccacatcggaactaa

SEQ ID NO: 965786 - DNA, 120 bp, Artificial Sequence
  ENSG00000271335_0 (sequence is synthesized)
ggttcggggcggcgcagccccgcgcggttgtgggatcgctcccgggggccgctcctctctcgggcactggggtcgcgggagacgtcgtcgggagctcggtttctggaggcccttccccac

SEQ ID NO: 965787 - DNA, 120 bp, Artificial Sequence
  ENSG00000271335_1 (sequence is synthesized)
cgggagctcggtttctggaggcccttccccacccggcctctgcctcctccactcccccgggctggacggaacggggcccagcgcgggatgcgaggctggagggcagtggcgcaatctcgg

SEQ ID NO: 965788 - DNA, 120 bp, Artificial Sequence
  ENSG00000271335_2 (sequence is synthesized)
caggcgcgcgccaccacgcctggctaagaaataaccatggatatgggtagagacagagccatatggaatgcacactgcagtggtgaacacatggcccagctctgccatcaaggagaagga

SEQ ID NO: 965789 - DNA, 120 bp, Artificial Sequence
  ENSG00000271335_3 (sequence is synthesized)
ggcccagctctgccatcaaggagaaggaacatgaatggagctggaggccatcatccttagtgaactaacacaggagcagaaaaccaaataccacatgttctcatgtgtaagtgggagcta

SEQ ID NO: 965790 - DNA, 71 bp, Artificial Sequence
  ENSG00000271335_4 (sequence is synthesized)
accacacccagctaatttttttttttttggtcttgctgtgttgcccgggctggactcaagtgatcttccct

SEQ ID NO: 965791 - DNA, 120 bp, Artificial Sequence
  ENSG00000271335_5 (sequence is synthesized)
caacagacactgaagcctccttgagggaggagggtaagaggaaggagaagatcagaaaagataactaccaggtactatggtagcttagtacctgggtgatgaaataatctgtacacccaa

SEQ ID NO: 965792 - DNA, 88 bp, Artificial Sequence
  ENSG00000271335_6 (sequence is synthesized)
cccaaccctcatgacagtccctgaaactaaaagttttttaaaaagttatttaatatatatatatttttttgagacggagttttgctct

SEQ ID NO: 965793 - DNA, 120 bp, Artificial Sequence
  ENSG00000271335_7 (sequence is synthesized)
ttaatattaatgggacaatactcattgcaagaatcagacttcaattgctagcataagtaaatgacaggcaggagatattgaaaatgcaatcttatagacattcaaggagaggacgcagga

SEQ ID NO: 965794 - DNA, 120 bp, Artificial Sequence
  ENSG00000271335_8 (sequence is synthesized)
acgcaggacatttctgtgtcataaatgtactatggaaaataaaaatgagaaaaatggaaataaaatacaagaaaaggttatgataaatttcatattattttaccacaataaaaaaatttt

SEQ ID NO: 965795 - DNA, 120 bp, Artificial Sequence
  ENSG00000236724_0 (sequence is synthesized)
aacagaggcaaagatatacaaaccaaaagcggaagaacttctttctcctctggatgtctgggagtaaccaggtaggtcaactcaagccagatgacaagtggagagaggtgacaagaggtg

SEQ ID NO: 965796 - DNA, 120 bp, Artificial Sequence
  ENSG00000236724_1 (sequence is synthesized)
tggacagctcggagaggactgaagcatccaacctccttccaaagctacctgtactgatgcagccatacacttgcccttgggcaagagaagttcattacagcctgctccacaaaaagggga

SEQ ID NO: 965797 - DNA, 120 bp, Artificial Sequence
  ENSG00000236720_0 (sequence is synthesized)
agaattctaaagctcagagattctccatgctgcatcccccataccatctatatctaaggctggggtgtaaagtaagaaatggttttcaacaagcatgctagggccaccacaactaatccc

SEQ ID NO: 965798 - DNA, 120 bp, Artificial Sequence
  ENSG00000236720_1 (sequence is synthesized)
actgccctgcaagcatctccagatgattttgatgcagttggtccacaggtcacagcctgaaaaactctaagaccgtcagctgatcaactacaataatattctctccagcattccagacaa

SEQ ID NO: 965799 - DNA, 120 bp, Artificial Sequence
  ENSG00000236720_2 (sequence is synthesized)
tggctttccaacccctttaaggactggggtttactacctactcaagcagtccatttgtcttcagtcagatgactattaaaaagttctttcatatactgggtccaaacaggactttctgaa

SEQ ID NO: 965800 - DNA, 120 bp, Artificial Sequence
  ENSG00000236720_3 (sequence is synthesized)
ctttctggctattgttaccagttctcttttgtgcagctcagagtatttcgaggccaatggcctgagctacaagtgattgaaagggcaacttaggttcaggtgattcctcgaaagatttgg

SEQ ID NO: 965801 - DNA, 120 bp, Artificial Sequence
  ENSG00000236720_4 (sequence is synthesized)
tcaatggcactgactgactaggagagcctcaagaatactttataaagcccatggttgcgcagtgaatctgggaacctgataagaaaataggttgctacggttctgcttattagagtggac

SEQ ID NO: 965802 - DNA, 120 bp, Artificial Sequence
  ENSG00000236720_5 (sequence is synthesized)
tcctagacctaatgaaaatgctaaattataaatccagaataagaactggaataaagttctctagaattactagaaacagcaaaagaaaactggatgaagacaatattggagcttttctac

SEQ ID NO: 965803 - DNA, 120 bp, Artificial Sequence
  ENSG00000236720_6 (sequence is synthesized)
tttagctgacaagctggcactgtactggatactgagaaaaaagtggtaaacaaaactaacatggtctctactctcctggaattaaaagtctagtgagggatgacacagtaaaccataaag

SEQ ID NO: 965804 - DNA, 120 bp, Artificial Sequence
  ENSG00000236720_7 (sequence is synthesized)
aaaatattaaacggggtagtgagggctgtcctctcaacttggaagaccatcccagctgagaggaatcagtgtcaccagaaggaccacaaggagacaaacatgagttggaatccttctttt

SEQ ID NO: 965805 - DNA, 120 bp, Artificial Sequence
  ENSG00000236720_8 (sequence is synthesized)
accacttcctagtggtgggtcttagggaatttacttaacttcctggacctcagttatatatcctgtaaaacagagaaaattatacctacctttaaataaagaattgctgtggaaatgaaa

SEQ ID NO: 965806 - DNA, 120 bp, Artificial Sequence
  ENSG00000236720_9 (sequence is synthesized)
gcttcctgcatatcctgactctcttctggctgttctcttccaacctacaaagatgtaaggtgaatttaattcaggaccactggagaagagcagaagcagatccctcctatctctccatga

SEQ ID NO: 965807 - DNA, 120 bp, Artificial Sequence
  ENSG00000236720_10 (sequence is synthesized)
cctcctcagcaagcaggccatgtcctccagcccactccctgtcccactgcctgcccatacatactccaggagaacagtacctgtttacggtctcttggctctctggagtgtggagtgctc

SEQ ID NO: 965808 - DNA, 120 bp, Artificial Sequence
  ENSG00000236720_11 (sequence is synthesized)
tcagagttgagaggggaagacactggcatgccatgagcaggactgccttggagccaactcacagctgagcttcctacctggtcttccagggaaggtggagcttcaagaagcttgacctcc

SEQ ID NO: 965809 - DNA, 120 bp, Artificial Sequence
  ENSG00000236720_12 (sequence is synthesized)
tcatagcaccagcgtaaagggcagttaactgtttgggcatcaaaataggcattgtgtgagttgttgtgtatccccagaccaacgtgacaatagaaacaaattattcctaaggttgggaaa

SEQ ID NO: 965810 - DNA, 120 bp, Artificial Sequence
  ENSG00000236720_13 (sequence is synthesized)
atattaaacgaaaatgcaggagtaccttccatttgggaaacagctgtctttctactataaggagaaacctggtgcttttctgcctggtactgtcccagcacggcacatgtgatattcctt

SEQ ID NO: 965811 - DNA, 120 bp, Artificial Sequence
  ENSG00000236720_14 (sequence is synthesized)
ggattgagagcagagtcatgataatagccactgctggtggatgacccaacacagccagcctcagtcatctcacccttggcaaaacaatctttctagagccaaatacttgagggatctccc

SEQ ID NO: 965812 - DNA, 120 bp, Artificial Sequence
  ENSG00000236723_0 (sequence is synthesized)
gtcatgaacagcatacccaacaccaaagccatcagagaccacaggggcaaagcccccaaggttcactgctgggctgctcagtgtgctcgtggacaggacattgtggtttatctgcccgta

SEQ ID NO: 965813 - DNA, 120 bp, Artificial Sequence
  ENSG00000236723_1 (sequence is synthesized)
tgcagggtccaggtagagctcaggcaagatgatccctttggctgctgccagatgccgcagagcaaacaagtgtcggtcaaagccctggcctgtgagaaacaaaatggaaaaccagagtct

SEQ ID NO: 965814 - DNA, 120 bp, Artificial Sequence
  ENSG00000236723_2 (sequence is synthesized)
caggatggaaaaggacctcaggaaaacctcccaactcaccacatggaccaggaggtgtctggccttgtcatcagtgaagagttcatcccgactgggtttgggtaaacgagttgagttgaa

SEQ ID NO: 965815 - DNA, 120 bp, Artificial Sequence
  ENSG00000236723_3 (sequence is synthesized)
agtcatgttggttgcccgggtgagctggtcattatactcagattttgggtcaggattgaaagccataaatggattaaagttcagaacaacggagtctcgagcagataggtacatatcaaa

SEQ ID NO: 965816 - DNA, 120 bp, Artificial Sequence
  ENSG00000236723_4 (sequence is synthesized)
aaaataaaaagaaaaaaataacataaaatgttaatgctgtccctaaaaataaaatttgaagaagaaaaaaaattcaagcatagacaaaggaaatggcatcaacctccagagagaagaatt

SEQ ID NO: 965817 - DNA, 120 bp, Artificial Sequence
  ENSG00000236723_5 (sequence is synthesized)
gagagaagaattccctgaatgtttttgctctgcaataattcaagacatacaaatggggtcatacaatatatggtgttttgcatttagcttctatcacttacaataatgtttttgttttgt

SEQ ID NO: 965818 - DNA, 120 bp, Artificial Sequence
  ENSG00000236723_6 (sequence is synthesized)
tgcccggcctcccagttttcatgatgaggaagtgatggtagcttttcatctgcccagaagttaacttttgatggatttgccttctaaggcatcaaacatgtcttctaaggccttctccac

SEQ ID NO: 965819 - DNA, 120 bp, Artificial Sequence
  ENSG00000270681_0 (sequence is synthesized)
agccaaacaagggaattattatcaagttgaagaagaatgtgtccttgctaagggaggatgaaaatctcaattaaaatatcccccagtatgttttctttttgcttttttaagctgagagag

SEQ ID NO: 965820 - DNA, 120 bp, Artificial Sequence
  ENSG00000270681_1 (sequence is synthesized)
taaaacaaaagggaactgtttatttattttgaaacagtatctattctaccccaaagtagtggtttttgacctctttccctttcaaggatagctttttccttaaaactgtgatcaagacag

SEQ ID NO: 965821 - DNA, 120 bp, Artificial Sequence
  ENSG00000270681_2 (sequence is synthesized)
agtcttaaaagttgtgtctttattaggatgggaaaagaagaaagttctatgatttatgctcttgccttttgtaatgaaaggagctaatgactttcaacagaagtataattcacaaaaagt

SEQ ID NO: 965822 - DNA, 120 bp, Artificial Sequence
  ENSG00000270681_3 (sequence is synthesized)
aaaatccatttcatttattaccacttaactaagtgctttttctaatttgaaagcaatgctacctcccatgcctggtctgcattttgtatttaatctgaatggtttattcaacagtagttc

SEQ ID NO: 965823 - DNA, 120 bp, Artificial Sequence
  ENSG00000270681_4 (sequence is synthesized)
tatccatctagccaaatgccgagattggccagaggataaggcaaagctgaagagcgacctcttcttattgactagcaattgttattcttagtttctttatatcaagagacaggcttatcc

SEQ ID NO: 965824 - DNA, 120 bp, Artificial Sequence
  ENSG00000270681_5 (sequence is synthesized)
tcatcatcatcaaatcccactgaaggatattatttggagttataacttaacactcttcaacactggcaagcctgtgaaataaataaaggcagatttttgtgccctttcttgtctcttcac

SEQ ID NO: 965825 - DNA, 120 bp, Artificial Sequence
  ENSG00000270681_6 (sequence is synthesized)
ctcctctaataactcttgtccccttagagacgtcctgacacatctatacctctgcccttcccctggccatgatgcaccaggctgattgcagcgcactgtgaatgatggtccactttctcc

SEQ ID NO: 965826 - DNA, 120 bp, Artificial Sequence
  ENSG00000270681_7 (sequence is synthesized)
atttcaaccctgcagcacctttgctgagatcttttctaaatctcagctgctctttcaaccaaaatgcacctgcagaaacaaaactttcattctctcaagttaggtaaactgaaatataac

SEQ ID NO: 965827 - DNA, 120 bp, Artificial Sequence
  ENSG00000270681_8 (sequence is synthesized)
ttaagactctaatggctaatgtagcttactatattagcttactaagaagaccctaacattttttcatggactgcttaatgcttttctctaaataaatgaacaatatggaaatttcatgaa

SEQ ID NO: 965828 - DNA, 120 bp, Artificial Sequence
  ENSG00000270685_0 (sequence is synthesized)
atggactggaccgggaggatcctcctcttggtggcagcagccacagggaagagaatcctaagtccaatcggtgcagtctggggctgaggtgaggaaacctgggtcctcagtgaaggtgat

SEQ ID NO: 965829 - DNA, 120 bp, Artificial Sequence
  ENSG00000270685_1 (sequence is synthesized)
tatatgcacagaattccagggcagagtcaccacgacctgggacatgtctacagacacagcctacatggagctgagcagcctgagatctgaggacacagccgtatattaatgtgcaagaca

SEQ ID NO: 965830 - DNA, 120 bp, Artificial Sequence
  ENSG00000232401_0 (sequence is synthesized)
agatgggggcccctgcggtgggcagaataacggccactgcaaagatgccaaatcttatccccagagcttccgcagagatcctgcagatgtgattcgagtcttccagcaacaccacctcac

SEQ ID NO: 965831 - DNA, 120 bp, Artificial Sequence
  ENSG00000232401_1 (sequence is synthesized)
tctgctttgcacaatcactccacctccccacatgttgcggagattctcctggggattcacactcttcctacttgcagctgtgacacgggaaacatcctccaccaggtcttctctcacagt

SEQ ID NO: 965832 - DNA, 120 bp, Artificial Sequence
  ENSG00000232401_2 (sequence is synthesized)
gtggcctctgcgcacaggttatccacctgtagacctggacgggaccctcgaggctccctactctgaccatctggttttatagttgaggaaccagaagccgaggcaggtaacttggtgcag

SEQ ID NO: 965833 - DNA, 120 bp, Artificial Sequence
  ENSG00000232401_3 (sequence is synthesized)
cctaaaggcctccatccctccagtgcccacaacttaggtgcccacgacaacaacactggcctaccgcaaagacccagcccagaggaacaaggtgccactgtatgtctgaaaagggggccc

SEQ ID NO: 965834 - DNA, 120 bp, Artificial Sequence
  ENSG00000232401_4 (sequence is synthesized)
ttcaggatacaagccatctgcgcataggaagagggtccagaggctcatctggaatccctcctcactcactggacggaggacctgaccccgttcccatcattggttctgaatccatcagcc

SEQ ID NO: 965835 - DNA, 120 bp, Artificial Sequence
  ENSG00000232401_5 (sequence is synthesized)
cagcaagacaggtgtctccagcaagttctgtaaaatacaaccatagccgggcctggagtcagcccccaataaagggttcaccatggagtcaaagcttccttcacattgggaagagcctga

SEQ ID NO: 965836 - DNA, 120 bp, Artificial Sequence
  ENSG00000232401_6 (sequence is synthesized)
tgatgccgccttggtgccacccgtgcaggccgtgttccacttctgtcatgggctggagagaaaagagcgacatggacctgttcatgaaaggctcttcccgcaacaccaagcctggggcct

SEQ ID NO: 965837 - DNA, 120 bp, Artificial Sequence
  ENSG00000232401_7 (sequence is synthesized)
gcagggccgccatgaagaaaggtggctcctgcttggcagagagaaaaggggagggagggcaggtgagtcaccagcattgggcccctcagcccaggctgccaaggcagcccagtggaacct

SEQ ID NO: 965838 - DNA, 120 bp, Artificial Sequence
  ENSG00000232401_8 (sequence is synthesized)
gtccccatacagcatgtttttagtttgaatggttttacagtgttggagctgtaactttacaaatttgctttgccttcataactctgtaagagctataagcaaacgtagctttaatcagca

SEQ ID NO: 965839 - DNA, 120 bp, Artificial Sequence
  ENSG00000232401_9 (sequence is synthesized)
agggaggaagggaggcggaggaggagatgcaaggatgaagcgaaggttggagtgatgtggtctgctgcggggaccctgaggcgtgcaggcggcctctggaagctgaaaagacaggaaggc

SEQ ID NO: 965840 - DNA, 120 bp, Artificial Sequence
  ENSG00000232401_10 (sequence is synthesized)
agcttctcccctgagcctccagaagaacccggccctgctgacactggcccaggagccccttcccccatcagggcctggagagggaagaaatgactgttcacagattttaccccgcaagac

SEQ ID NO: 965841 - DNA, 120 bp, Artificial Sequence
  ENSG00000232401_11 (sequence is synthesized)
ccatttcagcattctgattttgagaaccataagacagtgtgtgttgtttaagcctccaagtctgtggatattcattacagcagccttgggaaactgacaccacctccccctaatcctccc

SEQ ID NO: 965842 - DNA, 120 bp, Artificial Sequence
  ENSG00000232401_12 (sequence is synthesized)
agtcctgggggtagggagtggggcaggcagcttcactgggccctttatctgcctgattctcatctttcttacacaatagtctactcattattccttccctaagggccaggacacaggcct

SEQ ID NO: 965843 - DNA, 120 bp, Artificial Sequence
  ENSG00000232406_0 (sequence is synthesized)
aaaagcaacgacgatggctggcagctgagggagagaccagcatccccagaactcccttttggtccttgtccagacttcaaggtctccatggaccactttgagccatatacgtctgccagt

SEQ ID NO: 965844 - DNA, 120 bp, Artificial Sequence
  ENSG00000232406_1 (sequence is synthesized)
cagtggcctctgcacccacgtcagaagcagcagaaatccaaagagcccttggcctctggaggcggcagcaggagtgctctccgaaaagagactgggccagccggtgggagcccagcgccc

SEQ ID NO: 965845 - DNA, 120 bp, Artificial Sequence
  ENSG00000232406_2 (sequence is synthesized)
acccaccgctcatcctacagcaggaccaaccccccgccaacccccagcctccggatcctctctccaggccttggaggaggctgcagaccggtgtctttagacaaagcttccggtgccttc

SEQ ID NO: 965846 - DNA, 120 bp, Artificial Sequence
  ENSG00000232406_3 (sequence is synthesized)
actccccctgctcaccaggttcagcagcggatgaagagcagagagcagaatgaagccagcttctcccagtcctagagaacaggcccaccctccagacagaagatgcacagctgctaagag

SEQ ID NO: 965847 - DNA, 120 bp, Artificial Sequence
  ENSG00000232406_4 (sequence is synthesized)
attcttgactgcctgccttcaagtattttgattccaaataggctcagtctcccctgctggctgagccttcccaatcgtgggctcccgtgggcaggaggctctgggctgcatggccaaggc

SEQ ID NO: 965848 - DNA, 120 bp, Artificial Sequence
  ENSG00000232406_5 (sequence is synthesized)
tctctctgttcctcttagttcaactctccttccctggccatctccctttccttccttcccccaggctgaagccctccccactcctcccctggggcagggccactttcccaccctcctcaa

SEQ ID NO: 965849 - DNA, 120 bp, Artificial Sequence
  ENSG00000232406_6 (sequence is synthesized)
ccagatggagcctctcactttcccaggagaatccaggctacactccaaagaccgaggcaggatgttcccagacatcgttctgcatttatacccaaagggctcaattcacttcaggtcatt

SEQ ID NO: 965850 - DNA, 120 bp, Artificial Sequence
  ENSG00000232406_7 (sequence is synthesized)
gagaccacacagaaaatgaggcttctgctattttaattattttgattattattattattcactaacatttctattagcactttccagtttgcaaaatacttttgtgtgtcatctgcacag

SEQ ID NO: 965851 - DNA, 69 bp, Artificial Sequence
  ENSG00000232406_8 (sequence is synthesized)
tttccagtttgcaaaatacttttgtgtgtcatctgcacagcatcttgtgagataatatcatccctcatc

SEQ ID NO: 965852 - DNA, 61 bp, Artificial Sequence
  ENSG00000232406_9 (sequence is synthesized)
cttataaataggcaggctgaggctcagagtgggagtgacttgcccaaggttacgcttacac

SEQ ID NO: 965853 - DNA, 120 bp, Artificial Sequence
  ENSG00000232406_10 (sequence is synthesized)
tacatactttccactttacccaacaataaccctttccagaaaaatcaggctggaggaagcaggagagacacttaagaatgtatggcccccataggcatcagttgcaattactacttgagt

SEQ ID NO: 965854 - DNA, 120 bp, Artificial Sequence
  ENSG00000232406_11 (sequence is synthesized)
tacttgactgttttcattccccaggcagggaaactgaggcacagggataggactcaacctaggaccaagtctcatggagaaagaaggaaagaggagcccatccaaaaaaggggttcctca

SEQ ID NO: 965855 - DNA, 120 bp, Artificial Sequence
  ENSG00000232406_12 (sequence is synthesized)
gttccttagctgcaaattctgcttccagccctagcgctaccatttctttttgtattacttaggcaggttatttgacatctctgagcctcaattttctcacctataaaatgggagaatccc

SEQ ID NO: 965856 - DNA, 120 bp, Artificial Sequence
  ENSG00000232406_13 (sequence is synthesized)
tgccccatgtctgtcactgggctgctgtgatgggaggtcagcagatgctggcagaagagaagggacaggacccttcattccctctctgctctgtctaggaggcaggagaaattctttcct

SEQ ID NO: 965857 - DNA, 120 bp, Artificial Sequence
  ENSG00000232406_14 (sequence is synthesized)
cttaaattttaactggatggaacttaatggtgcaaaagtccaggatacaggaaagccaggaggagaacggaagtgattcgctccactggctgggaaagcaagggacacagagtcagccac

SEQ ID NO: 965858 - DNA, 120 bp, Artificial Sequence
  ENSG00000232406_15 (sequence is synthesized)
agacccccaaggtcactgcggggcagagattcaaccaaacacttcaggcagggcccctcctatctcccttttatctttcaaaggaggaaaccaaggttctaagcaaagcagtgacttgcc

SEQ ID NO: 965859 - DNA, 120 bp, Artificial Sequence
  ENSG00000232406_16 (sequence is synthesized)
aaggtcacccacaagtagtcagtggtctcctgactcccagccaccagggcccttgactactgggcaagcagggtggggtggggagcactcccagcccaaggacttaatctttcattcagc

SEQ ID NO: 965860 - DNA, 120 bp, Artificial Sequence
  ENSG00000232406_17 (sequence is synthesized)
aagcagtaatgctcacaccaagccaggccctggacactggggaaggctggaggaattgaatacagcctctgcccttgaattcacaatcaatctagtggaggcacgtaccccagcacatca

SEQ ID NO: 965861 - DNA, 120 bp, Artificial Sequence
  ENSG00000232406_18 (sequence is synthesized)
gaggatactagaaggtgaagcaccaccattttctgagcacttcctctgtgcctggcactggacacacattcatttgtttaatcctcaaagcaattctctggcactgaaattattaatccc

SEQ ID NO: 965862 - DNA, 120 bp, Artificial Sequence
  ENSG00000232406_19 (sequence is synthesized)
tttcacagctgaagtaactgaggctcagaagggttagcgaccccaaagttcatccagctaataaatggcagggtcggaatatgactgacaggtatgtctggtgccaaactctgagcttca

SEQ ID NO: 965863 - DNA, 120 bp, Artificial Sequence
  ENSG00000232406_20 (sequence is synthesized)
acccttataaactccctgtttttaggtctgtgctaaccaatatggtagctactagccatggctagttgctatggagcacttgaaatgtggctcgttcaaataaaaatgtgctgtaaatat

SEQ ID NO: 965864 - DNA, 120 bp, Artificial Sequence
  ENSG00000232406_21 (sequence is synthesized)
atcagaaaaggcttcctggaggagaagacactaagccaagctgggttaaagccaagccccctgtacatgtctgggcatcccagaggctctcacagaccgctccagtggcttggacaactg

SEQ ID NO: 965865 - DNA, 120 bp, Artificial Sequence
  ENSG00000232406_22 (sequence is synthesized)
attgccatctttggctaaaaacaatgctggtctccacagagcacagtaagaggatctggtctggctctgcttcctcaatggaagaagcttcagtggctcctcattctctgatgaagcaac

SEQ ID NO: 965866 - DNA, 120 bp, Artificial Sequence
  ENSG00000232406_23 (sequence is synthesized)
tcaaatacctcagcccgactctcaagaccttccacagcctggtctcacctggctcttcagcctcattctcagattccatgtgatgagctttgtcaaactgactggttccaggtccccagg

SEQ ID NO: 965867 - DNA, 120 bp, Artificial Sequence
  ENSG00000232406_24 (sequence is synthesized)
gcacagtggctgtgccctcttctctgcctgggagaccctcttcccatttcccatagttattcttctaggcattctccaggaagtcgttcctgaacccttcctctttgcaccaactcctct

SEQ ID NO: 965868 - DNA, 120 bp, Artificial Sequence
  ENSG00000232406_25 (sequence is synthesized)
ggctagaaataacctcttggcctctctgtctccgtcctgccaccctcaagttcagggtcatgtgacctgtccaagggttttaaacttccattgcactatgagctttaggataatggccac

SEQ ID NO: 965869 - DNA, 120 bp, Artificial Sequence
  ENSG00000232406_26 (sequence is synthesized)
ttttcatcatactcccttccctccgcccacacacacccctgaaggcccacatcagtgcccagttcacaatatgtgcatagtatgtgttggccatcttcacaccgaaagccagaggccagg

SEQ ID NO: 965870 - DNA, 120 bp, Artificial Sequence
  ENSG00000232406_27 (sequence is synthesized)
ggacactcctgaggctgagttctgccttatctccacctcggctatgtttcttaataggtccccatgcttccagctgcttcttgggaaatcagcccctctaggaggtctgggagccacatt

SEQ ID NO: 965871 - DNA, 120 bp, Artificial Sequence
  ENSG00000232406_28 (sequence is synthesized)
cctgaggccagaacatgaaaaatctggccatgtacccactagatacagatgtccacccagcctcccgtcgggtgcctgaagtgtcagctgaggtttgcatcatcacagcatctctaattc

SEQ ID NO: 965872 - DNA, 120 bp, Artificial Sequence
  ENSG00000232406_29 (sequence is synthesized)
cttgcagtcagaagagagctggagagtatcatacagaggctgggagcagtgagaggcaacaggagaaaagctgtgtgtgtgtccctggtcccaggtgccagaaggtgctgcagcatcacc

SEQ ID NO: 965873 - DNA, 120 bp, Artificial Sequence
  ENSG00000232406_30 (sequence is synthesized)
atcaattaacatcgccattgcagagagcatctgagtccccacttatgtgctggcactgtgcctagcaacttgcctatattttcaattttaaatctcctacttccctgtaaggcagacatt

SEQ ID NO: 965874 - DNA, 120 bp, Artificial Sequence
  ENSG00000232406_31 (sequence is synthesized)
atagatccaccttgattttacaggggaggaaactgaagttaaatcactcatccaaggtcacactgctagtaggtgcaggggcccaggattcaaccccaggcatgcctgactccaaggcct

SEQ ID NO: 965875 - DNA, 120 bp, Artificial Sequence
  ENSG00000232406_32 (sequence is synthesized)
gtgtttgttctatcattaatcctacacacattgggcttcacacaggtttattctggagatactgacatattctgttcatgtctggggggtagttacacaagtatgtgtaaacttatgatc

SEQ ID NO: 965876 - DNA, 120 bp, Artificial Sequence
  ENSG00000232406_33 (sequence is synthesized)
tttagatactctggggtcctaactcagcccatagggatcagaaaaggcttcctggaggagaagacactaagccaagctgggttaaagccaagccccctgtacatgtctgggcatcccaga

SEQ ID NO: 965877 - DNA, 120 bp, Artificial Sequence
  ENSG00000232408_0 (sequence is synthesized)
tcccatggttacagctgctcgactcacattgatctggccagcacctggaccccttcagaaccccagcacagtactaaggaagtttgtggccacagagctagctggatccccaggagctga

SEQ ID NO: 965878 - DNA, 120 bp, Artificial Sequence
  ENSG00000232408_1 (sequence is synthesized)
gtgctgccaagagagctgacccaagtgaccgaggccacctgcagctgctctctccacttgccatgggagcctcagccgaagatgtgggaatgaagtagtcagggcatttgtttccatgaa

SEQ ID NO: 965879 - DNA, 120 bp, Artificial Sequence
  ENSG00000232408_2 (sequence is synthesized)
ggtccctcagggccttgggtggcaagagctctgcttctgatgcctgtgccaggcccctgccctgggctttcccggagccttcagcccaaacatacctgggtgattagtacttttgtaaat

SEQ ID NO: 965880 - DNA, 120 bp, Artificial Sequence
  ENSG00000232408_3 (sequence is synthesized)
aaatgctctacaaattaccccaactaaagtggaccggctccaaagtccacactgtgacagccatacctttaaagtaacgactggcttcctctttcatctgcattgaccctgtttgctcaa

SEQ ID NO: 965881 - DNA, 120 bp, Artificial Sequence
  ENSG00000232408_4 (sequence is synthesized)
tgtaatgtggtctttaattcaacgattacattttgcatatgtaatattttgacttggttcttttcggtagtttctttgtcttaggtcttattactaataatatttttctgtatccaaaaa

SEQ ID NO: 965882 - DNA, 120 bp, Artificial Sequence
  ENSG00000236896_0 (sequence is synthesized)
tggctttctaactttgaatgaaaaactcagagctgataggaaggctgactgtccccagatgcgtggttaatgaggtgcttctaacagagcgacatgttcagtttactggaaggataagaa

SEQ ID NO: 965883 - DNA, 120 bp, Artificial Sequence
  ENSG00000236896_1 (sequence is synthesized)
ataccttcaacaagggaaacgattcttcatgttaccccacacgacaagtctgcaggatcccagaggccaagcctactgtgtaacagctgacaatgccatcaatttctgtggtgtttatgg

SEQ ID NO: 965884 - DNA, 120 bp, Artificial Sequence
  ENSG00000236896_2 (sequence is synthesized)
catgttccagcacatcacacataaggtatcatgtgactagctgaatgtgattttaagagagtgatctccaaacttttcatttgccttaaggatgacgcctctgtgcgaaaacactttaaa

SEQ ID NO: 965885 - DNA, 120 bp, Artificial Sequence
  ENSG00000236897_0 (sequence is synthesized)
agataaagtctgactatgttgcccaggctgatatctcactcctgggctcaagctatctgcaaaccagagcctcccaaagtgctaggattacagggcatgaaaacaaaaagtaaaatgatg

SEQ ID NO: 965886 - DNA, 120 bp, Artificial Sequence
  ENSG00000236897_1 (sequence is synthesized)
gttggaaaaaaatgaagagtttgactataaaatacattattagaacatgaaaaacatctgtgaaatgtttagtagagtacattgttacttaaagattacttacatgtgtctcctgtctga

SEQ ID NO: 965887 - DNA, 120 bp, Artificial Sequence
  ENSG00000236897_2 (sequence is synthesized)
ccaactgtaaataggtgtaaacttttcttctaaagagaagataatataaatctagtttatttgaagaatgatgtataatgaaacattattaaatttgagtggtacttaagatacaaatcc

SEQ ID NO: 965888 - DNA, 120 bp, Artificial Sequence
  ENSG00000236897_3 (sequence is synthesized)
attgaataaactactgacaaaaagagtccctggaaaattcattatattcttgttcctatctttaagagaacagggcacttccttaagagcacaggaatcagttcttcagacaaatatatt

SEQ ID NO: 965889 - DNA, 120 bp, Artificial Sequence
  ENSG00000236897_4 (sequence is synthesized)
cagatactccttgtgttattctccactagttccttccagaaggttttacctgaaatctctagtcgacaatctttgctgaaaatataattaatctatctcccatatttctgaactctaaag

SEQ ID NO: 965890 - DNA, 120 bp, Artificial Sequence
  ENSG00000236897_5 (sequence is synthesized)
atttttgttctgatccttttaatcatgccagaaattgtaaagttatttttccaccatcatgcaatgaacatggcatcagaaaattagttcctagtctcctgagcagtcactcttctgctt

SEQ ID NO: 965891 - DNA, 120 bp, Artificial Sequence
  ENSG00000236897_6 (sequence is synthesized)
tgcttcatcatttttctttgcatgtcagtttctgccaatagtaaattgagaaagaatattcacaaaattgcctttggctcacaggagttgtagcaaaattatgtcttcatagctacacaa

SEQ ID NO: 965892 - DNA, 120 bp, Artificial Sequence
  ENSG00000236892_0 (sequence is synthesized)
tggaaaagtgtaaggattgtagtggtgagatgtgtgttccagactctctggattcaaatcccagctctgctactcataacagatataggaaatattaatatttataccacccatgggaca

SEQ ID NO: 965893 - DNA, 120 bp, Artificial Sequence
  ENSG00000236892_1 (sequence is synthesized)
tgcttctagcaggaggtcatcagccagcctcccaggaggttcagctcccaggctccgtccagctgcccagtggctgaggctcagcatctccactgcctgtaacctactcacggcacactg

SEQ ID NO: 965894 - DNA, 120 bp, Artificial Sequence
  ENSG00000236892_2 (sequence is synthesized)
cacccacggcacacagcacccgggcaccgctcacggcacagagcacctgggcacggtggctgggaggctctgacctctgcagcagacacagagctccacttcttattctctgttaattga

SEQ ID NO: 965895 - DNA, 120 bp, Artificial Sequence
  ENSG00000236892_3 (sequence is synthesized)
ctatctctggagggtcttgaagaaagaagaaattctgtattatccaaacagatggttatgaggatctactttcaaccttccacgttatgtgctgtgaatcaagtcttcaccctaccattt

SEQ ID NO: 965896 - DNA, 120 bp, Artificial Sequence
  ENSG00000236892_4 (sequence is synthesized)
ttgtagtggtgagatgtgtgttccagactctctggattcaaatcccagctctgctactcataacagtacatgctgcccatgcataaacaatcaaagttaaaccgagaaaagatggataca

SEQ ID NO: 965897 - DNA, 120 bp, Artificial Sequence
  ENSG00000236892_5 (sequence is synthesized)
catggagctgctaccgattgggaaaggatttggttattttattatttcataatgctgagctgtgatggacctgacgacatctgagaaaaaaaaaattgcccaaatgaaaaaataaatagc

SEQ ID NO: 965898 - DNA, 120 bp, Artificial Sequence
  ENSG00000236892_6 (sequence is synthesized)
agtgtgacacggtgaggggcgcacatcgccgtgaactcctttttcccccacaaaaatccgaatcaaattaagcctctacattagcgctgttcaacagaaatatcacgtgagctatcttac

SEQ ID NO: 965899 - DNA, 120 bp, Artificial Sequence
  ENSG00000236892_7 (sequence is synthesized)
agtatttaagacaggaatcttaaattttctagtaaccacgttaaaaagtccacaggaacgcacatggtaccaagaagggaaagaagataccacgtatgtgcagtcactcaattcagagtg

SEQ ID NO: 965900 - DNA, 120 bp, Artificial Sequence
  ENSG00000236892_8 (sequence is synthesized)
tgacttaattgcattcactttctcattggtaacatcgggacaataataggtccttactgccagggctgctatgaggattataagcaacacgcaaaaggcatttggaactagaccctgctt

SEQ ID NO: 965901 - DNA, 120 bp, Artificial Sequence
  ENSG00000236892_9 (sequence is synthesized)
gtgtcaagaaggctacaaatacaagggatttgggtgcagggaagttaggagagaacagggaaggctcatcaagagagaacagggcaagactcactgatgtgttattttcattctgcaaaa

SEQ ID NO: 965902 - DNA, 120 bp, Artificial Sequence
  ENSG00000236892_10 (sequence is synthesized)
atttaacaagtgattacacagcaggagctacattaaaggcccagaattttaaaagaattaaaaaaaatagatgaagtcctaaaaacttccttgtgtatttgaataaaatgatataaacag

SEQ ID NO: 965903 - DNA, 120 bp, Artificial Sequence
  ENSG00000273796_0 (sequence is synthesized)
ctcctcgtgtgcgcgaaactcatggcactggcttgacggctttctctgaaaccctctgattccgcctggcccatccacactgtcccttcccggccagggctcatctcctatgcctggacc

SEQ ID NO: 965904 - DNA, 120 bp, Artificial Sequence
  ENSG00000273796_1 (sequence is synthesized)
aaacagcgtagtctccagtctccctgatctccccacacgtggccccacccatcctctgaagcagccccaggaggcagcagtgacttcacacttctagtgcccggccctcccggccctcct

SEQ ID NO: 965905 - DNA, 120 bp, Artificial Sequence
  ENSG00000273796_2 (sequence is synthesized)
gccgcggggcctgcttgggattctcctctgctggcatcatccctgcctgcctcagccttcccaggcccaatcctgcccgatctcacctcttcccgcccagccacctggtcgggtcccgac

SEQ ID NO: 965906 - DNA, 120 bp, Artificial Sequence
  ENSG00000273796_3 (sequence is synthesized)
cagcatctgccttcaaacctggagtccttccctgagtgcttgcggtgcactgtgaggaaggaaatcaatgtaaaggattatgacccacattttttaaaaataaaaagattaaggagaaca

SEQ ID NO: 965907 - DNA, 120 bp, Artificial Sequence
  ENSG00000273797_0 (sequence is synthesized)
tccattttattgctgaatgctattctgttgtattgatataccacattttgtttatccattcatcagctgatggacagttgggttgtttctgttttttggttatgaataatattgcagtat

SEQ ID NO: 965908 - DNA, 120 bp, Artificial Sequence
  ENSG00000273797_1 (sequence is synthesized)
tgctaagaacgtgtgtataagtttttctgtgggtatatgttttcatttctcaaggagatacctttaaagctgcatccatccatatctctactttgtggttaacattctcctaggttatgc

SEQ ID NO: 965909 - DNA, 120 bp, Artificial Sequence
  ENSG00000273797_2 (sequence is synthesized)
gtggtgttgcggatattgccctgaatcaagaaaaggtgccaccaaaaaaaaatccaaaacccaaaaacaaaaagagagaatcctgtttttaagtttgaactctccagtagcattgtttcc

SEQ ID NO: 965910 - DNA, 120 bp, Artificial Sequence
  ENSG00000273797_3 (sequence is synthesized)
aaatatttggtgcagaactttaaccattggtgagagttgacagacgcgatagtgcctaaattcaatgcacatgtactgctgctttaaacaaataaagaggattttcaatgcgaagcctca

SEQ ID NO: 965911 - DNA, 120 bp, Artificial Sequence
  ENSG00000264434_0 (sequence is synthesized)
tgaaaagctcttacttctataagctttttcatttgcatggattatctagtatcgttttttcccaatacccatttgtttatagatgctgggaaaggctgtggagaaagaggtgagagaaag

SEQ ID NO: 965912 - DNA, 120 bp, Artificial Sequence
  ENSG00000264434_1 (sequence is synthesized)
actgcagttctgccctggattcaaaacagtttctccatgggaaaatttgatgtgctatttgctaaataatttaagaatgtaagttatcaaccagagaaaaaggtctgcccatattgggaa

SEQ ID NO: 965913 - DNA, 120 bp, Artificial Sequence
  ENSG00000264434_2 (sequence is synthesized)
tttaaaagctcttatgttttagcaagtactctaaataatacatgacattagacgaaaaaaatcgtgagcaatacaaaatgttacacaataatgtaaaatataaatattcaaatatactaa

SEQ ID NO: 965914 - DNA, 120 bp, Artificial Sequence
  ENSG00000273792_0 (sequence is synthesized)
catgggtggggcacagtctcaggttgggaggtatattgatttcctattgctgctataacaaataaccacaaatgttttggcttagaacaatatgaatgtattctgtcattgtcctagagg

SEQ ID NO: 965915 - DNA, 120 bp, Artificial Sequence
  ENSG00000273792_1 (sequence is synthesized)
tcacaagtctaaaattggttgtgatatggtttggatttatgtcccggtccaaatctcatgctgaatgataaccccctttgttggagtaggggcctagtgggaggtgaacagattatgagt

SEQ ID NO: 965916 - DNA, 87 bp, Artificial Sequence
  ENSG00000273792_2 (sequence is synthesized)
tctcccccttcactctctctctctcctgctccaccacgtaagacgtacctgcttccccttcaccttttgccatgatcgtaagtttcc

SEQ ID NO: 965917 - DNA, 86 bp, Artificial Sequence
  ENSG00000273792_3 (sequence is synthesized)
tgaggcctccccagccatgcttcaccctctctttataaattacgcagtgtcaggtagttctctgtagcaatgtgagaaaggactaa

SEQ ID NO: 965918 - DNA, 120 bp, Artificial Sequence
  ENSG00000273792_4 (sequence is synthesized)
gtgtcaggtagttctctgtagcaatgtgagaaaggactaacacaggttggagtcctgcattccttctgaaggcttcagggaagaatcgtatcttgggcttttccagctcctggaagccac

SEQ ID NO: 965919 - DNA, 120 bp, Artificial Sequence
  ENSG00000273792_5 (sequence is synthesized)
catatggggcccacatggataacccaggatcatctccccatctcaaaattcttcctcctttgagtctcttttgccatgtaaggtagcatattcacaggttccagggattaggaggtgaca

SEQ ID NO: 965920 - DNA, 120 bp, Artificial Sequence
  ENSG00000273792_6 (sequence is synthesized)
tctttgggggccattattcttcctaccacaggaggtgagggaaggcttctcccaggagctgccacttgagaggagacccacacgacaaaaacagatgagggggacaggctgcaaagatcc

SEQ ID NO: 965921 - DNA, 120 bp, Artificial Sequence
  ENSG00000273792_7 (sequence is synthesized)
tggacctggcagaagcctgcagattctgaggaaaatgccagcatgactgaagtgagcagcaagcgggggctggagggggaggcagggcccaggtccctctgcattgcgggagccagagaa

SEQ ID NO: 965922 - DNA, 120 bp, Artificial Sequence
  ENSG00000273792_8 (sequence is synthesized)
ggagcgcagatttcattctgagtgcagtggaacgtgggcagagggctggagagttgtgttctcactgggctaacttgtacatggatgaagacagtttctctggcagttgtttagagcagt

SEQ ID NO: 965923 - DNA, 120 bp, Artificial Sequence
  ENSG00000273792_9 (sequence is synthesized)
gctgtctggtagaaatacaatgtaatcagatttgtcagtttagatgttctagtagccacatgttaagaagtaaaaggaaacagctgaaattaaccttaataaaacattttatctttaccc

SEQ ID NO: 965924 - DNA, 120 bp, Artificial Sequence
  ENSG00000264083_0 (sequence is synthesized)
tatattttttattttatatttttcagactgctcagcctcttgagtagctaggattataggtgcccaccaccatgcctggccaatttttgtagttttactagagatggggtttcaccatgt

SEQ ID NO: 965925 - DNA, 120 bp, Artificial Sequence
  ENSG00000264083_1 (sequence is synthesized)
tgcccagccaaggtgccacacttttaaacagccaggtcttgagagaagtcacttgctatcatgaggacagcaccaagggatggtactaaaccattcataagaaatcaacccccatgatcc

SEQ ID NO: 965926 - DNA, 90 bp, Artificial Sequence
  ENSG00000264083_2 (sequence is synthesized)
tggtactaaaccattcataagaaatcaacccccatgatccaatcacctccctccaggcaccacccccaataccagagacacacgttcaaa

SEQ ID NO: 965927 - DNA, 87 bp, Artificial Sequence
  ENSG00000270072_0 (sequence is synthesized)
acaagactccatctggggggaaaaaaaaaaggaaaattttgtgtatttgagtgtttgtacattttattgtatgcatggaagaaatcc

SEQ ID NO: 965928 - DNA, 120 bp, Artificial Sequence
  ENSG00000270072_1 (sequence is synthesized)
tgtaagtataattaattaaagttggggaaatggaaaaattaaaacaggaaggaatacttatgaaatattttgtttaaaaaaaaaaaaagagggtggccgggcgcagtggctcacgcctgt

SEQ ID NO: 965929 - DNA, 120 bp, Artificial Sequence
  ENSG00000287339_0 (sequence is synthesized)
gaacctgaacaacctctgccgttaacatattttggtgacccgggaaggaggaagaggcctgaaagataagacaaagaggttcctacaacctggagaccgagaaggctgccaggcaggagc

SEQ ID NO: 965930 - DNA, 120 bp, Artificial Sequence
  ENSG00000287339_1 (sequence is synthesized)
tgtgattgcagctgaaagatgcagccggtctttagcaactccacatggaggaagccaggaaaataaatactccaatcaatcacaatttctttttctgctatgtcttgcccatgctctgaa

SEQ ID NO: 965931 - DNA, 120 bp, Artificial Sequence
  ENSG00000287339_2 (sequence is synthesized)
acctcttccacaataacaacttctgtttcactcagcattactttgtgcccagctgagaaaggactgcattctccattctcttacatttgcgtgactgtgatgtggaactggaactaacaa

SEQ ID NO: 965932 - DNA, 120 bp, Artificial Sequence
  ENSG00000287339_3 (sequence is synthesized)
aaaggaagaacatcagaggaggtgcaagaagcaagagagggaaagcaccgtggtggaacagtggctgatagttttctggtagagtgctagaaaaacatttaataatgagcatgttccata

SEQ ID NO: 965933 - DNA, 120 bp, Artificial Sequence
  ENSG00000287339_4 (sequence is synthesized)
tccagtgattttatttatttttttattttgatagttaagtatttaagtgttccctttgtgccagggaatgtattatggaccagagagtaatgaaataaagatgccatttcacttcctgca

SEQ ID NO: 965934 - DNA, 120 bp, Artificial Sequence
  ENSG00000287338_0 (sequence is synthesized)
ggaggctggggcatttttctgctgcgctggcctgcatctgcctttcgagtagccctagaggcctaacgcttgaggtcaccttcatggtttttccagtgaccttggccattaatgagctcc

SEQ ID NO: 965935 - DNA, 120 bp, Artificial Sequence
  ENSG00000287338_1 (sequence is synthesized)
caccgcttccccagctgcagctgtattatagcgccagagtcttccaagcctgcaggttgtgccaagcctggagggatttgcaaaagtggctctcccagagaggctgctctctttgctgga

SEQ ID NO: 965936 - DNA, 120 bp, Artificial Sequence
  ENSG00000287338_2 (sequence is synthesized)
atttgccttgttctctcctcactgctgaagcactgtcactgcgtcctaaaaaaacaccacagtatttctttatagcagcgcaagaacagactcatacaggatcactgcatgtggaatcag

SEQ ID NO: 965937 - DNA, 120 bp, Artificial Sequence
  ENSG00000287338_3 (sequence is synthesized)
cttccaggactgtgaaacaagacatttctttggttcaagccactcccttagtgcacattgttatggcagccatggaaaaccatccacagagggtcagttcctatggaggtggggtgagtg

SEQ ID NO: 965938 - DNA, 120 bp, Artificial Sequence
  ENSG00000287338_4 (sequence is synthesized)
acgagatgttcctgactgggctgacaacggaggacgagagagcttgggtgtggatgggaaaataactagaaacttcccttgatctctcagcattctgttccatccctgtcacttcgatgt

SEQ ID NO: 965939 - DNA, 120 bp, Artificial Sequence
  ENSG00000287338_5 (sequence is synthesized)
ctctctttcttgaatatggaagcagccctgggcccagctgctgcaggtggccaggaaggagcctgggaggatgacggggttcctgatctgatagaactgggctgtgactaggcagaaccc

SEQ ID NO: 965940 - DNA, 120 bp, Artificial Sequence
  ENSG00000287338_6 (sequence is synthesized)
tgttccaccacacacaccccagtggaggacgttctgtatctgtgatgaatgacccctgcatacattatatctttcagtaaaaacagtggtgtttcagtagtgttactagctaagctgctt

SEQ ID NO: 965941 - DNA, 120 bp, Artificial Sequence
  ENSG00000287338_7 (sequence is synthesized)
aactctcacattacagacgtcagtgaagccccttggtaggtagtgtctaaaattagatttatctgcttatttacacaattatactctcatgagtttgaatgttggggaaagatcaagaaa

SEQ ID NO: 965942 - DNA, 120 bp, Artificial Sequence
  ENSG00000287338_8 (sequence is synthesized)
aagaccagatcactagatggcaatagcacacaagagctttatttggatgaagcttggacagaatgcatggaaggggaaagtcccttgcagcagaagaccttccagaggcagtggcagggc

SEQ ID NO: 965943 - DNA, 120 bp, Artificial Sequence
  ENSG00000287338_9 (sequence is synthesized)
aagaaaagggcaaggacactcccaggggagaggaggatcagagaggaggttacaggtctaagagatgtcacaggtctagaagaaaagaaaaggagccaggtgcagtggctcacacctgta

SEQ ID NO: 965944 - DNA, 120 bp, Artificial Sequence
  ENSG00000287338_10 (sequence is synthesized)
actttgggaggcccaggcgggcagattgctgagttcaggagtttgagaccagcctaggcaaacatggtgaaaccccatctctaaaaaaagatttaaaaattaaccaggcctggtggcatg

SEQ ID NO: 965945 - DNA, 120 bp, Artificial Sequence
  ENSG00000287338_11 (sequence is synthesized)
tacctgaagtctcatttacttggggggctaaggctggaggatcgtttgaacccaagagggttcatggtggggagcatcatggtgaggagtctctgggtcagagagctccaaaggacagca

SEQ ID NO: 965946 - DNA, 120 bp, Artificial Sequence
  ENSG00000287338_12 (sequence is synthesized)
gccatttggggtcttttgtagccctgaggttcgtcttacctatggtgagagggtgtcgggtgtagttttgcaaattatcgaagcaggcaggctctaaatgggcaaataatatttggccta

SEQ ID NO: 965947 - DNA, 120 bp, Artificial Sequence
  ENSG00000287338_13 (sequence is synthesized)
catttaaagcaattggatgtgcaagaatttgagtttggtgctggcaggcttgagttaacggtcctgggctgtggtgtggaagtaaacagcatgggggccaatacacaggggctgtcttga

SEQ ID NO: 965948 - DNA, 120 bp, Artificial Sequence
  ENSG00000287338_14 (sequence is synthesized)
actcgttcatacaatccatttataacctgtttataacttgtttataacccatttataccacatacccctaaagcaaatacctagcagatagcatgcagggcctatttgcctggcctcctt

SEQ ID NO: 965949 - DNA, 120 bp, Artificial Sequence
  ENSG00000287338_15 (sequence is synthesized)
caatggcatcacattctccaccaccacgatggttaatatggacgagccctagcagctgcccagtgaagtccacacgctactgcccaaaccagctcaagtccttagttgtcatgaaaataa

SEQ ID NO: 965950 - DNA, 120 bp, Artificial Sequence
  ENSG00000287338_16 (sequence is synthesized)
tgtgagttcccacagccgtaaaagggaaagcagcaagagccacatgagcatccccggaaccctgggaacagtcatcagtgtcatcttcagggtcatgtccctacaagcagttctcaggct

SEQ ID NO: 965951 - DNA, 120 bp, Artificial Sequence
  ENSG00000287338_17 (sequence is synthesized)
cctgctgagggtcagaacagagccgaagtcacaggatatcaaaaatggataagcccaacctcagctcgcagaggaattgctcagctgacagatgattgtgttatctcagtgaagccagat

SEQ ID NO: 965952 - DNA, 120 bp, Artificial Sequence
  ENSG00000287338_18 (sequence is synthesized)
gacaatgtacttggccaacggaacatcttggtcaatggatctccaagttggttataaaattaaagcaaaataatgccattatatgtaagatgtcattgattgtaagatgctcctttattt

SEQ ID NO: 965953 - DNA, 120 bp, Artificial Sequence
  ENSG00000287338_19 (sequence is synthesized)
aagatgttttcttctagaggatttctagttttagctctttatgtttaaattgagggaaactaaatgtatggccttaaggagctgttccagcctgagactatacaccagcagaaagaaact

SEQ ID NO: 965954 - DNA, 120 bp, Artificial Sequence
  ENSG00000287338_20 (sequence is synthesized)
cacagcactgaaaatattgttctccgccctccctcatccctcttccttctgaatgggaaaaaagagtaagaagcttttccctccagctgaaagcaaaggagtactctagccctctgtgat

SEQ ID NO: 965955 - DNA, 120 bp, Artificial Sequence
  ENSG00000287338_21 (sequence is synthesized)
agctgatggcagcatctttggtggctctcccagagaggctgctctctttgctggaatttgccttgttctctcctcactgctgaagcactgtcactgcgtcctaaaaaaacaccacagtat

SEQ ID NO: 965956 - DNA, 120 bp, Artificial Sequence
  ENSG00000287338_22 (sequence is synthesized)
ccgtaagacgttgcctgtcattggaggtttgctccttctctctatctcagacaggattcaatgaagaaaacagaagccactgtatgtactccaggtgtttaaagttttaatttagagaat

SEQ ID NO: 965957 - DNA, 120 bp, Artificial Sequence
  ENSG00000287338_23 (sequence is synthesized)
taagggtatactgaaatattgcaagacctggggtagtggaggtcaggtaagctgacaccaaagacctcatcccaaaacactcaaagagtggtacatgtcccacacttgtgggcagcagca

SEQ ID NO: 965958 - DNA, 120 bp, Artificial Sequence
  ENSG00000287338_24 (sequence is synthesized)
agcatgattgttcccaaatctcaactccttacagatctggctgtaactacccctgaagaacaaagacctttcccccacctctgtcctaatctcaggagagcttctcatttgcaaactcta

SEQ ID NO: 965959 - DNA, 120 bp, Artificial Sequence
  ENSG00000287338_25 (sequence is synthesized)
accaggaatcagacagggacagagttcagggaagtattcctggctttgcttccctctgcagaagggactttggctttgagggaggtcctggggttggtggtaatgccaagttgaccttgg

SEQ ID NO: 965960 - DNA, 120 bp, Artificial Sequence
  ENSG00000287338_26 (sequence is synthesized)
acaatccagcactctctaaggatggctccagcccctcgaggggagtcagcaccctctgaatagcattttcaggcctctcccaggaagctggggcttggagtgggagtgtccccccaggag

SEQ ID NO: 965961 - DNA, 120 bp, Artificial Sequence
  ENSG00000287338_27 (sequence is synthesized)
agtggcagaggcaggatgattcagggtcagcccaaaccttacagatattccccgaggtggccaacgcaaccatgagcaagagccgaggccttagccaacaagacaatggagggcagctca

SEQ ID NO: 965962 - DNA, 120 bp, Artificial Sequence
  ENSG00000287338_28 (sequence is synthesized)
tatgaagggcaaagcaaaggccaaagtgagagaagtaagcgctgtgacatggagaccagctcaggataggatagatggctcaggaaccaggctgttaaggagagaatactcagcatttct

SEQ ID NO: 965963 - DNA, 120 bp, Artificial Sequence
  ENSG00000287338_29 (sequence is synthesized)
gaggacccgtgctggtctgggcccgctcccccagcccctgatgggggcctgtgtgctctgcaaagagctgtgccctgtgatggggggtctgtgacctgggagggaatacactcaatctca

SEQ ID NO: 965964 - DNA, 120 bp, Artificial Sequence
  ENSG00000287338_30 (sequence is synthesized)
catgggttgtggaagcctgtgctccccccacagccagggaagatcatgagctgctttgtgagtgtgagacattacagatacaacagccaattgactcaaacaaaactattgcaggaaaga

SEQ ID NO: 965965 - DNA, 120 bp, Artificial Sequence
  ENSG00000287338_31 (sequence is synthesized)
aaaggctttctgaattatggagtgctgtgggctgagttgtggacccccaaaatttatatgttgaagtcctacccctagtgcctcagaatgttcctttatttggagatagggtctgataga

SEQ ID NO: 965966 - DNA, 120 bp, Artificial Sequence
  ENSG00000287338_32 (sequence is synthesized)
gtttagttatttgtccccccaaatctcatgttgaaatgtagtccccagtgtggaaggtggggcctggtgggaggtgagtggctcgtggaggaggatttctcatgattggttcagccccat

SEQ ID NO: 965967 - DNA, 120 bp, Artificial Sequence
  ENSG00000287338_33 (sequence is synthesized)
cctcatggtgcagtcctcatgacggtgagtgagttctcgtgagatcgggtgggttgaaagtgtgtggcccctccttctccttctcttgcacctgctttggccatgagatctgcctgctcc

SEQ ID NO: 965968 - DNA, 120 bp, Artificial Sequence
  ENSG00000287338_34 (sequence is synthesized)
aaaagctccctgaggcctccccagaagctgagtagatgccatagccatgcttcctgtacagcccacagaaccgtgagccagttaaacctctttccttgataagttacctaccctcaggta

SEQ ID NO: 965969 - DNA, 120 bp, Artificial Sequence
  ENSG00000287338_35 (sequence is synthesized)
aagttacctaccctcaggtatttctttatagcagcgcaagaacagactcatacaggatcactgcatgtggaatcaggtaagacaaggtcatactggagtaggaaaggggttaatccaata

SEQ ID NO: 965970 - DNA, 120 bp, Artificial Sequence
  ENSG00000287338_36 (sequence is synthesized)
tgactggtgtccttaaaaaatgggaaattcatcgagggcagattggataaaggaaatgttgtacatatacactatggaatacttcacagctataaaaaaggagaagattatgtcctttgc

SEQ ID NO: 965971 - DNA, 73 bp, Artificial Sequence
  ENSG00000287338_37 (sequence is synthesized)
ctgaaggtaaataatgagaacacgtggacacatagaggggaatagcacacactggggcctacttgagggtaga

SEQ ID NO: 965972 - DNA, 120 bp, Artificial Sequence
  ENSG00000287338_38 (sequence is synthesized)
agaggggaatagcacacactggggcctacttgagggtagaaggtgggaggaaggagaggatcagaaaaaacgattggttactaggcttactacctggttgatgaaataatctgtacagca

SEQ ID NO: 965973 - DNA, 120 bp, Artificial Sequence
  ENSG00000287338_39 (sequence is synthesized)
aaccccagtatcaagagtttacctatataacaaaactgcacatgtacccctgaacctaaaataaaagctttttataaaaagaaaagaaaaagggctgggcatgatggctcacacctgtaa

SEQ ID NO: 965974 - DNA, 87 bp, Artificial Sequence
  ENSG00000287338_40 (sequence is synthesized)
atgatggctcacacctgtaatcccaggactttaggacacccaggtgggtggactgctatgcgaaaccccgtctctacaaaaattagc

SEQ ID NO: 965975 - DNA, 120 bp, Artificial Sequence
  ENSG00000287338_41 (sequence is synthesized)
tgaagtcccatctacttgcagggctgaggccagaggatcgcttgaacccaggaggtggagattgtagtgagttgtatttgtgccactgcactccagcctcgttgacagagcaagggcaag

SEQ ID NO: 965976 - DNA, 120 bp, Artificial Sequence
  ENSG00000287338_42 (sequence is synthesized)
gcagcatctttggtaagcaaatggatcgtctctgccaagaaggaagaaaaaaagaagcattaattgggcaccttctacttgccaggctccattctagagaatttacctaaatcatctcat

SEQ ID NO: 965977 - DNA, 120 bp, Artificial Sequence
  ENSG00000287338_43 (sequence is synthesized)
tgaattcacatgactagataatgtaaagagtggtcacctccccatttcacagatcaggaaactgaggctccgactagaaagatgaagcaacttgcctagctagtgattccaatctgggtt

SEQ ID NO: 965978 - DNA, 120 bp, Artificial Sequence
  ENSG00000224318_0 (sequence is synthesized)
tggccgcgggaaggctggagccgttctggctggcaccggggtctacgccctcctgccggaggctggctctcgcctctgctcccttcctgggttctgcgccgccacccctcacccacgccg

SEQ ID NO: 965979 - DNA, 120 bp, Artificial Sequence
  ENSG00000224318_1 (sequence is synthesized)
cttatcttccctccctttgcacgctcccgcgggacagggagagttacaggcttcagactttatctcgttgtggaaagcaagagaccaagccaaaaactttggtcgtgcttttcaacatct

SEQ ID NO: 965980 - DNA, 120 bp, Artificial Sequence
  ENSG00000224318_2 (sequence is synthesized)
ttctcccattgctgcgtcttagaggggtgtggtgccatgataccacttttgaaaatcctgttgaatgcaagtcctctttgttgctcattgaacaatgaggatatttagctcccctcagag

SEQ ID NO: 965981 - DNA, 120 bp, Artificial Sequence
  ENSG00000224318_3 (sequence is synthesized)
ctaccctcagagttggatgagctatcctcagagttggatgccaccaccgggagcagcaaaagcgaaggcaactcatgattctgcctcagaagcaatcgaataaaatattttgaaaatgaa

SEQ ID NO: 965982 - DNA, 120 bp, Artificial Sequence
  ENSG00000224318_4 (sequence is synthesized)
cgagggaccctgaccgcgccccgcttcctttccataacgagtggacccctcccggagcaccttcagcccttcctccacgggagacccccccagcgccggcacgagagatgccagcggacc

SEQ ID NO: 965983 - DNA, 120 bp, Artificial Sequence
  ENSG00000224318_5 (sequence is synthesized)
gacccccacccctgacacacctgcgccgcctccgaaacgcgatctgtccggcgcctcccctcgggcgccttctcccccgagccggccgggagccgggacgggggcgcgcagggtccggtc

SEQ ID NO: 965984 - DNA, 120 bp, Artificial Sequence
  ENSG00000224318_6 (sequence is synthesized)
gcacgctcccgcgggacagggagagttacaggcttcagactttatctcgttgtggaaagcaagagaccaagccaaaaactttggtcgtgcttttcaacatctccggtcaaaagaggaaaa

SEQ ID NO: 965985 - DNA, 120 bp, Artificial Sequence
  ENSG00000224318_7 (sequence is synthesized)
gcaacaaatgatcaggagaattgggggcttacccagtgagcgaagctttggcaaaaatgtaaagccgtgcagcacaatgcaagaggaggccaaggactccctgcaaaacctcaacttcaa

SEQ ID NO: 965986 - DNA, 120 bp, Artificial Sequence
  ENSG00000224318_8 (sequence is synthesized)
gcctaaaacagcctgaaggttgaaaaactggactgctggctccagatgaagtccaccctttcccaactgattctttctgaataatgcccacctgcacactcagaggatggggtggggcca

SEQ ID NO: 965987 - DNA, 120 bp, Artificial Sequence
  ENSG00000224318_9 (sequence is synthesized)
tgcaagctccctgccgggaacccagcctcttgagctcctatgtggtggggcaggagccagttcacaggcttccctctcactctgctgagagtttttctcttttccttttttttgcccaat

SEQ ID NO: 965988 - DNA, 120 bp, Artificial Sequence
  ENSG00000224318_10 (sequence is synthesized)
aaattccatttttctcacccttctgtgtgtccatgagcctaatcttttctgattgtgtgacaagaacctgtattttcctacaacatctttactcaaaaattcgaattagattacttttaa

SEQ ID NO: 965989 - DNA, 120 bp, Artificial Sequence
  ENSG00000224318_11 (sequence is synthesized)
atgtaacttaagcaaaccttattttctctgcctggatcagatgtctaccacaaataatagatttcaataagaaaaggcaggtccatatagcagagacatagctacagatagcctgaacct

SEQ ID NO: 965990 - DNA, 120 bp, Artificial Sequence
  ENSG00000224318_12 (sequence is synthesized)
ggatgtcagggctgttctactaaagcagaggttgctgtgagatgcggagcctgcctacgtgggaactgcgctacatcagatagatttggcacctgccagggtcttgcacagatgcttgcc

SEQ ID NO: 965991 - DNA, 120 bp, Artificial Sequence
  ENSG00000224318_13 (sequence is synthesized)
aagattctttgtaataacctgggaagatgtgttctgccaggtaccaccgtgtcaatgataaactggaacatctgagttgtcaaagctgaatgatgttccattgcaacacatgagaaaaat

SEQ ID NO: 965992 - DNA, 120 bp, Artificial Sequence
  ENSG00000224318_14 (sequence is synthesized)
gcctctctctgcatttacagtttcactttctatacatagtctctaagagttgctgcttctaccctaataccttacatgctgtactagtttttccttagagctccttcccctgccctcctt

SEQ ID NO: 965993 - DNA, 120 bp, Artificial Sequence
  ENSG00000224318_15 (sequence is synthesized)
ctatgagactattacacgaggctaaaatgtggggccagaagataaatctaatgagagctgttgctagtggtttcaaaataatttcttttctcaagtgactaaatatatattttttaattt

SEQ ID NO: 965994 - DNA, 120 bp, Artificial Sequence
  ENSG00000224318_16 (sequence is synthesized)
tgctggctccagagtggcatgcctgacacagtcctctcttattataacttctactcaagcagacactatgtctcttatgcaaatagactcctgagaggattgatccaacatccagtagac

SEQ ID NO: 965995 - DNA, 120 bp, Artificial Sequence
  ENSG00000224318_17 (sequence is synthesized)
atgctcagacatgtctgcaccctagtgacagacaatgtagatgtcccttgccccacccaatagtactttacctttgtaccatgcttcctattttacaaaacagtccatatgtgcaatcac

SEQ ID NO: 965996 - DNA, 120 bp, Artificial Sequence
  ENSG00000224318_18 (sequence is synthesized)
caaaaactacgccttattcaagttcacatagctggcaagtggattagattaggctcttttaacttcaaacccactgctctttctattccagcctactatatcctttaaagggggggatgg

SEQ ID NO: 965997 - DNA, 120 bp, Artificial Sequence
  ENSG00000224318_19 (sequence is synthesized)
attaatttacttccacttgagaaattatcaggacaatgagctacaagatgacaaacaatgagggtttgctatttattatgtgtgaagcagggcattttacccactgaacagcaggatctc

SEQ ID NO: 965998 - DNA, 120 bp, Artificial Sequence
  ENSG00000224318_20 (sequence is synthesized)
aattgttgctcattccaataccatggtaactatatatttttctttttaaaaacaatattaaataatacattgtgcctttgtgtacatataagtgcagtatggtattttggcagtttattg

SEQ ID NO: 965999 - DNA, 120 bp, Artificial Sequence
  ENSG00000224318_21 (sequence is synthesized)
caaagtatcaaggcttcccgatgacatgctaaggaatcaaattgaaaacactgggtctatgttttcgcataaaaatcaagagccaagaactctcaagtggataccaatgtagtatagtaa

SEQ ID NO: 966000 - DNA, 120 bp, Artificial Sequence
  ENSG00000224318_22 (sequence is synthesized)
ggcaaccacgttatgcacctagatattcccatatgtacagtgacacatgattacatgaaattgacaatattgtctttttaaaattatcagcaatagatctggagtaatagaaaacttctg

SEQ ID NO: 966001 - DNA, 120 bp, Artificial Sequence
  ENSG00000224318_23 (sequence is synthesized)
aaaatattccacagtccgtcagttgttggtcctgtgtctctctcccaccgatcatttgatttttcatttcaaagcattcacagagaaggcatgacattttttcatttcttttccatctgt

SEQ ID NO: 966002 - DNA, 120 bp, Artificial Sequence
  ENSG00000224318_24 (sequence is synthesized)
agggcatgttggagtcctttattagattttattaatatttcagagtcccaggattgggatgattgttgaattggtgaaggcgacaatatcaggcaatttgcattctatttgagtctcatt

SEQ ID NO: 966003 - DNA, 120 bp, Artificial Sequence
  ENSG00000224318_25 (sequence is synthesized)
atcaactcaagttggtcaggctgtcagccatggagaagggcgttgcctggcatttaggaattattcaatgaataaaatttttaaaagccataaaaatcatatacttttcaaattcacata

SEQ ID NO: 966004 - DNA, 120 bp, Artificial Sequence
  ENSG00000224318_26 (sequence is synthesized)
cacagacttgtgttaacttgtcatatttcagcatcacattaaaactatcttctgtaattatgtctaatttaaactgtaacaattctgtagatatcttatatcttaaagcccttttcttgg

SEQ ID NO: 966005 - DNA, 120 bp, Artificial Sequence
  ENSG00000224318_27 (sequence is synthesized)
aataaaaattcttacacatctccacattgtctatcttaattctagccatgattgagaagtcttcctattaattcatacatctttattttttaaagtctttttgtcgtgcattctgcacat

SEQ ID NO: 966006 - DNA, 120 bp, Artificial Sequence
  ENSG00000224318_28 (sequence is synthesized)
ctctctatgcagagttagctcttttgagttattaaattcaataatagtacttataacaacaatagcagcagcaacagcacttacatttagatagtgctttctatatactagaaattgtgc

SEQ ID NO: 966007 - DNA, 120 bp, Artificial Sequence
  ENSG00000224318_29 (sequence is synthesized)
tcaactatatgcattatttcatttcatacatatagcaaccttatgagttaggctataactcattttgcccccagatttgaagaatcaggctcagagaagttacctaattagcccatggtt

SEQ ID NO: 966008 - DNA, 120 bp, Artificial Sequence
  ENSG00000224318_30 (sequence is synthesized)
agctcagagataaaagctatgggagggtgcactgatgtctgagtgatgtttaaccatgccggtccaggtacagtgcctgtctccggaatgatgcagggatcccaaagtggagagaattag

SEQ ID NO: 966009 - DNA, 120 bp, Artificial Sequence
  ENSG00000224318_31 (sequence is synthesized)
cggcggattcgggcgcccggtgtgctccgtcgactgaccccgagctgtccgaatccggcctcggccaccgggggcggggcgtgaaaagggggcgtctcctcccgggtgcaggctgagggg

SEQ ID NO: 966010 - DNA, 120 bp, Artificial Sequence
  ENSG00000224310_0 (sequence is synthesized)
agtgctgtcggagggttgctggggaaaggagattggctggcgaggaagatgaggaatgtgctgccaggagactgggatcacggccagatgctaattacgatggcctgggggtgctggtac

SEQ ID NO: 966011 - DNA, 120 bp, Artificial Sequence
  ENSG00000224310_1 (sequence is synthesized)
cccctgtcagcatcatatcagcctctccacttcaaatcctgcccctctgatgttagaatctggctgcaaccatcccgtgattctgtggagcctcgtgccttacttctgctggcttctgtc

SEQ ID NO: 966012 - DNA, 120 bp, Artificial Sequence
  ENSG00000224310_2 (sequence is synthesized)
tgtcgtcacttccgttctccaccaccctggcctcaatcaaacacgttttctctgatgcaaaactcgaccttcatttacagaaagggttatctcaagaggcttgggatggttaaaccctgc

SEQ ID NO: 966013 - DNA, 120 bp, Artificial Sequence
  ENSG00000224310_3 (sequence is synthesized)
acatctcagaggaaggactggctcttcacctgttcctgcaggataactgctaacggcttaaaatattctgcctgataagagggcttctgtatatctggggccttgggccatgccgggtag

SEQ ID NO: 966014 - DNA, 120 bp, Artificial Sequence
  ENSG00000224310_4 (sequence is synthesized)
ttgatgctaacaacatgatttatggtgggtgcctgcggtcatgctgtatcagcctgacctctggaggggctggacactgggtaactgatccccaagaaaagccatggacactaaggctca

SEQ ID NO: 966015 - DNA, 120 bp, Artificial Sequence
  ENSG00000224310_5 (sequence is synthesized)
ggtgagttcccctggttggcagtgttttgcgtgtgttgtcacacatcattgctgggagacttaagcactgcacatatgactatctaggagggtacagctgcaagctcctgcctggattct

SEQ ID NO: 966016 - DNA, 77 bp, Artificial Sequence
  ENSG00000224310_6 (sequence is synthesized)
tatctaggagggtacagctgcaagctcctgcctggattctgccctgagcacctttttcctttgctgattttgtttat

SEQ ID NO: 966017 - DNA, 84 bp, Artificial Sequence
  ENSG00000224310_7 (sequence is synthesized)
cacctcccaggttcacgtgattcttccaaccaccatgcctggctaattcttatatgttagtagagacggggttttgccatgttg

SEQ ID NO: 966018 - DNA, 63 bp, Artificial Sequence
  ENSG00000224310_8 (sequence is synthesized)
cgccttgctgatttttaatccgcatccttccactgtgttaagctgtaactgtgaatacaacag

SEQ ID NO: 966019 - DNA, 120 bp, Artificial Sequence
  ENSG00000224310_9 (sequence is synthesized)
atccttccactgtgttaagctgtaactgtgaatacaacagcttttttgagttctgcgattctttgcagcaaatcgtcatacctgagcgtgtcttggggactccccgacacatcttcccac

SEQ ID NO: 966020 - DNA, 120 bp, Artificial Sequence
  ENSG00000224310_10 (sequence is synthesized)
tccctcttctgttttctcacttcctctggagtaaactgaaagaggcccctgcttgcctcttgcaaggcagttctgaacacactgagatcatttgtgatctcatatcctcttctaagcaat

SEQ ID NO: 966021 - DNA, 120 bp, Artificial Sequence
  ENSG00000224310_11 (sequence is synthesized)
tcatcaagaaatttctttcaaataaacccagtgctcttcatggaggtgatgctgatgaaaatgactttctccagcttattacacgtttgcagaagctcctgtttaagagtttgagcatgt

SEQ ID NO: 966022 - DNA, 120 bp, Artificial Sequence
  ENSG00000224310_12 (sequence is synthesized)
cacatgcatgcccacagctgtcatgccttcaccagaaccaggacgaggagttattctattgccagaattgaagaaccatttccacatattgtaaggtcagtgaaagtacaatgaaaaata

SEQ ID NO: 966023 - DNA, 120 bp, Artificial Sequence
  ENSG00000224310_13 (sequence is synthesized)
cacctgctagcatgcctatgcatggcctctctgcaaataagatgaaggtcccttcaccacctgcttgcactgctaatggccctgtagattccactggatggatttgtaattttctcaacc

SEQ ID NO: 966024 - DNA, 120 bp, Artificial Sequence
  ENSG00000224310_14 (sequence is synthesized)
atttcccctaatgctggatatttgggttatttccaacatttttacgcttccaaataaggcacccataatgattcttgcagagtaatcattaggctcttctataattatctaattatcctt

SEQ ID NO: 966025 - DNA, 120 bp, Artificial Sequence
  ENSG00000224310_15 (sequence is synthesized)
ttttttttgtttttttctgaggcagggtcttgctctgacacccaggctggagtacagcggcacgatcatggctcactgcagcctcagcctcccacgctcaagtgattccacagtctcagc

SEQ ID NO: 966026 - DNA, 120 bp, Artificial Sequence
  ENSG00000224310_16 (sequence is synthesized)
ctcctgtgtagctgggatcacaggtgtgcgccaccacgcctggctaactttttgtactttttatagagacggggagtttttttgtatttttttaaatagagacgatgtctcaccatgttg

SEQ ID NO: 966027 - DNA, 120 bp, Artificial Sequence
  ENSG00000224310_17 (sequence is synthesized)
cttaggctgttctggaacttctggactccagtaatcctcctgcctcagcctcccaaggtgctgagactataggcatgagccaccgtgcccagccatataattatcttaagataaatttct

SEQ ID NO: 966028 - DNA, 120 bp, Artificial Sequence
  ENSG00000224310_18 (sequence is synthesized)
atacatggaatttttatacgtggaatttctatacatgaattaaagagcacagatttttgtatgttggttgcttggtttttagaggcagtatctcactccattgcccaggttggagtgcag

SEQ ID NO: 966029 - DNA, 120 bp, Artificial Sequence
  ENSG00000224310_19 (sequence is synthesized)
tggtgcaatcatagctcaccgcaccactgaattcctgggctctaggagtcctccttcctcagcctcctaagcaactaggactacagagtacatatgtttttaagatctttgatatcttat

SEQ ID NO: 966030 - DNA, 120 bp, Artificial Sequence
  ENSG00000224310_20 (sequence is synthesized)
accttttggggactgtatcagttaaaaactctaccagtactgtagaaacatgatcgtgtctctgtttccttgccacactgggcattaattacttgatccattaatgagttaattgcaccc

SEQ ID NO: 966031 - DNA, 120 bp, Artificial Sequence
  ENSG00000224310_21 (sequence is synthesized)
tccattaatgagttaattgcaccctcaataagagtatggtaaagtgtgacacatttacactacagaatattatgctgtaaagaataaggatgtaggccaggtgaggtggctcatgcctgt

SEQ ID NO: 966032 - DNA, 120 bp, Artificial Sequence
  ENSG00000224311_0 (sequence is synthesized)
agtttttcgccgtcgaggagttcctgcagagcgggctcaccccgcccggttgccattagttacccggacgcacctcccaccccaccaccggaaaaggaaagctgaagcagaaaggctaaa

SEQ ID NO: 966033 - DNA, 120 bp, Artificial Sequence
  ENSG00000224311_1 (sequence is synthesized)
cctgataagttggcaaattgggaattagacccagatctgcctgacaccagagtctgagccttttaacactgcctgtctttcctgtgaaaaccagacagcacccgctctcatactacttct

SEQ ID NO: 966034 - DNA, 78 bp, Artificial Sequence
  ENSG00000224311_2 (sequence is synthesized)
ggccaggctgggtagtggattgcttgagtccacgagtttgagaccagccttggcaacatggcaaaaccccatctctac

SEQ ID NO: 966035 - DNA, 120 bp, Artificial Sequence
  ENSG00000264956_0 (sequence is synthesized)
aaattctggctagcgtcacaatgaatgccaccgtcacctagcgacaaatccctgcggcttggcggagacagagaactttgtggaggtgcctaggcggtggactctcgcctgtcttctctg

SEQ ID NO: 966036 - DNA, 120 bp, Artificial Sequence
  ENSG00000264956_1 (sequence is synthesized)
tgggatccacgggatagtcccatgatcctaggagagggcagacgtgagccagcctgaagaaacgccaagcaggagccccaggaataaaccgcaaaatccctaaggatccaaaaggatctg

SEQ ID NO: 966037 - DNA, 120 bp, Artificial Sequence
  ENSG00000264956_2 (sequence is synthesized)
caggatgcctcaggcctgcctagtcatcgtagggatatggacactattgatgggagcggctggccatctggagtggcagttgccatcatgccagtagcgcttgggccgcatgggcagtgt

SEQ ID NO: 966038 - DNA, 120 bp, Artificial Sequence
  ENSG00000264956_3 (sequence is synthesized)
tgtcaggagcagcagcaggagcagcagtggcggtggtaggaccccgttccctgtgtccccaaggcatctgactgcgccgccgccccctaatggctgggcaggacccactgccaggtgcag

SEQ ID NO: 966039 - DNA, 120 bp, Artificial Sequence
  ENSG00000264956_4 (sequence is synthesized)
accctccatggcggcctcaatttcgcttcctaccacatctgggagcccatcagcgctggcagccgggtcttgcaggattggccccaggagcatcaggttcatttgtgcggcattagccag

SEQ ID NO: 966040 - DNA, 120 bp, Artificial Sequence
  ENSG00000264956_5 (sequence is synthesized)
ggcccccatgccacctgcacctcgcccatgcactactgcagggaaaacgcagagaggagtcacggccaaggctgcacactctatggagccagtggcagctggggacaagtgggagcccag

SEQ ID NO: 966041 - DNA, 120 bp, Artificial Sequence
  ENSG00000264956_6 (sequence is synthesized)
ccccttccaagttgccagggcaggaactccccaggcgcaactgcagctgcccaaggagggtctgcgacccaggcactcctgtgctcttgggagccaggagaaggcaggagccccaccctc

SEQ ID NO: 966042 - DNA, 120 bp, Artificial Sequence
  ENSG00000264956_7 (sequence is synthesized)
ccaggcacagctggagcctttcaagccacagctgcagacccaggcacctctgcactcttggggcctgggaaggcccccgtgaccacacaggctcggaagtgcctgcccccactgtctggg

SEQ ID NO: 966043 - DNA, 120 bp, Artificial Sequence
  ENSG00000264956_8 (sequence is synthesized)
ttctcctcgctgtcagcacctgctccaatcttcgagcaaagttgaggtcgagcacactatattgtgaccaatataaaatagatataaaaatacctcttacacttaaatccaggcattgcc

SEQ ID NO: 966044 - DNA, 120 bp, Artificial Sequence
  ENSG00000264956_9 (sequence is synthesized)
gtgcttttaaaaatacaagctagtgattatactgaatttgtaaatcacgtaggatagtgagtcattttagaatattaattatttcagtccataaacctggatgtctttccttttttgtgt

SEQ ID NO: 966045 - DNA, 83 bp, Artificial Sequence
  ENSG00000264956_10 (sequence is synthesized)
ttttgtgttttctttaatttctttcattgatgtttgtaatttttgttatagaaatcatttacttcctcggttaagaaatagct

SEQ ID NO: 966046 - DNA, 120 bp, Artificial Sequence
  ENSG00000264956_11 (sequence is synthesized)
agcttccttaattttttttctgctagtttactatcaacatatagaaatgctactgttttttgtatgttgattttatatcctgcagctttattaaattcatttatcactctaagaagtttt

SEQ ID NO: 966047 - DNA, 120 bp, Artificial Sequence
  ENSG00000264956_12 (sequence is synthesized)
aggtagagaccttagtttcttccgtgtatgagatcacattgtctgcaaacaaggataatttgactgtctcctttccaattcagatgccctttatttctttctctaacctaattgccctgg

SEQ ID NO: 966048 - DNA, 120 bp, Artificial Sequence
  ENSG00000264956_13 (sequence is synthesized)
ttcactatgtgaaatatgattggtgaaagtgggcctccttttcttgctccagttttcatggtaacatttttcaccttttccacgttcagtatgatcttagctgtagggttgtctttacgc

SEQ ID NO: 966049 - DNA, 120 bp, Artificial Sequence
  ENSG00000264956_14 (sequence is synthesized)
ctttacgcccttttgtgttgaggcatatgttttccacactaaattgtttagaggcttttgtcatgtaagaacgtttaattttgccaaatgctttcattgtgtttattgatttaatcatat

SEQ ID NO: 966050 - DNA, 86 bp, Artificial Sequence
  ENSG00000264956_15 (sequence is synthesized)
ttgccaaatgctttcattgtgtttattgatttaatcatatggttttcaatatatatccaaaggaaagaaaatcaatatatcaaagc

SEQ ID NO: 966051 - DNA, 120 bp, Artificial Sequence
  ENSG00000264956_16 (sequence is synthesized)
aacagatgaatggataaagaaaatgtgacatacatatataatggaatactattaagttataataaagaacaaaatcctgtcatttgtggcaacatgaatgcaactggagggcattatctt

SEQ ID NO: 966052 - DNA, 73 bp, Artificial Sequence
  ENSG00000264956_17 (sequence is synthesized)
catttgtggcaacatgaatgcaactggagggcattatcttaggtgaaataagcctggcatagaaaaataaaca

SEQ ID NO: 966053 - DNA, 120 bp, Artificial Sequence
  ENSG00000264956_18 (sequence is synthesized)
ggaggtgcaaaggcggtggactctcgcctgtcttctccgtgggatccacaggatagtccgaggatcctaggagagggcagatgtgagcgagcctgaagaaacgtcaggcagagccccagg

SEQ ID NO: 966054 - DNA, 120 bp, Artificial Sequence
  ENSG00000264956_19 (sequence is synthesized)
agtaaaccgcgaaatccctagggatccaaaaggatctgaaggatgcctcaggcctgtctagtcgttgtagggagacaaggtctggctctgtcacccaagctggagtacagtggcaccagc

SEQ ID NO: 966055 - DNA, 120 bp, Artificial Sequence
  ENSG00000264956_20 (sequence is synthesized)
ttcacaaaaaaagaaattccaaagcagaagtcctggtatgttactattccagacaaatctgatatgagaaagcactaaagataattgaaacattaatttaataattaattaattaaaata

SEQ ID NO: 966056 - DNA, 120 bp, Artificial Sequence
  ENSG00000264956_21 (sequence is synthesized)
gtacagtcctggatgtcttttttgtgctttctttaatttctttccagctatatataaatgtgtcttggtatgaatttaagtgcctgggaatgaatagtactgtcccccaggataataagt

SEQ ID NO: 966057 - DNA, 120 bp, Artificial Sequence
  ENSG00000264956_22 (sequence is synthesized)
tattagcaaattaataccttgcttctgttagttgtcaacatgttgcaagtaaacattgttgataggcactgtggatctactaagggtaagatatcatcctttcacaaaaggatagctatt

SEQ ID NO: 966058 - DNA, 120 bp, Artificial Sequence
  ENSG00000264956_23 (sequence is synthesized)
aaacctgactgtaggtaaagttaaattgcaactaaacatatgtagacatatactaagattttaaacattacacaatatttctgaccaataaaatataaactagagtctaaactgtttggt

SEQ ID NO: 966059 - DNA, 120 bp, Artificial Sequence
  ENSG00000264956_24 (sequence is synthesized)
taagaatttcattgctagagtacccttacaagttctaactgaatttccaaaaatctaacattttgttctcaataaaataaaatgtgtttaataaatatgaagcaaaaaacaaaatcctaa

SEQ ID NO: 966060 - DNA, 120 bp, Artificial Sequence
  ENSG00000264956_25 (sequence is synthesized)
acaaaagcaaacactgttgatcagtcaatttaacatggaatattattgctattatttttattgaccaataatttatttcctgacttttcttctcagatatggacactattgatgggagcg

SEQ ID NO: 966061 - DNA, 120 bp, Artificial Sequence
  ENSG00000273240_0 (sequence is synthesized)
ctgtttcacataataacagcattcggactcaacactggccaagagtgcctagacgaggaatctaccaatgatagcacacacaataggatcttgcttgtcttgacagcacagaagagcatt

SEQ ID NO: 966062 - DNA, 120 bp, Artificial Sequence
  ENSG00000273240_1 (sequence is synthesized)
gggatatacttgctgaacataattggaattgtaagaaaaataatacctgatgtgaaaggttttatgttcaaactggattccagtgtataacagaaataagctctgacctctctaaccgta

SEQ ID NO: 966063 - DNA, 120 bp, Artificial Sequence
  ENSG00000273240_2 (sequence is synthesized)
ccagtgccagatgtcctgacttctaatcctagctttgcttttcctagttgtgtgacctccaaagcacccaaactctgtggcccagttgcctgtaaaatgaggacagaaactatttcatgg

SEQ ID NO: 966064 - DNA, 120 bp, Artificial Sequence
  ENSG00000273240_3 (sequence is synthesized)
gattttgaaagaaattaatctacagcaggtgcctggtacatagtgccactttatcattattgttacacataaatgaaatttttgaaaaacataagttccaaataaaaaacctcaaccata

SEQ ID NO: 966065 - DNA, 120 bp, Artificial Sequence
  ENSG00000261560_0 (sequence is synthesized)
cttgagtcatcagtaccttcagatggagattttgctagatttcagtgagaatttatttaccatgctaactccaggcagagtaaattagaaaaagaatccattatcaaatgtaatatttag

SEQ ID NO: 966066 - DNA, 120 bp, Artificial Sequence
  ENSG00000261560_1 (sequence is synthesized)
acataattggcaccttacaaattgtattatctggtttcttgatgccttgtgcattggagatgagaatatatagtatcttctaaaatgtttacattttaaagcctactttttcctattatc

SEQ ID NO: 966067 - DNA, 120 bp, Artificial Sequence
  ENSG00000261560_2 (sequence is synthesized)
tttgcaacttggaggctaacatatgagtgaaaataattctcaggttgagttcttagttagttgttgctgctgttgttgttttgagatggagtctcaccctgtcgccaggctggagtgcag

SEQ ID NO: 966068 - DNA, 71 bp, Artificial Sequence
  ENSG00000261560_3 (sequence is synthesized)
cttacttactcagttttgtctgtagagttgtcccaaaaattatggagatgagccaggcatggtggctaaca

SEQ ID NO: 966069 - DNA, 120 bp, Artificial Sequence
  ENSG00000261560_4 (sequence is synthesized)
cccaaaaattatggagatgagccaggcatggtggctaacacctagcactttcgaagtttgaggtggaccgattgcttgagcccaggagttggagaccacactgggcaacatagggagacc

SEQ ID NO: 966070 - DNA, 120 bp, Artificial Sequence
  ENSG00000261560_5 (sequence is synthesized)
aggattgcttgagcccaggaagtcaaggttgctatgatttatgagctctgatcacaccactgcactccaggctgggcaacagaacgagacctttactaaaaaaaaaaaaaaaaaagctat

SEQ ID NO: 966071 - DNA, 120 bp, Artificial Sequence
  ENSG00000261560_6 (sequence is synthesized)
taaaaaaaaaaaaaaaaaagctatggaagtgtaaggcagcttggtggttgcaaggggctgaaggagggaaagtaaggagtgactgcttaacgggtgtaggatttcctttttgggacaatg

SEQ ID NO: 966072 - DNA, 120 bp, Artificial Sequence
  ENSG00000261560_7 (sequence is synthesized)
aagttttagaattagatagtggtattgattgtacaacatggtgaatacactagatggcactgaattgcaaactaaaatggtttaaaagttgaatgttattacttatattttaccagaata

SEQ ID NO: 966073 - DNA, 120 bp, Artificial Sequence
  ENSG00000261560_8 (sequence is synthesized)
gaaaaaagtatgattctctaaacataagtgaagttagtgcccagacatatttgcaagtgaggggccttagtaactagtatagagaaagtagctgttctctgtggaagctatcacttgata

SEQ ID NO: 966074 - DNA, 120 bp, Artificial Sequence
  ENSG00000261560_9 (sequence is synthesized)
ctaatcactaggcaggtatagaatgtcctagagttgagcaagcctcaaaaactcacttcagtttagtcctcctgaatctcagtggaacagagctagaatagtttaaaagacatagaggca

SEQ ID NO: 966075 - DNA, 120 bp, Artificial Sequence
  ENSG00000273243_0 (sequence is synthesized)
tttttctctaagttgcctatcggaattgaatctgccttgcctgagcctctcctttcagactttcttccctctccccagccatcagtgacctttcagtcttcatcccaggtcctctttctt

SEQ ID NO: 966076 - DNA, 120 bp, Artificial Sequence
  ENSG00000273243_1 (sequence is synthesized)
ttcttgcttacgtcatagaacattacaggatgctgtggactgaattgtgtcccccacgaattcgtatgttgaaaccctaactcctagtgtgattgaatttagagtaagaaagtaattaag

SEQ ID NO: 966077 - DNA, 120 bp, Artificial Sequence
  ENSG00000273243_2 (sequence is synthesized)
gttaaatgatgtcatatggcatgtgaaaacacagccagaagctggccatctgcatactaccaggaactgacttgccagcctccaggactgtgagaaaataaactgttgcttaagccatca

SEQ ID NO: 966078 - DNA, 120 bp, Artificial Sequence
  ENSG00000261566_0 (sequence is synthesized)
aaaaaaatttacctagccagatttattcagaagtagataaacttcatttaaggttagggttattatattgtctgttgcccacataatcttaacattataaatacgtcagaggaagacact

SEQ ID NO: 966079 - DNA, 120 bp, Artificial Sequence
  ENSG00000261566_1 (sequence is synthesized)
gtcataatacacagcatttggactactaaaccacttcttttaagatgaagagttctaaaaacatagttcaagtgtctaattcgagcaaaaccagcgagtttcagtggaatactgcaggag

SEQ ID NO: 966080 - DNA, 120 bp, Artificial Sequence
  ENSG00000261566_2 (sequence is synthesized)
ggttgcagagttctcaagaacagtcagactcactgttgaaggacgcgagtcccgtgtgttgagctagtttagaccatctccttgttctcctgggtaacctggcgaatggacgctgcctgc

SEQ ID NO: 966081 - DNA, 120 bp, Artificial Sequence
  ENSG00000261566_3 (sequence is synthesized)
tatgcaggctgctgagcgacaggttgggcgctggcccttgcagcgcttcgcgggggcggacagcaacaggagacattggctgtggcgcgatgccgaccagcaggcggggaagacactgct

SEQ ID NO: 966082 - DNA, 120 bp, Artificial Sequence
  ENSG00000261566_4 (sequence is synthesized)
gtgagagctgaggcagaagaggacttgacaggctgggcgccgagctcacgaggggccctggcttcaacgctgaggcgcggacgccaaaaaggctgcgagaggcgagacccgcgatgttgg

SEQ ID NO: 966083 - DNA, 120 bp, Artificial Sequence
  ENSG00000273245_0 (sequence is synthesized)
ggggttaggatatgaagttaatcacttattagtgactaccctctaccaaaatgactacatgcaagcagtcctgcctggaggaagttaaggacaaagagaaaggaaaataagtaaaaccta

SEQ ID NO: 966084 - DNA, 120 bp, Artificial Sequence
  ENSG00000273245_1 (sequence is synthesized)
catgatttttgtaacataggcttggtcacattgctatatttcatctaagtgatggctatacagtttttctctgcttgtcacatttaacagagatataaaagttcttgctaaaaggctagt

SEQ ID NO: 966085 - DNA, 120 bp, Artificial Sequence
  ENSG00000273245_2 (sequence is synthesized)
ttgggaagaaatcggagcaagacaactggcgaggcaaaaagaacaagcaggggcagacatggaaatccacctagtctgttttaaagagcccctgggcaggcaacttctgaggaggacgct

SEQ ID NO: 966086 - DNA, 120 bp, Artificial Sequence
  ENSG00000273245_3 (sequence is synthesized)
gtcagcagaagtgccatcatataaacactacaccttcaaaaaagtttcctgaccctattgtcccctctgtgtcctcctcatttcagttaacatggcctgttaaaaaatcttgtcaccatt

SEQ ID NO: 966087 - DNA, 120 bp, Artificial Sequence
  ENSG00000273247_0 (sequence is synthesized)
aagaaataaagggcaaagactttaagccacttgtctgaagttgcactgttagtgaaatttaataatagtagcaaacatttgttgagccgttttgctaagtacttcaaatggattatatca

SEQ ID NO: 966088 - DNA, 120 bp, Artificial Sequence
  ENSG00000273247_1 (sequence is synthesized)
cctgaggctcagaaaaactcttgacaaaattctcagggaaaactcttcagctctggatgtctccctttttgtggatcaaacacaaagggcatcattctaaaatatatacagaaccataaa

SEQ ID NO: 966089 - DNA, 120 bp, Artificial Sequence
  ENSG00000273247_2 (sequence is synthesized)
agccccaaatagccaaagcaaccctgagcaaaaagaacaaggctggaagcatcacactaccagacttcaaaatttactacaaagctctaatacctaaaataacatggtactggcattaaa

SEQ ID NO: 966090 - DNA, 120 bp, Artificial Sequence
  ENSG00000273247_3 (sequence is synthesized)
ctcgggctggcgccggtctacctaggcaggcgtgggacctgtcgggggcttcacggcagcgcggaaggccagcctgcagagaggctgggcccagcgccctgactgacccagccccgccac

SEQ ID NO: 966091 - DNA, 120 bp, Artificial Sequence
  ENSG00000273247_4 (sequence is synthesized)
gtccaaggttcccgccctctggaggaagccgcgcaatcactccgggggcggggagagacagacaactgagaggaaggaggtaccacgggcactctctcgcgagagggccgcagagccgcc

SEQ ID NO: 966092 - DNA, 120 bp, Artificial Sequence
  ENSG00000273247_5 (sequence is synthesized)
tttgacgggggcgtgtacctggagagcaacggagggaatctgaagatttaaggacaaagagcagttgaaaactcagagctgtggttaatgggagaatttcaaggatggtgaaaaaaacta

SEQ ID NO: 966093 - DNA, 120 bp, Artificial Sequence
  ENSG00000273247_6 (sequence is synthesized)
agaacatacaatgaggaaacgatggtcttttcaataaatggtgtgggggaaagctagataactatatgcagaagaatgaaacaagattcctctctctcgctatacacaaaaatcaaatca

SEQ ID NO: 966094 - DNA, 120 bp, Artificial Sequence
  ENSG00000273247_7 (sequence is synthesized)
aaatggattaaaggcttaaatctaagacctgaaactacaaaactagaagaacacactggagaagtgctccaggaccttggtctgggaaaagatttttttgtttaagacctcaaaagcaca

SEQ ID NO: 966095 - DNA, 120 bp, Artificial Sequence
  ENSG00000273247_8 (sequence is synthesized)
gacaacaaagcaaaaacagacaaatgagattacattaagctaaaaagtttctgcacagcaaaggaaacactcaacagagtgggggagacaacccacagaatgagagaaaacattttcaaa

SEQ ID NO: 966096 - DNA, 120 bp, Artificial Sequence
  ENSG00000273247_9 (sequence is synthesized)
ctatccatccgacaagggattaatgaccagaataaagagaccaaacaatttaagccaaaaacaaaacaaacaaacacacaaaaaaaacaaaagccaaataatctaaaaagtgggcaggtt

SEQ ID NO: 966097 - DNA, 68 bp, Artificial Sequence
  ENSG00000273247_10 (sequence is synthesized)
agtcccagctacttgggaagctgaggcagaactgcactccagcctgatgacagagcgagactccatct

SEQ ID NO: 966098 - DNA, 120 bp, Artificial Sequence
  ENSG00000273247_11 (sequence is synthesized)
caactgcactccagcctgatgacagagcgagactccatcttgaaaaaaaaaaaaaaaaaagtgggcaaaagatccaaacagacatttctcaaaggaagacataaaaatggccaacaggta

SEQ ID NO: 966099 - DNA, 120 bp, Artificial Sequence
  ENSG00000273247_12 (sequence is synthesized)
aatcattagagaaatgcaaattaaaacaacatgttatttcaccccagttaaaatggcttgtattaagaaaacagataataacagatgctagtgaggatgtggagaaaagagaaccctcat

SEQ ID NO: 966100 - DNA, 120 bp, Artificial Sequence
  ENSG00000273247_13 (sequence is synthesized)
tagtgaggatgtggagaaaagagaaccctcatacactgttggtagaaatgtaaactagtacaaccactatgaagaacagtatggaagttcttcaaaaaactaaaaatagaattaccatat

SEQ ID NO: 966101 - DNA, 120 bp, Artificial Sequence
  ENSG00000273247_14 (sequence is synthesized)
aattccactactgaatatgtatccaaaagaaaggaaatccgtatatcaaaaagatatctgcactcccatgtttattgcagcattgttcacaatagccaagatatggaattaacctaagtg

SEQ ID NO: 966102 - DNA, 120 bp, Artificial Sequence
  ENSG00000273247_15 (sequence is synthesized)
cccatcaatgggtgaatggataaagtgtggtatgtatgcacaatgaaatattaatcagccataaaaaataatgaaaccctctcatttgcagcaacatggatgatactggcgaccactatg

SEQ ID NO: 966103 - DNA, 120 bp, Artificial Sequence
  ENSG00000273247_16 (sequence is synthesized)
ttaaataagccaagtacataaagacaaatattgcatgttgtcagtcatacatgggagctaaaaatgtggatttcatgatgacacagagtacattggtggttaccagaagccagaaaggag

SEQ ID NO: 966104 - DNA, 120 bp, Artificial Sequence
  ENSG00000273247_17 (sequence is synthesized)
gggatggagtaggggatgaagggggaaaaaggatataagtgtacttattaccactgaactgtacacttaaaatggtaaagatggtatgttatgtattacctcagtttacaaaagaaaaaa

SEQ ID NO: 966105 - DNA, 120 bp, Artificial Sequence
  ENSG00000273247_18 (sequence is synthesized)
caaatggcatcaacgttaataagtgtaaaagttgtactagggataaatccgccatttaaaagggaaattagaaatctgaaataatgagtgcagttagactctgaaacccttgaagtcccc

SEQ ID NO: 966106 - DNA, 120 bp, Artificial Sequence
  ENSG00000273247_19 (sequence is synthesized)
aaaagtctcattcagaactggtcccaaaatgaatacgtacttttgtatcattgtctaattaaagctgcttttttcaagtattagtttgcttcaaaattaatctttttatttgtactatta

SEQ ID NO: 966107 - DNA, 120 bp, Artificial Sequence
  ENSG00000273247_20 (sequence is synthesized)
agacaactgagaggaaggaggtaccacgggcactctctcgcgagagggccgcagagccgcctttgacgggggcgtgtacctggagagcaacgcaggcaatcaagctggctaggttcctgc

SEQ ID NO: 966108 - DNA, 120 bp, Artificial Sequence
  ENSG00000273247_21 (sequence is synthesized)
agacaactgagaggaaggaggtaccacgggcactctctcgcgagagggccgcagagccgcctttgacgggggcgtgtacctggagagcaacggtaaggacggagccgacggctccggcgt

SEQ ID NO: 966109 - DNA, 120 bp, Artificial Sequence
  ENSG00000273247_22 (sequence is synthesized)
cgggtcggttccggcatcgacgtatcgtttggtcgccccagagaggagacaggtttcttcagcttgccgctgaggatgtggcatcggctgcgctcaccgccgccgcctctgtgaactgcg

SEQ ID NO: 966110 - DNA, 120 bp, Artificial Sequence
  ENSG00000273247_23 (sequence is synthesized)
ggagttgggacagcggccagggctagatgggtgggacgcgagtcctcgccgaaagcttgccctgtgcggggcgcacttggaggcgagctctgggccgtggcgagttttgcagcctaaggt

SEQ ID NO: 966111 - DNA, 120 bp, Artificial Sequence
  ENSG00000273247_24 (sequence is synthesized)
cttggcaggcgcattgctgtgggctgccggagagcaggctggagttcgagaccgcccaccggagagcaggcgagagttcgaggcctaggtacagcgcatttcgctaggcatccccaagaa

SEQ ID NO: 966112 - DNA, 120 bp, Artificial Sequence
  ENSG00000273247_25 (sequence is synthesized)
tatccgcgtgatccttgtggccagagtttgttgagctaatatccccagcccaaacagtagagcacatcacatgtcggccacctgggagcgttgaacctggtagttactaggcgcccctgg

SEQ ID NO: 966113 - DNA, 120 bp, Artificial Sequence
  ENSG00000273247_26 (sequence is synthesized)
tggaaataaaactcattatgccctagttatgtcttagtgcctgggtgacgatgatgtagcggttaaagattaactgagcgcacttagaggttgtctttgtctacctaaggaaaatatcaa

SEQ ID NO: 966114 - DNA, 120 bp, Artificial Sequence
  ENSG00000273247_27 (sequence is synthesized)
tagattaaacccccaaccttaaagaatctccgtgaatttttctgaggaaacgtgcaatattgtcatacaaaaggccccaaatatgcaaacattgctttttgttaaaagtttgttttgttt

SEQ ID NO: 966115 - DNA, 120 bp, Artificial Sequence
  ENSG00000273247_28 (sequence is synthesized)
tgcagtgacatctgtttgagcagatgaatatgccattgggaaagtcaaggactgtcggagaggaggacatggcagaccttaactaaagtgagggggacagtagagcactaaaagttctag

SEQ ID NO: 966116 - DNA, 120 bp, Artificial Sequence
  ENSG00000273247_29 (sequence is synthesized)
gaaaggagatgaactgcttattccatcagatgaaaatatagtcagaacagatgagtagtagaacttaaacatgcccggagttgccaggaatttgcaaaagccttgatataattcctgttg

SEQ ID NO: 966117 - DNA, 120 bp, Artificial Sequence
  ENSG00000273247_30 (sequence is synthesized)
ctgtagaaagactttctacagtcactaatatatcaagttatgttcactagaaaaaaagtttacttagtttatagaaatgggctgaaaaatcctaattacttatctgtgaggttattttca

SEQ ID NO: 966118 - DNA, 120 bp, Artificial Sequence
  ENSG00000273247_31 (sequence is synthesized)
tttatgctaactctaacacacattttggggtattgctaatttaatctttgaatactgtttttgctgtttcatgattatatgttatgtcctaccagctagattgccaactcttgactactg

SEQ ID NO: 966119 - DNA, 120 bp, Artificial Sequence
  ENSG00000273247_32 (sequence is synthesized)
actggaagtttattgtttattcagcaaataatgaattaagtcagtgaagtgagagatttcgtgtgtaaggattgttaacttgaacatttcaccagttacacacagttcagccctacttaa

SEQ ID NO: 966120 - DNA, 120 bp, Artificial Sequence
  ENSG00000273247_33 (sequence is synthesized)
attttaaaaatcattgttggcacttgacattgttatgaggagttttgtattttcaacttgtattttgagagtgtcctcatgtgactgaagtatgtgctactcttcttaattgaataaccc

SEQ ID NO: 966121 - DNA, 120 bp, Artificial Sequence
  ENSG00000273247_34 (sequence is synthesized)
cagaatctccagaattgataattggaggaaattctactgttggaaagaatggatggattatacagccctgttttttgactgttcattttgtccttggagtcactaccacttggcctcaaa

SEQ ID NO: 966122 - DNA, 120 bp, Artificial Sequence
  ENSG00000273247_35 (sequence is synthesized)
gtgtgaacatgtaaccctttccttaatactttgctacacagctgagcagaaactgtaaatttggatcctttgtcagtacaacttaaaatggaacaatttcaatggcttagggtaagataa

SEQ ID NO: 966123 - DNA, 120 bp, Artificial Sequence
  ENSG00000273247_36 (sequence is synthesized)
acaatttcaatggcttagggtaagataagtatgtaaagatacttttgtaatagaagaaaaaacattggatattaaaatcacacagtagtacctgggtgtggtggctcatgcctataatcc

SEQ ID NO: 966124 - DNA, 60 bp, Artificial Sequence
  ENSG00000273247_37 (sequence is synthesized)
tgcctataatcccaacgctttgggaggccaagacaggagcactgctatacaaaaatcagc

SEQ ID NO: 966125 - DNA, 90 bp, Artificial Sequence
  ENSG00000273247_38 (sequence is synthesized)
aaaaaaaaaaaaaaaaaaaaagtgggtgtggttgtgtacacctctacttcctgctactcaggaggctgaggctctgcagtgagctatagt

SEQ ID NO: 966126 - DNA, 120 bp, Artificial Sequence
  ENSG00000273247_39 (sequence is synthesized)
ggagttcaagtctgcagtgagctatagttgcactgctgcactccagcctgggtagcacagcgagacccccatctctaaaacataaaagtaaacaggctgggtgcagtggcttacacctgt

SEQ ID NO: 966127 - DNA, 120 bp, Artificial Sequence
  ENSG00000273247_40 (sequence is synthesized)
agactgtgtctcaaaaaaaaaaaaaaaagtagaaaacagaatagcataaggataatcttatatacaaaataagactactcaatttctgaattttttttttaactagatatgccacctcct

SEQ ID NO: 966128 - DNA, 120 bp, Artificial Sequence
  ENSG00000273247_41 (sequence is synthesized)
aattttttttttaactagatatgccacctcctgatgacagtgcccatttcgtaacttgtcttactcagaaacagctcttagataattttactctttaagttcaggtctgagcacagagga

SEQ ID NO: 966129 - DNA, 120 bp, Artificial Sequence
  ENSG00000273247_42 (sequence is synthesized)
caaagaattcccttgattgcctatgaaagaaaggattctcaaccttggcactattgacattttaagtcagataattctttgttgtggaaggttatcctgtgcattgtaggatgtttattt

SEQ ID NO: 966130 - DNA, 120 bp, Artificial Sequence
  ENSG00000273247_43 (sequence is synthesized)
tatcagcatccctggcttctacccagtaaatcccagtagcaccccaccaccaaccaaaactgtctcaaaatgttgctagatgccccttggggacaaaaatcctctccctccctcctcctt

SEQ ID NO: 966131 - DNA, 120 bp, Artificial Sequence
  ENSG00000273247_44 (sequence is synthesized)
gaatgccactggcactccttgagcctacagaagggctcttctcacaagtttgataccctgtacctcccagttgatagtgggaattacttctcctttgaagacacaattccagttaccctg

SEQ ID NO: 966132 - DNA, 120 bp, Artificial Sequence
  ENSG00000273247_45 (sequence is synthesized)
agaagtatggcattggccttgctggcctccaccaaattactatatcactgtgtttggtaaccccagacatcatactagggctttaatttcagtatataaatagtaaattagtatccttgt

SEQ ID NO: 966133 - DNA, 120 bp, Artificial Sequence
  ENSG00000273247_46 (sequence is synthesized)
ataggttagcttaatgagtttcagaattcttcaagtcatatcttcataggtaggatcactgtggagttaatggcatttgaactatgtactcagtactatgctagtggttggtgcaagggg

SEQ ID NO: 966134 - DNA, 120 bp, Artificial Sequence
  ENSG00000273247_47 (sequence is synthesized)
aagatacaaaataaggtgtgattttagcccatgaggaatttatactttatctgcagaagcaaattaatatggaaccgttagtgaacacctggataaaacagaatgctaaattttacccta

SEQ ID NO: 966135 - DNA, 120 bp, Artificial Sequence
  ENSG00000273247_48 (sequence is synthesized)
gaggtgcttggcctggacttcaagaattctaagtgaattgaagtatgttcacagtaagaaaggttaaaaatggctctgcccacttgtaggcagatgggaagctaggatggcagacttgcc

SEQ ID NO: 966136 - DNA, 120 bp, Artificial Sequence
  ENSG00000273247_49 (sequence is synthesized)
aatatttgatatatgtaaaaagtgcaatcatggcctctgttgtttcctcttttatctcgttctctttattagtccaggttctctagaggaatagaactaataggagatatatatatatat

SEQ ID NO: 966137 - DNA, 120 bp, Artificial Sequence
  ENSG00000273247_50 (sequence is synthesized)
ttaactcacatgatcacaaggtcccagaataggccatatgcaagctgaggagaaaggaaggcagtcgagtttcaaagctgaagaacatggagtccaatgtttgaggacgggaagcatcca

SEQ ID NO: 966138 - DNA, 89 bp, Artificial Sequence
  ENSG00000273247_51 (sequence is synthesized)
gaaggcagtcgagtttcaaagctgaagaacatggagtccaatgtttgaggacgggaagcatccaacatgggagaaagctttcatgtttt

SEQ ID NO: 966139 - DNA, 87 bp, Artificial Sequence
  ENSG00000273247_52 (sequence is synthesized)
aacactctcacagacacattcaggatcgatactttgcatcctttaatccaatcaagttgactgtattaaccatcacaagtccaccac

SEQ ID NO: 966140 - DNA, 120 bp, Artificial Sequence
  ENSG00000273247_53 (sequence is synthesized)
ccaatcaagttgactgtattaaccatcacaagtccaccacttgtcaacttaaacacatacatatctcctgagatcattcataatcttcaaataaagacaataataatgtcataattacac

SEQ ID NO: 966141 - DNA, 78 bp, Artificial Sequence
  ENSG00000273247_54 (sequence is synthesized)
taatcttcaaataaagacaataataatgtcataattacacctaatacaactatcctttgtacagctggaaacacacca

SEQ ID NO: 966142 - DNA, 120 bp, Artificial Sequence
  ENSG00000273247_55 (sequence is synthesized)
cccagcactttgggaggccgagatgagtaatggcttttgacagtaatagagggtctcaacctgatttttcttaagtttgcataaggcttaggagaggataaaataaggcaggatctagag

SEQ ID NO: 966143 - DNA, 120 bp, Artificial Sequence
  ENSG00000273247_56 (sequence is synthesized)
taggagaggataaaataaggcaggatctagagattggtgaggagaaacggaagtcctcattcttgacagctctcagcacatgcagccctccccacacacacagtcacactcacacacact

SEQ ID NO: 966144 - DNA, 120 bp, Artificial Sequence
  ENSG00000273247_57 (sequence is synthesized)
cacaaccagattcacattcctacccatgcacacactaacacacacttgtgcacttaaactcgtgcacttacacattcacattcatatactcacatgcacacattcaaaacacacacatac

SEQ ID NO: 966145 - DNA, 120 bp, Artificial Sequence
  ENSG00000273247_58 (sequence is synthesized)
atactctacaaacactcatgttgcaaaaggggatttgtaagctgaatgtttagaactcagaacacatattttcacaaaaataatattatggtcgggcgctgtggctcacgcctgtaatcc

SEQ ID NO: 966146 - DNA, 120 bp, Artificial Sequence
  ENSG00000273248_0 (sequence is synthesized)
cctggctctaaaaagattttttttttttaacagggattgtattgacagtgggggcttggggagggcagacacggaccctgggagcgctgcagggcactggggggagagaggggcgggact

SEQ ID NO: 966147 - DNA, 120 bp, Artificial Sequence
  ENSG00000273248_1 (sequence is synthesized)
ggagaattgtcccccatccagtccccgcgatgactgggttttgacagcctcccctcccgagcgcgcacattcccaggtttgcagaatgaaaatcaataaaatcgatgcagtggcaaagaa

SEQ ID NO: 966148 - DNA, 120 bp, Artificial Sequence
  ENSG00000273249_0 (sequence is synthesized)
ttggaaagcacctggggccgcgcccgggcgcagtgcccccatgtggcctcccaccccgggcgggcaggacgattcctgcccatctggaagaccaggaacctgcgcgttcacagggttcgg

SEQ ID NO: 966149 - DNA, 120 bp, Artificial Sequence
  ENSG00000273249_1 (sequence is synthesized)
cacagggttcggaagcccgggctgcgccttcccgcggggccggctgccgggctgggggctcttcccgcctctgcatgcacagagcccgcggtgcacgaacctgctccccgccagccccgc

SEQ ID NO: 966150 - DNA, 120 bp, Artificial Sequence
  ENSG00000273249_2 (sequence is synthesized)
gcccgctccgcagtgcgcaaactcacttcgcagcgggctctcccggggccagcccttccctcctgggcgggcattttcacctccaggtacaagggggtggtccccagaggaggactcagg

SEQ ID NO: 966151 - DNA, 120 bp, Artificial Sequence
  ENSG00000273249_3 (sequence is synthesized)
ggcttaaggagaagctgaggcccggtcctctggcctcaacgactgcacattctcgccgcctgcttcacttcttagagccttggaggtgaattggtctcaccacctcaccccacccccagg

SEQ ID NO: 966152 - DNA, 72 bp, Artificial Sequence
  ENSG00000273249_4 (sequence is synthesized)
tggaggtgaattggtctcaccacctcaccccacccccaggagatagaaccttctagtaaaaatgagaaaatc

SEQ ID NO: 966153 - DNA, 120 bp, Artificial Sequence
  ENSG00000273249_5 (sequence is synthesized)
gggacctgcgcaggtggcgtcgcccggcgttgtctccggagtcgattcgggccggggcacctccccgggcgaccaggccccttcttgatcatcgctggtacggatgagagcggcagtggg

SEQ ID NO: 966154 - DNA, 120 bp, Artificial Sequence
  ENSG00000273249_6 (sequence is synthesized)
ccttggagtggactgccgaaccctgagagggagggccactggcagcgatggacgaatggcccgtggcaggagtgctggtgtcctcgaagcaggcagcccggaagcactggccccttcatg

SEQ ID NO: 966155 - DNA, 120 bp, Artificial Sequence
  ENSG00000273249_7 (sequence is synthesized)
gccagcccagagctttggggggcagcggattccgatggcagttgattcgggaaggtggaggaagccgagggacggggcaatgcccaggacccagggtttcccggagctgctgaccagatt

SEQ ID NO: 966156 - DNA, 120 bp, Artificial Sequence
  ENSG00000261569_0 (sequence is synthesized)
ctggaccagatggaaattcagggggctattaaaaagcacccaggtatgctggcaaattgacaaagcactctgtgcataaccacgaaaaacacattttcttaaagacccaagaagaccctc

SEQ ID NO: 966157 - DNA, 120 bp, Artificial Sequence
  ENSG00000261569_1 (sequence is synthesized)
aagtgaagactgaagcaaagttttcaacagtctgcacatgtgttaaaggaacgccccagcccagagccatccacaaaaactggaagaatccgtcagtttgtctttgtctcagttttgtca

SEQ ID NO: 966158 - DNA, 120 bp, Artificial Sequence
  ENSG00000261569_2 (sequence is synthesized)
tatagacctttgtgacacacagatctatatacaatggaaactacaaatttctaatgaaagagccatgaaagatcacaaaagatcttaataaatagaaagacatttaatgtgcatgatcat

SEQ ID NO: 966159 - DNA, 73 bp, Artificial Sequence
  ENSG00000261569_3 (sequence is synthesized)
cagctgtcctgagagcacgtctctacatctaactaggtcagccgcctccaaccctttgactacaaggactttt

SEQ ID NO: 966160 - DNA, 120 bp, Artificial Sequence
  ENSG00000214432_0 (sequence is synthesized)
gctcccagcgcttcgcgtaccaggaaggggacggcgtcctgaaagggacatttgaaaaacggaggcaacgcgtctattaattaggtggcggcgcctggggtcgcagcactccagaggctg

SEQ ID NO: 966161 - DNA, 120 bp, Artificial Sequence
  ENSG00000214432_1 (sequence is synthesized)
tcgcagcactccagaggctgagagtctcgcccttttgcctagtggaggagctcggctcactgcaagctccgcgccacaacccccctgccgccccaggttcaagagattctcctgcctcag

SEQ ID NO: 966162 - DNA, 88 bp, Artificial Sequence
  ENSG00000214432_2 (sequence is synthesized)
ttgggccagaatgctggggtggaagagttcccagttttaaaggagaagtacaagaagacctgtaattgttagcaagatatacagaaca

SEQ ID NO: 966163 - DNA, 120 bp, Artificial Sequence
  ENSG00000214432_3 (sequence is synthesized)
tacaagaagacctgtaattgttagcaagatatacagaacacagtgcacacagcagcgcacttctcaagtcagctccaggttcaagctcaaaggcctaaagttttgcaaacatctggtgaa

SEQ ID NO: 966164 - DNA, 120 bp, Artificial Sequence
  ENSG00000214432_4 (sequence is synthesized)
cagaatgctggggtggaagagttcccagttttaaaggagaagtacaagaagacctgtaattgttagcaagatatacagaacacagtgcacacagcagcgcacttctcaagtcaggtcctc

SEQ ID NO: 966165 - DNA, 120 bp, Artificial Sequence
  ENSG00000214432_5 (sequence is synthesized)
caagatgctcggcatgggctgaggcgcctcctcctcctccttactgcccagttcatcgcctgtgaggggtggccagaggggtcctcggacaactcaacaagggagatggtcagaacgatc

SEQ ID NO: 966166 - DNA, 120 bp, Artificial Sequence
  ENSG00000214432_6 (sequence is synthesized)
aagcgacctctccaaggcggggactgaagcgtcaggtctcacctgctccaacatctcctgcatcctctgccacacgcggcatgctctccatggagatactcagcgtactcgtctctccat

SEQ ID NO: 966167 - DNA, 120 bp, Artificial Sequence
  ENSG00000214432_7 (sequence is synthesized)
ttgtagatactgcagccactccatcacctgcgagaattgacacagaagttaggaagggctgtcactggtcctcacatactcctggccacctggggtcatcttccttccacgtccctccct

SEQ ID NO: 966168 - DNA, 120 bp, Artificial Sequence
  ENSG00000214432_8 (sequence is synthesized)
ctgcaaagcctcacgtgccccaggtatgcttccagctgtgcccgctcctccatggcctgctgtaactgctggttagcatccagggctttgcagcatctagacaactggatggtgaaacag

SEQ ID NO: 966169 - DNA, 120 bp, Artificial Sequence
  ENSG00000214432_9 (sequence is synthesized)
gagacatttctatctggggagcccggactgttccacacagcgcctttaaaagggctagggctaggctcaatgtacaactcagtcaataaggtctctgtcaagttgctttgctttagatac

SEQ ID NO: 966170 - DNA, 62 bp, Artificial Sequence
  ENSG00000214432_10 (sequence is synthesized)
gcgaagccccgtctctaccctgaggcaggagaatagcttgagcctgggaggtggaggttgca

SEQ ID NO: 966171 - DNA, 120 bp, Artificial Sequence
  ENSG00000214432_11 (sequence is synthesized)
aggttgcagtgagctgagatagcaccaccgcactccagcctgggtcacagagcgagacctcacctcaaaaaaagaaaaaaaaaagatcacaactctattaccaggaaatagtgaaagtgt

SEQ ID NO: 966172 - DNA, 120 bp, Artificial Sequence
  ENSG00000214432_12 (sequence is synthesized)
gtgttggcttgaacctcagaaggaaataaacagactcatgagctagccatataaatgtaatctataaaataatggttttcatccatgatgctttatgaaaaaaaattttaagccctaacc

SEQ ID NO: 966173 - DNA, 120 bp, Artificial Sequence
  ENSG00000214432_13 (sequence is synthesized)
ttcagattctgattccccaggtccatggcagggcctcaatttgtagatttttagcagtctctagaggattctatggcaggagaagaacaaggactcaaatttttcggctcttggctggag

SEQ ID NO: 966174 - DNA, 120 bp, Artificial Sequence
  ENSG00000214432_14 (sequence is synthesized)
cctccccatacccggcatgatccctaggccatggccccagctggatggggctctcaccaccccagggctgcagtaatccctccaggtgttcaagaacctctggcatacgccaggtagaaa

SEQ ID NO: 966175 - DNA, 120 bp, Artificial Sequence
  ENSG00000214432_15 (sequence is synthesized)
tctgtaggtccaaagccagggataccatatgttctgtattgatatgaaacaatgacttgcaattaaaacatataaatatccttcctactcctaccctccatccaatgtgttttattttta

SEQ ID NO: 966176 - DNA, 120 bp, Artificial Sequence
  ENSG00000214432_16 (sequence is synthesized)
gttttatttttatgagttaaataagaaaacgagtggcaatcggagattttgtctaaaaagtatatctacaggtatcagttctcatccagcctgatctcatccaatatcatatatattctc

SEQ ID NO: 966177 - DNA, 120 bp, Artificial Sequence
  ENSG00000214432_17 (sequence is synthesized)
tccagcctgatctcatccaatatcatatatattctcttacatgtaaagtttcagaaaagtatcttcacaatgtaagactcaggcacactaggagttctataataaaacaccaagtagatc

SEQ ID NO: 966178 - DNA, 77 bp, Artificial Sequence
  ENSG00000214432_18 (sequence is synthesized)
tgtccaaccttacttcaacaggaaatttaagttttgagttttttccaccttgaacctgggaagcggaggttgtggtg

SEQ ID NO: 966179 - DNA, 120 bp, Artificial Sequence
  ENSG00000214432_19 (sequence is synthesized)
atctctttgagatacatactgaagtttttacaggtgaaataatttggccaggagtaatggttcatgtctctaattcccaccactttgggaggtccaggtcggggtcggggggttgcttga

SEQ ID NO: 966180 - DNA, 120 bp, Artificial Sequence
  ENSG00000214432_20 (sequence is synthesized)
ggggttgcttgaggccaggagtttgagataagattggtcaactacaacacataaaaaatagccaggcatggtggtgggcacctttaatctcgatacttgggaggctgaggcaggaggatc

SEQ ID NO: 966181 - DNA, 120 bp, Artificial Sequence
  ENSG00000214432_21 (sequence is synthesized)
taggacaaggagactggctttcacagaggttcgggttgggttcagttttcttcagaagaacttcagaatgcactacaacaggaaaatcatattctagatggagtcaagtcaatctgtttg

SEQ ID NO: 966182 - DNA, 120 bp, Artificial Sequence
  ENSG00000214432_22 (sequence is synthesized)
tataccagatacatctatgatatacatgcagctactatctgattatgtatcaattaaatagatcataaatgtggaacgatggggactttgagagatttgtaactgaagctgccttcatgc

SEQ ID NO: 966183 - DNA, 120 bp, Artificial Sequence
  ENSG00000214432_23 (sequence is synthesized)
atttgaaacaaagcaagagcttcttttccccactccgaattaaaacacagcgcaacaggggccacatttatttggcaggacagtaccaatatgtgaacatcctcctcctcactgccgttg

SEQ ID NO: 966184 - DNA, 120 bp, Artificial Sequence
  ENSG00000214432_24 (sequence is synthesized)
gggtgacttgactcataagcagctgttcttacacaaaatattaacccgaactgctagtgtcacacagaaggaagtggtcttgattgtgtatgtgggccagcatgttctacaaatgctgaa

SEQ ID NO: 966185 - DNA, 120 bp, Artificial Sequence
  ENSG00000214432_25 (sequence is synthesized)
aggtgggagaagcacaaatacaacccactctttaaaaaaactaaataattcaaagtaaaattttctatccccgccccctccccacccttgccttctccaataataaaaagtagaatccag

SEQ ID NO: 966186 - DNA, 120 bp, Artificial Sequence
  ENSG00000234768_0 (sequence is synthesized)
ggtcgagtgggtccagggggagccttggtggccaagtctgctgtgtggccgcagtagaatcctgagcctgggtgagggggaagagcagaagtttccttcccacatttctggaggctgggg

SEQ ID NO: 966187 - DNA, 120 bp, Artificial Sequence
  ENSG00000234768_1 (sequence is synthesized)
gtgacggccttgatccccttcactgggaggagacctggagctagtcatcctccaacactatcacgtcggcaacgcctgggtcttggaggggacacattcgaacctcagccaggtacaagc

SEQ ID NO: 966188 - DNA, 120 bp, Artificial Sequence
  ENSG00000234768_2 (sequence is synthesized)
aggagcagggaggccctgacggggcaggacggtgacacctcctctccacacctctgcagcagaagatcgtgcctcctggtggggatgattattgattaaagcatctgaattcaatcagaa

SEQ ID NO: 966189 - DNA, 120 bp, Artificial Sequence
  ENSG00000234766_0 (sequence is synthesized)
tcccaaagtgctgggattacaggtgaagttttagtacagcgtggtgaccttggaaagcctgttctgcttctgacaaaagtggcctgagcctgtgggtacacagtgttattgggactagct

SEQ ID NO: 966190 - DNA, 120 bp, Artificial Sequence
  ENSG00000234766_1 (sequence is synthesized)
gcttcaaatcgtaaagtaacatgtggaggcgacacaaatattatttgctgggagtgagagaggtactcacatgctcttttcacttattgtccagaagaagaacatcatgatggaagatac

SEQ ID NO: 966191 - DNA, 120 bp, Artificial Sequence
  ENSG00000234766_2 (sequence is synthesized)
ctttcactggagtcagtgactcttagctactgaataccttacccaataggtcaatgctgaatgttatcaatgaagtccataacaaaccatagctgtggataataataatccttcttataa

SEQ ID NO: 966192 - DNA, 120 bp, Artificial Sequence
  ENSG00000234766_3 (sequence is synthesized)
attatttgctgggagtgagagaggtcccacttccaccattggggattacaatttaacatgagatttgggcgaggacaagtatccaaactatgtcagctgtgaaagtttggggaaaaggga

SEQ ID NO: 966193 - DNA, 120 bp, Artificial Sequence
  ENSG00000234766_4 (sequence is synthesized)
tttatttttacattttttcttagctgtttcccaagaagatatccacatcatctacaaataatgacaactttgtgtttttaccaacatatatcagatttttttctctttacaactcattcc

SEQ ID NO: 966194 - DNA, 120 bp, Artificial Sequence
  ENSG00000234766_5 (sequence is synthesized)
actagaaagaaattgtaagacaatacttaataacatttttgatagtaggcagacttgtcttgctcctgattgtaatgcagttttccctagttgtttaacatcatttgtgtgtttgtgaat

SEQ ID NO: 966195 - DNA, 83 bp, Artificial Sequence
  ENSG00000234766_6 (sequence is synthesized)
ttttccctagttgtttaacatcatttgtgtgtttgtgaatttgagaaccctgagaaatattgcctgttaagtatactttctta

SEQ ID NO: 966196 - DNA, 120 bp, Artificial Sequence
  ENSG00000234766_7 (sequence is synthesized)
ttataattttgttaatatatgacccgcagcgttttgtcatattacggtctaggttagtgcagatattgcttgtgcttgggaacaggatcatttttatttgtgattctgggtataagtgga

SEQ ID NO: 966197 - DNA, 120 bp, Artificial Sequence
  ENSG00000234766_8 (sequence is synthesized)
gttgagcagatcctgggaaagtgaactaaactgttatttgaaaattggactgtatgtctcacgactactctccatttccatatgagtccatttcccctagataaaggaaatatttcatca

SEQ ID NO: 966198 - DNA, 120 bp, Artificial Sequence
  ENSG00000234766_9 (sequence is synthesized)
acaaacgaaggaggctttcatgatccccccttggctgatgccaacagagtgccagtaagagagagacaaaggtgcaaccaaaatcaggggacctcagggttcttctctctacggctacta

SEQ ID NO: 966199 - DNA, 120 bp, Artificial Sequence
  ENSG00000234766_10 (sequence is synthesized)
tgagatgaggaaacaccaagaataaataagaagaaagaaggctccaggttgttaaatttttggcgatgggatgccatttcctggccaagaggacaggaggaccagagagagaggtgagag

SEQ ID NO: 966200 - DNA, 120 bp, Artificial Sequence
  ENSG00000234766_11 (sequence is synthesized)
ctggccaagaggacaggaggaccagagagagaggtgagagagcagcaagtgaccttgcgggagtctcacggcgggagtcttttaaaaatcaaagtgtacccagagtgtgatgttcccctt

SEQ ID NO: 966201 - DNA, 120 bp, Artificial Sequence
  ENSG00000234767_0 (sequence is synthesized)
tccatgcctagcatcatagggaaaaacagctggagcaattgaagttagggttaaggatctcaagggcttggacttctcagagatgaagatctggatcactccatcaggcaagcaacgaag

SEQ ID NO: 966202 - DNA, 120 bp, Artificial Sequence
  ENSG00000234767_1 (sequence is synthesized)
accagatgaaatgctgcttgaagggctggcatatctagaattggtggtagaaatatctttgcttgaaagtttgctcaagaaacaccatgcatatttgacatcataaggaaagaaatgagc

SEQ ID NO: 966203 - DNA, 120 bp, Artificial Sequence
  ENSG00000234767_2 (sequence is synthesized)
agaaccatacatccaacttacattgcaattactgcagaggaagagagatggagaagttaaaatgaaacatttcaaggatgaatgggcactgaaaattggtaaagtggcagaaaagtccaa

SEQ ID NO: 966204 - DNA, 120 bp, Artificial Sequence
  ENSG00000234767_3 (sequence is synthesized)
aaagatattttgcagaaacatctgtttgctgttgctaaaaattttagcatttaaatgttctcatttgggctctgaagttagcacttccttgaagtagttcacacctttgctattgctcct

SEQ ID NO: 966205 - DNA, 120 bp, Artificial Sequence
  ENSG00000234767_4 (sequence is synthesized)
gttcagctacagatcattttatgcaaggctgattttaacaagaaaatggtgcattaatttacaatgtgttgagtgttttaaaagtggcaaaatctaggcttttgtaaaattttagaatct

SEQ ID NO: 966206 - DNA, 120 bp, Artificial Sequence
  ENSG00000234767_5 (sequence is synthesized)
ggaaaaaatagaaatacttatataaagctcttcaaaataccagaatggctttatgcacaaaaaattacatgctgattaagaaaattagaaaattcggtaataaaaaaagaagtacatcta

SEQ ID NO: 966207 - DNA, 120 bp, Artificial Sequence
  ENSG00000234767_6 (sequence is synthesized)
gtagaaataacaaataaagaaactggagcagaaaatcagtcacattaaatttaccaccattcaaaaagccaagacatcaaccatagtcttggattcatctttaactgttgggtaatacgg

SEQ ID NO: 966208 - DNA, 120 bp, Artificial Sequence
  ENSG00000234767_7 (sequence is synthesized)
aagcttttgttaagtgaaaattagtgatacaacatttccgaacctgtgtttgattgtataagtgcaagagactctcctagacattcctagaaataaattttctgtgtcataaaacatgag

SEQ ID NO: 966209 - DNA, 120 bp, Artificial Sequence
  ENSG00000234767_8 (sequence is synthesized)
aataatcaacttaaaaaataatgccaaactgtttcagtgatagataactaactctccaattggtaatatataagagattctacagatttccactacgtctaacacttggtattgtaaaat

SEQ ID NO: 966210 - DNA, 120 bp, Artificial Sequence
  ENSG00000234767_9 (sequence is synthesized)
cttaatgttgccaatgtaacaagaattagacagaaaattacagtggttttgatgttgatgtcactgattacaatgaagttattaataaatatctttttttgtgtggtgacctatgtaaaa

SEQ ID NO: 966211 - DNA, 120 bp, Artificial Sequence
  ENSG00000234767_10 (sequence is synthesized)
catctgagtcagtctatccttccaggaattgaattagttttcctcacactctcagaggaggcaatgcataacacaagttacatgtcaggagcattccccagagatgatgattttgattca

SEQ ID NO: 966212 - DNA, 120 bp, Artificial Sequence
  ENSG00000234767_11 (sequence is synthesized)
acatcctactgtttcaaaaatatagcaatataattttaatatgctattgggcatatattctggtggcagtttaccacttcgaaagggatcagattaaaatgtctttattagaggtcaaaa

SEQ ID NO: 966213 - DNA, 120 bp, Artificial Sequence
  ENSG00000234763_0 (sequence is synthesized)
aggtagaaagaacgctgtcgaagagtgcagctgcagcggagcacctcagcaagagaggactgagtgcaacacagtggatccttcctcaggggtatttatggaccttaaagccggagctga

SEQ ID NO: 966214 - DNA, 120 bp, Artificial Sequence
  ENSG00000234763_1 (sequence is synthesized)
aggggtggagaagggccttttcttctctcttctatgaagaccactcattgacgacatcatcgcaggtctggtttactatccgagctccaggagcctcctatttgccatatgatctgtgga

SEQ ID NO: 966215 - DNA, 120 bp, Artificial Sequence
  ENSG00000234763_2 (sequence is synthesized)
agggagagagcagcatgctggaggggatgatttggcaagtccgctgaagaacacaagcctcgactgctccccggcgtggaagaaggaaggcgataaatactgtaacggaggacgaggaag

SEQ ID NO: 966216 - DNA, 120 bp, Artificial Sequence
  ENSG00000234763_3 (sequence is synthesized)
gtaaatctcctcctctctctccttgaaatttcttgagtgaattctacattgttcattcattcatgtttatgtgccagcaagctttgggagcactgtaaaaataaaaaaggttagaccact

SEQ ID NO: 966217 - DNA, 120 bp, Artificial Sequence
  ENSG00000234763_4 (sequence is synthesized)
gttagacatctgggaaacatctatgttagagaaggactatatattaatttatctcatttatgggaggcaaatactatgattattgaaggtacatctctttctttatggatggagtacatc

SEQ ID NO: 966218 - DNA, 120 bp, Artificial Sequence
  ENSG00000234763_5 (sequence is synthesized)
ttatttttctaaaatttgtatttgaacctatttatttctaattgtcaaaaatgtgaagtgagaaacttaaaaactttttagtttctcttgtcccaccattttatgtacttccaggttgtc

SEQ ID NO: 966219 - DNA, 120 bp, Artificial Sequence
  ENSG00000234763_6 (sequence is synthesized)
tgtcccaccattttatgtacttccaggttgtcaaataatttggaattttagacttagataattctctaatgtatattatagatcttctatttcaataattagcttatattttaattaaat

SEQ ID NO: 966220 - DNA, 120 bp, Artificial Sequence
  ENSG00000234763_7 (sequence is synthesized)
gggaaaggcagagagcagagcatagtgaaggcagctaaattcaattggggcatgttgagattgagttctctgtggtcattcagacagaactgtccactaagaagaaatggaatctatggt

SEQ ID NO: 966221 - DNA, 120 bp, Artificial Sequence
  ENSG00000234763_8 (sequence is synthesized)
tctgcaggtcagaatggtctgtaccagagatgaagtcatcggtctacagatgaattgagtgaaagcaatcacccagagccaggcaaggtgtcagagctccaacatcaaaaggtggttgac

SEQ ID NO: 966222 - DNA, 120 bp, Artificial Sequence
  ENSG00000234763_9 (sequence is synthesized)
ctcttctatgaagaccactcattgacgacatcatcgcaggacagagtctcctgctgtcacccaagctggagtgcaatggtctgataaggctgatgaaggaccatttatgctgaaacccaa

SEQ ID NO: 966223 - DNA, 120 bp, Artificial Sequence
  ENSG00000262171_0 (sequence is synthesized)
gggcatggtggctcatgcctgtaacccagcactttgggaggctcaggcatgagccactgcgcccactggcctcgttgttttaaagacaactatgagttaattccttagaacagtaggatt

SEQ ID NO: 966224 - DNA, 120 bp, Artificial Sequence
  ENSG00000262171_1 (sequence is synthesized)
ctgaaattttaagcctagttagaaatctaccacgtgactgtatcaatgccatcttaaggagtcagggatgtgtatgcagaatggaaatctaacttactgattagccagagtcaccatgac

SEQ ID NO: 966225 - DNA, 120 bp, Artificial Sequence
  ENSG00000262171_2 (sequence is synthesized)
cttaggactgaattggcaccatcccttgtagtgatctgcaacttttattttcaaacagttcctactggctaaatgacaacttcagagaatgaacacatctcatccacagagtcaagaaca

SEQ ID NO: 966226 - DNA, 120 bp, Artificial Sequence
  ENSG00000262171_3 (sequence is synthesized)
gagcaagagctcagtaggtgtcacctagaaggattataatacattgctgtacactactgggaaatcaatgtagtttaacactgttctgcaccctgccaaaggcaccaagtaagtacatca

SEQ ID NO: 966227 - DNA, 120 bp, Artificial Sequence
  ENSG00000262172_0 (sequence is synthesized)
ggctttccccgaggggctctggagcagaaagagctgtctcaaggagacgcagagagatggtctcgggcgcgaccagcagggattcctcgtccacacagtttcctgacagcggttgaaagg

SEQ ID NO: 966228 - DNA, 120 bp, Artificial Sequence
  ENSG00000262172_1 (sequence is synthesized)
gccagacccaccccgggtgaaaggacgcattgtgtgcccgcagcatgaggggagcctgcagagaggcgtctttgtagggtccacgagggggaaagcgcttcccggcaggcggagcacaca

SEQ ID NO: 966229 - DNA, 120 bp, Artificial Sequence
  ENSG00000262172_2 (sequence is synthesized)
agccagccggtggccacggccgggacaggcttgtacgcaggacattgaggtccggcgaggatgggggggccaccaggcccccggccctttgcagagtgttgctcgttttctcccacccca

SEQ ID NO: 966230 - DNA, 120 bp, Artificial Sequence
  ENSG00000273226_0 (sequence is synthesized)
ctgggagctttttagtaatgtaaaaatgtgggtccccactcctctatcaatcactatctgcgccttaaccagacccctaggtgattcacatgtacatttaacatttagaactctgctttg

SEQ ID NO: 966231 - DNA, 120 bp, Artificial Sequence
  ENSG00000273226_1 (sequence is synthesized)
taaagctattattacagtaatgccaacaaagagcttgcattacttcaaccttaaagcctaatgtgccaccttctaaagatcctgatattgtcacaataggctagtcagcatagaactgtt

SEQ ID NO: 966232 - DNA, 120 bp, Artificial Sequence
  ENSG00000273226_2 (sequence is synthesized)
gtgtgtgaacagcctaacaattcactggagttgaaaagctttgttaaaacaaatttgaaatggcttaaaaaccatttagtggatggtatccactaaaactaggtatccactaaaactatg

SEQ ID NO: 966233 - DNA, 120 bp, Artificial Sequence
  ENSG00000273226_3 (sequence is synthesized)
ccttaaaagttaccttttaaaaaagacatgttcatcttcacaaggtcaattttcatgtattaaattgtgtatagtgctttaaagagctatattcctcaaaaataaactatataaaaaaga

SEQ ID NO: 966234 - DNA, 120 bp, Artificial Sequence
  ENSG00000234492_0 (sequence is synthesized)
acactagctgtctgtgtcaaggccacgcagaaatctattggaaatcgctgtggaaacaaacgcaaatgaaaagccgcaaagagcaaagttgcaggcaacagaagccaactctgggtaaca

SEQ ID NO: 966235 - DNA, 120 bp, Artificial Sequence
  ENSG00000234492_1 (sequence is synthesized)
agcaaaaagggaaggagaaggatgcaagggctgctcagagaatagataatataataaatattaatgacaataatatgagactgaagacaccacatggctgctcactggcccgtctcctct

SEQ ID NO: 966236 - DNA, 120 bp, Artificial Sequence
  ENSG00000234492_2 (sequence is synthesized)
catgactgctgctctgggaaccacctctctgctctccatcgctaccactctagcctgtggcctgctcctggttgaagaagccatcaatgaaaatgaataccactctggaaatcttgggtg

SEQ ID NO: 966237 - DNA, 120 bp, Artificial Sequence
  ENSG00000234492_3 (sequence is synthesized)
gtctgacctgatattttcgcatagtggccacagatattttaggcccccaagaggtagtcttactctttcaattttactggctccactgtttgaggaacttggaacaatttccccagggac

SEQ ID NO: 966238 - DNA, 120 bp, Artificial Sequence
  ENSG00000234492_4 (sequence is synthesized)
agtcactcagaatgagagtcctgctttccctcagcactcttgccctttgagggtggggccaaatgttttcttcctttcttactgaggacttttgatcctggtttttgatatttgtcattc

SEQ ID NO: 966239 - DNA, 120 bp, Artificial Sequence
  ENSG00000234492_5 (sequence is synthesized)
ccagggggaattttgtaccctgtgtcttggtaaagtgtaagaccactgtggattttggggttaagtctcatttccctatccctcccttcaagagaagaaagaaagagagaatacccaaac

SEQ ID NO: 966240 - DNA, 120 bp, Artificial Sequence
  ENSG00000234492_6 (sequence is synthesized)
cctgcatcgtctctcactcgcctgtccagagcctatggaacagccattggggcagctgtcacaagctgttcacacagcttttctgatatactgacagtctcatgaggaagtgcatataac

SEQ ID NO: 966241 - DNA, 120 bp, Artificial Sequence
  ENSG00000234492_7 (sequence is synthesized)
tccctgcaatggtttgaatgtgtcctccgaagtttatgtgctggaaacttaatactcaatacaacagtgttgacaggtgggacctttaagaggtgattagatcacaagggctccgtcctt

SEQ ID NO: 966242 - DNA, 120 bp, Artificial Sequence
  ENSG00000234492_8 (sequence is synthesized)
atgaatggattaaggttattgagagagtgggacgcttatgcaagcaagtttagcctccttcctgtgtgctctctctctctttctctctaaaaaagaatgggagttattagatgctttttt

SEQ ID NO: 966243 - DNA, 120 bp, Artificial Sequence
  ENSG00000234492_9 (sequence is synthesized)
gggatattggccctggcaacaggatgaacatggaccactggagcctggaattctgccactgagagattccccgggagcatggctttcttttctttcctgggttccgtggattctctcctt

SEQ ID NO: 966244 - DNA, 120 bp, Artificial Sequence
  ENSG00000234492_10 (sequence is synthesized)
ctcctgaggaattagcctccttactgtcagaccagccacagaacttcctcccacttatcccttagatgtcaactacccacacttcaaatcaccctggagactgatgtgactgggatgatt

SEQ ID NO: 966245 - DNA, 120 bp, Artificial Sequence
  ENSG00000234492_11 (sequence is synthesized)
tgactgcatgtaggtcagagctgcctccaggcaacttgtggggccaaggctctgtggctagaaggaagtgagcattaatacatcacttagaacagcaaaaatcatcatctgaagatcatc

SEQ ID NO: 966246 - DNA, 120 bp, Artificial Sequence
  ENSG00000234492_12 (sequence is synthesized)
agaacagcaaaaatcatcatctgaagatcatcatctgaaaagatcagcatcagaagagctgtgaatatcaccgatctgataattgggtatttttggtaaaacacacacacacacacacac

SEQ ID NO: 966247 - DNA, 120 bp, Artificial Sequence
  ENSG00000234492_13 (sequence is synthesized)
acacagccctgcttttatgagaattgagcttaaatagatgtgggtggaggttttactgaactggatatttcttaacttttggagtacaacacctagtctcctaattcctgtcctgcatag

SEQ ID NO: 966248 - DNA, 120 bp, Artificial Sequence
  ENSG00000234492_14 (sequence is synthesized)
cgtgcttacacagtattttaaaattagagataattaaatttgattttgtttcaataattattttgacagttttaaaatatcttttggaattgtttgtaccattccagtccttttcaaatc

SEQ ID NO: 966249 - DNA, 120 bp, Artificial Sequence
  ENSG00000234492_15 (sequence is synthesized)
caagactgaaatgaatttttctagctatttatcccatctttgagttaagaacataggtccttgcgtttcagtttaataggtgattctttaaaatttgtttatttatttagaagcagggtc

SEQ ID NO: 966250 - DNA, 120 bp, Artificial Sequence
  ENSG00000234492_16 (sequence is synthesized)
atttttgaaaccatatggaacatttcaagttaataaaaatttttaattaaaaaatatgtgcacaattcacagatgatcagtcttttggaattattatagaatatttttgacaataaaact

SEQ ID NO: 966251 - DNA, 120 bp, Artificial Sequence
  ENSG00000234492_17 (sequence is synthesized)
atgctgaactcaatcttttcttaatgattatgaagatattttctgattgcaaaactatgaaaattaatggtcattgtgatattgttgtgagtctaggtcaatgtggagttctggagacag

SEQ ID NO: 966252 - DNA, 120 bp, Artificial Sequence
  ENSG00000234492_18 (sequence is synthesized)
aataatacctaaagtagatctgttttttactttgggaactgattataacacctggaaattatgtgttatattatttaattaaatgagacaatgtatataaataaaccaagcattggggct

SEQ ID NO: 966253 - DNA, 120 bp, Artificial Sequence
  ENSG00000234492_19 (sequence is synthesized)
tggcacatagtatttttcagtcaatgagagaagagtttgaatatgaaattttttatgcactggggagtaacttcctagatctatttctctatgtacttcctctctgtcaatctcactcat

SEQ ID NO: 966254 - DNA, 120 bp, Artificial Sequence
  ENSG00000234492_20 (sequence is synthesized)
tcaacaatacttactaagcatatactattaatattatattgcattgattctaaatcagacacatagtcacattttattaactctaaaactgtgatcagttttaacattgctggtggctta

SEQ ID NO: 966255 - DNA, 120 bp, Artificial Sequence
  ENSG00000234492_21 (sequence is synthesized)
caaatactgtcagctagaagcaatcatgatgtactagttggctattctttttggtggcacaattggataactgagccccttcgtgtttctgtcaactgacgtttatgtttgaggaaggca

SEQ ID NO: 966256 - DNA, 120 bp, Artificial Sequence
  ENSG00000234492_22 (sequence is synthesized)
catgaatcagggccattgtttgaaatctaacctttggcaaaaatcggtaaggaactagccctcaaacttgcctaatggtaggtgtcagcggcttggatgaaaattcccagggataataga

SEQ ID NO: 966257 - DNA, 120 bp, Artificial Sequence
  ENSG00000234492_23 (sequence is synthesized)
ggagtactcttttaagaaatagtgtagcaccaacactctagatggtacagaagatggatactgtgggaaagtcagggacactgatcactctatttgaaaggtaattcagcaaatttagac

SEQ ID NO: 966258 - DNA, 120 bp, Artificial Sequence
  ENSG00000234492_24 (sequence is synthesized)
tcacacatataaagaagtttagaaaattgaaccaattacttttgtttatatttttctttttatgtatgtgtaagagataagataaatatctgtgactaaatatgtctcttataccaaata

SEQ ID NO: 966259 - DNA, 120 bp, Artificial Sequence
  ENSG00000234492_25 (sequence is synthesized)
gaaaaatatatccaagaagaaattataatgtcattgttttattaagcattatgtcatgctttttggaggcatttccacccttttttatctttcttaatggtatataaaattgcagtgcat

SEQ ID NO: 966260 - DNA, 120 bp, Artificial Sequence
  ENSG00000234492_26 (sequence is synthesized)
ttcaccatcagtggttcattggattcggtgaagtctaagtaactgctggaccttgcgttaggctttttagatacaattaattaagcaaatatttatttatttatttatttaaattgagat

SEQ ID NO: 966261 - DNA, 72 bp, Artificial Sequence
  ENSG00000234492_27 (sequence is synthesized)
ttaagcaaatatttatttatttatttatttaaattgagatggattcttgctctgtcgcctacggtgaaaagc

SEQ ID NO: 966262 - DNA, 73 bp, Artificial Sequence
  ENSG00000234492_28 (sequence is synthesized)
ccaggtagctgggattacaggcacctaccatgttggccagtctggacttgaactcttgacctcaggtgatcca

SEQ ID NO: 966263 - DNA, 120 bp, Artificial Sequence
  ENSG00000234492_29 (sequence is synthesized)
ttacaggcgtgagccaccacacccggcagcaaatatttattgaatgcctactgtgtgccccaagctgttctaggtgctataaatgggccagacaagctgtcagggaggttgccctggctg

SEQ ID NO: 966264 - DNA, 120 bp, Artificial Sequence
  ENSG00000234492_30 (sequence is synthesized)
cctggctgggaagacagacatcagacaacataattccagagctggataaatactagggagaaaaacaaatgtgtgatgtattataatggatattgcaataaacactgggatttaagacac

SEQ ID NO: 966265 - DNA, 120 bp, Artificial Sequence
  ENSG00000234492_31 (sequence is synthesized)
agagatgcagggaaccaccacgttgtacggcaaccaacgtgccgcccctctgtgggcggggattcacactagctgtctgtgtcaaggccacgcagaaatctattggaaatcgctgtggaa

SEQ ID NO: 966266 - DNA, 120 bp, Artificial Sequence
  ENSG00000234492_32 (sequence is synthesized)
acaaacgcaaatgaaaagccgcaaagagcaaagacgaaggaaactaagagaattaccagttgacctacctttaaagaatgactaaggatattcttcaaaggaaatgatagcagcaggcat

SEQ ID NO: 966267 - DNA, 120 bp, Artificial Sequence
  ENSG00000234492_33 (sequence is synthesized)
tggttatgcatgctgatggagactgcttttgaagcttctttattgaaggagcgggagaagagtaagaaagttggagcagactaagaagacaggaaagaaagaaaagcaaaagtaagatag

SEQ ID NO: 966268 - DNA, 120 bp, Artificial Sequence
  ENSG00000234492_34 (sequence is synthesized)
aggctctgaactagttactggacctctacccgtgaacaaggcagaccctgccttcttggaacttgtgctctggcagaacggacaagcatgaaacaagtaattgcaacatgatttactgtg

SEQ ID NO: 966269 - DNA, 120 bp, Artificial Sequence
  ENSG00000234494_0 (sequence is synthesized)
agagacaaggaaatgctgtcaccgcggttaacacgcacgtggagggaagacctgggttttagtcctgtctccatcaacctcaagaaatgggacctcatggaagggaggggaggcaatgcc

SEQ ID NO: 966270 - DNA, 120 bp, Artificial Sequence
  ENSG00000234494_1 (sequence is synthesized)
gaggatgtgctcctgagcaggtgccacaattcttcacctgtaaggctgatctaagaagattcctaattatcaattgagagcagagatattccacttccaattacatggcctgcctgctca

SEQ ID NO: 966271 - DNA, 120 bp, Artificial Sequence
  ENSG00000234494_2 (sequence is synthesized)
ctcttacttcctattcacactctcttggagaccactttgtgattctaccaaattctataggagaggtgacaaccccaaagagaaggctctagaaagatgacatttggaaatgtgtacgct

SEQ ID NO: 966272 - DNA, 120 bp, Artificial Sequence
  ENSG00000234494_3 (sequence is synthesized)
accacaaagggacaaactggtatctcagagcactcagcaacaaaaacaagaaagctaagcctctgcactgcaatgtggcagggcttctggctaagtatagcaagcaattctgatgtggag

SEQ ID NO: 966273 - DNA, 120 bp, Artificial Sequence
  ENSG00000234494_4 (sequence is synthesized)
acaaacagcagcaatgggaatgatatgccaatgaaggattccaacagttgggtctgcaagtgtgcttgtcctgtgacacaaacggcctagacatctcagcactgcttggagctgctcatt

SEQ ID NO: 966274 - DNA, 120 bp, Artificial Sequence
  ENSG00000234494_5 (sequence is synthesized)
gggggagcctaagaaacatcagccctttcacaacctcttgctcctgagcagagctcatctcccaagagcacatcagcccgcagcccagtctgatgagaagcacagtattcccctgtgcca

SEQ ID NO: 966275 - DNA, 120 bp, Artificial Sequence
  ENSG00000234494_6 (sequence is synthesized)
gtggcagcctcagagcatcctgaaagagcgcttcctagacacgcagtggaagccatgacttcccctaagctgccggtgctgcctctgaactcatgtggaggttcttttttcagtgtcccc

SEQ ID NO: 966276 - DNA, 120 bp, Artificial Sequence
  ENSG00000234494_7 (sequence is synthesized)
acctgtaaggcctctccagaggcccaaactttaatagaatctgagagaaaaaagtggccagtctatctgctgtccagagtgatgccaaactctttctcccggagccagttctccccgttg

SEQ ID NO: 966277 - DNA, 120 bp, Artificial Sequence
  ENSG00000234494_8 (sequence is synthesized)
ggcagtcaggaaacaataagtgaacaagaagtaacctcagaagaagaaagaactttgggagaatgcactgagaaaggccagactgagtccccttggatgaagttaattaagaaacaaaca

SEQ ID NO: 966278 - DNA, 120 bp, Artificial Sequence
  ENSG00000234494_9 (sequence is synthesized)
agagaatgctgctagccaaaaaaagatctgctgataattgaggaagagcatctttaaaaagacactcaactacatttcagaaacataaagatctaagtgttggctctacaagggaagaaa

SEQ ID NO: 966279 - DNA, 120 bp, Artificial Sequence
  ENSG00000234494_10 (sequence is synthesized)
taaagagaaagaactttttttcctcctacaacaggtctagacaacgtcatacaaggagttgcacgcatatccaaaacaaaagcaaggcaaaaacaagcaaaaaagcaacaaatgcattcc

SEQ ID NO: 966280 - DNA, 120 bp, Artificial Sequence
  ENSG00000234494_11 (sequence is synthesized)
aaaatgatgtccatttatcagcccagaaatgtactggatactggtttagttcagcctgtaggtgctgggaagaaattccgacaaatccaagtcagttgcaaaaagggaaaactccagaca

SEQ ID NO: 966281 - DNA, 120 bp, Artificial Sequence
  ENSG00000234494_12 (sequence is synthesized)
gcatatgagcttccctgaacagattttactccaggtttgcagcccgcaagatttaagatggggccatgaggttaaatcttgtaaactcagaagtgttcacgctactgcatccctaaactc

SEQ ID NO: 966282 - DNA, 120 bp, Artificial Sequence
  ENSG00000234494_13 (sequence is synthesized)
tgtaactctctacatactctttaaagcagtgtttctctgcatctttcattccatagccattgtccacctgatccaaaatatcctaagtttttcagtgtttggaagcagggtttccaattt

SEQ ID NO: 966283 - DNA, 120 bp, Artificial Sequence
  ENSG00000234494_14 (sequence is synthesized)
ttgtgtatacagaaaaggggggtgtgtgtgaaaaaataagtattagaaaaaaaacatgttatacatatctatcacagaaatgagtgggcaaggtttagaagatggctgaaaccaagccaa

SEQ ID NO: 966284 - DNA, 120 bp, Artificial Sequence
  ENSG00000234494_15 (sequence is synthesized)
tactaaggtctactggttggctgcaacaagtttaaaatgtcttcataagggccctggttgggcaatactatacttgctgacagtacttgggatctgccacagacctatagcaaaggactg

SEQ ID NO: 966285 - DNA, 120 bp, Artificial Sequence
  ENSG00000234494_16 (sequence is synthesized)
ttcaacttctccaaaaagctggtattaaccaccagaagaaataagaagttcaaggccaaaatatccaaatgaaccaaccactctacttgctgaaatgccataaagcttctttaccccaga

SEQ ID NO: 966286 - DNA, 120 bp, Artificial Sequence
  ENSG00000234494_17 (sequence is synthesized)
agcagaaaaatccgttttccattttggaatctatcaagtaggacaaatctgccacctgggagcatctcctcaagggcaatctctgctccctttcctacatggcctgacaataccctcgag

SEQ ID NO: 966287 - DNA, 62 bp, Artificial Sequence
  ENSG00000234494_18 (sequence is synthesized)
tgagaccagcctgacatagagagactatgcctctattattttaaaaaaagaaatgtcacata

SEQ ID NO: 966288 - DNA, 120 bp, Artificial Sequence
  ENSG00000234494_19 (sequence is synthesized)
gactatgcctctattattttaaaaaaagaaatgtcacatatttttaccctcttcactcatctttccaccttgctccaatagattgctgacagaaaagtgagacctcctccaccccaaggt

SEQ ID NO: 966289 - DNA, 120 bp, Artificial Sequence
  ENSG00000234497_0 (sequence is synthesized)
tgtttcccggacttctcagataaaccctctgcaatctcttgggttcctttctccgttccttctttaagaacattctcaaagctttcgtctattggcatcggcttggtctccacatctgct

SEQ ID NO: 966290 - DNA, 120 bp, Artificial Sequence
  ENSG00000234497_1 (sequence is synthesized)
tttgttatttcttggtcttcaatttcaatttctaaggattcctcaattggaagtgacacctccccatcctgacttgatgatttcttcatggagcagtggaaagaacgtagtccagaaatt

SEQ ID NO: 966291 - DNA, 120 bp, Artificial Sequence
  ENSG00000234497_2 (sequence is synthesized)
gaagatcggtgtcatcaataatttgggcttgggactatccagtttcacaggggcattcagttgattgaaaatccaatatcaatattgtttatagtatcaaaacaatctaccgatcaaagt

SEQ ID NO: 966292 - DNA, 120 bp, Artificial Sequence
  ENSG00000234497_3 (sequence is synthesized)
ctctaaaattactacaaaaacctatttgatatcctatggcattgcccaatttaaattatttataaaatatgcagtaaatgtgtatgccagaaaatcaatgtcctaggcattgactcctaa

SEQ ID NO: 966293 - DNA, 120 bp, Artificial Sequence
  ENSG00000234497_4 (sequence is synthesized)
aacattctcaaagctttcgtctattggcatcggcttggtctccacatctgcttttgttatttcttggtcttcaatttcaatttctaaggattcctcaattggaagttccatttggcagct

SEQ ID NO: 966294 - DNA, 120 bp, Artificial Sequence
  ENSG00000234497_5 (sequence is synthesized)
ctctccatgcctccagccctgccggctctccatgacaggtcttagcattttaaatatagtctcagagacatatcagagtttccacaaagatttgagagatgctacacagcagtaaaaaac

SEQ ID NO: 966295 - DNA, 120 bp, Artificial Sequence
  ENSG00000234497_6 (sequence is synthesized)
aaactcaaaaagcctttcagcaacagagcccctgaagtctaattccatttgcttttatctcctgataccttgacaaacaccagatgaccactatttttcaaataaatcacatactctagc

SEQ ID NO: 966296 - DNA, 120 bp, Artificial Sequence
  ENSG00000234497_7 (sequence is synthesized)
acagtggcagtggtagcccaatgccaagggttctgttattatctgtccagcttattggaggtcacataaaatatcaaaagtgacacctccccatcctgacttgatgatttcttcatggag

SEQ ID NO: 966297 - DNA, 120 bp, Artificial Sequence
  ENSG00000234497_8 (sequence is synthesized)
gaagagaaataagaaaggctgagagggttgaaagactttaaggggggctagtaagaaaattgtaggcctctagaattgtacacaggccagcctttccttctcatctacttcactttccta

SEQ ID NO: 966298 - DNA, 120 bp, Artificial Sequence
  ENSG00000234497_9 (sequence is synthesized)
aaaatcaattttaagctagacaaaaaatgtgcagagaccaactttaagtggatccaaggcagtaatttgagctgattccatcaaattatagatgcatgagaagcatgcattttctaaaga

SEQ ID NO: 966299 - DNA, 120 bp, Artificial Sequence
  ENSG00000234497_10 (sequence is synthesized)
ataacaacgctgcaacaaacatttttgaaggaactactaaaatatttccatctctaaactcatcctcttccacttcagatgatttcttttccatttcattctattctctgaagcaaaaac

SEQ ID NO: 966300 - DNA, 120 bp, Artificial Sequence
  ENSG00000234497_11 (sequence is synthesized)
cagaggaaagaaatctgatggaatgaaattctgctagcaaccatctgaaagtataaatgagggagaaagtccaagatttaaaaattcaagcaaattttcttgcctgttggaaggaagagc

SEQ ID NO: 966301 - DNA, 120 bp, Artificial Sequence
  ENSG00000234497_12 (sequence is synthesized)
tctcaaataaagagataatcaagagacatattacagggcatcaagagccatgaaagtaaatcagcaaactggataatttcttgcagattagaaacatctccctgaatcacagttgaagca

SEQ ID NO: 966302 - DNA, 120 bp, Artificial Sequence
  ENSG00000234497_13 (sequence is synthesized)
aaggggatgatgccaggtctgactcctacttggaaaatcataatcccatgtttcctcttgcctgggcaactgtggagctgtgacatgcctgtgtgcagcccactgcacaatcagcagacc

SEQ ID NO: 966303 - DNA, 120 bp, Artificial Sequence
  ENSG00000234497_14 (sequence is synthesized)
tcaggcaaatccagctccaagctgcacctagcacctttaatgaagtgactgattaaataaaagcatcccccttttgttaagcaatactttctgaagcagcatggatttagaggcagccct

SEQ ID NO: 966304 - DNA, 120 bp, Artificial Sequence
  ENSG00000234497_15 (sequence is synthesized)
gtgagtttgtaggcgataagcactatataaatactaggtaatagtgggattagagtcagggaaagacctgtgtcctgtgtatgaaatgagaaactggaaggagaaacttttaaagagaaa

SEQ ID NO: 966305 - DNA, 120 bp, Artificial Sequence
  ENSG00000234497_16 (sequence is synthesized)
aatacaggaaaaggcagccctttatccttttcatttcctcttattcatatttctttctgctaaagcttatttctgatggtaaaatctcttttctcttgggtctcattatttcattctctt

SEQ ID NO: 966306 - DNA, 120 bp, Artificial Sequence
  ENSG00000234497_17 (sequence is synthesized)
tttaaaaaatattccctaattattgcaaccaagtaaattttttctaacaaacagaaggcccaagtgacagctcgtgattaaatatacacactaggaaacaaacagtagtttctttcaatt

SEQ ID NO: 966307 - DNA, 120 bp, Artificial Sequence
  ENSG00000234497_18 (sequence is synthesized)
gactgaactgcctctatacttaccatcttgcaaagatataatgaccagagacaaatgaaactttaataaggtttctcggccctttctgctatcctcaagtaagtatcaaaaccttccatg

SEQ ID NO: 966308 - DNA, 120 bp, Artificial Sequence
  ENSG00000234497_19 (sequence is synthesized)
aaaattcagttccatttgaagaacaggaacaaggcctcatgcccctgcataactaaagctcttctttctgatttccttcaccagttgcttatgactttccttctcatttcttttcagatt

SEQ ID NO: 966309 - DNA, 120 bp, Artificial Sequence
  ENSG00000234497_20 (sequence is synthesized)
tctcaggcaagtacaactgagctgataaagaaacagcaagcccattgagtggttaacccatcagtcattatatatttgcaacatttagcattgaattgatatactaagttttcactgaaa

SEQ ID NO: 966310 - DNA, 120 bp, Artificial Sequence
  ENSG00000234497_21 (sequence is synthesized)
tctcttttatccatgcccacacaaacagtatagtgtcaaagggcctgttcttgttgatagtgttgggtaataactcctctccatcttcttcacgaagccctggtgaattctggacatcaa

SEQ ID NO: 966311 - DNA, 120 bp, Artificial Sequence
  ENSG00000234497_22 (sequence is synthesized)
gtagggtgaccatgaaatttatcatccaaacttggacacatagtgaaagaagtgttactaaaaattaggaaatgggggggaaaggggcagaattttgaactattccaggaaaactgagaa

SEQ ID NO: 966312 - DNA, 120 bp, Artificial Sequence
  ENSG00000234497_23 (sequence is synthesized)
agagtgatctattgttattaaacagatcatgtgactctcctgcttaaagccctccagtgattcccattatccatgggataagttccaacattccccaggcaacataaaatgtgttatatt

SEQ ID NO: 966313 - DNA, 120 bp, Artificial Sequence
  ENSG00000234497_24 (sequence is synthesized)
ttctaatacctactatctcccagtgattgcaatttctcatgctacatttaaatgtctggcaacggaactgattgtagtggcccaaacactatcaactacttttaatctccaggcctctac

SEQ ID NO: 966314 - DNA, 120 bp, Artificial Sequence
  ENSG00000234497_25 (sequence is synthesized)
aactgtatgagtcacatgatattggaactattcccttgtattatctctctctcagtagataaggatgacgtcctagtgatcttcatgcccccagtaacttgccagtgctgatgcttagta

SEQ ID NO: 966315 - DNA, 120 bp, Artificial Sequence
  ENSG00000234497_26 (sequence is synthesized)
aggacctaattaacattgatccaactggacacagacatggaacaattaggcattccatattctgtcctttccatattctgataaagctacagtaggttggttctaccctatataggaagc

SEQ ID NO: 966316 - DNA, 120 bp, Artificial Sequence
  ENSG00000234497_27 (sequence is synthesized)
ttgctacatttatagaaactcaatagttaccagaacaggaaaactgattcacagtgtcttgttaaaccaaacaccaattttggttactattccttgataaagattgatacaaaaccagcc

SEQ ID NO: 966317 - DNA, 120 bp, Artificial Sequence
  ENSG00000234497_28 (sequence is synthesized)
tgaccataaaaagtggcaatccccatgttgatgctggtggccctagagagagaaagtctgacacaagccagaggaagagtgttcatatcccaaagacttaggaagcagctggttgtatga

SEQ ID NO: 966318 - DNA, 120 bp, Artificial Sequence
  ENSG00000234497_29 (sequence is synthesized)
aaacctcacagcactacattacacatgttcttccctttctcttctctttctctctggttttgcctcccagtttgcttttagtatagttactcttttcattttcttttgggccatttttct

SEQ ID NO: 966319 - DNA, 120 bp, Artificial Sequence
  ENSG00000234497_30 (sequence is synthesized)
tactactgtgtaaactttacctcatgcttattcctaatgtgcccagaaacacctcaatccttacagaggcatcagagctctagattttcaggatctctctcacctgttccttcccacaga

SEQ ID NO: 966320 - DNA, 120 bp, Artificial Sequence
  ENSG00000234497_31 (sequence is synthesized)
aatgataataagggttcctgctcacatttcctcccccactccctctgcttcctaacctactctggtgcttccttgtgtagctctgcatggtgtggtgtaagagttattaacattattgaa

SEQ ID NO: 966321 - DNA, 120 bp, Artificial Sequence
  ENSG00000234497_32 (sequence is synthesized)
ggctggagtgcagtggtgcaatcatagtggtgcaatcactacagccttaaactcctgggcccaagccaacctcctgcctcagcctccttgatagctgggattacaggtgttagagattgg

SEQ ID NO: 966322 - DNA, 89 bp, Artificial Sequence
  ENSG00000234497_33 (sequence is synthesized)
agttcttgcctcagcctttcaagtcactaggattacagatgtgagccactgcacctgatcttgtgatggttaattttacctattaattt

SEQ ID NO: 966323 - DNA, 120 bp, Artificial Sequence
  ENSG00000234497_34 (sequence is synthesized)
tgcacctgatcttgtgatggttaattttacctattaatttagccggactccaatgcccagattggtaaacattattctggatggatccctgaccaatgcatgtggtgtgtcccctcctct

SEQ ID NO: 966324 - DNA, 120 bp, Artificial Sequence
  ENSG00000234497_35 (sequence is synthesized)
tgggaactgtgagtaacaatctatctttttgatggcaattgtctcttaatctgtaagtttcaccatacctgaataatttttaaaaacccacattttaaaatagccatgcagaacaatata

SEQ ID NO: 966325 - DNA, 120 bp, Artificial Sequence
  ENSG00000234497_36 (sequence is synthesized)
cctactttcattaagaaagggccaactagtgaaggtttcaagcagtagaggagcatgttgagagtttttccataaagtttaatttagcaccattatgtagaatctaataaaaccgagatg

SEQ ID NO: 966326 - DNA, 120 bp, Artificial Sequence
  ENSG00000234497_37 (sequence is synthesized)
aattttgcttattcctttttcccctttctgcttttcaatctcagttccctggttctatctgctaacttcctactgatcattcaaagcccatttcaaatgccaccttctctaggaggcatt

SEQ ID NO: 966327 - DNA, 120 bp, Artificial Sequence
  ENSG00000234497_38 (sequence is synthesized)
ctctaatctcctcggtcaaaactaatatttctttcctctatgtttctattgtgctttatttatatcacaattatagtactcatcacaatatatcatggttaattgtatatatatatatct

SEQ ID NO: 966328 - DNA, 120 bp, Artificial Sequence
  ENSG00000234497_39 (sequence is synthesized)
gtctctcttgctagactgcagtctttctgagagaaacagtttagtcttacccatcttggtaacctcaggacctagcatatcatttgccattatcaacaaaaactggactgagctatattc

SEQ ID NO: 966329 - DNA, 120 bp, Artificial Sequence
  ENSG00000234497_40 (sequence is synthesized)
tcatttagaggcaggacaagtatatagatgattgcaatagttccattaaaagattagttatcaagcccctgaactagagatgtagcagtaaggatgaaaaaggattatcaggtacatgag

SEQ ID NO: 966330 - DNA, 120 bp, Artificial Sequence
  ENSG00000234497_41 (sequence is synthesized)
ccactgttcaggtggcatctagagctgtgccatccaggacagcagccacttctcccatttggatgctgggcatttgaaaggtagctcatttgctgtaagtataaaatattcattgaatat

SEQ ID NO: 966331 - DNA, 120 bp, Artificial Sequence
  ENSG00000249945_0 (sequence is synthesized)
ccccttcctaaaccaaggtatcaaagttaatcaagccccttcctcagagccgagataattttgagtgttagccgtctctcggttgccggctaataaaggactcttaattcgtctcaaact

SEQ ID NO: 966332 - DNA, 120 bp, Artificial Sequence
  ENSG00000249945_1 (sequence is synthesized)
gtagtgtttttctaacttgctcgggtacaacagttggaggccccagcgaaattttaacgccagcgggcaagagccggtctcactccgggctcccccggaaggacggctggcctgtaggga

SEQ ID NO: 966333 - DNA, 120 bp, Artificial Sequence
  ENSG00000249945_2 (sequence is synthesized)
agccgccacctgcaaagacgaaattttcaggttcccgaagggtgaccgtcttccggaggacagcggatcgactaccgtgtgggtgccctaaaattcaacatctgagtcctcagcttctga

SEQ ID NO: 966334 - DNA, 86 bp, Artificial Sequence
  ENSG00000249945_3 (sequence is synthesized)
gggtgccctaaaattcaacatctgagtcctcagcttctgactccggggtcagtgggggacctcccttgggagatccatcccctgtc

SEQ ID NO: 966335 - DNA, 90 bp, Artificial Sequence
  ENSG00000249945_4 (sequence is synthesized)
gaccacaggtcctcagaccaaccagcttcttcttggcttagcgactgaagactgacgctgcggatcgcctcggaagccccctagaccatc

SEQ ID NO: 966336 - DNA, 120 bp, Artificial Sequence
  ENSG00000249945_5 (sequence is synthesized)
gcctcacatgctgaacagaacgaatgcaagataacataacttcatagtatgtgagctcttctcagatagtttattaaaaagacatacatagatgctttccttaatatatttaacaacccc

SEQ ID NO: 966337 - DNA, 120 bp, Artificial Sequence
  ENSG00000249945_6 (sequence is synthesized)
aaggctagtctgtcaaataaaaaaaaaatgaaaaggactcacagtcatttgttttatttctgaagttaaacaaaaaataaaattctaaggtccaccaaccatctgaatgaactcctcctc

SEQ ID NO: 966338 - DNA, 120 bp, Artificial Sequence
  ENSG00000249945_7 (sequence is synthesized)
tcagctacgggcattcctgagttaacctgaaaatccagttcaggttatgatgacaaagggggttggacatgcctcactataccctccagcattaacattaacacagaccttaagtctgat

SEQ ID NO: 966339 - DNA, 120 bp, Artificial Sequence
  ENSG00000249945_8 (sequence is synthesized)
aagaaacgtttgcaatctattttctgtgaagcctgctggaggcttcatctgcataataaaaccttggtctctacaaccccttattttaacccagatattcctttctactgacaataactc

SEQ ID NO: 966340 - DNA, 120 bp, Artificial Sequence
  ENSG00000249945_9 (sequence is synthesized)
tttcaaacaaatgtcagtcaggaaacatttaaatctgtctatgacctggaagctccccactattgagttgtcctgcccttccagatggaaccaatgtaagtaaatcttccaggtattgat

SEQ ID NO: 966341 - DNA, 120 bp, Artificial Sequence
  ENSG00000249945_10 (sequence is synthesized)
tgatatctcatgtctccctaaaatgtataaaagcaggctgtaccctggccaccttgggcacatattgttgggacctcctgagggtgtcactggcgtgtccttaactttgtcaaaataaac

SEQ ID NO: 966342 - DNA, 120 bp, Artificial Sequence
  ENSG00000269911_0 (sequence is synthesized)
ggaagacggtggcgatcaaaagggcagacatgctgaagtatgtcatcaaaaggtacaggagcttcctccctgagattttcaagaaagcctctgacctccccgagttagtctttgggttct

SEQ ID NO: 966343 - DNA, 120 bp, Artificial Sequence
  ENSG00000269911_1 (sequence is synthesized)
atctgaaggaacttgatccagcagagcactcctatgtcttgatcagaaaaatcgatcctgccctggtttggggcctgacaggcgaccagggcacaccaaagacccggctcctgatgatta

SEQ ID NO: 966344 - DNA, 120 bp, Artificial Sequence
  ENSG00000269911_2 (sequence is synthesized)
ctctggactcgatcttcatgcaggccagctgtgtccccgaggaggtggtctgggaggtgttgagggtgttggaggcacatttcgtctaaaaagcatttcgtctttggggagtccatgaag

SEQ ID NO: 966345 - DNA, 120 bp, Artificial Sequence
  ENSG00000269911_3 (sequence is synthesized)
ctcatcaccaaagctagtgtgcagcaggagtatctggtgcacaaataggtgtcccacagcaatcccacgctctaggtattcttgtgggggctctcaaaggaaacaagacagatggaagtc

SEQ ID NO: 966346 - DNA, 120 bp, Artificial Sequence
  ENSG00000269911_4 (sequence is synthesized)
ccggagtttgtggccaaagtgaatgacacccaccccagttcctttccgtggcagtaaatgaggcattgagagaagaggaggagataccccgtgcccgagatggcagctgccgttggtgac

SEQ ID NO: 966347 - DNA, 120 bp, Artificial Sequence
  ENSG00000269911_5 (sequence is synthesized)
gtgacaagtgccagtgttagtgccagttccagttccagggcctatgccatggctgaagcaagcatcagcaccagcaccaatgcaagtgccagttgccagtgccagggctagagccatggc

SEQ ID NO: 966348 - DNA, 120 bp, Artificial Sequence
  ENSG00000269911_6 (sequence is synthesized)
gctagtgtcagggactcctcctgccagcagtgaaggctggggctgagtcttcactttgttttgctgtgggtagtcaaaagggccccacagcagtgggtgctggggtcctgacttttcaag

SEQ ID NO: 966349 - DNA, 120 bp, Artificial Sequence
  ENSG00000269911_7 (sequence is synthesized)
agtcgaggggtagagtggggttagggagaacctgccgcccatggtatctgtgttccagttctatttgtctttctcagtgatttagctttcaatttgcatactgcaaagttttgtttgcct

SEQ ID NO: 966350 - DNA, 120 bp, Artificial Sequence
  ENSG00000269911_8 (sequence is synthesized)
taattaactttcttttataatgatgatcattttacaggaaataaactggttaaaactacatgatgacagaattatatcagagttgaaacaaacgccatacctaagcatttttttcaaaat

SEQ ID NO: 966351 - DNA, 120 bp, Artificial Sequence
  ENSG00000269911_9 (sequence is synthesized)
cctttgttccatagacacttgattgagtacttaagttgaacatctaggtctatgaatgacgttggtcaaatgttttattgttctctgtttcggttttagcaggagagatttgctgtttca

SEQ ID NO: 966352 - DNA, 120 bp, Artificial Sequence
  ENSG00000269911_10 (sequence is synthesized)
taaaagaaattgggagagtatatcattttatgcctgtaacttattatagcattggaataagctgttctttggaggtttgagagactttaccagtacaatcattccccccctcccccaaat

SEQ ID NO: 966353 - DNA, 120 bp, Artificial Sequence
  ENSG00000269911_11 (sequence is synthesized)
ataaaaagataaaataaaaagccggtcagtgtctgttgcacaaaattacaaccgctctctgcttgtatttgcctagttctccagaatgtagggaaaaataaaaattcaatgaattagaca

SEQ ID NO: 966354 - DNA, 120 bp, Artificial Sequence
  ENSG00000269910_0 (sequence is synthesized)
gcaagaatggagtcaggagcctcagaaaaggagccacggccacaggcgagcagctcggggacaacgctggctccacagggcagctcctgggccaggcacccgctggcgactacacggagc

SEQ ID NO: 966355 - DNA, 120 bp, Artificial Sequence
  ENSG00000269910_1 (sequence is synthesized)
ttgtcttgtggaaacaaacgcgctttcacaaacacagcagtcctgcgacatgaggcgggatgaaactttgaaaggtattttaaagtctagccttgtaacaaaacctcaggacactctgtc

SEQ ID NO: 966356 - DNA, 120 bp, Artificial Sequence
  ENSG00000269910_2 (sequence is synthesized)
cctctgctgtgccaccacccaccctgttacatgacagtggcaagctgagctttcacgggatggctggtgtttcacagaccgcccctccatcccgtagcctagttggctggcatggaggtg

SEQ ID NO: 966357 - DNA, 120 bp, Artificial Sequence
  ENSG00000269910_3 (sequence is synthesized)
gcgctgctgagcgtcagcctttggaatcactgatcacctcggcgtctgttttgtatgctctttacctatggactagtttgtggacggctaagaaatacagcctcagcattgatttgaaaa

SEQ ID NO: 966358 - DNA, 120 bp, Artificial Sequence
  ENSG00000269915_0 (sequence is synthesized)
aaaataatactccatgcattgtgggtgggcttcccctccgcaggccccagcccaaggcagctgggcctagctgccctggtgctgtggggaggggggtgggatgggtaaggggagggggat

SEQ ID NO: 966359 - DNA, 120 bp, Artificial Sequence
  ENSG00000269915_1 (sequence is synthesized)
gaggtgggagtgtggggggaggggggtgcggtgggggttgggggagggcgggtgggagctgcaggatggcaggagaggtgaggctggagttggggtaggtcctgaagtccagagggagcc

SEQ ID NO: 966360 - DNA, 120 bp, Artificial Sequence
  ENSG00000269915_2 (sequence is synthesized)
ctgcacccacatgtggacttgccacccacacatgccacctctgtccaggccccagcaaagaggctggcccttggctctttcctgggcctgggagacctggcagggaagaggctgtgcggg

SEQ ID NO: 966361 - DNA, 120 bp, Artificial Sequence
  ENSG00000269915_3 (sequence is synthesized)
caggaaaccctggggtccccggggtgcagtgtttcctcacctcgagggcagggatgcggccaggtggccagcgcagaacccctggcagcagccaagcctaggggagggactggagggcag

SEQ ID NO: 966362 - DNA, 120 bp, Artificial Sequence
  ENSG00000269919_0 (sequence is synthesized)
aaattctcaattccttaggtttatgtgcttttacttcttttatttgattaaaattgctgtcatgacctctctctgcagagggctgcatcattttggtcattctcaagtgatctctttgag

SEQ ID NO: 966363 - DNA, 120 bp, Artificial Sequence
  ENSG00000269919_1 (sequence is synthesized)
ttattccttttggtttagaagttaagactaaatgctgaagtttttgtaacttttggttttgatatcatttcaaacttaagaaaacatttgaagaaaaggacaaagaatttccacttaccc

SEQ ID NO: 966364 - DNA, 120 bp, Artificial Sequence
  ENSG00000269919_2 (sequence is synthesized)
tttacccaggtttaccagttattgataagtatatccatttgctttaccagaaggctaacttgttttagttctcattttcacctttgagacatttggaataaatatcaatgttaacataaa

SEQ ID NO: 966365 - DNA, 120 bp, Artificial Sequence
  ENSG00000269918_0 (sequence is synthesized)
gagccaccgcgcccggccagcattgtatcttaaaggtagcctttcagttgtttggatgacagttgtctccactggacatctgcttcatgccaggccctctcctgggtgttggtgtgtcca

SEQ ID NO: 966366 - DNA, 120 bp, Artificial Sequence
  ENSG00000269918_1 (sequence is synthesized)
ctcttccctccaaccaccatattcccttgaggccaggaatggacctaagggtgcctcaggcatgggaagacccgataccggcctctctggagctcgctggcttctggagttctgagttaa

SEQ ID NO: 966367 - DNA, 120 bp, Artificial Sequence
  ENSG00000269918_2 (sequence is synthesized)
ggaggtagttgaagagacccatgtatgacccccagatgccagtaaaactaatcatgtgcagggaaggtggtcacgtcaataagattttgaaagcaagattcatcaaaaaataggccagat

SEQ ID NO: 966368 - DNA, 120 bp, Artificial Sequence
  ENSG00000269918_3 (sequence is synthesized)
ttgcagtcccacatgaacctgcattgaaccctcattgactatccaggtatgtattactttaaaaaaataaaaactaacataaccttaaaacatattagcaaatttccctgacacactgaa

SEQ ID NO: 966369 - DNA, 120 bp, Artificial Sequence
  ENSG00000269918_4 (sequence is synthesized)
agtaggatattattctaaaatttttcctttatgtatgtagctttttagaaaccctacaaatgtgttttgtgtaaaaggatgtagtctgcaatcattttctgactcttggtgtaataaaaa

SEQ ID NO: 966370 - DNA, 120 bp, Artificial Sequence
  ENSG00000269918_5 (sequence is synthesized)
ttaagtggcctaattatttaaaagcttgtcgtttgaaattattttttgagaaacagtttaaagcatgatactatttttgcttttcatgtaatgtataagtattcgcagaagctgcttgta

SEQ ID NO: 966371 - DNA, 120 bp, Artificial Sequence
  ENSG00000269918_6 (sequence is synthesized)
tatgtttgtgttccatgtatgaaaatgttgtaaacagggtccatgtatttccccagtgagagttgctgatcttttggctgtaattaccaagtgcttgaggttggggtggctggaaatgaa

SEQ ID NO: 966372 - DNA, 120 bp, Artificial Sequence
  ENSG00000269918_7 (sequence is synthesized)
ccacgtgaattaaaggaaaggaaatgaagaagaagatcgtatcaatacgatgatctaaatcagtgttctgcaacttttctacccagtcatcagtgggagtgaatcagtaggaatgtgggg

SEQ ID NO: 966373 - DNA, 120 bp, Artificial Sequence
  ENSG00000269918_8 (sequence is synthesized)
aagggagtgaggggagacccccttcttgactcagcagtggtgacggtcggtgtgtcctgcagacctgaagccaagatcaagggcgcttgagcaccaggagcccccgcagttcctgaatga

SEQ ID NO: 966374 - DNA, 120 bp, Artificial Sequence
  ENSG00000269918_9 (sequence is synthesized)
ccagcggagggcaggtgccagcctgtggcaaaataggaaagaaaaggacaggatggggacttcaccatttttttcagccttaaattgttccttaaaccttcatgtccttttctctaatgt

SEQ ID NO: 966375 - DNA, 120 bp, Artificial Sequence
  ENSG00000269918_10 (sequence is synthesized)
atgttcttgtttggtaaaataaaaaagtttgtaaccctgagttctctaaagatatacattcttttttactggtttgtgaagtcagaaggatgagagctgctatttcttggaaccgtgcaa

SEQ ID NO: 966376 - DNA, 120 bp, Artificial Sequence
  ENSG00000269918_11 (sequence is synthesized)
taaatattagcatattcagtctcagttctgcctagaggacctatttgcttttctttatctcgtaacccataactcacaggacattaaccagggtgtccaagaacagtctgggaaagtttt

SEQ ID NO: 966377 - DNA, 120 bp, Artificial Sequence
  ENSG00000269918_12 (sequence is synthesized)
gataattacttcagcattgctgtgtgatgggagacattgttttaaaaaccgaatgtggtagaggttaaaaggacagccgtcaccatcctgtttcaaccaacgcttgactgagaactcttt

SEQ ID NO: 966378 - DNA, 120 bp, Artificial Sequence
  ENSG00000269918_13 (sequence is synthesized)
ctggaaatctctcgaacagacttccaaaagttatatgtgaaaaagcactgaaacctcacataacgcaaagatccactgcaatacaggcatttaggaaatcatttacactaccttgctgat

SEQ ID NO: 966379 - DNA, 120 bp, Artificial Sequence
  ENSG00000269918_14 (sequence is synthesized)
cacttttcacacttgatcttagccaaaaggccaagaagcgatgtggataacttttcaacctgtaaaatagccaccaatctgcaaaaaaactaattgaacactaataaatgaccaaaattg

SEQ ID NO: 966380 - DNA, 120 bp, Artificial Sequence
  ENSG00000262031_0 (sequence is synthesized)
agacctaaatttaggcctcactgactcctaccttgggcatgtaagcaccagttggatcagatacaccagggaaactgaggcccagaaagggatgtgatctgcccgattgtgcagaattca

SEQ ID NO: 966381 - DNA, 120 bp, Artificial Sequence
  ENSG00000262031_1 (sequence is synthesized)
gagcccagctggaacctgaatgtcctgaccccccatccagtgccccccttcctactctatgctgcctctcgggtgacacacacagcagcaagtgagccctgcagacagagacattctaga

SEQ ID NO: 966382 - DNA, 120 bp, Artificial Sequence
  ENSG00000262031_2 (sequence is synthesized)
ccagtgctcaggagccatactctcagctagattgccttcagcctgccaggaggaggagcagcccagtccagactgaaagcctccaaggaggaagttctaccggcttctccatgcctccaa

SEQ ID NO: 966383 - DNA, 120 bp, Artificial Sequence
  ENSG00000262031_3 (sequence is synthesized)
agttctaccggcttctccatgcctccaaacccactgtaccttgtgcattccatctggaattttcttctgttgaaaggaaggtgctgggtgggaggaggagggagaggatcaggaaaaata

SEQ ID NO: 966384 - DNA, 120 bp, Artificial Sequence
  ENSG00000262039_0 (sequence is synthesized)
gctgggaaaaaagacacgtcaactcaatacccatcctatttttagacggcctgagattcgtccttatccatgcagggcagtcgggtaggacaatgaagaggtggacttctgaatttgaga

SEQ ID NO: 966385 - DNA, 120 bp, Artificial Sequence
  ENSG00000262039_1 (sequence is synthesized)
agtgaggccaccacccacctgcaatagcttggcttcctggatccctaagcaaagacagagtcttgctctgtcactcgggctggagtacagtgacacaatcacggttcactgcagcctgga

SEQ ID NO: 966386 - DNA, 120 bp, Artificial Sequence
  ENSG00000262038_0 (sequence is synthesized)
gctttaaagaagtttcttggccaggtgcagtggctcacatctctaatcccaatagctgggactacaggcacgcactaccacatctggctaactttttgtattttagtggagacagggttt

SEQ ID NO: 966387 - DNA, 61 bp, Artificial Sequence
  ENSG00000262038_1 (sequence is synthesized)
gatccgaaacatacatattttttaagtttctagaagcttggtcccatgacatctgtataat

SEQ ID NO: 966388 - DNA, 120 bp, Artificial Sequence
  ENSG00000262038_2 (sequence is synthesized)
agcttggtcccatgacatctgtataatctcattggccagaacttggtcacacaaccattcctgctgctgtggagccttatgaagttaaaaatcagggttttattatcaagaaaggaagag

SEQ ID NO: 966389 - DNA, 120 bp, Artificial Sequence
  ENSG00000262038_3 (sequence is synthesized)
agaccagatattggtggtcagttagcatcatgtgccaggaccaggtagtgtttaatcttagaaatgcaaggatgatttaaaatgggaacatccgttagtgtaactcattacattagcaaa

SEQ ID NO: 966390 - DNA, 120 bp, Artificial Sequence
  ENSG00000260763_0 (sequence is synthesized)
ttcttgtgcaaaatgtttcagctctggtgactggaagccatttcaattggctaccatgtcagtttgacatacttctgtaattgtgttttgtttttatctattttattttacatacttatt

SEQ ID NO: 966391 - DNA, 120 bp, Artificial Sequence
  ENSG00000260763_1 (sequence is synthesized)
tttagtacctcctatttcctggtgatgcaagagtcttccatatgcccatcttcttctctctttcaatacttgcttgctcagtccacaaattagccatttttctaaggagtctggtccttt

SEQ ID NO: 966392 - DNA, 120 bp, Artificial Sequence
  ENSG00000260763_2 (sequence is synthesized)
ttattagagaacgaaattagaatacaagatctgggatctgcacctacttgctggtactgaagtggtgttgtttctagtccctctgggctgtcaccatgaagatacatgcatgtacaccaa

SEQ ID NO: 966393 - DNA, 120 bp, Artificial Sequence
  ENSG00000260763_3 (sequence is synthesized)
cgcatacatgtacacacatctaaaacatcgctacatacaaccattcatatctgtagcaagctaagcatgagttcatacttgtgtccagctctagtcatttaccacatgggttattctccc

SEQ ID NO: 966394 - DNA, 120 bp, Artificial Sequence
  ENSG00000260763_4 (sequence is synthesized)
ctttcttgtctagaacctcctactctatctgtgagaaatctggcgcttaccctctaccatttattggttatttcttcaatttagtgtctacatagatagcattatcagaattgtgaaccc

SEQ ID NO: 966395 - DNA, 120 bp, Artificial Sequence
  ENSG00000260763_5 (sequence is synthesized)
attcccctgtcatcacctgaagtaaagcgctctgtacagtttatgttgcctttagtgtgagagactccacccattcccaaagttacatagactggtttcttttcatacactcttttcaat

SEQ ID NO: 966396 - DNA, 120 bp, Artificial Sequence
  ENSG00000260763_6 (sequence is synthesized)
gggtttgtttcatacatttgtaatacctttagattgttttgtcacattctgcattttatggtgcaattccatcagaaagtacataattcttttttaatttgcatgtactatgattcattt

SEQ ID NO: 966397 - DNA, 120 bp, Artificial Sequence
  ENSG00000260763_7 (sequence is synthesized)
ttttttgctataaagttctatggggtttggctaatggaaagtatataaatgattacagtgtcatacagaataaaaaaacaattcttcctttgctgcttctattccactcttctcctttct

SEQ ID NO: 966398 - DNA, 120 bp, Artificial Sequence
  ENSG00000260763_8 (sequence is synthesized)
ctgaactccttgaacccaatgattattttgctgttgttgttgtatgaatctctggtttggctttatccagatgttgtataattgaaatgttttagcctcatgtgaaattatgaaacaatt

SEQ ID NO: 966399 - DNA, 120 bp, Artificial Sequence
  ENSG00000260763_9 (sequence is synthesized)
gtggctgtagtattctgaatttccaccagcaacgaatgaatgagtgtactaactggctatacaaaccacagtggctgtactattttcatttctaccggcaatgagtgaatgagagttctt

SEQ ID NO: 966400 - DNA, 120 bp, Artificial Sequence
  ENSG00000260763_10 (sequence is synthesized)
ccttcacattctcatcagtaattggtgttttggtgttttcattcccctacccctgtctttcttaatttagctaccctaataaggtatataaccgtaatttattgctgttttaacatgcat

SEQ ID NO: 966401 - DNA, 120 bp, Artificial Sequence
  ENSG00000260763_11 (sequence is synthesized)
tccatgaattagactaaggatacactataagtatttttttcaaatgtttatttgcaatcagtatagatatatataactttttccctggggttcagagattttgcccaattttttgttttt

SEQ ID NO: 966402 - DNA, 120 bp, Artificial Sequence
  ENSG00000260763_12 (sequence is synthesized)
aattaggttgtttgtaacttatagttgagttctaagagacttgaaaaatatttttagatataaactctttacaaatatacactttgcatatattttcttccatattcacttagcattgtc

SEQ ID NO: 966403 - DNA, 120 bp, Artificial Sequence
  ENSG00000260763_13 (sequence is synthesized)
ttaagcagagaggaaagttttgagtttaagtcctcctcctcctcctccttcctcttcctcttcctcttcttcttctccttcttctccttcttctccttcttctccttcttcttcttttct

SEQ ID NO: 966404 - DNA, 120 bp, Artificial Sequence
  ENSG00000260763_14 (sequence is synthesized)
tccctggatagttctttgtatttggatctgaaaactcatcattggaggtgacgtggagcaagacggccaaatagaacaccccagtaatcaacacccccagcaaaaacttcaatttgaaca

SEQ ID NO: 966405 - DNA, 120 bp, Artificial Sequence
  ENSG00000260763_15 (sequence is synthesized)
actatccacacaagaagcaccttcataagaaccaaaaatcagtgacctgttgcacagagagagaatccgagcagttggaggaagggagagtgcagtgattgtggggatttgcattggaag

SEQ ID NO: 966406 - DNA, 120 bp, Artificial Sequence
  ENSG00000260763_16 (sequence is synthesized)
tcagtgctgcctgtcacagcagaaagaaacgcaaggcagaatccagccaagacctacagagggaccactaagatcagctcttgccagagaggaatcatctgttccaacagtcagaacctg

SEQ ID NO: 966407 - DNA, 120 bp, Artificial Sequence
  ENSG00000260763_17 (sequence is synthesized)
aattccagcaagccccaccaccatgggctaaagtgctctagggttctaaagaaacttgtaagtcagtctaagccacaaggactgcaattcctgggtaactcctgatgttgtggttgtctt

SEQ ID NO: 966408 - DNA, 120 bp, Artificial Sequence
  ENSG00000260763_18 (sequence is synthesized)
gttgacagtggacttggggggcacatgacctagtaagacaccagttggggtggctaagggagtgcttgtgttacccctcccacaaccctaggaagcacagcttgaagctctgcgagaaac

SEQ ID NO: 966409 - DNA, 120 bp, Artificial Sequence
  ENSG00000260763_19 (sequence is synthesized)
tccttctctccacttgaagagagaagaagaaagagtaaataggactttgtcttgcaacttttataccagttcattgacagtaggatagggcagcaggcagagtcatgaggccctcatttc

SEQ ID NO: 966410 - DNA, 120 bp, Artificial Sequence
  ENSG00000260763_20 (sequence is synthesized)
aggccctagctcctggatgatatttccagacacacctttggctggaagggaacctactaccctgaaaggaaggaactagacctggaaggattcatcacttgctgactaaagagtccttgg

SEQ ID NO: 966411 - DNA, 120 bp, Artificial Sequence
  ENSG00000260763_21 (sequence is synthesized)
gtcctgaatgatcagtagtgacagcgaagcagtacttaccgtgggtcttgggtgagactcagagatgtgctggctttgggtgagattcaacatatgccaacctgtggtggctgtggagaa

SEQ ID NO: 966412 - DNA, 82 bp, Artificial Sequence
  ENSG00000260763_22 (sequence is synthesized)
tgagattcaacatatgccaacctgtggtggctgtggagaaagactccttctgcttgaggaaaggagaggaaataacaaaggt

SEQ ID NO: 966413 - DNA, 120 bp, Artificial Sequence
  ENSG00000260763_23 (sequence is synthesized)
caaggtgggaggtgattaaattattggggtgggtcttttctgtgctggtcttgtgaaagtgaattggtctcatgagatctgatgattttaaaaatgggacttttgctgcacaagttctct

SEQ ID NO: 966414 - DNA, 79 bp, Artificial Sequence
  ENSG00000260763_24 (sequence is synthesized)
attttaaaaatgggacttttgctgcacaagttcctcctggccttccactgtaattttgaggcctccccagccatgtgga

SEQ ID NO: 966415 - DNA, 120 bp, Artificial Sequence
  ENSG00000260761_0 (sequence is synthesized)
tgaaagaattaaaagtaaaaataaaacttgttagccttacagtcagaacatgtgggtaaataaatatgaaaagagcgaatagttaagctggcttaagaaagagatttaattgatagaaaa

SEQ ID NO: 966416 - DNA, 120 bp, Artificial Sequence
  ENSG00000260761_1 (sequence is synthesized)
attaaacttttataggagagtctgggtaaatttaaccagtaagtaaaaacttaaagtccaatctcaacatatataaaggaatctgtataaactatatttgaaacctggatgtatgtgctc

SEQ ID NO: 966417 - DNA, 120 bp, Artificial Sequence
  ENSG00000260761_2 (sequence is synthesized)
ttcaaaaagttattagataagttttagatatcataaatattatcagaccagaaatggtgtatggaactcacagatatctaagaagacaagaggtgggatctcaaaaatcatgctctgatt

SEQ ID NO: 966418 - DNA, 120 bp, Artificial Sequence
  ENSG00000260761_3 (sequence is synthesized)
tccctaaaggatcagaagatctcagaatttatggagcagtatctcctcaaatcagaaagtaaaggatgcacacaaagaggaatctggaaaacctcccctttatcactggatggctatata

SEQ ID NO: 966419 - DNA, 120 bp, Artificial Sequence
  ENSG00000260761_4 (sequence is synthesized)
aacgttcttaccaaaaatctgagaagacattcagggagatcagcttcgtctacttcaagcattattaggtggtcttcaaagtcttaggtgcattgaagaaatattttttaacgtattatt

SEQ ID NO: 966420 - DNA, 120 bp, Artificial Sequence
  ENSG00000260761_5 (sequence is synthesized)
gaaatggtatttgaatggaatattttgtaaaaataaagcacaaaaaaagcagatagataggagaaatatagaagaagtccaaaattgatttggaagttgatcatatagggtcagatgtct

SEQ ID NO: 966421 - DNA, 120 bp, Artificial Sequence
  ENSG00000260761_6 (sequence is synthesized)
tctcctgctaaagttgtcacctttatctctcagtctcttttcttcacattgatcgtaaagcttttgcacatttcttcttttagaagctcgtcttcctgatttatgcatgaattcctcgtt

SEQ ID NO: 966422 - DNA, 120 bp, Artificial Sequence
  ENSG00000260761_7 (sequence is synthesized)
tttgtcatttattcacaaataaagattacctcgtgtagaagctgtttcctttccacttgctagaagttattttgccaatcacatatgattattttatcattttttaattaccatcagtgc

SEQ ID NO: 966423 - DNA, 120 bp, Artificial Sequence
  ENSG00000260761_8 (sequence is synthesized)
atgaaattatctttattattcacttgtttttattataatcttataatttcaaataaaatgtaaatctactgtcccttgctttacctccgtgtcttcagtgcctagaacaggactgtcata

SEQ ID NO: 966424 - DNA, 120 bp, Artificial Sequence
  ENSG00000260761_9 (sequence is synthesized)
cacagtgactcaatacacatttacttatgggtgattccctgcctgactgttacaggaagaaggaccaggaatatcagaatctgaagtgtcctctaaagtcataaagactagaaggcattg

SEQ ID NO: 966425 - DNA, 120 bp, Artificial Sequence
  ENSG00000260761_10 (sequence is synthesized)
aataatgtttcttaactatgcaaggacttcagaattagatctcacatagatatatacaactgtgtgtagattcgaaaaacagaattaaatgggtaaaacttttaggaaaatgtacatttt

SEQ ID NO: 966426 - DNA, 120 bp, Artificial Sequence
  ENSG00000174680_0 (sequence is synthesized)
agcttcagaaagccaggaaaatcagaatgctgagagtatattaataattcctaaacatatttttaaggttcttcaggcctgtctcagagctatggaggatgcagcaaaagggatgccttt

SEQ ID NO: 966427 - DNA, 120 bp, Artificial Sequence
  ENSG00000174680_1 (sequence is synthesized)
gatctgctgtctctggatgcacaaggagctcagagaaacaaccaggacacagaacaaaacaaagcatggagctctaatttaggggtttcagctaagcgagtcactcagcaccagcactgc

SEQ ID NO: 966428 - DNA, 120 bp, Artificial Sequence
  ENSG00000174680_2 (sequence is synthesized)
acaggaggtagttcttacagcttcctttatgagaaagatttgttcttctgtttataggtgagaaatctgagacctaagaaattaagtgattggcctgtgggagatttgaatccggttttt

SEQ ID NO: 966429 - DNA, 120 bp, Artificial Sequence
  ENSG00000174680_3 (sequence is synthesized)
ctgactccaaagccttacctgtttcttcctaacatgttgactgcctattctaagcatatacagtgttgcaaatgtctgacactgttctagagcctcatcctcttttcacctccaacatgc

SEQ ID NO: 966430 - DNA, 120 bp, Artificial Sequence
  ENSG00000174680_4 (sequence is synthesized)
tcttgtttgtggcctggtcgtcagagtatatgcgctgggctgggaaaccctcattggtggagacaaagtggcaagagagtaaaggtggcaatttccaaggggacctcattgcacatcaga

SEQ ID NO: 966431 - DNA, 120 bp, Artificial Sequence
  ENSG00000174680_5 (sequence is synthesized)
cacaaagtgtgactcaggcatgtgcctcaacatataagccaagagagtgccaggcctttaaataagaaacactggatgttttctgcaacttaaatacaagtaagcttggcgggtagggag

SEQ ID NO: 966432 - DNA, 120 bp, Artificial Sequence
  ENSG00000174680_6 (sequence is synthesized)
ggaaattgttgtactggaatctaacagtgttttcaaacgttcccatttcaccattaatggtggcacataatcaaattagcctttaagagcaatcatcactccatgggtggcaccgtggta

SEQ ID NO: 966433 - DNA, 120 bp, Artificial Sequence
  ENSG00000174680_7 (sequence is synthesized)
tgcgaagatgcctcggagattttaattctctgtaacagctttctacaataaaacagtaccgaatttgaaagtcattgagagtaattctagtaggtcttgtttatacacgatcttgcagag

SEQ ID NO: 966434 - DNA, 120 bp, Artificial Sequence
  ENSG00000174680_8 (sequence is synthesized)
gtgtctcaagagctagtggcttagattgagtcactttatacagttaaagctgtagatataagcacagacagaaaactgtacctctgtagatctgtagatgtctgtcagtgattcacagct
